United States Patent Application Publication US 2026/0103690 A1 - sequence listing, part 21

SEQ ID NO: 90455 - protein, 433 aa, unidentified
MPTTHPYDLVIGLDRSDRKADLHLIDTRTGTVQKQTVATSPEALHDWLVQLRRDHPQARVAICLEQPAANLIVFLETYSWITLYPINPISLQKFREAFVTSRAKDDGKDAQYLAELLLSHPDKLKPWQPDDSHTRQLQQLVLHRRAVVDQRTGLTNRLKALLKQYFPQALDLCGEDLWRPLATAFLLKWPTLQSLKKARKESLKQFYYLQGSRSQTLIEQRLERIDKAVPLTDELALLQSYTLRVQLVCKELQLLLKTLQQFDQQIAKVFQQHTDRPIFEAFPGAGPVLAPRLLASMGSERERFAQPENLQSFSGVAPVTKQSGGKSYIHRRYLCPKFLKQSFHEYAKESILHSRWAAAYYGQQRNKGCGHHTAVRALAYKWQRIIWKCWQTRTIYKEAIYEAALKKNKSPLIGLLDQIELGKSPVKSRAKKS

SEQ ID NO: 90456 - protein, 464 aa, unidentified
MRTDKKLWRNRKARKELARRLQSENPGLEVVHPHAAGIDVGNSGHYVAVRPDRDSQPVRRFECFTAELHRLADWLQSCGVKTVALQSTGVYWIPLYDILEERGFEVYLVNAQHTKNLPGRKSDVQESQWLLKLHTYGLLNNSFQPPSKIRTLRTYWRQRLQHVTGAATCVQRMQKALTQMNIQLANVISDLSGVTGQLIIRAIISGERDSWRLAELSHPRIQASRAEIAKSLEGTWRSELIFVLQQELEMYDTYQRRIAECDQQLQKHLAAFADTVTPPAKEELPAKKKKKQNKNNPHFHLADELQRISGVDLTRIDGVDVFVAQTVISEVGLDMGRWKTEAHFASWLGLCPDNRISGDKVLARGTRHVLNRAATALRLGASTLLKSQTYLGAQYRRLRSKLGAPKAITAMAHRLARLVYRMLKYGQQYVDKSAEYYERRNRQQQVEFLRKKAARLGLQIIPLE

SEQ ID NO: 90457 - protein, 468 aa, unidentified
MPSASTHRKRQLDELACVHPNAAGLDIGSEEIVVAVPPDRDPQPVRVFQTFTADLHALVAWLVACGIDTVALESTGVFWIPIYELLEAAGIVPYLVNARHVKTVPGRKTDWNDAQWLQKLHALGLLHASFRPDAEIRTLRTLARYRSELVERRAPHINHMIQALKHMNIQLNLVLSDITGVSGLAMLRAIIAGERDAERLAEFRQPGCKHSFAEIVKALTGTWDDAQIFILTQSVELFDYYSTKLEACDGQLEQQYQAMESRWEKDAPLPDLPPAKGESKSKNAMSFNARAQIARVIGVDLVAVMGLSAITVQTIISEIGTDMERFPTVKHFRSWLGLAPHNDISGGKVLRSRTMNVHSRANQAFRQAAHSVTRAHSSIGAYYRAMRARLGPKQAIVATAHKIARIVYHLLKTGEPYREESDAEYERKRQEREIKHLARRAQKLGYTLTAVPATAPETHPEPGGEGSC

SEQ ID NO: 90458 - protein, 342 aa, unidentified
MKIHTIGIDLGKTNFHLVGLNERGEVVVRKRFSRAQLLRFTANRKVHVIGMEACGGSHFLGRALQEQGHEVRLIPAQYVKPYVKTNKSDYIDAEAIAEAVGRPTMRFVPIKSDDQLDLQSLHRVRERWVMRRTAVINQIRGLLLERGITLRKGRRYVDEALPGILEDADAKLSGTLRLLLAQLKLELDQLAVRLEEAEALIEQTVQENEACQRLVKIPGIGPVTATAVIAAIGNGSAFRKGREFAAWTGLVPREYSTGGKQKLLGISKRGNRYLRKLFVQCARAVLQQKTKQSSGLKAWLEKLTSRTHRNVAAVALANKLARIVWAVLATGEAYRAPLPVAA

SEQ ID NO: 90459 - protein, 279 aa, unidentified
MENIALIGIDLGKNSFHIHCQDRRGKAVYRKKFTRPKLIEFLATCPATTIAMEACGGSHFMARKLEGLGHSPKLISPQFVRPFVKSNKNDFVDAEAICEAASRPSMRFVQPRTESQQAMRALHRVRESLVQDKVKTTNQMHAFLLEFGISVPRGAAVISRLSTLLEDNSLPLYLSQLLLKLQQHYHYLVEQIKDLESQLKRKLDEDEVGQRLLSIPCVGTLTASTISTEIGDGKQYASSRDFAAATGLVPRQYSTGGRTTLLGISKRGNKKIRTLLVQW

SEQ ID NO: 90460 - protein, 347 aa, unidentified
MNIIGCDFHSRMQVIAMLETETGEVIQRRLDHESGEAKAFYEGLKGPVLVGIESTGYTRWFAEMLAGLGYELVVGEAAKIRAKETRKQKHDRRDAEHILNLLVKGDFPQIWLPPAEERDVRVWIEHRHQLVELRTRAQNSLQAIALSYGRRRRHRLWSKAGQEELQKIPLRAGTARRRQDLVALVRQLNVWIKELNQRILEEVGRREDAQRLMTHPGVGAQTALATVLVLGPVERFPDDRHLTSYLGLIPQEDSSGGRQRFGHLTKQGNRLMRFLLVEAAGIASRYDAGLRRTYRRLAFRKGAPVAKVAIARKLAIRLYIMLRDRIDYQEFCRRGSHAGMLEHRSLA

SEQ ID NO: 90461 - protein, 372 aa, unidentified
MKEDSVIFIGLDTSKLKISVAVAEGERNGEVRFFGDISFEPASVAWLVNKLSKRGAKLHFCYEAGPTGYGLYRQIVELGHDCVVVAPSLVPKRAGDRVKTNRRDAVSLARLHRAGELTAVWVPDEAHEAIRDLVRAREAASDALKQARQQLQSFLLHHGRIYTGRKPWTRAHTRWLTCQAFDHPAHHILLAEYCQAIEDAGVRLDRLTQLVVETAASWSMAPVVAAYQAMRGVAFMTAVTFVVEIGDVRRFDNPRQLMAYLSLVPSESSTGERVKRGGITKAGNTRVRRVLIEGAWTYRFPARVSPTIQARLEGLPRIVREIAWKGQVRLCARYRKLMAAGKPKVVAVTAIAREMAAFLWAIGQEVAPTAKI

SEQ ID NO: 90462 - protein, 343 aa, unidentified
MEAYAGKQFVGIDLHRRRTVIVRITEAGEVLEAVRIVNDVQRLASVMARAGDCPEVVLEATYGWYWAVDALQAGGANVHLAHPLGVKAFEYRRVKNDVRDAQDLADLLRMGRLPEAWIAPPPTRELRELVRHRAKLVGLRSHCKAEVHAVLAKCGVQVLMSDLFGLAGTELLDRLELPAPYAARIASLRRVMDDLDFEINLFAGIIRGRMAHEPGYTAVQKIPGIGPTLAAVLVAEIGDITRFASASKLTCWAGLTPKHHESDTHVRRGRITKQGSRLVRWAAIESVKTISKTSEVGVLRERVADRRGRNIGSVAAGRRQLELVFYALRDGHVRALEHLPAAA

SEQ ID NO: 90463 - protein, 367 aa, unidentified
MKKISTAAVKQNRNFSEQKLTIGFDLGDRSSWYCVLDGAGSVLLEQRVSTTPKAMKEVFGGMPRCRIALETGMHSPWVSRLLSELGHEVIVAHARNVRLIGESRKKDDRLDAQTLARLARIDPQLLSPVKHRSAKAQADLTVIRARAGLVRARTALVNTARGLAKSYGERLRGCNVRNMNPEKAEGLSPELQTALEPLLAGIESLSERIVECNERVETLAQESYPQVARLKQVKGVGTLIALTYLLTLEDAHRFRKSRDVGCYLGLQPGRRNSGQSEPQMHISKEGDPYLRTLLVQGAHHILGPFGIDSDLRRWGLKLAERGGKSGKKRAVIATARKLAVLLHRLWVSGEAYEPLHNSNHRAMPAAA

SEQ ID NO: 90464 - protein, 346 aa, unidentified
MSSYTVGVDIAKRVFQVHVVDANGKVQAARKLRRSEFLGFLSKLPPSLIGMESCSSAHHWARELSAMGHEVKLMNPMYVKPYIKRGKNDAVDAEAICEAVTRPTMRFVPIKSVDQQSVLMVHRTRSLLIKQRTMLVNALRGHLAELGIVAPVGIERIAELVDRVTGREGDEVGIPPLVRSLVEVFAQQISTITEEVRALEKSLRSWHRTSEASQRLATIPGVGEITATALAATVPDPSYFQSGRAFAAWLGLTPRSNSSGGKERNGRITKAGDRHLRTLLVLGATSVIRRVRAGQPTPIYSWVNRLLDKKPARLASVALANKLARIAWAVMARGTDYQPQRAALAL

SEQ ID NO: 90465 - protein, 377 aa, unidentified
MEYYAGIDVSLEWSSVCLIDGGGKIVREDKVASEPASLIAWFAKLGVEVTRIGLEAGPLSQWLYAAMRAGGLAVELLETRHVHDAFKAMPVKSDRNDARGIAQLMRLGWFRPVHCKSLAAQDVRAVLTARKLLQAKLHDVEMSLRGILRGFGLKVGPTTPKRFALRIRELVAGHPTLEAIAAAVLTVHVPLLAAFIALDRRVGAMARADARARLLMSAPGVGSIVALTFVAAIDDPARFTSSKQVGAHFGLTPRKYQSGETDVDGRISRIGDGSVRTALYEAANVILTKPVKGSALKSWAMRLARRAGPKKAKVALARKLAVILHRMLCDGTRFRLAETGKRAERPAPRPDRPQPGAMLAAVKAAHAPPAAVAGGQP

SEQ ID NO: 90466 - protein, 533 aa, unidentified
MIKVPAVLECCAGIDIGKKNVAVASFKGPADKEAEITTREFGTTVPALQVMKEWLVKEGCTSVAMESTGSYWIPVKTVIDDAFAITLVCARKHRTKKGDKTDFRDAINLGHLQRHGLLTGSYLPERGIVELRDLTRRRKKLLGNLASEKNRIQKVLETANVKLGNVVSDVFGVSGQSMVKALLSKREMEAGEIANLAKKRLRTKLPELTEALQGHQMNDHHRWLIEQSVEHIVLVDQQAEKLEDKIEEQIKPYGTQYELLQTIPGVKAFTASSVLAEIGADMKQFPTADHLCSWAGICPGNNRSAGKSKSSHIKKANKFLLAALVEASWGAVRKRGSVFERKFRKWVVRMGKKKATIAISRCLLRTIYAVLKEGKPYQEPNTSEIQELERKSKVLHCGNQLRKLGADATVLEQMVQQMLSATPLQNIAQLEAGGSETTEEAKEAGLPKTSQPSQRPQACRGALGFRARQAPREQYSVVKHPPGDRASQSAPKVKRAARTKPAGEPQPREKVRGAKNESPSSANQQNKPSEHLP

SEQ ID NO: 90467 - protein, 390 aa, unidentified
MDVLYQSCAGIDVHQANIVVCILHGPLTSTRPKREMATFDTTTKGLRACHDFLSQFHVEAVGMESTGVYWRPVWHALCDDFELILAQPAHMKAIPGQKTDKKDAHWIAKLTRIGLLPRSFVPDETIQELRELTRQRKHYVESRNRETNRIHKILQSGGIKLTTYIEDIMGLSGRNLLQLLVDGTPITPRIVHQSVYTTLKKKVPQLLEALDGYFSDHHRFMLKQSLEIYDFYQKQIELLEERMNVYLSQYENYVEILDSIPGIDVITASVIISEVGVDMSQFPTAGHLASWAGLCPGNNESAGKKRSTKIRHGNSYLKKCLCQAAFAVKKQKGSPLADRFYQIQSRRGSQKATIALAHQLLKIAYILLKEQITYPEFLAQKKTTRDELVA

SEQ ID NO: 90468 - protein, 320 aa, unidentified
MNSHYKIEKIQTEINHVGIDVSKQHLDVSIAGSKTQRLANTQAGLRVLHQKLGRLAHPRVTCEATGGYEKLLVDSMLDAEIEVCVAAPGRVRYLANAEGLLAKTDSIDAELIRRFAEKIPLPRQIKQDPAAQKLRQMSDYRRMLSEDIVKTSNRLELAQGYLREQLQSQLTHLQGLMKKVEADIKAHIRNCEELAQKAARLQELKGVGPVLAATLLAHVPELGKVGDKTLACLVGVAPHPKQSGNFKGKSSIRGGRANVRHVLYMAAVTAARSNPILAAFYQRLRTQSGKTAKVALVAVMRKMLSVLNKMIAQPNFSLAH

SEQ ID NO: 90469 - protein, 449 aa, unidentified
MKSLPVINPNAAAVDVGSEQLHLSIAGDAPVVFGTFTDEVYRLRDYLKAQGVTSVAMEATGVYWLYAYAVLEAAGLEVVVVNGRHVRNLPGRKTDMADCQWLATLHAHGLLRGGFVPPAAIRRLQDYQRLRADHIIGAGSQVQKMQQALERMNIKFHDVISDLDGVSGLKVVRAILAGAREPKALLLLCDPQIQKKKGERVLQSLKGTWASEHLFALGQALAAWEFYQKLLGECDQQIEVVLRELAGPEPPAPGPGAPAQPPGKKAGKNAPQIEQLHQLLMRLCGGRDVTAIAGIGDYLLLQLLAETGPDLKAWPSEKHFAAWLGLAPGSRQSGKRKGSVKVQRNRAGRLFCAGARSLVQSVDKALGGFYRRLAARKGGLVAMKALARKLAELYYRVLRYGLAYADQGLRVYEQKYAESQRRLLAKLAAKQGFKLVSLPLEAHLTGVSV

SEQ ID NO: 90470 - protein, 466 aa, unidentified
MCILHATSHFYMCSSALQAQLNMTLSMKAYLCINDSFIECPTVSPCGAILKFDLEVYLMLKIVYPNCCGIDVHKTFVLAVIAITDEHGVTQYFRHRFSTFTKGLGELKQWLEYYSCTDVCMESTGKYWIPVYNVLEDSCSICLAHPKYVKAIRGKKTDKKDAKWIADLFKHDLVAGSFIPPLPIRELRDLVRYHFKLTNFCSSEANRLQNSLTVSNITLSSVLSDVLGVSGSRIIDAILEKPTDEIDLSALIHGRLKSKLSDLELAIDGKITDEQAIKIRIIKSHYDALTLCKSDLEKAIIEVAEEFRAQQKLIQTVPGCANQFTTIKIISEIGVDMGQFPTAGHLCSWAGLTPTNDESANKKKSVRISKAGHYLKPLLVQIANGIVKSEKYPEHRNKYLQLKKRRGHKKAIIAIARRILTAIYHVLLKREPYDSSYYSIEIVHPNRVMTINEAISFAKSHGFVVS

SEQ ID NO: 90471 - protein, 418 aa, unidentified
MPRTKKQPVSLPVIESNAAGIDIGATQIFVAVPADRDPEPVQSFPTFTVDLERLADWLVMCQIQTVAMESTGVYWIPLFQILEKRKIEVRLVNAHHVKNVPGRKTDVEDCQWLQHLHAVGLLRGSFRPDDEICAIRSLWRHRDNLIQLATIHLQHMQKALDQMNLQIHHVISDLAGTTGLAIVDAILAGERDPGKMAHLRDPRIRASEETIMKSLVGDYREEHLFALRQSLKSYRHYQEQIQEVDLQVKQMLQQLPPKVAEGEKPPQGDKTRKVPWRNEPPQLRDDLYRAFGVDLTAVPGINSLTAQVLLTEVGPDLFRFPNAAAFCSWLRLCPNPKISGGQVLSSRTRPTKNRAALALRMATQGLCRSNTFLGDHFRRMKARMGTPKAMTATAHKLARIVYHMITTQQEYDATVFQQ

SEQ ID NO: 90472 - protein, 437 aa, unidentified
MGGMAKRRKQHQPPQQTMNDSPQWQQYQAFGALDWGSQTHSVIVIDAAGKVMEDFAIEHSALGWKQFRQKLQVYGSIPFAIETSQGAAVEQLLEAGMIVYPLNPNRAQAYRQRKAPSGVKDDRLDAWSFADALRVDGHGWKALQPEQPLTKELRLLCRDEVSLIEQRTALIQQLRQALAEYYPAALEAFEDWTSVSAWMFLQRFPTADSLAQAGRRQWQKFLHSRRLWGSDQGPRRMEIFAHATELAGSEPTVKAKSLLALSLVQMLFAVQKQLELYRQRIEELFARHPDHDLFGSLPGAGSKLAPRLLSEIGDDRQRFEADAQALQCFGGTAPVTIRSGKDRKYWPVHQRQACNKHLRHALHLFAEQSLSRCVWAHIYYQHHRQKNQSHANALRRLAHRWLKIIHKMWLDRSPYNAELHHRNQLQHGSWIFQFQKS

SEQ ID NO: 90473 - protein, 349 aa, unidentified
MDRTTYGLDIAKNVMQLHWVEAETGEIGRKKLARAKLAAYFAELRPVRIVMEACGSAHHWARVLGGLGHQVELLPAAQVRAFVRSNKDDAADARAIWLAAQQSDIRRVPQKSVEQQAALALHRTRTHWVSVRTATVNSLRGLLYEFGVVLRGGRQAGLKALAEQRAAIDGQIPATMRALVDGQLQTLQQIGQRIDELESEIAALQGPLKGARELDRVPGIGVLGSTALAATLGDAKAWRSGREFSASIGLVPAHAGTGGKVRVGHLSKRGDPYLRTLLIHGARSVIERAKHKPKWLEQLLARRPKNVAAVALANKMARTAWAIVAHGRAYQRDWKSTGPGSGAAQAAAA

SEQ ID NO: 90474 - protein, 419 aa, unidentified
MSFKILKFKCCGLDVHKTWIYACIGITDSNNRTEYKQARFSSFTKGLNELCDWLAKYNCKDVCMESTGKYWIPVFNILEQHNLWVTLSHPKYTKPMKGNKTDRKDAKWICDLYMCGMVKPSFIPPADIRELRDLVRYRFKLTCMITGEKNRAQNCLTVSNLKLDDVFSDVFGKSSRSITEQILQHPGEKFDVAPFVHGRCKTPIEEIQAAVDGAISKEQAVKLRQCLDHIDELQKHISEVEQEILRLSDKYEAALNLIRTVPGFDKNPMTAIQVLSEIGGDMSVFPTAKHLVSWAGCCPRNDQSNQKIKSTRISRAGSYFKPVLVQVANALIKSKKHLEFTNRYKRIKARRGHKKAIIAICRMILTAIWHILSDLKPYTPEGFLESRPVKEEKVLSISQALNLLKQRGYIIKDEPLSVS

SEQ ID NO: 90475 - protein, 314 aa, unidentified
MAMLASRPEIGIDVAKDDLVIHLQDENQTVTIDNTPQAIRQWLATLPKGCDIAIEATSTYHMDITERAHAKGHRVYVVDGYRLSNYRKGVGGRAKTDLADAQLLARYLRREKDELRPWSPPPKAYRVLQSLLRRRAALVKARTALRQSLSGEPELKAPLQTLIAEMDRIDTLIQKRLKSAVSAAGLQTQVQRCDAIDGVGEITATALVMAFLRGDFTNSDAFVAFLGLDVRVRDSGKLTGKRKLTKQGDTEVRRLLHCAAMSASRHPVWRAFYQRYRDRGLHTTQALVILARKIARTAFALMKQQQEYCPAKLF

SEQ ID NO: 90476 - protein, 422 aa, unidentified
MKKIQAKKVRFVNANTLIVTIDIGKSTSFGYCLCPDGTEVKPFEFTNNRGGFTKLWDCVIRTKMANGLEEVVVGYESTGAYAEPLINFLKGKAVKLVQVNPMHTKKLKELQGNSPNKTDKKDPKIIADIIKLGHALTVVIPEGSAAELRRLFQARERAIRRRTALYNQLQDLVFISFPEFLQVVKDVKTKSARYLLQHYPTPQDILNQGVDALALILKRISKGKLGIARAKALFEVAEQSVGVKEGRLSVTLEIKAMLADITNCDHLIKQFENEMTRYLEEIPYSRIILSMKGIGVITVAGLIGEVGDFSKFDTQAELLKLAGLNLFEVSSGKHKGQLRITKRGRSLMRKLLFFAAINTVRKGGIMHECYQRHLQKGMKKIKALIAIARKLLCIIFALVRKQSDYLENYQEAMAAQQFKKAA

SEQ ID NO: 90477 - protein, 420 aa, unidentified
MTNPYRWFVGVDWGSERHRVVVLDAEGALVASRNVEHTGVAQQQFLQWLAELTENRISEVAVGIEVPRGAMVEGLLERGFAVFAINPKQLDRFRDRYAVSGAKDDDRDAFVLGDSLRTDLHCFHCVTIEDPLILQIRELSRLDDDLQTDAVRLANQLLVQLLRYFPSLLALNPAADEPWLWDLLEVAALPAQAAELGRSRIESVLSARRIRRLSAEQVQTALRTPALTLAPGAALAASRHALLLLPRLRILHVQRRQVAREIASLIEQLPAAIDADGHPVEHRDADLLLSWPGLGIGIAATMLGEASRGLAQRDYHGLRCYGGLAAVTRQSGKKQVVIMRYACNRRLRNAFYHWSRCSLQKDPRSREHYAALRARGHSHGRALRGVADRLLATLIAMLKTRTPYDPKLRSRGRENIPSTP

SEQ ID NO: 90478 - protein, 411 aa, unidentified
MHNRQNYLYVGVELHKEHHTAVIINCWQEKLGEIQFENKPSAFSKFLLEVETYVSAGVSVVFGLEDVGGYGRALAKYLVDHEQVVKEVNPALSFLERKSHVTTQKSDSWDAECVARILVNKFNQLPDAKPNDLFWSIQQLVSRRNALVKAQSALKNQLHIQLNHHYPSYKKFFSELDGKTALAFWQQYPSPSCLEGANIKQLTAFLLDVSNNTCSVKKASEILKLVKEDGHTMKEYQETRDFLVRSIVRDIEFKKTEIKYIERELKQLVKLLAYQLETMPGIELVTASALIAEIGDVRRFPNANKLARFAGIAPVYFGSGGKGKTHKSKQGNRALHALFYNLAVQQVQVAKGSKKPRNPVFHAYYQKKLKEGKTKGQALVCIMRRLVNIVYGMMKYKIAYELPVVEEKEVV

SEQ ID NO: 90479 - protein, 455 aa, unidentified
MKSRRRIASPKAQERRLPIGLQQGFAISGMGFGTRCTAAILSHRCPLWVISVISNRGTDVRFTPESDRLLRCREMTRMGWTGRAPAPDDPQGLFGAFNEHEEHTMPHKTDLTVVRTIGIDTGKSTLHMVGLDERGAIVLREKVSRHRIAARLVNVQPCLVGIEAGMATHYVARALSALGHDVKQVPPAYAKPFRQGHKNDFRDAYAVAEAVQRPSTRCVPIKTDDQLDLQALHRVRSRLIGDRTAVINQLRGFLLEHGIAVRQGHRFLRQQLPQILATRADVLSPRMVRIAGDLIEDWGYLDERIERVTDEIEGLAQTDVGCGQLMTAPGIGPIVASATVAAIGNGAAFAKGRDFAAWLGLVPKQMSTGDRTILGRITKRGNRYLRMLFIQGARAILLHPTSWAKHSFGPWLTAAAKRLHHNVLTVALANKLARIALTVLVEGRNYETRITPAAA

SEQ ID NO: 90480 - protein, 342 aa, unidentified
MEAKRYIGIDLHRNCFTACLRLENGREYGKEWKLEELAKFVEKLRPTDQVAVEVTGNTRLFHDAVAPHVARVVAVNPSQFQVITHSVKKTDSNDARNLALYLAKDLLPEVRMKDKTQAQIASLTQTRDSMVKLRTALKNKVNNLCSAHGVNLNKESLSSEKGLKAVLEMHFDLLVNLELKIIIDQIRSLNKSIAELEETIGQQGQKLEGHKNLTSIKGIGGLSGGILLSIIGDIGDFADEGKLAAYFGIVPRVSNSNETERSGRITKRGTKLGRTTLIQCALIAQRYSPYLKTYYQKIKSRRGTGKAIVALARKFLGIIYRTLKNKWVFEDFPNFVLAEQAA

SEQ ID NO: 90481 - protein, 325 aa, unidentified
MRQPQSQVKPQTQIGLDVSSQTLDAHIRVDGKAFSVPNTDAGFDQLCEILSAYSVSMILMEATGGYEDNVACYLQLQGFDVVVINPRFARRFAQSMGRLAKTDRIDAAILAQMAFMIDSGPDRDRYIKPVTDEQRKQLSRLSSRRRQVVDLITIEKQRLTHADDYARESINGVISLLNVELKRIESDILRYVKKNFSELANRLLSIPGVGEQAMIVLIADLAELGHVNRRRISALLGVAPFNHDSGKFKGQRRIRDGRQTVRNVLYMGVISATRFNPVIKAFYDGLLLRGKPRKVAIIACMHKLIRIINAMMRTGKPFDTSLHGV

SEQ ID NO: 90482 - protein, 360 aa, unidentified
MKDNLTQSEPPEPALLIGIDWADQKHDTYTIDRQGHGVWEQIEHSPEAIDVWLAEKLRQADGQPIAILIEQSRGALIHTLMFRKNVILYPINPKQFARYRESYSNAGCKDDPTDAQLLARMLRERIRLLKPWRPDDESTRLLARLCQTRRQLVNERTRLTQQLIDQLKAYFPLVLEFNSSQSISSLVLELLRRWPDPRCLKRADRRVLHRVLREHGYRNEDKRQEVIERIRSAKLLSRDRALIEPAAIVVQCLARQIPVLEKSIDELETTIDKEMANHPDAKLFTALPGAGKTLAPRLLTAFGSQRDRFASANEVATFSGIAPVTKRSGKSCIVHRRYACPKYLRQTFHEFADHARKWCP

SEQ ID NO: 90483 - protein, 379 aa, unidentified
MSHKARYATTTAGLAALADWLAGEAVTVVGMEATGVYWKPCFYALEDRFEVWLCNAHHVKNVPGRKTDMSDAAWLADVVAHGMVRPSFVPPPPIRQLRDLTRYRKRQTDTRAAEVQRLEKVLQDAGIKLTSVASGVLTMSGRNMIEALIAGNRDPEVLAEMAIGRMRTKKAALTEALSGHFGPHHAVTARQILDHIDFLDARIAAVSEHVAARMAPFAAAVELLVAVPGISRISAEVIIAETDGDMARFPSPAHLASWAGVAPGNHESAGKRRRVGTTNGNRWLRRTLIESARAAARTQASYFAAQYRQIAHRRGPNKAAVAVAHSLTDVIWHLLTTGEVFEDLGVDFYQRRRDPEREARRLVDKLEALGHTVTLTQTA

SEQ ID NO: 90484 - protein, 410 aa, unidentified
MLVPPQVHVSVDVGCHRHSVAIGLSSGELLEEFDIAHRPEGFNDFFHRIERHQRRFPGRVSVAMEGYNGHARPLDTLICERGWRLLNVNNLKLARFKQVFPAAAKSDRIDARRALELMQLGEHLPQVGNALQEVYPPASENAKLKRLTRRRRALVDEKTRVLARMQGDLRAVCPGLLDITGDAENLWFLSLLTHSEDLAKLARLREKTLLSIPGIGIKYAALIRQWQGQAQFSHETDYAGPMIIEDAQRILELREAIKALEGQCEQLAQASEIARLIDTLPGFALICSSELAGEIGTLDRFPGEASLAVYLGMANLDNSSGTRQGARAPGQVNKRAKAAMMTGVDRHRKQVPESQRYYEKKRAEGKSHNQAIRALARHLCRVLYRMLKHAEPYRIREDDEQCPVTVPPAP

SEQ ID NO: 90485 - protein, 334 aa, unidentified
MNSEKYIGLDVHQATISVAVMDSRGKVVMESILETKASTILEFFAGLRGTLSVTFEEGTWAAWLYDLLKPHVAKVVVCNPRKNALLKDGNKSDRIDARKLAELLRLDNLKPVYHGETGVRMLRELARSYLTIVKDLTRVMNRLKALYRSWAIPCAGRDVYYTRHRTEWLGKIREAGVRRRAEQLYQQLDMLQHLRQQARRELLAESRKHPITAKLRKIPSLGPIRSALAVALIQTPHRFRTKRQLWAYSGLALETRTSGEHRYVRGQLRRSKKQVSIRGLNKDHNHDLKGLFKAAATRASVQPGPFQDTRDHWPKASSRRWCVSRWRARLQPLR

SEQ ID NO: 90486 - protein, 360 aa, unidentified
MKIQRTSVGLDVHARSVVTCALDGDTGEVFQRRLTPDYGEIVAWLGDLPGPVAVTYEAGPTGFGLARALAAAGIGCEVAAPSKLIRPAGDRVKTDARDAAHLARLLHLGQITAVTVPTAAQEAARDLVRAREDCRGDLMTARHRVSKLLLRQGIVYSEGKAWTGRHELWLRSQRFDNPALQLSYEASFDAMLACLDRRNRLDDAITTLAAASEFTPVVHRLGCIRGVATLTAFGLAVEIGDWHRLTGRSIGAYVGLVPSEYSSGDSRSQGGVTKTGNGHVRRLLVEAAWHHRTQYRPGVELRRRWDLASPAARARGQAANRRLHTRWAGFDARKKRPVIANVAIARELAGWCWSLAVMPD

SEQ ID NO: 90487 - protein, 341 aa, unidentified
MPIVTVGIDLAKNVFAVHGVDEAGKAVLIKPRVSRDQLGALIAQLPPCVIGMEACSGAHYWARVFQMCGHTAKLMAPKLVAPYRMSGKRGKNDAADAAAICEAVTRPSMRFVPLKDEHQQATLCLHRTRQGFVEERTATYNRLRGLLSEFGVVLPQSPERLRLDIAAHLDLLPGWARRCISDLLEHAGNIEDRLGEYDRAIAEIAREDERSKRLMQLRGIGPTTASALLASIGAGHDFRNGRQVAAWLGLTPGQHSSGGKARLGSITKAGDAYLRSLLVLGARAVMANLGDKQDRFSRWVRNLMERRGYWRAAIAIAAKNARMAWAVLKYGDDFRHEPVAA

SEQ ID NO: 90488 - protein, 428 aa, unidentified
MLFNAKRFPDGWKRAETIHFSSDAKGFKQLQRYLDSFSTDPTQFLILSEPTGGYYGLALQMYLIMKGYHLLQVENSAVKEYREDIYGSETKTDDTDARLMARMGFLHEWVGEEFSIQPIHITTPDESVIRLMSRDLVKLGKEIGRRKNQLHQILAFTFPELKTFFKDDISGTAARNLIKRFPTPHELKKASIKEIAQVLHASHAYHHEKRANELLILAQDSVGLKLVSHHLWRQAWILEQLDVLETARNDLLSHLQQLTAPHPYAPIIESLPAKSPIWTATLISMIGNIDRFHNYGEFRAYAGWYPKVAQSGTSVHSSSLANDGARSIRNVFGQMSQILITPAFKSTAFYAYYKRLVARGMKPGNALGHMAGKLATVLYGCLKTMTPYDEKKHLQHLGFTIEAETKLAISIEIASELIDKDTLRNDIS

SEQ ID NO: 90489 - protein, 454 aa, unidentified
MCLEDRPVLQPNAAGIDVGAREMFVAVPPGRDENPVRVFATFTEDLEQLADWLLQCGVTTVAMESTGVYWIPLYDVLEQRGIRPCLVNARHMKNVPGRRTDWHECQWLQFLHSVGLLRPAFRPEEDICAVRTLLRHRNELVQAAAQHVQHMHKALTQMNLQIHHVISDITGVTGLAIVDAILAGERDATELTKLRHSRIKADQETIRKSLVGNWRLEHLFTLRQSRELYHTYQQRIVECDLEIEQLLPRFEPRVDPAEKPLPRDQKRNRAGQKRRKKNGHPNPGFDLRTEAYKLFGVDVTQIPGVEENALPLFSEVGRDMSKWPTAGHFASWLNLCPDNDISGGKTLWRGMRAVKNRAGHLFRLAASSLHHSPTPLGNYLRRMKGKLGPSPAITATAHKIAVIFYTLIKHQAEYDETIWAARDTEREKRLEARLKRQAKQLGYELVPIERKPAA

SEQ ID NO: 90490 - protein, 340 aa, unidentified
MRQLYVASDLHGNNNLIGIIDGEGKRIFKKKLPNDPLLINDTLKPFKEEIVGIVVESTYNWYWLVDALMEEGYKVHLANPAAIQQYSGLKHTDDKHDAFWLSEMLRLGILPEGYIYPKEERPVRDLLRKRGHLVKLRTSLIISLENIISRNFGRKLPVNDVKGLRKDHVTPLFEGKEDLGLAGRVSKETIDFLTHQIRQIEGVVEKRVTLKEQYRNLLTIHGVGKILGLTIMLETGPIGRFETVGDYTSYCRKVPSQWISNGKRKGSGNRKNGNKYLSWAYAEASDFARRLHPESRAYYNRKMQKSNPAVAHSALSHKLARAAYYIMRDQVAFRPEKLFG

SEQ ID NO: 90491 - protein, 345 aa, unidentified
MKYIGIDYHKQYFVATIMNDQGEVIRRDKASTDRSSIRHYFKHADLSGGVKAVMEACYGWEYFYDEASDLVDELIMAHPLKTRLIAEARIKTDTIDSETLAHLLRADLIPQAYAPDTETRRQKNLLRYRSSLVAMKVRIKNIIHAVLTRSHIEDQLFTSLSDKFGKRGLSYLRAVSLKGNDTVILNDYLDLLEETDKKIKEAEKRIRTVCHEDKICNLLSSIPGIGPILAVTIRYEIDDIERFMSAGKLCSYAGLVPSTYSSGNRTYQGKITKQGNKWLRWAMIEAAQKAPAKDLWLQGFYQRISKNGKKIARVAVARKLLEIIYRIWKEEKPYYKKGTVALPCV

SEQ ID NO: 90492 - protein, 416 aa, unidentified
MAVTRWVGRAVGLDVHREFCELAICEDGRVRSGGRVASTPEGLGVLARSLLPSDRVALEVTGSCWEVARILEPRVNRVVVVSPDDTGIASARAKTDRLDARQLASLLWKGELEAVWVPDERCRILRRRLARRGQLMRARTRSKNEIHASLQRRLQAKPPCSDLFGVKGRAWLAALQLPAEERESVDAAMRHIEFLDQELAAVDRLIAQQALSWPEIRRLMSVPGVNLICAASFIAAVGNANRFLTSRKLVAYLGLDPRVKQSGEGPARSGRISKRGSPSARWALVETCWSVVLQPGPMRAFYQRTKARRGHGKAIVATARKLAVLFWCMLTRSEDYAHQQPTLTRKKLRRLEITAGAPKYTRRAVGSWSTNLLMHQAERELALQAEASYKRMVQDQRAGAPARKSGASVTPERAQV

SEQ ID NO: 90493 - protein, 432 aa, unidentified
MRPNAAGIDIGATEIFVAVPADRDSDSVRSFPSFTEDLHRLADWLQTCRVDTVAMESTGVYWIPLFQILEARGIEVHLVNAQHVHHVPGRKSDVLDCQWLQYLHSVGLLKASFRPEQAVCEIRSLMRHRESLVEMASVHVQHMHKALDQMNLQIHHVISDITGVTGLAIVDAIADGQTNPKQLAALRDYRIKASEQTVTKSLVGTYRREHIFTLKQSRTAYRHYQQLIADCDREIQQRIETFDNGDPGSSPSASSPDSTPSNPLPFDLKSHLERIFGVDLTAIPGFQCLRIQTLFSELGASLTRFSTVDSFSSWLNLCPKDGFSAGRRIRATKNKTRNRAAQAFRLAAVSLQNNQSYLGDYYRKQRARHGAPKAIKNTAHKLARIFYRLVTTRQPYDQSVFLKLERRNQQRRLHKLQSVAKQMGYNLVPSHT

SEQ ID NO: 90494 - protein, 358 aa, unidentified
MTDGSREQPKMTAGLDLGDKYSHLCLLDAESGEVIEESRLRTALETFRRRFDSEQPLKIAIEVGTHSPWVSRLLEECGHEVLVANARKLRLIYGKGRKTDKLDAENLARLARVDPKLLYPLKHRGEDSQAHLAIIRSREALVGSRTQLINHVRGAVKSFGARLPKCSARSFHKKALDRLPEELVSALGPLLETIGELTQRIREYERKLEEIATEHYPETKILRQVEGIGTLTALTFVLVLEDPHRFLKSRAVGAYLGLVPGEDQSGESDPQQRVSKEGDKMLRRLMVGSAHYILGPFAHDSDLRRHGLKIAERGGKNAKKRAVVAVARKLSVVLHHLWITGELYEPLYNVHRSGSRAA

SEQ ID NO: 90495 - protein, 357 aa, unidentified
MNYTQNQKIEQVTESTLALGVDIGSSEHYVRAFDYRGRELTRKVFRFSTDINGFNSFYDWVTQICIKHGKNEAMIGCEPTGHYWYTFYQFVKDHGMKLAFVNPASVKKAKELDDNSPKKTDLKDPKTIAKLVIDRRYSFPYVPEGIYAETREVTSSRDLIMKELNAASNRIQRWLKIYFPEYLTVYKKFDTTTGMMILEEVPLPTMVTALGVDNIIKIWREHKVRGKGASFNRAKTLVDAAHDSVGKSGGQGAVMEIQMLLEDYKVKKQQLEMVTSVMEELIMQIPNAEKMLSVDGVGLVTVAGFISEVGDISRFKNPKQIQKYVGFELVENSSGKHKGRTTISKRGRKKLRKSYIR

SEQ ID NO: 90496 - protein, 412 aa, unidentified
MKDLLEISCGLDVHKEKIVACILTGPLGKPTRSEIREFSTLIPDMIALRNWIVSKNCHHVAMESTGIYWMPIYEILEDAFYGDITLLVVNARHMKNVPGKKTDMRDSEWISTLLRAGLLNGSFIPEKRIREFRDLNRYRKSVIRDITSQKNRIEKFLQSSGFRLSSFISDIFGASGRNIILHLIEHGQIDKTALDSCLKTKTRNRIDEILMSVNGTLSEHQKAFLRILMTHYDSLKKHLAEIETSLEEDMAPFALQVEQLNSIYGISTTASCAIIAEIGIDMKPFKTAEHICSWAGLCPGNNESAGKRKSASVTKGNPYIKSMLCEIAWVIAGKRNTYLSAWYWRIKQKKGAKKAIVALARKLLVIIYTMLKQGTLFDESCFETRRKHCEQKQLSRYIRELEKHGYHVEAQS

SEQ ID NO: 90497 - protein, 420 aa, unidentified
MLEQTQDQQEVIERIAALDIGKATLVCCARVPGKGARRAQEVTTYSTMTRSLQTMADRLLELGVTRVVMEATSDYWKPAFYLLEAHGFEVWLCNAKDVKHLPGRPKTDVLDAVWLCKIAERQMIRPSFVPPPPIRRLRDLTRYRVALVSDRTGEKNRVEKLLEDAQIKLSVVASDIFGVSGRDMMDQMIAGQRDPKVLAQLARRRMRSKIGQLEEAFVGHFTDHHAFLLKRMLARIDALSADITAMEIRIEEQIAPFAEAVERLDEIPGVGRTAAHVIIAEIGLDMSRFPTAGHLASWAKFAPGVKESAGRKKGTGATGHGDPYLARVLGEAAVSAGKTDTFLGERYRRIARRRGKKKAIVAVGRSILVIVWHLLSDPDAQFHDLGADFYDNRLGPERIKRNHVRQLEALGYTVTLEPAA

SEQ ID NO: 90498 - protein, 321 aa, unidentified
MTYVGIDVSKATFVVAYSSAKSNETKTFKNTTKGIREFIRTISPEENHCVLEATGNYSMLLVYLLSKAGFTVCMENPLKIKNFARVMLSVVKTDEIDARLIALYGERMQPAPFKLRSDSLLLLKQKRTVLRQLKKQLTANRNLEGSLKVLPFIDSKCKKVLEKTIKFLEKQIEEMEEELTSLAEIEYKKQMDLLTSIKGIGATLAAALIIATGGFTYFDNAKQLTRYLGLSPTYQQSGTSVNVKGHINRNGDAYLRSQLYIGAMASLRCNTECKACFDRLRSNGKPGKLAIVAVANKLIRQAFAVVAHEKKYIDGYKSVKP

SEQ ID NO: 90499 - protein, 421 aa, unidentified
MPNIEIGVDFMVKENFIYVGIDLHKETHTAVMIDCYNQKLGEITFPNRPADFPKLVAKVKKCNTDGKTIVFGLENAYGYGRALAVWLIDKGYFVKDVNTAISHRQAKHRGAMYRKSDSDDAEAIALATLNMLDKLPDAYPNDAYWSLGQLVHRRDNIMKQRTRLVNQLHEQLCIAYPSYKQFFNDISRPTALYFWEHYPSRKYLKGKSVEDLRAELVPVSHNKCSTKTCEKILDAVASDKVKNNAYQDARDMVTLSIVSDLQHYDKQLAEVDKMLEQMYKMLGCTLTTIPGVNVITAVKILAEIGDIKRFSNANKLAQFAGIAPLHLSSSGKGKDVATKQGNRRLQATIYFLAIQMVQVSSKGTPRNSVVRAYYEKRKAEGKTSQQALICISRRLISIIYGMLKHGTEYRMPVVENAGEKL

SEQ ID NO: 90500 - protein, 383 aa, unidentified
MRCAGLSPRNGLGEDRNHGGADMAQVRTWAAFDVHVSGVVAATLDRDSGQLQVQRLPGRSEEVTAFTAALPGPVRATYEAGPSGFVLARRLEAAGVDCLVCAPGLIPRGPSDRVKTDRRDAERLVRLLAAGELHRVAVPSVAEEALRDLVRAREDLRGDLMRARHRLAKLLLRHEVRFEGPQANWTQAHLRWLAEVQMPEPASQTALEDYRGAVSALMIRREQLEGEIARALPESPWAQTAGRLVCMRGIDTLTAAGLCAEIGDFRRFEHPAQLMSYLGVVPSEHSSGERRRRGPITRSGSQHARRLLVEAAWHYRRPPRVAGNLARRQRGAEPQVIALAWKAQRRLHHVWNRMERRSKRRTVIAVAGARELAGFCWAVATVE

SEQ ID NO: 90501 - protein, 413 aa, unidentified
MAIEVLHTDCAGLDVHKKTIVACVLHSRPSVATSKLTRTFGATLDELERLRDWLLAEGCTHVGMEATGVYWKPVHNVLEGHLELLVANAEHIKVLKGRKTDVKDAEWIATLLAHGLLPASFIPDRAQRELRELTRFRTALIRDRARVVNRLQKTLEGANIKLGTVLSDIVGASGQRILDALLRGESDLEAVVELADPRILRSKRAELEQAILGRLEGPLAFLVGQELRQVRMVDEQVEACDGEITERMRPFADELERLDEIPGIGVRNAQVIVAELGPDLSRFPSARHLAAWAGLCPANKTSGGKRQRAGTRKGNPWVRQAMVEAGWAAGRAKKSYLGEQFRRLCGRLGRKRAVVAVGHSILTIVYFLLARGTRYEDLGVDYVPARQKAERERRAIKQVEALGYRVVREPSAP

SEQ ID NO: 90502 - protein, 428 aa, unidentified
MNTNDTTNTNDKTDPSAQPPQAWIGLDWGDQQHSFALQARGGQIETGTIEHSAENLHRWLKELEQRFGGRPVRLGIETSRGAVIAALLQYPWLEIYPLNPVTSARYRSAFKPSGAKDDLPDALVCLELARDHAAKLRPLQPQDPQTLKLSGLVEARRDLVDRRTTLLNQLTSLLKSYYPQALALLENLNTPMAVAFLKRWPEVIRLKAARPAAVKKFFYQHNIRSEELVKKRLALIEQAVALTTDEARLSVAVLQLHALVDQLEVFQKHVARLDAVIKSAFAAHPDAHLFRDLPGAGPQLAPRLCAAFGADRAAYPDPAGLQKYAGLAPVREKSGGQLWTHWRWNAPRFLRQSFVEWAGQTVRYCQWARLYYQRMTRKGKQHAVIIRALAFKWIRILWKCWQDRTAYDETRYLKQLIHRKSPNAVTAP

SEQ ID NO: 90503 - protein, 399 aa, unidentified
MNYFGIDISKRTSVIAHYQDNIFQKEFTIQNNKNGYNQLLNYLNEMDQFQFVFEATGIYSRGMVKFCRVNQIDFIEMNPLEARFKTSSLRAWKTDESDAHKLALLAPYLKASTSLDSNPDIFFELRERARFHVEIENDQNRLKIMIIELLHQTFPGLEKLFKNRYSKIALNIIEEYAHPDLVSQKDIESLTSSIMEYTNKNLSYQKAENYAERLNKIAQESYPNVKHSSFLVKKVRLLIQQLKSSIQQLSQLDKEMIELAQQLECFEVMHSIPGIGKLTVAMIIGELGDLTKFKTNKQLNAYVGIDIKRYQSGKTQYRDTINRRGNKKARRLLFLVVMNIIRGQRNYNNHIVDYYYKLRKQPNEKSHKTAVVACINRLLKTLHYLVNESKLYDYQMSPH

SEQ ID NO: 90504 - protein, 343 aa, unidentified
MEFYCGIDLGSRFAQVAVIDHDGRLLVQRKVRCELGAVLELLGAFEPRPKVVIESTFNWYWLVDGLQEAGYEVHLAHVLKLAMITGSKVKTDKRDAHVLAKLLRIGAIPEAFIYPREWRAPRDLLRRRLALVRKRAVEYGCIRRLLLRHGVLDHTRHSTTLLTSEQLAGWFDEPLVKLHARQEVERVRLYSHQIGELEAELLPLAVKHADFENLQTLPGVSEILGLTLLYETGPVTRFASARNYSSYCRVVSGIGQSSGVTRRRGRQSKQGNPFLKSAYNQAATHAVRNYPKFRSLFDRQVACHVGRVGKVVAYNTVAHKLAVATYYILRDKVSYREDLMFRD

SEQ ID NO: 90505 - protein, 429 aa, unidentified
MNYPPVAGIDVGKNFSEMCILSPNNEIYHRIKIYHDSIDSIQKAVGLLQKVEKDFAIRPVVVLESTGHYHKILFHYLSDSGFEVSIINPIQSDSIKNIGIRKVKNDKFDAHKIALLYRFSFIKTTVVPDDVIDCLKNLCRQYYKLGDELTTYKNRLIGTIDQVMLNFTDVFQNVYSKTALAVLDRYPSPKQILKANKKTLISLIEKTSKKGLVWSTEKYELLVLKAKEFKDLSISNPGNLAILKVNISMVRTLQEAQKDILDAINEIILADSLKDDPVLSPIINLLCSIPGIGVLTSATILAEVGNFSAFSSPNKLVAFFGIDPSVNQSGEFTGTRNKMSKRGSRLLRRVIFTTALANVRSKRNGDKINPVLYEFYQKKCINKPKKVALGAVMRKLVNIIFAVIRDKKPFELRTPEEHEELLLTRSLVA

SEQ ID NO: 90506 - protein, 352 aa, unidentified
MANKDFDELMSIGIDIGKDTFHIVGFDPSGQRVLRKQIKRLALVATFEKLPRCIVGMEACLSAHFVSRTLREMGFEPRIIPAIYVKPFSKGQKNDYNDAEAIAEAALRPNLQTVSEKSQDQLDLQALHRVRSRLVSRRTATINQIRAFLIEQGITVRKGLRALKNSFETILEERKDEISPRMRSILIGLYGDWMWMDNRIDKVSSEIEEISRTEDNCVNVMTVPGIGPMISTAMVAAIGEGEAFDRGRDFAAWVGLVPRQYSTGGRTVLGRITKRGSRYLRMLFVQAAKIIMMRPHRWPDFSFGEWLTRACERMHRNKTAVALANKLARMAWSILRHKTAFDAPRDEVAIGV

SEQ ID NO: 90507 - protein, 402 aa, unidentified
MNAVGIDVSKGKSMVSVLRPFGEVVAKPFSVGHTGSELKELADYLKSLDGETRVVMEHTGRYYEPVARFLHDEGVFVSAVNPKLIKDYGNNTLRKVKTDKADSRKIARYGLDNWAELRQHTPMDTIRMQLKTLNRQQSLYTKTKTMMKNNLIALLDQTYPGVNTLFDSPVREDGSQKWVDFATAFWHVDCVRNMSLTAFAERYRKWCKRHGYNFSQSKAVEVHAGAQDLIAMLPRDALTKTMVRQAIDALNAVSASLERLKAEMQALAAQLPEYPVVMAMYGVGDSLGPQLMAELGDVTRFTHRNAITAFAGVDPGADQSGTHEAKSTRVSKSGPPELRRALFLVMDCLLKTQPQDDPVYRFMDKKRAEGKPYLVYMTAGANKFLRIYYGRVKEYLASLEGN

SEQ ID NO: 90508 - protein, 348 aa, unidentified
MAIGTSTNAVATIGIDIGKNSFHLIGLDDRGAIVLRQKRSRRQIETKFANMAPCLIGMEACVGAHHLSRRLQALGHDTRMMPALYVKAYLKGQKNDFRDAEAIAEAVQRPTMRFVPTKTMDQLDLQALHRSRSRLVRQRTAVINQIRAFLLERGIAVRQGPQALRRAMPEILARPGDVLSPRIIHIIEGLCSDWRHLDTRVDDLTAQIETVAGGDEACQRVMSIPGIGPLTSSAMVASIGDGSAFRRGRDFSAWLGLVPRQMSTGDRTILGGISKRGNKHLRTLFIQGAWVILMRSKNWANYSFGRWLEAASKRLHRCVLVVALANKLARIAWSVLNGRQSYQASLAA

SEQ ID NO: 90509 - protein, 402 aa, unidentified
MNAVGIDVSKGKSMVAIMRPFGEIVSAPFEIKHTASDIHSLVELINSVEGESRIVMEHTGRYYEVLAHQLSKANLFVSAINPKLIKDFDNDSLRKVKSDKADAVKIARYALDKWQNLKQYNVMDELRNQLKTMNRQFGFYMKHKTAMKNNLIGILDQTYPGVNTYFDSPARSDGSQKWVDFASTYWHVDCVRKMSLNAFIDHYQNWCKRKKYNFSQSKAEEIYGKAKELVPVLPKDAITKLIIKQAVYQLNSASTTVESLRTLMNETASKLPEYPVVMAMKGVGTSLGSQLMAEIGDVSRFTHKSAITAFAGVDPGVNESGSYEQKSVPTSKRGSSDLRKTLFQVMDVLIKTHPQDDPVYQFLDKKRAQGKPYYVYMTAGANKFLRIYYGRVKEYLSSLPES

SEQ ID NO: 90510 - protein, 345 aa, unidentified
MQTMYYIGLDVHKKKISYCVKDGSGHIHAQGAIPAARSDLDRWMKTLPAPWTAAMEATIFTGWIYDHLKPHAAALKVAHPLMLRAIAAAKKKNDRIDAHKIADCLRCDFLPECYMASTEIRERRRTLRYRNLLVHQAVQLKNKISGLLMEAGVSYNKQKLHKVGYFKDLLAINPDINEGLKPLLRLCRETLVRLQKTESALVRSLQRDSLLAERVQRLMTIPAVGPITALTWALEVGDVKRFSSIKKAISYCGLCGAEKSSADTVKRTPISKQRNKHLQSVLVEAAKMAPRLSSELALIYDREKQKGNANRATLAVARKLVAYLVAIDRSQRDFLVVEKENCAAA

SEQ ID NO: 90511 - protein, 363 aa, unidentified
MQGKEVSKQETAGKSSVGIDVSKSWLDVHVLPSGQAQRFANTEVGIRQLKRWLGRFALGLVVVEATGKWHRQTRRSLHASGLPVAVVDPFRVRMFAKAQGIWAKTDRLDARVLAQFAAVMAPPQRPPASDALEALQELVAARDSAVAEQTALKNQLAAAASPFLIRQLQDRLARIAADIEALAGEIRRLIAADPGLARRHAILVSIPSIGDTIAATLVASLAELGTCSSRQIGLLAGLAPVADDSGARQGVRVIWGRPPARAPRPLPRGALGRPPQRRPESLPRTPDRQRQEAKVRHHRRGPQARRAGQQPHRSGPPLDAKSAPTGLTPNTDAFPDDCSASGRRSEKGRSGHPRLGRRGLKRN

SEQ ID NO: 90512 - protein, 370 aa, unidentified
MSSVSHQGFTHLGLDVSKDWIAVAALAPDRDRATVQKIFHDEVSVRRLIGRFDDRSKLWACYEAGPTGYDLYRLLVGMGVRCDLIAPSLIPKRRGDRVKTDKRDARHLAGLHRAGQLTPIGVPSPAQEAVRDLCRTRGDMVEDLTRARNRLTKFLLRHSVVWRDGSNWTFKHQRWLAGLRFDDQALAATFAHYRATVELRDNSLAAIEEDLAPYCDRAPFGDQVHHLAAYRGVTRMGGLCMAAEVFDWRRFPAARSFMSFTGLVPSENSTGLSEHRGNITHAGNRHLRAQLVEAAWAYQHRPHVGAGIAARHDGLAPEVIAGAWAAQVRLSTRFRKHAARKNVRSVVAAAIARELAGFLWAEMTADSIAP

SEQ ID NO: 90513 - protein, 351 aa, unidentified
MLSEVVDAVVGIDTHRDTHQVEIALPTGTPITTITISNDSGGFAELLAWIIDHAPGPRVAVSIEGTRSYGIGLARAIAAAGLIVIECEQPNRKTRRGRGKSDPIDAHLAVLTALRCDTDRLPTPRADGDREALRILLGARHDLTTSHTAQTNRLRALLLGGDDLDRQIARARLTDTVLAGLTRRRCPAGADRAHAVRHAEIRRLAVAVRDGARALTANRAQLAGIVDDLAPGLTDRRGVGPVTAAQVIISFSHPGRCRNDAAFAALSGTSPLEASSGRTVRHRLNRGGDRALNRAIHTIALTRMRCCDKTRTYVTRRTAEGKTPREIRRCLKRYITRELYRTLTTTMIIAI

SEQ ID NO: 90514 - protein, 334 aa, unidentified
MSQEKYIGMDVHQATISVAVMDAGGKLIMECLLETKAATIVEFMEGLHGTLWLTFEEGTSAAWLYDLLKPHVSRLVVCDPRKNARLKDGNKSDRIDARKLAELLRTNQVKPVYHGEHGVRTLKELGRSYLTITKDVTRVMNRVKALYRSWAIPCAGTTVYAPRHRAEWLAKIAEPGVRVRAERLYQQLDLLQPVRLEARRELLVESHKHSAVKLVRQIPSMGPIRAALLVALLQTPHRFRTKRQLWAYIGFAVETHDSGEYRYVRGKLQRNRERITVRGLNDNHNNELKNLFKGAAISASTRPGPLRDFYVGLRKGCGRPWPVSPWHGRLPLSV

SEQ ID NO: 90515 - protein, 395 aa, unidentified
MNTLALGWDVHRKFSKVSLQEMGDEDQISVRERARLEHYDREAMRQWLSRIPAGTPVALEAAFGWPWIADLLEEVGLDPHLGHPPAIKVLARHEAKGDRCDADRLAKFQLRGILPESYLAPPEVRQRRERMRYRIALVRLHTGVKNRVQAILHRLGILHSFSDLFGKGGRAFLEKLDLPEASQAVLDGYLRLLDHLREEIERVEQWMRRNLDQDEVVRWLKTLPGIGLILAHVIRAEIGEIERFPSYRHLGRYSGLAPLSDDSADRHGRRHCSPACNHTLRWALVEAATGVLATKGTKAWRLRRLYARLTGGGRYNKNQAKVALARELSKLVYVVWSKGEPYMETPPPRPGSSTENRPASRTRKNGKTAKTTLRPDQPRHPMVRRRHTADGQTRL

SEQ ID NO: 90516 - protein, 450 aa, unidentified
MGLQTINPHAAGIDVGSERLYVAVVDGAVKVFDAFTESLHALRDHLLAAEVQTVAMEATGVYWIPVCDVLEAAGIEVCVVNGAHVKSLPGRKSDMEDCQWLATLHSHGLLRGGFVPTPIIRRLRDYQRLRQDHVRMGSAHIQHMQKALDRMNVKIHDVLSDLTGMSGLAMVRAIVKGVRAPLMLLELCDVQVVKRKREPLLKALRGNWQREHVFALQQALAGWEFYQQQIEQCDAEIALVLQELAAAAPLPAPPASPRPDTATQQPLAPAKRIHHNAPHIGDLKTLLVRITGGHDLSALPALTDYTVLQLISEIGTDMSRWPTEKHFTAWLGLAPSSRRSGKRRRREKRFRGRAAQILCVGARSLARSKYLALGGFYRRLRATRGPQVANIATARKLAVLVYNTLVHGLDYVEQGLERYEAVYKAQCLKRLERNARNFGLTLVPLSHQNA

SEQ ID NO: 90517 - protein, 385 aa, unidentified
MDQTSSSAISTNTLHCALELSRNSWLLAIQFPDREQPSLYPIEGGNTEKLMAKLTAALDCWAKVSGSPPAITLCYEVGYDAFWLARFLMGRGIECLVIDPGSLQVNRRGRRVKTDRIDVKMLLRTLIAWCRGERHVWSLVRIPSIDEEDLRRSHRERGRLVRERTAHINRIKGLLFGQGIRGINVKSKYKTLAVDNLVTGDGHRLPPRLACEIARQIQRLAMVQEQIAKIERERDTAPTPCEATERKRHLLLQLKSIGPAISALLSREVYYRQFANRRQVGSFLGLTPSPYNSGAEERCQGISRAGSGHVRAIMIETAWLWIRHQPKSALTRWFVERTAGQNTRVRKIMIVAVARKLAIALWRYVEHGMVPQGAILNPPTTGNAR

SEQ ID NO: 90518 - protein, 409 aa, unidentified
MDVIYERCCGLDVHKRTVTACLLTTKPEGGRQQETRTFGTMTDDLLTLADWLAQAGCSHVAMEATGAYWKPVYNILEGQFETLVVNAYHVKAVPGRKTDVRDAEWLADLLQHGLLRGSFIPDRPQRELRELTRYRTSLVRERASEVNRLQKTLEGANIKLASVATDILGATGRAILEALATGEGEAPSLAGLARGSLRQKRRELERALTAPVTDHQRLLIREHLAHIAYLDEAIGRLNHEIGERLRPFEDTLARLQTIPGVGRRTAEVLLAEVGTDISRFPTHRHLASWAGLCPGNNESAGKQRTGHTRKGSPWLRSALVESAWAAARTKQSYLSAQYHRLAARRGGKRAALAVAHSILVIAYYIMARGQTYDDLGGNYFDERDRRQVERRLVKRLEDLGYSVTLEAVA

SEQ ID NO: 90519 - protein, 396 aa, unidentified
MLRTNLQKQNDYTGQDFYIGLDVHKQSWYVTIRSLGIEVGHFTQAPDAAALHQYLQRNFPGGAYHSAYEAGFCGTGAHEQLCKAGIDNIIVHAADVPATDKQKKNKTDLHDSRAIAGHLERGNLKGIYVLNQEQQELRSLFRLRECKVKDTTRANNRLKSFLMYYGITIPGTVSKRGDLTGRALTWLDIELRSAAGTIVLQQYIAELKYQRKQLFQLTNTLRGQVMAHDKQTYTNLISIPGMGCITAIGLITEIGDFSRFDDPDEYASHLGLCPWEDSSGDCIKTKGMQPRCNRHLRPLLVEASWHAIRKSRKLFAYYSKHAGGKNGKKAIVKVARKLAMIARAVATSGQPYQEDYQKKGAGQEPAKKMKPKRFSSGITEQHINKQPNYGLIPMPG

SEQ ID NO: 90520 - protein, 363 aa, unidentified
MKNYIFVGCDSHEKTLVNKVAWNDGEMDTKKFGASVAGRQKLIDYLRQRSQRAGGALVVVAYEASGHGFILCDQLKAAGFICHVLAPTKIERSSKQKRNKNDERDAERLLDILRGHYLAGTKLPAVWIPDLQTRDDREPVRARQDLSEKQTTVKTQVQMLLKRNGVEKPEGMGRSWTRRYRQWLQAVSEPGPAAQTGMRQALKSLLRQLEFLENEIDQMDHAMRELARTPRREPIVTELMKEKGVGLLMALKYATDIGDFKRFRRGRQVGAFFGIVPCSDESGEKNDRKGHITREGSPSARKVLCQATWSRVQHDKREREVYDRLVKKNPKKKKIALVACMRRLAVRLWHVGVQAQLQMEAAA

SEQ ID NO: 90521 - protein, 417 aa, unidentified
MNSPGNSREIERYIALDIHKEYVMVGGMNASQEWVIRARRIEMHQFRSWAVNNLRAGDAVVIETTTNVWDIYDIVAPLVTRAVVAHAGDVRQIAEARVKTDKQDIECLIRLLIVGMVPEVWVPPDHVRELRGMIAYRNRLVKTGAMIRNRLHSLLHRHNLPLPESGLCDRAWWENQTISKLEKLQVRQELGLLEKVEQNKAELDNELGKMSVGETWGKAATRILQLPGLGVVVTMTVLAAIGDIHRFEGPKQLVGYAGLGAGVHSSGKEHKDKGITKSGRKELRWAMIEAAWRAIRMSALWKERYEELKKRKGSSKAIVAIARKLLVTLWHVLSKEETDRNASEEDLSWKMLLWSWSLGSEARLGLTPKQFAKYSLIRLGVQNDVTSFMRGKVLRRIAPAEEVLARISELGLPRLDT

SEQ ID NO: 90522 - protein, 342 aa, unidentified
MAIVTIGLDLAKHVFQVHGVDETGQAVLRRQLRRGEIDAFFEGRSRCVVGIEACGSAHYWARRITALGHEVRLIAPTRVKAYVQRGKKNDANDAAAIAEAVTRPHMTFVPVKSAERQSVLILHRTRDLLVRQRTMLVNALRAHLAEFGIVAAQGWRRAKELIAGLGEAEIPDLARSALQLVADQIDECDGRVDALEKQIISWHRTNEDSRNLATIPGIGPITASAIAASVPDPTAFKNGRQMAAWLGLVPRQNSTGGKDRLSRITKAGDSYIRRLLVIGATSIVRYARGKAPGCGEWLKALLERKSARLASVALANKMARIAWSVLNRGEVYRENDPSLRAA

SEQ ID NO: 90523 - protein, 344 aa, unidentified
MSQVTTIGLDIAKNVFHAHGADERGAMVFSRKLTRAKLLDFFTGQPTCTVALEACGGAHHWARQLQAMGHEVRLIPPAYVKPFVKRNKNDAIDAEAICEAAQRPGMRFVAVKSEEQQAAGLVFRTRDLVVRQRTQLINAIRGHLAEYGWVAPRGTAYMTMLADLLEDDEMTSTLPEAARPMFKLMVDMLAELDKQVAVLDREIARRAKEDEAARRLMTIPGIGPIAATAIIALAPPIETFRKGRDFAAWLGLAPRQHSTGGKQRLGSISKMGERTIRRLLIIGGSSMVRQACRFGAPAGSWLERMLARKPRMLVSVALANKMARMVWALLTKNEDYRAPAAVVA

SEQ ID NO: 90524 - protein, 397 aa, unidentified
MIAVGIDISKAKSTVAVIDSDGTVLASPFTMAHTQPEMEAFVTYLKGLGEPTTILMEYTGHYHYPVLKKLQDEGFPVCIVNPYQMKKYGDVEIHKAKTDKKDALRIAAYALEKSYKLVPYSSMDQKYEDLKFLSRQYSQRITYVAKLKVQLIALLDQTMPGITRILPLNSRNPEKCALLLFIKRFKSFDEIHRIGKARFLASYDVLAKKTSERSASSKGLSIYELAVDSITTRGEDPYIWLSQNQCVDLLSTTQNAADEIISQMRNIAETIPEYKVLRAMHGVGDRLGPIILAEIGDIRRFHSGKALNSYAGNDAPPYQSEQFESRNRHISKRGSSALRKACYEVMQALKLTKPQNDPVYLFMLKKEQEGKPFNVAKMAGVNKFLRIYYARAMELYK

SEQ ID NO: 90525 - protein, 350 aa, unidentified
MIIIGADYHPGFQQIAFVDTDTGEFQERRLQHREEAEKFYRDLAAQGMRVRVGMEASGQARWFERLLSELHFELWIGDAAEIRTRRVRKQKTDRQDAQLILKLMLKDDFPQIWVPSWENRDLRQLLWHRHRMVQARTRIMNQLQAVALNEGLRCKKRLWRKHGREQLEAFRLAPWASRRRRDLLELMDRLNPTIAELSQAIEQEVEKCPEARRLMTHPGVGALTALAFVLIIGKAERFGSGKQVASYLGLVPLEDSSGNRRRLGHITKQGSSMMRFLLVEAAQVTVRSVPEWRSKYLHLMMRRGRKTAKVAMARKLAVRLYWMMRKGWDYQQWNKFGSHAGQPGHRDGVL

SEQ ID NO: 90526 - protein, 427 aa, unidentified
MAYKIAGIDVHKRMLHVVVSDVQVDGEYDFTRRVFGSLPEALRSLAAWLVEQQVEEVVMESTAQYWKPIWGTLERYWKPICQTREGALATSGTLHLAQALSNRGRRGRKKDFRDAERLVKRLVAHELVLSFVPNVEQRLWRTVVRTKYQLTRNRVQLQNRLEALLEEAHIKLSSLVSDLLGASARRMLEAIADGETNRETLAALADRGLRATQEQLQDALGVCQELNPVYRRLIKMVLDEVASIDKRIDQLNQEMANLLRAHEDQVQRLAEVPGLGVDSAQQIIAEVGATAATFPSEKHLSSWVGACPGDEESAEVNYSRRSPQGNRHMRRILNQAANAAVKLKGSIFEILYRRYVPRLGHNQTIGIIAHKLCRLVWKILHRGIRYQERGPEVSKASKQKRTRKMIRQLRRLGYRIEPSASQSAITA

SEQ ID NO: 90527 - protein, 388 aa, unidentified
MNYVGIDISKYKHDCFIITDLGEVVNEGFSFTNDAEGFATLLSELKRLDADNVRIGFESTGHYGVNLKLFIHKNGYSFMEINPVFVKEYIRSQSLRRTHTDKLDPKHIAGYLMEKAYRPHQTSFYNLFSLKQLTRLRADLVRQRSRCLVQLTNVMDCVFPEFKPFFGNKFSVTALYILANYHSPEKIANMNVKSYDILRRKSHGKFSMDKFVKLKALAKTTVGMYTDYYGLQIDTILDVFSQLDCKVDALDKEITSIIADMNPPTLSINGVGPVSAAIIISEVGDFSRFSKSGKLLSFAGLEPGYFQSGQHEHNGHMVKHGSSHLRCAIMNCARAIRLHNEVFAAYYLKKISEGKDHEVALSHVAKKLVRLIYTLETKGIMFDPEKLR

SEQ ID NO: 90528 - protein, 393 aa, unidentified
MIYVGIDVASKKHDIVILNEVGEIFNKHFTIPNTMKGYKKLLSEINLAKEFFNDSQVRIGLESTGHYSRNILYFLILKGYSVTLINPLLTNMDRKASSVRKTKTDSIDAKAICMFLLRNQNDFKPYTLLSYHIDELKILVRQRKSLKKQSNRTMNQLHAFIDQAFPEYYKVFKKINSNASLKLLAHYASISEFKRVRVNTLAQLIKKASKGHHGLNKAQLIKTLIKDSIGIDSHALSLSIKQSVNMIEEINSQINQINISIKDHIDNSNTTLLSIPGIGYQTGAIILAEIGDIHRFKSDDELLAYAGLDPSVYQSGNYNGSFKISKRGSSILRWAIFQAAKVAVIHDPVFNAYYLKKINEGKHYFTVIGHVTKKLLRVIRSILKTNSVYSISH

SEQ ID NO: 90529 - protein, 351 aa, unidentified
MKTKNTACPKLFIGIDIHKTSWSIRIATDLFQGKRMTMPSDPENLRRYVEKNFPDHEVNCAYEAGCCGYSAHRAFATFGWHNIVFNPSDIARTGKSQYQKTDGIDADLICRELRDNRLTGICIPDVEREHLRCLFRRRNDLVKDIRQIKSQIKAQLLFMGIKIPTEHDNAYWSHAFRKWIESLALDNETAKSAIMSRLQQFEFLDKSVREVSNELRKYCRTHYKKDYRLLRSIPGIGGIVACGILSELGDLRRFGNFKQLAAYVGLMPAIHQSGDNTRSSGINPRGNSIMRSYFVEAAWQALRFDPVMQQYYRTHSGRDSKSILIKVARKLLSRVHAVIKTETPYQIGVLA

SEQ ID NO: 90530 - protein, 401 aa, unidentified
MRYYAGLDVSMQDTTIAIVNESGDLFRQMVSKTDPAAIAKALNSTGVQLEKAGIESASMAFWLIHGLQKLSVPAICIDSRTMSRLIELKINKTDKNDARSIANAIRGNHYREVHLKDQKSIEMTMHMNIRRQLVCTRTKLKNGVRGFIKSEGIRLGAVSHDKFSATVRQAIETSSSTVQVAIEPLLNTYETVSQNIAAMDQATEALGAQNPIVALLMSVPGVGLITALTFIATIDDPHRFKKARNVGAYLGLTPGQYSSGQTTQMKGISKCGSSELRSLLIECGMSILTKSVVWTKLKAWGLKILRKHGARKAACAVARKLAVILLKIWQTNTPFNFGTQEEQAKAEQERLSELAREEASQKKKSKTQSKKAKPKQEIRKGQQAPALTPSNQRATMEVLQT

SEQ ID NO: 90531 - protein, 429 aa, unidentified
MNLRPIAGIDVGKFFSEMAILSPSNEVIARMKIRHDSTTDVERAVELLKKTEKDFGSRPFVVMESTGHYHKILFHSLCKAGLEVSIINPIQTDSIKNIGIRKVKNDKVDARKIALLYRFQELKTTNIPNEDIECLRSLCRQYYKLNDELTAYKNRLTGIVDQLMLNFKDVFSNIFSKAAIAVLEEYPTPAAILKANRNKLISLIQKNSRKSLKWSTAKYELLVSKAREFAPLSVHNSSNIAMLGVYISMIRTLEDNLAKVLKAIHLLIAEDMAKDMPMLALTLELLQSLPGIGLLTAATILAEIGDFSAFSKPGKLVAYFGIDPSVMQSGEFTGTRNKMSKRGSRLLRRVLFTTALANIRTKRNKMACNPVLLEFYKQKCQSKPKKVALGAVMHKIVNYIFAVLRDRKPYELRSPQEHAQMLAAKHTAA

SEQ ID NO: 90532 - protein, 339 aa, unidentified
MRLYLGIDLHSSNSYLGIIDETGKRVFKRKLPNDPEMILAALSPYKNDIVHIVVESTYNWYWLVDLLMAEGYTLHLANPTVIQKYSGLKYADDQHDAFWLAEMLRLHILPEGYIYPKEDRPIRDLLRKRSHLVKLRTSLVISLQNIITRNNGARIKGELLKALITDHAAPFLEANEDLALAGKGSKASIDFLTRQIKAIQANIEGKVALREPYAQLVTIHGVGKILGLTIMLETGHISRFDKVGNYVSYCRKVSSKWISNDKGKGKGNRKNGNKYLAWAFSEAAELARRYYPEARAFYNRKLKHTNVAIAHGALAHKLARAAYYIMRDQVPFMPKKLFA

SEQ ID NO: 90533 - protein, 360 aa, unidentified
MNSIALGRQDVIVGVDTHKDEHVAVALDGLGGRLGERALPANPDGYKRLMDWANALGAVHAYGVEGTGSYGNGLARFLRRHACHVVEVIRPPRKGERRLSGKSDSIDAEHAAREVLAGKAATTPKLANGVVEAIRLVKIARGSAVNARSQAMITLKSVLVTAPDDLRHQLEPLTNYKLVNACAALGLKGRLADPAVATNHVLASLAQRWLELHKEVAAHSQVLKTLTHAAAPQLVGAFGVGTDIAADLLVAAGDNTDRIRSEAAFAKLCGVCPIPAGSGKTNGRHRLNRGGNRHANAALYRAVVVRLRWHAPTIAYMERRTAEGLSKREIIRCLKRYLVREIYGLLPEPSGVAGGLASAA

SEQ ID NO: 90534 - protein, 322 aa, unidentified
MEVLLTNVAGMDVHQKEIVVCVLSGTEDGSLQKEINTFSTLTKSLYELLEWLEERQVTHIAMESTGIYWKPVYNILEGYFDITLANAQRIKNVPGRKTDVSDSEWIAKLLRHGLIEKSFVPSQDLRELRDLTRLRKKWIGNLTAEKNRISKVLECSNIKLGSVISDIFGVSGRKMLTRLVDQGYLDQNDVDACIHHSLKKKANTISESLFGTLNDHQIFMIRSSWNHIEYIEKSIQKLEKRIDDLLQSYQEEKELLLSIPGVKEHTVACIIAEIGTDMSQFPTSRHLASWAGVSPGNNESAGKKKVEKVFKEIPISNQHFVK

SEQ ID NO: 90535 - protein, 397 aa, unidentified
MNKQANVSYTAHIGIDWADTKHDVCIQAAGEEHRTFTCLPHKAEEIEAWALDLHQRFGGQMAVALELSKGPLVYALQKYDFFVIFPVHPSTLAKYREAFTPSRAKDDPTDAELALDLILRHPNRFKPLNPQSVEMRTLTSLVEQRRRLVNDRVRLTNRLRNALKQYYPQALQWFDRIDTSLFCDFIERWPTLVEAKRARRTTLESFFRTHNMRFTHVLETRLESIKTASPLTSDAAVIAPHRLQALALIDSLRAILIAIKRFDQEIAELAPKHPDYALFDALPGAGPSLAPRLLVAFGEQRERFDSAAELQRYAGIAPVTERSGKKHWVHWRWQCSTFLRQTFVEWAAQTINKSFWAGAYYRQQREKGCTYNAAVRALAFKWIRILYRCWYTRTPYN

SEQ ID NO: 90536 - protein, 360 aa, unidentified
MADMKECCCGVDVHKSFIVAAIAKLVGKEVKFTKYMRFSTYTDGLRKFKKWLQANECEYVCMESTGKYYIPVYRIIADGTIHVDVVHPKYVKAPKGKKTDKRDAKRIADMYMRDHIAEYSFIPPADILALRDLTRYRRKTINTISAEKNRMSNNLTVSCIKLDEVVSDVYGKTGQLIVREIIATGGCDFDPAPFIQKRVKAPVEDFRRALDGNITPSILAKMKLGQERLDFLNKQKAELETILESLSKDFNRQHEILSSAPGIDFISAVSIIAEIGVDMNVFGNVKKFLSWCGTVPQNNESAGKKYSTRIGKGNIWLKPVIVQCALAAIKDKKHPEMRDKYLAKIKRLRRAFRTDQFPRA

SEQ ID NO: 90537 - protein, 298 aa, unidentified
MSKINSHHSHANIIYMGIDVHEKTYNISLFYQGENILSRQCPADYDSIRKILKKYSSFSCRAVYEAGAFGYGLYDQLKTDGVNVIVTPPSKVLRSQDDKVKTDKRDAAKLAHHLSAGLLKSVCVPPLQVRYDRELLRTRDQLVDQRRRIYQQIQSKLRYHGLPLRSKGTITALNKAALLQMPLPAPIRIAFSELICLYDFYSQRLRFLRNELLKLAESKPYATAIRLLQSIPGVGLFASLAWVLELPAMKYFLTDDKLANFLGLTPSEVSSGSKRRLGSISKTGNPKIRWLPSNPAGS

SEQ ID NO: 90538 - protein, 346 aa, unidentified
MKINRVGIDLAKNVFQLHGADYKGKTVWKRRLSRGKWLKVLFDTVEPGTEIGMEACAGAHHWARQLMQRGYPVKVIPPQFVKPFIKSNKNDANDAQAICEAMGRPNMYPVKVKTVEQQDLQAMHRIRNEIKSHRIAKANQIRGLVTEYGLVAPLQLHALRRAIPEWLEDADNGLTFLFRQLLQGLWGDLYALDQRMTELDKQIAVVAQEDPTARRLQQLRGVGPLIATALVATMGDARQYPKGRDMAAAIGLTPKQHSSGGKDRLLGISKRGDAYLRCLLVHGARSAVRTAKDKEDRLSRWIISLQARRHPNVVAVALANKMARMAWVMMTSGVDYEPDLAAASVN

SEQ ID NO: 90539 - protein, 344 aa, unidentified
MEPMYYIGLDVHKRKISYCVKDSGGKIYAEGLLPATRLDLDLWMKTLPQPWSAAMEATMFTGWIYDHLKPHAAALKVAHPLMLRAIAAAKKKNDRVDASKICDCLRCDFLPECYMASTAIRERRRTLRYRNLLVRQMVQMKIKSSSLLMEAGVSYNKQRLHKAGYFRELLASNPDIDEGLRSLLRLCRETVVRLQKTESAMVRSLERDSLLMDRVERLMTIPAVGPITALTWALEVGDVQRFSSIKKAISYCGLCGAERSSGNTVQRTPLSKQRNKHLQTTLIEAAKMAPRNSADLAMLYDREKQKGNANRATLAVARKLVAYLMAVDRGQRNFQVVETNCIAA

SEQ ID NO: 90540 - protein, 309 aa, unidentified
MQAIIAGIDVSKDHLDVALRPSGEVLRVARAAAGLEALVARLQKAAPQIVALEATGGFETVVTAALAAARLPVVVVNPAQVRAFAKAIGQRAKTDPIDAGVIAHFAEATRPQIRPLPDAETRLLADLVARRRQIIEMIGAESQRLKRAPERLSKSIARLLKALQKELTSVDGDIDDAVRGSPAWREKEDLLTSVPGIGKTIARTLIAQLPELGRLDRKQIAALAGLAPFTRQSGAWRGKSFIGGGRVAVRAALFMGAMVARRHNPVLKAFFDRLVAAGKPRMVALIAVARKLLTILNAVLRDQKPWQIA

SEQ ID NO: 90541 - protein, 347 aa, unidentified
MKQVTTIGLDLAKAVFQVHGVDALGAVTLRRAVRRRQVLAFFAKLPPCLVGMEACATAHYWAREIARLGHDVRLIPPAYAKAYVRRNKNDPADAAAICEAVSRPSMRFVAIKTEAQQAAAGIHKVRAMLIKQRTMLINTLRGLMAEFGIVVAEGPQHVGELVAILADPADRPIPTPLHEGLLVIVETLRGLERRIEIVDKQILDWGRSNQTCRHLITIPGYGPILSSAMAAIAVDPAAFGSGRHFSASLGLVPRQDGTGGKVKLGPISKRGNSYLRRLLVNGAMSVLCSKRAQQDPWLVKLLATKERKVAACALANKMARIGWAVMIRQQAYRRPRQDQPCPDLAGA

SEQ ID NO: 90542 - protein, 482 aa, unidentified
MKKKNIYVNQSQELLTLFEEAGDSAKIMCVPIDYAKKDHVVMFCNGHGDILRKPFSVKNNPEGVKYITEQVSRSCRHHKINQNHVFFGGEDVGSYAENFASTLRSGGWLVAGVNAHDAKKQRANLQASTDRLDLMGIAAMLLNRRANCSPAQSGIYRNLRTLVRHRRRLVVMTTEVRNRIHAIVDRLFPGFLDERKSGITPFSKSSLYLMENRFSASQIRRRRRSTLIEALRGLGTPKPDCAVAKLEEYAQQVLKTPDEYVSTLQLSMAQHVKHYRCLQENIEQLERETALWLAQTQGAFLTSVRGIGIVLAAGVTAEIGDPFEQKPLNNLVSYSGIIPRVIQTGGPEGEIYTGKVAKRSNRILKDYVVQSASHLGLHGPEDLMIDHKRRDAAGQHADFGIARRYLRMAMCLMRTSQVYLPPRLRKPGIKPEERAGYYLMTWPYLRDKWQKLGALEAAFSEDRPLGRWRNMVQEFYKIKLTL

SEQ ID NO: 90543 - protein, 331 aa, unidentified
MSMDAQGGATKHVRPNAGVDVSKEFLDLCWQDRHQRVGNDEAGWAQAIEVFRSADVDLVVLEATGNLERGFVLALQQAGLEVARINPRQARDFAKSLGQLAKTDRVDARVLRDLADVLARHEKRSQYLAPVHDEKRQALNDLMVRRRQLVEMRVAESNHLAAAPKRTARGVLSSLKFLDKQIAAIDKEIDQHIDDHFDGLRELLRSAKGVGPVTTVSLLAALPELGRLDRRAISKLVGVAPLAADSGKRRGQRHVWGGRAPVRAVLYMAALCAKKHNPVIRAFWTRLIAAGKPKKVALVACMRKLLTILNAMVRDNRAWDEAKAQLGTANT

SEQ ID NO: 90544 - protein, 374 aa, unidentified
MDSSLSNDGIMMCQTGDVKFFQLTEREESEMKISVFSVDLAKGKFQVHGFDALGERRLAKTLGRAGMQRLFSAQEEQGEVVMEACGSAHYWGRYLERLGYRVRLIAAQHVKPFVVGNKTDANDADAIYEGSRRAGIRSVSIKSIAQQDALVVHAHRERLVKARTALVNQLRGELAERGVVFGKKTGVLRRGVVAVLEQEAGGEVTEYLQRWVSERLDEWRSLDERIKGCEREMQQCYRASPACVQIGAVEGIGVITATATVATVGDARQYESGRHFSAWLGLTPKERSSGQTRHLSGITKRGNSYLRKLFVHGARAAVRAAQRKTDARSRWINALVERRGHNKAVVALANKNARIVWALLSSGECYRTPMAAAA

SEQ ID NO: 90545 - protein, 367 aa, unidentified
MPSIALERSDVIVGVDTHKDEHVAFAIDGLGGTLDEPRFFPANPDGYADMLSWATGLGDLHAFGVEGCGSYGSGLARFLRRSEHTVREVARPPRKGERRLSGKSDAIDAEHAARVLLSGTGSATPKLADGQIEAIRLVKIARDTAVKGHSSAIITLRAVLVTGSDALRAGLEPLTAHKLVVACAGLDTAGDIADPEVAMRATLACLAQRWLTLHEEIKIHTSHLKTLTRAAAPELLDRFGIGFDSAAEMLVTAGDNTDRIRSEAAFAKLCGACPVPAGSGKTSGRHRLNRGGNRQANAALYRIIVVRMRWHPPTIAYVQRRTEQGLTKREIIRCLKRFVAREIYNLLPDPSGPQHPLEAPNNRSSTT

SEQ ID NO: 90546 - protein, 460 aa, unidentified
MPNQRGEEQQRKNRRRRNWEEGFPELNRNAAGIDVGNAEHYVAVPAGRDAEPVRSFGSFTADLHRMAQWLKACGIETVVMQATGVYWVALYQILEDHGFQVNVVNARHTKTLPGRKTDVLECQWLQKLHTFGLLNSSFRPTEEIRTLRTYLRQRETLVAAASTCVQHMQKTLTQMNVQLANVISDISGATGMAILRAIVAGERDPDKLASRKDSRIHATKEQIAQSLEGDWREELLFVLQQSLELYDTYLGKIAECDRRTEAHLKTMPPKAGATLPPLPETAPARKREIRFNLRDHLHRIAGVDLTKINGLEVQTVQTILSEVGVDMSCWNTEKSFASWLGLCPDNRVSGGKVLKRGTRQVVNRAATALRLAAWSLIRSQSALGANFRRLRSRLGAPKAITAMAHKLARLIYRMLKFGAEYIDKGMEAYESRYRQQKMKWLTKQAAAMNLQLVPSPQVTS

SEQ ID NO: 90547 - protein, 266 aa, unidentified
MQHYVGLDVSVKETSVCIVDKAGKVMREVKVATKPEAILAVLTEEGLAIERIGLEAGPLSQWLYSALAGAGLPVICVETRHMKAALSAQINKSDRNDARGIAQMMRVGLYRPVHVKTRASQKRRMLLTSRQLLQAKALDIENDLRGTLRNFGLKVGMVGTVKFEARIRELVADHPDLAAIVEPLLIARRVLREQLGVLHRQLLEIVRHDEVCRRLMTTPGVGPVVALTFRATVDVPSRFTSSKAVGAAFGLTPRRHQSGEIDRPWS

SEQ ID NO: 90548 - protein, 325 aa, unidentified
MQVHFVDEHTGEIIDKQVKREKFLEYFSNREPCLIGMEACGGSHHWARELQKLGHKVRLLKGRFVKAFVMGNKNDVMDARAIWLAVQQPVKSVAVKSEEQQATLGLHRMRQQLVKFRTAQINALHGLLLEFGETTHKGRAALAKEVPEALERLKERLPLYLINMLDEQYQRITELDEHLDHIEKQLQAVARQNETCQRLLNIPGVGPLIATAAVATMGDASAFKSGREFAAFIGLVPRQTGSGGKIRLLGISKRGDKYLRTLFIHGARAAALLTKEPGPWITELKKRRPASVAIVAMANKLARTVWAIAAHGRKYDKNHVSIRPD

SEQ ID NO: 90549 - protein, 374 aa, unidentified
MGASSRLRPRRDWKPAGGSVLRPRMSLELQSFLPYPNSCLGTSPHQQTRDTKMTMLSVCGIDVSKDRLDVMVLPEQQRSFASNDPAGWAELIEQLRGFSISAIGLEASGGYERGVMRALLAAGMPVRQINPFRLRQFANASGVLAKNDRLDARMIAAFVAIIPTRPVQRPAPVVERLAEVLRVRRQLSNEKVAAENAAGMLENAVLKRLSRRHIARLAADIDMLDEHLVESIGADPALAHRYRLLTSMPGVGPVLACTLIALLPELGRMSRKQVAAMVGVAPYAFESGKLKGKRCIWGGRAPVRHVLYMAALSACNWNPVLKMFHHRLAATGKLPKVVIVAVMRKMLTMLNAMVRDDFAWADRHRGRHSVPTAR

SEQ ID NO: 90550 - protein, 398 aa, unidentified
MTESSDYESVQVFIGVDVGKDTHHAVAINRSGKRLFDKALPNDENKLRSLISDLKQHGQILLVVDQPATIGALPVAVARSEGVLVGYLPGLAMRRIAALHAGEAKTDARDAAIIAEAARTLPHALRTLKLADEQIAELSMLCGFDDDLAAQTTQASNRIRGLLTQIHPALERVLGPRLEHPAVLDLLQRYPSPEKLASLGEKKLAAQLCKLAPRLGKRLAADIAQALAEQAVVVPGTNAAAVVLPRLALQLITLRKQRDEVALEVEQRVLAHPLYPVLTSMPGVGVRTAARLLTEVACRAFASAAHLAAYAGLAPVTRRSGSSIRGEHPSRRGNKALKRALFLSAFAALRDPLSRAYYTRKMSQGKRHNQALIALARRRCDVLFAMMRDGTFYTPQGS

SEQ ID NO: 90551 - protein, 395 aa, unidentified
MLYLGIDIGKNNHEAGLVEEDGTHRGKSLRFSNDQEGFSSLLRFLEQKVGENEPLCIGMEATGHYWLPLYSFLHGKGFKLHVINPIQSDSLRNFRIRQAKTDSVDCFLIAEVIRFGKFSETRLADEDILELRNLARFRESLKDSCADYKRQVVAVLDQVFPEYDLLFSNMFGESSKAFLKTCGTPEQVLELDTKALAALLRKASRGRHGEKKADEIRSLAERSVGVTICLDAFAFQLKILIEQIEFTEGQINEIDKKLAGRLKKLNSVILSIPGVGPATGAIILGEIGDVNRFQNPKKLVAFAGIDPTVTQSGNFSGTHNRFSKRGSPYLRRAIWMSAVVAARFDPVFKAFYEKKRSEGKAYGTAIGAVARKLTYTIFAVLKANRPYEVRINPEA

SEQ ID NO: 90552 - protein, 391 aa, unidentified
MIYVGIDVAKDKHDCFITNSDSEVLFKAFTIFNNLDGFNDLYQKIESVMEDVTKVKVGLEATGHYSYNLLGYLIDKGLPTYVINPLHTNLYRKSLSLRQTKTDKVDARTIASMLMSDVNLKSYSDTSYHNEELKSLTRYRFDKVKERAKLKTSVSRLVCILFPELEKLVPTLHMASVYALLSEFPSAKHVATAHLTRLTNLLSESSKGRYGKDTAITFRDSARASIGSNMPAKSLELKHTIKLIQELDSEIDEIENEIKIIMDEINSPILSIPGINYRMGAMIIAEIGDFNRFDSPDKILAYAGFSPSTYQSGQLDGAYAHMEKRGSRYLRYALYNATKYVCHWDPTFAAYLAKKRAEGKHYNVAISHAVKKLVRVIYHLEKTKQQYIKAA

SEQ ID NO: 90553 - protein, 274 aa, unidentified
MIKYHKHIGIDIGKYNFVVGIEGIKDTKEYENTSFGIFEFINDNKDILANSLTVVETTGGYELELLYSLCERGYVVHRADARKVKNFIRSYGNSAKTDKLDAKALGLYGKERADKLEVFKPESKQNIQLFRLVQRRNDLKQMLVAEKNRLQQANTDKFVKNSCINMIDVLSNQITEITNQVEVIISSDQLLKAKHEILKEINGIGNIVAFELLILLPELGKLTRRQIASLAGLAPKANDSGKYQGYRKVGHGRAGVKLYYSLLLCQPVIARLLV

SEQ ID NO: 90554 - protein, 371 aa, unidentified
MRIVVLGIDLGKNLCSLAGLDETGAVILRRRMKRASVLPFTAQLETCTVAMEACCGAHHLGRQLVAQGHVVRLMSPAYVKPYVKAQHHLGRQLVAQGHVVRLMSPAYVKPYVKAQKNDERDAEAIAEAATRPTMRYVEIKSEAQLEVQSLHRVRGRLVAERTALINQLRALMLERGIAVPQGRCKLARYLPAILADERNGLGPRLRRLIEDMREEWRSIDCRIKGFNDELAERVRNEDTAKRLIRIPGIGVLTATALVAAVGNAQTFSCGRDLAAWLGLVPRQATTGGKPRLLHISKRGNGYLRMLLIHGARTALPGLAKKDTPLGRWVKALLARAHRNIVTVALANKLARIAWAVLARDRQYVTVQAIGK

SEQ ID NO: 90555 - protein, 412 aa, unidentified
MKRIRDRVAGLDVHRDNVVACCRIVGEDGAVKVSKASFASNRKGLADLAAYLLDAGVETVALESTGVYWRSPYYALEGLVPELWLCNAQHVKNVPGRKSDLSDAEWLADVAAHGMVRPSFVPPPEIRELREITRYRKTQIAERSREIQRLEKVLQDAGVKITSVASHVWSASSRQMIEALIAGERNPKVLAEMAKSRMRSKIDLLEDVLPGHFGPHHAIVCRQVIDHIDFLDSSIKALTEEITTRLVPFEAAMGILTSVPGVSARTAEVIVAETGANMSPFPSAGQLCAWAGLAPASHESAGKHRPAGTRKGSPHLKTALTEAARSASRTKGSYYSALYSRIARRRGPNKACVAVANSMLATIWYLLTNGQLYEDPGADYFTRRHDPEVEARRLARRIEELGFAVSIGSAAA

SEQ ID NO: 90556 - protein, 429 aa, unidentified
MGAMSENEVLGQEPQFAALVGIDWADQKHAWCLQAAGTTQRESGEVEHTPEAVEAWVGQLCQRFGNRPIAVAVEQVKGALVFMLSKYEPLHLFPVPPTMSANLREALYPSGAKDDPRDADLLVDLLWQHRDKLRRLSPDSEATRRVQNLVEERRHLVEEKTAQSNRLTNHLKIYFPQMLEWFDRLDTELVCALLEQWPTLEELQRVPPARLRTFFRKQRCHYPELVERRLVGIRQAMPAIRDRAVIEAKSTVVKVSAQLIRSLIRGVADLDRKIEEAAAAHPDFFIFESLPGAGAVLAPRLLAAFGSQRERYANAAEVQAYSGIAPVTERSGKKKWIHFRWACPKFLRQSFHEWAGHSVAHSQWARSYYQQQRERGKGHHAAVRGLAFKWIRIVFRCWKDRVTYDESRYLAALAKRNSPLAAVAAGTIL

SEQ ID NO: 90557 - protein, 480 aa, unidentified
MERLYHCCAALDVHKASVVACRLRTLPSGGKEQEIQSFGTTTPELLRLLAWLQAWGVTHVAMESTGEYWKPVYNLLEGHVELLLVNARHVQQVPGRKTDVKDAEWLADLLRHGLLKASFVPGREQRDLRDLTRQRANLLAERTRVVNRIQKVLESANIKLATVATDLQGVSAQAMLVALVKGEASPEAMAELGRGRMQEKREELEAALTGNVREHQRFLLAAHLEQLAFLNRQIDQYSARIAAQINRMSAPPAPAGTEAAERPAADPSPPAGTAPPAADPGPPAAPGPVAAATPAPPGSAPAPRLPWTPLPPPTYRAAIALMDPIPGVNSVGAENVLAELGNDMRQYPSAAHASSWTGIAPGNHQSGGKRQAVKTPPGNKALRRALVIAAHGAVRTKDSYFGVLYRRVKGRRGHKRAIVAVAHALLGVIYYVLLRQQQYEELGAHYLDERQPEKSAQRLVRRLRELGYQVTVEAREPAAA

SEQ ID NO: 90558 - protein, 321 aa, unidentified
MTSQNETVCFGIDISKHWLDIAEYPSARVTRIDNTAAAIRGWLRTLPKGHQRIACESTGTYHRTLVELLIGAGHQVFLIDGFKLSRYRDTVGQRAKTDRHDARLIARYLAHEGTDLRPFCLPAPSVTELRGLLRRRATVVRSLGRIRQSMEDLPGFGRDVRVALARLTALIKQFEQRIASLINESGWTEPYRRILKIEGVGALTAAGLCAAFHRAPFSGADAFIAFLGLDVSVRDSGKKTGRRVLSKKGDSEMRRLLYNAAMAASRSTTWQPFYQRMLQRGFRRTQALVALARKLARVAFSLMKNAADYVPKQHENACGGT

SEQ ID NO: 90559 - protein, 411 aa, unidentified
MDSVLYVGIDTSLGAHVVCAMAADGQVVARTTVPNDQAGAEQFVAWLHPHAAPYARLAIGVEATSVYYVPLMEWLTQTPDLQRWQPTWYVLNPKVVQKFRETYVDRGKTDRADAALIADVMRFGRVTPWTPPDPRYAALQVLTRHRRQLSHLITQEKNRALVQLFCVWGQYAHTEEPFFSNVFGVASQTVLERYTPDTLAAIPLADLVAEIAAAGRQRLKAPDDIAQTLHRLARRAFRLHPDEQDARHQSLVLHLDTIRALEHQQQALDKVIARDMQAFRQTLTTIPGIGPVYGAGLLAEIGPIERFPSENALAKYAGLTWRPHQSGNFDADIRPLTRTGNVYLRYYFIEAAERVRVRDPQFKAFYEKKYHEATHHAHKRALVLTARQWVGVVYGMLTRGQIYDERKLMPH

SEQ ID NO: 90560 - protein, 352 aa, unidentified
MYEQSINAKYFCGIDLHKDNMFICLIDNMNKIHIHKRIPATYEALHHEIAPFIEDTAVGVESTFNYYWLQDACQKDNLQFYLGHALYMRVGVHKKKDDKLDSYRIAQLMRNGNFPFAYAFPSKFRGLRELLRERLKTVRLRSQHFTRFYIKLLQYSGWSQELSTNPAPNHILRQQYIRSINDQALKVVFQQISDNIDLLDAAINKIEKEARNLTTSYLPKQLKLVTSIPGIGFILGMTILYETDDINRFKSMQNYASYCRVISTQRSSSGKTVDGKNQKSGNTYLKLAYSQGACLAIRHSKEINAYYKKLTKKKGAPKARAIIKHKLAAAVYQILKKNTTFDISLFMKPVKS

SEQ ID NO: 90561 - protein, 326 aa, unidentified
MSIIELPILGIDISKAKFDVALLVDGKVKKTRVFENNLTGFKALSLWIIKHDITHLQACMEATGTYGDELATYLYDQGFEVSVVNPAQIKSFSGAQLNRAKTDKADAKLIAQFCASMHPMAWMPPPVHVRELQALVQRLAALLQMERQEQNRLGTAAPVTQPSIKAVLATIKAEIKAVERMIRDHIDHHPDLKDQSKLLDSIPGIGVATIARLLAFVGDVHRFNDAKALAAFVGLNPTVHQSGSSVRGKSRLSKKGNATIRKALYMPAVVARRYNPIIKEFAERLKKAGKSNMLIIGAVMRKLLHIIYGVLKSGKPFDANYAVKNA

SEQ ID NO: 90562 - protein, 441 aa, unidentified
MDHARSAASSPDATSNVFSTLTHYGAIDWGRGNHELCVVDATGAIVLEQSIDNTPEAWADLRAKLAALRAADGSPAVVGFAIETNCGPAVERLLEAALAVFPLNPKAAERYRDRKAPAGDKNDRFDAFCFADALRTDGHRWRTLRPQDPITQELRLLCRDEIALIGQRTALVNQLQAALHEYYPTAIAAFDDWTKSGAWEFVLAFPTPHHLASAGKRKWEKFLHAHKLYRAETAAKRIELFGVAARWASPNPAVTAAKSLLATTCAKQLRTLQAQLDEYRARIGELFDKHPDHDLFGSLPGAGEKIAPRLLAELGADREIFQDPQSLQCFAGVAPVTRQSGRSRIVSFRRACNMFLRATVHLWADLSRTKAPWAEAYYRHKREQGADHAAALRCLGMRWLKILWKMWQERKPYDGERHLRDQTKHGSWVISLLPQVAVQQH

SEQ ID NO: 90563 - protein, 314 aa, unidentified
MTSTDLVVGIDISKGKLDVGVVPTLERWTTDNDCDGLTQLAKKVSDLSPTLVVMEATGGLERPVRAALESAGLRCAVVNPRQVRDFAKAMGILAKTDSLDALVLAKYGQKVEPEARPAKDAETQELEAILTRRRQLIDILTAEKNRLGGVASRRVRMSLEEHIAWLEKRLDDLDKEMNVFIKKMPEWREKGKIIESVPGVGPVTTLTLLAVLPELGTLDRKKISALSGLAPFNQDSGKFRGQRRIWGGRAAVRSVLYMAAMSAKKWNPVIKVFYDRLIGAGKKFKVAITACMHKMLIILNSMVRNGQKWHAESI

SEQ ID NO: 90564 - protein, 348 aa, unidentified
MRFYNQQHQYYCGGDLHARTLFVHILDSEGRTRFERNLPACPKAFLDAVAPFRDGLVVGVECMFAWYWLADLCEAERIPFVLGHALAMKAIHGGKTKTDRIDAAKLAGLLRGGVFPQAYVYPKAKRATRDLLRRRSNFVRQRAQLIAHIQNTNSQYNHPPFAKKLTYKGNRNDDIVDRFADDSTKMMVASDLTMIAAYDAQLQKLETHLQQHAKIDDPVTYQFLRTVPGIGPVLGLTMLYEIDNIHRFPEVGNFLSYSRLVSCIHESAGKVKGVGGKKIGNAHLKWAFGEAASLMLRSFPAAKAWMQRQERNRSKVRAHAILEAKIGRTVYAMWQHQRPFDPKRFLAS

SEQ ID NO: 90565 - protein, 352 aa, unidentified
MNEHSKAQTITVLGIDLAKRSFHLCGMDAQGRRVFSKQVSRAKLAEQLAQLPPCRVAMEACGSAHYWARTFQAYGHEVKLIAPQFVKPFVKSNKNDAADAEAIAEAAQRPTMRFVPLKSVEQQDIQAIHRMRSQAVEQRTAQVNQIRGLLAEYGLIIPQGRVHVRPCLATLLEDAANGLSAVFRASLQGLADELRHLDERVAHYDAQIAALARDSEPAQRLMTIPGIGPLVATALLAAIGSDPRLFGNGRGLAAFLGLVPRQHSTGGRDRLLGISKRGDTYLRHLLIHGARAVIRWVARKTDALSRWAHAVLSRRHTNIAVVALANKLTRIAWAVLTSGQPYDATRGALSNA

SEQ ID NO: 90566 - protein, 346 aa, unidentified
MPCQVHHIGVDVSTAHLDTHGLPGRGVRRRLPNTPESHAELAAMLSALRQGGDDVLVVMEASGGCERALHHALVEAGVPTAIVNPKRVRDFARSNGWLAKTDRVDAKVLKAFGETNRPRPTPVPEPVRAELMELLDYRTQVMAEVLARSQQLEHYRSEAMREHAGAALAALKAQVDSLAVDIEMTVHGDAELSRRAELLRSFKGVGPLISADLVAFLPELGALTEKQIASLAGLAPFARDSGTLRGVRRIHGGRAKVRRALFHAARVGLRWNPALKALYDRLIGRGKPGKVACMRKALVILNAILKTGEPWDPDFEAKKEEARKAVRAARRETSPANAEPACAPAV

SEQ ID NO: 90567 - protein, 334 aa, unidentified
MEQVTTVGIDLAKRVFALHGVDGAGRVVLRRTVQRDELVELVAGLSPCLIGMEAGSGAHEWARRFQAFGHTVRLMAANYVTPYRRNGKNDGNDAEAICEAVGRPGMRFVPIKSAEQQAVLAVHRVRQGFVEERTSTINRIRGLLAEFGVVLPLRSESIRRHAREAAETLPDIARRPIQDLCAHLRELDARVLAYDREIERLARQSEAARRLMKIRGVGPLSALAIVATVGTARDFRSGRQFAAWLGLTPRQHSSGGKSRLGHITKRGDAYLRTLLVLGARSVLNTAMRHKDRISRWVLALQTRRGYHRALIAIANKNARIAWALLSRNQELRTA

SEQ ID NO: 90568 - protein, 404 aa, unidentified
MMTAPERCVTGGVDTHADVHVAAVLDSATGRSLGVESFPADTAGYAALQDWLASHGSVDAVGVESTGAWGAGLARHLSGAGMRVIEVDRPDRKARRQEGKSDPLDAEAAARAVLSGRATGAPKSGDGPVEAIRSLEVVCHGAVRDRTRATNQFKALLVTAPADLRERMSALSFSSQLELARRFRDHDDPLETQLRFSLKTLARKIAFLDEQITELEARMNTLTGQAAPALAGTFGVGPHVAAQLLATVGDNSDRITNEAAFAKLCAACPIPASSGKTQRHRLNRGGDRRANKALYTIVLVRMRHHAPTRAYVARRTTEGKTRAEIMRCLKRFVAREIYNVITNPPAVPSGHDIRQRRLHNDITLTALATALDVAPIRLSRVERCLDFNNDLAQRAHDWLTQNAP

SEQ ID NO: 90569 - protein, 318 aa, unidentified
MSKEFVGVDISKDTLDIATYTREKIWSAPNSEAGINHLIEELGELGSLLVVMEATGGYETNLAYALNKSGIPCAIVNPREVRDFARATKKLAKTDAIDSRVLARFAALIQPDPRPLSDEQTQELEAVIARRRQVIEMLTTEKNRLHQAQKTVRGAIKAHIDYLEKELNHIDSDLQGRIKESPIKHEKYNLLQSVPGVGPNLSSTLVIELPELGNLNRRQIAALVGVAPLNRDSGNMRGKRSTWGGRSQVRAALYMSTLVATRFNPIISQFYAQLCARGKAKKVALVACMRKLLSILNSMLKHHVPWHFSPPVLTVNNI

SEQ ID NO: 90570 - protein, 439 aa, unidentified
MSSLPVLDPHAAFVDVGSEQMYVSIAGGPPEVFGAVTSQLHALRDWLLTRNVHSVAMEATGVYWLPLYGVLEEAGLEVLMVNGRQTRNLPGRKTDMKDCQWGATLHAHGLLRAGFVPPAHIRRLQDYLRLRADHISSAASTVQQMQKALERMNIKFHDVISSLTGASGLAVVRAILGGERDPERLLDLCDIQIRRAKADRVKESLRGTWAEEHLFALRQALAIWEHYQSLIADCDRQIAALLPADGDDEPPKVAAKTQSRKRPGVNAPEIPKLRQILAQMCGGQDLTRLPAHTEYSVLQIIGEVGTDLTKWNTEKHFTAWMGLAPGSHQSGKRRGSVKRNRNRAGRLFCVMARTLARSKDIALGGFYRRMAARRGGLVANIALARKLAALFWRVMVKGMDYVEHGLAYYEAKVLETKQRALRRLAAQLGQKLVPVTMTT

SEQ ID NO: 90571 - protein, 339 aa, unidentified
MAFYVGMDLHSSNTYLGVLDHNLKRIFQKRVMNDLPLMLDTLEPFREELQGIAVESTYNWYWLVDGLMDAGYRAIHLANPCAVKQYEGLKYADDRHDAFWLAHLLALGILPEGYIYPKKDRPVRDLLRKRSFLVKQRTMLILSLKSLVERQTSLRLSRSEVKTLEPSDLELLLADEHLILSAQANVSTISFLSQQITQIEKAIKKKVKLRKAFQYLKTVPGIGDILALTIMLEVGDISRFPKVGDFVSYARCAPTERLSDGKSKGQGNAKNGNRHLGWAFIEASYFARRSYAKFSRYYQRKAAKTHQIVAAKAISNKLARICYYVMRDQVPYREEAIFC

SEQ ID NO: 90572 - protein, 392 aa, unidentified
MPQWALSIGPCGSPYRTCGEEASHAHVTSIGLDVHARSVAAAAFNPFTGEVVRRSFGTDASEIAEWALGFEDPRACYESGPTGFHMARELRALGLDCAVAAVSKMQRPAADARRKNDRRDAEFIARMLATHNIVEVPLPDMAVEAARDLDRALDDATRELRRSRQRLNMFLIRLGHVWDERNADGARKKAWTRAHWRWVSEIRLEGPQRDALEYYVTAARCAESDRRQLERRVVALAGTDRWRATVEALSCIKGVDTLTAFRLAAEAGSFSRFRSAPAFASWCGLTPSEHSSGESERRGGITKAGNALARTALIESAWHYSTCSPRPKAPAPGTDVPPAIRSRADDCTARLHRRREALAAAGKSACKANAAVARELACWVWEIGCRSEGTVL

SEQ ID NO: 90573 - protein, 352 aa, unidentified
MYYVGLDLHKKYITGCVLDSQGAVVAEQRRLPPVLETLLGWLAPVGQPVAVALEATLYWAWLHDRLTAAGYQVAVAHPQQVKLICHARCKTDPVDARKLADLLRTDLLPAIWIPDAATRARRTLLRGRAWVVRTRTRVKARIQAYLAAENERVPVSDLFSRGGRAWLATVALPPEVRQQVDRLVALVAHLDAQIAEQDRGVRELAQATPEAALLQTIPGIGPFGALLLLAEIGTIARFGSSHELAAYAGLVPSTRSSGGKTAHGSVGPAGSAWLKWLFVEAVQTLKRQPGPVRSQYERLLRAKGKPKATVAAARKLCCYVYWMMKEGRSYDDWLRQRHQREVRPIQAVASVA

SEQ ID NO: 90574 - protein, 416 aa, unidentified
MPEEPIFYAGIDWASEAHVVCLADAGGRIKARASFAHGGEGLAAMCAWLVAQSGAAPQMIHVAIETPHGPVVETLLERGFNVYAVNPKQLDRFRDRFSPAGAKDDSRDAEVAADALRTDRHRFRALSLADPLVIELREWSRITDELKIEQGRLANRIRDQLWRYFPAWLDPADDLAAEWFLELWESVPTPSHARRVREATLAKLLKRHRIRRFDAAELIATLRKPPLRVGPGTVAAATAHIRTLIARLRLVNRQIKEAHGELDRLLARLAEPQDDAPGQTEEQRDVTILRSLPGVGRIVCATLLAEASDALQARDYHALRTLSGVAPVTKQSGKRRIVVRRHACHWRVSDAVYHWARTAIQHDPRSRAKYDALRQRGHSHARALRSVADRLLVVACAMLRNGAPFAPLAPPQKTAC

SEQ ID NO: 90575 - protein, 343 aa, unidentified
MKITRVGIDLAKKIFQVHGVDVAGRQVWKRQLKRCSWLSVLTEAVEPGCEIGMEACGGAHHWARELKSRGFKVKLISPQFVKPYLKSLKNDVNDAEAICEAMTRHHMRFVAVKTVAQQDIQAIHRVREGLMNHRKAKANQIRGLVAEYGLVAPRQMAPLRRAIPCWLEDAENGLRQPFRVLLHGLWEDLQRMDERLKVLDKEILMLSESHPDAKRLKQLRGIGPLTATAMVAQFGDGRHFKRGRQASASVGITPRHAGTGGKNWLFGITKKGNPYLRSILIHGARSVVSKAKHKDDRLSRWVTELAKRKHPNVAAVALANKTVRIAWAMLRNGTDYDPELAMA

SEQ ID NO: 90576 - protein, 340 aa, unidentified
MIDVLGIDLGKNLCSLVGFDDAGHVVLKKTIRRNRTLVEIGKHRPRIVAMEACCGAHFLSTPIKELGCEVRLMSPEYVKPYVKTMKNDLRDAEAIAEAATRPTMRFVTPKPMAQLDMQTLHRVRERLMAERTRLINQTRAILFERNITVPQGACRLANQLPGILADDANGLSPRMRILLQDLHDERVGIEKRIAAYDAEFERASRSEAPCAKLRTIPGIGALTATALVAAVGDASAMAKGRDLSAWIGLVPKQNSTGGKSRLGRITKRGNSYLRKMLIHGARSICKHHRDRDTPLANWIRGLSSRMAMNKVYVAVANKLARIAWSVLRSGREFDMGELAR

SEQ ID NO: 90577 - protein, 365 aa, unidentified
MKKISTVQTRGKKIFQGQLTIGVDLGDGFSAYCVLNESGEIVLERKVATTPEAMKQVFGSMPRCRIAMETGTHSPWVSRLLTALGHEVIVAHAQKVRLITKSRRKDDRLDARSLARLARIDPELLSPVKHRSVQAQLHLTEIRARAVLVSARTALVNAARGLVKSYGERLRKCGTEQFRRDTTSGLSTGLREALEPLLQEVESLNERIQEYDRRIEKMAKVTYPETALLKQIKGVGNLIATTYVLTLEDPHRFRKSRDAGCFVGLQPGRRDSGESAPQMRISKEGDEYLRTLLVQGAHYILGPFGEDSDLRRWGRKLSARGGKTAKKRAVVAVARKLAVLLHRLWVSGEVYEPLHNSQKAMNAAA

SEQ ID NO: 90578 - protein, 387 aa, unidentified
MQIITDRSQAPTAIRTDLGAIFVSLELSRSTWLITSLSPGSEKMSKHTVGSGDVAGLWARFSQLKDKVQVRTGQVVPIIVIQEAGLDGFWIHRLLQDGRAESHVVDPASIATSRRRRRAKTDKIDGEALVRALLAYKRGEPRVCAMVRAPTPQEEDRRRVCRERKTLTAERVEHVNRIKGLLFAQGISDYEPLSRKRRERLEELRTGDGRPLPKHLKAQIGRELDRLELALQQIKSVEAERDAVLSPSHEGTPAPGAMLKNLKGIGLEFAGVLWSEGLFRTFSNRRQVAAYAGLAPTPWRSGSVAHEQGVSKAGNPRLRTTMIQLAWLWVRHQPRSMLTRWFQQRVQLNGGRVRKVLIVALARKLLIAFWKYVTAGVVLDGAETTAA

SEQ ID NO: 90579 - protein, 378 aa, unidentified
MGWPGRAQRLICWTIVGRREAKLKEHAMRTSQNTQETISTIGIDVGKNTFHLIGLDIRGAIVLQQKVTRHQLGRRLSNIPRCLIGMETCSGTHFIGRQLTALGHDVRLIPAQYVKPFLKGHKNDYRDAEAIAEAVQRPTMHFVSIKTPEQMDLLALHRVRSRLVGQRTGVTNQIRGFLLERGITVRQGLMPLRKALPEILSSKSDALSPRMINLIGELIQDWRRLDERIAAVSSEIEALAKQDESCQRLMSVPGVGPIISSAVVAAIGNGAGFKQGRDFAAWLGLIPKQESTGDRTILGKISKRGNKYVRTLFVQAAHVVLERRPSTARQSLWPWIEQASKRLHRNMLAIALANKLARIAWAVLARGRAYQPRITANA

SEQ ID NO: 90580 - protein, 429 aa, unidentified
MIMGFTKPIEHFNLKRKKVITMNTLYVGIDVSSKSNVVYLMLPNGDKHSNFSVANSHEGSTLLVKRILSALTSLSLDTVLIGLEATSVYGDNLVYFLREDASLAPFHRKIHVLNPKQVKKFHDAYNDLPKNDYVDSFVIADCLRFGRINKEVYLGDYRYKALQNLTRARFFAVQNLIKEKQRFMNVLFKKYSTMTQEKVFSDTFSTTALAVYDEFDSAEALANMDLHELTDFIIEKGKNRFPDPDAVAKAIQKAARSSYRLPKTVNDSVNQVLSISITSIKALESQIKEFDKAIKAQMELLPNVLISIPGIGPVYSAGIMAEIGDINRFDNQAALAKYAGLAWKQHQSGDFEAEVTRLIPSGNRFLKYYLCEAALSLVRCDKEYSDFYHLKYKEVNRCQHKRALALTARKFVRLVFRLLKDNRLYCPAK

SEQ ID NO: 90581 - protein, 358 aa, unidentified
MHYVAIDLHKRYSVCSALNEQGQRTREARIDGNSAAGFAQFFHGLGGPSQVVIEATWNWGRIHDLLEEIEEVEEVVLAHPYKTRIIAEAQVKTDKLDARALAKLLRADLVARAHIPSPQTRRRKEVLRQRLFWVRVRTMVRNRVHQLLDRQPRVDLPQVSDLFGARGMAAMKQLQLPEPDATQLRQDLGLLEELGKRIKELEAMIEARNATDAPTQLLSTLPGLGKVLAAVVAAEIDQVERFAQPKKLLAYAGLVPTTHSSGGKTYNGPLMPMCNKWLRWAFVEAAWVAVGCSNYFGGLYRQQRARGKGANTAIVIVARRLAEIAWQMLRHQRPYEDRPATPNALPDRSAHALVEVTA

SEQ ID NO: 90582 - protein, 406 aa, unidentified
MSDIFALDVSMGKSYCVWYRGKHCLKEFSLVHTKAGFNALRDMIKKAQKPIIYFEATGIYSRVIEHFCETNGLRFCRLNPLELHLKSESLRRVKTDQKDAHRIALTVQENAFRLTVPWKKDYLQLHELSRFYNQLNADWNYRLNHLHTALEQVFPELKQLFVNRTSKLALNIVELFPHPALVRPYSRVKLKNILMASTDKRIFKMKAYKYADRLIDLAQKSYPAVSGDAIQVDEVRYYARQLIALTRKKEEVIKRMESIAQRLPEYILYCSFPGIGKQTAAQLMGELGDISRFDNANQLNAFVGIDIRRYQSGTYLGQDHINKRGNPIARKLLYFTVGNMIRQQHANSNHIVDYYYRLKEKRPHPKLNKVAMVACMNKTLKCLLSMIKHHEKYHYRYTDSIVPVKA

SEQ ID NO: 90583 - protein, 390 aa, unidentified
MIYVGIDVAKDKHDCCILDVEGRKLYPVFTISNDKVGFDELFSRIEEVTSDKTEIKVGLEATGHYSNNLLASLVDKGFPTVVINPLHTNLYRKGLSLRKTKTDKVDASSIAMMLMTDRTLKPYSETSYHNEELKSLTRYRFDKVHERSKLKASLARLVNILFPELEKLVPTLHQNSVYTLLEELPGANYIAGCHLTHLKKILEDSSRGHYSRDKAIEIRNAAIDSIGTPMEAKSMELRHTIHLIWILSEEIEEIEASIKAIMDEMQSPIMTIPGISYRMGAMILAEVGDFERFDNADKILAYAGLSPSTYQSGQLDSSHSHMEKRGSRYLRYALFNATKFVCKWDESFGIYLGRKISEGKHYNVAVSHAAKKLIRTIYRMELTGQAYSPS

SEQ ID NO: 90584 - protein, 330 aa, unidentified
MKNYDEVVGIDVSKKTIDAYCYHAQVHREFANELLGYKSLIKWVLKHTKGQTFFYCFENTGYYSLKLALYLSSQDIVYVEESPLKIKRSSGIVKEKTDRLDAQLIARYAWLYREELEPSTVKSNSQLELGRLLALRDQIVRNNAGLKGTLKEMKVLLTSPTTDLGCISLKRSITYLTKQVKGIELRIKEIISQDESMSINFKLLCSLKGIGLVLACQFIYHTGNFTRFDKWRSFSSYCGTAPYEHRSGTSIHRRKQCHYLGDRKMKSLLSMATISAIQHDSELRLYYKRKLAEGKQTMIAVNNVRNKLIARAFAVVKRGTPYVVLQQHVA

SEQ ID NO: 90585 - protein, 358 aa, unidentified
MEETKTRVVGIDLAKRSYVAHAIDPAKEKAVIWDGRTDGKGIERLCAKLRPTDRVGIECCSYAFYLVKVLTAKVGCRVLVLNAGDLAIIYKSVKKTDLEDAGKLAWLLEKMDDDELPVVTPPGEKEEHRRAMVSELGSKKKARTVLINRLHSLFVRQGIVTVGKEDLRTADHREAQLVNLGGHTASEAKRMQQELILLESHIDEIEAEIKLDLKGEPKVSHLMSIPGVGPTTAMAFLAYVGDGSRFSHARQVSHYVGMTPRVDSSGETTRIGGITKRGCTAIRALIVQSAWAAVRTSKDHKLKQKYEELAARRGKGRAIVAVYRRLLELMWVVLRTDTFYWETTKEELDLKMARSKVA

SEQ ID NO: 90586 - protein, 341 aa, unidentified
MYHTGCDIHKKTCHLQHLDEDGALGLSKNVPTTREAFAKFLARLDGPTTMTLEATRGYWWISQFFARHPKVSQTNVVDSRRGRKLAEELSVRRGYGRAKNDRIDAEMLAEQTRCGLAPTIHVPTPPQLAVRTLNRHHLMLRRLKTMAANRIHGILSMHGVFTAIQMLRNQATQRDQLLRELPGYVELFVTNMLKQMELFDQQTVQCDQELDKILPASNPTIKLLMTAPGIGIVLARTIATEILDPSYLREPKYLLSYAGLAPLQNESAGKKGPMQLNQFCNYYLKYAFVAAAHGARTHPRYRRKYEQDIKQHGKIRAKLNLARRLAKAVYWMLTRQQPYKF

SEQ ID NO: 90587 - protein, 370 aa, unidentified
MSQSSTLFIGMDVHKDSIAVAYVAQDHGAEVTYLGTFGTRQCDIDHLIRKMQSKAKHLIFVYEAGPCGYWLYRYLSKKGYDCWVVAPSLIPKKPGDRVKTDRRDAVQLARLARSGDLTAVYVPKVEDEAIRDLTRAREDAISDLKDAKLRLKAFLLRHDIRYTGQANWGAAHLRWLSEVVCHTPAQQIVFQEYVRAVNEHSERLQRLEQELQDHVKAWRLYPVVEALQALRGVQFTVAVTLVAEMGDLTRFESPRELMKFMGLIPSEYSSGEQRRQGAITKAGNTHARRVLVEGAWAYRYPAKISRHLQLRLEHQPKVIQDISWKAQVRLCKRYRRLVARGKHANVVTVAIARELTGFMWAIAKEVPVIA

SEQ ID NO: 90588 - protein, 316 aa, unidentified
MKSYNSFIGIDIGKFSFFVALHGEKSIKEYENSPSGIKQFIKEHKKILSHSLCILETTGGYEMRLLLALCDDKYSVHRGNTRKIKNFIRSHGNMAKTDSLDAKNLALYGFERHESLVLFSSPSKQAMQLYELVQRRMDLKQMLVAEKNRMKSPRTDYVKNSIQLMINLLTTELTAITKEIEQIILLDPILKQKQMTLRTIPGIGPIIANELITLLPELGELNRREIAALVGVAPIANDSGKFKGYRRTTYGRQGIKPLLFLAAMAARNSNSHLKIYYESLIKRGKAKMVALVALMRKIIIIANARLKNEQINNVTT

SEQ ID NO: 90589 - protein, 406 aa, unidentified
MNGPVITVDVSKGSCHFQPYIENGKPMCKPKVLKDTIEGFDNLAKTMNKLKERSSNSTVPVVFEATGVYHRCLQKYLDDNKIPYYIISPLMSAAYRKTNINSNKTDDLDCGHIAKCFYGEQDLRVYKKQTNIYEELRHTNRYYESELNFLRQRKTSFRALLDIIYPLIDKCFKGHSSLYDEVPMTVLKLYPHPKLLLRHKEETIVNRVTSKVNHDKKFVEKIVSLMYEGASRCYPGCDEDDKEVNRLKETIMSLQEQVAKCDEILKELIEQARKVPYFKYVVSITGVGLNLASRLVAEIGDITRFENIKAITAYAGLNPKIRQSGDIDGTHLAISKKGNRHLRCLLYLGATCNYRLKKHDSLYEFNQKKRQQSTNPLKKKAANIATAHKLLVIIYALSKNNQEYNS

SEQ ID NO: 90590 - protein, 420 aa, unidentified
MRNAGIHANSLLEVRRMYNAVGIDVSKGKSTVAVLQPGGTVIRKPFDVSHTSQNLNELADYLSSLDGTTKIVMECTGRYHEPMVKALSEAGLFVSIVNPHLIKNFGNNSLRKLKSDPADARKIARYTLDNWTELRQYSGMDNTRTQLKTLNSQFSFFMKQKVAAKANLIALLDNTYPGVNKLFDSPTREDGSEKWVDYAYSFWHADCVRKIGLKAFTERYKSFCKKHHYIFQQDKPEKLFNASKELVAVFPKEKTYKLLIQQSIQQLNLASEHVERLRREMNELASTLPEYSTVMGIYGVGKTYGPQLIAEIGDVSRFTHREALTAFAGVDPGVDESGQHKSKSNRASKVGSARLRKTLFQIMTTLLQNAPEADPVYRFLDKKRSQGKPYYVYMTAGANKFLRIYYGKVKECLRNLEQTE

SEQ ID NO: 90591 - protein, 433 aa, unidentified
MYAAGIDIGSREHYVAVPSSLDDDCVKNFSCFTSDLDAMADWLVEIGITTVAMESTGVYWIPAFEILESRGLEVILVNARDVKNVTGRKSDVKDCQWLQQLHTYGLLNAAFRPEDDYVILRTYMRQRETIISHSSSKIQHMQKALRQMNVLLDNVVSHITSQTGMAIIRDILSGIRDPRRLAENRDRRCKNSAEIIAKSLVGNYRDEHLFALNQSVELYDFYNEKLDECDQVILQHLNTLNKQANAGERPAQKKRKKNSSNSLRFDASINLYELCGVDLTAIDGMEEHGLLKIISETGIDMSKWTTENRFTSWLGLSPNNKISGGKILSSSSIKTKNRAKQAFKMAAFSLSNSRSGLGAFYRRLRGRVGAPKAINATARKLAVIFYKMIKNKTEYRKQSQEEYDEFHKSRVLKQLKRKAKLLGMDLIPSVPLA

SEQ ID NO: 90592 - protein, 310 aa, unidentified
MEATVVGIDVSKNTLDVHVYPTGEAFAVVRNADGIDALIARITPLGVHAVAVEATGGFETVVAASLGGAGLPVIVVNPAQVRAFAQALGKRAKTDPIDAAVIARFVEATKPQIRPLPDQDTRLLAELVARRRQIIQMIVAEKQRERQMPTRHLKKSAVRLIKALEKELDVLNTDIGDSVRGSPVWREKEDLLQSVPGVGPVVARSLLAELPELGTLTRREVASLAGLAPWTRQSGKWRGKSFTGGGRSSVRTTLFMAAMVGARCNPSLKTFHQRLIAAGKPKLVALIAVARKLLTILNAILRDKTPWQPA

SEQ ID NO: 90593 - protein, 282 aa, unidentified
MQSVTRVGIDLAKMFIQVHAVDAVGKLVCNKQLSRDKFIAWCNQLPAGCLVAMEACSGSHAWARKLIALGLDAKIIAANHVTPYRLEGKGGKNDANDAAAICEAASRPSMRFVPVKTLSQQGMLCVHRYREGVKEERTANINRIRGLLAEFGIIAPQSPNKLRERLAEIIEDADNDLCGIARMVIQEAFSHWDEIDKQLEWCAQRISAHVKENQQAQAAVQLMGVGPVTASAAVVTVGDFKQFKNGAQFGAWLGLTPRQNSSGGKTKLGRITKRGDVYFACC

SEQ ID NO: 90594 - protein, 397 aa, unidentified
MWGKTSTTLVYDIVEDRYTKVFPFTVDRPDFERFLLFLQRQGPIEEIMVGVEASGPYALTIGHFLLEHRYTVVELNPFQASQFRKAQGKKAKTDRVDARSLAAFLAVGSYKPLTLGDPLYENLRELTRFRADLVKDRTCQVNRLKETLAIAFPELGAYIASLESPTVLTLLTNYPGPQALAEAGAQAVSACIIEASHRRLGSAQAQAVVNAAGTTIGLLRRQQALAIKLEVLASGITSVNMQLQRVETAIEDLFRQLPYDKSDFPVGGIQSLACILAEIEDVNRFPTLKQFLSHFGWCPQTFQTGGFRQEHPRMSHAGNRYVRRVLWMLAIMAVNTIPAYHDYLQRRTAAGKKKMHTIVAVGRKILSVIYAVLKTGRPYTSAGGASHTDPCPVLTSL

SEQ ID NO: 90595 - protein, 357 aa, unidentified
MGKSIRNLTAVTRVGLDLAKNAFQVHAVDATGAIVVARKLTRGRLVPFFAELAPCVVAMEACASAHHWGRALIELGHEVRLIPPAHVKPYVRRNKSDQVDAAAIYEAMSRPGQRFVPVRSIDNQAELIRDRARELLAGQRTAALNALRGHLAEIGLIAPQGAHHAYGLKRMAADGFNENGEIVVPDCVRGALRSLVGQIDALDEAIGAIDRELAASVKADETAKRLMTIPGVGSVTASAIRATIQDASAFASGREFAAFLGLTPRQNSTGGKTQLGRITKMGDRYLRKLLVVGACATLRHRRGHSDALRLWASGMLERKTVKYKFNLTAVALANKVARIVFVLMTRGGQYDGRPVAA

SEQ ID NO: 90596 - protein, 412 aa, unidentified
MEVMHERVAGLDVHKAMIVACVRIMAGGKISRECRTFETSTAGLEALLGWLTQSGCTHVAMEATGVYWKPVWNILSDGEFELIVANAAHIKNVPGRKTDVNDAMWIADLVACGLIKASFVPEQEIQELRGLLRTRKQLVREKASHVQRLQKTLEEANIKLESVLSDVMGRSGRAMLQALIAGETDPAKLAALAHPKVRAPQARLREALRGRVKRHHRFLLDLHLQQIDALDAGIAAIDREVDAGLASFRDAVKQLSTIPGVSQLSAQVILSEIGIDMSRFATAAHLRSWAGLCPRNDESAGKRRSTRLRTGAPWLKATLVQCGWAAARTKATYLNAQFVRLRARRGPKKAVCAVAASILTAAYHMLKDGTFYQDLGATHFDRRRPDAQARRLIKRLADLGFSVQLKPAAAVS

SEQ ID NO: 90597 - protein, 350 aa, unidentified
MPSTPNQSTPSVMIAIDPHKRSWTAAAVDARLQPLATIRVPVSRDGYRTLLRFARRWPDTAWAIEGASGLGAPLTVRLRQDGITVLDVPAKLAARVRLLSTGHGRKSDEADAVSVGVAAHTSSSLNTAEIDAATTALRALVEHRDDLIKTRTQTINRLHTVLTHLIPGGASRDLTAERAAELLRTVRPRDTAGKTLRALAADLISELRGLDRRINKAVHDIEMAVKACGTTLTELHGIGALTAAKIVSRVGSIHRFDSPAAFASYTGTAPIEVSSGDVVRHRLSRAGDRQLNYCLHVMAITQIRRDTQGRNYYLRKRANGKSHSEAMRCLKRRLSDIVYRQLINDANATT

SEQ ID NO: 90598 - protein, 331 aa, unidentified
MSEIITVGLDLAKNVFQVHGADGTGRAVLHKKLRRAQVLEFFGLLPPCVVAMEACGGSHFWGREIGKLIPPVYVKSFVKRQKNDAVDAEAICEAAVRPSMRFVSMKSEETQGAAMVFRFRELLIRQRTQAINALRGHLSEFGQVVPQGAANASKLIAIVEGSECELPVDAIPTLKTLLATLAHFETEIARLDAEIARRAKEDELARRLMTVPGIGPLIATAIATLAPPPETFRKPRGFAAWLGLTPRQHSTGGKQRLGATTKMGERSLRRLLIIGANSVIIKRHTHREAQPGTWLGNLLSRKPPMLVRVALANSPVHTRRSVRTAQRRSGG

SEQ ID NO: 90599 - protein, 374 aa, unidentified
MENSITHVAMDTHKKEHKVALHYPGGEQIVQFAVKNTARDIKKMVKKIKKQAPADIKFCYEAGVCGFALKRRIEASGCQCTVIAPSLTPIKPGDRVKTDRRDARKLLAMFKAGLLTEVHAPDTKQEAARELTRCRQTAQENLKRIRHQILKFLTRHGYVYRDGNHWTQKHLRWLRSLEFDLLSLRDVFDSYFTEMQHCSQRLASLDKEVEKLAERKPYKEIVGLLRCFHGIDTLTAITVITEIFEFGRFSTPGELMSYLGLTCSEDSSGQKERKGSITKAGNKRVRRLLVETSWHYRHPYIAKSKALRERRKDQPQWAIDIADRAGQRLRKRYWYLVNSGKPPCIATVAIARELAGFIWSVFNEYKARNNEKVA

SEQ ID NO: 90600 - protein, 440 aa, unidentified
MLQALPMLDPLAAFVDVGSEHMHVSVGGNRPAVFGTVTSQLHALRDWLLAQGVHSVAMEATGVYWLPLYGVLESAGLEVRMVNGRQTRNLPGRKTDMADSQWGATLHMHGLLHAGFVPPADIRRLQDYLRLRADHVAAAATCVQLMQKAFERMNIKLHHVISSLAGVSGLAVARAIVAGERSPEALVALCDVQIRRKKAQAVIEALRGSWADEHIFALAQALQSWDHYQKLIAECDARIATVLPPHDDTQPPLPRTTRQSGVNAPDIARLREILAQMCGGRDLTKLPALSSYGVLQLIGEVGTDLSAWPTEKHFTAWTGLAPGSHASGKRRKGVRRGRNRTGRLFCLMAQSLIRSRDIALGGFYRRLAARRGGLVATKALARKLAAWFWRVMVKGDDYVEQGLARYEEQVRQSKERALKRLARELGRELVPLSAVDHATA

SEQ ID NO: 90601 - protein, 337 aa, unidentified
MKFSGIDLHSNNSVVVVSDEEDRIVYQKRLPNNLEQIRAALAPYREELAGVVVESTYNWYFLVDGLMDAGYRVHLANTTAIKKYEGLKYSGDFADAAYLAQLLRLGLLPEGYIYPREERAGRDLGRKRMQLVRCQTMQILAIENILARQTGGRMSGERVKRLTAKQVEELDLVPDVALAVEANRAVSAALQQQIAVLEKRLKQRVKLRPEYRLLKTVPGIGETLATTIMLETGTITRFASVGNFSSYCRCVDSRRESNGKKKGEGNVKNGNKYLAWAFVEAANFALRYCPEAKRFYERKKRKTNRIVAIKAIAHKLARACYHMLREQKPFDVQRCFV

SEQ ID NO: 90602 - protein, 367 aa, unidentified
MEKIGVVGGRGQEGLPAKRPPDGTPVWMAMDISRSKAVYCLRWDGSEQRRLSTPLGIAHVRALLEHYRGCQVHVAYEACGFGYELAWWLQEQGIARMVIAPSRVERVPGLQVKTDRVDVGKLARKLEKGDLKAIYIPSRTVHEQRQIGRTYAQCLKERKRAQVRIRSLMQEQGRLGPLPAAGWKVYSAWLGAQNLPQSVRLCVQAHEQLRALADQQAQRMKVELYKLARGAEYRPLVKALSAQSGVGWQSAIRLVLELGDIDRFRTTDALPHYLGLTPSQYSSGELDHRGHILKCGPGFLRALLLQCAWSAIRQGHDTELQERFANLAPRIGRKRAIIAVARKLAIKLRGRWRTHLMASTPASAVAV

SEQ ID NO: 90603 - protein, 341 aa, unidentified
MKNLFIGVDFSKEKVDVAIIFADGLTETAARVFNEFKTTVSGYKQLVKWVEQNSYGIDSSLWLFCGENTGDYSKGLCNFLYGKGYDMWLENAKSIKDASGLRRLKSDRADASMIAEYAMRNYDKAVMYEPLSESLAQLRELFLYRQMVIRHRCSFQVRRGEKRLTMEKSPTKTMISQSGRHIVSELNKEVEKIDKRIAELIKSDEELTEVFTIVTSVPGIGTQNAVCLMVYTDNFRRFNYDSRKIACYYGIAPFGKDSGTSVHSDPHVHYMANRQIKAMLTQAALAAVNFNPIMARYYMRLVERGKKKQVALNNVKNKLVHLITAMVRNRQLFSPEYKISA

SEQ ID NO: 90604 - protein, 342 aa, unidentified
MKTVTTIGIDLAKNSFSVYGVDAKSKPVLSRTLSRASVVRFFANLPSCLVGMEACASSEYWARTIESLGHEVRRIHPRYVKAYLLGAKNDANDAAAICEAVQRPNMRFVPHKSPEQTDIQCIHRIRQGYVKSRTALVNQTRGLLSEYGIIIRQGICAVRNQLPALITDEKNELSGLMRRNLSSLYESLCFLDDRVHEQDKLLKAVAKENEACQRLMKVPGIGIMTATILLTIAGVASNFKNGREFAAFLGLVPRQNSTGGKARLLGISKRGDCYTRTLLIHGARAALCRMISGYTPEYRRNLWAVELAARRGKNKASVALANKTARVVWSLLTQGGEYKHAA

SEQ ID NO: 90605 - protein, 372 aa, unidentified
MNYNTVYVGMDVHKESFTLCSCKYEDEKASHYQRTPASYKNVLRYLAFLRTIYGEYTRFVCGYEAGCLGYSLYHQLENFNVECVILAPTTMLEQRSKRRIKTDKRDAEIIARSLAQHNYSPVHIPTETDNQTKEFIRMRDDHKAELKKIKQQILSFCLRQGYQYDGSGNWTAKHVKWLRSLKPAGLYKEILDEYLLTYTILTDKLNRLDQRIEELASKEEYKESVSKLTCFLGIKTHTALSVIVEVGDFQRFVSARKFAGYLGLVPGQHSSGDDRNGLGITKAGNTHVRRLLVESAQSYTRGKIGYKSRVLRSRQAGNSPQVITYADRANELMRRRYYKMVLKDGKKYNIAKTAIARELACFIWGMMTDNIY

SEQ ID NO: 90606 - protein, 413 aa, unidentified
MEIVYLVCAGLDVHQKTVVACVRRRDARGKTRSQTRTFGTTTGTLLELSDWLSRSGVTHIAMESTGVYWKPIWNILEGQFEILLVNAQHIKQVPGRKTDVKDAEWIAQLLHHGLLRGSFVPGTAQRELRDLTRQRRKLIQANASVANRIQKVLEDANIKLGSVATDVLGVSGRAMLEAIIGGEVDAGVLAEHARGRLRRKIPELQQALRGRVTDHHRFLLRLLLDDLACREELVARLTARIAAVMPAPMVEAVDRLKTIPGIEDRAAQAIVAETGADLAAFPSAAQIASWAGMCSGNNESGGKRKSGKTTKGNRWLREVLVQSAWAASHTKQTYLSAQFWRLAARRGRKRAAVAVGHTLLVMIYHVLKKQTTYRELGGDYFDRLDAERTTRGLVKRLERLGHKVLLEPANTAA

SEQ ID NO: 90607 - protein, 458 aa, unidentified
MSKKRRRQERLQVVNPDCAGIDIGKDTHYVAVPGERCDDPVRSFPGFTRDLHEMSQWLQSCGVRTVAMESTSVYWIPVFEVLDRAGFDVVLVSPRATKQISGRKSDVLDCQWIQQLMSYGLLRGAFRPDDEVCPLRSYVRQAKRLSEDRARCVQHMQKALTEMNVRLDSVISDIMGKTGEAILRAIVSGERDCHRLASLRDGRIRASVEMIATSLEGTWREEHVFALEQALHRHDFLTTQLDACEGRIAAAVDNLTPPYDPETGEVRDNGDGGEPAPHTDATLAHALHRMMGVDLTRIPTIGATTALTIAAEIGPDFSAFPSAQHFCSWLGLAPGTRISGGKKLSGRSPSVVNKVARSLRIAAVTARRSQTFIGAKHRSRLARLEKAVAVNATARELACLIYNMVTRGTEYVERGMEAHERNRTSRVMTSLTRRARQLGFALVAIDENQPTTAAVTTA

SEQ ID NO: 90608 - protein, 417 aa, unidentified
MSKIIERCAGIDVGKRFLLCSILTGAAHEDPTSQTRRFDTDVPDLEDMCEWLEQEAVTHVVMESTGSYWIPVFNLLEGHFTIVLANPEEVKNRKGHKTDRKDAEHLADLLRHNHVRASYIPPEPVRQLRDLTRRRIQLTQDASRERNRVQKLLEQANVKIASVLSDVFGVSGQSMLLALLAGQATPEEIAQLARGTAQRKIPQLIHALEGHRMSDHLRFVIRSCLRHLACLEEEIEELDGEIIRRMELPLFQNAFILLQTIPGIGQLSAASILAETGADLAAFPTVEKIASWAGLCPGNKESAGVQKGRGTTHGNPYLRMTLVQCAWSAARKQDSIFRARFLQLAPRRGQKRAIMAVAHSMLIVLYCMLTRSVPYNNSEDAPRQRRRKHRAHHHLRCLRRLGLTVHVTPGLDVDAGG

SEQ ID NO: 90609 - protein, 351 aa, unidentified
MTYLKNKSFPITAGLDVHKNVIICVILIDKDKTIRAKFARNLKGIGLLIEHLKRYSCEQVVMESTGPYYRIIYDQLSAAGLNPYLVNALDNSNKGKIKTDFRDAERLARKFIAGEVKPSYVPTSPIKELRKLIRRRTKLIAIRTMLKNLVRAELDELVIPIDEIFLSLGKKARELLLTLTTSGDMEGLLSKYPSLRKKMEAIERFLNVEIPETSGLIITILVRLMMVIDEAIKEIDRLLRQIVIRDKKLLRAVELLMTVPGVGFVAAVTIIAEIGDISRFSSPKSLAMYAGLCPRIFQSGGRIYYGSLPWRCNKRLRWIMYQVAIALLRTRSQLKRFYERIKRRRGCLLRR

SEQ ID NO: 90610 - protein, 426 aa, unidentified
MKVQYERVAGIDVHKDMIKVGIRSPGDKPWTRRSEVLQYRTFYGVLQQMAADLRKRGVTHVVMEASGVCTEPVYYALAERDFDEVAVINPAHAKALKGHKTDARDCLRVAELFECGLLRGSYIPAPELKEVRDLTRYRMKTVQARTSEIQRLGKALESAGIKLGSVASELTGKSATAMIEALIDGERRGRVLADLAIGRMRTAGKLADLSQALTGRFTEHHALLCRLHLDRIAVFDAAVAGLEDTIALRAAPWQREQDLLRTVPGFGDVVAQAWLGEIGPAPHTYFASHEKLASWVTLCPGNHISAGKRKHGRTGDAGTYIKPMLVQAAWAAIRVRGRLQARYSRLVRRFGGEKNPAAKKKAITAIAHTLLKIAYQVLRSGKPYQDLGADFYTRRESPGQRQAYLMRQLQKLNPGCTITITPAEAA

SEQ ID NO: 90611 - protein, 325 aa, unidentified
MASQNDLSRSLVALQQNNTIIAVIELSLNSWLVAGIVPGGERHPLKKLSVDEKLLLQLLYRWRDEAVKAGHMITRMAVAFEAGRDGFWLARWLRARGIEAYVIHPTSVAVPREHRRAKTDRLDTELLKRVFLGWLRGEPDHCSMAAIPSLQEEDAKRPTRERENLVGERTRVVNRMKACLVRFGIRNFKPTLRKAPKRLNALCTPEGDPLPPNTLAELRRDMARLRFIIDQINEIEAARLQRLELAPAEAPHAMVRLLARVIGVGIETADMLVHEVLSRNLRDRRAVARYAGLTGAPDESGNKRREKGLAKAGNARVRRGMIQLA

SEQ ID NO: 90612 - protein, 396 aa, unidentified
MLRVFASPPESDTSHVVRTFATTTADLIVLSEWLEENGCTHVAMEATGVYWKPVWQVLADSSCFELILANAAQVKNVPGRKTDVNDATWLAELLAHGLVRASFVPEPAIQELRGLLRTRKQLVREKASHVQRVQKTLEEANIKLESVLSDVMGRSGRAIIQALIDGETDPAKLAALAHWKVRASTETLSEALRGRIKRNHRFLLRLHLQQIQALDAGIAEIDREVDDGLACFRDAVDRLSTIPGISQLSAQVIVSEIGTDMSRFATDAHLRSWAGLCPRNDESAGKRRSTRLRKGAPWLKSMLVQCAWAAIRSKGTYLHAQYVRLRGRRGPKKAICAVAASILTAAYHMLKDGTFYNDLGPTHFDRRRPETQARRLIKRLAELGFSVELKSMATAS

SEQ ID NO: 90613 - protein, 456 aa, unidentified
MKIPQSTIRLLTGRLVKILLNREVSTMKSNTQNAKIEAITEKTLVLGIDVGSETHYARAFDYRGIEYSKKPFKFSNTEAGFVTFKEWILDLKERHEKDKVVPGMEPTGHYWFNLGKFLQDNEMKPVLVNPHHVKKSKELDDNNPTKNDRKDPKVIAGLVREGRYMIPYLPEGVYADLRTASNIRFQLQAELTRIQNRISRWFNIYFPEYKTVYGKPDAKSGMLILKAAPLPEDILTLGIDGVNQIWRDAKLRAVGKARAKTLIEAAEHSVGSKEGAVSARMEIRMLLEDYESRNTRLQEVMVLIEELVRKIPMAEKLLEIKGVGIRTVSGFLAEVGDISRFNNPKELQKLAGLALVENSSGKHKGETTISRRGRKRLRYLLFEVAMSLVSKNPEFRELHNYYTTRRLNPLKKMQSLMAIAAKLIRVFYAMLTKGVDYDPKKMVSDIKRPAVYLQAA

SEQ ID NO: 90614 - protein, 357 aa, unidentified
MHTAQQISFAKVHFFIGLDAHLRNWKVTIRLDGLELKTFSMNPAPLELLAYLQKHYPDGIYHIVYEAGFCGFWALRIFRQHNIDCIIVNPADVPTTNKEKVNKSDPIDSRKLARTHENKDLHGIYIPDTFHEELRMLMRLRYRIIQSQTRSKNRIKGLLYCQGIQIPLQFSDNARWSHNFILWLKQLHLNTDAGNFTLQNLILQLKEIREHNKNILNQLRTEARHPDIAPIMKALQGVPGVAFITAMYLYTEIMDMKRFANDNHLVSFVGLVPSTQSSDTTVQVNGISVRQNPFLPTMMIEAAWTAVREDPAMTLKFKELSKRMNQQNAIIRIAKKLVTRVRHVWLKQEEYVYALVA

SEQ ID NO: 90615 - protein, 365 aa, unidentified
MMETVYCGVDFHARMQTIAYCDSANGEIQLAQLDHRKDDVRGFYSQFTGQVIVGMESGGYSSWFEALLEELGHTVWIGHATEIRRRANWRQKNDRRDAELILEIMLRGDFPRIHCHSRESVEVLRMLRYRARLIKMRTMICNNLQAIAINCGLSERSRMLSRAGQERLKSARMTPVIKQQSEDLLTLLVPINERIGRVDRWLKQQASTDDRVKLLMTHPGVGVLTALGVVHTLEPFNRFSKQRSVVAYVGLEPMERSSAERKRYIGISKAGSRLLRFLLGEAAHVAVRFDPELKQFHERIGKRRGKAKATVAVARKLLIRCWIMLRENIDYAEFRGRGVEARLARLGHRPSMPEVVIERPASSDR

SEQ ID NO: 90616 - protein, 461 aa, unidentified
MLSPKSRHLHVGVDIGSRCHAVAIGLSDGRLLEEFEIPHSSAGFEKFFSRIETQAKDHPFPVAVAMEGYGGHARPLDGLVAERGWLLFNVNNLKLARFKEIFPAAAKSDRIDTRKTLELLQLREHLPLAADVLQEVMARPEENDILKRLTRRRRRLVNERVGLTSVLQSDLQAAAPGLVEITREVANLWFLNFLTCRKDLRKLAGVRRASLLKLPAIGVCYADRIQTWQTSACFSRDAGLVGEMIHQDALRVLELKRQIKALDDKIARVAETSSSARQLASIPGFGDVCSAELAGEIGTIARFKSEASLALYLGMATLDHSSGKRRGSKSPKHVNTRAKAAMMTAVDRHRKEVAQSQRYYEKKRSQGKTHNQAIRALGRHLCRVIFKMLCQDRPYRIDTQGDLPGAPDETIHPQSCPDNRDRTGGPPAVDRENGPSKDEPFKVIPSPLAAIGSPACTAGPP

SEQ ID NO: 90617 - protein, 418 aa, unidentified
MSLNVAGGSAYYVGVDWAAVTHAVCVLDPTGKRVAAFTVEHCAAGLTALTQRLARLGAPDTMPVGIERPDGRLVDALLEAGHPVVPVKPNAIKAWRDGEVLSGAKSDAGDAEVIAEYLRLRQHRLQLATPYTAQTKALRTLVRTRGDLVELRVALTNQLTAVLDTHWPGAKEIFADVESPIALAFLTRYPTARHAQHLGVKRLTAFCVEHHYSGRRSGEQLRTRLRAAPAGTLDETVCHAVSDAVTALVTVLTSLGAAVKTLDRSVTATLGKHPDAEIFTSLPRSGQINAAQILAEWGDCRQAYAGPDSIAALAGVTPVTKESGKHRAVHFRWACNKRFRVAMTTFADNSRHDSPWAAEVYTQARTRGHDHPHAVRILARAWIRVMWRCWNDRVAYNPTRHGNAQRLTQPRQNEPLAA

SEQ ID NO: 90618 - protein, 482 aa, unidentified
MKRRNIYQNRSQELLSLFEEAGNSAKVMCVPIDFAKKDHVVMFCNGYGDILRKPFSVKNSPEGIKYLAEQVARSCRHRGINPNHAFFGGEDVNAYAENFVNTLRSKGWLVAGVNAHDAKKQRANLQASTDRLDLMGIATMLLNCRANCCPAQSGRYRNLRTLVRHRRKLVVMSTEVKNRIHGVVDRLFPGFLDEKKSGIVPFTRSSLYLMENRFSAKQIRRRRRQKLIEILKRFGTSKADATADKLQQYAAQVLHTPVEHIDTLQLSLVQHVKHLRCLNESVEHLEREIAVNLAQTQGAFLTSVRGIGVVLAAGVTAEIGDPNEQKPLNNLVSYSGIIPRVKQSGGPEGKTYIVSVAKRCNRILKDYLVKSALHLGLHGPQDLMADYKRRDASGQHADFGIGRRYLRMAMCLMRTSQIYLPQRLRKAEAKMEERAGYYLTTWPYLRGKWKKLGALNAAFAKDRPLGQWRQVVQELYDIKLKL

SEQ ID NO: 90619 - protein, 322 aa, unidentified
MSVSVLGIDIAKQKFDAALLVEGKTKHKTCKNSAEGFEMLRLWLEKQGIQEVHACLEATGNYGEDLAIYLHEAGHMVSIVNPARIKGFSQSALLRTKTDKLDAALIARFCLAMKPGAWIQPSPESRSMRALVRRVDSLIDMRSQEKNRISTAHESVSLLIKEHIAYLDQEIEKIRKQISDLIGKDPNLKRKKDLLDSIPAIGKVTIPHILAELDDLEKFNHVRELVAFIGLAPKETLSGSSIKGKPRICKIGHARLRKSLYMPALVSIQCNPVMIAFYNRLKDKGKNGKVIVCAIMRKLVHVIFGVLKSGKKYDPNFQPISA

SEQ ID NO: 90620 - protein, 344 aa, unidentified
MAIVGGLDIHRRQITYDWIDTTTGETRRGQLSPATRLELRSWLAQFDGPQVDFALEATTGWRFVAEELARAGIAAHLAEPADTRALRGPKRRAKTDRTDAHHLRELLRAGTLPESWMPPAHVADARTRVRLRRALVGERTGWYQRIHAILFHHGLPERSQLLTTEGRAWLARAELPAVARQAVDLALRMIDHLEVELDRLDGELARIARAQPGCQALMGRYGIGWLTAVAIWAEFGDVRRFANSRQAVRFTGLDITIAESDGKRARGHLARQGSPVLRWALHEAAMCAARPSSPDHPYYLQVKQRLGGKRAALSVARKLAREAYHTLRALGDQALVPAELPTAA

SEQ ID NO: 90621 - protein, 347 aa, unidentified
MLADELDYVIGVDPHRDTHSLAVVDVRSGGVVFEATAVADGEGYESVLRLANQHAPGRRAFAVEGTGSFGAGLARFLVSREERVLEVGRLRRERQSGKNDALDAIRAARSVLGQTRPARPRAGGEREALRALSAAREGAVTARRAGLCQLRGLLVSAPEPLRAELRSLTRTQLLRRLTAVRPEGRQDPELRGTLLALRALARRVKALTVEERELAREIETLTRKLAPQLLEQPGVGPLAAAQVLISWSHRGRITSEAAFARLAGCAPIPASSGQTVRYRLDRGGDRRLNRALHMILVTRRRAHAPTIAYIERRIQEGKSRREAIRCLKRYLARNLYRLLENGSPLPT

SEQ ID NO: 90622 - protein, 339 aa, unidentified
MNSMAVGVDIAKQVFQVHYVDQQTGEVVNKPVKRAKFLEHFANRAPCLIGMEACGGAHHWARQLTRMGHKVRLMPAEFVKAFNIRNKSDAADAKAIWLAVQQPSKAVAVKTEMQQAMLGLHRMREQLVKFRTMQVNALRGLMTEYGEVMGKGRAALDKTIPEVLGRLADRLPAVLIDTLRDQWNGLARLDEQIAQIERRMREWKKEDSAVKAISEIPGVGLLTATAAVAMIGDANAFNSGREFAAWAGLVPRQTGSGGKVNLHGISKRGDTYLRTLLIHGARSVLTHAKEPGRWVEQMEKRRPRNVVVVALANKMARTIWAVLAHDRAYQKDYVSMKPA

SEQ ID NO: 90623 - protein, 350 aa, unidentified
MIIIGCDYHPGVQQISFVDTDTGEFQETRLQHREPAEQFYRELALRGMQVRLGMEASGQARWFERLLAELKMELWIGDAAEIRARRVRKKKTDREDARHILRLLMEDRFPRIWVPSWENRDVRQLLWHRHRMVQMRTRVMNQLQAVALNEGMRCKKRLGGERGRQQLESFPLAMWGSRRRHDLLELLDRLNPTIAELTQAIEAEVANYPAAQRLMTHPGVGALTALAFVLIIGETERFQCGKQIAAYLGLVPEENSSGESRRLGHISKQGSGFMRFLLVEAAQVTVRSDGQWRSRYFHLAMRRGRKIANVAMARRLAVRLYWMWRRQWDYEQWKEFGPHAGQPGMSDGVK

SEQ ID NO: 90624 - protein, 435 aa, unidentified
MSKTLEIVHPFAAGIDIGSRSFYVDAGEDRIRVFPTFTADCQAVRDYLLSQRITTVAMESTGVYWVTLYAVLEECGIEVYVVNGRDVKNVPGRKSDVKDCQWLRRLHSYGLLRKSFIPETDIRKVRSYLRLRQDHIRAAATQVHLMQKALTQMNLRLAEVINDISGASGMRIITAILTGERDANTLVEYCHESILKRKKDLVIKSLEGHYSEDQLFALRQAYGTWNYYNALIKECDVEIERQLLHMSKDKDDVEMNAKRKPIRYHKPEIDNLHKPLLKLTGGKDPIGIAGITDYSFLQIVSEVGTDMSAWPSEKHFSGWLKLAPMSASSGKMNKRVRMKRQNNAGLIFRNLAQGLLNSKHLALGAFGRRIRARRGSAIAIKAIARKIACYYYRVMTKGNEFVEKGIEAYENHLKEQKRKQLEKMALQFNMQLVPA

SEQ ID NO: 90625 - protein, 407 aa, unidentified
MDSLFVGIDWANQHHDICIMHNDGSVFKEFRISNDSDGFTHFDAQLKPFLKEQILICIETNHGLLFEHLIQFNFRLFPINPGALVDYRKTDNLAKNKNDKLDARLLADYIRKDRHRLREHMMNSESTQIIKLLTEDRKRLLKEKVRMELQLIDTLKLYFPAALKLFSDITNKISLAFLSQYPTPEKTKKLTLKRFQSFLKKNKYTKPGRAEEIFSILQKDYPNAPEIFVQAKERFVKAIIPQILVIVQQLDDYDHEIKKYYDLHPDKNIFHSLPGVGKDIGPRLLSCFGDRRDRFTHFNDIQCLAGTAPVTRKSGHSCHVFFRFSCNKIFRDVVDQMAFTSLQRSLWAKNHYDKLRNKGNSHHSALRSLANKWIKIIHQLWITRTTYDENYHLAQITKRALAKKIAV

SEQ ID NO: 90626 - protein, 349 aa, unidentified
MKKIIIGIDVSKENLDATAICEKNSEFSLQSVAYSKFENRPMGFKRMLVWARKLVEGVDLSQILFCCETTGGYDRALCEYIFAKGYDIWRESALQIKRSAGVRKGKNDKNDSLTIAEYAMRHMDKAVLYVSPDRNIVQIKQLFLYRVQLVKEKTAKSVRVREIKCTAQKSKALSFIIRETEKRIRHLKKEIVECEKRIVEIIDSDENLKRNYSHLNSIKGISIVNATALIVYTNNFRNITSGRKLASYYGVAPFREQSGTSIDRKINTASFSNHMLKSYIIQAATSTITPKGIYRQYYTRMIQKGKHHNLVMNNIANKLLILAMALIKSDRDFEFNHEYIREFNKSKSA

SEQ ID NO: 90627 - protein, 421 aa, unidentified
MSRSQRIVGFDCGEDTHSAVLLDTAGKYGKKFEVTNERGQIQELLAELILGIGPEAELVVSVESKRSHGRIVSDVAVELGCDLRQVNTVALNHYRDLEGQPRKDDDWDAYLAARMVFLEMGGCRKAIVTTQEERTLSRLTRTHSRLVEDRKRDVARLRAVLLELAPEMLHTSWKGPKPGSKAMQYMLERWPGFEGLEKAQLRSIEKILSRCRYGSRAADVAKLIRKAARGISVAEEERRAITFELDLLVQQIRFCNESVDQVYTKIARRVERDPVGEKLLEMHGFGPIITGVLVSELVPVARTSTEPKCATYAGVTPLSRKSGKSLDNDRLTQGVNQRILHALYTSSVVAIKNSAIDRAYYEKKLRDYAGHPKPHVAAFIALSRQRHKLVYKLITTDARYDKEILIASHLARLEQDRIAAA

SEQ ID NO: 90628 - protein, 341 aa, unidentified
MYYIGLDVHKKTISYSVKLADGEVRAAGEVKATRAGLDEWLRTLPQPWSGAMEATLFTGWIYDHLLPHAASLQVAHPLMLRAIAAAKRKNDRIDAGTIADLLRANLLPACYMAPCATRELRRTLRYRNLLVRQSVQMKNRLAGLLMETGVTYNKEKLHQKGYFGRLLQEPELPPALQPLLKIGRETVERATASERALVRALVQSPAPAQRVERLMTIPGVGAITALSWALEIGEVSRFASLKQALSYCGLCSGEDSSAGVQKRSPISKQRNQHLQTVLVEAAKLAPRFCPELALVHARAKQKSNRNRATLAVARKLVAYLLAVDRREKGFQAGTSSAEAAA

SEQ ID NO: 90629 - protein, 410 aa, unidentified
MELLYQRCAGLDVHKETVVAAVRLAVDGKVVTEVKTFATTTQGLLSLSDWLAENGCAHVAMEATGVYWKPVWHVLEDGEVELVLANASHVKNVPGRKTDVSDAAWLAELLAHGLIRASFVPDGQTQELRALLRTRKQLVREKTRHTQRIHKTLEDANIKLDAVLSNVLGKSGRAMLDALIAGESDPARLAALAHAGVKCPQDKLREALRGRVTRHHRFLLQLHLRQIDALDAAIATIDQEVEGNLAPFRTAVELVSTVPGVSTLSAQVIVSEVGTDMSRFPTAGHLLSWAGLCPRNDESAGKRRSTRLRKGAAWLKTVLVQWAASRKKASYLQAQFLRLKARRGPQKAVCAVAASILKAVYHMLKNGTLYHDLGPDHFHRRSKTTQTQRLVRRLEHLGYAVEIKPLPTPA

SEQ ID NO: 90630 - protein, 323 aa, unidentified
MFYLGVDVAKKKLDCMLLDTSSGKLKSKSVPNTPDGFGALLEWLEKNNVVNPHVVMEPTGMYHEGAALALADAGLVVSLVNPAQLRAFAQGLGVKTKTDKADSAVLARFGAAQQPAPWQPPSPSARRLKALITRRDAVADDLQRERNRQEANDFSSVPETVGDSIAESITFIEAELKRLEKMIAKHINDDPDLRNKKDLLETIPGVGPRVSGHMTALFAGRTFGSAEQLAAYLGLVPVMWESGTSVRGRPHMSKAGPAYLRKVLYMPAVGARRWNPHIKALNDRLLAKGKSKMAAIGAAMRKLAHLCFGVINSGKPYDPKFAM

SEQ ID NO: 90631 - protein, 339 aa, unidentified
MKLYAATDLHSSNNYLAIIDENGERRFKQKLPNNPALILEALMPYKEEIAGIVVESTYNWYWLVDMLMAEGYKVHLANPVAIEKYSGLKHADDKHDAFWLAEMLRLGILPEGYIYPKEERPIRDLLRKRGHLVRLRTSLIISLKNIISRNYGIELDCNSMKRLKTNHVAPLLEDNEDLALAGSVSKESIDFLTRRIKEIESAIENKVKLQEPYNNLQTIPGIGKIIALTIMLETGPIERFADTGNYVSYCRKVHTKWMSNGKQKGKGNRKNGNKYLAWAFSEAAELARRFDAKAKAYYQRKKQQTNFMVAHNALAHKLARAAYHIMKDNVSFMPEKLFA

SEQ ID NO: 90632 - protein, 345 aa, unidentified
MELHTIGIDLGKTVFHLVGLDPRGEVVVRKKFSRTQLLRFTANVHVGLIDMEACGGAHFLGRALREQKHEVRLIPAQYVKPYVKTNKSDYIDAEAIAEAVARPTMRFVPIKTDDQLDMQSLHRVRERWVMRRTAVINQIRGLLLERGITLRKGRHHVDATLPPILEDADANLSGAVRLLLTQLKLDLDQLSVRIDEADAVIQKTAHENEACRRLVAIPGIGPVTATALIAAIGNGGAFHKGRELAAWMGLVPREHSTGGQQKLLGICKRGNSYLRRLFVQGARAVLQQRTKQSSGLSAWLAQLTSRTHRNVAAVALANKLARIAWAVLAKNEQYRPSVVADVAAA

SEQ ID NO: 90633 - protein, 583 aa, unidentified
MLLHHAPVSQPQADAKMHRIGVGIDTSRYGHYAAFLRDDLQPAAGELQFVESAVGYAQLRSRLEQIVSKLGTVHFAVRLDVAGQYADNLLHFLHTLQRQLANATLVISCGDPQRNKNYRAALFGSQKSDPVEARAAARYALSERPAPVKMLSAEQRTLRHVASRLQAVVRQRTRLINQFHLLLTSTFPELALLANDIASGWVLTLCERYPTAKLLAAASAQDIGQIPYLPEKLIAPLLEHARTAIASLEGDTVAELVRDQVRQLRDVRARQLRLEKTLVDAYRQLPDANHLDSIPGIGDVTAAILTAFIRDIDRFQTPNQLVAYFGAMPIEESSGVDRDGKPRAAKRNIMSRRGNDLVRRYLWMAALSAVRYNPAVRALYARVVAKHPDQKAIAIGHGMRKLLHLVFAIWKTKKPFDKTHYPWDTPAHVAALDARDEQEAAATPEQEQAAGLTLTAEPAQKEVTAACESSLPHDAEPGQNAFVDFAHVKAQLPIARVLEHLNLTRKLQGAGAQKRSACPIHCPHSHGRTFSVNLDDNVFQCFSPRCQKKGDVIDLWAALHHQDLRQAVLDLVRTFALEPAPNK

SEQ ID NO: 90634 - protein, 384 aa, unidentified
MAKIITKLPLFHLKANKSALLFALQLHTNADSLMSFIFKNIGNSPCVFGMEATGHYWYPIYSFLKAKGYTIYVINPIQSDTLRKMYIRQTKNDSIDSFLIAEVIRFGQFTTTSMTDENILAMRQLCRYRDSVISSRTEIKLRISTIMEQIFPEYEKQFSSLWLSTSMGILEKYLTPENIENAPIDELFEIIKDKSHNKLTMKKAISIREAAADTFGIKIAQDAFSFQLKQLIDRMNFLDKQIEALDCQILEYYEKFDCYLHTIPGIGMIAAATILAEIGDINRFKSSSALVAFAGIDPTVRQSGEFSSTHNHMSKRGSPYLRHAIFLAATTCSFHNSPLNAYYKKKREQGKHHLTATGAVARKLTTIIYAVFRDGKPYEPKKFC

SEQ ID NO: 90635 - protein, 314 aa, unidentified
MKKCIGIDVAKQYFDMYVLCSRQHHRLDNTAEGVRQCVLVCKAATPELIVMEATGGYELALACALQTEGLPVAIVNPRRIRDFAKAAGQIAKTDKLDARIIAQFAATLEPMPTEQINENTQKLKALVARRNQLVGLHTAESNRLEHADNRDIQHSIAAVLKVIEDQMKAVERKIEDHIRNTPELKQRSETLQSTPGIGPTTAHMLVTELPELGRLNRRQIAALLGVAPIARDSGTLRGKRMTGGGRKNIRSRLFLPTLVAVRYNPVLKAYYDRLVSRGKCKMVALVAAMRKLICILNTMIKKNQNWQPNFTKIA

SEQ ID NO: 90636 - protein, 419 aa, unidentified
MKPQAREAFAAFVGLDWADAKHDICLQAAGTKHREFLVLEHRPEAIDAWVQTLRTRFNGQPVAVCLELNKGPIVSALRAYDFLVLFPVNPFTLAKYREAFTPSHAKDDPTDAELQVELLLTHRDKLTPLSPQSPTMRALAQLVEHRRRLVGDKVRLTNRLTSALKNYFPHVLQWFQDKDTAIFCDFLSHWPTLKAAQLARRTTLERFFQAHHVRSVDVITTRIEAIKSAVALTTDDGVITPNALLVQALVAQLRVTLQVIADFDTAIAQRAQEHPDFALFEALPGAGAVFAPRLLVAFGEQRERYASAEELQKYAGIAPVTERSGKKSWVHWRLQCPKFLRQTFVEWAAESTRHSFWAQVYYQQQREKGKAHQVAVRALAFKGLRILYRCWQDRTPYDESMYLQALKRRSAPLLHHLAK

SEQ ID NO: 90637 - protein, 350 aa, unidentified
MDKELYIGVDVSKQTLDLAYYDGESIDWKKAHIKVSNNNAGFKKIGSWVAKVSKGFDIVLFCMEYTGLYTQDFRLWLEEKHYIYRMVEPRKMHRFEPDLDDGLRSLDRIKTDELDSFRIAIYCEQNHRKILRNPSKLPSPVYFKLKRLLAERKQTVKQSVLYKQQLHDICAYDTDLSVERKNGQLKTLNDALKGIDNEIDMYIKEDADISKNFSLLTSIPGIGRVVALETIVLTENFMAIDNPRKYACYIGVAPFKKESGTSVRKGSSVSKKGFKQAKADLSIACLVCMQHIPNIRDYWERKRKEKCSGIVFNAIKFKMILRMFAVIKRGTPYVETDNYRNGKNKQPGVN

SEQ ID NO: 90638 - protein, 387 aa, unidentified
MYFIGIDISKFKHDCAIIDELGDVITPSWSFQNDCEGFSLFRELLDALDGEKRIGLEATGHYGQNLKLFLENNGFSFMEFNPLLINRFVRSKSLRKTKTDSIDALMIARYLMTVEYKPYPPSFYTFEKLKSLTRFRDNLIRQRSKQLVELTNILDKVFPEFKPFFKGRFSATALYILSNYASPEKISNMNSKSYEPLRRLSRGKFSMVDFVELKTLARNTVGSTSDYLLQEMEITIDIYNQLQSKVEEIEQQINNSVLELNPPMLTIPGIGVSSAAVILSEFGELSKFSSPSKLLSFAGLEPGYFQSGTSESAGKMVKHGSSHLRYAIMNCAQTVVNYEPTFAAYYAKKRAEGKEHRVALTHVAKKLLRVIYTLQTKELTYNSELIR

SEQ ID NO: 90639 - protein, 274 aa, unidentified
MQDTVGIDISKPILDGFRLATGEHRQFPNDKAGCAALIRWIGKTPIRIVFEPTGPYHRLLEQSLTKAGIAIIKVNPRYARRFAEATGELAKTDRIDAMLLARMAAVLDLQARPARSELQHDLRELSVARKALIKDRIAARNRDQVAQNAIIRRQLKARLVQIDRQIGEIETAMATIVEGNETFRRRREILASIPGIGPVTAMAIIVEMPELGDLDGKQVASLAGLAPITRESGSWKGRSRIQGGRASLRCGLYMPALVALRINPDLRRKYRALK

SEQ ID NO: 90640 - protein, 370 aa, unidentified
MTQCIKTHYVGLDVHKDTIVIAVAELGRQPARVIATVPYEWKALRKVLDKLGPRSQVACCYEAGPTGYGLARALIAAGWSCDVIAPSLIPKRHGERIKTDRRDAVKLAENHRAGQLVAVFIPDEQTEAIRDLERAREDAKKAERVVRHQLSKFLLRNGKRYPGKTTWNAAHHAWIAKQAFVEPAQKYVLADALAAVEGATLRASELTARLREVTVGWSQEPLIKALQAMRGVEFVTAVTLVAEVGDFRRFATAEDFMGYVGLIPSEQTSGNHRRQGPITKTGNAHVRHVLVESAWHYRRQPRMSKALRDRSAGVSPRVCAIAWKAQKRLHSRLSKLIGRGKNKAEAVTAVARELAGFVWAISREEKLLVS

SEQ ID NO: 90641 - protein, 388 aa, unidentified
MLLDHLSDGPTAIRTQFGAIFVSLELSRSNWLITSLSPGKGEKMSKHGVTAGDVAGLMKLFADLRRKAEARTGESYPIITIQEAGLDGFWLHRVLQQNGVESHVVDPASIAVPRRRKRAKTDRIDGETLLRSLLAYKRGEPRVCAMVVAPSPDEEDRRRLCRERRTLIAERVTHGNRIKGLLFAQGIFDYAPLRRDRRKRLEALRTGDGRELPSHLRAQIGRELDRIELLLEQIKAVEAAQEALLVAARRPASEAVPDPVTMLLSFKGIGANFAAVLWSEAFYRQFSNRRQVAAYAGLAATPWQSGGIRHEQGVSKAGNPRLRTTMVQLAWLWTQHQPQSALTRWFKERSPQGRKRAIVALARKLLVALWKYVTQGVVIEGATMKPAA

SEQ ID NO: 90642 - protein, 420 aa, unidentified
MYSQSSQTSIYSTCVAIDWADSKHDLAIINKSELENKQISNQPTVIHQYFLNLCEDNGWNKVAVVIEKNRNLIMSVLESIPLLDIYTVHPTTSASYRNTFTPSGAKDDKKDSQSLLDLFLKHPEKVSRHQMLNETDILGQFCEKRRRLVDDRKAICGQLMAALKKSYPVVLDIFKDNSLYSLFVLDFLDKWPSSKQLMASNLSSISRFLNQRTSKKEKNIERIKSIKQTDSFLSESQQEMYLIETQVLLLRIRTLNEAIKRYEVKISELYTKNEDYDIIHSFHGAGATMGPRLLAFWGNDRERYKECKDALLSSEIAPVKIESGKSSYVRRRYLCNKYKQQTFIEYAMGSLKKSKWAQAFYESAAKRGKLHNEILRALAFKWIRIMYKCWKDKQVYSEEKYIKQLIKKRVHYVDKLLEAC

SEQ ID NO: 90643 - protein, 356 aa, unidentified
MSETTLGTDIIIGVDTHKLTHAAVAISALGARLGSLTIPANSRGYQALQAWARSLGVIRAFGIEGTSSYGAGLSRFLCEHNQPVFEVNHPNRHLRRQKGKDDTLNAEGAARSVLAGQATAAPKPSTSAVEMIRHLKVARDTALKAKSQAIQTLKAIIVSAPAVLREQLDSISGKMTLLRHLAALRPGPLTSTTASAKACLRAIARRWLTLDEEIKTHDAHLEQLTSQLAPELVRAHGMGAGTAAEMLLLVGDNRERIHSEAAMAKLCGVCPIPASSGKTSRHRLNRGGNRQANAALYRVVIVRMRAHQPTLDYIKRRTAEGKSKPEIIRCLKHFIAREIFGYLCRPSSAQSSPAGP

SEQ ID NO: 90644 - protein, 324 aa, unidentified
MKYQNTLFLYAGIDVSKYTLDLGIYPTEEHVQVSNDKNGIRTIIKRLKKLKIVLLALEPSGGYERELIQSLHKNDIPFVAVNPRQARDFAKSIGKLAKTDKVDAIMLAHFAEATKPEPRSQPDEQTSILQALVTRRRQVVEMKVAEKNRLSSAHPCMKKDISDSIARLEADEARLSKEIDAYIMQNEMMKTKKDILMSVTGVGPVCANTLLAELPELGTLNRKQIASLAGLAPFNCDSGRKQGKRMIWGGRASVRTALYMASHSACHHNKIIKPHFEKLTNAGKSYKVAVTACARKLLCILNAMIMTMTYWNPELARSKCDQKP

SEQ ID NO: 90645 - protein, 403 aa, unidentified
MNSVGIDISKGRSTIAVMRSFGEVVISPFEVRHTDSELSELARQLKSLNGETRVVMEATGNYHAPVAKLLHDAGLYVSVINAKLVHGYGNNDLRRVKTDRKDAVKLANYGLDRWLTLPRYVPEEDTRLLLKNCYRQYRQYSKVQTVLKNNLISLLDMVFPNVNRLFSSPIRGDGSEKWVDFVAEFWHCRCVSEKSQKAFTNKYQRWCRKHGYNFSEAKAHTIHAEACGHIDVIPKSETTKLLVEQAVAQLRATSASLVALKHEMQALASMLPEYPVVMDMFGVGPTLGPQLMAEIGDVRRFYSKKALVAYAGLDAPPNDSGDVTGRHKSMSKVGASSLRRTLFLVMSVYLQNAPLDESVYQFMDKKRAEGKPYRVYMMASANKFLRIYYATVKAYLESLEHTA

SEQ ID NO: 90646 - protein, 411 aa, unidentified
MKLFVGLDVSSFDIKVCFLNGEGDQLSSFTVENDLLGATQLRDEILHAVQGETVMELRIGLESTSVYSFHPSMFLHNDESIQSLGGQVFVMNPKQIANFKKSYNDMDKTDEIDAFVIADYMRFGRLPMSVVKEEQYVALQQLTRARYQIIRQITQEKQRFLQYLSYKCNTFTEDVESSVFGKAMMDLFLENYSLEELSQMVLEDLADYLQVKGKNRFPDAKQVAESIQKAARSSYRLDKVVEDSIDAILSTSITLIRTFEKQIKELDKSIERIMKGIPQTLQSIPGIGPVFTAGIIAEIGQIDRFESEEKIAKYAGLYWRKHQSGRFTADVTSLSRNGNQYLRYYLVEAANSVRRQIPEYGDYYAKKYQEVPKHQHKRALVLTARKFVRLVDALLRKNQIYTPKGSVIHEA

SEQ ID NO: 90647 - protein, 309 aa, unidentified
MSVVMGLDQHRAQISAEWIDTITGEVSRARIAPADRAGVRKFLAPFKDAGLEVALEATTGWRFVVEELDRIGAEVHLAEPAEAAALKGKKKRAKTDWADARHLRELLLIGRLPESWIPPAHILDLRARVRTRHLLSHQRTEWQQRMHAVLYHHGVPQRRDLLTLDKREWLANLALPTAAREQITTALSVIDALELKLIPFDEELRAYARKQPGCRTSADQIYGVGGLTAVTILAELGEVRRFPNSRDVVRYAGPDITVYQSDGHRAPGHLSRQGPPALRWALYEAAQRARFPASPDRPHLRPARRPHRR

SEQ ID NO: 90648 - protein, 333 aa, unidentified
MKPKPTTCCYVGIDVSKLTLDVCIRCGNTLRHLQIKNTAVAIRKLVKQLKQEKADVVIGMENTGRYNYALYAELATTPFTAFVINPLHLKKSMGLVRGKNDRVDAERIASFIETHRHTLKPWVPKRTVLTALQALLAKRTLLVKIKKQLVVSTAELSLLSDASVRHVLTEDDLIMHIEKSIEQVEARMNALVADDTVLNTQASLVRSIPGIGKVLSWHLLIKTNEFKDIDDPRKLACYAGVVPFDYASGTSVRGKPRVSLYADKNLKMLLHLAAMSAIRLSGELRDYYQRKVAEGKNKMSVLNAVRNKIIHRACAVIKNQTPYAPIKNNLVLS

SEQ ID NO: 90649 - protein, 345 aa, unidentified
MVMIGIDPHKRTHTAVAIDTAERVLDERLVRATSKQVPELLEWVKRLDGGDRIWAIESAGGLGYLLAQQLLAAGEHVVDIPATLASRVRLLGTGRSDKNDPNDARSVAIAALRAAELVPVRVEDHASVLRLVSRRHTQLGWSYNKTACRLHALVADLVPGGIGKEVVVCQARSLLADHPSIGAVAVERHALALDLVDELERLNTQRTALRKRIAVAVDASGTTLTEIFGVGDVGAAIILGQVGDVGRFRTADRFAAYNGTAPIEWSSGNPTRPIHRLSRRGNRTLNHVIHIAAVTQLRHRHSPGRAYYDAKRTQGLTGRAALRSLKRRISDAIYRRLVADAARRS

SEQ ID NO: 90650 - protein, 423 aa, unidentified
MSKILNIGIDISLQTATCSFLSQDGKFHSKTFDVDNNISGFEILKQKIAALCLLEGYTDVNIGLEASSNYGFHLLSYFSTVYLNGVKFHLYQINAKYINRFKKAFSEKEHVDPVDARAIAEYLRFGRLPAEFKPDNPYLPLQRLVRYRYHLVKTIEREKKLYLANLFLKFPGWVQTKPMKSLGKTTLDITTEFTPDELVEMSMEELALFVAKAGKNRCPDPTSIAEEIQKAARESYRIRPELSSSVTFVLASIYRTLGALKQNLKELDKAICEEAKGFINPLIFIKGIGYVYATGILAFACDVKRFSSHNQLARLAGLVWKRKQSGKFESDETRLVRECNKYLRYYLVEAANSLRMHNEEYQRYYQKKYQEVPDHKHKRALLLTARKLVRLVFALLSNNQLYDQFRDSQSPRHALNKNCQRAV

SEQ ID NO: 90651 - protein, 316 aa, unidentified
MTNVKMSKSIINVGIDVGKFKLDVFIHEKDIFFQVDNNPEGIKQVLRRLSYYHVERLVMEATGRYEFNMAEAAYRKNIPVCIAKPLNVRRYAGATDQLAKTDKIDAALIAEYAAVIKPKMSIEKSKTLIIIKDLLSRRRQLMNMRTKELNRIKIMGKAFEVSCKRMIRMFDKEIERMEIQLNKHVVEQEEWSEKKEILLTAPGVGNTLVYTILADLPEIGTLNNKEIAALVGVAPMNRDSGKMRGKRRIKGGRSGVRSTLYMATLSATLCNPLIKRFYNRLLAQGKVKKVAITACMRKFITILNAMVRNNEQWNIS

SEQ ID NO: 90652 - protein, 356 aa, unidentified
MSSNIKYIGLDVHNEAITIAVRNGAGKLVMESILETKAATLLQFLQGLRGELYVTLEEGTWAAWLYDVLKPHVQDVVVCNPRRNALLKEGSKSDKVDARKLSELLRAGLLRPVYHGENGLRTLRELARSYQVISKDLKRVMNRLKALYRSWGIPCAGTQVYAPRYREEWLNKIRQAGVHRRAELFYQHLDGLQLLRRQVRGEFLAESRKHKAVKVLRQIPCIGPIRAALLLALMQTPHRFRSKRQLWTYSGLGVETHDSAQHRYVDGQLQRSKKPQQVRGLNQNHNHEMKEIFKSTATSASRCAGPFQDFYTSLLAKGMKPEMARLTLARKIAAVTLTLWKKGARFDAQHLKAQAA

SEQ ID NO: 90653 - protein, 438 aa, unidentified
MSNKVIFNLDDLFISVGIDVGADFSWMSIALPNQQFVGKPYKILHNSIDSLTTAVSKIKEAEELYSLESRIFLESTGIYHYPLFCYLRDKGFNCSVINPIITKNSTNINIRKVHNDRFDSKKAALVGLKPDLKVSLMPSDLALNCRNLCREYYDLMDNRSAYVNKLQGELRMAFPQYLGIFSKVTINTSLALLETYTSPSAFLEADKQEIIDIIKSTARFGLTYAQNKYNAIIQAATDANQFGYIIDSNIKRIRLYISFIRKYDEEINNILESLHELVDANEDADFVKQIHLIETFKGAGFLSAVSIMGEIGDFSAFSKPKQLFAYFDLDPAVKQSGKFEGTKVRMSKRGSAIARRVIHTLTLQSISISRNGEAKNPVLREYYLKKCDSKPKLVAMGAVSHKVCNMIFAILRDNKPFKIIAPQEHIKQYNAAKCDIAA

SEQ ID NO: 90654 - protein, 477 aa, unidentified
MPLLGRNRPINNMKSKTSKHKKQNKKVSIDAGWEPVNPHAAGVDIGSREHWASVPREASERPVRKFGTFTGDLETMAEWFKECGVTSVAMEATGVYWIALFQILERRGFHVLLVNARQTKNVAGRKSDVQDCQWIQRLHTYGLLQGSFRPEDPYCVLRTYLRYRDELVGARSTQCQHMQKALLQMNIQLPQVLSDVTGVSGLAIIGAILEGQRDPVKLAAMVDRRVRATQQTIQQALLGDYRAEHLFVLRQAYELSNAYEAKINACDEQIVRETANLPAKVDPAIRPLPARKEGRSRSFDTMAGVDMRPKLYEKFGVDLTGVEGIGVLTGLILLTEVGPNISRFHSEKHFCSWLGLCPDNRISGGRVLSSRTRRVVNRASDALRMAAYSLERSQTALGGFARRMKARLGAAEGITATAHKLARIVYRLIKHGENYVRQGLEDYEKKFAARKLNALQKTAKAFGFELIQKQAIAQSVS

SEQ ID NO: 90655 - protein, 316 aa, unidentified
MNTQDNNDINIGIDTGQAMLDIYVRPTGELQSVENNSEGIRTAIRFIKKFKPDRVLIEATGRLEMAFFCAAHKAGLPVCVCNPIQVRKFAQAIGRMAKTDKLDARDIAYYGDTIKPDPTDLKPEKLRLLSDLLAVRSQCLEMSTMQKNRLQRMPKTVHRSIRNILNSITKEIASIDQQLDKLVAEIPHYQERVNQLISAKAVGKVLAYTLLSDLPELGQLNRKEIAALVGVAPMNRDSGKHKGKRKIRGGRHKIRTVLFVSMLSAIQCHPTIKPMYQKLVAAGKPKKVAIVACMRKQLIILNTMVKNGTYWNENMT

SEQ ID NO: 90656 - protein, 318 aa, unidentified
MRIKERDLQARQQTLAMLDTGTGEVVNRTLPHEGESVREFYSTLPGPVRVGIEATGSMKWFLQLMQELGIDCQVGHPATIRAAEPRRQKHDQRDAGLLLKLLVENRFPSIWQPSQELLDLRGLLLHRHQWVRLRTRIQNALQAIALANGLRRGSSLWSESGQRAIASLPLATHTAQRRSELQAMYAGFEAEIEQLKQQVLQQAGPRPTAGLLMTHPGVGPITARATDVFLGDPKRFSNGKALASYIGIIPREHSSGGRQRLGGLSKQGNPLLRLLWCEAAAHAVRRDPELRRFYRRKLVQKGLGKARVAAARKLGPGN

SEQ ID NO: 90657 - protein, 316 aa, unidentified
MTDRPNFVGIDVSKAQLDVALRPSDEHDTLVHDAVGIDTLVARLRHVAPTLIVLEATGGWERPLVRALVAAALPVIVANPRHVRDFAKATGQLAKTDRLDAVVLARFAEAVRPPLRPHPDAATEALAALLARRRQLLDMLTAEKNRLSTAPTRVQRRIRAHVTWLTAELARLNEDLDAAIRQSPVWREQEDLLQSTPGVGPVMSRTLLADLPELGTLNRKQIAALVGVAPLNRDSGTLRGKRQVWGGRAPVRAALYMATLVATKCNPVIRSFYLRLRGVGKAPKVALVACMRKLLTMLNAMMKHRTPWRSSAVQKA

SEQ ID NO: 90658 - protein, 316 aa, unidentified
MQSILNLGADVDSRTVMVACSAGSFKPHRIANERNALQAWLRTVPRGSRLAMESTGSYHELLADLAHQAGLQVFIVNARDLRRYGQGIGRRGKTDRIDAEVIARYIAREHQELHAYVPPTDAQRLLARLIGRRAKLVRAKDSIRQSLGGLPALQSEARRLIGHIDRVIARLDLLMQRTVQQTPAVREAAGHIVTIPGIGVLTSTCLGHRFTRLPYTTSDAVVAATGLDPRPEDSGQKEGRRRLSKRGPAEERRLLFNCARSAAQRKPWRPYYDAQLAKGLSKTAATVVLARKMLRVAFAVYQHRQPFNPLLVGGGT

SEQ ID NO: 90659 - protein, 327 aa, unidentified
MIQSVLGIDVSKDTLDVVLLKEETNTYASFSNNPVGFGKLARWLISQGAGQVHACLEATGQYGDGVAEYLYQAGHAVSVVNPARIKRYGDSKLHRNKTDKADAALIAEFCRKEIPALWAPLPAYLKQLRQMVRRLEDLQANYQQERNRLSSGVSDTWVVEDIQDHLKELSKRIKALKQAIFQVIIDTAELKEQFDLLLTIPGIGKLTAARLLAEMGDIACFEDAPQLAAYAGLNPKGFRSGSSVHKKTHISKEGRALLRRILYMPAIVACRCNPIVHVFCDRLTQHGLPKMAVVAAAMRQLLRLVFGVLTHKQPFDPHYLLSPTFTS

SEQ ID NO: 90660 - protein, 360 aa, unidentified
MHATRTTANPTSLAVDLAKDVFELAFANTVGEVVERRRLGRAAFAHVLDNRAQLQVIMEACGSAHYWARRLVRQGHAVTLLPARAVRPYVRGNKTDRSDAAGLLEAARCGAICPVPVKTPEQQGVQALHRVREFHKAQRTAAINLVRGLLREFGLVIPLGAAKVRPATLVALEDAENELPMELRATLAELLDSIAQAEQAMAAVEARLRAFAARDLRSQRLQAVGGIGLITATALSASIGELERFRSGRHFASYLGLTPREHSSGSHRRLGRITKRGDVYLRMLLIHGARALLRSAKLARTKGLPLDRTRAWALALAGRVGTNRAAVALANKTARRLWAAEHRRVSFDPDHVSVQPARMH

SEQ ID NO: 90661 - protein, 400 aa, unidentified
MPMLSIGIDVSKGKSTVCGMKPGGEIVYTPFEVQHTREGMSELVSLLRSSGEEVRAVLESTGSYHCPVVTALLENGIFVSVVNSLRMKRFCSQSIRKVKTDRIDAMQIALYGLAYWQELQPTKLPEDTYRELQLLARQYYQMTSLLIKAKVDFNAICDQVLPGMQELMSDHAGRHKLSDFVLRYCHTTHILEMGETRFRKDYCKWAEKKGYRNCERMAALIFATAQNGIPVLPNAPSTQIVITEAIRVLHTVEASRDAILTQMQALAKTLPEYSLVREMPCIGDTLAPRLIAEIGDVRRFHSKRALIAYAGIDAPPYQSGKFCANNRHISKRGNRYLRKTGYEVMQSYVMHKPANDPIFTFIEKKRSEGKSGKLAMVAGLNKFLRVYYGKVTELYRSLPQ

SEQ ID NO: 90662 - protein, 343 aa, unidentified
MKVLKQVLGVDVAQKELEVTLGRMYDDTTIELYAYRVFKNTENGMLKLSQWVNNLTNKEIKVRYVMEATGVYHQKFAHYLEEKQEEVSIVLPNKISNYMRTLDIKTVTDKTCSEAIARFGLERKLENWKKPKDIHRVLKQLTRERRQITDERTIVKNQLHAEEAEAIPNSQSVVRLHRRIAFLNTLEKEIKDEIKINIKQDKDLMTDINNICTIPGVSVLTAATIIGETNGFELIRSKKQLTSYAGLDVKEKLSGTSVKGKPRISKRGNRYLRSALHLPALSTIKWDDNFRDQYARIVAKHGIKMKGCVAVQRKLLELIYIIYKTKTVYDKDYESKKILAKKI

SEQ ID NO: 90663 - protein, 397 aa, unidentified
MEIQDETGRKLAARRLPEGASGITRLHELIAAHLGSEGDPGQVAVGIETDRGLWVQALAAAGYRVYGLNPKQVARFKERYSTSGAKSDAADAHALADMVRAERHQLRALAGDTPGAQAVKVAARAHQTLIWERTRHTLRLRSALREFFPAALAAYADLGLTGPDTLELLMRAPAPAAAARLTAAQISAALKRAHRHGVPARAQVIKDALRGPQLAQPAPVTAACAAVVQAAAAVLITLNEQISRLEAQVEAHFLQHPDAEIYLSQPGIGTVNGARVLAEFGDAPGRYACAKARKNYAGSSPITRASGRSRAVLARFVRNDRLADALQSQALSALTGSPGARGYYDKQRARGLGHNPALRQLSNRLVGILHGCLKTTTHYDEATAWPATVTHPQPLAA

SEQ ID NO: 90664 - protein, 414 aa, unidentified
MSQTSSPMPPPAALAYVVGIDIGMESCMMCCLTMEKRQVIKPSQFSNDAAGFEWLFTHLEQMKSAPQQILVGLEATSRYGENLYHALVKRGYRVCLLHPGQIHAFAQQRGLRAKTDRLDATTIARALLSGEVRFGYVPSEEVATYREVVRLQQQLTEDIVRYKNEMHALVVVLFPEFYQVFADPSRPSALTVLRAYPSAQAMREADPKVLSQLLREECPGHYGRQTAQKLVRLAQGSVSSGLATQARSSSLRILCDQLSHTQSNLHLLQHEIERLLDQDPRAKGVLAISEMGPLTVAVLRAELGDLDRFARIDQVVASAGLDLQVKQSGKWKGQTKLSKRGSGRLRRILYLAALRSIRLPTSAFGIYYHRLVHRGMKKGMAVVAVMRKLLIVAAHLIQTQQDYDAGKVGRQALS

SEQ ID NO: 90665 - protein, 368 aa, unidentified
MNKRTYVGLDVHARSVKGCAIDQETGEILRQSLAGSEAGVLEWVSGLRGPVLVVYEAGPTGFGLARRLAAAGIECLVAAPSKLQRPSGDRVKTDARDAEHLARLALLGQITPVRVPGNADEAARDLVRAREDVRADLMRARHRISKLLLRHGLVYSGGNAWTDAHHTWLHRQHFDNPALQAAYESSLEAAELTLDRRNRLDAKITALALTDRYAPVVRALMCLRGISVLTAFGLTVEIGDWTRFSGSTIGSYLGLVPSEHSSGASRSQGGITKTGNTHARRLLVEAAWHHRRPYNSVSRDMRSRWNAADEASRARGHQGNHRLHRKWDQFEARHKRRVIANVAVARELAGWCWSLAAAIQQEQPWTDE

SEQ ID NO: 90666 - protein, 341 aa, unidentified
MDEVSTIGLDIAKSVFQVHGVDAAGAVVIRKRVSRAKVLEYFGELPPCLVGIEACPSAHHWGRELQGLGHTVKLIPPSYVKAYLKRGKNDANDAAAICEAVTRPSMRFVPIKTKEQQTALMLHRARQLLVRQRTMLSNALRGHLAELGIVSAKGRNGTAELLRIIADGRVSPAVCGILKVLARQYGTIGTEIASIDKSILALHRGCEASRRLAEIPGIGPIGATALVAEIGDWKTFSSGRSVAAWIGLVPKQHSTGGKDRLGSITKQGNRYLRWLLVVGAMAVIRYARKHGTERRPWLGRLMERRPTKVAAVALANKIARMAWAIMVRGERYKEPRLSLAA

SEQ ID NO: 90667 - protein, 422 aa, unidentified
MKNNAARKLRQVPEGYLIIGVDPHKKKHAAVAITQDLTIHDRFKVDNTREGLEFLLRRVKTVMVKSGCRGIMFAIETGGHYWRNIAYYLDERGVPFRFINQYTLKRRREGKDLNKRKNDYRDSEVAAQLLCTGEFVESGIPQGVYAELRTAHNAYRRLVKERTRITNLAKGLLDALFPEFVRVFKDPCGLTSLSVLSTCSTPGIIAGMTEEEFIALIEAAHHGRRLMRKKLGELRSVAKSSIGIEAGAHSVSVEIAFLIEKQKLIKGQIQTIERTLIKLVDASEEGKYLLSIRGIHYIAVAGLLAELGCFKSYRTAKQMIKMAGSNPTESESGGKRRSRTPMSKQGRPVLRYCAWTSVIPMLRLNPDFRAWAKERRERPAHANPLNGREVVGAALNKLLRLCFAMVKNKTYYRSPHLVQVSN

SEQ ID NO: 90668 - protein, 336 aa, unidentified
MDTVCATVGIDVSKQKLDIALLVDGKIKTKVVENSAPGHQALLEWLGKSKLPLSALHVCLEATGVYSEPVALVLHQAGMLVSLVNPACIKGFGQSENIRNKNDIVDAKLIARYCAAMKPQLWTPPPLEQRQLRAWSQRIHTLKDIRQQEENRLEALTISGMNDVAEHVKQSIAWLNAAIEKLESDINDHIDRHPGLKHDAELLSSIPGVGMTTVAKILGQLGDIRRFASAKAFAAFIGVTPRQRSSGSSLRSRTVISRTGNTALRAALYMPSMVARRHNPILRQFAERLANNGMAKKAVIAAVMHKLVHLIYGVIHNDKPFDPNYQIKGLAIQDGI

SEQ ID NO: 90669 - protein, 343 aa, unidentified
MDCFAGLDVSVKETSVCIVDDAGKIVREARVASEPEALLQVLTNTIYRFKRVGLEAGPLSQWLYSVLAEAGLPVICVETRHMRAVLKAQINKTDRNDARGMAQMMRAGLYRPVHVKTLRSQKLRVLLTHRKLLQSKAIAIENELRASLRNFGLKVGMIGTMKFEARIRELVERLPDLAVLVEPLLIVRRVIREQLGILHRRLLAIVRDDDVCRRLMTIPGVGPVVALTYRVTVDVPARFRKSKAVGAVFGLTPAKYQSGENDRTGAISRCGDEMMRIMLYEAAQSMLVRTAKWSWLKAWAMKIARHRGMKKAIVALARRLAVIMHRMWVDGTEFRWTRELPVA

SEQ ID NO: 90670 - protein, 350 aa, unidentified
MVVVGADVHKRTHTFVAVDQAGRKLGEKIVTAVTVGHAEAVMWARERFGSDVIWAIEDCRHLSARLERDLFGFGQKVVRVPPKMMAQTRASARTRGKSDPIDALAVARAFLREPDLPVASHDSVSRELKLLVDRREDLVAQRTATINRLLWRVHELDPDHSPKARSLDLAKHRSILGDWLKTLDGLVAELARDELADITRLTEDINALAKRIGERVRAVAPVLLAMPGCGELTAAKLIGETAGVHRFKSEAAFARHAGVAPVPVWSGNTRGRVRMTRSGNRQLNAALHRIAVTQIRLQGLGQTYYRHRIAHGDSTPEALRCLKRRLARVVFNHLHTDQHNRQNACHPAAA

SEQ ID NO: 90671 - protein, 387 aa, unidentified
MITFCVQKRYFVAEIVAPPSASSLHAGLYLGSAFGVKPYSLQEWLSARVPNRLATPIKDIAMTKPILGLDIAKDKFDALLLLEEQQHRRTFNNTRAGWKQLICWLQRLNVAAVHACMEATGRLWEGLSVHLQENGHEVSVVNPVRIKRYAQSRLARNKNDEVDALLIALFCREQKPPLWKAPSVERRQLQDLSRLLFSRKQQLQQEKNRLKSGVQTSAALREIKTLIKDIQRSIRRLETEIKAVLKQSAELNNKATLLCTIPGISDRTAAVILAELPEVEHFDHAAQVAAYAGLSPAQRQSGSSLRGKTRLCKTGNWRLRQALYFPAIVASLRNPLLKARAQRLRAAGKTKMCVIGAIMHHLLRLAYGVLKHKQPFNPNFVPLPVAP

SEQ ID NO: 90672 - protein, 398 aa, unidentified
MFQVWTWVQTAIKPPAQFITRVSPSSPLSETRGHVGAYVAKDRHAVALAESGRTGEVRYVGEISSDSASVRRLVRKLGRPGVRLRFCYEAGPTGYGLKREIEALGHECAVIAPSLIPRKPGDRVKTNRRDAEKLARLFRAGELTEIWTPDAAHEAMRDLIRAREAAVKDRTRKRQEIRSFLLRHGKIYPGLKAWGTRYLRWLHGLSFSFRSQQAVLQELILAESQCRERAARLEKAIEDGLLDWPLAPVVERLQALRGVKLICAATFMVEIGDVRRFANARQLMAYLGLVPSERSTGDAVRRGGITKTGNARVRRVLAESAWTYRYPAKLGKGKYFESRHLPEVVRDIAWNAQARLTKRYRALIARGKRSTVAVTAIARELAAFMWAIARADEQQAGT

SEQ ID NO: 90673 - protein, 367 aa, unidentified
MKGEVQDKKVLIRGKEVFIGVDVHKESWHVTARTEGEEVFHGGIPSQYHAFQRLFDHFKDCKVKVAYEAGPCGFWLYDRLTEDGIETIVVPPSLIPIESGNRVKTDKRDSRKLAKLLEGNLLKRVYVLREEDREDRELLRTRRQIVEHRNDVARQIKSKLLFYGIRSPFSAKERWTKQYLRWVKGLLFEREVLKVSFQSLMELYEYLSVQLVKMNKKVIELSQNEKYLDKVRLLRSVPGIGILIAMEILVELPEMERFKSGDELASYIGLTPSEYSTGQYVRQGRITRCGNKRVRTCAVEGSWILITKDPLMRLRYKKLKAMKGAKRAIIAIARRMMIQVRRILLSREPYRVGAPGVIRQQFVVSRA

SEQ ID NO: 90674 - protein, 354 aa, unidentified
MSEITLIGLDLAKTIFRVNAVDRHGKTLMNKNIHRDRMIRYFATLPECTVAMESCATSHYWARTLESLGHTVKLIHPRYVAPYRLGDKNDAHDAAAICEAARRPDMRFVRVKSQRQTDIQALHRSREGLIKERTASLNRVRALLMENALQQKLEALEKLLGQYNVHVLCEALDVSLGALYNHLLHLRESIAELETILKGLVAEEEDCQRLMQVPGIGLITATLLASELGNGAAFKNARAFSAYLGLTPKQHSSGGKNTLLGISKKGNEYLRSLLVHCGRAVLRAILYGHHPFGGNRIEAWVKELMLRRGKYKTTVALGAKLARIAWSMQAKGSSFTAAICAQESSCHVSVSAAQ

SEQ ID NO: 90675 - protein, 343 aa, unidentified
MSIKVIGIDLGKSIFHLVAHDQFGKIEFRKKLSRQKLKEFLSNHPLTTIAFEACGGAHWLGRYCQQVGHRVKLIPPQYVRPYVKGNKNDFIDADAIAEASGRPSMRFVEVKSESAQVISAIHRIRSGYIKERTACMSRIGALLLEFGVSLPRGHATMKRLFTWLATQRQSLPPLLMDELLSVHEHYTELCTRIKQQDDKLLRLVADHPNGCLLKSIPGVGDMTASQCLADLGSVQQFKNGRNLAAWLGLVPRQHSTGGKHTLLGISKRGNKHLRTLFIHGARAILSKPDKTGAPFGDWLIRLRKEKPFNVACVALANKLARIAWAVLYYQQPFNAAMLQSEPA

SEQ ID NO: 90676 - protein, 453 aa, unidentified
MSRKKTKLQSVNEPPKIRADAAGIDISPEVIYVAVDPRRDPQPIRHYGTVTAELYRIANWLRACGVQTVAMESTGVYWIPLYQVLDERGFEVYLVNARHYKNVPGRKTDVCDSAWLQYLHAVGLLQGSFRPADEICAFRTVMRHRASLVEAASKHVQHMQKALDQMNVQIHRVLSDITGVSGLAMLDAILKGERDPRRLAELRDGRVQASEESIVAALEGNYRIEHLFTLKQSLESYRHYQKLIAECDRQIREQLEALEGRSGGNEPPDARKNMRRRSDEELRKEFFRIIGVDLTAIPGINVGTVQVLLAEVGPDLSRFRSAGAFANWLALCPNNSITGAKIKSSKTKKTENRLAAALRMAAESLCRDKSYLGQFYRRMKMHLSGGAEAVTAAAHKLARIIFAMVTRRLEYDESRFAEIEQRNSQRARLRFIKQAEKFGFRLTPIQPAADFVS

SEQ ID NO: 90677 - protein, 428 aa, unidentified
MNDTMPHSEDALVAFVGFDWADQKHAGACCAAGGPLEAFELEQSPEAIDRWAIALHQRYGPGRIAVCLEQSKGALIYALMKYDFFVLYPINPSQLKRFRDAMTPSGAKDDPGDAALNLELLLKHRDRLRAWQPDHEATRLIGILAEDRRSLIATRTRAINALKIRLKQYFPLALEMLGELDTELACHFLLRWNSLAELKQEAPEQIESFYRLHHCHHPQQIAQRLEAIARAVPLVTDQAIIQSGQMLVKSLAAELLSLIGPLKQYDKKLAELMDRHPDSAIFQSFPGAGEALSPRLLAAFGTDRQRLARPDDMQSMSGIAPVVIQSGKTQHHVRRRRACNKFLRQTFHEFALHSRSRSAWAKAYYDMMRDRGLKHHAAVRTLAFKWIRILFRCWQTRTLYNELHYLQRLYQNHSPLLKFLASSPQKTT

SEQ ID NO: 90678 - protein, 373 aa, unidentified
MFHFTTLFIGMDVHKESFSLCYYDMMANQFKHSTKVGPNVSYIVNYVNELRRLYGQDAEVLCGYEAGCLGFTLYHQLQAHGIPCIVMAPTTVMKEGSKRVKTDKKDAAQLAKALAFRSYRPVHIPTVEDEQVKEYIRMRTDHKVALKKIKQQILAFCLRHDFRYTEGSSNWTQKHVRWLRSLNPDGLYAEILTEYLLTYEKLVDQIERYDARIEQLGQSDSYQEKVSRLSCFIGIKTLTALSIVTEIGDFNRFATAQHFASYLGLTPSENSIGDKERRGAITKAGNSHVRRLLIEAAQSLAKGTIGYKSKELKRRQSGNRVEVIAYADKANERLRRRYRTLVLGKNKKQNVAKTAIARELSGFIWGMMTGRIA

SEQ ID NO: 90679 - protein, 327 aa, unidentified
MDVHSSNYTLCAMEPVVGAKDRVFANIQVPPDYKNVLQFIENLKKKLGLTDTYSVECGYEAGCLGYSLYHQLTNAGVKCVILAPSTMLAPQGKRVKTDARDANMIAQCLCYGGYLAVHVPTDKDDSVKEYLRMKNDHELALKKIKQQINAFCLRHGFFYDGNKWTIKHWNWLKTLEVDDLLRKTLDEYLASYKEHSSKIERFDKRIEELAGDDDYKESVKKLGCLLGIKTHTAPSLIVETGDFSRFAKGNTYATFLGLAPGESSSGTKIQRSGISKAGNSHLRTLLIEGAKGICKGQIGHKSKELRCRQDGNASDVIAYADRANTRL

SEQ ID NO: 90680 - protein, 313 aa, unidentified
MTEYTIGIDISKSHLDAFHLEDETAKRFENSPRGFRALIKWLGAAQIARIVFEPTGPYHRAFEEALSGKLPLVKVNPLKARRFAEACGAHAKTDAIDARTLARMGEALRLEPDQPTSHKLLNLKDLQIARIGLIKDRTRLRNRGHMQTNPVLKRQIKTRLALVERQITELDAEIAKHIAEDQSTARKRDILCSMPGLGPVSAAMVIAFLPEIGTLERKQAGSLAGLAPYNRESGMWKGRSVISGGRKPLRDALYMPALVAMRFNPDLQAKYSQLRAAGKPAKVAIVAIMRKLLETANALVKADRFWVEKSPCA

SEQ ID NO: 90681 - protein, 432 aa, unidentified
MKHNQSNKQNQRISRISETTLVIGTDIAKHNHVARAFNYRGIELGKRCLFQNDENGLLNLLAWAESIKQEHGLTDVLPGVEPTGHYWFPLFHFLKQYGVEVVLVNPHHVKKSKELDDNLPTKNDIKDAKVVAKLVIDGRYTQPQLPEGVYADLRVLMNQRDRLCGDLNRVKGRIHNWLDRFFPEYTQVFKDWEGKASLITLQHFPLPQDVIAAGETTVVAIWKKNDVKRAVGPKRAELLYRKAQKSIGLTEGAMAAKHELAMYLEQYAMLCRQIEQLMELVAGLVEQIPGATHMMSIPSIGLTTVAGFLAEVGDLSGYDHSQQIVRHAGLSLRENSSGLHKGETTISKRGRCRLRALLFRAALTMVAKNQEFRALHLYFTTRRDNPLKKKQSMIAICNKLIRVLFELGRKQKEYDASKVLGPHREAQLQAAA

SEQ ID NO: 90682 - protein, 410 aa, unidentified
MHGKAGPMIYAGIDIAKNDHVVGATDEHGRDASKPMKFANSAGGFDRCVAYLEGLAESKSDLMVGMEATGHYWLPLFCHLQNEGFSVVVINPIRTDAMRRFKGSSRVKTDMIDCVLIAETMRCGDFEPSRLGDESMMELRQLTRLHQELKESVANLKRQVITALDQVFPEYDSIFSDTFGESSKAFLKRCPTPEECLGIRADSLAGTLAKASHGKLGRKKADEIKSIAKGSCGMRMATSALSFQIKLLIDQIDFIERQAEEVEAKIREGIQEIEPLILTIPGIGHILGAQIVSEIGDIRRFHSAPAIVKYAGINPSVSQSGKFSSDDNHITKQGSPYLRRALYLAAMGQLKLKTPFYDYYAKKRADGKSHREALIAVSRKLVHVIYAVLSKQQPYDPNAAKSPELASRSE

SEQ ID NO: 90683 - protein, 317 aa, unidentified
MTRVICGVDVSSTSLEAFVESAGPGRSFANNAEGIAELAAFCREHEVELVALEATGGYEKQPFALLWAQGVPVSILNPRAVRDFAKGMGMLEKTDRIDARIIAGYAGVKGSAPCVPLSKRQEHLKALVNRLRQVTQLHVSQRNQGLLVTDKTVQRSITTVLKVLQSQKRALAAKIAAVLASDPMWQQLDQSFRSIKGVADRTVAAVMADMPEIGTLSNKAVAKLAGLAPLARDSGKKHGKRVVRGGRRQLRAVLFVVAGGVAHHHPDFAAFQQRLSAAGKPKRVIRVALAHKLLVRLNAKAREVRLQFAAANAAQIA

SEQ ID NO: 90684 - protein, 359 aa, unidentified
MAKFIKMISTVMSAIGLDLADVWSDWAGLDESGTVVRRERVKTTESELRRVFGAIEPTTIAIEVGTHSAWISRVLSSLGHTVVVANARRVALIHRNKRKNNRIDAEFLARLVRADKELLFPIQHREERSQADLAVLRSRDVTVRSRTKLINHVRGTCKTFGVKLPRCSAEAFVVRCSGLVPVALHSAVNDVLALIADMTAKIKSYDSTIAAMIKRHPAAQLVGKITGVGPLTSLAYVLTIEDPHRIVRSRSAGAYFGLVPGSDDSGEKYEQRRITKEGDRFCRRLLVNAAQYILGPFGAKVDSDLRRHGEAIASRGGKNAKKRAVIAVARKLAVVMHHLWVHNEDYVPLFNAAQKPVAA

SEQ ID NO: 90685 - protein, 408 aa, unidentified
MEAIIERCCGLDVHKDIVVACVLIGPADGKARKEIRTYGTTTAQLEQLRDWLGQIGCTHVGMESTGVYWVPVYAVLEEHFELIVGNAAHMKNVPGRKTDVKDAQWIAELIRCGLVRKSYVPPKWQRALRALTRYRRKLVEAQASERNRLQRLLETCNVKLASVATDVFGKSGREMLRALIKGDESPEQMAQLARGRLRKKLEQLVLALRGKVESHHRFMLEMQLGRVEDIEANIAVIDSKIDEAIAPHRAVMERLMTIPGVDRVVAMTVIAELGIDMNVFPTPAHAAAWAGVCPGNNESAGKRMGQQKRRGNVHLATALVQAAMAASKTKNTYFKARFWKLAGRAGTKRAAVAVAHSILNAIYHMLKGSVDYKDLGGDYLDRFLNRRSEQRLVQRLRSMGYEVRAQTA

SEQ ID NO: 90686 - protein, 318 aa, unidentified
MQTSIVFIGVDVGKFELQVAASDGEIVTGVLPNNRSSIVGWLKRLPAASVIAMEATGGYQELLARTAHERGFEVYVLNPTHVHHYAISLGNRGKTDRLDAAVIAQYIAQHHKKLHRYEPISPELQEVRALQALRSTVVRVGTSLRLSAQRHGCVSSHQKKALASLTAWSEQLEREMIAKIKAQSDWAKTYGLLTGICGIGPITGVALTSLFSRIDFASSDAAVAFCGLDPRPNESGRKVGRRRLSKQGDKAARTLLYNAASSAARTEQFKDYYAMLRVRGLASTAALVIIARKLLRIAYGVWRTGQPFDPEKLRPTTA

SEQ ID NO: 90687 - protein, 412 aa, unidentified
MQAIIERCCGLDVHQETIVACLLVGAPGAQPTKEVRTFRTVTPELEALRDWLREAGVTHVGMESTGVYWRPVYTVLEGHFELIVGNAQHMRNVPGRKTDVKDAEWIADLVRHGLIAKSYVPPRPLRELRELLRYRRKLVESQAAERNRLLRLLETANIKLASVASDVFGVSGRAMLRALIAGEASPEAMADLARGLLRRKRADLILALDGRVEEHHRFLLAMQLRRLEAIEADIAALDQRIGKRLEPYAAPHTLLMQIPGVDWVVAAVLIAEIGVDMSVFVSVYHLAAWAGVCPGNHESAGRQKSGRARKGNIHLRAILVGAAISASRAKGTYLKDKFHRLKARRGGLRAALAIAHKILVSAYHMLAKNLPYRDLGEAYLDQISQTRTVANLKRRLERLGYRVILEPNAQAT

SEQ ID NO: 90688 - protein, 346 aa, unidentified
MLHVGLDLSRKRIDVCLISDQGELIDRFEATPDRDGLHGLAARVAVYGQPVRGVVESMNGARFVHDELVAHGWEVLIADAQKVKGLAPLACKTDKIDSRVLAELSFRDLVPAIWLPTVELRREREISRWRLHLVRHRSTLKNRVHSTLITFGHQRHMSDLFGVAGRRLLAELDIPEPWRSHVDASLVLIDDLEARITQIAKELRRSGADHRYIPLLLTAPGFGWITSFTVACEIGDISRFPTPIKLTGYTGLCPRVKQSGQMDQRGPLSKHGPRYLRWGLMEAAIAASSHPLYRERYQATKRRLGKQRGPKVAQIDLSRQLAEAIWYMLTRNQPFAPAGAIIRLAA

SEQ ID NO: 90689 - protein, 339 aa, unidentified
MMKLYGGIDLHSTNNYLGIYDEEDRAVVCKRLPNELEVVLAHLEPYKTELAGIAVESTYNWYWLVDGLMEQGYRVLLANPAGNEQYKGLKYTDDRDDSRWLTRMMKLEILATGYIYPKAERPIRDVLRKRMRLVQHRTAHIVSVLNTITRNTGKTLNWSRIEQMTDEQIDQLCGETMIGMAPRASLAVIKSLNQEIIKIEKAVKAKARLRSEYKLLKTVWGVGTILGLTIMYETGEISRFPQVGDFCSYARCVGSKRMSNGKKKGENNSKNGNRYLSWAFVEAANFATRFYPQAHRFVQKKRAKGNHTLAVKALGHKLARASYYVMRDQVEFDPRRLFG

SEQ ID NO: 90690 - protein, 525 aa, unidentified
MKNSAKSKPKAAAQTTETSKESKSSKLRSRGQKDRIKSKPKTAEKSTQASKTETRKRCKPRGPGKAARMNRKQRRELARKIQADDISLQVIHPDAAGIDIGNQSHYVAVPPSRDSEPVRSFGCVTGELEEMAAWLKGCKIRTVAMQSTGVYWIPVYDVLEAAGLEVYLVNARDTKNLPGKKTDVQESQWLMKLHTYGLLRNSFRPSEQIREMRTYWRQRNDLVRSAARHVHRMQKALTQMNIQLANVISDVTGVTGQAIIKDILAGERDARRLAAHRDGRIKASVDEIARSLQGNWRKDLLFQLKQEQAQYEFCQEQIADCDAQLEKYLKEQEDRSQGAALPKETRKGRNKRKRGNAPTFNVREGLFRMTGVDLTQIDGIDVMTAATVISEAGWDMSRWETENHFVSWLRLSPSNRISGDRVIGKERLRTQNRLNAAFRMGAAGLRESSSYLGAQFRRMSSRLGKAVATKAMAAKLARLVYRMLRYGMEYVDKGAAFYEQQHQKRQIQLLRRKAAELGFQIVETV

SEQ ID NO: 90691 - protein, 334 aa, unidentified
MLYAAIDIHKHVFQAAVLDPDSGQVIEERFSADRESLARWAEPWQGRVLAVAIEATTGWRWVWRELIARGFEVRLAEPLQARALLGRRRSAKTDRLDARWLARLLAKEMLPQSWIPPAEIQELRDRTRLRKALAEDRRRWGQRLHACLLHEGWPCSKSNLLRPPGLRWAAALRLSAHARLQIDSRLAVMATLEAQLDTVDAELRRFARSDERCQALQSIYGIGPILACHLLAEIGEARRFRCAQQITRLAGLDPVVDESGESRRRGKLAKAGSPHLRWALVEAAVHAHRATHPDLALYRATRERRHTTVARLTVARKIGKRAFHALRELELATA

SEQ ID NO: 90692 - protein, 374 aa, unidentified
MSHHSEAFVAFDTSKLRNAVAIAETGRAGEVRFVGEVDSTGIATAKLVKKLAAKYDRLTFCYEAGPTGYGLYRQIRTLGHDCIVAAPSLIPQKPGDRVKTNRRDALSLAKLLRAGELTAVWVPDERHEAMRDLSRARGAAVEDLRGKRQQVSSFLLRHGLHYPGKKTWTKAHTVWLASLKLAHAEQRFAFEEMLLAVRQAQERIERLKQAIRAAVADWSLAEVVTALMAMRGLDLISATTFLAEIGDLSRFQTPRELMAYLGLVPSEASTGDTVRRGPITKTGNRRARRILVECSWSYQHAPRVGKKKLEKVAAAPSVVREIAWKAQCRLCARYRALIRKGKPKNVAVTAIAREFAGFIWAVSREVTSAGAAAA

SEQ ID NO: 90693 - protein, 412 aa, unidentified
MKDLLEISCGLDVHKEKIVACILTGPLGKPTRSEIREFSTLIPDMIALRNWIVSKNCHHVAMESTGIYWMPIYEILEDAFYGDITLLVVNARHMKNVPGKKTDMRDSEWISTLLRAGLLNGSFIPEKRIREFRDLNRYRKSVIRDITSQKNRIEKFLQSSGFRLSSFISDIFGASGRNIILHLMEHGQIDKTALDSCLKTKTRNRIDEILMSVNGTLSEHQKAFLRILMTHYDSLKKHLAEIETSLEEDMAPFTLQVEQLNSIYGISTTASCAIIAEIGIDMEPFKTAEHICSWAGLCPGNNESAGKRKSTSVTKGNPYIKSMLCEIAWVIAGKRNTYLSAWYWRIKQKKGAKKAIVALARKLLVIIYTMLKQGTLFDESCLETRRKHCEQKQLSRYIRELEKHGYHVEAQS

SEQ ID NO: 90694 - protein, 410 aa, unidentified
MGYETKNRRAHVMTRKNTLKSLPPDTEFRVVGLDLAKSDVSVAAIPVDDNTPSLVDRMTYADLLDWAGKISPTLFAMEPCNGYSLLCLQLENLGHEIKVISGWTVSMWINTHLSEQKTDLNDAIALARLAVSDAELTPIRHKSITEIRIQTVQAVRQQLMSQRSKSIVSFKALAQQWGIPCAAGHRNLKKLRESIEAKVDLITRPVANAMLFLLDAVKSLDRQIGQLNQTLQELVMSDERGRLLQSVLGVGTQISARVITVVGNVERFNSPRSLVAYVGVAPRNFITGHKNLTKKKHGNCPDLSHKGQGKISRRGDKLLRSLFIQGAACLYMQFCKDQLPECQLKRWILKQLAMQKNYGKLIVSLAAKLIRIVWAVLTYGEKFNIQKAGMTRSMWSEMALETPLNKEVPA

SEQ ID NO: 90695 - protein, 418 aa, unidentified
MTKPIDSTFIQIIHPVCCGLDVHKDKISACLITLDENGQEQYELREFTAFTKDLLEMKKWLIENDCPILAMESTGVYWRPVHNVVEGVMEVILVNARHIKNVPGRKTDISDSKWLAGLLRHGLLRGSFIPPEKIREWRELTRLRKIYTESLADYKRRIHKIFITANIKIDSVVSDLFGLTGRNLIGLLCGEAELTIENVQKCTKGTLTKKASELFDSLQGFFKDHHRFQLIGMMETISTFEKRIDEINERLDLLTKEHQSLLDRLDAIPGINKKSAQAILSEIGVTLDEFICMSAFVSWAGLCPGNNESAGKRKNGRNGVRNHPLKTILVQVAWAAIKTKNSYYKAKYYKLKARRGAKKAIVAIAHKIGKAIFNIIKHGATYRELGEDYLIAPNKQKVLRNLNKRAKEMGLKLVPCEI

SEQ ID NO: 90696 - protein, 410 aa, unidentified
MEVLHPRCCGLDVHKDTVVACVRLVIDGKTVKEVRTFSTTTADLMALSQWLAENKCTHIAMESTGVYWKPVWHILADGQFELVLANAAHIKGVPGRKSDVKDADWVSDLLAHGLIRASFVPDSPTQEMRTLIRTRKQLSREQARHILRVQKTLEDANIKLDSVISDLMGVSGRKMIEALIAGQRDPVKLARLADPRVKASQETLRQALRGRVTKQHRFLLRLHLDQIDGIDAAIAKIDREVEAAIAPFRTAVEQISSVPGVKNLAALQIISEIGTDMKRFPSDANLVSWACICPRSDESAGKRRSTRIRKGSPWLKTALVQSAHSAVRMKGTYFHALFHRIRSRRGVKKAIVAVAASILTAIYHMLKDGTMYQDLGPNHFDARNKERQKNRLVKRLADLGYAVELAPLPN

SEQ ID NO: 90697 - protein, 386 aa, unidentified
MSYGPRVGHGLAVRVLVPNPRVSFPWESQSPVGHGVLFRTVARAALPASQGRNLIVNHALVVSSSPLPSSTTMVGVDVAKATLDVFWRPAMRLKVVNSPAGRAGLLRRLQAVDVDRVVVESTGGYERDLLSELLEAAVPVAQVNPRIVRDFARSYNLLAKTDRIDATVLARFGEERKPRTLGPADKIRLMLQELIAARRQLVEQCTRLRNQMEHVRLKTVAESIRRSIKHVRQELLLIEAEIQRLIDQNPSLNARQKNLLQVEGVGLTVSRILVSELPELGVLDRRKLAALVGVAPFNDDSGQFQGRRAIRGGRHTVRTALYMATLTAVRRNAVLKVHYQQLLARGKPKKLALTACMRKLLTYLNVRLTHLQTDPPPTTPPGGGAK

SEQ ID NO: 90698 - protein, 471 aa, unidentified
MAADEGMADGAGVPGHGGEGAEVAEDSTQVVEYAAAIDVAKGSGMVCTRVSGSRPDRRRQAVWQAGATYREVIALMDHLRCQGIQRLVLESTSDYWRVWYYLAEAAGLEVWLVNARDVRHLPGRGKSDRLDCVWLCKLNERGMLRRSFVPPQPVRDLRALTRTRARLAQDQARHQARVEKILEDALLKISVVISDLFGASGRRFLDALAAGERSPAALAALGDPRLKATRQELEDALTGRFRDIHAFEISTHLRLIDAINEEIARLDEKIGQQLALIPGTAPACAACGLAGGGHAPGCADQDAEVLGLAERLDEITGVGAVNGAALIAELGTDPSQFPTPGHAAGWARLTPRSQQSGETAKPGRTGKGNRYIRGALGQAAMTAAKTDTRLGAMYRRIARKRGKQKAIVAVSRVICEIAWILICDPSARYAELGPDYYQPLSPARQTRAKIREIERLNPGKKVILADADTAA

SEQ ID NO: 90699 - protein, 352 aa, unidentified
MEIVVGIDVSKERLDVAILPQEEVFAVGNDHAGIDELVERLKGIGVDAIALEATGGFEMLAVAGLSAAGLTVLVVNPAQVRAYAHAIGRRAKTDPIDAAVIAAFVLATKPEIRPLRDAETQALSELVARRRQIVQMVVAEENRLRMALAKQAQKSIKRLLKALRRELESLDADLDSHIRKSPVWRVREALLTSVPGVGATTARTLLAELPELGSLDRRQIASLAGLAPWTRQSGKWKGKSFIGGGRGKVRAVLFMAALVASRYNPETSRPSATGWSLPASPRSSPSSQPCASYSPSSTPSSGTDDHGKTLDKQDSRSPRGEKRESRRCGISLLPSGRRCRQADEGATRHALI

SEQ ID NO: 90700 - protein, 410 aa, unidentified
MEIQHERCAGMDISKRDVKVCVRTPGKRHRTFDKQITVWGATAGEVRSLTEYLVAQEVTLVVMEATGSYWKPFYYPMEAKLNVMLVNARHAKNLPGRKTDVSDAQWLAELGAHGLVRASFVPPEPIRELRDLTRARATFARERTREIQRLEKLLEDAGLKLSSVATQITGVSSRAMLSALIAGERDPAVLADLAKGRLRNKIGPLTEALQGRFSNRHAFMTHEYLQRIDQLEESIKRLDQQTKAAMVDYEPAVALLSTIPGVSTTVAHVIIAETGADMSRFPTAAHLASWAGVCPGHNESAGKVKSSQVRPGNTYLKAGLGIAAMAAARSNGTYLQGRYKRLAARRGPMRALVATEHSMIVSIWHMLITGEIYNELGADYFSRNNPGLARRRAVAQLHRLGYKVELTTAN

SEQ ID NO: 90701 - protein, 470 aa, unidentified
MSKGSGMTRGDRRRNARRERLRAVLPRDGAVIGIDLAEDKQAIAVIDHDVRVLARKTVRVKVFRLGEALDWAVGQARAKGFAHVTVACEPTGPRWLQVQRLCAERGLPLVCIQPLMSHIAREQQDYTTHKTDEADCVLIARLAVELHCYLPEELDETWAHLRHLGRRRAQLITSATASAQRIRDFLSVAWPTVTETCAQPLESVTWLAALQVVTSRCGADPGRLAAMGEEAFTALVRGAVPGWGGKKGWGTICGRIFAALIDTEGVVVSSRRGLLRRCADELGDLQRARAQRRAVEADMVAVLEELGLSRLADIPALTAVGAAAILAETGDPRRYDSSSSVVKHAGLSPSDNASGAFYGEAHISRRGRPGLRLTVWRAVWPMLRFNPVMAAKYQAMTSAADDAAQAAASQADAGSRQVSAAAAAARARRARARVACAASLLRWIYSMVVHDTSWDPGVASGAASCPAEAA

SEQ ID NO: 90702 - protein, 427 aa, unidentified
MEKMDNEIKRGCGIDIDSITLWVTIFIITLRGTRTDTKEFSNTVSGIKELKKWLKRKRISHVAFESTGYFWQMLYSFLETDFTIVVANPRQIKQLKGKKTDRLDSKSLAILLRNGAIRPSFILPKEFREFRDLTRQYQNLVHDLVRVKNRIRQTLWHACIPLDKCMSDIFGKSGHAIIEALINGVPGKEAAQLAKGRLKGRIALIEEALRFPLSNHYREVLDRYWEQYLSLKEEISQLNREIDTKMSPYNAVIQRLCSIPGIGRKLAQSILSEIGIDMTRFPNAKHFASWTKLCPGNNSSAGKRKSGRNSRGNKYVRSYLVEAAWAAVSSRGSAFRSLYYRRAARLGRKKAIISIAHKLLRIIYKVLSDGSEYSAAYESELCQNMRISVARKRLREFDNEELVSELLSRGVKTVTWSWEEDEPVLTV

SEQ ID NO: 90703 - protein, 395 aa, unidentified
MSAEGEAIRSNDYRKDTTVKAPSTRPAAVLGLDVGKSSHWACLIDRDGEVLASAPVRNREAELDALFASAPAGTLVVVDQFRNIGSLAVRRARAAGLGVAHLPGLAASRAAGLFAGEAKTDERDAAVIARTALGVPDSLSGVPGRGEALEAARALSSQRDHVVACATRDKNRLRAVLLESCPALEAAVDLSDRRWLELLAGFGGAWGIARSGAGGPRAEAAGEAAAASTAPPPALVEAENRQVMFLAARISEALDEAGALEAETAALLEGDETYACLLTVPGIGPRTAAQLAVSVDIGRFPDHDHLASYCGIAPRVRSSGTSVRSVRASRRGDARLKSLLIFSCNSLVRSSGRYGEYYRACRARGMGHGRALKAVARKRLRAIYAVMRDRVPYRE

SEQ ID NO: 90704 - protein, 411 aa, unidentified
MDTIVERPGALDVHKAQVTACVRTPGAGRAREAHFAEFQTTVAGLLTLRDWLAAHGVTQVTMEATGVYWKPVWAILEDDFELLLVNARHVKQVPGRKTDMSDAAWLCQLAEAGLLRASFVPPKPIRALRNLTRYRKTQIQERAREANRLHKALEDTGIKLDCVASDILGVSGRAMLDALVSGTTDPQVLADLARGRLRAKLPALREALQGRFDRMHALWIGSILAHIDFLDEQITGLTEMIAEQIAPFEKAVELLCTIPGVQRRTAETIIAEIGIDMTIFPTAKELASWAGQCPGNHQSAGKRRSGKTRNGSKWLDWGLEEAALAATRSKDTYLAAQYARLRPRRGHKKALGAVKHSIIVACWHMLSTGEIYNDLGGDYFQRRDPTKTTKRLVAQLERLGHTVTLQDAKAA

SEQ ID NO: 90705 - protein, 343 aa, unidentified
MKVTTIGIDLAKAVFQIHGVDERGKAVVRKRLKRSEMATYFAKLEACLVGMEACGSAHHWARKLQGLGHTVKLMSPQFVKPYVKTNKNDMADAEAICEAVSRPSMRYVSVKTVERQAILSVHRARAGFVKARTAQANQIRGLLSEFGVVIPQGIHSIMKRIPEILEDGENGLPGTMRNLLERLTANLKEMDRQVDELERQIQLWHRENEASRRLAEIPGIGPITASAIVATVGKAKEFKNGRQLAAWMGLVPRQNSSGGKQNLLGISKRGDTYLRTLLIHGARSVIRYAESKADESGWLRKLMARRNKNVAAVALANKNARTIWALLAHDRTFRPDYIPAAVA

SEQ ID NO: 90706 - protein, 387 aa, unidentified
MFYVGIDIAKNTHWASIISSDGEIVKEPFSFSNDNSGFQKFISNLDSLDKTKILIGLESTAHYGENIISYLFNLNYKIGLINPIQTAHLRKSNIRKTKNDKVDTYIIIKALTLGNYSLITSRDINNLKLKGLCRSRRNLVTIRSKSKIQLVSYLDQIFPELAQFFKGNLHLNVSYQLLKEYSSPKQISSLHLTKLSNILHDNSHGRYGKQDAIRLRELAKSSVGVDNPSLSLQIKHAILQIELYNEQIAEIEALYKSILDEMDSPILTIPGMSYNQAAVIVGCIGDINRFQHSCQLLAYAGLDPSVIQSGNFQARSTKMSKRGSGMLRYSLVYSAHNVVKNNKTFRDYYELKRSQGKSHYCALGHVAHKLVRVIFKLLKDNVTFNLD

SEQ ID NO: 90707 - protein, 407 aa, unidentified
MEKKEKRYIGLDVHKHYLIAVGVDENLEVVLPARRVELSHLEGWMKKALTRQDEVVLEMTTNTWQLYDELVEYAGSVMVVHPPHVALITRAQVMNDKIAASILARLLAKGLLVGIWVPPQGIRELRGLVAQRRKMTRLATQAKNRLHAVIQRHHLKPPLGNPFAKTNNGWWLALPLGKLEKMNLQSDLETLQFAEQQEARIEKEMTGIAAEDEEIGCLLHISGFGVITAVTVYAAIGDIGRFVESKKLVGYAGLGARVHDSGLTTRTGKITKAGRRDLRVALVEAAHVVANSHPHWKAELARLQPRLGYNKAIVAIARKLLVTVWHVLARKVADRFAEPEKVSKKMLHFAYEVGKANRAGKSAAQFTRERMDTLGMGQDLTSIPWGAKKPIPLPPSTLKERSDVPNK

SEQ ID NO: 90708 - protein, 355 aa, unidentified
MSSIEGRWCMKTVTFDVHAEACQMAVVTEEGEVVYETRVETTAEALCRAVDGVPGPKRVVFEEGPMSALIHDALKDVADEVISCDPTRNALIARAEDSNDERDARRLAVLAGAGAIRQVYVPPEPYRTLRSLTHYDQTLAEAVTTVKNQLKALCRRQGIRCKGTGVYRSAGRGEILKLAPNALVRWAMQSLYRRLDALRRERVGAARMVSKQVKKTGVMKVLGTIPGVHTKTGPAIIAWLADPGRFKSRGAKSSYGGLGLKQDVSNWKPTGHAHASRRGQRELKRALFLAARGALRGTNALRRRYDARRAAGWEGKKAIRDIARTILFIACAIWKSGEEYDDGKVSVPKTEHGAR

SEQ ID NO: 90709 - protein, 366 aa, unidentified
MIVIGTDTHKCTHTCAAAKSGTGELQGELTARAREPGFRELLDWGRELDSERIWALEDCRHVSGALERFLVGEGERVVRIPPKLMGESRKAERARGKSDPIDALAIARAALKEGPETLPVAQLDDEALELKLLLDHREDLVRARGEDQQRLRWHLHDLWPELEIPAGALDRALWLDRIARRLARAEQTARVRIARDLVRAVRERSRRATELEREIGALARAQAPQLIELPGCGPLTAAKLVAETAGVKRFSSDAKLARLAGVAPIPASSGRRDRHRLDRGGNRQLNCALHRIAVTQGRTHPPARDFLARKQAEGKSRMEALRCLKRHLARAVWQALRAAQRRESINSPSLIDDSPKLRPAARLGLT

SEQ ID NO: 90710 - protein, 386 aa, unidentified
MQYPNDSRRCLTVLDQDSTLIAVIEMSLSSWLVAGIVPGVERQPLKKLAVDESALLKLLRRWREEAEKAGRRIERIVVAFEAGRDGFWLARWLKACGIEAYVIHASSIAVSREHRRAKTDRLDTELLKRSFLGWLRGERDHCKMVAIPTIKDEDAKRPNRERDSLIRERSRIVNRMKAAFVRLGIRGFNPKLKRAAGRLDGLRTPEGEPIPPNTSAELRRDMERRRLVSDQIRQIEEARLERIEQAPSDGPHAMVRLLARVIGVGIETADMLVHEVLSRNMRDRRAVARYAGLTGSPDESGRKRREKGLARSGNARVRRGMIQLAWRFLLHQKDSALTRWFRARTENARGTRKPMIVALARKLLIALWRLVREGVVPDGVVLRPAQ

SEQ ID NO: 90711 - protein, 343 aa, unidentified
MEHYVGLDVSLKQTSICIVDRTGKIEREGVVSSDPEAIALFVKSHAPYVTRIGLETGPTATWLWTELKQLGLPVICIDARHAKAVLKMQINKSDRNDAAGIARIMQTGWFKEVRVKGLDSHSVRALLTSRALLVKIKRDLENQIRGLLKNVGLVIGRAKFNVFAVRAEELIEDRPELIAVVGPLLKARQAIERQTDDLNRKVLRLARYDAQVRRFMTVPGVGPITALCFKATIDDPARFKRSRSVGAYVGLTTRRHASGEIDWTGRISKCGDAMLRSYLFEAAGVLLTRVPKWSAVKAWGMRLAKRNGLRKATVAVARKLAVILHRMWIDGTEFNWSKKEVAA

SEQ ID NO: 90712 - protein, 340 aa, unidentified
MQNMHFVGLDVHKKIIAFCVKQIDGKVISQGTIDANRAALKCWVNTLPSPWVAALEATLFTGWIYDFLRNYSSNIKVAHPQMLEAITVAKKKNDISDAEKIADLLRCNLLPECYMQPKEIRELRRVLRYRSLIVREIVRMKNKISGLLMEEGIEYEGRRLHTKRYFFNLLEQIEISEELLQILKMSRECLEFLKSIEKKIVAGLKVHSEIKERMERLTTIPGVGPITALTWILEIGDPHRFPNIKKAVSYCGLCSGQKESGGKQYRGPISKKRNKRLQTILIEAAKIAPLWNKQLTEVYEREKKKGHRNRATLAVARKLVAYLLAVDKSGKPFELRNTGK

SEQ ID NO: 90713 - protein, 424 aa, unidentified
MAKKGKKNKPTPENMPILHPHAAGIDVGAEEHWVCVPADRDAQPVQKFSAFTCDLHRLADWLTACRVTTVAMESTGVYWIPLFQILEARGFEVALVNARHVKNVPGRPKTDRFDCRWLQKLHSYGLLAPSFRPPEDICQLRSLLRHRDHLIQMTVKHIQHMQKALDQMNLHLHHVLSDVTGVTGMRILRAIVAGERDPHTLAQYRDYRITSSPDTIAKALEGDDRPAHVFPLTQSLALYDCTQQHIAACDQEMERVLGTFESLVDLADHPLPPPTTSHRQPQRNEPAFDLRSHLYRITGVDLTQVPGLQAMTIHIVLAEVGLNRHTWPTDKHCASWLGLCPDHQISGGKVRSTGSRRVQNRASRALRMAAQSLRNSPSSLGALFRRMRSTLGPAKATPATAHPLAKIIYHMLKEQTPSQERGAE

SEQ ID NO: 90714 - protein, 393 aa, unidentified
MKNVYANVTAVGMDVHYKFSTVTMRDAKGQVVRRERLDHRDRAALRERLRRWPRAAPVVLEASFGWGWLADLMQGLGLRPELSNCYKLEQMRKARGLPKTNKKDADLLSLLPYEADGWWKVWPAPPEVRDRREWMRHRASLVKVQTETKNRICALFHRHGILHEFSDLFGADGRRFLAEVCRRGGTKDVPLPQGALAALRSLMELLTDVRRQLAWIARELRGQLERSALARRLDGIPGIGLILAHALVAEIGMIERFATHRALAAYSLLAPISHDTGEDHGSRPLGRRLGCRGNRTLKWAFVEAAHGAVRRGGKWRAIFDRATDGGERDRNRGYIKVARELVKVVYVVWKKNVQYTDQPPPRPGASRRERAEAFFSSTRSGTGQPCRPMAVVR

SEQ ID NO: 90715 - protein, 393 aa, unidentified
MPQLNDLSRSLIALEQDATLIAVIEMGQSSWLAAGIVPGVDWQPLKKLAPDRDGLLQLLYRWRKEASQAGRTIKRIAVAYEAGRDGFWLARWLRARGIEAYIIHPSSVPVSREHRRAKTDRLDTELLKRAFLGWLRGEPKHCSMAAIPTIEDEDARRPSRERESLVKECTRIVNRVKAGLARLGIRGFRPTLAQASKQLETLRTPEGAAVPANTLAELRRDIARLCFVKQQIKEVETTRAKRLEQTHGERRTAMVRLLARVVGVGIESADLLVQEVFSRELRDRKAVARYAGLTGAPDESGQKRRERGLAKAGNARVRRSMIELAWGHLLHQKDSPLAEWYRRRTADARGGTRKTMIVALARKFLITLWRLVTTGEAPAGLLLRPAAQPLACP

SEQ ID NO: 90716 - protein, 322 aa, unidentified
MWYVGLDVHLDTTAVSIRNSRGVLTKRVIVSTTRTSLRCAFRGVRGRSRVVCESGPLAAWVRDTLQSRLREVLVCDRRRMRLTTSGAKSDRIDADRLSELCRRQDLHLVHVPEGDAAVLRRYALHYARMLRERSRIIQRLRSLFYECGVRVESPRAAPQRVPLGRLVTPGAKYVARAYLRQLEVATALVQEARVSLVTAAEETPGFPVLQTVPYVGEIRASELVAMVGNPHRFRSLRAFWAYGGLGVVQRSSSEHKIEDGKAIREARTRGIRLRVGQPLLKKVLRDIALHASMGRGPFREFYDAQLRRGKTPSVARVAVQGR

SEQ ID NO: 90717 - protein, 345 aa, unidentified
MNRIIKIGMDVHTTNYTLCIFEPSFEHDGTVHCITQVKPEVKNIIHVIETFKKKHENEELNIVCGYEVGCLGYSLYHELKEKGVECVILAPTTMKTEKGGRKLKNDYRDAKMIAECLAYGGYSAVHVPTELDNSVKEFIRMRDDIKENLKSIKQQIIAFLTRNGKQFEGKSFWTRKHIDWINTVSFSEPLLQDTLKEYMIEYNHLCDRVETLDKQIEEISLKEEYVEKVQQLQCLIGIKTHTALSLIVETSDFNRFKKGNMYSAYLGLIPGDDSSGGQENKLGITKAGNSHLRKLLVEAAQGYTRGKVGFKSKVLKSRQENCSSEVVAYADRANERLRRKYYRMT

SEQ ID NO: 90718 - protein, 394 aa, unidentified
MVVSVGIDVSKDKHDCFIVSSEGEVLADAFIIPNTMDGFHYLLQRIRHCTAPQDKIKVGLEATGHYSYNILGFLLDKGLPTYVINPLHTNLYRKSLSLRKTKTDRVDARTIAAMLMSDVDLKSYTDTVYHNEELKSLTRYRFDKVRERAKLKQSVSRLVTILFPELEKLVSSLHSASVYALLSEFPGAKQISSTHMTHLKAVLKNASQGRYGQEMAETIRNAARSSVGSVMPAKSLELQHTIRLIRELDAEIEDIETAIQAIVDEMQSPITTIPGMGVRMGAVILAEIGDFSRFDSPDKILAYAGMSPSTYQSGQLSLSGAYSHMEKRGSRYLRYALYNATKHVCHWDPTFAAYLAKKRAEGKHYNVALSHAAKKLVRLIFAMEKSQRPYCAAA

SEQ ID NO: 90719 - protein, 317 aa, unidentified
MNDALSFVGIDVAKDKLDVFIDSTNQYFTVQNTPAGIASIRDRLTELNVKLIVIEHSGRYERRCALDLMDADLPVALVNPRQIRDFARSRNWLAKNDRIDSRLNAEFGKANNPRLSEKIPQNRAELDELVGRRRQLVAMRASEKPRLQQASSKSVRLSIEKVLRQLDAQIQDLERAISKRIENDDDWRGQVKLLQSVPGVGPVLASTLVAELPELGKVNREQIAALAGLAPFDDESGKFKGRRTCFGGRAQVRCTLYMAALTARRVNPIVRALSQRLLARGKSFKVMMVACMRKLLTILNTILATKTIWRENQVANA

SEQ ID NO: 90720 - protein, 429 aa, unidentified
MTVQQGTSESAVLVAIDVSKLRHDVLIEAPGWRSRKRLVVPNQADEFRHFAEYLHSLDRPVHIAFEATGDYHRGLAHFLLVQGFQLHLASSLALARTREALHNSWDKNDPKDAQVILHMLRSGLVQHYHDPLAHRMNDFQELSKTYHQVSLEKTRTLHRLLTHYLPLYFPEIEPYFHSTRAEWILQLLRVFPTPASIQARSMTEFVREAWSLVGRKVSKQRLLEDIYRTAQSSVALPVAADSEAVAMFRLVLQEMLTLCQLRDQIEERADDHLQNNCDYHRLRQIPGIGPIGALTILAEAGDLRRFAHYRQFLKFCGLDLATYQSGQFRGTSRISKHGNARLRCVFWMAAQVAVRMKENSFRYKYERYLRDTSADADTKRKACVAVAAKIARVAHSLIKTGADYRPFFEAAAPSGRIRSARAVEAISTS

SEQ ID NO: 90721 - protein, 312 aa, unidentified
MALYTNFIGLDIGKFNFVVAVNGNKKTEEYENNNSGIMLFLKKYKNILPNSLCVLETTGGYEMRLLLALCDKNYSVHRANTRHVKNFIRSLGNAAKTDSLDAKALALYGHERSGRLEKFIPSSKKALELYELSQRRKDLKKMLIAEKNRIQAPKVDLVKVSFSEMINILTNQIEAIDKEINKLIAEDEVLKAKKEVLKTIKGIGDVVANELLIFMPELGKINRRQAASLTGLAPKANDSGTVNGYRRTSKGRSEIKSILFLAAMAARNSNSEFKSFYIKLINKGKKKMVALVALARKIIVIANAKLKPFATI

SEQ ID NO: 90722 - protein, 372 aa, unidentified
MRVDKRRNRINRNMSSIIAGVDLGDSSSLATVLTPTGEIADRFSFQMSEEGYTYFSGRVPKDAKVAFEATGMAYPFSRTLREHGYRDITVAHPAELAWIVKSKKKNDKADSLKIAKLHLAGMLPESHLLPREEQIARDLLIQRVKLGVEIGKMKTRIISYLKREGVYSNLPNSKDNFSAKRRIAIAALRFNDDRDLVLRTMIDRLEFMEKQCEPLEQRIKLNARENKYVRILMSIPGVDYYLASLYASYIGDPHRFPSFDHVASFLGIIPESKDSANVRRRGRMSKDGPSTARWSLGVMVDSVMLFNPPIKEYFLRVKERCGNGSYAHVLSMKKLARMIHHMMLAEVNWRWENADLTERKLSRLEANGGDST

SEQ ID NO: 90723 - protein, 350 aa, unidentified
MMIIGCDYHPGFQQIAFVDTETGELQERRLEHREEAEKYYRGLGAQGVKIRVGMEASGHARWFERLLAELQFELWTGDAAAINAKRVRKQKTDRQDAQLILRLMLKDDFPQIWVRNWENRDLRQLLWHRHRMVQTRTRIMNQLQAVALNEGLRCKKRLWRDAGREQLEAFKLAPWASRRRRDLLELLDRLSPTIAELTRAIEQEVEKCPEAQRLQTHPGVGALTALAFVLIIGKADRFQCGKQIASYLGLVPLEKSSGNQRRLGHITKQGNSLLRFLLVEAAQVTVRSLPEWRSKYCHLTLRRGRKIAKVAMARKLAVRLYWMMRKEWDYEQLRKFGSYAGKPGHRDGVK

SEQ ID NO: 90724 - protein, 412 aa, unidentified
MATTIHSNTINQNLWVAIDIAKYKHEVLIEYPNGAQKRLIIMNTLNDFNRLADKLNDTKLPIQIGFEATGYYHRGLAYFLIKSGFNVKLISSIATARTRDAHYNSRDKNDKRDANIILYLLKSGVTQYYYDPVIAETNDIQELSNTYDRVTFRKTQLQHSILNHYLPLYFPEAEKYFCSTRAKWFAEFFYAFPCPNAITCYKEEEFIEKAWSLVGRKVDKHNWLKDVYFSAQNSVGLPIDTRSKTIDMYRLILNDFAEICRQRNDIENLADSYLAQREDYVRLKTVPGIGPIIAMTILAEAGNLRRFKHVNQFLKYCGFDLATKKSGTFSGKTTLSKRGNAKLRQMFWMASTIAIRMRENTFRRKYENYIKEDPKNANLKRKAYVAVAAKMARVVYSMIHHQTDYYCTHSSQ

SEQ ID NO: 90725 - protein, 330 aa, unidentified
MNTAGIDVAHKTLALAISTEEKLGKVREFANTPSGHAALIKVLQSAQVERVCLEATGSYHLDLALAIDAAGVPLMVLNPKAAKRFAEALLTRHKSDAVDAGVLGPFAQRMPFEPWQRPGAEALELRACVRRLEALVADRTRAKNQRHALRQSTTTPAVVLEDVRLSIRQYADQIEALRDWAAGRIAADAALAEVHGRLTSTPGIAAASAIGLMGERLVLPEDRRAKPWVALAGLDPRQSTSGTSVNKKPHLSKAGNGHLRKALFMPALSAARHEPHVNNYYRHLIEVRGLKKIQAVCAVMRKLLHAIHAMLKHRQAFDGRRFCLLREVAP

SEQ ID NO: 90726 - protein, 360 aa, unidentified
MTDGMTSVALDAACIELQGAIVAGFDVHRRQITFDALDTRTGEVLRGKIDSTPAAVEQWVARFPGREVHVAVEACTGWLFVARALERCGAVTHLAEPIETSALRGRKRRAKTDRADARWLRQLLLEGRLPESWMPPEHVRQWRSRARLRNTLASERTSWVQRIRATLYHYGIAGAPDDLRTLAGREFLAGLELPVDARERIRVALEMIDLLELQIAEIERELRALARRQPGCRALMDKIYGIGELTSLVTLCELGDVSRLHASRQAVRLAGIDIGVHRSDRTARLGKLTRQGSPDLRWALYEAAQSACRKTSPDHADYRALKDRGLSHTRASLTIARKLARRSYHVLRELGPDALQPITD

SEQ ID NO: 90727 - protein, 359 aa, unidentified
MNYIGLDCHKQYDFATLIDSETGEIRSKKLAHRKEEFKSFIGGRSNSKMVIESCWNWSKTYELAKDLVDEVILAHPLKIKAIASAKIKTDAIDSRTLAQLLKADLIPQAHLREADNRLKQKVIRHRAFMVAMRTRVKNKVNDLVSNRLLSPTVEETKPKNLFSKSGKGENGVAWLKSLEWSVEEDKKIFESAMRLIEQFSLEISASNRMMDEIFKKDKDAQLLYTIPGIGKTLAVLISTEIDGIGRFSSPSRLCSYAGLVPSTHSSGGKTYHGKITLEGNRWLRWALVEAVVPASYSDIEVRTRLNTLRKIKSANVAKTIMARWLLKVVYHVLKENRPYVPADPADASPGRLLKALASS

SEQ ID NO: 90728 - protein, 370 aa, unidentified
MSVRRILAKTIDTDLEYEAIGIDLAKNCVSAALLTTDGEVVCIDRLDYSELEKSAQALSPTTFAMEPCTEMNYLVQKLEAWGHRCLVIGGKNVQNYVENHYSGQKTDLNDAQALAFLAQDKQLRTIKAKDIEQQKYASLTTLREQYIKQYRQTIVSLKGICQAWGLNISKGISGKAQLKDLIENHAAFPEELRESLVDMVTHAQTTQKVLNKITKTLEVLAKNDKVCQLIQTIPGLGTIRSCRLRATIGDIKRFKNPKDFPAYYGLVPRSIATGHNEKKGKITHRGDRTMRSLMVQGAGSVINMATKGKLKSKQLTKWILKKQKEKMPWGKLVCAVAAKLLRIVRAILISSKPYNPKIAGVAKCSLSKGS

SEQ ID NO: 90729 - protein, 408 aa, unidentified
MRTMHERCCGLDVHKKTVVACVLTSTTKETRTFGTMTHELLEFVAWLEQERVTHVAMESTGVYWKPVFNLLEGRDFELLVVNARHTKAVPGRKTDVKDAEWLADLLRHGLLRASFVPDRSQRELRELVRYRRTLIHEKTRLITRVQKVLEGANIKLGDVASNVMGLSGRAMLKELAAGNTDSVAMAELALSNLRPKRQRLALALEGTVGAHQRFLLRSQIELIEMMEKQIDAINGEVEERMRPFQPALDLIDQIPGIAQHGAEQIIAEIGIDMSRFPTPAHFASWARVCPGTNESAGKRRQAGTGDGNPWLRSALIEAALGAVRAGRAHPNFFAARYRRLAGRRGPKRAQMAIAHSMLIAIYHMLRDGAHFVDLGPEHWDQRHKESVARRSIRRLEQLGYKVTIEAVA

SEQ ID NO: 90730 - protein, 341 aa, unidentified
MQLAVLGIDLGKNKCSIVGLNSAGAVVLRRRLRREGVIEFTTKLKSCVVAMEACCGSHHLGRVLRAQGHEVRLMSPEYVRAYVKSQKNDDRDAEAIAEAATRPTMRFVELKNEEQLDMQTLHRARDRLVGERTALINQLRAVLFERGIIVAQGRRKLERQLTVMGTQVEALSQRMRMLIQDMRAQWYELDRRIAEFDKELADWARDDEAARRLRTIPGIGVLNATALVAAIGHGESFARGRDLAAWLGLVPRQVTTGGKPRLVGITKRGNKYLRKLLIHGARAALPTLLESPTPLGGWLRGLMARMHKNAAVVALANKLARIAWAVLRHGETFSIELSTTA

SEQ ID NO: 90731 - protein, 429 aa, unidentified
MTRISAGVDVSKNRSTVCIMDQDGKFIMRPFLVWHSTEELDFLADTLKRLNGEVRVIMESTSIYQYPIALQLKERGLFISIVNAYEMKQFANIDFRGGKTDKKDSRTIASYGISYWDKLVEWQIPKDTYFNLDLLNRTYMNAKKHRQIILQELQHYIDCAMPGMDKELHSLNLSTKKDFMLDFVEKFWHRDEIVNMTEAEFTEVFTAWAKKKGYRPVEGKAAKIYAIAKSCIPYYPANPTVKTILQCIVDKLSGVNRTLVTIVTQMIEEAKKLPEYQIVREMPGVGDPLAARFFGSAGDIRRFKNSKALVAYAGIDSPPDESGDFSSTHRHITKKGSKVFRDTGYEIMMALRAQKRTWEKVRKNPEVYDYMLKKEAEEKPRKVAKIAALNKFLRIVYARIKELYDNMALAERAKAKTRSKTKAKTKATA

SEQ ID NO: 90732 - protein, 339 aa, unidentified
MVYVGVDLHRRVSQISAMDEQGEVVLARRIRTEPLEFLRVFGELEPEPMSVAFEATFGWGWFAELLKDAGIAAHMAHPRDTKAIANARVKNDAVDAKTLAHLLRAELLPEAWMAPLEVREARRLVRMRGALVRIRSRLKNQVHAVLADQGVLFPMSDVFGALGREELSRLQLPSLVQHRLEAHLRLIADITNEVSIADHEIRALFKNDTRRKRLQAIPGIGLLTAATVLAEVGDFARFPSADHLCSWAGLTPKERSSADNVRRGRITKQGSRWLRWALVEAAVTAERDPGLRALYTRIAARGGRNGKSIARVAVARRLLTLCFYAVRDEHGCRAFPLAS

SEQ ID NO: 90733 - protein, 435 aa, unidentified
MGSKLQKIQAQGAGIDVGSRQFFVGIESGEVKSFDTFTSGCHQVVEYLQQHSVTSVAMEATGVYWIVLHDMLRDVGIEVAVVNGRHVKHVPGRKTDVKDCLWISELHSYGLLKKSFIPDGQVKEMRHYMRLRENHIEQKVKAVQRMDKALVMMNIRLSSVVSDVQGQSSLRIIQAILQGERRADVLLSLCDSRIIKHKKEQMHECLQGFYKPEQLFALKQSWEQYEFSEKQIAACDVCIEKLLQTLTINKPEPVVNEKPKRIYHNKPNVENLHKMVQQLYDGKDLTVLPGITSYSLLKFFSVTGNDLTSWPTEKHFTAWLGLAPNQYQSGNMKKYRRIKTNTEAGQILKECVQPLLRSKHLALGVFGKRISSRRGPSIAIKAMARKLACWIYRMVTKGLDFVENGIKQYEERQKKDTLKWLKKKAKELNYTLAPC

SEQ ID NO: 90734 - protein, 406 aa, unidentified
MELTTLYQRVIGLDVHQAQITACAIIQESDGTTRTEQRQFGAFKRDRRKLAEWAASLTPDQVVMESTGIYWKSPYAALETVGIHALVVNARHVKNVPGRKTDVGDAQWLATLARAGLLRGSFVPPAKLRELRLVTRQRQKLVGQLSAEKNRLHKLLTDSGIRLGVVVSDIHGQSARAMVKAIIAGQQPHEVLHLASRRLKATREELFDALQGELTDNHCFVLDEIMRHIEEIEARIARFDARLLEELKDEHNKLALLQTLPGVDLIGAAMLLVEIGTDMNAFGSADRLASWVGICPGNNESAGKRKSGRVRKGNLYVRRLLCEFAHAASRTKSVFHAKFQALLVRRGYKRSIVAIAHKLLRTIYFMLSRGEHYRDSATDYEALSVQRNASRWIKKLREFGFIPKPA

SEQ ID NO: 90735 - protein, 405 aa, unidentified
MLETIVKRVAGLDVHKMVIVATVLLTQENGETLTETRKFGTFRKHRRQLARWLTRCGIELVVMESTGIFWKSIFETLETAAIKTYVVNARFVKNVPGRKTDVMDSEWLATLARAGLLKPSFIPPKDLRELRLIGRHRMKLQGMLAGEKNRLHKILDDAGIRLGGVVSDINGVSAREMVAGLIENKPVEELVQCARGRLKSKEEELHDSLSESISERHRFLLQKIHAHICILESEIQEMDNYLFEAMTPYQEQWGILQTLPGVDKFSSAMLLIEIGTDMEQFGSPGRLASWAGMCPGNNESAGKRKSGRARKGNRSVRRVLCEVANAARKTNSQFKGKYQSLVIRRGHKRTIIALGHKVLRVIYSMLKNNQPYWDPGIDYEALTVKRNAPRWLRALNKYGYLPAEA

SEQ ID NO: 90736 - protein, 359 aa, unidentified
MRALYAGCDLHGNNNLIGVIDGEGKRVFKKKLSNDLTLVRDTLKPFQEELVGIAVESTYNWYWIVDGLMEEGYEVHLANPSAIQQYSGLKHADDQHDAFWLAEMLRLGILPEGYIYPKEERPVRDLLRKRGHLVRLRTSLVNSLQNILSRNLGRKVNVNDVKALKEDRITLLLEMSEDLALAGRVSKEAIDHLTRQIRKIEGVVEKRIKLKEEYRYLLTLHGVGKILSLTIMLETGPISRFATVGDYVSYCRKVPSQWVSNGKWKGSGNRKNGNKYLSWAYAEASEFARRLYPEPRAYYHRKMQKTNAAVAHSALSNKLARAGYYVMRDQVTFRPEKLFGSGLGWNGEPGLGLVKNHEV

SEQ ID NO: 90737 - protein, 372 aa, unidentified
MNYNTVYVGMDVHKESFSLCAYTIEAEKASHYQRTEADYKKVLNYLEFLRTIYGDDANFICGYEAGCFGYTLYHQLTANNVKCIILAPTTMLEQRSKKRIKTDRRDAEIIAKCLAQHNYSPVHIPTAKDEETKEFLRMRDDHKLALKKVKQQILAFCLRHNYRYDGKSHWTAAHLKWLKALTPEALYKEILDEYLLTYQTLSDKIERLDKRIEELATQDEYREAVKKLCCFIDVKTHTALSVLVEVGDFKRFASAQHFASYLGLVPGEDSSGDDQNRLGITKAGNRHVRLLLTEASQCYARGQVGFKSKELKSRQSGNTPAVIAYADKANERLRRRYYKMVLNKYKKHNVAKTAIARELACFMWGMMTDNIA

SEQ ID NO: 90738 - protein, 352 aa, unidentified
MLIIGCDFHPGFQQVAIFDNLTGEIEGKRLQHRAEAEQFYRSLAGQEVLVGMEACGHYPWFERLLEELGMELGWGDAARVRAAEVRKQKTDRRDAEHLLQLLRENRFPRIWVPSLEVRDVRQLLVHRHKQVQARTRTKNQLQAIALSNGVQKKYKLWTKAGRAELEQLPLLPYAAQRRKRLLEALDGLEAEISELDRRVAEEAHQRPEAVRLMTHPGVGSVTALAMVLTLGPAERFASAKQVGSYFGLIPSEESSGGKQRLGRISKQGSSFLRFLLVEAGQTAARLDPQLKRFYRRLAARKNRSVAKVAVARKLATRLYLMLREDWTYAQLSQAVMQVGPSHSVAGKQEPSV

SEQ ID NO: 90739 - protein, 419 aa, unidentified
MLGVGIDWAEEFHLVAFGRAGEGVVEVLRVEHRPEAVSGVVERIAGLEADPAEVRVVIETRHGLLVEALIDAGYTVLPVNPELVSRRRGPARKKDDAEDARICCLLALDRHAGLKRLIPHGPVAGELRSIARDDERACRDERRLLNRLRADLLATFPAALAIAGDDLGAPRVLRLLQRWPTAQALAAVSREEIIAFARAQRTGYLQRFADRVQAAVASEQFVAPEHLVRAKADTIRLAAAQLLIDAQRRVWEKRMGQLLRDGGQPNEDASPGQTFTGGQIYLSFPGLGARLAARIAGEIGEHVDQFTTPNALQCYAGSAPVTRRSGKRDFVVAHRLACNRYLSDAVPKWAFASLRRCSWARQFYDAQRIRNKNHHAALRALGNRWLEVLWHCLTTGVPYDDTIHVANRDRALQAASAVA

SEQ ID NO: 90740 - protein, 431 aa, unidentified
MEKINLHSAGIDIGSRSIYIGIEGKEVASFGTFTSEFKEAAAYLHEHCIHTVAMEATGNYWVILYDILEEAGMDVWLVDGRQTKQVPGRKTDVKDCQWINQLHSYGLLNRCFVADGLVKELRGYQRLREDHIRSMSMHVNHMQKALIEMNIRLPEVLSQVQGVSGLAMIEAILSGERDPHKLVSLCQKDLIRRKGEELLKALEGHYSPVGLFSLEQAYQGYKFYKLQIAACDQKIQHSLNRNGTDLSDIHLDDSRKPIRHNKPQVEDLGKHLLKLFEGKDATKLSGITDYSWFQLYTETGTDLSRWPTEKHFTSWLGLSPGQNHSGKQKRSKSKGAPKAGNIFRITAQSLLQSKKIALGEFGRRLRARKGTGIAIKAIARKLAEQYWRLMVKGLDFVEYGIQYYQDKLLNQKKKYVLKLAAEMNMEVYQTK

SEQ ID NO: 90741 - protein, 370 aa, unidentified
MKEPTTSYIGLDIHKESIAIAIADAGRAAPRFIGTINPAPAELCKTMRRVCTKETTLIVYEAGPCGYGWVRYLRKQGWACDVIAPSRITRQPAEKRLKTDRRDALLLARESRAGNLTSIVVPDERDEAIRDLVRAREDVRVARHRVRLQMQAMMLRHGRHYQGKRNWTQAHDRHLSTIRFEHPAQELAFNEYRLASKEACERVERITEALRVQCEDWRMNPVVKALMCLKGFDFVAAVTFVAEMGDLTRFAHPRALMAYLGVVPSEFSSGASRRQGGITKSGNKHARRILVEAAWNNRFKAQVSRELEVRQEGHPKIIRDISWKAQLRLSKRWRSLSMGRKLAQNKICVAIAREFAGFIWDVARHVKVKA

SEQ ID NO: 90742 - protein, 395 aa, unidentified
MFIVGIDVAKRSHEVCMITSDGQTVQRPFSIRNNCTGYNLMLEKIRKHTNIKSQIVFAMESTAHYWLALFTRLRKDGYHVILLNPIQTSAMRDMFIRKIKTDAKDSFIIAELIRFGRYAESNVAQDRLLALKELCRNRFYLVDMAGDLKRKLIALIDRVFPEYEAQFDTIFCKSSVALLKKYPTPQRLSNAHLDKLTELLWNSSNGHFGEWKARELKDLARNSFGVEDCDGAYSTLILLMLDQIQSLSGKADALEKEISRLFQSFDTTVTTIPGVGPIIGAVILSEVGDISRFSSADKLAAYIGVDPSVNQSGEFQAAHAHMSKRGSPYLRRCIWMSSQVAVQRDPMFRAYYEKKAAEGLKYMTIIGHVTRKMTAVVFAILRDHKVYEPVLPTAA

SEQ ID NO: 90743 - protein, 343 aa, unidentified
MQAVTTIGLDIAKSVFQIHGVDAAGNVIVRRQLKRRYVLPFFQKLPPCLIGIEACASSHHWSRELKALGHTVRLMPPAYVKPYVKRQKNDAADAEAICEAVTRANMRFVATKTPEQQSCLMLHRTRHLFIRQRTAVINAIRAHLAEFGIVAPVGRNGVEQLLDVVANASDKRLPEIARACVLALGAQLRTLKVQILNFDRQIVAWHRSSEASKRLDEIPGVGPALATALVASVADPKAFRSGRNFSAWIGLVPKQRSSGGKDKLGSISKQGDRYLRSLFTAGALAVIRYAKIHGTKHRPWLTALLARRPTKVAAIALANKIARMAWAMMAKGERYKEPVALAV

SEQ ID NO: 90744 - protein, 356 aa, unidentified
MQPQGTKKIDFKGKELFIGLDVHKKSWSVTILVEGMEHKTFTQLPDPKALFNYLQRMFPGGTYHSAYEAGFCGYGIHRELNALGIKNIVINAADIPTSQKDQLQKRDPIDSRKIARALEKGMLRAIHIFDRDMEELRSLNRTRFYLMRDLRRSKNRIKSFLQYYSIIIPLEMDNNQWPLKFVAWLKQIQMQTLSGQDAFSNLIRSYEYHREQILTLSRQIRLRVTEYDKELYSLLKTISGIGPLTSSALITELGDINRFPHIDHLSSFVGLIPRVKQSGETSYSGGITFRCNSYLRTLLIESSWQAIRQDPALMQYYHQHLINNKGQKVIIKVARKLLNRIRYVMKNRQPYVTGVA

SEQ ID NO: 90745 - protein, 317 aa, unidentified
MTAPEIFVGIDISKKRLDVAVTPGEQTFICPNTETGIRKLVCRLKELNPQIILLEATGGYEFLLIAALREAELPACFINPKLVRNFARGAGIAAKTDRLDAQVLALYACRMRPQPRILPSQQQQELKLLLTRRRQLLEMIQMENNRLDPAPLPRIAQSIQQTIQLLEAQLAALNREIDDFFRLHPLWLGLEKTLTSVLGVGHLSALILIAYLPELGRLNRKEIAALAGVAPYNRDSGQWRGQRHIEGGRRLLRHGLYMATLVATRFNPVIRACYQRLLAKGKAKKVALIACMRKLLIILNAMVRKQQPWCPCAPITS

SEQ ID NO: 90746 - protein, 334 aa, unidentified
MKKRYFIGIDVAKASFDFCLLSSSGACLWRGQFCNDAHGIEGFLAQLRAGGWKLCQIHFALEATGVYGQKLLSALHQGGLAASVLNPAQVKYFAFSVLRRTKNDQVDAEIIARFCRERKPLATRALRPIEEQLKLLVHERESRVGEQTRERNRAKKDPFQIALPTLIRRQRQQRLQQMEKETAQLDAAIDSLIASDECLKTQSKLLCSIPGIAAVTAAKLLSELAAKEFQSARQLAAYAGLTPSEFRSGYLLYGKTHLSKIGNAFLRKALYLPAAGARRWCKPLKPWIAILESRKLHDLAIRGALMRKLLHIAFGVLKHQKPFNPLLVSFAKTL

SEQ ID NO: 90747 - protein, 383 aa, unidentified
MKAVCGLDVHKDSIYLCILHPDGELFEQVFGVLTFQLHEMCKLLKKHHVSEVSMESTSIYWVPIWRVLSPHFTLRLVNPYFIKQLPGHKSDVKDAQWIAECTKKELVNGSFVPPEIIQQLRQYDRRIFDLNEEIVRKESKVDAVLQRCNIRLSNYVSNIECKSYRTVVRRLSEGVTDPQELIKEIHGRIINKHGRETILASMEGVVSQAEIDVLRQLREEIDIAESHKKECQDKMSEICQKYFPEELRRLQTIPGIKERAATSLIAEIGTDMSKFETANHLAAWSGLRPRNDESNKKVKSRKTTHGNSYLRRTIIQCAWAASRQKDCFFSWFSYHQTVVRRKNKMKVIVAVARKMLVAVWHVLHDNVEYIDFKHDCEESANNG

SEQ ID NO: 90748 - protein, 397 aa, unidentified
MYIVGIDIAKRKHEAAVIDGEGTVIIKPFSFTNNCSGYNRLLAMLAKAKLPLDEVSFAMEATGHYWLALFTRLQKEGFRVQVINPVQTNSIRSFYIRQAKTDPRDALLIAEVIRFGHFSESTLHPENIYELRELCRGRHAIVSMQADVKRKVVALLDQVFPEYETAFTNLFGDTSMAILQNCPTPKELSEMPLEELCHLIEVSSHKRFRMAKAQELQALARNSFGFAMAGDVFSTMIRLYAKHLDFLKQQVREMDRKIAEIMDTLDTPITTITGIGPTLGAYILSEIGDINRFSSSAKLAAYAGIDPTMRQSGEYNGVRNRMSKRGSPYLRHAIWLATSSAVLHDPALKFYFQKKRDEGKPYMASVGHACRKMVSIIYAVMRDNKAYTPYIPNEISA

SEQ ID NO: 90749 - protein, 313 aa, unidentified
MTKTTNTNPIDYIAIDVSKATLQVQDDQRSFAIDNDSKGYLKLLKHLKTCQNPLVVFEASGGYERGLCEFLHKKAIPLAMVNPARIRDFARSEGVRAKTDPIDTKMILAFAKSKALRAMEAPSETSIELAALLDRRGHLVEQLAREKNRLQNSEKFILRSIQRMIKILEKEINAIDKAIDELVGSEPGLKSRSEIIQSVQGVGKITAWTLLAYLSEIEHLNRNRLVALAGIAPFNRDSGKFSGKRSIIGGRAKVRRCLYMAAHTAANCNPVIAAYVQGLRDRGKPYKCAIVAAMRKLLIHIQALVKKHQLSPC

SEQ ID NO: 90750 - protein, 394 aa, unidentified
MKLIGIDIGKNKHFFCIMDQQTGEIISQPVSFSNDKEGFDFLIQKINSYPKDSVLIGMEDTGHYHFALLKYLLNLQYTVALINPKTTDFNRKMQGGITKNDKLDTINICDVLDTPERKKQYRITKVNSFDLYEQKQLTRHHHNLKEEENVYKNRLQKCIDIVFPEFNKLFNSKYGTVYMNILKTFGSAENIANTDIRTIRKCFEIEGRGNRISLTPERLKECARSSIGISSSAEVIQIKHLTAQIELIEEQLTEIDKKIEEFSIQNNSPILSIPGISHFSGTSILAELGDISNYSKPSQIIKFAGVAPLHYESSQFNAQHTSITKKGSKYLRKTLYQIILPVIKHNPVFNKYYQLKISQGKGHRCAQGHCVRKLLRIIYHLLKTNQQFDHQLLR

SEQ ID NO: 90751 - protein, 365 aa, unidentified
MYIIGIDIGKNHHEASIVSPEGKQIGHSLPFATTHKGADSLMSFIFNNIGNSSCIFGMEATGHYWYPIYSFLKARGYTIYVINPIQSDSLRKMYIRQTKNDSIDSFLIAEVIRFGQFTTTSMADENILAMRQLCRYRDSVISSRTEIKLRISTIMEQIFPEYEKQFSSLWLSTSMGILEKYLTPENIENAPIDELFEIIKDKSHNRLTKAKAISIKEAAADTFGIKIAQDAFSFQLKQLIDRMNFLDKQIAAATILAEIGDINRFKSSSALVAFAGIDPTVRQSGEFSSTHNHMSKRGSPYLRHAIFLAATTCSFHNSPLNAYYKKKREQGKHHLTATGAVARKLTTVIYAVLRDGKPYEPKSFC

SEQ ID NO: 90752 - protein, 416 aa, unidentified
MTDQRQWYTGVDWASENHHVRITDGGGRDIGEKLFRHGGEGLAELADWLLAASGATDPGQIHVAIEVPHGPVVETLLERRFNVYAINPKQLDRFRDRFSPAGCKDDSRDAEVLASALRTDPRCFRLLAVADPIVIELREWSRITEDLVAERTRLTNRMRQQLWRYFPAMLDLGSDLGSEWLLDLWQLVPTPREAARIREASVAKIIKRNRIRRFDAAHVLSVLRRQPVTVADGTTQAASAHVATLVARIRLVNQQLDDAHRRLDSLTQRLALSQETEPGQQRQHDAVILASLPGVGRIVLATLLAEAWDALQRRDYAALRSLTGVAPVTKRSGKSRIVIRRHACHPRLANAVYHWARVAVQHAPRCRLKYATLRGRGHSHARALRSVADRLLNVACAMLRAGTTFNPSLVPQNAPC

SEQ ID NO: 90753 - protein, 401 aa, unidentified
MATARSRAWIGVDIGKTHHWVCAVDESGKKLLSRKVLNDEAEIIAVIAAVRELAADRVWAIDILGTPSALLVALLAQAGEQVRYASGRVVAAMSAAYTGEGKTDAKDAYVIAETARIRADLAVIDADTDLVRALGVLTGHRADLVADRVRMINRLRDLLTSVFPALEREFDFASCKGALVLLSGYATPEAIRRMGEARLSRWLRQRRVRGFADVAARAVAAAQTQQTVIVGQDVAASIVAELAGAVLTQHARLKLLDQQIQDVFAQHPQAEVIASIPGFGPVLGASLLVAAGDLAAFPTAGHLAAAAGLVPVPNDSGRRAGNLHKPRRYSRPLRHALYLSAQSSMMRAGPNRDYYLKKRDQGRTHSQAVIALARRRVDVLWALLRDNRTWTPAPPSRAQAA

SEQ ID NO: 90754 - protein, 345 aa, unidentified
MPIVGGLDIHRKQITFDYLDTVTGEVKRGPIAPADRAHVRAWLARFAGCGDVAFAVEGCAGWRYVAEELAAAGIAAHLGEPAGTAALRGRKRHAKTDKTDARHLRSLLAEGRLPECWIPPAQILEYRALLETYHDLRRAHTAWVQRIHAVFFHQGAPPLGEGVLRTEQGLAGLRAAAAAHLSAAGQLQVATALDMLAATEARMGPLRKQLRDTARHLTGARVLEARLYGVGPVTALALTCWLAGKDRFSSSRKAVRFTGLDITVHSSDRKGPPGRLSRQGPPVLRWAVYEAGKTHARTPAPGHCYYAAVAGRKNTKRAALPEARKIVRQACHILAELGDDALTAT

SEQ ID NO: 90755 - protein, 374 aa, unidentified
MSKRTRKAADGKSLVVTARDNVYVGLDVHKVTIHAAVRVNGCLTDTWVMPANAGSVIKTLEPFQAGLSQVVYEAGPTGFGLARALRRRGFPIDVIAPGKTPRPANPGSKSDRLDCRRLAQFAEKGLLKVVAIPTETEDQDRQVLRLRAQVVKKVRRVKQQIKSLLLYNAIAEPEGLKNWTLASVGALREMELPGGIRLFLEELLGELDHLRNKLRRVERAIALLARQERYRDLEVHLRTHPGVGQITAMTFLTEVYQPGRFVEPEELSCYVGLAPRVSQSGERRREGALIKAGRGTLRALLVEASWQWVGKDDFARAHYRRLTRNTGNSQKAIVGMARRMAVNLWCMAVRGEDYCLDYRRTTRGSRRSVSLAGG

SEQ ID NO: 90756 - protein, 313 aa, unidentified
MSLEEQRIVVGIDVSKARLDIAAKGEEWPVNNDLDGIGKLISRLQTLNPGLTVVESTGGLERLVVAELWAAGLPVALVNPRRVREFGKSIGLLAKTDRIDARLLVRFGEAVKPDPVCLPSEEEQKLSALMTRRRQVIEMLTMEKNHLCSSHPAAKESITKIKTVLQQELDELDHQIENFIDQFPGFKKKDEILRSTPGVGKVTAAILLSDLPELGTLDRKKIAALVGVAPFNNDSGRFRGKRRIKGGRPSVRTVLYMATLSATKFNPVIRTFYEHLVLQGKAKKVAIVACMRKMLIFLNSMIRDMQPWRSSIA

SEQ ID NO: 90757 - protein, 401 aa, unidentified
MESPIVSIDVSNGNSHYMCFIKNNKRFGKVKKIDHDIEGFKRLLEDIQKLEAETNEKVCAVFEATGVYTKPLERFLSKNSIKTYIINPLESARKRKEEIHNKKTDKLDPISISKVYYDKEEMMELTKKDETHNWLRKKNRLYEDQLNHLRKYKVTFQNQLSICFPGYLDLFKDGYSDIPMTILKKYPHPDLLKNKKAETVARYLEKNTCHTHKVSLEYALKIIEFAKKTYPGCEKDDVEVEIFKILLDKVIETQRECEKTLNEMITVASTLEEYRYISSIDGIGLNLAARIIAEIGDIEEFKSREALVAYAGLDPHIYQSGDQDGKHLKISKKGNKYLRCLLFLAVGCSIRGAKDNPVNRFYQKKKQQSNPLNSKAAKTACTAKLLKIIYGICKNKTTYER

SEQ ID NO: 90758 - protein, 357 aa, unidentified
MNTVARIGVDLAKNVMQLHGVDESGNVVIRKSISRDRFAAWFANLAPCRVAMEACSSSNYWTRRLHSLGHDVVLIAPQFVTPYRKGGKQVKNDALDAEAICEAASRPHMRFVPVKTPAQQSVMVIHRMRTGFVEERTALTSRLRSLLGEFGVFIPQGIEIFRTKFVEALEAASNELHGLARAALLKGWEHWLALDEQIASLEEQIALHANQDNQAKQLLAIVGVGPITASATLATIVDAKQFKNGRQMAAWIGLVPKQASSGGKSRLGHITKKGNDYLRTLLVQGARAAITTAARRHDRLSRWIVEIRARLGWSRTLIAVANKHARIMWAILAKGERFDPSYVPHRPSFVVSPDTAT

SEQ ID NO: 90759 - protein, 354 aa, unidentified
MIIVGCDYHPGFQQIAFVDTDTGELQERRLEHREAAEKFYRDLGAQGMRVRVGMEASGHARWFERLLAELNFELWIGDAAVIRTKRVRKQKTDRQDAQLILQLMLENRFPQIWVPSWENRDLRQLLWHRHRMVQARTRIMNQLQAVALNEGLRCKKRLWREHGREQLESFRLAPWASRRRQDLLALLDRLNPTIAELSQAIEQEAEKFPEARWLMTHPGVGSLTALAFVLIIGRADRFQCGKQIASYLGLVPLEDSSGNRRRLGHITKQGSSMLRFLLVEAAQVTVRSLPEWRSKYFHLMMRRGRKIAKVAMARRLAIRLYWMWRKGWEYEQVKKFGSHAGKLEPGHGVQYNTE

SEQ ID NO: 90760 - protein, 432 aa, unidentified
MQSQTEPKWAAFAAIDWGDQKHVWKMRPADLTTDEGGELPHTPEAVDLWASELARRFGERPVAVCLEQSRGALVYQLMKYPHLVLFPVAPTTSARFRGAFSPSGAKSDARDADVLLTLLLQHRRQLRPLRPDTEQTRHLQYLVEQRRHMVDEKTRCSNRLTACLKQYFPQVLEWFGDIDEPLPCAFVEHWPTLSAVQHSHPGTLRKFFHKHNCRSEPLIQTRIDQIYAATQAVLDNAIVQAGCMQSRQLIALIEVLRRNIGELEQVIEELYSQHEDAFLYASLPGAGAALEPRLLVAMGTDRDRYQTVEELQSYSGIAPVTQRSGKSEVVHFRYACPKFIRQTFQEFAQHSIQKSEWARAFYQRQRASGKGFHAAVRALAYKWIRILFRCWKNRQPYDEERYLTSLQRRSSPLSQTEWKAAAGFQKLSVKFS

SEQ ID NO: 90761 - protein, 340 aa, unidentified
MEKRYIGIDLHRNRFTCCIRLENGRTYLSEWALKDLDRFVKKLRASDEVAVEITSNTRLFYDAVAPHVSRVVVVDTNQFRVISHSVKKTDPNDARLLSLYLAKGLLPEVRMKDKQLGQLASLTQTRDTLVKQRSALKNKVNNILSARGLNLPKEALSSEKKLAEVLELPFDEIVRIELRVIVEQIRSLNKSIAELEKTIGEEGSKLEGHKGLSSIKGIGKITGAILLSVIGDVNDFPDEGRLASYFGIVPRVSNSNETERNGRIHKRGTKLGRTALVQSALIAANYSPYLKRFYERVKARRGAGKAIIALARKFLGIIYRTLKNKWVFEDFPNFVLVEES

SEQ ID NO: 90762 - protein, 454 aa, unidentified
MKKQDSYIYFVGIDCAQNKHDFAVINDQKKFLIKKGHFSNTLQGYEKFLKTVLSKCLNKDKILFGMEVTGIYGTNLYERLASEGYHVVIISPDSVKKYRDYKGLNKTDKIDSTCIAELLLKGDAQLVDIQKNGYTDLKAYIRRRNALKATCTQETNRFLAKVCLYFPDLLKVFPSGRATLKAVFSIYPTPYSIIEANFDELVSVLQEASKNKFGQDKAKELVRAARNSIVVRKSVPDGELYNIHSLIDSINSLETEIRVLENLIQSKAEEYPAYQVLLTLTGCGKITAATIIAEIGDISRFHKASQIVSLAGLYGNNSKSGSSVNKRGKISKKGSRYLRHAIYMVAEFARRNNPIFKAYFTKKKNGDRTKHILAVNAVANKLCKVIYSLLKNQSTYIIQCRDLAKLSESTQNEFFQNVETDFSANTRRKKYLYEDKHGELHEFVFKSTRKVRVE

SEQ ID NO: 90763 - protein, 342 aa, unidentified
MKVMTVGIDLAKNVFQVHGVNEHGKTVLRKQLKRDQVATFFAIMPQCLIGMEACGSAHHWARKLRSFGHDVRLMAPQFVKPYVKTNKNDVADAEAICEAVGRPNMRFVPIKDIEQQAVLSLHRVRQGFVKARTAQANQIRGLLAEFGLVIPQGIAHIAKRVPELIEDEHNELPGLFRLLVQRLLEQLKGFDHQVREIESQIVAWHRVNENSRKLAKIPGIGPITASAMVASLGDAKSFKNGRQVSAWLGLVPKQNSTGGKTVLLGMSKRGDSYLRTLLIQGSRSMIYAAQRKDISDSWLGRLLKRRNANVAAVALANKNARIIWALLAGDREFHSDYTTVVA

SEQ ID NO: 90764 - protein, 323 aa, unidentified
MQGKVSFEENAMPAVYVGVDVCKEWLDIHLHPLGQSRRFGNDTTGIRQLKRMLARCRPESIVMEATGKFHRAAHRSLSADGFCVSVVDPLRARLFARACGYLAKTDRLDARLLALLAASLRPGANTPPSPHIEALQELVNARAAAKGEITALQNRARTATTAFLRGELSRRLKSLERHVQRLDEEIERCIGEDPELGRKVEILTSIPGIGRITAWALMAGMDELGRCSGKQAAMLAGLAPVANDSGARTGRRSIRAGRPAPRRALYMAALSARRSNPSLSRFAKTLEAAGKPPKVILVAVMRKLLVLANCLLAQDRLWTPNPP

SEQ ID NO: 90765 - protein, 366 aa, unidentified
MKQQHQDSEVTIGLDLGERRHRFCALDSRGEVLEEGSLLNDRASLARLTARYRGALAVMEAGAHSPWVSRYLKRLGWEVIVSNPRKVRAIYQHERKSDQRDALMLARIGRMDRALLYPVRHGSEEAQQDLLRIKLRDSLVRARVALINSVRFSLKSLGYAVRNPSSERFHKVAMERLPERLQQMIAPSVQALAELSTRIAVLEREINVLARTKYPQTLWLQQVPGVGALTALYFVLKIEDPQRFENVRDVGAYAGLCPRRDQSGQSDPQLRISKRGDPYLRRLLVSAAQYILGPFGPQSALRAYGLMLAADGSARARKRAVVAVARKLAVLLLSLWKNRSHYEAFPHWQTIEDKRSGTIAMHRVEA

SEQ ID NO: 90766 - protein, 394 aa, unidentified
MTKHTLYVGLDTDKRHIDVAVAEPLPGGEVRYWGQIGNDPTALDRMIRRLQKGGRELEVCYEAGPCGFGIYRRLNRKPRVRCQVVAPSMTPRRPGSRVKTNRRDSLTLVKLLRAEELTAAWVPDEEHEAMRDLTRARSTAMQDLTRCRQRITGFLLRQEIVYVGKPWTKKYRIWLGRLEFVAPAHRLMFDELLSAFDATRARCDRLLADIVELLPNWSLCWLVTALQALRGYQLINAVTLAAEIGDPRRFENPRQLMAYVGMVPSEHSTGDSVRRGGITKTGNRGARKVLIEASWTYARRAKSLPRAQGQPEAVRVIAEKALHRLSGRYRRLMAQGKLAQVAVTAIARESLGFIWAIAHAAGAENVARPSSLGGRSWPAGKPSQGGPLAPAVGG

SEQ ID NO: 90767 - protein, 353 aa, unidentified
MKPRMESNTSPPTVIGVDIGKDVFHLVGFGAGGKIAFRRRIRRLGLKDAFEKLPPCIVGMEACLSAHFVSRTLRALGHEPRMVPAIYVKPFVKGQKNDYNDAEAIAEAALRPNLRFVREKSQDQLDLQACHRVRSRLVSRRTATINQIRAFLIEQGIAVRTGPRALRNSLFAILENRKDEISARTARLIRGLYEDWCNLDERIETVTGEIEALSRTEAKCRQLMSIPGVGPLISTAMVAAIGSGEAFERGRDFAAWLGLVPRQYSTGGRSILGRVSKRGSKYLRTLLIQAAKVLLMRPHNWARYSFGPWLNSASARLHRNKLAVALANKLARIAWSVLRNDKAFDTHLEVAAI

SEQ ID NO: 90768 - protein, 376 aa, unidentified
MEAVNAYVGLDVHKESIAVAVADSGRDGEVRFWGTVPNTAHHVEKIATKLAERHGRIAFTYEAGPCGYEIHRLLQARGFACDVIAPSHIPRKPGDRVKNDHRDAVTLARLARAGELTAIWVPDPVHEAVRDLVRARHAASKDLKQARQRIQSFLLKHAASDYSAKPWTGRHRLWLAGRRFPHEAQQIAFQSYVNAMEQVLSRRTDLEAEIRHLVPQWSLGALVEALQALRGVALVIAVTLVAEVGDMRRFAHPKQLMAFLGLTPGEYSSGGSVRPRGITKAGNCSVRTLLYEAAWSYRLTPKVGSHMQQTMPRDIPQEAREIAWKAQLRLCKRYRQLQAKGKKSQVAITAVARELLGFIWSIGQCVSPRSEPATIA

SEQ ID NO: 90769 - protein, 310 aa, unidentified
MDVFIGIDVSKDRLDICVRPSGEAFVVTRDDEGLERLVERLRALAPILIALEATGGYETVVASALAAAHLPLAVVNPRQIRDFARSTGKLAKTDRLDAAAIAHFAEAIRPPARPVADAEAQALGELVARRRQVIEMIVAEKNRRRLAGQPRVLKAIDRHVDLLQVELSELDRDIDGAIRKSAAWQADADLLASVPGVGKATLRTLIAELPELGRLDRRKIAALVGVAPINRDSGVQRGRQTIAGGRAPVRTALYMAALVASRSNPVIAAHYQKHRANGKAAKQALTACIRKLLVILNAILRDRKPWSLSA

SEQ ID NO: 90770 - protein, 325 aa, unidentified
MKYTPVGVDIAKHVIQIHFINEHTGEVVDKQLRRQDFLTFFGNREPCMIGMEACGGSQHWARELTKLGHKVRLLQARFVKAFVMGNKNDVMDARAIWMAVQQPGKEIALKTEEQQSVLVLHRSRMQLVKFRTAQINALHGTLLEFGESIHKGRAAMEREFPEALERMKERLPPYLIMVLENQYNRLNELDSLIEDIEKQLTSVARQNETCKRLLDIPGVGPLIATAAVATMGEASAFKSGREFAAYVGLVPKQTGSGGKVRLLGISKRGDTYLRTLFIHGARALALVAKEPGPWITELKKRRPASVAIVAMAASVMTKTGKTGTH

SEQ ID NO: 90771 - protein, 400 aa, unidentified
MISVGIDVSKEKSTICILRPYSEVVASPYEVAHTESGVKALAERICALEDEVRVVMEATGGYHLPLLAGLKQAGLFVSVINPLVMKKYASTALRKGKTDKLDSVRIANFGIDNWFKLSDYSAPEEIYAQLRILGRQYSHYVAMKIESKLALTDLLDRTMPGIKNLLSGKRSEAPTKDKLSDFVEEYWHYDNITKKSEARFVGDYCRWAKKKGYHANEAKAKKIYALARDGIPTLPSSAASTKMLTLEAVRVLREINRTLETILTQMQELATTLPEYAVVHAMKGVGVVLAPRLIAEIGDVRRFHSGSALVAFAGIDSPPYQSGGFSGTQRRISKRGSALLRKTGYEVMKCLKSTKPAQDAVYLFMLKKEAEGKPKKVAKIAALNKFLRIYYARVMEVYKS

SEQ ID NO: 90772 - protein, 495 aa, unidentified
MAVDLEREKVAKARTPLERLQEFLQTGPDLAINSSKESYMPKPRDKANRVRTVSKQELENLPLLNPDAAAIDIGSAQHLVAVPPGRDTESVRSFGAFTADLHALARWLKQCRIRSVVMESTGVYWIPAFQILEQYGLEVLLVDARAAKNLPGRKSDVLDCQWLQRLHSFGLLSGCFHPAAEIVPLRAYLRLREELVRAGSQSVQHMQKALFEMNIQLANVISDITGETGLAIIEAILAGERDGKKLAQLKHRRIQASKETIAKSLEGNWRVELLFALQMALDTYQFYQQQIAACDQRIAQALAKLPTRQPAAQSEPAGQTDQLLKAQKLTPLQAELIRIAGVDLMRIDGIGEQIAQVILSELGTDLQSNFKSEKHFSSYLGLCPGTKISGGKVLKRKSRKVAHRVATALRLAARSLHSSDSALGANFRRLKARLGAPKAITAMANKLAKLVYRLMVYGKDYFDTGTQRYEQKFRLQQIRRLQKQAKMLNLKLVPA

SEQ ID NO: 90773 - protein, 418 aa, unidentified
MDVVRACCCGLDVHKQSVVASLTRAVTGGVRATTTRAFATTTEALTELATWLAAQGCTHAVMESTGVYWKPVDNILREQAPHLDVAVVNAAQVKALRGRKTDVQDAAWLAMLLQHDPLRPGFIPSREQRALRDLTRTRTTPTDERSAVVNRVQKVREDADIKLAGVATDVMGVSGRAILAALLAGTADPAALAALAVGKLRTKRAERERALDGRMRAHHRVLVAMHLGHIDVLDEQIAELDRRIAEATRPVAEVIARLDTIPGVDVRTAQVLVAEVGVAVAQFPTATHLSAWAGMAPGNNLSAGKRRDGKTRKGSKWLRRALVQSARAAARTKKEGQTAFAEQDRRLVVRLGPKKAAVAVGRAILTTAYYLLAHETTYTESARVRLADDRRRRLERRALAQLAALGYHVTLAPKEPAA

SEQ ID NO: 90774 - protein, 328 aa, unidentified
MDPTTTTTALLFAGVDVSKDRLDVCLRWSEPESHHKEEAFVVAYDDNGIDALLSRLLEEPTVLVVLEGTGGLERTVVGALAAAGLPVVVVNPPQMRDFARATGRLAKTDRIDASILARFAEAVRPAPKPLPDREIRALQAIVARRRQLLGMIAAENNRLSSATKAVGKRIKAHIRWLEKELSRTERDLETAIESSPALGENEALLRSVPGVGPVLARTLLAEVPELGTLTHKRVAALVGVAPLNRDSGTLRGHRSVWGGRAEVRGALYMGALVAARRNPVVKEFYERLLAAGKPKKVALVACMRKLLSILNAVLKHRTPWRSTQYLFP

SEQ ID NO: 90775 - protein, 425 aa, unidentified
MNYKQNEKINQVKESTLVVGIDIGSTTQYARAFDWRGIELGKVFTFSNSREGFESFKAWMQHLQDKYEKLDAIVGIEPTGHYWFDLGAYLEDEGILLVMVNPYAVKQTKELDDNSQSKNDRKDPKVIAKLVTEGRYSAPYTPDGVYADLRIMVANRKRLIREMTQIKNRFARWFAIYFPEYTDVFGDYEAQSSMLLLKKVCTPEAIVELGAEKINQIWRDAKLRAVGMKRATTLCETAKRSIGLKKGSSAARYEMKLLLEDYEYKKAQLDAVMEEIEKLCRKIPESEQMLAIKGIGVITVAGFLAEVGDVRRFESPRQIQKLAGLSLRENSSGKHKGQTTISKRGRSNLRAVLFNAAIPLIATNPEFKSLHEYYTTRANNPLKKKQSVIAISCKLIRVFYAILANGVTYDAQKMLSDIHRQPQAA

SEQ ID NO: 90776 - protein, 339 aa, unidentified
MQQERQYVGIDLHRRRSVIVRMTREGEKLDLVRIENDPVALAIEIAKAGPNPAVILEACYGWYWASDVLEACGARVHLAHPLGNNWGHRRVKNDERDAVDLVDLYRLGRLAEAWIAPPEVRELRELIRYRAKLVALRSGLKAQIHAVLAKEGVRVPMTDLFGVAGRVLLGTCPLGDAYAIRVESLLDLIDVYNREIEMLEGRIGQRLDGHRGYRAIQAIPGVGPGLEAVFVAEIGDVTRFPSPDKLTCWAGMTPRHRESDVLVRRGSITKQGSKLVRWAAIEAISRGRGGSFLQSQFRQLAERRDNRNVARVATARKLLTLVFYGLRDGEIRCIARHAA

SEQ ID NO: 90777 - protein, 315 aa, unidentified
MTQPVYIGIDISKRTLDIATADRYIGQVANDAPGHEQLLKQLASQGDVHIGIEASGGYERPLLKRLLNAGCHVSVVEPARVRHFAKSINWRAKTDKIDAQLIARFAHTTQPRPAQKPDKTAEKLRALRDRRKQIVEDRVREQNRLESCDDTSIARMIKQSIARLQKIESQLDAQLARCLSKSPKLKAKADVLIQVKGVAEQTAVTLLAHLPELGTVNRQQIASLAGLAPYAHDSGRHKGKRKIRGGRGVVRTALYMASMSAVQHDAVMRDFYQRLIAAGKLRKIAMTACARKLLVHLNARCAQAQALPGKKAAGA

SEQ ID NO: 90778 - protein, 346 aa, unidentified
MKNSTPKRAVKVLGIDLAKKSFHLHGVDKHGHVVLTKKLTRAKLKAFVAQMPACLIGTEACGGANYWKRVFESYGHTVKMMAPQFVKPYVKSNKNDAIDAEAICEAVQRPSMRFVPSKNIEQQDIQSLHRIRSQIVARRTAQANQIRGLLMEYGIIIPKGIAYVRKEIPGILEDADNELTGLFRSLLRELYDEMVHLDERLEKLEDELKIICRDNAHCQRLLTIPGVGLLSATALVAAIGDISAFKSGRELAAWLGLVPRQHSTGGKPTLLGISKRGDSYLRTLLIHGGRAVVRVAGKYLDKRSQWIGDLEKRRGNNITAVAVANKNARIAWALLTNQTSFQASVN

SEQ ID NO: 90779 - protein, 331 aa, unidentified
MSVCVGLDIGSRTSIVGVRKDGRPAGQWDIAQTPAGRKAAVKKLLALKPKSIVMEATGIYYLDLALGLQAADLPVSVINPKSFHNFAKLMLVNSKTDAIDAQLLSEYGERMTPRLWTPPSPVQLELRALGRHINRLVGHRTRAKNELHALQATSTTVSMLIEDQEEAIASLDNRIERFRKAGREMVAQCPTLTRQYKQLLAGPGIGEVSALAALAELTTLPQMLKSSQVARHAGLDVRQTQSGTSIDKPGRLGKSGNAYLRAAMYMPALTAVRCDPYAKAFYESLVSRGKKKMQAIAAVMRKYLTGIWACMRGDVPFDTVKLFSSEHLGKA

SEQ ID NO: 90780 - protein, 391 aa, unidentified
MDRAWVGIDVGKEFHWVHVLDTSGRELLSRKLENDEADISKLIDKALSLAEEVLWAVDQPGGSAALLLALLWERDQRVLYIPGLSVNRASDTYRGESKTDARDARVIADQARMRTDLGELEPGEEEVAQLRILLGRRRDLVVDQNRTITRLGEALLLLSPALERALDLNRRGPLTLLTHYQSPAQLRRAGHKRIAAYLRNRGVKGFDSVASKALTAAKSQSIALPGESMAARIIAELAREILALKNRIELIDEEIEQRFFDRPEAEILASLPGMGPLLGAEFLVAVGNLSAFARADHLAAYSGLVPAANDSGKRIGNNRRMRGGNKNLKRVFYQAAFASLRSSPESRAFYDRKRAEGKSHTQALIALARRRVNVLWAMLRNGTTFEARSAA

SEQ ID NO: 90781 - protein, 342 aa, unidentified
MEHFAGLDVSVKDTSVCIVDDTGKIIREVKVASEPEALSAVLKSPAYHFKRIGLEAGPLSQWLLSALAEAGLPAICVETRHMQAVLKAQINKTDRNDARGIAQMMRAGLYRPVHVKTLRSQKLRMLLTHRQLLQSKAIAVENDLRGTLRNFGLKVGMVGKVKFEARIRELVDNQPDLAVLVEPMLIVRRVLREQIVILHRRLLAIVRDDEVCRRLMTTPGVGPVVSLTYRATVDVPARFHKSKSVGAVFGLTCAKYQSGEIDRSGRISRCGDEMMRVMLYEAAQSMLRSKKWCWLKAWAMQIARRRGMKKAIVALARRLAVIMHRIWVDGTEFRWTRQAAAA

SEQ ID NO: 90782 - protein, 360 aa, unidentified
MHATTVAVDLAKSVFQLAVADDNWKVVETHRLTRTQFERWFPNRNVTLVVLEACGSAHHWARWLNGLGIEVRLLPAAYVRAYVKRNKTDAADAAALIEAARCAEITPVRVKSVEQQALQGLHRTRSLWMGTRTSRINALRGFCREFGLAIPQGARTGVEAISRALADPHTPIPGMIHRAMLFLVEEIRLLELRIGQLERELAELAKHSPACTTLLSIPGVGLLTATAMVAATGGRVSHFQDARHFASWFGLTPREFSSGNSRVLGRISKQGDRYLRMLLTHGARAVLRAATVARQAGRTLDGLRTWGLAVQARANHNKAACAVANKMARICYAVLRDGEPYGTPSRLAHKLNRSDFMIAG

SEQ ID NO: 90783 - protein, 509 aa, unidentified
MGSKKYRRCCGIDVHKKNVTACILPPVGKPEVEVRKRTFRTFTRDLKQLRTWLKNLKVTEIAMESTGQYWRAVWNIFEGHFEKLILVNPQHIKGLAGHKTDPKDAQWIASLLETGKLKGSLVPPRELRELRDLTRQRVNLLEELNRAKNRVEQLCQAGNIKISSVASDLFGLSGRTMLKAIVEGRRDPGWMADYARGTLRGKRRELEWALDGSFTDNQRWLLHQELGQVDWLEVHIQVLEQEIARRMAPFEEPIRRLTTIPGIESKTAWTIVAEIGVDMSAFEDAQHLASWAGLCPGNRESGGKRMSGRMRKANRYIKRAMCQAAWAAAHTRNAYPAAFYRRLQARKGPQKAVMALAHHLVAIAYNVLKRGEEYVEIGGDFYDRRNKSKVVSRMVSRLAKLGYQVTLTPTEPSELASDKPSSEPTSQISLESEFHADLVGEEPTPEPTAPASVSPEVTVELPAPDITSVRRLKRGRPCKCAERGIPCKHQVGLRLNSFETQGLERGKFS

SEQ ID NO: 90784 - protein, 388 aa, unidentified
MNVGADKSEPLTAIHTDLGAIFVSLELSRSSWLITSLSPGGGEKMSKHSVRGGDFAGLMERFAQLQEKARLRTGQSFRIIVVQEAGLDGFWIHRALQNEGIESHVVDAASIATSRRRRRAKTDKIDGETLVRALLAYKRGEPRVCAMVKVPTPGDEDRRHLCRERKALTAERVRHVNRIKGFLFSQGVSGYQPLRRDRRQRLEELQTGDGRAFPQHLKALVNRELDRLELLLKQIKTVEAARDALLAMEQTAKPAPAAMLLDIRGIGPEFAAILWSEGLFRHFENRRQIAAYAGLAPTPWQSGAVDREQGVSKAGNPRLRTTLIQLAWLWLRNQPRSALSIWFHERVSRNGGRLRKTTIVALARKLLVALWKYVTAGVVIEGVTMKVA

SEQ ID NO: 90785 - protein, 329 aa, unidentified
MYYVGIDISKRVVDVCLLVDGIKGKRKTKTLPNGPNAVEALAEWLTRQQCDPGQAHIVMEATGIYHEHLAYGLHQSGIAVSVINPHRLREFAKGMGILTKTGKVDACALACYGCLRQPECWTPPAPEIRKLRALLQHRDSLLGDKQRLENRLSALSSTLTTEEVMASLELMVQHVKDELEHIERLIADHIDKYPGLKNDLKLLKSIDGVGDQIGWNMLATIRGSNFRSAEQVAAYLGVIPVERRSGTSVRGRARLSKIGPPAIRAKLYMGAIAAISHNHHVKAQYERLLQKGKAKMLAIGAAMRKLVHLCYGVLHTQQQYDRNYGVVAS

SEQ ID NO: 90786 - protein, 407 aa, unidentified
MIYVGIDIAKDKHDCFITNSDGEVLFKSFTISNNPDGFETSFQKIQSVSDDLTKVKVGLEATGHYSYNLLGYLLDKGLPTYVINPLHTNLYRKSLSLRKTKTDKVDARTIASMIMSDVNLKSYSDTSYHNEELKSLTRYHFDKVKERAKLKTSVSRLICILFPELEKLVPTLHMASVYALLSEFPSAHAVASAHLTRLINLLSQSSKNRYGKDTAVMFREAARNSIGSNMPTKSLELKHTIKLIQELTSEIDEIEAAIKQIMDEEIQSPILTIPGISYRMGAMIIAEIGDFCRFDSADKILAYAGMSPSTYQSGQLDNCYSHMEKRGSRYLRYALYNATKYVCHWDKSFGEYLAKKRSEGKHYNVAISHAAKKLVRLTFCNGEIQKSISANSLTFFSVNISLLECQQ

SEQ ID NO: 90787 - protein, 423 aa, unidentified
MKRIAMTKKLDTTFIQIVHPVCCGLDVHKKKISACLIIIDEHGKEQYEVKEFGTFTNDLLEMKKWLTDNSCPVLAMESTGVYWRPVHNVIEGFMEVILVNARHIKNVPGRKTDISDCKWLAGLLRHGLLKGSFIPPKEIRQWRELTRLRRTYTESRADYKRRVHKLFETANIKIDSVVSDLFGVTGRNLIFLLCNESELSLDAIKENAKRGLKAKSKELHSSIHGFFEDHHRFQLIGMMEMIATFEKRITEITQRMDTLTEKHQDLLNRLDEIPGIDKKSAQSIVSELGITLDEFTCMAALASWAGLCPGNNESAGKRKSGRTSVRSHPFKTILVEVAWAAVKKKGSYYRAKYYKLKARRGAKKAIVAIAHRISKAIFNIIKQGDTFMDLGEDYLTVQTRQRVINNIKKQAEQLGYKLVPCEN

SEQ ID NO: 90788 - protein, 343 aa, unidentified
MDYFAGLDVSVKDTSVCIVDSTGKIVREVKVASEPDALLAVLRNPAYDFKRIGLEAGPLSQWLFSALAEAELPVICVETRHMRAVLKAQINKTDRNDARGIAQMMRVGLYRPVHVKTLRSQKLRMLLTHRKLLQAKAIAVENDLRATLRNFGLKVGVVGRVKFETRIKELIESFPDLVALVEPLLVVRRVLREQIAILHRRVLAAVRDDEVCRRLMTVPGVGPVVALTYRATVDVPARFRKSKSVGAVFGLTPARDQSGERDRPGAISRCGDEMMRTTLYEAAQVMLLRSAKWSWLKAWAMKIARHRGMKKAIVALARRLAVIMHRIWTDGTKFRWTREVAAA

SEQ ID NO: 90789 - protein, 325 aa, unidentified
MSSPSLPVVGLDVSKATVAVCYQLDQQVKHVEVSNDKVGFTRLLEVCGSHCLFVVESTGTYYLALAYHLHEQGGRVAVANPLVIKRFIQMHLGKGKTDRQDTQWLLRYGQQQPVKCWQPEEEALVECRQLEQVTEQLLKQKTMIANSLEALQQHPIISPLAQQRLQQMWQLLDDQVRALEAELLALLDQRFTKEMSLLCSIPGIGRKTAGMLLLFAGGFTRLTTYRQLIAKTGLSPREHTSGTSVRGKTRITKMGGGFLRSKLFVCSFSAKKSNAACKALYERLVAKGKNGKLALIAVCNKLLKQAFAIIKSGVPYRADFTRIAA

SEQ ID NO: 90790 - protein, 354 aa, unidentified
MKKYIGCDMHKKYSVFVTMDEHGRLSEPRKVANDSLELDSYLKTLEEATPVAVEASGGWYWFVDRLEQAGLDVRLVNPLEAKKRMAGRHKTDPRDAAGLAMLLRNGTLPEVWIPPADLRDLRGLLRTRLALRRHTTILKNRVHGAVRRYGQWEPGEAKNLFAGKGRVQLAVYVGALPPETRIATRHEWQLIDEVEQHIQELEKRIRRGLGQLGYVRLLRSLPGVGEILSAAIYLEIGEVRRFGCAAQLASYAGLTPSVHASGGKTRMGPASAMANHYLKWAFVANCIVMQKHRFAGRHVVQLYERLRAAKNHGKAAVAVARHLAEASWWMLQKKQSYREPAPASRSSSENGSAR

SEQ ID NO: 90791 - protein, 356 aa, unidentified
MLNDAKYIGLDVHQATISVVVLDCTGHLVMESIIETKAATILQLLHGLSGSLHLTFEEGTCAAWLHDLLQPHVAKVVVCDPRKNALLKAGNKNDRIDARKLADLLRSGLLSPVYHGENGIRTLKEVARSYLALTRDTTRVMNRLKALYRSWAIPCAGQRVYAPDDRSEWLAKITEAGVRRRAEIYYQQLDALRSLREQVRRDLLAEGRKHSAMKLLRQIPSIGPIRAALLIALMQTPHRFRTKRQLWAYCGLALKTSTSGEYRIVEGRLKRSKKFLAIRGLNQNHNHDLKNIFKGAATRAAAVPGPFQDFHAGLVARGMKPTMARLTLARKIAAVTLIVWKKGVGFDAEYLKQQAA

SEQ ID NO: 90792 - protein, 346 aa, unidentified
MEQFVGLDVSQDITHVCVIGSDGKIVWQGTCPSTPEGISNAVRAKASNAIRIGLESGPLSTWHWHALKSEGLPVICLDARHAKAALNMQMNKTDKNDAHGLAQIVKAGWYREVGVKSLDSHTIRSMLGARSQLISMRVEVSNQIRGILKTFGIVLRRHDGLSFEALVSEACERDIGRVSHTVGTLLRVYTSLKAQILCLDRELARYARGSAPCRRLMSIPGVGLLSAIAFITAIDDPVRFAKSSSVGAYLGLTPRRYQSGEIDHNGKISKCGDPLVRAYLFEAATTLLTRVGRWSALKAWGLRIAKRSGMKKAAVAVARKMAVIMHRVWTTGESFRWTSTPELEAS

SEQ ID NO: 90793 - protein, 338 aa, unidentified
MSVELIAIDLAKNIYQLCGVNRAGKSVFNKQVSRTKFVQTIAQYPGVTVAMEACCNSNYIGRLLLRMGYNVNIIPPNHVKPFVKGNKNDRNDAFAIAEAARRPDMHFVQPRSIEQTDMSIAHKIRERRIAERTALVNQVRGLLMEYGVTVPLGIHKLRADLPLILGDAENELSIIARQQFQLLLEEWQALDILISEQDTLIKRQAHADKKATRLMQIKGIAELTSTAIVSHMGASHNYKNGRHYASCLGVVPQEYSSGGKQKVGGITKRGNKYIRRLLVQCAWSIIRRIESATDNLSLWAKKVIERRGKQIASLAIANKLARIVWAMSHYKQDFNYGN

SEQ ID NO: 90794 - protein, 335 aa, unidentified
MEFTFFIGIDISKNELDFAVRHGNILLFHKEAENSPKAILSFIKELSNLDKFSMQKAVFCMEHTGIYNNHLLSYLVKKHANICLEPALQIKNSLGKLRGKNDKIDAIRISEYAYDKREKLRLWQPKRDIVQRLAYLSTIRTRLISVKKMLSVPAKEMDIFIQKDVVKKNAKLYNATLKSIAADLEKADKAIEDIIESDAELKRLFSLITSVPAIGSITATAILITTNEFKDIDSPKKFACYAGVAPFPHESGKVIKKLRVSHMANKKVKTLLHMSALTAIRYNEDLRKYYQRKIEDDKKNKMLVINAVRNKLILRIFSCVNQNRKYEKNYNQILV

SEQ ID NO: 90795 - protein, 313 aa, unidentified
MPSPLIFGVDVAKDTLQIASAQSPTQLSLSNRRSSISAWLAKLPRGSRVAMEATGRHHLLLAELAHAAGMIVYVLNPCDLRHYARAVGLRGKTDRVDARLIARYLLREQAELHPYVPPTPVQREIDQLLRRRATLVNTKTRLQLSLRGMASYAADLRHVLKRLEALIAKFDQRLRQLATHQADAQRRVESTLGIGPLLGVALTNTFERVPLHNGDAAVAFVGFDPRAKDSGQFKGRRRLSKRGPAELRRLLFNGARSASKTKLWHPLYERYRNRGLSATEATVILARKLLRIAFSIYRHGTTFDPARLRSCLT

SEQ ID NO: 90796 - protein, 351 aa, unidentified
MLSQTTAVPKLFIGMDVHKKSWTVHFKTDLFDNKTVTMPADPAALISYVEKTFEGHEVSCCYEAGCCGYWIARSLQQKDWEVKVVNPADVPRNNKQSWQKTDKIDSRNLCKHLSDGNLKAIYIPDEQQEQLRSLFRRRIHLARNLRSIKNHIKSQLLYFGIKLPEQYDNPNWSREMKTWIGNIKWKYSSAAESMRSRLKQLEFIWYEELHISNELRTYCRKHYKKDYYLYKSVPGIGGITAAAMIAELGDIRRFNRLDELAAIVGLVPGIYQSSDNKINLGLTKRSNHQLRSLLVEASWVAVRTDMALQQYYRKHAHKEPNKAIIKVAHKLLSRMRAVIASGVPYQLGLTK

SEQ ID NO: 90797 - protein, 356 aa, unidentified
MAIVAHARPFVIGVDTHARNHAVSILACPTGEIVDEAQFPATAAGLSRAVSWAGRRTGGDVTVLWVIEGTGTYGARLRAVAADTGYTVVEAPRINARANRTIGKSDPLDARRIAAAALPLHETQLREPRADDGVRAAVKVLLASRDHMSTERTATINALTALLRVVDLGIDARRPLTQAQIDATAAWRARDEALATATARGEATRLAKRVAALDKELKDITKRITDLVRQSPAGGLLDQPGIGPVTAAVALTSWSHLGRIRSEAAFASLAGASPIPASSGNTVRHRINRGGDRRLNRALHMAIVTRMRMDPRTRAYVERRTAEGRTLREIRRCLKRYLAREIYRHLTTAARAQLTA

SEQ ID NO: 90798 - protein, 343 aa, unidentified
MHIASIGIDLGKTTFHLVAVGEQSKVVVKKKFSRKQLLAYTANLQSSLIGIEACSGAHFIGAALRSQGHDVRLIPAQFVKPYLKSNKNDFLDAEAIAEAVARQNMRFVPIKTEDQLDLQALHRVRDRLVHHRTAIINQIRGFLLERGITFAKGPANLRNQMPAMLEDAELKISPRMRTLLARVWQEWKQLEIDIADASDEIERISSEDAGCKRLRQIPGVGPLVSTATVAAIGNGAAFRKGRDFAAWLGLVPRQYSTGGKAKLYGISKRGNIYLRRMFIHGARAVLLRVKYDTGGFGQWVHQLEARAPRNKVIVAIANKLARIAWAVLFRAEDYRHMAVCAPA

SEQ ID NO: 90799 - protein, 372 aa, unidentified
MTSMPEPTPIDRARDEREEVVLGVDTHKDLHVAAVLSGLGALLATRAFPTTAAGYRGLVAWARSFGALRRAGVECTGSYGAALTRHLQAEAIEVVEVNQPDKATRRKRGKTDAIDAEAAARAVLSGRATATAKTSNGPVEAMRVLRMARNSAVNASTKAINQLKAVLVGADPALRDSLAGLGPATLVRRCAELPDPTPGSGLSEVDRAVVFTLRTLAARIMALKAEAYQLHKQLRALIAAHAPELLERRGIGPDSAAALLIAAGDNPERLCSEGSYAALCGASPVEASSGKTQRLRLNRGGDRQANAALYRITVSRLRWDSRTQDYLRRRLAEGKTRREAIRCLKRYIAREIFTLITPKAATALANQTANAA

SEQ ID NO: 90800 - protein, 351 aa, unidentified
MIIVGVDYHPSVQQVAFLDTETGETGERRLNHSDGEAERFYRDLQRRQVKVRVGIEATGHARWFERLLAELKFELWIGDPARIKAARVRKQKTDRQDAELLLRLLIEGRFPQIWVPSPENRDLRQLIWHRHRLVQMRTRAMNQIQAAAMNEGVRRKKTLWSKTGRRQLEALPLAPWATRRRQDLLELVDRLNTTIDELTAAAEQEARKRPEVLRLMTHPGVGPITALAFVLVLGSPDRFGCGHQIGSYLGLIPCEDSSADRQRLGHITKQGSSLLRFLLVEAAQAAVRWDPDWRRRFVHLAMRRDRRIAKVAMARKLAVSLYWMWRKGFDYPQTLQFGSHAGEPGYVHGVK

SEQ ID NO: 90801 - protein, 391 aa, unidentified
MLICGIDIGKNHHEASIIDKDGRLLSKSFRFANSTSGADGLLEYIDKCNADKDVVVIGMEATGHYWLSIYCFLFDAGFQVNVINPIQSDAIRNLFLRKTKNDAKDSFLIAETIRIGRFSKTELADEDILSMRQLCRHRMDLVDYIADQKRKIIGVMDRVFPEYQNMFSDMFGKTSTELLAKAVTPEELLAIPTDELCMLLKSNSRGRFGTAKAEELREAAKTSFGITIGTAAFAMQLRQLLEMIELLERQLVELESEIEQYLMKLNTPITTCPGVGKVLGAVILGEIGDISRFSEPKKLVAFVGIDPSVKQSGEFTGTQNKMSKRGSPHLRRAIWLAANVASFHDPVLSAFYQKKRSEGKHHFTAVGAVARKLTFIIYAVLRDNKPYVPNC

SEQ ID NO: 90802 - protein, 345 aa, unidentified
MKITTAGIDLAKAVFQVHGVDEHGKAGLRKQLKRKDVVSFFANLEPCLIGMEACGSAHYWARKLSELGHTVRLMAPQFVKPYVKTNKSDRNDAEAICEAVSRPNMRFVAVKTAEMQAVLALHRARQGFVKARTAQANQIRGLLAEFGIVIAKGIGHIAKRLPEILEDGENGLPGMMRQLLERLGGELKALDKQVREMERQITLWHRDNEPSCKLEAIAGIGPITASAYVASVGDAKSFKNARQVPAWLGMVPRHEGTGGKATLGRISKRGDVYLRTLLIHGARAAITAFERKPDQADGWLKRLLARRNKNIAAVALAAKNARIAWALLAHEHSYHHDYVATCPAA

SEQ ID NO: 90803 - protein, 315 aa, unidentified
MSDVPCFIGIDVAKAQLDIALRPSGERWAVPNDASGVAMLVERLQTLHPTLIVLEATGGLERAATSALAAAGLPVVVVNPRQARDFARATGQLAKTDALDARALAHFADVIRPTPRPLPDAQTQELRALLGRRQQLIGMRTAEQNRLAGASERLTKDITAHITWLNVAIATLDDDLETMLRASPLWRANDDLLQSAKGIGPVSAHTFLLELPELGTLTRQQIAALVGVAPLNCDSGTLRGKRTIWGGRAHVRTVLYMSTLVATRFNPQIKVLYERLLAAGKVKKVALTACMHKFLTILNAMLKHRTPWQPQEVQS

SEQ ID NO: 90804 - protein, 420 aa, unidentified
MRNAGIHANSLLEVRRMYNAVGIDVSKGKSTVAVLQPGGTVIRKPFDVSHTSQNLNELADYLSSLDGTTKIVMECTGRYHEPMIKALSEAGLFISIVNPHLIKNFGNNSLRKVKSDPADARKIARYTLDNWTELRQYSGMDNTRTQLKTLNSQFSFFMKQKVAAKANLIALLDNTYPGVNKLFDSPTREDGSEKWVDYAYSFWHADWVRKIGLKAFTERYMSFCKKHHYIFQQDKPEKLFNASKELVAVFPKEKTYKLLIQQSIQQLNLASEHVERLRREMNELASTLPEYSTVMGIYGVGKTYGPQLIAEIGDVSRFTHREALTAFAGVDPGVDESGQHKSKSNRASKVGSARLRKTLFQIMTTLLQNAPEADPVYRFLDKKRSQGKPYYVYMTAGANKFLRIYYGKVKECLWNLEQTE

SEQ ID NO: 90805 - protein, 415 aa, unidentified
MALKIVYKICCGIDVHKTFVVACVASTSDKGITSYESHRFSTYTSGLKTLLQWLIDRNCKDVCMESTSKYWIPVYNILEKGCSIVLAHPKYVKAIRGKKTDKKDAKWIADLFKHDLVAGSFMPPSDIRQLRDLMRYRFKLTCFKSSEKNRLQNCLTVSNIQLGNVVSDTFGKSAQAILDKLLENPADTSFDLEPLVYKSLKKKLPELRDAIDGFITPEQAGKLKIIKDHYDNLESRKAELEELILALAAPYQQELTILQTAPGISSNFTAIGIISEIGTNMEAFPSAKHLCSWAGLTPTNNESAGKKKSVRVSKAGCYIKPLLVQCANAVIKSTKHPEMRNRYLRLKKRRGHKKAIIAIARMLLTALYHMLKNGENYNPELYQKTDLPPVDREITIEQALMLIRNQGYKIKSATT

SEQ ID NO: 90806 - protein, 347 aa, unidentified
MKKGITTTIGCDLGDKESEIFVLQADGTFDRARVKTTKESVRKFFERAPAHVVIEVGGHSRWVSELLRELGHRVTVANPRRVRLISENDSKTDRTDAELLARLGRADVTLLSPVEHRARQAQVELAVVKARDVLVASRTRLVNHVRSVVKSFGERLPRCTAESFHRRTRKAVPSELGPALEPIYEALARIEEQIRALDRTITELGRKHPEVALLSQPHGVGELTALAYALTIGDKERFRKSRTAGAFFGLRPRKDQSGGGDPQLRITKAGDPLVRRLLVNSANHILGPFGADSDLRRWGLKLAERGGKNARKRAKVAVARKLAVLMHRLWVTGEVYQAIGYGHAEAA

SEQ ID NO: 90807 - protein, 370 aa, unidentified
MSHSTTLFVGLDVHRNSISVAYATENPADEVIFLGPIGTRLCDIDKLTRRLQSKASRLIFAYEAGPCGLTLHRYLTKKGFTCLVVAPSLIPRKSGDKVKTDRRDAVTLARLLRSGDLAPIHVPDVDEEAIRDLSRAREDAMCDLKAAKLRLKSFLLRHDIQYSGRSAWSPAHLHQLARIALPTPTQQIVFQEYVRTISERTERLKCIETELRDRATSWKRAHLVEAFQALRGVQFTVTVTLAAELGDITRFDNPRQVFAFLGLNPSEHSSGDHRRLGGITKTGNSHARRALVEAAWAYRFPARVSLLIQERQEHLPTPIQNIAWKAQVRLCKRYRHLSSRGKHHNVVITAIARELVAFMWAIARELQTAA

SEQ ID NO: 90808 - protein, 341 aa, unidentified
MKKFIRTAIDLGKTYFQVHGLESEGGQSISRKMKRSKMREFYEQIEPCRGGMEACGSGHYWARELVAMGHEVMLIPPAYIKPYIKRGKNDAVDAAAICEAMSRPGMRFVPIKSADQQAVLMLHKTREMFVKQRTMSVNALRGHLAEFGIIVAKGIGRVDELLALAQSDAELPQIAKSAVAGLAQHLEGLDQSIEAVGDEIARAHKQNPTSRLLDEIPGIGVLIASVIASSVPDPSVFKTGRDFAAWLGLTPRQNSSGGKEKLGSITKQGNRYIRKMLVVGATSVMRVAGKRKGALADWINALQAKKPKRVAAVALANKLARICWAIMTTGEGFRVDTYVKA

SEQ ID NO: 90809 - protein, 352 aa, unidentified
MQCIAFDSHKHYTWALVQDETGKVLREQRINHVRGALRGFLEGFEPGSPVAVETIGNWYWITDEIEAAGMVPQLVNARRAKVMSGSINKTDKLDARGLNQLQRSGTLPTVWIPPRELRDARELPRTRMVLVRQRTKLKNRIHANLAKYGLNTDGATDLFGVRGRRILGQCLEELPVQTRYATESLLDELDHLHAKIAELEERMAELFSEIVALEYIMTLPGVGFILGVVILTEVGDVERFPSASHLASYAGMTPRVHASGGRVRYGRTRPDVNHYLKWAYAEAANVAMMHRRRHPQRHVSRLYTRVKSRRGHPKAIGAVGRHLAEATYWMLTKHEPYRDPAAEQTEESKREA

SEQ ID NO: 90810 - protein, 468 aa, unidentified
MRIPFKRSSRNRRFPWHRHSPTIVKQGMAMRKRQAEVVFPNAAGIDVGASSHWVAVPRHATDDPVREFGTMTDDLQALADWLRQCGVDVVALESTGVYWIPLYDVLEQRGFEVWLVDARQMKYVPGRKSDVQDCQWLQKLMSLGLLRAAFRPEADVRVIRTIVRQRDVLLTEQARWVQRMQKALVQMNIQLTEVLTDVMGVTGQAILRDIVAGERDPAILARHHTRRLKASATDIQRALTGTWREEHLFLLQQALAIYDDLARRVQECDAKLEALLQPLQRHDKKLPKTTKTRSKNSPTFDLRQSLANWAGVDLTRIDGLGITHVLKLLSEIGVDLSRFANVKHFCSWLGLSPGTKISGGKILSAGTKRSANRARQALKMATMALARSDSALGAFYRRLCSRMDKPRANTAVAHKLARMVYFMLTRGEDYVDRGRENYEEQQRQRTVAALKRRAKTLGFELTPAPVTA

SEQ ID NO: 90811 - protein, 371 aa, unidentified
MRENTIFVGLDVHKNSISVGLADAGRDGHVRSYGTIDGDLESVHKVVRKLQSTGATLHFVYEAGPCGYDLYRSLTNKGFDCVVAAPSKIPRKSGDRIKNDRRDALSLARLHRAGELTPVYVPTAEDEAMRDLTRGREDAVKALRVARQHLLAFLLRYGHRYNGKSYWSKAYWKWIADIKMPHRAQQIILQEYVHAVHEQFERVQRLNEQIRELVPQWQLAPMVKALQALRGVSLIVASTTLAELGDLTRFSKATQLMAYLGLVPSEQSSGDSKHRGSITKTGNGHVRRALTEAAHAYSHPARESRILLARLEGLPQQVQQIAWKAQVRLCGRFKRLMARGKNRNKIVSATARELSAFMWAIAQEVQPRSQA

SEQ ID NO: 90812 - protein, 340 aa, unidentified
MQVSTVGLDIAKNVFQVHGIDEHGRTVLRRKVRRDQLLKLFGELEPCLVGMEACATAHHWARELGALGHEVRLMPPAYVKAYVKRNKNDAADAEAICEAVTRPTMRFVPIKSAEAQSVLMLHRARHLLVRQRTAQVSAMRAHLAEYGFIAAKGISRLRDLLPLLEDGAGMLPELARQTLLLIAQLIEALTIQIRKIETELLRWHRGNASSQRLETIPGIGFITATALAATVHDARAFRSGRQFAAWLGLVPRQNSSGGKERLGGISKMGDRYLRHLLVIGGTAVVRYTRRKKTSISLWASQLLERKPARLVTVAVANKMARVAWAVMAREENYRATPATA

SEQ ID NO: 90813 - protein, 465 aa, unidentified
MVLREADGIAPVGLGRDVGPGLLVAHGLAQGVRVVALVRQQHGALGEIGDQPFRAGDVALFAGGELALDRAALAVDERVDLGCEAASGATQTAISTPLMDGPPLNRRSDPPEAGDPSAMEEEKMSIKVLGIDLGKASCSVVGLDETGRIVVRRRMRRETVIAFVAKLPACVVAMEACCGAHHIGRALAAQGHEVRLMSPEYVRPYVKAQKNDDRDAEAIAEAATRPTMRFVALKSEEQLDMQTLHRVRDRLVAERTSLMNQIRSLLLERGIVVPQGRQKLAEHLAQAQGEASLLSPRMRVLLADLEMRLNELDERIEAFNKEFASQAKTDELASRLMGIPGIGPLNATALVAAIGDARTFARSRDLAAWLGLVPRQVTTGGRPKLLGITKRGSKYLRKMLIQGARAAMPVVRSSETRLGHWLRSLLARAHPNAAVVALAAKMARIIWALLRHERSYAAGSEPVSA

SEQ ID NO: 90814 - protein, 403 aa, unidentified
MNAVGIDVSKGKSMVTILRPFGEIVSSPFEIKHTSSDIHSLIKLIHSIEGESRVVMEHTGRYYEALAHQLSAADLFVSAVNPKLVKDFNNDSLRKIKSDKADSVKIARYALDKWQSLEPYSITDESRAQLKVMNRQFHFYVKQKTAMKNNLIGLIDQTYPNANTYFNSPTRSDGSQKWVDFVSTYWHVDCIRKMSLNAFVEHYQNWCKRKKYAFNKSKAEEIYTKTKELVPVFPKNEITKHIIRQAIDQLNSTSVTVETIRTLMNETASKLPEYSIVMQFKGIGPSLGPQLMAEIGDVTRFTHKGALTAFAGVDPGVNESGSYAQKSVPTSKRGSSNLRKTLFQVMDVLIKTMPQDDPVYQFMDRKRTQGKPYYVYMTAGANKFLRIYYGRVKEYLSVLPDPS

SEQ ID NO: 90815 - protein, 383 aa, unidentified
MKSVCGLDVHKDSVYLCILSEFGELIEKVFGVLTYQLEEMRDLMLHHHVVEVSMESTSVYWIPIWRVLSPHFKLNLANPYFIKQLPGRKSDVKDAQWIAECTMKELIRGSFVPPETIQQLRQYDRRIFDLNEEIVRKLSKLDAVLQRCNIRLSNYVSNVDSKSYKAVVRAISQGITDPEELVKLIHGRIIKHHGIDVITASLKGVVSLAEIDMISQLRDELDMAEAHKEKCQARMLEICEREFPEDLKRLQTIPGIKERAATSLIAEIGTDMNKFETANHLASWSGLKPRNDESNKKIKSRSITHGNVYLRKTIIECAWAASRTKDCFFSRFSFHQTQVRKKNKMKVLVAVARKMLIAVWHVLHDNTNYIDFTTDRKTSRTRG

SEQ ID NO: 90816 - protein, 368 aa, unidentified
MKQVTTCVGIDAHKKDLFIAMVVGTQATPVTWTVANEPNAIRRLVRKLEREAPGPVRSCYEAGPCGYALQRRMTTTRVACQVIAPALIPCKPGERIKTNPRDARKLAELLRAGLLTAVQPPTPADEAVRDLCRARDDAREDLQRSRHRLGKLLLRRGLHFSGRNWTTAHRRWIERLKWTHAPERVVVDDYLLAINHLEARLIELDARLTDIAQTAPYREPIGWLRCFRGIDTLTAILILAELHDFRRCQSPRALMAYLGLVPGEDSSGEQHRRGRITRTGNALVRRLLVETAWHYQHRPSVGVALTRRRTGQPTRVIAIADKAQQRRCRRFRRLAEHHKPAPKIAVAIARELAGFLWAALQPAPATVN

SEQ ID NO: 90817 - protein, 412 aa, unidentified
MGSLLQGSLPTATLVVAIDPGKARNRVWLSTDASGLVVEPLSVPVLRSGLDELDALVRRHSPDGGPIFAVEATGALHRAWVAELNRRFPQAVRVFAPSETAAARAQLGSRRFKTDDRDCAALTYLARQGHGRSVPADDHEALLAAVRHRRGLVAERKAAQQRLHDQVNALCPGLSAPTGQGRSLDLAGVTGQAFLQCLIDFGGRPVGARSLRARAPGRLSAANAAFWAARWKDCLPPPAHVAAGVDRLARSVRRWRNLNDDITAVETDLETLLAGTDGQILTSLPGVKTVRAASFAAFSLPVTRFPDAEHLYSATGLAPASYQSSSIDRRGRISRQGLPEHRDALMNMAWGLAQHCPPFTDREEQLRIRGMKPMQVRVALARHTCRLAYRMLTTQDAFDEQRYRRNRHQVRR

SEQ ID NO: 90818 - protein, 369 aa, unidentified
MSSVSHRGFTHLGLDVSKDSIAVAVLEPDRDRASVDKIFHDQVSVRRLIGRFEDRSKLWACYEAGPTGYDLYRLLTGLGVRCDVVAPSLIPKRRGDHVKTDKRDARRLAGLHRAGELVAIGVPSPAQEAVRDLCRLRGDMVEDLTRARNRQTKFLLRHSRVWRDGSNWTLKHERWLAGQSFDDRALAATFAHYRATVALRHTSLDGVEADLAVYFMAPPFGDQVARLAAYRGVTRMGGLCLAAEVFDWRRFPYARSFMAFTGLVPSENSTGLSEHRGDITRAGNRHIRAQLVEASWSYQHRPHVGAGIAGRQAGLPPEVVARAWAAQVRLTCRFRQLGARKNIRSVVATAVARELAGFLWAEMTADVAA

SEQ ID NO: 90819 - protein, 337 aa, unidentified
MNEITTIGLDLAKRVFQVHGADATGRPVLQKKLRREEVLSFFAKVPPCVVGMEACASSHHWAREPRALGHDARMIPASYVKPYVARQKNDAADAAAICEAVTRPAVRTAPIKSLTQQALRVLHRTHELLSRQRVSLINAIRSHMAEFGVIAPAGPQHVGSLIERISDPKTPIPDAVRAPLGILVDEYVALNARINALEAEMRKSCREEPESARLLTIPGVGPITVSAILAGVPNIRGFRSGRDFAAWLGLVPRQNSSGGKDRLGRITKMGDRTIRRLLVIGAMSTIRWSRSKQNFAQSWLGRIIARKPIKLAAVALANKMARIIWAVMTREETYRPA

SEQ ID NO: 90820 - protein, 364 aa, unidentified
MKIVGCDLHAGQQSIAMMDSETGELTEKVLKHEGNAVREFYGWLEGPVVVGIEATGAMQWFLELLEELGIECRVGHPAKIRAAETRQQKHDRRDAEVILELLLMKNRFPDIWMPSTEQRDLRSLLRDRHQWVKMRARLQHTLQAIALNHALRKGKALWTATGRQALQDLALPDYTAQRRDELLRLYLQLERRIQQLDKQVEKEAQGRPQARRLLTHPGVGPVTALATEVFLGDPHRFRTAKEVASYIGMIPCEHSSGKRRRLGKLTKEGNSRLRYLWTEATLHAAVKDPELKRFYRRKLVQKGMGKARVATARKLGIRLWIMLRDEIDYEEFCRRGKLPQKGKTHAGMPDFNSGPARAVTGSTE

SEQ ID NO: 90821 - protein, 360 aa, unidentified
MDVSKERPQVTAGLDLGDKYSYLCFIDSQSGEVIEEGRLRTSPEAFLRRFGSERPMRIAIEAGTHSPWASRVLEEECGHEVLVANSRKLRLIYANKRKTDEVDAQNLARLARLDPRLLYPLKHRGEECQAHLAVIRSRQALVDCRTQLVNHVRGAVKSFGARLPKCPARSFHKRAKEHIPEALRPALEPILEQIASLTERIRGYDRRLETICQEHYPETDLLRQVEGIGPLTALTFVLTLEDPHRFERSRSVGAYLGLVPARDQSGDRDPQKRISKEGDEMLRKLLVGSAHYILGPFGSDSDLRRHGEKIASRGGKNAKKRAAVAVARKLSVLLHHLWVTGEVYDPLHNTHRHQEREEAA

SEQ ID NO: 90822 - protein, 372 aa, unidentified
MTQSNILFIGMDVHKESIVVSLADDDRSEVRRYGAIGGTLTDFKKLLRKLVSTGKDLFFCYEAGPCGYELYRFITSQGHQCIVVAPSLIPKKPGDKVKTDKRDADNLARLLRSGDLTSVYVPNAEDEAMRDLSRAREDAVQVLKGAKQRLKSFLLRHNIRFNGSANWSEKHLRWLAEDVNMAYPPQKIVFQEYVNSVTEANARVKRLEAEIQHHAKLWRLYPIIQSLMAMRGVRMVVAVTIISELGDLTRFEKPKQLMSFLGLTPSEHSTGDRIKKGSITKTGNQHARRVLIEAGWSYRFPAKVSKEIQKRQENASLPVRDIAWKAQLRLTKRFRTMANNGKLNNVIVVAMARELVAFMWAIAQEVPIQPRS

SEQ ID NO: 90823 - protein, 325 aa, unidentified
MSSHEIVGIDVAARKLVASGERAGLAVAYDNTLAGRSQLIKDLRRSRRAVRVVLEATGSYFLDLACELVAAGIAVMVVNPKATHHFAEAILQRRKTDPVDAAMLREFGRRMDFVPWQPPRQALFAFRALTREAQALSKTVAAAKNRLHAVSATQQAPQTLIDALERQIAHNQALIDELIAAALAQSDSDPELARLVARTDSVPGFAAKAAVLVTGELAVLPPMSARQWVAQAGLDVREESSGTSLARRPRLSKRGNKRLREALFYPALTAARCCPAAAAFVERLVARGKTRLQAIVALMRKLLHALHAMWRNDEDFNADKLFAQA

SEQ ID NO: 90824 - protein, 423 aa, unidentified
MAYRIAGIDVHKKKLAVVVADVEVDEEYQFERRWYGSNPAQLQLLCQWLIEQQVEEVVMESTAQYWKPLWGALERYWKAMCQKREGAGKMSGTLHLAQALSNRGRRGRKKDFRDAERLVKRLVSQELTLSFVPDTDQRLWRTLTRTRYQRTRDKVRLQNQLEALLEEAHIKLSSLVSDLLGVSARRMLHALAEGETDPAVVAALAHQRLRATPAELRDALGACSQLHPVYRRLVRLALDDWQSIEQQMGQLDQEIASLLREHEDAVKRLAEVPGLGVDSAQQIIAEVGAKAATFASAKNLVSWVGACPGEDESAGVNRSKRSPKGNRQMRRILSQAANAAVKYKGSIFEIVYRRLVLRLGHNKTIGAIAHRLCQLIWIILHNGVRYEERGPSVCEKAKRTRTSRMIRTLRALGYRVEPAVIPA

SEQ ID NO: 90825 - protein, 342 aa, unidentified
MDHYAGIDVSLECSSVCVVDASGKIAREGKVASEPEAVIAYFGSLRLCVVRIGLEAGPLSQWLYAAMKEAGLAVELLETRHVRKALETMPVKSDRNDARGIAQLIRLGWFRPVHCKSIGAQETRAVLTARKLVQSKLLDVENSVRGILRGFGLKVGHTTNRSFAGRVEDLVVNHASLHMIAAALLSVHAVLLRELKAFDKQVRSMARVDVKAKLLMSAPAVGPIVALTYASAIDDPGRFTSSRRVGAHFGLTPKKYQSGETDYTGRISKIGDATVRTALYEAAHIMLIKPIKSCAPLKSWAMRIARRSGMKKAKVALARKLAVILHRMLANATPFNAAMAAA

SEQ ID NO: 90826 - protein, 478 aa, unidentified
MKLLYRRCAGMDIHKKSISVCVRQRVAGKKEAQIEEAVFGTFTQDLERLGQWLKERKVKQVAMESTGVYWIPVWNILERKKWKLELMLVNPATVRALRGQKTDRIDARRIAEYLQYGLLRASFIPPKPVRQLRELTRMRVHVQQDRNRIVNRIGRLLETVNIKLGSVASNIVGKSGHAILERLAQGSANAEELANLARGTLKKKIPDLVAALNGRPDEHFRWTLKRLLRRLESQDTELAELDARLCEKYAEHADLLQRLCTIPGVEITTARVLLAELGTDMSQFPTAAHAASWAGLCPGNAESAGKRFSGKTRKGDRYLRRILVQSAWAASRAKDCILAAAFRRTAQRRGRKKAALATAHRILRIVWSIIRNGTEYAERGGDHFDQLHPERTATKLLRRLERIGFDVEIKNRRGRPPGSKNKPKPPVANPVANPVANRVLRQECERCWRLAVRGHCICLLKRSKKNTPALLTPEQSAT

SEQ ID NO: 90827 - protein, 430 aa, unidentified
MKITTRISPINPNLLKVTVDVGMESLYAYTELPPQTNAAHCLEETIPNRNQPIIRALEQFSQLARQHGFEGLCVLCEPTGGYERRLLRLARQAGHFTAYLNAESVRKLRVVQSNDSTKSDLKDPKTMFLLAKLGKTLTHRNLSGPWLVLRETHAYYEEHDRHNVVLRCQIHRVLTQLFCEFTFKKDFLFESPALPHLVREFGLNPYRIVATGQAAFYRRMKKHGVRLRTLERLWQDAQRSVLQHLEPGYSDLLETNLRELFEDFWRCQQRLEAARQQMIGLLHQLQAQGEVKLTARPGLINEFLLARILAETGPLEDFKSWPQLLRYAGMNLCERQSGTMIGRRRISKKGRTLLRKVMGQVVLPRVRKTDLYGPYYHGKKANGMVGQKAMMAVARKFLKLLWGLNRSAQDYAPARVFCSATQFQPLAQAA

SEQ ID NO: 90828 - protein, 391 aa, unidentified
MVCVGIDVAKDKHDCCILDSDGMVRADCFTIPNNMDGFKQLLQTIRNCTKKSDKIKVGLEATGHYSYNILGFLLDNGLPTYVINPLHTNLYRKSLSLRKTKTDRVDARTIATMLLSDVDLKPYTDIAYHNEELKSLTRYRFDKVQERAKLKQSVSRLATILFPELEGLVSSIHGTSIYALLSEYPGAKQISEVHLTKLTNLLTTASKGRYGKEKAIQIREAARASIGSVMPAKSLELKHTIKLIQELASEIDEIEDSIQKIIDELNPPILSIPGMGVNSAAVILAEIGDFSNFSSPDKILAYAGCSPSTYQSGKLTNCYAHMEKRGSRYLRHALYNATKYVCYWNPVFAEYLAKKRAEGKHYNVALSHAMKKLVRLIYALQKSGKAYLVAA

SEQ ID NO: 90829 - protein, 348 aa, unidentified
MVVIGVDAHKRTHTVVAVDEAGRKLGERTAAATADGHLELLGWSRTWPERTWALEDCRNLTRRLEADLLRAGEAVRRVPTKLMAGARRSAREPGKSDPIDALSVARAALREPNLPTARLDGVERELRLLVDYRDVLISDRTGHQSRLRWFLVELGIPEPPARRLTLPVVLASVDLQLVGRSEPCARIARDLVARISEMTRAIDDLARQIGELTETLAPNLMSLFGCGSLTAAKLVAETAGIGRFRSRAAYASHTGTAPIPVWSGNLVRHRLSRGGNRQLNAALHRIAITQLRCPSLGQAYVAKRVAAGDTKTEAIRALRRRLSDEVYRRLQADEVARTTTANAVREAA

SEQ ID NO: 90830 - protein, 385 aa, unidentified
MATHSIKANKSSKSGALGAPPAPTMSALPSEAGTAAQLPKVIHLGIDVHLRQHVVCRKIDAATVQPAQRMKPEAFVAWAVKQKALAQRVVCCYEAGPFGYTLQRQLAAAGITCYVVRPQDWDKLGKQVKTDSRDARELAEALARYEAGNKHAMAVVRVPELAQEQRRMITRQREAFVREVRRLGAMGRSHGMTQGHEVSGRWWRKAGWKALSSKLPEALKDLLEPLRQLLVQLDELIKARTAQIEAQASAATQRPKGLGALTERGIDNEVLDWHRFNNRRQVSSYTGLCPSEHSSGGSRRQGSINKHGNPRLRHMLVEAVWRFIRLQPGWKRLLKMVEKLKVGLKASKKKLAVALARELAVDLWRLNTGRCTLADLGLIAAQEVA

SEQ ID NO: 90831 - protein, 333 aa, unidentified
MLDTTTFVGLDVHARSIKAVSLDVMTGEVRGATFGYDAGAVAEWVRSVDPRARCVYESGVTGFDLQKRLSGLGVGCVVGAVSKMIKPSADRRRKNDRNDAEFLARMLSVGNVVEVWVPDDECEAARDLTRALEDARDDLSRSKQRLSKFLLRHGLVFDERTPTGRRKGNWTRAHWSWIESIRFAEGADNDVLAYYVDAVRRAAEEKARLEGLVEAEARRPRWRKRVDSLRCLKGVDTASAADLVFEAGEFSRFGNARSFAAWVGLTPSEHSSGESDRRGAITKAGNKHLRKTLVEAAWHYLTCSGRPKDLAKGQAPDRVVSATVKTTNFAIAL

SEQ ID NO: 90832 - protein, 367 aa, unidentified
MKKISTVVARQSKNFPEQKLTIGLDLGDRWSWYCVLDEAGEVLLEQKLGTTPKAMREVFGGMPRSRIALETGMHSPWVSRVLSELGHEVIVAHARNVRLIGESRRKDDRFDARTLARLARIDPQLLAPVQHRSAQAQAHLMVIRARAGLVRARTSLINTARGLTKSYGERLRGCSPRNLNAEKAQQLSPELQAALEPLLGAVESLSQRIYEYNQQIEKIATESYPPVARLKQVKGVGTLIALTYLLTLEDPQRFRKSRDAGCYVGLQPGRRNSGQSEPQLHISKEGDPYLRTLLVQGAHHILGPFGADSDLRRWGLKLAERGGKNGKKRAVIATARKLAVLLHRLWVSGEAYEPMRKSRRETLPAAA

SEQ ID NO: 90833 - protein, 436 aa, unidentified
MTSHCQFYNYKFQEVILLSFKILKFKCCGLDVHKTWIYACIGITDSNNRTEYKQARFSSFTKGLNELCDWLAKYNCTDVCMESTGKYWIPVFNILEQHNLWVTLSHPKYTKPMKGNKTDRKDAKWICDLYMCGMVKPSFIPPADIRELRDLVRYRYKLTCMITGEKNRAQNCLTVSNLKLDDVFSDVFGKSSRSITEQILQHPGEKFDVAPFVHGRCKTPIEEIQAAVDGAISKEQAVKLRQCLDHIDELNKHISELEQEILRLSDKYEAALNLIRTVPGFDKNPMTAVQILSEIGGDMSVFPTAKHLVSWAGCCPRNDQSNQKIKSTRISRAGSYFKPVLVQVANALIKSKKHLEFTNRYKRIKARRGHKKAIIAICRMILTAIWHILSDLKPYTPEGFLESRPVKEEKVLSISQALNLLKQRGYIIKDEPLSVS

SEQ ID NO: 90834 - protein, 323 aa, unidentified
MQGQKSPERSAQPGVYVGVDVCKDWLDVYLHPVGQKFRVSNAPEGLKALKRRLAELSVERIVMEATGKFHRQAHRTLHASGFAVAVVNPLRARLFAEAVGQLAKTDRLDARVLALMGQTLEPSALAPAPEALEALQELARARAAAKAEETALSNRRGASQTAFLKAELGRRLKTVASHIERLDAEIEGRIDAEPALKRRYDILITIPGVGPVAAVALVVGLPELGACSAKAASLLAGLAPLACDSGEKAGERHIKGGRAFVRTGIYLAALAAARFNPQLSDDYKRLRGAGKKAKVAITAIMRKLVVLANVLIKENRPWTPIHA

SEQ ID NO: 90835 - protein, 366 aa, unidentified
MRKPSTTAVRGRGKLQSEQLTIGLDLGDRSSFYCVLNGAGEVIVEERVATSPEAMKKTFGKMPRSRIALETGTHSPWVSRLLSELGHEAIVAHARNVRLIGQSRRKDDRLDAQALARLARIDPQLLSPIQHRSAQAQADLSVIRARYALVRTRTALICSARGLTKSFGERIHSRYVRGFKPAMGETLSPQLQVALAPMLSALEAITARIREYDAQIEKLAEESYPDVALLKQVKGVGTLIALTYILTLEDPRRFRKSRDAGCYIGLQPGRRNSGQSEPQLHITREGDSYLRMVLVQGAQHILGPFGEDSDLRRWGLKLAERGGKRGKRRAIIAVARKLAVLLHHLWISCEAYEPLHNVQKRRLAAA

SEQ ID NO: 90836 - protein, 402 aa, unidentified
MPMLSIGIDVSKGKSTVCGMKPGGEIVYAPFEVQHTREGMSELVSLLRGSGEEVRVVLESTGSYHCPVVAALLENGIFVSVVNSLRMKRFCSQSIRRVKTDQIDAMQIALYGLAYWQELQPTKLPEDTYRELQLLARQYYQMTSLLIKAKVDFNALCDQVLPGMQELMSDHAGRHKLSDFVLRYRHTTHILEMGETRFRKDYCKWAEKKGYRNCERMAALIFATAQNGIPVLPNAPSTQIVITEAIRVLHTVEASRDAILTQMQALAKTLPEYSLVREMPCIGDTLAPRLIAEIGDVRRFHSKRALIAYAGIDAPPYQSGKFCANNRHISKRGNRYLRKTGYEVMQSYVMHKPANDPIFTFIEKKRGEGKSGKLAMVAGLNKFLRVYYGKVTELYRSLPAIE

SEQ ID NO: 90837 - protein, 413 aa, unidentified
MIYCGIDWAEKTHDVALVNDTGELLAKRRITDDAAGYTILLDLLAEFGDTEDNPIPIAIETSRGLLVAVLRTGMRQVYAINPMAAARYRDRTSVSRKKSDPGDALVLANILRTDMHVHRPLPGDTDLGRAIAVLARAQQDALWNRQQMANQLRSLLREYYPAALDAFATWPNGLCRPEARELLKTAPTPARAARLSRTQISTAFKRAGRKRGIDAEADRIREVFRSEYAHQSPLVEDALGKQLLALLLQLEAACTAADNLAQAVEESFPQHPDADVILSFPGLGVQLGARVLAEIGDDHTRFADARGLKAYAGSSPITRASGKKSSITRRRVKNDRLNHAGYLWAFAALTASPGAKVHYRRRRDKHGDWHAAALRNLFNRLVGQLYHCIQVHEPFDEALAFPASAEAMTATAA

SEQ ID NO: 90838 - protein, 315 aa, unidentified
MVDVPCFVGIDVAKAQLDIALRPCGERWAVPNDAGGVVTLVERLQALHPTLIVLEATGGLERAATTALATAGRPVVVVNPRQARDFARATGQLAKTDALDARALAHFADVIRPTPRPLPDAQTQELRALLGRRQQLIVMRTAEQNRLAGTSERLMKDIEAHITWLNARIATLDDDLEELLRASPLWRENDDLLQSTPGIGPVCARTLLLELPELGTLTRQQIAALVGVAPLNHDSGTLRGRRTIWGGRAHVRTVLYMGTLVATRFNPRIKAFYERLLAAGKVKKVALTACMRKFLTILNAMLKHRTPWQVQEVQS

SEQ ID NO: 90839 - protein, 399 aa, unidentified
MLEQAWAGVDVGKEHHHCVVIDAEGRRLLSRRVANDEAVLLALISEVTGLAGQVRWAVDISTGEAALLLALLAAHDQPVSYLSGHQVNRAAGGYRGSGKTDAKDAAIIADQARMRRDLAPIRLPEEVIVELRMLVARRRDLQSDRVRAVNRLHETLLTISPALEKALDLTNQGPLILLTGYQTPAAIHQLGVTGLTEWLRARKVRSAGELATRAVAAAHAQRIALPGEALAAHLAAQLAEGVIALDEQIKHTDKLIEGRFHRHHAAPVILSMPGIGFLLGAEFLAATGGDTAAFTTPDRLAGYAGLAPPPRDSGRISGNLYRPKRYNRQLQRVFYTSALISIRCCPESRTFYDRKRAEGKRHNQAVLALARRRVNVLWALLRDHRPYQASPPASTAAAA

SEQ ID NO: 90840 - protein, 343 aa, unidentified
MNEVTTIGIDLAKSVFQVHGVDAAGKTVIRKQLRRRQVLAFFRKQSPCLVGMEACATSHHWAREIAALGHEVRLMPPRYVKPYVKRNKNDAADAEAICEAVTRPTMRFVAVKSVGRQSVLMAHRTRELLVRQRTMLVNALRAHMAEFGVVARVGLPQVKKLLAVIADGDDERIPALARTCLEGLVRQLLSLEREINGAEKRIHAWHRASEDSLRLETTPGIGPITASALASSITDPHIFRSGREMAAWIGLVPRQNSTGGKVRMGRISKQGDQYLRWLLVAGAMTVIRHAKRRGTTDPWLAHIIANKPTKVAAVALANKNARIAWVLLRHGGTYRKAASAKAV

SEQ ID NO: 90841 - protein, 346 aa, unidentified
MRFYQQQHRFYCGVDLHARSMHVCIVDQEGQTKVHKNIDAHPDRFLPLIRPYRAGLVVAAECMFAWYWLADLCAQEQIPFVLGHALYMKAIHGGKAKNDKIDSQKIALLLKGGMLPIAYAYPKAMRATRDLLRRRSKLVRTRAEALAHIQNTVSQYNLPPLAKKLTFAANREGVAERFADHSVRRMVESDLALIGHLDEQLQSVELYLVRHAKVDDPQAYHLLQTIPGVGKVLALILLYEMHDAGRFGDQRHFVSYCRLVRPTHESAGKKSAGKGRKIGNAHLRWAFGEAACLMLREVPAAQTYVARLEKQHGKAKAISILAARMARTAWLMLKRKEAFDANQFLK

SEQ ID NO: 90842 - protein, 343 aa, unidentified
MTYFAGLDVSVKETSVCIVDDAGKIMQEARVASEPEALLQVLTNTIYRFKRVGLEAGPLSQWLYSVLAEAGLPVICVETRHMRAMLKAQINKTDRNDARGIAQMMRVGLYRPVHVKTLRSQKLRVLLTHRKLLQSKAIAIENDLRATLRNFGLKVGMIGTVKFETRIRELVESLPDLAVLVEPLLIVRQVVREQLGILHRRLLAIVRDDDVCRRLMTIPGVGPVVALTYRVTVDVPARFRNSKVVGAVFGLTPSKYQSGQNERTGGISRCGDEMMRMMLYEAAQSMLVRSAKWSWLKAWAMKIARHRGMKKAIVALARRLAVIMHRMWVDGTEFRWTREVAVA

SEQ ID NO: 90843 - protein, 428 aa, unidentified
MLKHNTEPDPAEEFAAFLAIDWADEEHAFRLQVVGQNKVETGTLEQKPHVLGPWVAKLRERFGGRPIAVGLEQSRGALIHALMAHDFLVLYPIHPTTVAKYREAFKSSGAKNDPLDAGQILEILTKHQDRLHRLNPDTVETRLLGRLVEDRRKAVDLRTTHVQALGANLKEYYPQALELTHDNLKSRLACDLLIKWPTFEDFQQAKPSTLKRFYYGHNVRSPEVIERVLALAEKSQALTTDPALVESGRRLTQMYARLIQALNPAIEDYDQRIQRVFDAHPEAKLFRGLPGAGPALAPRLLAFFGTDRSRYAAAFNVQSFTGIAPVTKSSGKSKVVHARAACPKFDRQTFHEFSRLSVPHCQWARNYVQYYTDKGKKYHTIIRALAYKWIRILFKCWQERTPYNEDKYMETLKLRGSIFATWHLQKNS

SEQ ID NO: 90844 - protein, 402 aa, unidentified
MPMLSIGIDVSKGKSTVCGMKPGGEIVYTPFEVQHTREGMSELVSLLRGSGEEVRAVLESTGSYHCPVVAALLENGIFVSVINSLRMKRFCSQSIRKVKTDRIDAMQIALYGLAYWQELQPTKLPEDTYRELQLLARQYYQMTSMLIKAKVDFNALCDQVLPGMQELMNDHAGRHKLSDFVLRYHHTTHILEMGETRFRKDYCKWAEKKGYRNCERMAVLIFATAQNGIPVLPNAPSTQIVITEAIRVLHTVEASRDAILTQMQALAKTLLEYSLVREMPCIGDTLAPRLIAEIGDVRRFHSKRALIAYAGIDAPPYQSGKFSANNRHISKRGNRYLRKTGYEVMQSYVMHKPANDPIFTFIEKKRGEGKSGKLAMVAGLNKFLRVYYGKVTELYRSLPTIE

SEQ ID NO: 90845 - protein, 311 aa, unidentified
MYYIGIDVSKKDLSVFNGKDLNFTNKEGLKSFKKYLKKKYNLSEIAIIFEPTGIYSFYLKEFCAENSIKAYIINPKQSHNFARALGIRPKNDKIDARTLYKFRKLIDLNDIKVPVIDQQVKTLSGYLVSYQFALKQRISLSNHLESLQDKRLIALIKKDLKRAKKLEDNLFNDILEYVSKNQNLKEDYQRFLTISGVGDKMAIALLTLFKTYQGTNRAQITALAGLDPVRRESGTSVKYREKISKNGKGIYRKIFYLPTICATVHNQKIRVFYQRLLANHKTKKLAIIASMRKLLLIAHAMYRDKTEYIAV

SEQ ID NO: 90846 - protein, 350 aa, unidentified
MGTMPQDGVVCGVDTHADVHTAAAVDGNGQVLGVAQFAATGEGYRQLLGWLGEYGPVAIAGVEGTSSYGKGLTRFLRGNGIDVVEVIRPNRQTRRYNGKSDPVDAVAAARAVLSGEASATPKKGDGPIEAIRVLRIARSSAIKARTQAANQIRDLIRTGPDDLRDRLHQLTTRQRVDACSRLRVTDRHTVAEAASRRVLRILARRHQSLTGEIAELTTRLDQLVTTTAPTLISLNGVGPDVAAKLLIAAGDNPERMRNEAAFAALCGASPLDASSGKQQRHRLNRGGDRQANNALWTIAMVRMSADPRTRHYAERRTKEGLSKGEIIRCLKRYIARETHHAILQDLTHLT

SEQ ID NO: 90847 - protein, 336 aa, unidentified
MRYIGVDLHTTQITVCYLKAESEFEIRKYQLVEMDKFVNTLEKTDEIAVEATCNTRWFYEQVASSVRRVVLVNPRQFEVVKNSVKKTDKNDALNLARFLKADLLPEVRAKREAAGRVQSLVNTRTKLVRLKTSLINKIHALHVEHGRKLKKTSLASDKGLEKVLLSEWSAIERIELEIIIEQIRSLKVSIRKLDKAIETESEKLQGYESLVSMSGIGSLSAGILLSVIGEIKDFGSADKLASYFGIVPRVSNSNETVNHGRITKRGNKTGRTTLVQCSLAAIKKSEYLKKYYEQVKARRGHGKAKIALARKYLGIIYNTLSNNWVFADFNNFELAE

SEQ ID NO: 90848 - protein, 459 aa, unidentified
MKKKSKRTKGIESAYPFDGMSKVNPNAAGVDIGADEIVTCVASNETTQLVRGFGNYTIDLHAIADWLAEHKIKTVAMESTGVYWIPLFEVLEQNGFECLLISSRSLRRVPGRKSDVTDAQWIQTLHSYGLLESSFRPQADLISLRSLLRHRRNLVDHRSPHILHMQKALLQMNIQLSQAVSDVTGVTGQAIIRAILSGVRSPKMLASLREPGCKKSEEEIAKALTGTWREEHLFVLKQAVALYDFYSQQILECDEEIERMYAKTRADWVAEELLPLPKRKRSSHSKNKFHETEKIRGHLKRLSGVDISLVDGIGVSLAQTVLLECGTDMTKFPTEKHFGSWLGLAPKHEISGNKVLKNTTLKTKSRAGQAFRMAAQSVKQADCAFGVLYRRLRARLGPAQATVATAHAIARVVYRMLKYKIEYDPLTVNEYQKQYEEQQVKYMQKRAAKLGYQLTPVPA

SEQ ID NO: 90849 - protein, 350 aa, unidentified
MDSVKYIGMDVHKEAISIAVLNSSGKLAMECTIETKASTILDFLKGLRGSLHVTLEEGTWAAWLYDLIKPHVTELVVCNPRRNALLKEGSKSDRIDARKLAELLRSNMVRAVYHGEHGVRALRELARSYLTISTDLIRVMTRVKAIYRSWGIPCTGKQVYAERHRAEWLGKIQEAGVRRRAEFYYQQFDALRALRQEVRRELLAEAQKHDAWKLLREIPFIGPIRAALLIALIQTPHRFRTKRQLWTYSGFGIETHSSAEQRFVQGELQRAKRAASIRGLNRNHNHELKNVFKSAATVAASKAGPFKEFYDALRAKGIRPEMARKMAAITLLVWKKGVRFDAQHLKPQTA

SEQ ID NO: 90850 - protein, 331 aa, unidentified
MAGKVTEAAVVGGVDTHKDLHVAAVVDQNNKVLGTQFFSTTRQGYWQMLAWMTSFGALKRIGVECTGTYGSGLLRYLQNAGLEVLEVTAPDRMERRKRDKSDTIDAECAAHAAFSGIRTVTPKTRNGMIESLWVLKTCRKTAISARRVALQIIHSNIISAPDELREQLRNMTRMQLIRTLGSWRPDASEYRNVTNVYRISLKSLARRYLELHDEIADLDVMIAAIVDELAPELIKRNAIGYESASQLLITAGDNPQRLRSESGFEALCGVSPVLVSSGKTNRYRLNRGGDRAANSALHIIAIGRLRTDDKTKEYVARQVAEGHTKMKQYAA

SEQ ID NO: 90851 - protein, 341 aa, unidentified
MKNLFIGVDFSKEKVDVAIIFADGLTETAARVFNGFKTTVSGYKQLVKWVEQNSYGIDSSLWLFCGENTGDYSKGLCNFLYGKGYDMWLENAKSIKDASGLRRLKSDRADASMIAEYAMRNYDKAIMYEPLSESLAQLRELFLYRQMVVRHKCSFQVRRGEKRLTLEKSPIKTMISQSGRHIVSELNKEVEKINKRIAELIKSDEELTEVFTIVTSVPGIGTQNAVCLMVYTDNFRRFNYDSRKISCYYGIAPFGKDSGTSVHSDPHVHYMANRQIKAMLTQASLAAVKFNPIMARYYMRLVERGKKKQVALNNVKNKLIHLVTAMVRNRQLFSPEYKISA

SEQ ID NO: 90852 - protein, 350 aa, unidentified
MLIIGCDYHPSFQQIAFVDTDTGELQERRLEHREEAEKFYRELAVQGMKVRVGMEASGQARWFERLLAELNIELWIGDATEIARKRERKQKTDRQDAQHILRLMLKDDFPQIWVPSGENRDLRQLLWHRHRMVQARTRIMNQLQAVALNEGIRCKKRLWREKGREQLESFRLAPWASRRRHDLLELLDRLNPTIGALSQAIEQEVEKCPEAQRLRTHPGVGPLTALAFVLIIGKPDRFQCGKQIASYLGLVPLEDSSGNRRRLGHITKQGNSLLRFLLVEAAQVTARSLPEWRSKYVHLTMRRGRKIAKVALARKLAVRLYWMMRKGWDYEQLKKFGSHVGQPGNRDGVK

SEQ ID NO: 90853 - protein, 378 aa, unidentified
MEKSSTVFVGMDVHKDSIDIAVADAHEARHFGRVGGDAASVDRAVRKLRSRHRNFTVIYEAGPCGFWLYRRLRAQGLGCLVVSPSLTPRNAADRIKTDRRDAMKLARLARAGELTSVHVPDALDEAMRDLVRTREDAVAMQRQARQRLAALLLRNDIRYVGKTAWTAAHRRWIAHLKLPQPPQQIAFEEYVQAVHEAGARLERLNVALHRQLEHWRWRPAVEALQALRGISAIHALRIVAELGDLSRFPSPRGLMGYLGLIPSEDSSGPRRRQGRITKAGNSSARRALVEAAHAYAHPARVSWVIARRQSALPKSVTDIAWKAQLRLCSRFRRLAARGVPRNKIVVAIARALGIRLGYRPRHPPQRQIVDRCHCKGVP

SEQ ID NO: 90854 - protein, 350 aa, unidentified
MEFFVGLDVSLDETHFCVVDEGGRIVKEGRCPSDPQALARSIRHKGRKIEHVGLETGGLSQWLFDGLTKEGFSVSVMEARHVRAAFAAMRVKTDRNDARGSAQLVRLGWFKRVHVKSLDAQETRALLTLRAFLVEKVTAAENSLRAALRNFGLKMGAVTRPTWEARARELAAGQDVREQIVEAMLRVRSLLLAELATVEGRLVVLAKADPVTRLLMTVPGVGVVVALSFRSAVDDPAHFRRTRDVGSWLGLTPRRWQSGKTDIVGRITKGGDARVRTMLFEAAATILGRVRLMSPLKAWGLRVAKRTCMKKAIVAVARKLATMLLAMWKSGTAFWATPKEPASAKDFAAA

SEQ ID NO: 90855 - protein, 391 aa, unidentified
MIYVGIDVAKDKHDCYVCDSDGVELYAPFIIQNTREGFEDFFEKVRAVATELSEVKIGLEATGHYSYNILGYLLEKEFRIFLINPLHTNLFRKSLSLRQTKTDKVDARTICMMLHSGMALTPYSKTSYHMEELKSLTRYRFEKVRERARLKQSLSRLVTILFPELEKLVPTLHMKSVYSLLHEFPGAAQVASCHMTHLKKLLYDSSKGRYGKDVAETIRNAARSSIGSHMPAKSLELKHTIDLIRKLDAEISETEDAIKVIMDDIGSPILTIPGINYRMGAMIIAELGDICRFDSPDKILAYAGMSPSTYQSGQLTSSYSHMEKRGSRYLRYALFNATRYVCQWDDSFAKYLAKKRSEGKHYYVAVSHAAKKLVRLIFHLMTTGETYMQVA

SEQ ID NO: 90856 - protein, 310 aa, unidentified
MDAIYVGIDVSNDRLDVYVRPSETAFAVARDGKGLEELVERLRVLAPRLIAVEATGGFETIVAAAIAGANLPLAVVNPAQVRHFAQAIGKRAKTDPLDAAVIAHFAEAVKPEPRPIPDAAARLLGELVARRRQIIEMLVAERQREKRADAVRVRNSLARHIKALEKELPEIDRDIDTMVRGSPVWREKENLLVSFPGVGDILARTFLAEVPELGTLHRRQIASLVGVSPYPRQSGRWKGKAMIGGGRSAARTAVFLAALSAIRCNPVLRVFYQHLLAVGKPKMVALIAVARKILTILNAMLRDHKKWQPA

SEQ ID NO: 90857 - protein, 357 aa, unidentified
MSKCRPLVDDQLSHQATVFCGIDVSAATLLVAVQTAPEWKLDQRQFANSPAGHRQLLAWLRKRTGLVRVTLEATGVYGIDIALALDEAEGFAVEVLNPKKASDFARSLGRSKTDRTDAVALAEYSRRMKFVAWKRPCREQLELRALGRHMTTLTEEHARLSNRLHAAQASRTAPRCVREDLKRTMAGIQRRLARLRREAKVRIEKQAEMRRKWQRLRAMPGVGEISAVQILSELAGLDEDMTVRQWVAHSGLDPAHETSGTSVRKPSHISRQGNRYLRRALFMPALTAARFDPYLKAFYGQLLARHKSKLQALTAVARKILHAIYGVFKTDTPYDGAKLFPALEASIVPQPQPFPTY

SEQ ID NO: 90858 - protein, 418 aa, unidentified
MNMNAVGIDVSKGKSMVAILRSYGEIISKPFEVKHTVSGIRSLIEQIQSIDGESRIVMEHTGRYYEPLVRELSKADLFVSAINPKLIKDFGDNSLRKVKSDKADAVKIARYTLDSWTELRQYSLMDEIRNQLKTMNRQFDFYMKHKTAMKNNLISILDQTYPGANTYFDSPAREDGSQKWVDFSATYWHVDCVRKLSLNAFIDHYQKWCKRRKYNFSRSKAVEIYEASKELVSILPKDDLTKLIIKQAVEQLNTASQTVEQLRTMMNEAASKLPEYPVVMAMKGVGKSLGPQLMAEIGDVSRFTHKGAITAFAGVDPGVNESGSYEQKSVPASKRGSSTLRKTLFQVMDVLIKTKPQDDPVYLFMDKKRAQGKPYYVYMTAGANKFLRRYYAKVRDYLATLDDLPPVDMDSTGLNQTN

SEQ ID NO: 90859 - protein, 337 aa, unidentified
MKFCGIDLYSSNSYIVITDEMDKKLVHRRYPNDLGKILAVLAPYRTELAGVVIESTYNWYWLVDGLMAAGYDLRLANTVAMKRYDGLKHSGDEEDAAHLAHLLRLGILPTGYIHPPAHRALRDLARKCIQLVRSRTQHVLAVENILARTFGTRLSSNAIKRLSVALVDTLGLNADVALAVKSNVAIIAALNTQIALLEQRLVEGTKPRPEYPLLKSIPGIGEVLAIVILLETGDITRFAGVGNFASYARCVDSARTSNGKKKGEGNTKNGHAYLVWAFIEAANFARRFCKEANAFFEKKKTKTNGVVATKALAHKLARASYHILKEKQPFDVKRCFA

SEQ ID NO: 90860 - protein, 380 aa, unidentified
MATTRTVLRGKDTAGGGDLYMSFELGDKHWQLSIGDSHNRVSRYTVGAGDTAAVADCIVKAGARLRTGGQARVHSCYEAGRDGWWLHRWLSELGVDNIVVDAASIEVNRRARRAKTDRLDADKLLAMLVRHHAGEHVWSVLREPSSEDEDARRVHRELQRLTHERIAHTNRIGSLLVLHNLRPRIVIGGRDWAAWWDRHRDQVPPMLRAEIEREGARLKLVKEQVRVLEAARCKDLAEGKQPLVAHLARLRAIGPKGAWVLVKEVFGWRHFANRRELAGSLGLVPTPYASGDSEIEQGISKAGNRRVRGLLVELAWSWLRLQPGSALTQWFNRRFAGAGKRMRRVGIVALARRLIIALWRYLQDGEIPAGAQLKPAVAHA

SEQ ID NO: 90861 - protein, 417 aa, unidentified
MPDFAAYLGIDWSDRKHDLCLIDAATGKKELFRIRHTPEAINECASLLRARFGGKSVAVGLEQAHGPLLFALLKYDFLVLYPVHPSTLARYREAFSPSRAKDDPTDAEYLAELLTAHRERLKAWRADDERTRTLQYLVEHRRRLVSDRTRISNRMTALLKAYFPQVLQWFPDIRTALVCDFLLRWPSLQALRRVRRATLEGFFLEHNSVRRETLQRRIKAIKEGVPLVTDGAVLTSSVLMVKALAVQMKTTIAAIIEFDAEIERLCAEHQDFTLFAGLPGAGSVYASRLLAALGTDRERWPSAEELACYAGIAPVIERSGQSAWVRWRYFCPKFLRQSFHEYAGESVKHSFWARAYYEQQRAKGKSHQAAARALAYKWIRIIFRCWQTRTPYDEVKYLESLRKKGSPLLKFAAQNPA

SEQ ID NO: 90862 - protein, 391 aa, unidentified
MLPTRLREQNESDKVLIKGDSMSVRRILAKTIDTDLEYEAIGIDLAKNCVSAALLTTDGEVVCIDRLDYSELEKSAQALSSTTFAMEPCTEMNYLVQKLEAWGHRCLVIGGKNVQNYVENHYSGQKTDLNDAQALAFLAQDTQLRTIKAKDVEQQKYASLTTLREQYIKQYRQTIVSLKGICQAWGLNISKGISGKARLKDLIENHAAFPEELKESLVDMVTHAQTAQKALNKITKTLEELAKSDKVCQLIQTIPGLGSICSCRLRATVGDIKRFKSPKDFPAYYGLVPRSIATGHNERKGKITHRGDRTMRSLMVQAAGSLVNMATKGKLKSKQLTKWILKKQKEKMPWGKLVCAVAAKLLRIVRAVLISNKPYNSKIAGVAKCSLPKGS

SEQ ID NO: 90863 - protein, 354 aa, unidentified
MNIKYIGMDVHKETISIAVMNGEGKVVMESTIETKTSTILQCIQGIHGDLHVTLEEGTWAAWLYDLLKPHVTELVVCDPRKNALMKEGNKSDKIDARKLADLLRGGYLRPVYHGENGLRTLKELARSYLTISKDLTRVMNRVKALYRSWGILCGGQQVYAPRHRTEWLNKIGEAGVRRRAKFFYQQLDALRELRQAVRKDLLAESRKQSASKLLREVPSIGPIRAALLIALIQTPHRFRTKRQLWTYSGLAIDTRGSAQYRYVGGQLQRSKKPQQLRGLNQNHNHEMKEIFKSAASMASSREGAFHDFYQGLLTKGMQPAMARLTLARKIAAITLILWKKGAHFDAEQLKPQAA

SEQ ID NO: 90864 - protein, 393 aa, unidentified
MVYVGIDVAKDKHDCFIANSDGEVLYDVFTIQNNMDGFEDLLFKIKTASKDLNKVKVGLEATGHYNCNLLGFLKSKGLPTIVINPLHTNAYRKSLSLRKTKTDKADARAIASMIMSDVSLKPYSDTVYHNEDLKSLSRYRFDKVSDRSKLKQSVSRLVNILFPELEKLVSTLHTKAVYELLSEFPGAHQVASANLKHLTALLSTASKGHFGREKANEIREAARRSISTYLPAKSLELRHTIKLIRELNAEIAEIETEIKKIMDSIDSPILSIPGISYGIGSMIVSEIGDFSRFDSPDKILAYAGCSPTTYQSGQLYSSHAVMEKRGSRYLRWALINAARYVCNREPTFAAYLEKKRSEGKHYYVALSHAAKKLVRLLYHLETTGEKYIPKTLS

SEQ ID NO: 90865 - protein, 366 aa, unidentified
MLARGTKDKEHAMSQKIDTSIAVVGIDIGKNSFHIVGLDARGAIVLRQKWSRGQIEARFANMPPCLIGMEACVGAHHLSRKLKALGHDARLMPAKYVRPYSKGQKNDFRDAEAIAEAVQRPTMKFVATKTADQLDLQALHRVRERLVSQRTGIINQIRAFLLERGVAVRQGLRFLRAGLAQILATRTDVLSPRMVHLIEDLAGDWRRLDERIEGLSADIETLVQHDPACQRLMTVPGVGPIISSAMVAAIGRGEVFSKGRDFGAWLGLVPKQTSTGDRTILGRISKRGNRYLRVLFVQAAWVVLIRPKNWERYGLKPWIEAAKKRLHRNVLAIALANKLARIAWSVLAHGRNFEVRKIDEAAAQSV

SEQ ID NO: 90866 - protein, 340 aa, unidentified
MNFTPVGVDIAKQVFQVHWVDPQTGEVISRQIRRGAFLEHFANRTPCLIGMEACGGAQHWARRLGEMGHQVRLMPGKAVKAFVIGNKNDMADARAIWSAVQQPCVRAVALKTETQQAVLALHRMRQQLVRFRTMQINGLRGLLTEYGEVMAVGRAALNRAMAGVLARLSERLPAMLMDTLREQWQRLDVLDEQIAQIERRLSEWMKQERACRQIADIPGVGLLTATAAVATMGDPKTFSSGREFAAWLGLVPRQTGTGGKLRLHGISKRGDVYLRTLLIHGARSVLARTKEPGPWIEQLRRRRPNNVVTVALANKLARTIWALLAHDRKYEKAHVSVRPV

SEQ ID NO: 90867 - protein, 387 aa, unidentified
MSQVSDLSRSLAAFDQNTALTVVVELSEASWLVAGLVPGLDRQPLKKQEPNPVALLRLLERWRAEAVTAGRTIERIALAFEAGRDGFWLARWLQARGIEVHVIHSTSVAVSREHRRAKTDRLDTALLMRVFLGWLRGERGHCRMVAIPTLAEEDARRPSRERESLVGERTRIVNRMKAALARLGIRGFKPELRKAPQRLEALRTPEDMPIPPNMLDEIRRDMARLAVVREQIDAIERARLVRLEQAPTAGPHAMVRLLACVIGVGVETADMLVQEVLCRNLRDRRAVARYAGLTGSPDESGKRRREKGLAKAGNTRVRRGLIQLAWRFLRFQKDSALAQWYRGRTECPKGARKTTMIVALARKLLIALWRMVTTGEIPAGVALRPAA

SEQ ID NO: 90868 - protein, 370 aa, unidentified
MAKRSMFVGMDVHKESIDISIAEEGRAGEVRHYGGIAGNLEALAKVVKALRAPNRRLRFVYEAGPCGFGIHRYLTAQGEDCVVVNPSSMPKRSGDRIKTDRRDGDALARLHRAGELTAIYIPTADDEALRDLVRAREDAVSLSTQAKHRLKAFLLRQGRRYPGRAGWTQAYRRWLADLSFPLAPQHIALQEYRDTIDETERRVERLTDQLRQLTPAWRWAPVVDALQALRGVSFVTAVGLVAEVGDIRRFDHPRQLMAFLGLVPSEYSSGPSVRRGGITKAGNPHARRLLAEAAWAYRGLPRIGRQMLYRQEGLSKPICDIAWKAQLRLTSRFRKLVARGKTKPKVATAVARELTGFIWAIAQEVPAPPA

SEQ ID NO: 90869 - protein, 347 aa, unidentified
MRFYTQQHPFYCGIDLHARTMYLCILDQAGETLLHRNMTATPEALLKAIAPYRDQIVLAAECMFTWYWLADLCAEQGIPFVLGHALYMKAIHGGKAKNDKIDAHKIAVLLRGGMLPQAYVYPAEMRATRDLLRRRMHLARKRGELLAHVQNTNSQYNLPAIGKKIAYKTNRDGVAERFADPAVQKSIEVDLALITYYDELLRDVELTIVKTAKHHDANTLYLLQTVPGIGKILSLVLLYEIHQIDRFPRVQDFASYCRLVKCAKESAGKRSGTSGTKIGNAHLKWAFSEAAVLFLRDNPAGQKFLTRLEKKHSKGKALTILAHKLARAVYYMLKQKTAFDISKFLNG

SEQ ID NO: 90870 - protein, 370 aa, unidentified
MKRKILYVGLDVHKKTTDVAIASGRSNGKVRSYGKIDSTVDALNKLINKLQVGDKQLRFVYEAGPCGYQIYRHLDAKGIECSVVAPSLIPRRSGDRIKTDRRDAVNLARLFRAGELTSIYVPTPEDEAIRDLLRCRDDMKRFERKARQRLLSFLLRHGYQYSGKRNWTKGFYNWLATVKFSHSAQQITLQEYIDVTNECSERIKRITEQIQVHVEEWSRARFVKAYQALRGVSLIVATTVVSEIGDMRRFPTPKQLMAYLGLIPSEHSSGKTVRRGPITKTGNSHVRRSLIEAAWTYKMQARVSTILVKRQQGLPKSVCDISWKAQTRLCARYRRLMARGKTKQTVITAIARELSAFIWAIDKEMQVTHE

SEQ ID NO: 90871 - protein, 405 aa, unidentified
MNAVGIDVSKGKSTVTIRRPGDVVLMPPCDIPHTQSAINALIEQIKSLDGETKACMEHTGRYYEPVANWLSDAGIFVSAVNPILIRDFGDDSLRAPKTDKADSKKIARYALDRWAKLKQYGSMDKTRSQLKTMNRQFGFYMDQKTSMKNNLIALLDQSYPGANDFFNSPARSDGTQKWVDFVYTYWHVDCVRSKSLQAFTEHYQKWCKRNGYNFSAAKAEKIYQSSSDLIAVFPKDDSTKTLIRQAVTMLNTASQTVESLRLKMDQTAATLPEYPVVMAMNGVGPSLGPQLMAEIGDVTRFTHRESLTAFAGVDPGKNDSGKRNQKSVRTSKKGSPNLRKTLFQIMDGLIKRSPADDPVYAFMDKKRSEGKPYYVYMTAGANKFLRIYYGRVKEYLASLEGTKES

SEQ ID NO: 90872 - protein, 339 aa, unidentified
MTEEKGFIWAGIDVSKRTFFAAIDIENEAEKLPVAKLPAKEFKRSKDGVASFIKWADELLEDQEFAVVMEATGSYSLELISLLKNQRTDLRISMQNPRMVSDFIRSLNQPHKTDKTDAQAIARFGTERKPEEVSLPEPHWAELRELERLRSAMVRVRVELENRAESLFTAFARRTNQRTIGSLNMEISELEREIKHLVIEHEDIHSEVRILTSMPGVSFVSACAILAELGSLKQYDQKQISAVSGLAPRRMSSGSSLNKSFMGRNGSKRLRQILYLDSIYAVAKVPLLNSMYDRLIAKGKSKMTARCACMRKLLLILRAMVVNNKPYEENYSKTFPKSA

SEQ ID NO: 90873 - protein, 349 aa, unidentified
MAVTIVDSARHVVGGVDTHRDVNVAAVVDMNGGVLGVESFPTTSDGHRGLSSWMSRFGSIERVGIEGTGAYGAGVARHFLAGGVVVIEVDRPDRQKRRKHGKSDQLDAVEAARGALSGRCEGRAKSGDGHAEALRVLLVAKRSARSTRIATIVQLRHLMFTAPDELRARLGGLSATQLVNQAAKLRPHPAGGVALHATKTAAVILARRVQALDAELDVIDAQLEPLVKAAAPELLNIYGVGVDTAAVLLVTAGDNAERITSEAKWAMLCGIAPIPATTGLIEHRFRLNNAGDRQANNAIWRIVITRLGQHEPRTVAYMQRRLAEGKSKRYIIRCLKRYVAREVFRALPR

SEQ ID NO: 90874 - protein, 337 aa, unidentified
MAKPKAMRRAGVDVSARWMDVSRDAADEAVATRQCANTAAGQRALARWLTRGGRRAQVVLEATGLYSLDVALTLQRTAGVEVMVINPRASKEFAGAWGQRARSDASAADLLREYAARMPFTPWTPPPAPALALRAIMRRVVALIEMRAQERNRLHAVSATEALPPSVGADVRQHIRALGRQIARLEREARALVEPAPALRAGYRHLCSITGIGRRSALLILSEVAVLPTDLTVRQWVAHAGLDPRPIRSGSSVHPPVHISKRGNVYLRRGLFMPALVAVRRNGAVQRLATDLTARGKAPLVVLVAVMRKLLHAIYGMLRTDTDFDGEKFRRSIRPAA

SEQ ID NO: 90875 - protein, 385 aa, unidentified
MTATQIHSTIIPRDYDIFIGLDVDKKKMAVTCLDHGTLQRSLSLPYSGSQLLNYTNKHFAGQRIAFVYEAGPTGFGLHDELTAAQHPCLVVTPAMVPSAPRKRVKTNRLDSKKLALELRGGKLEGIHVPTQSYRELRQLVQLRDTQAAQARATKCRIKSLLLFEGIPFPEPQEKWTVAALKALETLSCNATVRFKLDRLMDALQFHYELAAKVQKEVRRFCNADPELRQSIKLLRTIPGVGTITATHAVARLGDWRLIKNDRQIAGFLGLVSSEHSTGDKEKRGEITRIGDQRLRNKLIQCAWTAIKKDPELRAFYRRIYARQPKKLAARKAIVAVARKLTTRIYAVLKNQRPFEIRADVTAAPLTVEETVGLRERLDIAQNDEF

SEQ ID NO: 90876 - protein, 323 aa, unidentified
MVRSYQNFIGIDIGKFKNVVAFHKQKNAVEFDNNTSGWQQLCQKFSDILPNSLVTLENTGKYELGLSHFLIDKNITVHRANTRKVKSFILSHGTLAKSDKSDARALAQYGFERHRTLSLFVPTSEKQSTLVALCQRRDDITQMRTQEKCRLEAPENDHIRESCQKTIEFFNGQIDELNNTIQRIIDESHELQEHQKILKTVPGIGKKLSQDFLCLIPELGYLNRREVASLAGVAPHPRESGKAVGYRRIIGGRSNVRKKLFTAAMSAARSKSVLGAFYSKLVESGKKKMVAITALMRKIIVIANARLKEAINLHTLTTVTEIG

SEQ ID NO: 90877 - protein, 415 aa, unidentified
MEVMHAVCCGIDVHKDVLVVCLRCVVDGAAQKTTRQYGTTLPELRKLAEWLVEQRCPIVGMESTGVYWKPVYHVLSQVAEVLVGNPRDMHRRPGKKTDRIDADWISELLAHDLIRPSFVPSPEQRALRDLTRTRVTLVQSRTQAKNRVHKLLEDTNIKLGSVVTDLFGKSGRAMLNALVAGERNPQKLAQLALGTLRKKVPQLELALEGMFTEHHAALIKMGLAEVDLLDQHIAELEKRIGELSGKMGPKIDICDSVPGVDRTAAVAVLAETGEEMSRYGSAKRLGSWSGVCPGNNESAGKRYSGRTRRGNKWLRRVLVQCAWAARKTDTAIGRRFRTLQVRIGGKKAALATAHQILTTVYHLLVKGVRYDDEKCGRPKPEREVRQRLNAIRQLAQLGYSVTLQPIATAPAPTPA

SEQ ID NO: 90878 - protein, 336 aa, unidentified
MKKYIGLDAHSSTCSFCVMNEAGKIIDTAQIVTNGRLLVDYLRSISGIKELTFEECELSSWLHKILRKEVDKVLVCNPVENRQYKKAKTDKLDAMNLAKLLRGDFLKEVYHDGSDKEKLRDLMSGYQDLVEDAVRIKNRYKSLFRKEGKRRSGKALYRDENFLEELDREDFKFIGKHCFDLLGSMEKSRISYVKEIKKLSKKHEEIRYLKTLTGISDIHAAKIVAQVIDPHRFSTKYKYYSYCGLVRHRQISGGKVYGDKKIWGNRVLKCVYKMAAESVLRGNSKLRKYYDHLRDKGTGHKNAKNAVARKIAAISLAMLKKGEKYREEMITNDLVK

SEQ ID NO: 90879 - protein, 338 aa, unidentified
MYYGGIDAHKTYLTVVIVDKDGNEVFRDRRVPVGDGEPLMAALAAFRPLEVVVETCPFWPWIHDRLESTEIGFHLAHASDLQAIARARTKTDSIDAELLARMLATNLIPEAYPKPAPQREVCYLVRHRATLVRDRTRCCNRIHNQLQQRGLQLPREKLLRTEGRQWLQEEAWSRLSPEQRKTVLTQLQLIDTLGPMVKELDDRIKERALEHRGACLLQTIPGIGPYRSLLLVAEILPISRFPSPESLVAYGGLAPTTRQSGTSAPRHGQLPRGANRWIRGELISAIPTHLRVAPDSRLSQYYEEQKERLGWATARVATARKLCRIIHAMLSTGEVWRS

SEQ ID NO: 90880 - protein, 373 aa, unidentified
MERACGLDVHKDSVFSCIINENGEIISKKFGVLTPDLEELRRHLVENHVDAAAMESTSIYWMPVWDALDGSGIELKLVNPYFIRQLPGRKSDVKDAEWIATCVRKDLIRGSYVPCGAVRQMRKYNRMAFDLSRDIVRLETKLDAALQRMNIRISNYVSSTDTKGYRSVVEKLSQGVTDPEELLRGIHRRTVNRHGRETLVAALTGMVTDVDTDMVRMYRERLDLARRQKDECELKLRQLCEEHFPRKFANLQTMPGMKPKSAAAVIAETGGDMKPFETPAALVSWCGLRPRNDESAGKIMSTRTTHGNRFIRTTMVECAWAAARKRGCFYSRFSYRLATERKKQKMKVVVAVARKMLSAAWHILSEDTAYRDA

SEQ ID NO: 90881 - protein, 315 aa, unidentified
MDHNKAVYGVDVSKRNLVAAGYDEPTPVVVANLPESIATWLAQLPRGATVAMEATGTYHQVLAHLAHTAGMQVYVLNPQTLKHYAAAIGQRGKTDGCDARMIARYVVHEQAKLRRWLPPAPAANRLSQLLERRHTVVSTRQTLAQSLAVPMLKAPRQSLLANVDRILRRLDILIRHEIARLPGMAALYERLKSIVGIGPVVAAQLVAVFSTLNFAKTDSFIAYTGLDPRAEDSGDHRGRRRLSKRGPPLLRCLLYNAGMAAANSRLLKPVYKQLRERGLQTTEAIVILARKIARIAYAIYKSGECFDAQKHLKTV

SEQ ID NO: 90882 - protein, 341 aa, unidentified
MTIKRIGLDLAKQLFQLHGVDQQDQVVLRKQLRRNQMLAYFSNLPPCLIGIEACSSAHYWARELQKLGHTVKLMAPQFVKPYVKSNKNDAKDAEAICEAVSRPTMRFVAIKTIEQQDIQALHRIRTELVHQRTAKVNQIRGFLAEYGMVVERSVEKLRKALPMLLEDGENGLSFYFRALLQGLQQDLITLNDRVSDLDKKIKLLASSNTSANRLQQIPGIGPVTATAFVSAVGDGKQFKRGRDLSAWLGLTPRQHSSGGKECLLGISKRGDSYLRTLLIHGARAVLKVAGHKDDPRSRWLQNLCTRRNKNIAAVALANKNARIVWALLTQETDFIPEGKPA

SEQ ID NO: 90883 - protein, 363 aa, unidentified
MTEEKRRYVGIDLGKREYTMAIIGKNGKMSIHLGKTNIHGRQTLYKKLEATDKIALEAGNLAFIMAREIMERVGSEVRILNSAKLPFIWDAPTKTDKEDAMKLAHLVEERKDEKLPLVPLPSEKELERRKILASYGREMKNRTRLINTLHAMFLHQGHTTVVRKNLATAQRRQEAVQILTGVEREEAEWILKYLELHDQRIKELKDKITKEAKKDEDMKNLQTIAGVGPIVAYAFAAHVGDGSRFSKGAQVSNYIGFVPRLDYSGTIQRNGHITKRGNAYLRGLLVQAAWSNVRSKKGGALRTRYKYYTLTQELSKKKTIVSIGRKLSELMYAILRTKTAYVPQQWNGPQEKTRPRAILENCA

SEQ ID NO: 90884 - protein, 386 aa, unidentified
MSLATSSSSRSAPATTNLAKIAEKLEAARIESDECLVGMEATGHYWISLWEFLDANGYEVVVINPIQTDAFRKVDSLRKTKTDAIDSVLIAEYLRFANPESSKMANPDVEQLRELARFRSFLVEQATQLKNKAIRVLDQAFPEYGKLFSNTFGEASKALLKQCPTPEEVLATDIRTLTRILKENSGGNCGRAKAEAVKDAARSSIGAKFGARALSFEIKLLVKRLSFTQVQIEELEDEISELLHRSDGHWLTTIPGIGDSLAASIAGEIGDPDRFETPKKLIAYAGMDASKYQSGANQDTNGHMSKRGSSELRRALMLAADKVRIYDPYFGEYYDSMKARGKHHYVALSGVARKLAGVCLSLMREQRPYESEPPEHHLPGHLQRQA

SEQ ID NO: 90885 - protein, 428 aa, unidentified
MTVKDCTSVKEYWQLKKEIRGSKDHLIVGIDVAKDDHKAFFGTAYGKTLLKRLTFNNDIEGFEKLLTLVREMKVKHSLNGVVLGLEPTANYHKPLGDFLIKCGRMVVLVSGVSIKRNRELLDGRWDKNDTKDAANVADLISQGKCLYYEYAPVLLKDLRGLLSLKRRLKKQEHGLRIRIRNNLLAQYFPELDKYYSKWEPEILSVVRWCLNPSVIAGLEYDQFVSLVSPGSKNIRQQERLKWIWKKAVDSIGCDAGEAAEFEAKVMVEELRHIREVIKGTDSKIKDVCVRFSEYDYLLTIPGFGPDISSKVLATIGNPFRFNSVSQVLKMAGMDLNANRSGKSSNTAVPVISKKGNAHLRYAIYQAAFVASVRNKYFIRYYTNTLRGREREKGIKTKMRVKLAAKMLVIAWTLMKKREPFDPAYLKIG

SEQ ID NO: 90886 - protein, 405 aa, unidentified
MNAVGIDVSKGKSMVTILRPFGEIIFSPHEIRHTSDQIDTLIREIRSLDGDTRIVMEYTGRYHEPIARWLSDAGLFVSAVNPKLIKDFDNDSLRKVKTDKADSVKIARYTLDKWTKLTQYGLMDELRSQLKTMNRQFGYYTKLKTAMKNNLISLLDQTFPGANTFFDSPARSDGSQKWVDFVDTYWHVDRIRSMSLPAFTEHYRKWCKRKGYNFQPDKPAEIYEAISGIIPVLPKDETTKFLVRQAVTQVNTASAAVEELRTRMNDTAAQLPEYPVVLAMKGVGTSLGPQLMAEIGDVTRFDHKGALTAFAGVDPGKNESGSYAQKSVRTSKRGSAPLRRTLFQVMDSLIKTMPQDDPVYAFMDKKRSQGKSYYVYMTAGANKFLRVYYGRVKEYLTKLSETTEN

SEQ ID NO: 90887 - protein, 465 aa, unidentified
MVAQKKASKQRPKAATPTALPVVRPQVAGIDIGSSEHWVCGPARADGAPNVRGFGTTTDELHALGDWLVAQHVESVAMESTSVYWIPIYELLESRGVEVVLVNARQLHHVPGRKTDVSDCQWLQLLHSCGLLRGSFRPAEAIVRLRALQRQVANLVAERTRCVQWMQKALDQMNVQVHRAVADLTGTTGMAIVRAIVAGERDPTTLAAHRDRRCRKSVAEIARYLTGTWRDEHLFTLASALRLYDAFGDEIATFETRLLAELAVLEPPARRADPVPSHPNTAKENAIRGRGEQPVRTTLWRFAGVDLTRIDGISIGVAKIVLTEVGPNLAAFPSEDAFVSWLRLCPRTPISGGKPLKKRRNGLGANRVAGALRMAATTVQRSKTALGASFRRLARHKGAAVAVFATARHLAKLIYRMLRFGQDYVDVGEQAYERRFQLRRLAAITEAARSLGFTLVQRTPEPAAR

SEQ ID NO: 90888 - protein, 385 aa, unidentified
MGTQTFIPRDYDVFAGLDVDKKSISVTFIDHQGFLKSLNMPYKVEHLVNYVRKHYGDKKVAFAYEAGPTGYGLYDGLEAQAYPCLIASPSMIPKAPGQRVKTNRLDSRGISENLRGGQLKGIHVPTPLYRELRHLTQLRDTLVSEMVRMKQRIKSLLLMEGLEFPPAPAGSQWSFLVKNKLRDLPCSTTVRFKLDRLLDSLEFDEKQVLKATREIRRFCQTDPELSQCIEYLKTLPGIGWIVASKLLARVGDWRQIKNIRQLPAFLGLVPTENSTGVRTERGSITHTGDGRLRSKLIQASWSAIRQDGELREFFRTVAKKHPRHLGSRVAIVAVAHKLSVRAAVVLMKQRPYEVRQKVQSAPLTQEETVPQGTTRRLAVPGETNS

SEQ ID NO: 90889 - protein, 340 aa, unidentified
MGIVGGIDIHRRQLTFDIVDLATGENIRGRVSPADRIELRRFLAGLDGSGGDVAMEGCTGWRYVTEELERAGFRAHVAEPADTAALRGNKRRAKTDRGDAQHLRKLLMTGELPESWIPPRHVLEARGVVRLYKDLADQRVAWTQRLHATLYHNGVPELGCPVAGEQARTLLHDAELSPAARRAVEVALAQIEVVNEMLAPIKLDLARLSRHQPGCQALTAHYGIGPVTSVAIWCEMGDTRRFSSSSDAVRHAGLDVTVYQSDTNRAKGHLARQGPGVLRWALYEAAMSSTKKASPDHEYFCSLRERLGTQRAALAVARKLARWCHHALRAAGDDAWAEAA

SEQ ID NO: 90890 - protein, 403 aa, unidentified
MIFVGDDWAEDHHDVHLMDETGKKLATRRLPEGITGIGALHAMVGAHTEDPEQVAIAIETDRGLWVQALVAAGYVVYAINPKAAARYRERHHVGGGKSDPADAKMLADLVRTDAHNHRPVAGDSSQVEGIKVLARAHQNMIWSRTRETNRLRNALREYYPAAVDAFEDLDDRDTLAVLGRAPDPATGARLSITQLKAALRAGGRRRYLDATAERIQASLRTEQLRAPQEIADAYATTTRSAVALLVTLNTQIDQLEKQLDQSFEQHPDADIYLSLPGLGDVLGARVLGEFGDDPERFAGAKSRRNYAGTSPLTKASGKKRAVVARLVRNKRLYDAIDQWAFCSLTHSPGARDYYDERRAADYKHHEALRALGNRLVAILHGCLKHATPYDEHTAWAHRQSTAA

SEQ ID NO: 90891 - protein, 338 aa, unidentified
MTIETLGIDIAKNVFQLHGVNRNGRVALKRRVMRDRLLAVLAQIGPCTVVIEACTGAFYWARKFEAVGHQVKIISPQYVKPFVRRQKNDGNDAEAICIAARQPHIPFVPKKTVAQQDIQALHRARQRMVNHRTAVVSQIRGLLLDRGFAIAKSITRARRAIPEILADLKNELTAMAREALSELYDLFRDLDHRIGSFDKKIERIFRQSEPCQRIAKIKGVGPKTATAVVAAIGDGSEFKNGRHFAAWVGLVPRQHSSGDRKVLMGISKRGNQHLRSLLVHGARAVVRTAPNRTDPNNLWVNQLRERRGFNRATVAIANKNARIIWAVLRTGEPYRAAF

SEQ ID NO: 90892 - protein, 359 aa, unidentified
MTSLTRLAEVVDVVIGVDTHVGTHSAALVAAGTGGVVEELSIPATGQGYAELVDWADDLTEEHGALRAWAIEGTGSHGAGLARYLGERGEIVIELDRPERAKRRNGAKSDPLDAIRAAREALARTRVGTPRQGAERQALAVLLAARRSAVAAAGVAQRQVFSLVIAAPEPIRDRFRGQKLKAMVTTAAAMRIHPSWDLETTTTVTVLRNLARRARTLQAEADDYEKQLRAIIKAWRPDLLDQVGIGPIVAAVVLCAWSHPGRIHSESGFAMLAGVAPIQATSGQVTNRHRLNRYGDRQLNRALHTIAITRQRRHQPTRDYTERRTREGKNPREIRRCLKRYIARDVFRLLEHRQPLDAT

SEQ ID NO: 90893 - protein, 422 aa, unidentified
MLEETQETEEIIQRVAALDIGKAELTCCVRVPSPDAPGKRLQEVRAYQTMTRWLLVMTDRLRELGVTRVVMEATSDYWKGVYYLLEAHGFETWLVNARDVKHLPGRPKTDTLDAVWLCKLAERQMLRPSFVPPPAIRQLRDVARYRADLVAVRTAEKQRVEKLLEDAQIKLSVVASDIFGVSGRAMLAALVAGERDPKVLAQLARARLRAKLGLLVEAFSGFFTDQHAFLLGKMLARVDQLDADLAELDAKLQELIAPFAHAVERLDEIPGVGQVAARLLLAELGTDMTRFPTAGHLVSWAKFAPGVKESAGKPKGSGSTGHGNPYLARVLGEAAVAASKTDTFLGERYRRIARRRGKRRAIVAVGRSILVIVWHLLADPTARYHDLGPGFYDTRINADRAKRNHIRQLEALGYRVTLQPAA

SEQ ID NO: 90894 - protein, 349 aa, unidentified
MKYFAGLDVSLEETSICIVDETGRIVKELRATSEPEALVGALRDTDLTLERVGLEACSLTSWLHDGLRKAGLPAICIETRQANAAMKTMPNKTDRNDARALAQIMRTGWFRQVHVKSRQCRLWRSLLVARRTILNEMRSIENVVRAILREAGVKLGTPSRADFVERVRELAGGDSEVTPLVEPLLAILITMLRELARLTKRVLDVVRKEKVCRHLMGVPGVGPITALAFRATIDRPDRFQHSRDVGAHLGLTPARYQSGETDIQGRISRCGDELARTALYEAAHTLLTRSRKWSSLRAWGMKIAKHRGMARARVAVARKLAVILHRMWIDGAAFRFGREPVTAQIGAAA

SEQ ID NO: 90895 - protein, 428 aa, unidentified
MNAVGIDVSKGKSMVAILRPYGELIEAPFEVKHTSSGVQSLIQTIQSIDGESRIVMEHTGRYYEPLFCQLTQAGLFVTAVNPKLIKDFGTNSLRKVKSDKADAIKIAKYALDSWSDLKQYSVMDKIRKQLKTMNRQLDFYMKHKTSMKNNFIGLLDQTFPGVNNYFRSPAREDGSQKWVDFATTYWHVDCVRKMSLNAFIDHYQNWCKRKEYNFRQSKAEEIYETAKELVPVLPKDNVTKFIVKQAARQLADASETVAQLKAKMNEAASKLPEYPVVMAMYGVGSSLGPQLMAEIGDVSRFTHKGALTAFAGVDPGVNESGSYEQKSVHVSKRGSAQLRKTLFQVMDCLIKNMPQDDPVYRFMDKKRKEGKPYYVYMTAGANKFFTHLLWTGLKSICSLYSNPNDFNIFPIGWHCCGGLILIPNFQPV

SEQ ID NO: 90896 - protein, 344 aa, unidentified
MHIASIGIDLGKATFHLVALGERSKVLVRKKFSRTQLLAHTANLPPSRIGLETCSGAHFLGAALRQQGHEVRLIPAQFVKPYRKSNKNDFLDAEAIAEAVTKQNMRFVPIKTQEQLDVQALHRVRDRLVQRRTALINEIRGFLLERGITFPAQPTHLRKNLPSVVEDAEQNLTPRLRWLLGRLWQEWKQTEIEIETVTDEIERISNQDERCQRLRQIPGVGPLVSTAMVAAIGNGAAFRRGRDFAAWIGVVPRQYSTGGKQKLFGISKRGNIYLRRMLIHGARAVLFRIKYDTAGLGQWVRRLSQRAPRNKVVVAIANKLARIAWAVLSSGKDYRHQPLQPAAA

SEQ ID NO: 90897 - protein, 333 aa, unidentified
MKNYRTFIGIDVAKLTLDYCLLTQDPQLEQGQILNTQKSVGKFLITLKKAGCEMNEILFVFENTGIYSSLLALVLSENKLDYAQVPALEIKRSLGITRGKSDKVDAKEIAHYAKRNTDKIALSILPEISLQQLKIVLAEREKTVAAIKTFERTKENEMFLTKEVFGSVKTINNQTVKLLKKQLALLDEKIRKLIREDENLHQQQQLLKSIPGIGEITSVYILMATKGFTAFTNGRKFACYSGVAPFEHTSGTSIKGKTRVSHLADKKMKTLLHMASLTAIKYDPELKEYYNRKKSEGKHTMLVLNNIKCKMVYRIFAVIQRKSNFVNLHKFAA

SEQ ID NO: 90898 - protein, 344 aa, unidentified
MEHYAGIDVSLEASSVCVVDGSGRILREAKVASEPDALGLFFRELDCEVTRIGIEACPLSQWLHAELTAAGFAVVLLEVRHVKAAILAMAVKTDRNDARGIAQLLRMGWYRPVHCKSQPSQDVRALLTARKQLLVKAIDVELCLRGLLRGYGLKMGVTTGPRFAARVRELTAGHPVLEPLGETMLRARDVLRKEIAVLHRQLLAIARTDPVCRHLMTVPGVAALTALTFKTGVDDPTRFTSSKRLGAHFGLTPRKYQSGTIDVTGRITKAGDAMVRSALYEAAHSMLTRVKTFSSLKRWAMAVAKRRGLGRATVALARKLAIVLHRMWIDGTDFRFGKEELVTA

SEQ ID NO: 90899 - protein, 346 aa, unidentified
MDHIAIDLGMKQSQVCIRNPRSEIVFEGRYPTERLAKVLAARPRGRVILETCSEAFAVADMLTEAGHDVQVVPATLARALGVGERGLKNDQRDARAISAASCRADLPAVHVPTKVSRDLKAMSTARESLVETRTKQINCVRAHLRTRLLKVKRGSPETFPARAREALLQDEDGVPQYIERQLLLLEMLNEQINAANKELMTVAKKNPVCGRLMTIPGVGPITAVRFVAAIDRIDRFPSASRVGSYLGLTGGEKASGEKSYSTSLTKAGSSKVRWTLVQAAWSAMRTRPNDPMVRWATRIAVRRKKHVAAVALARKMAGVMYALWRDGSNYNPMRAASLEEEASLAA

SEQ ID NO: 90900 - protein, 342 aa, unidentified
MWTIGIDAHYRLFVLCVLNEKGEVVKEETIKGSPGDVARFVKGLRRPSRICFEASCGYGTLYGELTPVAREVVVAHPGQLRLIFRAKQKHDRVDARKLAKLLYLGEVPRVHVPTLDVRSWRGQIEFRRGLVTKSTRAKNALRALVRTHAIVAPRGDSLWSRKGRAWAAALELPPLEALKRDMLLREIEFYRASIREVQKRLDEVAEAHAGVALLRTIPGVGPRTAEAFVAYVDKPERFGSARLAGSYFGLVPSLDQSAGKERFGHITREGPGTVRWLLTEAAWRAVRLSPSLRAFYERVLHGKKERKPLALIATARHLSEVMLAMLKSGVEWEERRAEKKAA

SEQ ID NO: 90901 - protein, 394 aa, unidentified
MAATHSVDSNASVTPVLYLAFELSSGEWKLASSTARGRRSRLVSVRARNTAGVLSEIARAKIRFGLPASTAVFSCYEAGRDGFWLDRFLRHHGINNVIVDSSSIEVNRRARRAKADNLDADSLVRLLVRYCEGEVNVWRTVHVPDAADEDRRHLHRELDQLRRERTAHVNRIGSLLAAIGIKVRAKCLSPRVLDTLRQWNDEPVPEGLKQRLVREFERMELLARQIRGLEADQARQICDDQTRHVAKVRTLMGLKGVGQTSATILVYEFFGWRQITSRRELAALAGLTPTPYQSGQSNHEQGISKAGNVLIRWIMVELAWSWLRFQPNSALSQWYRRRFGAGTARMRRTGTVALARKLLIALWRYVEQGEVPEGAEESDWEAKLKRVLAVRRSA

SEQ ID NO: 90902 - protein, 336 aa, unidentified
MEDPPRRSSTDGFAFFLGMGARKTALELALRDGEEIVARTTVSNDPEGHSTLVSWLADQGARPKKACVCMEASGDFEKAIAQRLYEEDYRVSVVNPRRIKGYASSQLQRTKTDSADAALIARFGQREDPRPWKPPSASESRLQELTRARQALKKEKTRAQNRLDEAEDKAVRKAHENLLDEIERQIEDLEEEIEEHIEEDSELNDRCSLLETIPGVGLQTAAIVVSELGAPEQFENARQAAAYAGLVPRHRESGTSVRGKPQMSKVPDGRLRRAMYFPAMTALRFNSAAGAFGNRLKERGKEKMVVVGAAMRKLLHICYGVLKSGRPFDPSLHPGT

SEQ ID NO: 90903 - protein, 355 aa, unidentified
MNGLRYIGLDVHQDTVSAAVLDGAGKLLMQSVFATRAVAILDFLHGIKGTLHVTFEEGVHSAWLYDLLRRRVARVVVCDPRKNKLLKSGNKGDLIDARKLAELLRNNSLSPVYHGGMSALEVQHRTRSYTMLTEDTTRVMNRLRAVFRSQAIRVHGRKLFRSDLRESHLAQLATPGLRQRAESLYRELDALHPLRLQAKREMLAECRKHPAMKWLRSVPFLGKVRTAVLIGRVQTPHRFRTKRQFWSYCGLALETHDSAEYRVVHGQVQRKSRPAQVRGLNWNHNHELKGLFKSAATMAAFRKGIFREFYSGLLAKGIRPEMARLTLARKIAAITLKIWKEGETFNAEHIKPQAA

SEQ ID NO: 90904 - protein, 318 aa, unidentified
MASFLGIDLAKETFHTCLLSDRADAKKAFPNTSKGFEQLTAWLKNRHAIDVHICMEATGAYWEALASYLYGLEQRVSVINPSRIKAFAQSELLRTKTDEVDAALIARFCKSQRPEPWLPPPAEIRILQTLMRHYEHLKTTRAQQSVYAQSLEAVVVTASIREVIAMLDEQIAQVERKIRQHFDDHPDLKRRRDLLTSIPGIGETTAGSILSEIPHLDRFQSAKAVAAFAGLSPRERRSGTSIHGRPRLCKIGNARLRKALYMPAIVALRFNPVLKIFADRLAAAGKHKRLIIGAVMRKLLVLAYGILRSGVAFDANYA

SEQ ID NO: 90905 - protein, 370 aa, unidentified
MHETITSYVGLDIHKDSVAIAIAPAGRSAAQFIGTTSSNLAQLCKVLTRQKCIPSRTLVVYEAGPCGYGWARHLNAHGWRCEVISPAHIAHSAASKAIKTDRRDALLLARESRAGNLTQVILPDSRDEAMRDLSRAREDALAARLRARQQLKSMMLRHGRSYHSNTWSEAHQRQLATVRFDHPAQQIAFDEYRQMVTEAHEHLERITQALRAQCTEWRMRPVVEAMMCLRGFDFVAAITVIAELGDLTRFAHPRALMAYLGLVPSEHSSGNTRRQGTITRTGNRHVRRILVESAWTYRYAAHVGRELQVRQERQPKLVRDIAWKAQLRLTHRFRKLNFGRKMKLPKVCVAIARELCGFIWDLARHVPIQA

SEQ ID NO: 90906 - protein, 320 aa, unidentified
MAQNDRVVVGIDVAKDKVDACIRSLSQRQTFPSRAEGRRKLIAWLRKHKVDKAVMEASGGYERDWAKALRGACFEVWIVDPKRVRNFARSAGRLAKNDVIDAEMIAWFAETFKEAPTQTHDVAREELAALVKARKAVIDLKTRLQSQNEHAVPGAVQKAHARVLKGLDAEIAKLEDAIVITVKATPAFAARAEIIESVPGLAETASAVLLAGLPELGTVRQEIAAALLGAAPYDDDSGKRRGERHIKGGRRWVRNALYMPCLGAATQSNPVLKAFYQRLIARGKEPKVALIACMRKLIVILNTMIARGQKWDPSRRFAVN

SEQ ID NO: 90907 - protein, 355 aa, unidentified
MAHPAYHSNNYETFIGLDVDKNSYSYTVHDQFQIKKSKKMPSDPEHLYNYIQKHYNTKKVICAYEAGPTGFSLHDYLSGKDITCLITSPASIPKAPNQRVKTNRIDSVKLTEHLVSGKLKPIRVPEGPYRELRDLVKIRENYARDRKASKQRIKALLLYANLYPALKDADGNWSSAYIEELRHIHCSYAVRQRLDMLVEDLEYARKKLLSVHRMIKSFCLEHDQINQYLNYLRSIPGVGFTVAVSLLGKIGDPEQLQNPRELAAFIGLTPREKSTGDTINRGSITQMGDKTLRFLLVEAAWVAIRKDTQLEQFYHRIKNKNHPRAASKIAITAVARKLTQIIYRVLKDKRNYIQY

SEQ ID NO: 90908 - protein, 408 aa, unidentified
MNTLYVGIDVSSKSNVVYLMLPNGDKHSNFSVANSHEGSTQLVKRILSALTSHSLDTVLIGLEATSVYGDNLVYFLREDATLAPFNRKIHVLNPKQVKKFHDAYNDLPKNDYVDSFVIADCLRFGRINKEVYLGDYRYKALQNLTRARFFAVQNLIKEKQRFMNVLFKKYSTMTQEKVFSDTFSTTALAVYDEFDSAEALANMDLHELTDFIIEKGKNRFPDPDAVAKAIQKAARSSYRLPKTVNDSVNQVLSISITSMKALESQIKEFDKAIKAQMELLPNVLISIPGIGPVYSAGIMAEIGDINRFDNQAALAKYVGLAWKQHQSGSFEAEVTRLIPSGNRFLKYYLYEAAFSLVRCDKEYSDFYHLKYKEVNRCQHKRALALTARKFVRLVFRLLKDNRLYVPAK

SEQ ID NO: 90909 - protein, 341 aa, unidentified
MSNANTYIGVDLHKKSCYVTVMDVLGKIRKQTEISTNTDKVRKFFNRYQTARVAVESTMNWMPFYENLESLGCSVVLSNPLMTKAIAAARIKNDKVDSKVLADLLRTNLLPTAYIQPREIRDLKELVRQRVSYVQLRTIIKNKIHSVLFKNNLKHDFTNLYGKAGRTWLESLETRDIYRAELDRYLTTLDLLDGQIEELSQNIIATAKTDYDCKLLMTIPGISYFSALVIKSEIGDISRFPNAGKLCAYAGLIPSTYASADKVRFGRITKRGSKWLRKSLIDAITSGSRHPSRLCFFYRKLKKNKGTGKAKVATARKLCSIIFAILTDKQPFREFAPVKQR

SEQ ID NO: 90910 - protein, 375 aa, unidentified
MSDHSEAFVAFDTSKLRNSVAIAEAGRAGEVRFLGEIENSAAATAKLVRKLAGKYQRLTFCYEAGPTGYGLYRQIKSLGHECLVVAPSLIPRKPGDRVKTNRRDAFSLAKLSRAGELTAVWVPDPRHEAMRDLTRARGAAVEDLRRKRQQVSAFLLRQGRHYSDGKKTWTKAHMNWLASQKLEHPEQRIAFEEMLLAVRQAQERIERLEQAIRAAVPDWSLAAMVTALMAMRGIDLVSATAFLAEIGDLSRFQTAPELMAYLGLVPSEASTGDTVKHGPITKAGNRRARRILVECAWSYQHPPRVGKEKQEKVAAAPRAVREIAWKAQCRLNRRYRALIRRGKLKTVAVTAVARELAGFIWAIGREVTTADAAAR

SEQ ID NO: 90911 - protein, 379 aa, unidentified
MEAKREDPLTLRHRCARVEMSSNHSQNRGSDMQVTTYGVDLAKQVFQVHWVETDSGEVRRKMLTRGQLQAFFACRAPGVVAMEACGSAHHWGRTLKALGHQVRVISSQFVRPFVKSNKTDAADAQAIWEAAQRPEMRFVALKSEQQQALMGLHRIRAQLVKQRTMQANQVRGLLYEFGVVVPKSWRALLAQAAPILADASRGEIPDLIRGELQQQLQGLRDLTGRIEQLERSIGAYRAQDEQCRRIEAIPGVGLLSSTAIVGSVGDARTFRSGREFAAFLGLVPRQSGTGGRVKLLGISKRGDPYLRTLLIHGARAVVNHSSRPGRSMPRWLRELLSRRPKNVAIVALANKIARTIWALLAHERTFDDRWGQAMPIPVL

SEQ ID NO: 90912 - protein, 377 aa, unidentified
MVLHRPVECAAFTGKVGPCTQVNGMVRRRTLAGIECGARGHLMKIYALGIDLGKTVFHLIGLDSSGQVVVRKRCSRTQLLAFTGNLQVQLIGMEACSGAHFLGKALRAQGHDVRLMPAQYVKPYVKTNKSDYIDAEAIAEAVQRPRMRFVPIKTEEQLDLQALHRVRERWVMRRTAVVNQIRSLLLERGLTLPKGRSHLGQMLPRILEDAELNLSGAFRVLLAQLKLELEQLAARIEQMDMVIQQQARENESCQRLTTIPGVGPVTATALIAAVGNGSAFGKERDLSAWMGIVPGEYSTGGKQKLLGISKRGNKYLRRLFVQGARSVLQRRDKQAPKCGRRGLGQQIGSHRMGGVVQERKLSRSGACGHHLKTLFKK

SEQ ID NO: 90913 - protein, 401 aa, unidentified
MSKFNPERYGIETASALESVINVHRQEPHAAYVGLDVHKETIAVAVAEPGRAEPVYRGEIANKAKNIEKLIGKLSEAYDGGLLQFCYEAGACGYVLYRQILACGHDCQVVAPSRIPRTPGERIKTDRRDALKLARLLRAGDLTAVWVPDRDQERMRDLSRARDDMKGQERKARQQLNAFVLRHGHHWPRGKSRWTPTHYNWLESLRFERPWQQVVLQEYIDATKAASARVAQLSDHLMQALPEWSLASVVDSLIALRGVDKLAAIVLLAELGDISRFDSPRELMAFLGLVPSEHTSGARRRQGSITLTGNAHARRMLVESAWSYRFPARQTMHLKRKAINASEAAKQIAWKAQVRLCGRYRKLTRAGKNTKVVCVAIARELAGFIWDIVRQQMARPAPQAA

SEQ ID NO: 90914 - protein, 478 aa, unidentified
MQDRRLVGIDLGITSAHTVRVLAGDGGLVCRRKAVPTVESLGEVEQAALAGAVAGTRLEVVVEPTGPAWLPIAVFFAARGHTVYRVSSAKAHDLRRFLRRHAKSNGIDADTLARLPLVDPAGLHPLQLPDAARAALDRRVRACDRLTRQAADHKRRIKGLVRQLLPASPLTGELGQADLAVLERWADPKALVAVGRARLQQVLASASAGQQGTQRAEQWLAAAHAALELYGDHSAIAFQALAAEVHSEVRLLRATQAEQAAHAREREACYRRVDPAALARSLPGLATIGGPALVATMGSASRFATAAKFRSFTGLAPRASETGQTDRKGQPISKAGNKLLRTTLVRAADHARRQDPQLARIYWTQMVQRGKDHLGAVCVVAAHLAERAWTVMDRGTPYVICDTDATPLTPTQAKQIIAERWTVPEEVRRRRRSKKGKAPQQVLQGHVHGAQGATRRPSPSSATLGQPPSPVKPTQPQP

SEQ ID NO: 90915 - protein, 368 aa, unidentified
MEITTIGIDLAKSVFAVSGADRRGKVVMGRQLRRAQVLEFMGKLGPCVVGMEACGGAHHWARAIGKLGHEVRLLSAALVRPYRSGPNKHDRNDADAICEAVRRPQMRYVAVKSVAQQDQLALHRVRAQLQKQRIGQSNLIRALLHERGVVARLGAAGLRQALTQALQAETSELSGAMGELLLELSGGLRELERRIAVLTRRIERAAKDDERCARLMEVPGVGPLISSALVATVGNAREFKRGRELSAYLGLTPRQHSSGGKTVMLGISKHGDRYLRTLLIHGARALLYRQGRGRAHPRAAWAARLVARRGPNVAAVALANHNARVLWALLSRGDGYRPPTSSFPSRPSAGAVIKRAREGKLLLATKRA

SEQ ID NO: 90916 - protein, 348 aa, unidentified
MSQSKQYVGLDVSLKETSICVIDDVGKIVWRGRTESTPEAIASAVKQHAPYAVRIGLESGQLSSWLFHGLKVAGLPVICIDARHAKAALSLKVNKTDANDAFGLAQIMRVGWYREVTVKGLDCQAVRALLVARAQIVSQITTTKNCVRGILKTFGRVLPKGLRSQFSGRVRAAIDGDPILGAIIEPTLRVLEAMRAQLLVYNKAVIQRARGDDTARQLMSAPGVGTVVALAYMTGDEDPARFKRSSSVAAYFGMTPRRYQSGEVDHAGRISKCGDGMVRGLLFESAKVLLSRSARPSALKTWGEALGKRIGPKKATMAVARKLAVILHRMWTTGTTFQWNTEAASPAA

SEQ ID NO: 90917 - protein, 351 aa, unidentified
MNLQENIITDNTSKMQMYDYYIAIDWSIEGSTIARMKSNSIKPVVTDIASNIKTIKEYLKELKGSKILTIEESTGAQWLYVELRDSVDKLLICNPNRNRLLEEGTKTDKIDASKLCQLLRTGLLKEVYHTDNENNYRIRKLVSAYDDLTIARVRIMNQHSAIYRAIGLKKTEKDKYDKKDKTLNFIIEHQTAVLELLGEEKEKFEEIFSDLVKHHQVIRNIKEISGFGNILAVEAFGIIIDARRFKNKYRLWCYCGLVKNKRQSGKMSKKKKSKVYSRKLKNVFKTATKAALGGKNDIREYYEYLLLEGYTEKDARNTITRYLTTSAYAVIKYNRKYEPYYWRKKLSGKVA

SEQ ID NO: 90918 - protein, 387 aa, unidentified
MTVRTVNNLPAATHGETVRCLFAIELSKRSWVIGFITPLSEKISRRTLKGCDWKGLLELIEEVRARVGRETGRAVEVVSCYEAGYDGFWLHRLLEAHGIRNYVIDPASLQVDRRARRVKTDRIDAERLLRSLMAYLRGEPKVWSVVRVPSVAEEDARRLHRERDRLVSERVQHVNRIKGLCALHGIYDYHPLRPQAMARLEQLRTTPGGPLPPRLKSEIKRELHRLELVIEMIATLEAERDAIVEDEASTHVNAKKIQNLHKLKAIGPEFAAVLVGEIFHRDFNNRRQLASYVGFAPSPFQSGNVAHDQGISKAGNCKGRTTGIELAWLWLRYQPDSDLSVWFRARVGTVKGRIRRIAIVALARKLLVALWRYLETGLVPRGAVLKG

SEQ ID NO: 90919 - protein, 425 aa, unidentified
MSEKDYNRQVVKRERIGRATLVIGVDVGNACNALGFMNKEGNVLGSCAKLHNSREGFEQFVKMTEGLKATHGMKDVLIGLEPTGHYWRKLAYFAKDQGYEVRFIRTTALKHHRELDESSSAKSDKRDALTIANITREGKYIDTVIEDGVMRQLRTLSKVRERLLRYSVGAKNALHAALDDYFPEMHEIFWSMNSRSLWAVLDRCPFPEDVVSMKRSVLKEMIVCSSRKKAGAAQKAKALHRAARKSIGVKRIGSADRYRVKICLEEVKRTVLMLKDIDRQMKSVLKEIPASEYLLSIPGIGTVSAAIFLGELGDPACFQNARQIVKYAGYDPQESDSGYRISRKFISKKGRWLLRKCLFFMSMRVVVLSNYFQEYYRRKLQTKNRVGQLPRRKEILCAVAIKLIKVIFALLRDKRRFQDTVSFAA

SEQ ID NO: 90920 - protein, 408 aa, unidentified
MKRYYIGVDWGDRLHQVYVGDQDGKKVREVKVQESPEGLAEIGRWLDENRAEGIELWAAIEKPAGRIVDFLLDHGVEVYPVNPKAVDRVRDRYRMSDSKSDAFDAYVLAEFLRTDQAHLRVLRPSSEKAQELKMLSRDQRRVGRHKTRLLNQLTTTLKEYYARPLEAFKDLETEIALDFLQQYPTPAHLSALKRKEFNRFATTQHHLSKQRCEELWKGLNQPQLAVPEHVVRAKAQLVEVLIEQLRASIKAVKIYNHKVESFFASSPAAPFAKTLPGAKSGTLVAAIWAELGDAQGRWESSRHLQAEAGAVPVTKASGKSRVVHFRFACNKHLRHTMYWFSFVSVNHSEWSKLYYRGQRDKGHSHHQALRALGAKWLKIIFVMWRDHKPYDENYHLANIARQKMRQAA

SEQ ID NO: 90921 - protein, 387 aa, unidentified
MQKPHDESKACLTAFVQDSTLTVVIEMSLANWLVAGMIPGVDRQPLKKIVPNPEVLLQLLHRWREEGIKAGKEITRIAVAYETGRDGFWLARWLRARGIDAHVIHATSVAVSREHRRAKTDRIDTAVLQRGFLGWLRGERGHCSMAYVPTVEEEDAKRPHRDRESLLKLRTSTVNRMKSILIQFGVRNFNPILRKAPENLASVRTPEGIPLPPNSVTALRRHMERFRVIKEQIKAIERTRLERLQRDPAEKLNAMVFLLVRIVGLGIETAEQLVHEILSRNLRDRKAVARYARLTGAPDESGSKRRDKGLSRSGNRRVRNILIQLSWRLLRFQPESDLVLWFKKRTANAQGSRKPMIVAFARKLIIALWRYVNTGLVPEGFQLRSAT

SEQ ID NO: 90922 - protein, 421 aa, unidentified
MSKGMTEKQWFAGVDWASENHHVYLMDCNGKRLGERQFRHGGAGLAEMADWLIATSGGAPGMIHVAIEVPHGPIVETLLERGFKVYAINPKQLDRFRDRFSPAGAKDDSRDAKVLADALRTDMRAFRKLELAEAILVELREWSRVADDLSTDKNRLANRLREQLWRYYPQMLELDEDITSEWVLDLWETLPTPAKAARVRESTVKKILKDHRIRRIDAAQALAILKKPAVVVAPGTTEAATAHIRTLIARLRPVNEQLKGAHRQLDILCTRLAEPVENTDGETEAGQVSEQRDAAILASMPGNGRIVLATLLAEAWDALQRRDYHALRALCGVAPITKRSGKSLIVIRRLACHPRLRNAVYHWARVAVQYDDKSRAKYDALRARGHNHGRALRSVADRLLAVACAMLKNGTLFDPSLAHAH

SEQ ID NO: 90923 - protein, 318 aa, unidentified
MMEHTYTGIDMAKDSFVVATKLAGKVTTSLHSNDKKGINSFLKSLSSQTWCIMEATGVYSLQLAIALYEKGIKVSVVNPLQIKRFAQTKLKRTKTDKVDAALIAEYGERMQPKLYEPPAPFMRKLQQQRMSLKLLVKSKRSFLNQLHALSQLEEADKAALKACKTVLTSIEKQIGRLEEQMQQLAEEHCQDLFTLLQTIPGISTKSAIELIIVSGGFRNFTSARQFSAFIGISPCINESGTSIRGYRGISRIGDKNIRAMLYMCAMAAKVYNKACRELYERMVAAGKAKKVALVAVMNKLIKQVFGMVRSGEVYSAPC

SEQ ID NO: 90924 - protein, 347 aa, unidentified
MLHVGLDLSRKRVDVCLISDQGELVDELAAAFDEDGLRRLSERVAAKHTGRVRAVVESMNGARFVHDTLEAQGWDVLVADAQRVKGLAPLACKTDKIDARVLAELSFRDLVPAIWLPDPQVRRERELARFRLHLVRHRSSLKNRIHSTLITFGKPCPVSDLFGVAGRKLLGRLEVPDPWRENVEASVVLIDQLDRQIDAVAGELKFVGADHPYVPLLMTAPGVGWLVGFSIACEIGEINRFSSPTKLCGYTGLCPRVIQSGESDRRGPISKHGPKYLRWALFEAALNACDHPLYKERYERTKKRLGRQRGPKVAQIELSRKLTEAIWHMLTRNQPFTPAGAPIRLAA

SEQ ID NO: 90925 - protein, 330 aa, unidentified
MSTYKVFIGIDVSKKYLNAAILNGDTTVTFKSLYCPEEFEKELNRHLKEIEKSELLIVMEHTGVYHLRLAHYLYESGYNVGVINPYSMRKFFEAKGKRAKTDKVDSIVIAEYGRQFFDGKLYRPKTEAQKQIETRLRLLDDFQRQINMVKNQREALSHVPMEGIKKVLRYYDGIIKALSSSMKKVEKEIQKLCREKFKKQRELLESIPGISDRAISVVVSMLRGFEGFSRAKEVGSFVGICPSPYESGDTVRGRGSIMKRGNSYVRKVFYMCTLSAIRVNVYCKGLYERLLKKGKSKKLALVAVGHKLLRQCFGVLRSGKEFNPSLVKST

SEQ ID NO: 90926 - protein, 419 aa, unidentified
MAFKILRKNCCGLDIHKTWIFACIGITDSNGRTEYKQARFSSFSNGLRALADWLAKYSCSDVCMESTGKYWIPVFNILEKTCWVTLAHPKYTKPQKGNKTDRKDAKWICDLYMCGMVKPSFIPPPDIRQLRDLMRYRVKLTNMLTGEKNRAQNCLTVSNLKLDDVFSDVFGKSSRSIIQYILEHPGEQFDVTPFIHRRCKHPVEEIQAAVDGVVSREQAAKLKECLLHIDQLNAHRERIEAEILRLAEPYPYQLELIRTVPGFDAAPLTAVALISEIGVDMSVFPSAKHLVSWAGCCPRNDQSNKKVKSTRISRAGCYLKPLLVQIANAVIKSDRHPECRERYRRIKARRGHKKAIIAVCRMLLTAIWNVLSKLEPYSEKGYLADKLTEHSVVISKAEGLALLCKRGYIFKDELAVESG

SEQ ID NO: 90927 - protein, 379 aa, unidentified
MSSENAIHIAIELSVSSWLVAVNTVSGATKSRLLRLDGGDASGLLKLIAELQTRVSTHPGDVAEVSCCFEAGRDGFWLYRLLTAHGIAAYVLEPTSILVNRRARRAKTDRLDAEGMLRVLAAWLNCDRQICSMVRVPTPDEEGAKRTHREREHLVQERLRIENRIEALLFTQGIRGRPSLRSWERDVATLRTGDGRELPPLLRAELDRLRRRLLLALELIRELETERAKTLDAAATDDLVARKIVSLKQIRGIGENFAAVLVREVFYRRFDNRRQLASYVGITPMPYQSGGVDRDRSISRAGNPRARTAMIQLAWLWLRYQPASGLATWFRERVGTLKGRTRRIAIVAMARKLLIALWRYVETGSIPDGLAFGTGTTAG

SEQ ID NO: 90928 - protein, 460 aa, unidentified
MNRKQRREVMRKIQSEDLTLEVVHPDAAGIDIGNESHYVAVPSTRDSQPVRRFGCTTAELKAMADWLKQCEIRTIALQSTGVYWVSVYDILQEAGFEVYLVNARETKNLPGRKTDVQESQWLMKLHTYGLLRNSFRPSQEIRTMRTYWRQRNDLVRTAGRHIQRMQKALTQMNIQLANAISDVSGMTGQAIVKAILAGERDPYQLAALRDRRVKASEEEIAGSLEGNWQEEHLFVLQQEQDGYQFCLKQMAECDQRLQQYLHQQEDRSQGASLPEEKRKERLRKKKKGNTPQFDLRAELFRMTGTDLTQIDGIDVTTAMTIFSEAGWDMSKWKTEHHFVSWLRLCPNNRISGGKIIGKGRLPTNNRVTTALRMAASTLRLSNTYLGAQFRRLRTKLGPPVAIKAMAAKLARLVYRMLRYGMHFIDRGAQFYESQHRNLQIHYLKRKAANLGFQIIEAPAA

SEQ ID NO: 90929 - protein, 340 aa, unidentified
MPLYGAFDLHAKTNHLGIIDQSGKRIVVKKLPNEPSIILETLKPMRKRIVGIAVESTYNWYWLVDLLMEADYKVHLANPSAIQKYSGLKHADDVHDAFWLAEQLRLGVLPVGYIYPKEERPIRDLLRKRGHLVRLRTSLILSLQNIISRNLGFQVDANDVKRLREDRITPLLGVNEDLALVGTTSKETIDFLTRQIKHIEKVVETRARLKESYRYLLTLPGVGRILGLTIMLETGAIARFPGVGNYASYCRKVNSKWTSNGKAKGKGNKKNGNKYLAWAFSEAAELARRYDEQARAYYNRKARKSNFMVAHSALAHKLTRAAYYVMRDQVPFMPEKLFAV

SEQ ID NO: 90930 - protein, 405 aa, unidentified
MGVAVPELWAGTDAGKAEHHCVVIDTAGRRKLSRRVANDETALLKLIADVLALSEGEPVAWAIDLNAGGAALMIALLTDNGQQVLYIPGRTVHHASGSYRGDGKTDAKDAFVIADQARMRRDLQVMHRGDDIAVDLRILTSRRLDLAADRTRAINRLRAQMLEYFPALERAFDYKTSKAALTLLTQYQTPAALRRIGKNRLATWLKNRKVRNHQLVATTAIEAAEAQHTAVAGEKLAAVVVAKLTREVMALDEEIAETDDLIEGRFRDHPHAEVILSMPGIGPVLGAEFIAHTGGDMSVFGTADRLAGVAGLAPVPKDSGRISGNMRRPRRYCRRLLRVFYMSAMVAARHCPVSKAFYERKRAEGKGHKQAIIALARRRLNVLWALIRDGRGFETIAPEPPVALG

SEQ ID NO: 90931 - protein, 354 aa, unidentified
MNSTQVFEKRKIAVAIGIDLAKDHCDVVAYNADNKICFTKANMTYPKLMEWLANAQPAVVLMESCKGCHVRARDIADLGHDTRLVKGADVKALRNVCQKNDIRDADYIARLLYVPGTKFVFVKNQRQQSLQFLQNEYKSFQELRIRVGNQIHAGLEEFGCPAPKSQQFVQSRMMAHLEKNAELIPEEVMASFLRRREMWLNLFKQEEDAKKRMEEIAKTDDDTKRMMTVPGVGAQTAVGMLVHIGGDIGRFKNSGQFAASIGLVPKQNSTGGNTTLNGITKRGPKRLRSNLVQCGQVILMHADKLKGNFGDWVRKMRDSGKKRGVIACAIAAKIVRIIYRLMKDKVDYTPVPSR

SEQ ID NO: 90932 - protein, 344 aa, unidentified
MNHSAGLDVSVKDTSICIVDDAGKIVREVKVASEPAALLPVLANGAYHFKRIGLEAGPLSQWLYSALAEAGLPVICVETRHMRAVLKAQINKTDRNDARGIAQMMRVGLYRPVHVKTLRSQRLRMLLTHRKLLQSKAIAIENDLRGTLRNFGLKVGMVGKVKFEARIEELVGSLPDLGLLVEPLLMVRRVLREQLVVLHRRLLAIVRDDDVCRRLMTTPGVGPVVALTYRATVDVPARFRKSKAVGAVFGLTCSKYQSGEIDRSGRISRCGDEMMRVMLYEAAQSMLLHSKKWSWLKAWAMQIARRRGMKKAIVALARRLAVIMHRIWVDGTEFRWTREQAAAA

SEQ ID NO: 90933 - protein, 387 aa, unidentified
MAQQLDDLSRSLTPLEQDSTIISVIEMSQASWLVAGVVPGIERHPLKKLEPSEVELFRLLMRWRAEATEKGRTITRIAVAYEAGRDGFWLARWLRARGIEAYVIHPTSVAVSREHRRAKTDRLDTGLLKRVFLGWLRGEPDHCHMVAIPTLAEEDAKRPNREREALVRERTRLVNRMKSCLVRFGVRSFKPTLRKAPDRLATLRTPEGVPLPPNTLLELRRDMARLRFVMDQIKEVEEARAQGLEQAPQDKPHVMVHLLARVMGIGIETADMLVHEVLARTLRDRRAVARYAGLTGSPDESGSRRREKGLAKAGNARVRRGMIQLAWRFLLHQKESALAQWYRARTADARGGTRKTLIVALARKLLIALWRMVTTGEVPAGVVLRAA

SEQ ID NO: 90934 - protein, 392 aa, unidentified
MLYLGIDIGKRSHVASLLNEEGKVVFKAFSFHNTTLGADKLLTKLNTYIESPCDVEVGMEATGHYWLSIYSFLVESNFTVFVVNPIQTDGWRKGIEIRKRKTDIIDSILIADLIRYGDFLETSISDEDTLALRNLSRFRNYLFHSCSDLKRKAIAVLDQVFPEYDSVFSDIFGKSSKQLLLNFSSALEFEDISAAQLSKALEKITFKKFATKKVHALSSLAKNSFGVKFAIDSFSLQLKMIVEQIIFIEQQIDQLELELEILVSKIDSPILTIPGIGAVNAATILGEIGDISRFSHPSKLVAYAGLDATVSQSGEYSSTNNRISKRGSPYLRKAIWSAAFVASNHDPVFKAFYEKKRREGKHHLVAVGACARKMCNTIHAILKKNVPYVPQI

SEQ ID NO: 90935 - protein, 411 aa, unidentified
MEKLFVGLDVSKNDYKVCILNGAGEKVMQVFALHNNADDSERLVDAVVSIATELNINKILFGYESTSVYGWHLQYFLADSTQLRPFSPSTICFNPSIIESFKKTLGDLPKNDRIDAFAIAERLRFGRLPESVPVDFRYLALQRLTRHRFHIVENIVREKCYYLSNLFLKCSGLCQAKVFSNNFGASALAVIDELGDIDMIADMPLEDLVRFLVEKGNEHFADADMVAKKLQDAVKSSYRLAPSVDNSLNLVLRCCIDNIKSMEKQKKAIEKAIKAEVTYFENEYTCLKSVKGIGEVISAGLIAEIAGISRFENDNALAKFSGIYWSSYQSAGFTADETSLRKCGNKYLRYYFIQAADQLRKYLPEYNAFYSRKFKESKTHHHKRALVLTSRKVVRLVFALLHEGKLYDPAH

SEQ ID NO: 90936 - protein, 414 aa, unidentified
MFYIGIDIAKDFSVCSVIDDKEEMIIKPFPFNSSTIGFKKLINNIESLNCDIKDIVIGMEATGLLFENLYRYLKDLNYNVILLNPYQTSQYRNMLTMKYVKNDNIDSLIIALLIKSGRYSKGYVNEEQIQSLKVLFRHKENIKEKLKSLKRETSSLLAVVFPELDKVIKDPFNVSGLILLEKYPTAKHFEYVSVDRILKLFRKTKGNNFNQAKAEHLLSIAKDTIYSGVAKDARAFFIRSNIKLIRALQEEIKSLEEEMIKIFDKQIESTQENKEDEDYISSVLDNLRTIPGVSDKTLLALLAECGNLDRFKDAKSLIGYLGLYPTQEQSGNTLKYGHLAKRGARYAKKALYLASVAAIRHNSELKQIFRNQVASGRAKKEALIIVARKLAYIIWAIYNHNQPYNPTRVFVAHP

SEQ ID NO: 90937 - protein, 360 aa, unidentified
MKKVQEYVVKNKPIYVGLEDSKRTWRLCIRSEGLVVHEVSMPTVYENLRNYLISRYPGCQIQLIYEAGFSGFWLHDLLEGDGIDCIVTPPNKVTQEKDSRMKNDRIDARRLSKNLENRDYRSCFIPDKELREDRQISRTLAMTQKDITRTMNRIRRFFDFHGLELLRDKQNWTVSDYKKTRQMVLGDSLKFSLDRLLDELDRLCGSKKQLKKKLQELSKKTRYAKTFGHFESCPGIGWLTAIRLVLEWGEDLSRFPSGKHMASYVGLTASEYSTGETIRRGHITSQGNELVRSWLIQCAWIAIRKDPVLLEKFNAVWKNTGSKKKAIVATARKLAVRLRYLAVNDEDYELGLVEEITVAA

SEQ ID NO: 90938 - protein, 324 aa, unidentified
MKPQQQSNPSGVEYVGIDVSQESLAVNAGGLFVGSVENTPAAIGALVRSLRKRLEAGRELRFCLEHTGLYGQDVWFALVDLGQTVCVVDPAKVRCYAKACGIAAKTDPIDAAVIRAFAEQTHPVPTPKPAPVRLKLRELTRCRGLYVRMRASTRQELDAARDKGCRKLLERSICQLTVHIERLDREIAAAIASDEEMTRLSEALKTIRGVSDVTAALVVALVPELGLIGRNRAGSLAGLAPFPKDSGKHHGRRRTGKGRENLRHALFMPAFSAVRCNPKLKAFYDHLRHDLHKPYYVAMVAAMHKLFLHMNSVAARVRKEAASG

SEQ ID NO: 90939 - protein, 356 aa, unidentified
MTKGSTMAREARITVGIDLGDKQSMVCVVDGNGDVLEEARLATTSTAFQHRFASVAPARVVLEVGTHSPWVSRLLKECGHETVVVDPRKLELITQSDKKTDRHDASTLALLGRIDTNLQLLKSVSHRPAQFQADLSVIRSRDALVRARTLLINDVRGLVKSAGGRLPASSAEAFPKKALPHVPPPLLATLKVSLEQIASLSQSIRELDAQVIEIAATRYPETGALTQIPGVGTLTALTFVLTIADPQRFRRSRQIGAYLGLVPRLRQSGERDPKLSITKAGDPYLRQILVSAAHYIIGPFGPDTDLRRFGLALAARGDKRRAVIAVARKLAVLLHHLWVTGEVYEPLRQKELVPIA

SEQ ID NO: 90940 - protein, 406 aa, unidentified
MDIHKSFIVACIATTDERNHTTHQIRRFSTFTGDLRKLADWLASNNCKDVCMESTGKYWIPVFNILEKTCNVCLTHPKYVKAIKGKKTDKRDAKWISELFKCDLVRSSFIPPPEIRQLRDLCRYYVKLTYVSTSEKNRAQNCLTMCNFKLDDVFSDVFGVSATRILDQLLQHRNSSFDIAPLIHRHCKATVVEVQAALDGELTLAQAEKLKIIRQHKEYIDNLRSTLKSLILQLASKFQPQIDLLLTVPGISEPLTAIRILAEIGADMSVFETSKQLCSWAGLTPQNHDSAGKKKTTRIARAGIYLKPLLVQIALSAGRSDKCPELKNKYQALKKRRGSKKAVIAIARKLLTAIWHILSNGETYNPELYRKADKPPVNRELSPDQAFALLRSQGYIIRVKELAPPA

SEQ ID NO: 90941 - protein, 454 aa, unidentified
MPKRMTGRPELKPVNVGAAAIDIGSKMHMAAVNPASTDVPVRSFGTFTQDLHDLADWFKACGVTSVAMESTGVYWIPVYEILEQRGFDVILVNARYAKNVPGRKTDVSDAAWLRQLHSYGLLRGSFRPDAEIAKLRAYLRQRERLVEYAAAHIQHMQKALMEMNLQLHHVVSDITGATGMRIIRAIVAGERNPDVLATYRDVRCHSSIETIRAALVGNNRDEHVFALTQSLELYDTYQAKMLDCDRKLESLIATLTDKGAKPVGKLPKPRIKTKQVNTPTFDVRTALYGVLGVDLTEIHGLGPSLALKLVGECGTDLRAWPSAKHFTSWLCLAPGNKISGGKVLSSRTRRSSSRAAALLRLAATTVGRSDTALGAFYRRLSSRAGKSKAVTATARKIAVLFYNTLRHGMSYKDPGADHYEQQYRSRVLANLQRRAKSLGFVLQAIPGDAEPAVS

SEQ ID NO: 90942 - protein, 453 aa, unidentified
MPTCGVRALLLVKESGNLPHSGEAADKLDEDGPCAIPRISSRRLRSRVRKQEPAAEQEGDPMIYAGVDIAKADHVIGAVDETGAEAAKPMAFKNSEAGFERCIAWPESVAQTEDDVFVGMEATGHCWMACFAHLTAAGYRVCVVNPMQVHAMRRLKGLSGVKNDRIDSLLIAETLGQGDYDQTRLAADEVQALKQLTRYHQGLKRELATVKTQAICVLDAYFPEYAGLFSDMFGAASLKVLSECPTPSEAARKRASSIAKMPSEGSHGRLGAERAARIKAAARSSVGIRLGEDAASFQIKTMVSQIEFLNATIAKVEREVGMLLERIEPNITTIPGVSTTTGAQIVAEVGDVKRFKNAASIVKYAGLNSGVDESGKFSAEGVPITKQGPPYLRRSLWLAANRARRFDPRLKAFYDKKRREGKPHRVAVTAVARKLCHVVYAVMRDGEPYDPGK

SEQ ID NO: 90943 - protein, 354 aa, unidentified
MIIIGVDFHPEFQQIASVDTDTGEFQEKRLRHCEEAEKFYGAVAASGQKVRVGMEASGHARWFERLLAELQIELWIGDAAEIRAKRVRKQKTDRQDAQLILRLLLEDRFPQIWVPSWKNRDLRQLLWHRHRMVQARTRIMNQLQAVALNEGLRCKKRLWRERGRQQLESFRLAPWASRRRRDLLELLDRLNPTIAELSLTIEQEVEKCPEAQRLMTHPGVGPLTALTFVLIIGEANRFQCGKQVASYLGLVPLEDSSGNRRRLGHITKQGSSMLRFLLVEAAQVTARSLPQWRSKYLHLMMRRGRKTAKVAMARRLAVRLYWMMRQGGDYQPWSKFGSHAGQPGNRDGVPSNTE

SEQ ID NO: 90944 - protein, 340 aa, unidentified
MMTTTIGLDLAKSVFQVHGVSSEGRVTVRRKLRRAELMRFFRDLPPCLIGMEACATAHYWARELSALGHEVRLMPPSYVKAYLRRQKNDAADAEAICEAVTRPTMRFVPVKSAERQAILTLHRTRELLVRQKTTLIRAIRSHCAEFGLVVPQGARRITDLLQLVRETHPSTLPQAAVLTMQMLGAQLDALAVQIRTLERRLLAWHRENETSQRLATIPGVGIITSTALAASISDPKLFKSGREFAAFLGLVPRQNSSGGKERLGQISKKGDGYLRKLLVVGATSVIRRARTGVTPSAGWVQALLERRPSRVVTVAMANKTARIAWAVMARGETYRPIAKV

SEQ ID NO: 90945 - protein, 365 aa, unidentified
MPSVTSAAGLIHLGMDTSKNTIVVGILMPGEQVPVIDRIWNEEGSVRHLIGRLGDPAGLRCCYEAGPCGFELHRLLASMGVACDVVAPSLIPRRSGDRVKTDKRDASRLARLHRAGELTAIRVPSPAEEAVRDLVRVRAALLADRKRAQQRITAMLMRHDRIWRATYWTREHERWIAGQSFEEPALAAALAHYRAALGTRRAELDAVESELALWAGREPLAPIVARLGCYRGIAALHGLTLAAEVVDWRRFGSARAFMGFTGLVPAEYSSGERTRRGSITKAGSEPVRTALIEAAWAYRYQPAIGVVLRRRQRDASPETLARSWQAQRRLHGRYKAMTARGKPAGVAVTAVARELAGFVWAEMTS

SEQ ID NO: 90946 - protein, 360 aa, unidentified
MDVHQKSISIAIADDGPDGDVRLYGTIRNTAEAIDKVIRKLVSTGAELHFVYEAGPCGFTLYRHLTGNGFSCIVAAPSMIPKKPGVRIKNDTRDALALARLLRAGELSPIYVPDREDEALRDLTRARNDARIAARKAKQRLHSFLLRNECIYNGKKKWTKAHYNWLAKLKMNHPAQQVAFQEYIDAVNECTERMARLDEQILKAADEWRWAPTVKALQALRGVSLLTAVNMVAEIGDFNRFQNPKELMAYLGLVPSEHSSGDRIRRGGITKTGNSHARRLCVESAWAYRYQARVTKLLLKRHEGLPKDILQIAWKAQLRLCTRYRRLRARGKAIQVVVVAIARELVAFMWAIARRIPAVA

SEQ ID NO: 90947 - protein, 345 aa, unidentified
MVEHIETIGCDLGDKQSELCILLPSGESKRPQPVKTTRAAMRTFFTRPPAHVVIEVGAHSRWVSQLLKDLGHQVTVANPRRVQLISQNDSKDDRVDAELLARLGRADPELLAPIEHRGNQAQADLAVTKARDGLVRCRTRLVNQARGLVKSFGERLPKCGTDCFHRKAWPSVPGELRPALEPIFQVLGEVELKIKEYDRALARMAKRYPDVQILSQPDGVGLLTALVYLLTLEDKARFEKSRSVGAFLGLRPKKDKSGDSDKQLRITKAGDPFLRRLLVGSANFILGPFGADSDLRTWGLGLSKRGGKNAKKRAKVAVARKLAVLMHRLWVTGEVYEPTGYGKAA

SEQ ID NO: 90948 - protein, 391 aa, unidentified
MVCVGIDVAKDKHDCCILDSDGTIRADCITIPNNMDGFKQLLQTIRDCTKKSDKIKVGLEATGHYSYNILGFLLDNDLAVYVMNPLHTNLYRKSLSLRKTKTDRVDARTIATMLLSDVDLKSYTDTAYHNEELKSLTRYRFDKVRERAKLKQSVSRLVTILFPELEKLVPSLHIASVYALLSEYPGAKQISEIHLTKLTNLLATASKGRYGKDKAIQIRDAARTSIGSVMPAKFLELKHTIKLIRELTSEIDEIEVSIQKIMDELNPPILSIPGVGIQSAAMILAEIGDFSNFESPDKILAYAGCSPSTYQSGKLTNCYAHMEKRGSRYLRYALYNATKYVCHWNPVFAEYLAKKRAEGKHYNVALSHATKKLVRLIYALQKSGKAYLVAA

SEQ ID NO: 90949 - protein, 325 aa, unidentified
MPKYSTAFGMDVHLRSTTVCALDADTGEAVTRRFPGNPWGEIAGWMDGFPGPSLAAYESGYLGFAPQRELAGLGVECVVAAVSKIPRSAADSASKNDRNDAARMAKAILAHDISPVWIPSPEVEGIRDLAGAYGGATARLATAKQRLLAFLAKRGFVYGGTTPAGNPRKYWTYDFLRWLDKVRPEDDGGVRTLAALRNEVEAAAEARADLLSEYRAAVDASPIAAEVAALQSIKGCAFALAAAFSAEVGDFTRFRSGRQVTAYFGLAPSQRSSGDSVRLGGISGAGNALVRKLAVEGSWCYAAARHQPKLMPRDTGVPLEIVDVH

SEQ ID NO: 90950 - protein, 317 aa, unidentified
MGEGSTIGIDVSKWRLDVSVLPGGETFAVGNDAAGWAALVEQLKGKGKSPVKAIGIEPSGGYERDLVKALQRGGLPVRMVNPYRLRQYAKALGTLAKNDRIDARLIARFTAELPTRELRRHPLTEQMAELVVARRQLSDDKVRLGNQLEQVREPLLRRLMGQRLRRIAADLLLLDKRLAEIVASDAALRTRDRLIQSVCGAGPVYSHTLIALVPELADPSLDRRQLAALVGVAPYDDDSGKRSGKRAIWGGRAAVREVVYMAALTAGRSNPVLKAYRDRLIAGGKAPKAAIIAVARRMLGIVLALLRTGQQWDPQYR

SEQ ID NO: 90951 - protein, 355 aa, unidentified
MTSVKYIGLDIHQATISAAVLDGNGKLLMESVVETRGSTIVEFLRGLRGELVVTFEEGTSAAWLHDLLKPHVSKLIVCDPRKNALLKVGSKSDRIDACKLAELLRGGHLSSVYHGGAGVRTLKELARNYLTLTQDATRVMNRIKALYRSQAIPCSGRSVYGARDRSAWLEKLTEHGLRCRAESLHQQLDLLGPLRQQARREFLAESRKYPARRCLQQIPCIGALRAALLIAFIQTPHRFRTKRLLWSYSGLGLETHSSADYGFKDGRLQRSRKNISVRGLNRNHNHDLKNLFKSTAISASTRKGPLQEYYAGLLAKGITPAMARLTLARKIAAISLRLWKKGEHFDPTKLKTQAA

SEQ ID NO: 90952 - protein, 313 aa, unidentified
MSQNNPSILHAGLDIAKASLELHLAGKSHPLTNDPKGHARMLQLLRAHPGVQIICEATGGYERAPVRALHTAAMALSVVEAGRVRHFARAQGQRAKTDPIDARVLADYGTAMRPAATPAPTAQQERLQALDTRRRQLIETLVAERNRSAHYTEALCRRQGRSLLKVLEKQVVQCEAAIAELIAADETLQAKADRLDAIPGVGFITAAVMLADLPELGTLSDEAVAALAGVAPYNQDSGDKTGVRHIAGGRSVVRCALYMAALSAVKHDAILKAFYLKLRAGGKKPKVALVACMRKLVVLMNRLLKNPKFELAK

SEQ ID NO: 90953 - protein, 381 aa, unidentified
MRHGARIGDCRVQANQEEQGGEEVEMAVYVGIDVHKHYCQAALMDDKGHVVKELRFDNTSQGTSSLVTVARSIDSQVEAVVEPSANFWVRIYDKLQDEGVDVKLSNPLRTKAIAEARIKTDRIDAKTLAYLLRGDLVAESYVPTRKNRERRALIRHRASLIRMRVEIKNRIHALLDKHELTHTYTDLFGKQGLEWLRNLQLPTPDQEILQSSLHVAETLTEQIRLMDIQIAKDATSEEKSKLLMTMPGVDYYAAMVLLSEIGDVHRFSSDEKLVSWVGLAPQTHQSGDSNWTGHITRKGSKRARWILGQCAQSARQHDPRMREFYERIERKHGPQKAVVAVARKMLAIMYVMLIRNEPYRGENPELTERKHKRLDTLVNSA

SEQ ID NO: 90954 - protein, 319 aa, unidentified
MDRVFIGVDVSKDYLDAAALPSSQTRRFANDPAGVAELVAWARELAPERIVFESTGRYQKLAVGALLAASLPAVVVNARQVRDFAKGLGVLAKTDAIDAGILARFGEVVATVVRPLPAPEIQEFQELYDRRSQLVRMRAAEKNHRHAAGSAQVRKNIDAHIAYLEKQIKGLEDRMDRFVETCDAFRAKDEVLQSLPGFGPQVSRTLLAYLPELGQGSRQRIAALVGLAPYNDDSGKESHTRHIRGGRGKVRIGLYQAAIVAIRHCAEMKEFYIRLKTRGKATKVALIAVARKLLVLANALVRSMKSYEPRANSVCPKNA

SEQ ID NO: 90955 - protein, 368 aa, unidentified
MIERVHGIDRHKSFSTISVLNRQGEEVQFAGACREFGKYVEGLGPTDAVVLEASTGSFWWADQIEARGAKCFVVDPRKFRIIKDSWNKTDKHDARNLAKALWVHVVTGEFGIPTVHKPAAVTRELRKLFAQYCLLNRQIATHKNNAQAIFVENGVELKKLAKRRLFAVGSGLEVLKEMNVSAASRVCLELTLQVLWKVVESKERLAGEILIAGEPLRSQVELLISIKGVTPLIALAFLADVADIRRFRTLRKMNAYLGLVPRASNSGGKERPGHITRESRKLTRTILTQCVHHVAASSESLEHYYRELREKRGTGRARIAVIRKLCGMMRRMLLSGEQYRWMDQGLYEKKLRQYERELKRVKEERPAA

SEQ ID NO: 90956 - protein, 403 aa, unidentified
MNNVAGIDVSKGKSMVSVLRPFGEVVAKPFSIGHTGSELKELADYLKSLDGETRVVMEHTGRYYEPVARFLHEEGVFVSAVNPKLIKDYGNNTLRKVKTDKADARKIARYGLDNWAELRQHTPMDTIRMQLKTLNRQQSLYAKTKTMMKNNLIALLDQTYPGVNALFDSPVREDGSQKWVDFATTFWHVDCVRSMDLAAFTERYRKWCKRHGYNFSQSKAVEVHTGAQDLIAMLPKDALTKTMVRQAIDALNAVSASLERLKAEMQALAAQLPEYPVVMAMHGVGDSLGPQLMAELGDVARFTHRNAITAFAGVDPGADQSGTHEAKSTRVSKSGPPELRRALFLVMDCLLKTQPQDDPVYRFMDKKRAEGKPYLVYMTAGANKFLRIYYGRVKEYLASLEEN

SEQ ID NO: 90957 - protein, 477 aa, unidentified
MRKPAEIVDADHELVIERVCAIDVAKASGMVCTRLPQGAAAGRRVSRVWEVAATTRAVTELADHLVAVGIEQVTVESTSDYWRIWFYLLEARGLDVQLVNARDVKNLPGRPKTDKLDAVWLAKLTEKGLLRPSFVPPVEIRVLRDYTRLRVDLTRERTRHWQRLEKLLEDALIKVSSVASKLDTRSVRDMLEALIAGERDPRRLAELARGRMKTKRAALVEALSGRFDGHHAEIARMLLDQIDGLSAAIDQLTTRAELLLQTLLAARAGDQPAGGAVPAPSSGDPCQAPTEARTEAPTEASVPANGPLAHRGGNGLSASQRLDEIAGIGPLAAQVVIAEIGLEMSRFPTAGHLVSWAKLCPRTIQSGATRRGGAAGKGNPYLKGVLGEAAAAAAKTNTFLGERYRRLVKRRGKLKALVAVARSILVIVWHLLSDPTARFYDLGPDYHTHRIDTTRKIQNHISGLTALGFRVTLEPAA

SEQ ID NO: 90958 - protein, 408 aa, unidentified
MEILYPCCAGLDVHKDLVVACAREVVGASVRHDTAEFATTTRGLLTLADWLKQHRCTHVAMEATGVYWKPVWHVLEGSFEQLLVNPAHARNVPGRKSDVNDAHWLADLLAHGLIRPSFVPPARIQELRDLTRTRKQLVRQVGRHTQRIQKTLEDANLKLTGVISDLLGTSGRAILKALIAGETDPERLLEHTTGRLEAPRERLLEGLRGVVTDHHRFMLRLHLRQIESLEAGIAQLERQIERLLRPFRERVERLATIPGVSDTVAQVLVAEIGLDMARFPTSGHLVSWAGLCPRMDESAGKRRSTRVRHGAPWLKTTLVTAAWAAASSRDTYLRAQFQRLKTRRGPKKAVVAVAASILTAAYFILRDGVDYRELGTGYFDHRDRARVLRRLSRRIEALGYRVEVHRVA

SEQ ID NO: 90959 - protein, 378 aa, unidentified
MKDIRHVGFDVDSEKLAVAVAEASGEVRSLGTIPYREESVRRLVKKLGPASRLRVCYEAGPHGYGLYWQLTKLGVHCDVIAPTLVPVKSGDRVKTNRRDAEKLARCYRSGDLTAVWVPDAAHEALRDLVRAREAAKKDQLRARHRLGKFLLRRGLRAAGGVKSWTKAHLSWIKTLHFEHPAQEATFLDYQHEVEHAAERVVRLEHAIDQAIEAAPPEMRASIAGLQALRGIKKVSAVTIVAEVGPVSRFARPKQLMGYSGMVSSENSTGNSVRRGAITKAGNAHLRRIAGEAAWAYQYRPAMSPVLKKRQEGLSEEVKEIAWKAQHRLCSRFRRLSAKGKLRQKVTTAIGRELLGFVWAIGIQVEKEQQRIKGPRRAA

SEQ ID NO: 90960 - protein, 355 aa, unidentified
MTSTQYIGMDVHKESISIAVRNAAGKIVMECVIETKASTILQFMDGLRGDVQVTFEEGTWAAWLYDLLKPHVTKVVVCDPRRNALLQEGNQNDRVDARKLAELLHNNQLRSVYHGDHGLRTLKELVRSYLTITQDLSRVMTRVKAIYRSWAIPCTGKQVYAPRHRAEWLAKINEPGVRRRAELYYQQLDALRSLRQEVRRDLLTESKKHKAWKLLCQIPSIGPIRAAVLLGILQTPHRFRTKRQLWTYGGVGIETSSSADHQVIKGQLERKKKQVEIRGLNRNYNHDLKNLFKGAAIVAASKPGPFAEFYAELVAKGMRPEMARLTLARKIATIVLIVWKRGVSFDAQHLKPQTA

SEQ ID NO: 90961 - protein, 344 aa, unidentified
MDHFAGMDVSVKETSVCILDDAGKIVKEVKVASEPQALLKVLGNPAYRFKRIGLEAGPLSQWLFSALAEAELPVICVETRHMQAVLKAQINKTDRNDARGIAQMMRAGVYRPVHVKTLRSQKLRMLLTHRKLLQSKAIAIENDLRGTLRNFGLKVGMVGMVGFEARIQALVATIPDLAMLVEPLLVVRRALREQIVILHRRLLAIVRDDEVCRRLMTTPGVGPVVALTYRATVDVPARFRKSKSVGAVFGLTSSRHQSGEIDWSGRISRCGDEMMRVMLYEAAQSMLRSKKWSWLKAWAMQIARRRGMKKAIVALARRLAVIMHRIWVDGTEFRWSRGPATAAA

SEQ ID NO: 90962 - protein, 385 aa, unidentified
MQKLNDLSRSPSPLDPDGTLIAVIELSLSSWLVAGIVPGVERQPLKKLAVDESALLKLLHRWREEAAKAGHRIKRIAVAFEAGRDGFWLARWLSARDIEAHVIHASSVAVSREHRRAKTDRLDTELLKRSFLGWLRGERDHCKMVAIPTTKDEDAKRPNREHESLVGEQSRIVNRMKATLIRLGIRGFNPKLKKAAERLDGLRTPEGEPIPPNTLAELRRDMVRRRLVSDQIRQIEDARLERLKQAPSDGPHAMVRLLARVIGVGVETADMLVQEVLSRSMRDRRAVARYAGLTGSPDESGRKRREKGLTRSGNARVRRGMIQLAWRFLMFQKDSTLAQWFRVRTESARGTRKTMIVALARKLLIALWRLVREGVVPDGVVLRPA

SEQ ID NO: 90963 - protein, 472 aa, unidentified
MIYSVGIDLHQGRHRARCLDEKAQPCDGFSFQTTPEGLATLEERVFRDGANPIIVLEPAGLPWLMVAVYLRSRHPDCRLVKAKTQKVAALRRYLRGPVKSDRLDALTLAKMPFIDPEKLVEIYLPPAKIHALQRLTRQRKRLESDVSGRKIRISAILDGYLPGVRRAFNDAWSTPFRAFLRSRLNPFAVAREGEEALHTFLSKASPRSKWSRAETRPVFLACQSVADVCELSEPAGTVNEEFFMDLQDEIARELRLMEIGEAESESLARRIAELYRILYPSDNLCTIPGVGEHTAPIFLATVGNPARFPNQSAFANWEGVVPGARQSSDVQAKGLRMTKAGPSIMRMALYQAGDIGRRWDPQLAAVYYREMVYHGKNHRQAMGAVMSHLGARVFTVLKGGRPYEIRDTEGNPISKDDARRLILDKYQVPEEIRRERRRRNRKVSKNRETATYRTNEAAKAPQPVLVQAISRK

SEQ ID NO: 90964 - protein, 457 aa, unidentified
MMETKRRREQRSMLPVHPDAAAIDIGATVHVAAVGPARDPEPVRSFGTFTGDLHRLADWFAQCGIKTVVMESTGVYWIPIYEILEQRGFEVRVVNARDAKHVPGRKTDISDAAWLQRLHEFGLLRGSFRPQGAIAALRAYLRQRERLLDYAAAHIQHMQKALTQMNLQIHHVISDITGATGMRIIRAIVAGERDPDTLASYRDIRCHSSAETVRQALIGNYREEHLFALAQAVELYEVYQAKVATCDEKIEGVLERLKQPCRAPAKPLRAARHKTRQPNAPAFDARGALYAVLGVDLTQIHGLGPYLALKLISECGTDLSAWPSAKHFTSWLSLAPGNKISGGKILSSRTRPSGNRAAALLRLAATTVGRTETALGAFYRRLSARIGKAKAVTATARKIAVLFYNAVRHGMDYADPGASYYEERYRRRVLTNLQRRAKAFGYVLQPTEIKVVPMAVS

SEQ ID NO: 90965 - protein, 314 aa, unidentified
MSVSTCFIGIDVSKDQLDVAIRPTNEKMSFANDDDGIDRLIKRLLPFQPHLIVLEATGPYHQLVLGRLLASGLAAIAINPRQCRDFARAVGRLAKTDSIDANVLAEFADKIRPELRPIPDDATQHLDAICTRRRQLVTILAAEKNRHHSGPATIRAQIKKHIVWLEKQIHELQSDLDKLIRSTPAWREKDDLLRSCKGIGPTTSHTMLASLPELGALSRHRISALVGVAPFNSDTGKHRGQRHVQGGRIDVRCVLYMATLAAIRSNPVIRAFHRRLIAAGKAKKVAITACMRKLLTILNAMVRSNTRWTPDFAS

SEQ ID NO: 90966 - protein, 360 aa, unidentified
MQADSNPKGVFVGIDNHSRSLQVCVLDQAGQILVNRPVPNDCPAVADLASRFGRVRRAALEAGSGSADLAEQLIQYADWSVELAHPGYVARMKASPDKHDLGDAHLLADLTRVGYLPRVWLAPPWVRELRRLVRYRQQQVDERRNARLRIGALLRDHRVRPPVRVNAWTQAWWYWLETEVIPELPARSAWIIPQQVKKIEWLSKEVRRAETQLRRHTNGDRLIERLLEESGVGVVTAWVLRAEIGRFDRFDRGKALSRFCGLSPRNASSGERQADAGMIKAGSPLLRATLIELAHRLPRCEDRWQAYRQQLLAAGKPGSVVAAAVANRWIRGLYYRMVQGHGDVAQEPLNESVTGVRVEC

SEQ ID NO: 90967 - protein, 344 aa, unidentified
MEVAIGVDPSKSSLAVAAVDPLGRVVGTAEFTNDPRGHRALLRWARERGPDRVIGIECSLSFGATLSRLLLRSGEDVREVPTTLTHRQRRRRASQGKSDMVDSVAIARIVASGEVLPSAHRLEVLTDLRALVEYRDQLVRARTQVANRTHADLVNVLPGYERQVPNLRAKAHRTTARSLLRGDRSVRGELGRKRLDELSRLEREIAAMDRRIQSTVRKTGTSLTSIPGVGPFIAAKILGEVGDPSRVRSKPAFAVLSGTAPLSASSGQVQRHRLNRGGNRQLNWALHYIALVQCRIMPDAQAYMDRQREAGKSHKEAMRCLKRHLSNVVYRHLVADARRAELAA

SEQ ID NO: 90968 - protein, 372 aa, unidentified
MLIIGVDFHPEFQQIAWVDTDTGDFQERRLQHREEAETFYRALAAAGQKMRVGMEASGHARWFERLLGELQCELWIGDATQIQSKRGRKQKTDRQDAQHILRLMLKEDFPKIWVPSWENRDLRQLLWHRHRMVQARTRIMNQLQAVALNEGLRCKKRLWRAGGREQLESFRLAPWASRRRHDLLELLDRLNPTIAELSQAIEQEAEKCPEARRLMTHPGVGALTALAFVLIIGNAERFPRGKQVASYLGLVPLEKSSGNRRRLGHITKQGSSMVRFLLVEAAQVTVRSLPEWRSRYFRLMVRRGRKTAKVAMARRLAVRLYWMWRQGWDYQPVFDGTPSRFPGCPACEPNLSTESLSSQPIFCNRQLHPHWD

SEQ ID NO: 90969 - protein, 388 aa, unidentified
MIYVGIDIAKLNHFAAAVSSEGEILIEPFQFSNDYDGFYLLLSKLAPLDQHSIIIGLESTTHYGDNLVRFLICKDFKVCVLNPIMTSSMRKNNVRKTKTDKVDTLVIAKTLMMQDSLRFSTLEDLDYIELKELGRFRQKTMKQRTRLKIQLTSYMDQVFPELQYFFKSGLHQKAVYALLKEAPMPKDIAYLHLTHLSNLLVKSSHGHFTKDMARELRVLAQRSVGLNDSSLSIQITQTIAQIKLLDSQLIETELEMANLVTCLHSVLMTIPGIGTVNGGMILGEIGDIHRFSTPGKLLAFAGLDPTVYQSGNFQAKRTHMSKRGSRVLRYALMNAAHNVVKNNATFKAYYDTKRAEGRTHYNALGHCAGKLVRVIWKMLTDEVEFNLE

SEQ ID NO: 90970 - protein, 316 aa, unidentified
MSEFTSFVGIDVSKDALDVWVLPKAQQWQVANDQAGCAQLVERLKPLGETVLVVMEATNVFWRMAAAALAGAGLACAVVNPRQVRDFAKSMGKLAKTDALDAQVLALFAQRVKPRVRALPSAQCQLAAELLGRRAQLMGMQVAEKNRLASASAKRVRKDIEATIAFLEKRLGALDQEIDSWLQSTPIDQSRADLLQSFTGIGHNTARSLLITLPELGSLSGKQIGALAGLAPFAKDSGKKRGQRHIAGGRSIVRAALYMPAISAIQHNPVIRALYQRLVQAGKHHYVAITACMRKMLVILNAMLKSNQPWKAPQNP

SEQ ID NO: 90971 - protein, 353 aa, unidentified
MIIIGVDFHPEFQQIASVDTETGEFQEKRLAHREDAETFYRALAGQKVRVGMEASGHARWFERLLAELQFELWIGDAAEIQSKRVRKQKTDRQDAQLILRLMLKDDFPRIWVPSWENRDLRQLLWHRHRMVQMRTRIMNQLQALALNEGLRCRKRLWREHGRQQLESFRLAPWASRRRRDLLELLDRLNPTIAELSQAIEQEAEKYPEAQRLMTHPGVGPLTALAFVLIIGKAERFQCGKQIASYLGLVPLEKSSGNRRRLGHITKQGSSMVRFLLVEAAQVTVRSLPEWRKKYAHLMMRRGRKIAKVAMARRLAVALYWMWRKGWNYEPSKSSDRTRASSEQAMVCSKTPSN

SEQ ID NO: 90972 - protein, 418 aa, unidentified
MEVAQDDQQIIARVAALDIGKAEVVCCVRVPGKSRSRLQEVRTFSTMTRSLLVMSDWLKSLAVTRVVMEATSDYWKPPFYLLEDTFQTWLVNAKDVKHLPGRPKTDRLDAVWLCKVAERQMLRPSFVPPAPFRELRDLTRYRVDLITARTAEKQRVEKLLEDAMIKVSVVVSDVFGVSGRDMMTALVAGERDPKVLAQLARGSMRGKTERLEEAFTGRFTEHHAFLLRTMLARVDAINADIDLVQARIDEQITPFATAVTRLDEIPGIGLTAAQTIIAEIGLDMTRFPTPSHLTSWARFAPGIAESAGRKKGNNGTGHGNRYLARALGEAAVGVGRTNTFLGERYRRIARRRGKKRAIVAVGRSILMIVWQLLNDPEKRFVDLGPGYYESRINHNRSTRNHVRELQALGYKVILEPAA

SEQ ID NO: 90973 - protein, 339 aa, unidentified
MNVMIGIDPHKASHTAVAIDVAEDQLSSVKVRATRRQVDQLMSWAEPFEKRTWAIESAGGLGYLLAQQLVARGEDVLDVPATLASRVRLLATNRSNKNDPNDAHSIAIAALRAPMLRGVERADHGEVLRLLAKRNMDIGNHRTRVVCRLHALLAELAPGGIAKEMYVSDADVFMAKLRPETPAQQMRFDLALELLDDVRRLDAQLKESHRRIRVAIKASGTSLTEIYGVGPIIAATLIGYSGDVTRFASRDTYASYNGTAPIDFSSGGRIVHRVSTRGSRKLNHALHIAAVTQIRNPGVEGRIYFERKVAEGKTKKESLRSLKRHISNAVYRQLILDAH

SEQ ID NO: 90974 - protein, 345 aa, unidentified
MPIVGGLDIHRKQITFDYLDTVTGQVRRGQIAPADREHLRAWLARFAGRDDVAFAMEGCAGWRYVAEELAAAGITAHLAEPAGTAFARGRKRHAKTDKTDSRHLRMLLAEGRLPECWIPPAHILECRALLELYNDLRRERTAWAQRIHAVLFHQGAPALGEGALRTEKGVAGLRAAAAAHLSPAGQLQVATALEVIDALEARLHVVRHQLLDAARHLAGAKALAARLYGVGPVTALAITCWLGGAGRFSSSRKAVRFAGLDITVSSSDRKGPPGKLSRQGPPVLRWAVYEAGKAHARTSAPDHRYYAAVKDRKNSKRACLSEARKILRQAHHILAELGDDALAAA

SEQ ID NO: 90975 - protein, 330 aa, unidentified
MKNYKEVVGIDVSKKTIDAYCYQRQVHKEFVNDVFGYKSLIKWVLKEVKDSAVFYCFENTGYYSLKLALYLTSQGIVYVEESPLKIKRSSGIVKEKTDRLDAKLIARYAWVYKEELSPSTVKSTSHLELGRLLALRDQLVRNNAGLKGTLKEMKVLLSSSTTDLGCISLKRSIVYQTKQVKTIEKRIEEIMFNDVSMSKNYELLSSLKGVGLVIACQFIYHTGNFTRFDSWRAFSSYCGTAPFKHESGTSIHRRKQCHYLGDRKMKSLLSMASISAIQHDSELRLYYKRKLAEGKDKMLAINNVRNKLIARAFAVVKRGTPYVVLQQYAA

SEQ ID NO: 90976 - protein, 435 aa, unidentified
MPERQDVFVGIDVSRRNHQCSFVNNERKPVCKTLKINEDREGFQTLKEKMCAIAHEKGSVRFLIGLEATGHYHQNLVAFLQSIDNLDVRVSCINPVQTKRFIQMLMLREQNDKVDSRAIAEFMCVQRPDQTSKKRSEMRPLRDLSRLRDQLVSQKTAHINQLHALMDQVFPEFEQVFPDIKNEPLAWAVLHCYPCPRNILTAKTSRLMTVQNRKGGRYLGEEKALQLKALATQTIGSSKGEVYVFQIKVLTQNLRSLHQQIEDTEKEIENTVNSMDLPPWKTIPNLGVLTMATLLGDVGDPRLFGTAKKFSSFLGLTPRGKQSGSSVNRKGHISKCGPSHIRQKLYMCVVSALATKKNPLILDVYNRLVSKGKPKNLAIVACMHHLARVIYGVFKYNQPFDPEFIVAKRSLGLPQNGNFSTSIHGINIQRPINKI

SEQ ID NO: 90977 - protein, 326 aa, unidentified
MSTILGIDVSKDKLDLVILSEEGKFHKVIGNDPAGFKRLDKWLISRHADRVHVCLEATGQYGDEVSEYLYGQGHDVSVVNPARIKRYGESKLHRNKTDKADAELIAEFCLKEKPVLWEPLSPDLKHLRALVRRLRDLQANYQQEESRLSSGEKDAWVIQDLTVHTEYLKASIEAIEAEIQNFTNQTPGLKEKQELLVSIPGVGKKTSARLLGELGEISRFENAPQLAAYAGLNPKGFSSGSSVHKKTRISKQGRSELRACLYMPAIVAMTHNPVIRALKERLQERKLPNMAIVAACMRKLLHIVYGVLKSQMPFDPEYDRQFNYSN

SEQ ID NO: 90978 - protein, 349 aa, unidentified
MASMPHPQRLVTVGVDSHKETHVAAAVDQLGRILGTTSAPTTQRGYGQLERWARGLGRVERFGIEGTGSYAAGLARWLAGRGHQVVEVNRPNRQARRRRGKSDPVDAEAAARAALAGDAVTTPKAANGTVEMLRVLGVARRSAMKARTQAANQLTSLLVTAPEPLRAQLRGLAPDRLVEVAAALRPGELAGPLAATKLVLRELARRHQALSAELDRLDTELAKLAPKASPGLLARRGVGPQTATALLVAAGDNPGRLRSEACFSMLCGASPIEASSGKTVRHRLNRGGDRQANNALWVIAMSRMSCDQRTKDYVEQRTEQGKSKKDIIRCLKRYIAREVYRDLRAAIAT

SEQ ID NO: 90979 - protein, 393 aa, unidentified
MICVGIDVAKDKHDCFILSSEGEVLADVFTIPNNAEGFDTLLQTIRRCARPEDKIKVGLEATGHYSYNILGFLLNEGLDTYVINPLHTNLYRKSLSLRKTKTDRVDARTIAAMLMSDVDLKSYTDTAYHNEELKSLTRYRFDKVRERAKLKQSVFRLVTILFPELEKLVSTLHMASVYALLSEFPGAKQVFEAHLTHLKAVLYDASKGRYGSDMATTLRDAARCSVGSVMSAKSLELRHTIRLIHELDAQIEDIEAAIQSMMGEIQSPITTIPGMGVRMGAMILAEIGDFSRFDSPDKILAYAGMSPSTYQSGQLSLSGAYSHMEKRGSRYLRYALYNATKYVCLWNPTFAAYLAKKRAEDKHYNVALSHAAKKLVRLIYALEKSKRPYSTAA

SEQ ID NO: 90980 - protein, 314 aa, unidentified
MADLCSVGIDVSKAILDVAWSTNPTARWQTTNDDTGWTALVAHVRTGQPTLIVLEATGGYEIGAASALSTAGLPVAIVNPRQVRDFAKALGLLEKTDAIDAAVLASFGARIQPPPRPLPDDLQADLQALVTRRRQLVDMLTAERNRVALARGAVRKNVVAHIAWLEKQLGKTDRDLRTQIEASPMWRARDQLLQSVPGIGPATSARLLASLPELGTLSHRQISKLVGLAPLPDDSGRRHGYRRIQGGRADVRCDLYMATVTAITHNPTIRAAYRRWRAAGKLPKVALVAAMHKLLIHLNAMLRHQTPWQPPATP

SEQ ID NO: 90981 - protein, 374 aa, unidentified
MDTIYIGVDFHARQQTICYLKTETGELVICDLKHQDKQAVRAFYAQFRGRVIVGLEASGYSPWFERLLEELGCEVWLGHATEIRRRARWRQKNDRRDAELILDLMLHDEFPRLHQPAPQSREVLRMLRYRQKLIKLRTMSKNSMQAIALQAGVAQRSRLFTKAGQQELSAAEMSPVMHWQIEHWLQLLQPLNQQLLETMVWFKAQSKGDVCIQRLRSHPGIGLLTSLCILHTLQPVSRFGNARKVAAYAGFDPVERSSAERQHFLGISKAGSRLLRYLLVEATHTAIRHDEDLKRFYKRLAERRGRPKAKVAAARKLLIRAFIMLRDEIDYAEFRRRAVAARLARQGQGPNVPEVLIGQPASADHRDELTSESQ

SEQ ID NO: 90982 - protein, 401 aa, unidentified
MVSDFRKGRYNLMKIYVGIDIAKLNHFAAAISSDGEILLEPFKFTNDADGFQLLVSKLESFDKNSIIIGLESTAHYGDNLVRYLVAEFYQVCVLNPIKTCQMRKNNVRKTKTDKVDTFVIAKTLMMQDDLRFITFFDLDMMDLKALGRFRQKTIKQRTRLKIQLTTYVDQVFPEIQYFFKSGLHQNAVYALLKEAPSPKEIASMHMTHLANLLKVNSHGHFTKEQAKELRILAQKSVGANDSAISIQITQTIQQIELLDSQLEKIEAEMTDIMKFNDSVIMTIPGIGYINGGMILGEIGDIHRFSNPNKLLAFAGLDPSVYQSGNFQAKTTRMSKRGSRVLRYALVNAAWNVVRNNATFKAYYDAKRAEGRSHYNALGHCAGKLVRVIWKMLTDEVEFNLE

SEQ ID NO: 90983 - protein, 344 aa, unidentified
MITIGIDPHKTSVTAAALDPVGETVGHRRVACTAKTADQLIGWADAWPDRRWAVEGASGLGRGVAQQLIAAGEQVIDVPAKLAARARLLGSGSSRKSDLVDAVSVGSVALYNSKLRTVEREDEAVVLRLLSDRRDDLVSERTRTVNRLHVLLRDLVPGGARRDLSTLQAGRFLSGIRPLTTVDIERKRIARALLEDLRRADRQLRAIGTTIETAVAASNSSLTEVFGIGPVLAAKIAGHTGDITRFASKAHFASYSGTAPIEASSGDLRRHRLNRRGNRQLNTALHTAAVCQIRSPGPGQDHYRRKLAELKTTKEAQRSLKRQLSNVVYRHLVDDHRRRQLTFD

SEQ ID NO: 90984 - protein, 411 aa, unidentified
MDKIYDKCCGIDVHKKLIVACFRCGKQQEVREFGATTRELLELADWLKEGGCEMVAMESTASYWKPLYNILESSDLKAMVVNARHMKAVPGRKTDVKDAEWIADLLQHGLLQPSYIPGKDQRELRELVRYRKSLVGERTRELNRLQKMLEGANIKLSGTVSDINGKSARSILEYLLTGKSIDGSKYDEMYEQKIIAHNLKATKEQIVDDLNGVMSPLQRRMMKELLVHLDELNVHIKNLNDEIDNFMKPEEKQASQAIQDVTGIGNTSAQAIISVIGSDMSRFPTDRHISSWAGLCPGDNESAKKRKSGKTRKGNALLRTTLITCAHAAVKNKKSYFYAQYMRISAHRGPKRAYVAVAHSMLISIYHILKDGVMFKDLGADYYNQFNKERKINAYLKKLKTLGWEAPIVAA

SEQ ID NO: 90985 - protein, 369 aa, unidentified
MKKKVLYVGLDVHKKTTDVAIATGRSNGKVRSYGKITSTIDALDKLIKKLEDGDKELRFVYEAGPCGYQIYRHLDAKGIHCRVVAPSMIPRRSGDRIKTDRRDSINLVRLFRAGELTSIYVPTVEDEAIRDLIRCRDDIKRFERKARQRLLSFLLRHGYQYSGKKNWTKGFYAWLSTVKFSHSAQQVTLQEYIEATNECSERIKRITQQIQVHAEEWSRAPLVKAYQALRGVSFIVATTVASEIGDMRRFQNPKQLMAYLGLIPSEHSSGKSVRRGPITKTGNSHIRRALIEAAWTYKMQARISNILLKRQQGLPKSVCDISWKAQTRLCARYRRLFARGKSRQTVVTAIARELSAFIWAIDKEMQLDG

SEQ ID NO: 90986 - protein, 479 aa, unidentified
MVTARPSQLNRKQRRELARRLRVEDPGLTVMHPHAAGIDVGNSAHYVAVRPDRDPDSVRRFECFTADLHRLADWLQRCGVTTVAMQSTGVYWIPLYEILDARGLEVYLVNARHTKNLPGRKSDVQESQWLLKLHTYGLLRNSFHPPVEIRTVRTYWRQRGDHVHAISTCIQRMQKALTQMNIQLANVISDLSGWTGQRIVRAILAGERDPATLAALSHPGIHATQDTIAKSLEGTWQPDLLFVLQQEVAMYDAYQQRIAECDQALELHLKGVADKVADPTADREPSPTTPRKGLRSGPKRRRKAGSHAPQFDLGRELHRISGVDLTRIDGIDVGVAQTLISEVGLDMTRWKTEAHFASWLGLCPDNRITGGKVIRKGTRHVINRAATALRLAATTLLRSQSYLGAQYRRLRARLGAPKAITAMAHKLARLVYRLLKWGHEYVDRGLQYYEERHRQQQVQLLKKRAAKLGLQIVEPPAAA

SEQ ID NO: 90987 - protein, 346 aa, unidentified
MTIVETRAITGGVDTHADVHVAAALDPIGGLLGVEEFPATAAGYAGLLGWLGGFGTIALAGIEGTGSYGAGLARHIAAAGVRVVEVDRSDRQDRRRQGKSDPLDAVSAARAAQSGRARGAPKGRDGAVEAIRALMADGRSAAGERTRTINQARALILTGPDDLRARFAGHTAAGLVTAIASLRPRPGDAAGHATRVALRELGRRAVFLDGQLERLDELIVPLVTARAPGLLALYGIGPNTAALLLIAAGDHPERLRSEAAWAHLCAAAPIPASSGKVTRHRLNPGGDRQANHALWRIVFTRMGSDPATRAYVERRTKEGKSKAEIIRCLKRYVARQVYPHLRPAAD

SEQ ID NO: 90988 - protein, 258 aa, unidentified
MEKRYIGIDLHRNRFTCCIRLENERTYVTEWELEDLGKFVKKLRPSDEVAVEITGNTRLFHDAIAEHVGRVVVVNTSQFRVIRQSVKKTDPNDAQTLALYLSKNMLPEVRMKDKEHGQLASLTQTRDTLVKLRTALKNKINNILSARGLNLPKEALSSEKRLAEVLELPFDEIVRIELRVIVEQIRSLNRSIAELEKTIGEEGSKLDGHKGLLSIKGIGKITGAILLSVIGDVNDFADEGHLASYFGIVPRVSNSNET

SEQ ID NO: 90989 - protein, 430 aa, unidentified
MKSNTQNAKIEAITEKTLVLGIDVGSETHYARAFDYRGIEYSKKPFKFSNTEAGFVTFKEWILDLKERHEKDKVVPGMEPTGHYWFNLGKFLHDNEMKPVLVNPHHVKKSKELDDNNPTKNDRKDPKVIAGLVREGRYMIPYLPDGVYADLRTASNIRFQLQAELTRIQNRISRWFNIYFPEYKTVYGKPDAKSGILILKTAPLPEDILTLGIDGVNQIWRDAKLRAVGKARAKTLIEAAEHSVGSKEGAVSARMEIRMLLEDYESRNTRLQEVMVLIEELIRKIPMAEKLLEIKGVGIRTVSGFLAEVGDISRFNNPKELQKLAGLALVENSSGKHKGETTISRRGRKRLRYLLFEVAMSLVSKNQEFRELHNYYTTRRLNPLKKMQSLMAIAAKLIRVFYAMLTKGVDYDPKKMVSDIKRPAVYLQAA

SEQ ID NO: 90990 - protein, 344 aa, unidentified
MYYIGLDVHKKTISYCVKDVGGQVHQEGKIGATRHELDGWIKTLPQPWSVAMEATIFTGWIYDHLLGRAAQIKVAHPLMLRAIAAAKKKNDRIDAGKIADCLRCDFLPECHMASTEIRDRRRTLRYRHLLVRQMTQMKNRVSGLLMETGVTYNKQRLHKVGYFRELLSTNDEVMDSIRPLLKLSRESIVRLQKTEYALVSSLQRDPLLVERIQRLRTVPGVGPITALTWALEIGDVSRFRSVKQAISYCGLCGDEKSSADKVVRTPLSKQRNKHIQRVLVEAAKLAPKEDHKLALVYETEKQRGNANRATLAVARKMVAYLLAVDRAGRDFVPTEEYRAKANGC

SEQ ID NO: 90991 - protein, 366 aa, unidentified
MDPIYIGVDFHARQQTICYLKTETGELVITELKHQDKEQVRAFYQQFQGPVIIGLEASGYSPWFEALLEQLGCEVWLGHATEIRRRARWRQKNDRRDAELIWDLMVHNEFPRLHRPTAQSREVLRMLRYRQKLIKLRTMAKNSLQAIALQAGLAKGKRLFTQVGQQEFQLAEMSPVLHWQRDHWFALVKPLNEQLLETMVWCKAQSKDDLVIKRLRTHPGLGLLTSLCLLHTLQPVSRFRNTRKVVAYAGFDPVERSSAERQHFLGISKAGSRLLRYLLVEATHTAVRYDQDLKRFYKRLAERRGRPKAKVAAARKLLIRAYIMMRDEIDYAEFRRRAVAVRLARRGQGPPSVPEVLIGQSASPGA

SEQ ID NO: 90992 - protein, 323 aa, unidentified
MNKDKEIFGIDISKDFFDVYTSSGKSLQYENTPGGFRSFRKLLSAKAHCVMEATGYYHYRLAGYLSKEKIRVSVVNPLSVKRFIQMKLSRIKTDKSDAKMICLYGESQRELQIWRPSDDNQMESLQIVRLLDQYTKQTTALKNKIHGEEVLGKPSKIVLRSLKRSLRNLQKEQAMLEEALITLVEQDHRDMLARLGTIPGMGRKTAILMLVLTDGFTKFETASQLCSFCGITPVIKQSGSSVRGRPRISKMGNQKLRNLLFLCSFTASRHNKACADIYQRIVNKGKSKKLALIAVSNKLVKQAFAIATSGLCYDENYRSQFPV

SEQ ID NO: 90993 - protein, 402 aa, unidentified
MNAVGIDVSKGKSMVAIMRPFGEIVSAPFEIKHTASDIHSLVELINSVEGESRIVMEHTGRYYEVLAHQLSKANLFVSAINPKLIKDFDNDSLRKVKSDKADSVKIARYALDKWQNLKQYNVMDELRNQLKTMNRQFGFYMKHKTAMKNNLIGILDQTYPGVNTYFDSPARSDGSQKWVDFASTYWHVDCVRKMSLNAFIDHYQNWCKRKKYNFSQSKAEEIYGKAKELVPVLPKDAITKLIIKQAVDQLNSASTTVESLRTLMNETASKLPEYPVVMAMKGVGTSLGSQLMAEIGDVSRFTHKSAITAFAGVDPGVNESGSYEQKSVPTSKRGSSDLRKTLFQVMDVLIKTHPQDDPVYQFIDKKRAQGKPYYVYMTAGANKFLRIYYGRVKEYLSSLSES

SEQ ID NO: 90994 - protein, 348 aa, unidentified
MKHYAGLDVSVKETSVCIVDESGKLCRERKVPSHPEDLVAILSDPAFSLEKVGVEAGPLSQWLFEGLAKAGLPVFCIETRHTKAFLDALQQNKSDRNDARGIAHMMRVGLFKDVHVKTLTSQKRRALLTARSLLQEKAIDLENEMRGLLRNFGLKVGHASGGTFERRILELVEHDSELAEIMEPLLAGRRKLREGLTKLDKRVVAEAKQDKVCRRLMTVPGVGPIVSLAYVSTIDIPSRFRHSRSVGAILGLTPVLKQSGEMSRVGHVSLRGDAMMRRLLYEAAQSMMTRVAKWCWLKAWAMNIAKRHGSKKAKVALARRLAVVMHRMWVDGSEFRWTREDTVSTAAA

SEQ ID NO: 90995 - protein, 348 aa, unidentified
MKQIMTIGLDIAKSVFLVHGVDAAGHVVLRQKLSRSRVLEFFAKLPRCLVGIEACASSHYWARELIALGHEVKLMPAQYVKPYVKRGKNDAADAEAICEAVTRPTMRFVGVKTVEQQSIMMLHRVRLILMRQRTQLSNALRSHLAEFGIVSPIGREGLDRLLTIVADTDDGRVPAEARASLEMLAAQLEGVKAQILENDRRIIASARATEAGRRLLEVPGIGPVLASAFVASVADPAIFKSGRDLAAWIGLVPRQNSSGGKERLGGITKAGNGYLRQMLMVGAMAVIRYAQRNSARRPWLVQLMCRRPTKVAAIALANKTARTVWALMISGERYRDPQAMQAAVSATL

SEQ ID NO: 90996 - protein, 449 aa, unidentified
MMEQDMAMSKSKEAAKLEVVHPNAAGVDVGGSSHHVAIRSDAPGKTVNEFGCYTKDLHEMADWLLSSGVKIVALESTGVYWIPVYEVLERRGLEVLLVHARHVKGVSGRKSDVLDCQWLQRLLSYGLLRGAFRPQDQMCELRELNRLRTRLLREQGRSVQHMQKALTVMNVQLSNAISDVAGVTGQKIVRAIVAGERDPQELASYRDARIKASAEEIAASLQGNWRSEHLLALKVALATFDFCGQQIEQCEVEIERAMQALQRFMQEPQKAKKRSKAKNAPKFDVRERLFKMCGVDLTRINGIDVSTAMTIISEVGTDMSRFPSEKHFASWLGLCPGTNISGGKRLGAASKHSANRATVALKQAAAALRTSQSALGAYFRTLCGRMDKAKAVTAAAHKLARLIYAMLTKGQEYVDAGQLYYEERYRERAVRQLQRRANKLGMLVVPAGS

SEQ ID NO: 90997 - protein, 355 aa, unidentified
MRHKYIGFDIDGKKTVACVVEQGRKDMYQTMKTDVKEMREYLKQQKEEGCQVHLTFEISGEAGYRYDALRDCVDTLTVSNPHKMTWIYRTRKKNDRIDARKQAVLLSIGEVPGVHMPGIEVRQWRVTIQQRRTVVNRIVSVKSRIRALLKGNGLTQAEHKGSWWKLANLAWMRREAKDWTETAIAQLWRVHLSGLLDELDQLSGRLKSLTRYLDRYLDSKAGGALLMSIPGVGPRTAEAVLAYTDDVHRFRRSKQYAAYFGLTPRLDESGQVRHLGHISKEGPSVVRWLIVESTWRAIQLCPFFKRFYERVECGQKQRKKTAVVATARKLLTIMRAMLLTGELFNEQTVCRAIEA

SEQ ID NO: 90998 - protein, 410 aa, unidentified
MNEKKETVQRVIGFDSHPDTFTAAILAGTTPATAIEEKVFNKIPLSRLKSWAQKSTTKADLFVLEASGNSFQVVRTLAAIERKALVLESCQMGKLKEAHANNDRISAVRIAKAYLAGTAKTVWVPDQKTQERRDWFHAYQKASRRTTQVNNSLKSYLSDNGVRLKTGTRLTQTASAQDLLQKARPWSPRQWQVIEGMLMALSHAEQQRRHWRSLIAQEVLDDPALLALTRLCGVREMVAFALGAILGDIRRFASPKKLVKYIGFNPAFDESGEGKWSGGIGGHGRKDLRGLLIQSAQSILRCSNNALAKWGKKLFARKGSRNLAVAAVARKLTVAIWYLMQGRWTPLEEIDEALHHKINTMITHVGTPALKILGKGRADFRQEIQQSLKNTRIYVLNPNLNFVPRPKVQK

SEQ ID NO: 90999 - protein, 359 aa, unidentified
MFSERTSAGLDVHARSVVATAIDTTTGEFFKERLVPTNDVVIDWLRRLPGPVAVAYEAGPTGFGLSRAINAAGIRCVVAAPSKMVRPSGDRVKTDARDALLLARLLRNEDLTPVRVPSVGQEAARDLVRAREDVRGDLMRARHRVTKLLLRHGDLYCGGAAWTGKHLAWLREQRFDYAGTRAAFDADLEAVEFATARRDRLDAAIATMAADSEFTDLTRRLACLRGISTLTAFALAVEIGDWHRFTGASIGAYLGLVPSEHSTGGSRRLGAITKTGNSHVRRLLIESAWHHKPFYKVGPTLQARWDLAPEHVRVRAHAGNRRLHERWLNYSARHKKHTVATTAIARELAGWCWSLAVLE

SEQ ID NO: 91000 - protein, 343 aa, unidentified
MTIMIGIDPHKATHTAVAVDDNEAVLDELKLRASNAQAQRLRDWAGGFENREWAIESANGLGYLLAQQLVAAGETVFDVPPVLASRVRLLGSGRSQKNDPNDARSVAMAALRSERLSLVRPDGHTRILRLLAKRHRDMARCRNKHCTRLHALLLELKAGGISSEITVTKANVLLEGVVVAAEVTRHRVLIARELIDDIARLDTALKASTKRVAAAVSASGTSLCDITGIGPICAAIIIGYTGDVTRFPTKGHFATYNATAPIEASSGGRKRHRLNPRGNRKLNHAIHIAAVTQLRYDTTGRVFYDRKIAEGKSSKDAIRALKRRISDVVYRHLIADVRRASIS

SEQ ID NO: 91001 - protein, 412 aa, unidentified
MEVVYPCCCGLDVHKKSITACVLWAEAKGKSRKEKKRFGTFTHDLLQLADWLEQCGVTHVAMESTGVYWKPVWNILAEQFEVLLVNAQHIKAVPGRKTDQKDSEWIADLLQHGLLRGSFVPPRPTRELRDLTRYRVSLVQEINRIANRIQKVLEDANIKLASVATDALGASGRAILEAMLAGEQDAARLAEMSKGLLRNKIPELKLALEGRMTEHHRFLLRQLYDHLRFTESKRSEIEQEIDRRMLPFEDKVTRLCTIPGVDRVTAWGMLAEMGMNMNQFPSSGHLASWACLCPGSFESAGKRLSGKMRKGNVSLRRCLSQAAWAISMMKNNYLSALYRRIAARRGAKRAVMAVAHALLEIAYHMLKRKEDYRELGADHFDRIDVNRIRRSLVRRLERLGHKVTLEPVALTA

SEQ ID NO: 91002 - protein, 315 aa, unidentified
MSQPAFVGIDVSKDFLDVHILPSGEHFQVNFDQEGIVQIIQKLQSLQQLQVIVMEATGGYEQQLASELCLAELDKISIVNPRFVRDFARASRQLAKTDRIDAKILALYGQTFKIQPQPLPDPAQRRLKNLVSRRQQVVKTRTAENNRLKQTVDTWIKASLNRIIAPLDQEIKTIDQQIQQTIKQNPTWYAKAKSLTKIKGVGDTTAFSLLACLPELGTLNRRKIAALAGLAPFNRDSGKFRGKRMICGGRAEVRKTLYMPALVASQYNPLMRNFYLKLTNAGKPKKLALTACMRKLLIILNANLKNYQNNFCLNS

SEQ ID NO: 91003 - protein, 343 aa, unidentified
MGTYVGLDVSLKTTSVCILGDDGSPVFEGKVATEPAALARLIRKRAPDLVRVGLESGPTSAWLTHALEAEELPVVCLDARHAQAVLSVRPNKSDPSDARGLAEMVRVGWFRSVQVKSMTSHERKALLIARQQLVETRVRIDNQVRGILKTFGLVIGACGRGQIGQRASELAKGRPEVDGIVTAMLVVRDSLVQQIAVFDRVIRRLVKGDDTARRLMSVPSIGPVVALAFMSTIDDPQRFSHARDVGAYIGLTPKRYQSGELDLAGRISKCGDGFMRTCLYEAAGVLLTKVKRWSPLKAWGVRLMKRVGAKKAKVAVARKLAVILFRIWKDGTKFQWTQEAEMA

SEQ ID NO: 91004 - protein, 367 aa, unidentified
MEKHNTARKSSCGGKRTTGKLTIGLDLGDRSSRYCLLDEQGEVIEEGSLPTTRKGLDRVFGAAGRCRLAMEVGTHSPWVSRYLARLGYEVIVANARRVRLISESSRKDDKLDAKTLARLARIDPELLSPIRHRGVQAQADLMMIRARAVLVQTRTALINAARGLTKSYGERLPSCATYQMGTDQAELLSPAIRAALEPLLAEVETVTERIREYDKQLEQLCQTRYPETKLLKQVHGVGTLIALAFVLTIEDPHRFRKSRAVGCYVGLRPKRRQSGQSRPQLGISKEGDVYLRTLLVQGAHHVLGPFGKDSDLRRWGLKLAAQGGKNAKKRAVVAVARKLAVLLHKLWVSGETYEPLRLANRAQTVAA

SEQ ID NO: 91005 - protein, 428 aa, unidentified
MKNRNTQKLEAITPGTLIVGVDIAKETQWAQFVNYRGLELRKFLKFKNHKNGFDSILASIEAICKNRRLDNIIVGMEPTGHYWKPLANYLLKNKVNVVMVNPYHTKRAKELDDNSQTKSDKKDALTIARLVRDGRYYEVYMPQDIFAELRVLSNSRISLMKRSNALKNTITAVMDEYFPEIVTVFKHPLKGKAAMQILKSCPFPSLILELGIDGVLVEIKKAVKKTVGRKKASQLVKTAKSSIGVGYGLVSVKLKLGLMIEELELLTKQLKQLEKAMEKALTDTGHDELILSIPGIGVVTAASFLGEIGDPMRFDHPRQICKMAGYNLIENSSGKNKSRTVISKRGRKNLRSILYQMAITMVAVNHEMKELYRYLKTRPQNSLKKKQALVVISKKIITVIYNLIKKQTEYRAELVLGEFRKNQIKQAA

SEQ ID NO: 91006 - protein, 354 aa, unidentified
MSNITRVGVDLAKNLIQVHAVDAAGKVVTNRALKREKFLAWCAELPAGCLVAMQACSGAHHWCRQLRQRGLDARMIPAQFVAPYRIQGKSGKSDANDAAAVCEAASRPHMNFVPPKTLAQQGMCVHRLRESLKEERTACINRIRGLLAEFGVVLPQKPVILRQQLNDVLEDASNDIAGMARLVLQRAQEHWQELEAHIQWCDQRIAAHQKDDEQVQRAAELKGVGPITASAVVATVGDFKQFRNAAQFGAWLGLTPKQNSSGGKTNLGSITKRGSNYLRNLLIQGAKSVVLVGKQNDPISQWAQRLRERSGWQKATVALANKNARILWAVMTENKRYDAHHVNVPPAEAMSMPA

SEQ ID NO: 91007 - protein, 372 aa, unidentified
MEKYCGLDVHKGSVFMCILNENNEKYEEVFGTLTPELERLRDALVDHGVGQVAMESTSIYWYPVWRVLETDFDVKLVNPLFIKQLPGRKSDVKDAEWIATVLMKGLVRGSFVPPGIIQQLRMYNRKIINLSKDLRRSEQGMDLVLQRCNMRLSNYLSDIGSKSMRKVAQSIAQGDFRPEHLLGLVHKRIITKHSAATIHAALCGHFTPGDLDMLKLTMQEIDFLENQISFCKARLLENCRDYFGLQMELMVTIPGVQEHTAASIISEIGTNMNFFPSASALVGWAGLRPRNDQSAGKIKGRKTLHGNKYLRLMLVQSAWGASRTKGSPFMARYQRLRKRMHHNKALIANARKLLVVAWHILAKKEPYFAKAT

SEQ ID NO: 91008 - protein, 370 aa, unidentified
MGKYSEVFVGIDTAKSKHAVAIADSGRDGETRYLGEIDSAPATIERVIKKLAGKYEKVRVCYEAGPTGYGLYRQIVTLGHECAVVAPSLIPKKAGDRIKTNRRDAVTLARLFRAGELTAVWVPDAVHEAVRDLVRARETAAADVRKKRQQLLSFLLRHGRIYSGSKHWAKAHARWLATQAFEHPAQQIVFQDAIDAIEDCASRLQRLEEQLHAIIPNWSMAPVVDAYQAMRGVSFMVAVTFVAEIGDVRRFENPSQLMAFLGLVPSERSTGDSVRRAGLTLAGNRRARRALVEGAWTYRYQARVSARLQKRLEGIPKPVRDIAWKAQVRLCGRFRRLTAIGKKRPVIVAAIAREMAAFLWAIGQHIAPAC

SEQ ID NO: 91009 - protein, 399 aa, unidentified
MAASRRVVIGADTHLDTNHLAVITDAGKPLADAEFPTSPAGYDDAARWAQSFGTIVIVGVEGTSSYGAGLTRVMQAAGIEVAEVSRPDRAARRRQGKSDPLDAYAAARAALAGDGLAVPKGEHTTALRALLSARRSAVKAHTAATNQIHALLVTAPAELRERFRRHSTTALVTALARCRPATHRDPTTAAVLTAAKALAQRVEFLERQKQHLTTQLDALVRQANPALRATYGVGPDTAAQLLVTAGANPHRLRTEASFAALCGAAPVPASSGKITRHRLSRGGDRAANNALYRIALVRMSAHPQTRDYVQRHDTNGRTKKEILRLLKRAIAREVFRLLTRPGPIDDYSDLRPARQAKNLTLATVAHHFGVPIITVSRLERGHQRNDTLAANYRQWLTAA

SEQ ID NO: 91010 - protein, 348 aa, unidentified
MVHFVGLDVSVKATSVCVVDDAGKVIVEQKVPTEPADIIALLTSLGVSFGRIGIEAGPLSQWLVNALTAADLPVICVETRHMKALLTAQQINKTDRNDARGIAQMMRVGLFKPVHVKTLVAQEQRMLLTSRKLLQRKLLDLESDLRGTLRNFGLKVGVASRSRYEVRVRELVEGFPRLAAIAEPLLAVRRVMRQQLAVLHKMLLDTVRGDLVCRRLMTAPGVGAVVALTYRATVDQPQRFLHSRAVGAHVGLTPKRYQSGEIDYDGGVSKCGDALLRTMLYEAAHSLLTQSRKWSWLKAWGVRVAQRRGMRRAIVAVARRLAVVLHRMWVDGSEFRWSKDSTAVPAAA

SEQ ID NO: 91011 - protein, 371 aa, unidentified
MSELPAETRPARLRVEASPRPPGARKPETELGAVSTTAVPHPDSRSGPSPHLQGRVMDEQRTVFVGIDVSKDRLDVHLRPSGEAFCVPREGKGMDDLVIRLQGLSVALVVLEATGGFEATVAAALAGVGLPLCVVNPRQIRDFARAMGRLAKTDTLDAEVIALFAERVRPQARPLREPERVHLAELVGRRRQIIEMIGMETNRGRQAIDKPLARRLARHVAYLQKELDAIDHDIGDAIKHSPAWREAEALLKSVPCIGDVTARTLLAELPELGTVSRHQVAALVGVAPINRDSGLMRGRRAIAGGRTSVRAVLYMAALTAIRRRSPFRAFYDQLTARGRPKKVALVAVMRKLLTILNAILRDHTPWRPLNA

SEQ ID NO: 91012 - protein, 399 aa, unidentified
MKNEIVVGIDPHSDSLGGVIMHEHNILSEFSIPNCSKVHTDRLISEAENFAKQFSAQTVFAIETTNVFWRPVFSYLKRLGKTVFTVNSLQTKNARGTKMRKTKTDIIDAKNIVAVYQQDNAHKTNFPEGVLFDLREITRLYSWLVNIQARFLDRIHCYLFQVFPEIFSVFKKKSVNSNTVLTLLEQELLHPENLKNTRIDKLTNVLVSASSGHFNRETTQKLKELAKTSFGIPEGKQGFTTCLKTLSKLYQHFDNLLKTLEVETIEPLLSTVSHPFSSLKGLGTMQTASFVSELGNPKNFQNADDVVAFFGYDPSISQSGKRSGQGKHISKCGTKYGRETMYLAAGSCMLNNPVLKKKYKKLKTKRFWKDAKSILAADLIKICYVMYRDNVPFDPNKIH

SEQ ID NO: 91013 - protein, 422 aa, unidentified
MSDPEVQESRVVVGIDTHADTHHVAVVTEYGKPLADQAFPTTAAGYQEALRFITGFGEVLQVGMEGTGTYGGALTKVLQGEGILVIEVNRPDRQQRRLKGKTDPLDAYRAAQSVIAGRSTAVPKAKDGPVECLRVLRASRVSALKCRSAAINQIKGLLISAPEGLRSRYQGMSTETMIGIMARSRPSGHLADPSYVTARVLKSLAVRYQHLSAEIDEVTTQLQDILESYAPMLQELPGVGTDVASQLLVTLGDNRDRVSNEAQFAALTGVAPVPASSGKTNRHRLSRGGDRQANCALHHIVLVRMNIDQRTKDYVVKRTEECKSKREIMRCLKRYVAREVYRQITNPTPAPAVDDLRPLRHELGVTLQEAAGSLDAWPSTLSRLERGRTRNDHLLLRYRAWLRDQKTGPEALTGSTTGAHRV

SEQ ID NO: 91014 - protein, 473 aa, unidentified
MEKETNKGYGFRTKYQYGAGVDVHKNYVIACVAVKRSNSIERQAIQQFPRNPVGLREMSRFLKKYLLSTIVMESTGVYTPFVKEGLEKTTWHGITPKILVINPSMIRKFPGELHADPQDAFDLAKLGILGLAEPSFLPKETLKEIRWLSRRIFFYTKDCTRVKNRIKQNLDLWGLSLPQFDLNSTWALDLCRILIFQARGNMKKTLKMIEHEECSLRSSSITAISRRKEKYERFFDVQLPRSAIRIIELQLANLSAQNAIINAISKEIEMIINDHPNLRDKVDRLTQIPGIEERSATTLLSEIGNIRRFPTVKKFLQYVGCAPTIYQSGTIRKASHLNKRVNHFCKLVFMHAGRAVCSNVKKDSDLKEFGRKQLNRHWNNKKLAHANTGIKVARIVYHLLLKGEEYQPFYETRDTLNVTNTKAKTNKAFQLSKIRRKTRRYFEYLRSALEHQHAERVQLVYDEIKTMWNNEIE

SEQ ID NO: 91015 - protein, 366 aa, unidentified
MHHSTKRKSVKTNRTLRNSIGVDTGDKKSRICVLSPDGEILEETEIPTSVPGYTRYFKRQDHALVSFEVGTHSAWIEIVVRDCGHDVIVANPREIEGIYKSNHKTDKRDALLLATYAAKSPELLHGITQRSPEIRRDLTLINARDSLVQVRTALVNAVRGFVKPTGHRIPSKISTHSFHRKATEHIPADLGPVLEPLLVSIGELTRQIDHYDREIELCSKKYPVTARLRQVAGVGPITSLMLVLVIMDPKRFKKSRQVGAYLGLVPKTYQSGESSPQLGITKSGNVLLRRLLVGSAHYILGRFGEDSDLRRYGLALAQRGGKAGKKRAVVAVARKLAVLLHRLWVTGEDYEPLRNATRRESKRAVA

SEQ ID NO: 91016 - protein, 332 aa, unidentified
MKYSETLGIDVSKRTLDAYLHQGNKHSQFSNDTKGFKSMLAWLRTYCEPSQCLICFEFTGDYSVPLSRFLTEEKLAFTMIPGLEIKLSTGLKRGKDDVTDAKRIAEYCWLRRDSLQPSKILSNQLFKLQKLLNVRDYCVQQEVSLGQQKQEFLAVFKKSENPEMIKMIDGLLRKCLKTKKEVEKLINELIKGDDELNRLYALMTSVVGIGPVIAWNMLVLTNGFNRFTSSRQFACFAGVAPFPHRSGTSLNSKDRVSHMANKHMKSLLNLGARSAILADPELKAYYHRKIEEGKNKMNVLNAVRNKLIHRVFSVVRRGTPYVRLNAISINVK

SEQ ID NO: 91017 - protein, 356 aa, unidentified
MEHVNKLDFSGQSIYVGLDVHKKSWTVSIFSEQCEHKTFTQPPKTDKLVHYLKRNFPGAAYQAVYEAGFSGFWTHDQLREQGVPCIVANPADVPTTNKERTGKRDPSDSRKLARSLRNRELKAIYVPARSKLEDRSLVRTRQNMVRKQTRCKNQIKALLYFYGINLPEDVVDSHWSQKFLRCLENLRMERSSGDMALKAHLDELHHLKEIIASLNRSIILLSRQAEYREMVRLLKTVPGISTLTAMIFLTELGELGRFASLDRLASYVGLIPDVESTGETEHIKNLTHRRNPQLRALLIEAAWVAARKDPVLLLAFNEYCQRMKKTRAIIKIARKLLNRIRYVLKNQVEYVPGVVQ

SEQ ID NO: 91018 - protein, 352 aa, unidentified
MLIIGCDYHPSMQQIALVDTETGERGERRLMHRDGEAERFYRELKQRRVEVRVGMEATGYARWFERLLAELSFELWIGDPARIRARRVRKQKTDRQDAQLLLRLLLEEDGFPRIWVPSPENRDLRQLLWHRHRLVQMRTRIMNQLQAVAMNEGLRRKRALWSEAGRKQLESFLLAPWATRRRKDLLELMDRLNPTIRELTGAVEKEAENKPEVQLLMSHPGVGPLTALAFVLIIGTPQRFHCGKQMGSYLGLIPCEDSSADRQRLGHISKQGSSLLRFLLVEAAQVAARVDAEWRRRFLHLAMRRGRKIAKVAMARRVAVGLYWMWRKEWDYQQVVKFGSHVGQLELRHGVQ

SEQ ID NO: 91019 - protein, 400 aa, unidentified
MRAVFGIDVSKASSEVAILVNGEKVHGYTMSNDALGFARLLGDLKTVHKPEIIFEATGVYSRRLQAFLDEHGYAYTRLNPLEAKKQLDSLRVRKTDQIDAEKLAQSQFVLNRKPTYVQEEVYQNLRTLSRFYQNLTEDIVRAKNRLHKVLQVTFPEIETVLSKPTGEQYWNLVTAFPCKDFVLDLSKDELLESIRQSTSKRISDKRVAYLAEKLIALANQSYCAVKKTSPIMEEVRYYAKELLRLSEQRQTVLDQMVELAQPLPEYDILLSIPGIAETTATSIIGELGDIRRFQSANQINAFIGIDLRHYESGNFLAKEHITKRGNPYARKILFKCIHNIASASHTNPCHIADFYEKRKRQSQTTSTKPHTIASIHRLIRTMYYLITHNKLYDYRSTQNQ

SEQ ID NO: 91020 - protein, 375 aa, unidentified
MSDKSERTGLPVVQPFAAGIDIGSRFHVVAVPPEIADESVQTFESFTSDLHRLADWLIQLNIKTVAMESTGVYWVPVFEILEDRGLDVILVNAREARNVPGRKTDVNDAQWLQRLHACGLLRASFRPGRDIAALRAYLRIRERHLDYAAAHIQHMQKALTLMNMQLQNVISDITGATGMKIIRAIVAGERDPVKLAQMRDVRCRASQETIEASLRGNNQPEHIFALTQALSLYDFYQARVQECDIEIERSLAKLNQDKPEPTSPIPKVRCKTRQPNAINFDVRASLYQLVGTDLTQIHGIGPYLALRLISECGVDLSRWPTAKHFTSWLRLSPGSKKSGGKLLSAYSGKTTNRVTDELQWLLGELIRLWALSIAA

SEQ ID NO: 91021 - protein, 425 aa, unidentified
MKVVYQTCCGVDVHKSFLVATIITTTGGIEPSYQKKRYSTFNNSILEFKQWLLDNHCHDVCMESTGKYWVPVFNLLEDKINVVIANHPKWVKAVKGNKDDTKDSKWIGDLFRLGLVKGSYIPCKKVRILREYTRYRYKLVSCRSSEKNRYQNALTVCNVALDSVVSDIFGKSSTSIIDYLLDQSGTSINHEEIASKLLRNLKSKEDAVIESVEGYQMTDTQKYRMRLVRAHMDYITAEINDVDKMIENMISSNPDFENAVRFLCTIPGVKRDSAITIISEIGTDMSQFSGSKRLCCWAGLTPDSNESAGKKKSVWITRAGVYLKPALVQCAHAAVKSDKSPYYKKKYEALVKRRGKKRAIIAIARMILTAIYQMLSTGEEWNPSNLYKIDMPVALVEKQKAKAIRQAKKLLQRKGTLPPDKPLAS

SEQ ID NO: 91022 - protein, 339 aa, unidentified
MSLYSAIDLHSNNSHVAIIDDQQNKVFYRKLANDPKVIANAFAPYRERLKGIVIESTFNWYWLADLLIEEGYPVHLANPCGIQKYSGLKHADDKHDAFWLAQMLALKILPEGYIYPKEDRPLRDLLRKRSQLVRVRTSLVLSLQNMVMRNHGIKIRSNDLKKLTQDPVAELFKDQQELALAGKASKETIDFLTRQIQRIETAARNKAILKESFSKLLTLPGVGDILGMTILLETGPIERFKAVGHYVSYCRKVPSRWTSNEKSKGKGNTKNGNRYLSWAFSEASDHARQTHGPSRDFYNRKLNQTNASVAHNALAHKLARAAYFIMRDYVEFKEDKMFP

SEQ ID NO: 91023 - protein, 393 aa, unidentified
MFYLGIDIAKNTHVASLLDEKGKTIFKGFSFSNTTEGGKSLLEIVKKYSDFTDVTVGMEATGHYWLSIYSFLYDYDFHCIHVINPIQTDGWRKGTEIRKRKNDIIDSVLIADLIRYGDFVETTLSNEDLYSLRNICRMRNYLIQSASDLKRKVICVLDQVFPEYQTIFSNTFGTTSKQLLLDYSSPSDFEELSVEALTETLEALSRKKVGQSTAEKLINSAQNSFGVTFSKENFKFQLKLLIEQIQFIDNQVKECETKIKELMKKINSPITSISGIGPVLGAVIISELGDIKRFDKPSKLVAFAGIDATVSQSGEFEGTHNVMSKRGSPYLRKALFQAALVASNTDPVLKAYYQKKRAESKHHKTCIGAVSRKMCNIIYFVLKNDKPYEVPNK

SEQ ID NO: 91024 - protein, 422 aa, unidentified
MMKLKYSICCGLDVHKNVIVATIVTTNKDGISEYLQKSFSTINSDIQRFHNWLIENNCYHVCMESTGKYWIPIFNYLENDIDVCLTHPKYVKAIKGKKTDKKDSKWIADLYKFDLVRCSFIPPKDFRQLRELSRYRFKLVCMKSSEKNRIQNCMTISNVGIASVLSDPFGKTATEIISYLLEHTADSMDEKAVRKLIKKGAKSKSDEIIEAIKGYTIETDQAKKLELARGHLEYLDDMITQTEVELYVRIKPYYEFVEFVSTMPGMTELSSTIVLAETGVDMDIFDDAKHLCSWCGLSPANNESAGKKKSVRIAKAGDYLKPMMVQCALAAIKSKKQPYFAIKYGRIKKRRGHKKAIIAIARMMVCIYHMVSEKKPFTPTDYEELMDPQNHVESVVLNENNVFAYLESLGYDSSKLVKRNDN

SEQ ID NO: 91025 - protein, 372 aa, unidentified
MNECIKYIGLDVHKETIAVSVAPSSTGEVRYWGEIANTPAALDKLVRQLNKDGATLSFCYEAGPCGYELYRYLTDLGWVCVVVAPSLIPKKAGDRVKTDRRDSLSLARLYRAGELTPVCVPDGQQEALRDLTRAREDLKHLQRQAKQRLLAFLLRHGKRYSGKNNWTQAYFRWLETVKFEHPAQQIVMQEYVDTVTSCGKRVASLEQQIEHTAQASQAWPMIEALMALRGVNLLTSVTVVAEIGDLKRFTTAPQLMAYVGLVPSEHSSGANTRRGSITKTGNSHARRVLVEAAWTYRHVARKTAPLQRRAERTPEVVQDIAWCAQKRLCQRYRTLHNKGKLKVQVCTAIARELTGFIWAIGHVLPATKPSAV

SEQ ID NO: 91026 - protein, 402 aa, unidentified
MNAVGIDVSKGKSMVAIMRPFGETVSPPFEIKHTASDIHSLVELINSVEGESRIVMEHTGRYYEVLAHQLSEANLFVSAINPKLIKDFDNDSLRKVKSDKADAVKIARYALDKWHNLKQYSVMDELRNQLKTMNRQFSFYMKHKTAMKNNLIGILDQTYPGVNAYFDSPARSDGSQKWVDFASTYWHVDCVRKMSLNAFIDHYQNWCKRKKYNFSQSKAEEIYGKAKELVPVLPKDAITKLIIKQAVDQLNSASTTVESLRTLMNETASKLPEYPVVMAMKGVGTSLGPQLMAEIGNVSRFTHKSAITAFAGVDPGVNESGTYEQKSVPTSKRGSADLRKTLFQVMDVLIKTHPQDDPVYQFLDKKRAQGKPYYVYMTAGANKFLRIYYGRVKEYLASLPES

SEQ ID NO: 91027 - protein, 469 aa, unidentified
MNEKEKRFLGIDVSKGYADFILLDKEKKIVEKNYQLDDNKAGHQLLKEQLLHQVKQGFKVICGLESTGGYELNWARAIKELSVKETNVEIYKLNARGVKHQLQSELRRTITDGVSAEGIAIYLINNYAVKKEDWQKSLQKATALSSRQMFCKLIVSQQKHQTAKYNQLEKLVYQNFPELLQFCKNGIPKWVVRLLEKYPGLAAIKNSKLIGVDAIKGIIEQKAALVKELAKNSVGVAVKDEMTEAMLQTLASEIIHISKQVEELKERLIKSGVNEEVQLLTSIKGVAEWTAIGILVHLTDVSLFKDADQLAAFFGVHPILKQSGDGKWGAKMSKQGNKTMRSVLYNAAANVVQHNPYFKNIYANQRAKGKTHRSAIGIIMHKLLRVIFGMLKNKTVFNAGVDLENQKKNSNSATNENAINITTRRYQELNTAAPISGRNYRKRKVVLEGCQALTNANTASPKNNLTLQT

SEQ ID NO: 91028 - protein, 343 aa, unidentified
MGEVTIIGIDLAKNVFQVHGAAADGSVVFRKKLTRPQFARFMAEQPPCLVVMEACASAHHWAREMSRHGHKVRLIAPHYVKPFIKRQKNDAADAEAIVEAALRPTMRFVEPKTQEQQARAVAFRTREQLVKQRTEAVNALRSHLYEFGHVAPVGIGYLPRLERVIADPDADIPDLAREICQMLLDQINQLTGRIDALKARIAALSNEAEMPRQLQTMPGVGPITALAVETFAPPMEQFKRGRDFAAWLALVPRQASTGGKQRLGKTSKMGQRDIRRLLVTGAMAVIRWALRRGAPYNSWLARLLERKPPMVAAFALANKMARGIWAMLTRGEGYRDPVIASAA

SEQ ID NO: 91029 - protein, 347 aa, unidentified
MTLYCGVDFHSRRQTVCYCNTDDGEVKIKDLHHYEDDVRSFYEQFKNEQVIVGYETSGYARWFETMLFELGIEVWVGDAAEISRLGKRRQKNDRRDAEHILDLMLKGEFPKLYRTDVKSQEIVRLLRHRQKLVKHSVMIKNSLRRILIETGLIFKAPLSSQKAKQKFRELKLPMLLANERDRWLELLIEIEKQIVGLEHKLKAEAQSDERVQRLLTHPGVGLLTSLCIVHTLGDVQRFATTRKVAAYAGLEPMEHSSGEKRRYGAISKAGNRLLRFLLGEAAHIATRTDNELKQFFQKLKNKCGTAKAIVAIARKLLIRCFIMLRDQIDYAEFRQRGIEARSARVYT

SEQ ID NO: 91030 - protein, 310 aa, unidentified
MDAIFAGIDVSKDWLDVHILPSGEAFRVGNNGSGFEALKARLAPLEPERIALEATGGLEMAVVAELHGAGLAVVVVNPAQVRSFAGALGKRAKTDPLDAAVIAAFAAAVRPEIRPMADAETRLLADLVARRRQILAMITAEQNRLRRASAKETVKSIKRLLSALTRELESLDADMDGRIRKSPLWLVRQDLLTSVPGVGAATARTLLAELPELGSLDRRQIAALVGLAPYTRQSGQWRGRSFIGGGRAAVRSALFMAGLVATRHNPVIKAFRDRLVAAGKPKMVALVAAMRKLLTILNAMIRDQKPWSAT

SEQ ID NO: 91031 - protein, 421 aa, unidentified
MRFIGLDVHKDFCVVAISNGGKARTAGRVKTRRDELELFAQSLMPDDKVVLEATGNAFAIARVLEPHVAEVVVANPRKVRAISHAKVKSDQFDARTLAELLAADLLDPVWIPDEQTRVLRRLSKRRLAIVVAMGRRKAHVFATLQRNLYVEPKGTDLFGTRGRAWIASLELPSDERQTIAGDLRQFDFLAAELKVVDREIAQISIAREDIKRLMTIPGVDMITAATMVATIGDVSRFATSRHLIGYLGLDARVRQSGMTAARTGRISKEGSAEARRVLVEAAWSAKRVPGPLRAFGQRIQARRGSQIATVAVARKIAVLCWHLLTRGEDYAHHRPTLHRRKLRKLELRAGASSQQGKHNANPIWETRSQDERERDLVAQAEASYRRSVADWKASGPKQGTGAAPGRAFDAARQDQAPDPAL

SEQ ID NO: 91032 - protein, 357 aa, unidentified
MELHVGMDVSLKENSIYVVDGGGEIVSEGTVISEPLAIAEFVKAKAAGAVRIGLETGPTTTWLWHELGALGLPVICIDARYAKAALSLQINKSDRNDAVGLALIMQCGWYKEVQVKSVACHEIRSVLNSRALLVRIKRDLGNQIRGLLKNLGLVIGKAQGHVFTRRVEELVAESPYLQQAVRPLLAVREKVSREIADLDRKLLSLTRGHQDSRRLMTVPGIGPITALAFCAAIDDPARFRRSRSVGAYFGLTPRRHASGEVDWSGRISKCGDTMVRSYLFEVAGVLLTRVPQWCALKTWGLRLAKRIGFKKAKVAVARKLVLRAAYAAPQGPRSTLSLHRMWRDGTDFIWSTKEAAA

SEQ ID NO: 91033 - protein, 387 aa, unidentified
MNQEKYIGMDVHDATISAAVMNAEGKVLMECVLETKAATILEFIQGLRGTLAVTFEEGILAAWLHDLLQPHVSRLVVCDPRKNALLRDGNQNDRADARNLAELLRTNHVHAVYHGNHGTRTLRELGRSYLALTKDSTRVMNRIKSVYRSWAIPCAGTSVYSRRHRAEWLAKLVEPGVRMRAEHLYQELDGLKPLRQAARRELLREASKHTAVKRLRQIPVIGPIRSALLVALLQTPHRFRTKRQLWAYSGFAVQTYDSGEFRFVRGKRQRNRERITVRGLNRNHNPDVKNLLKGGYLRHRTPRATAGFLCCPGGERDAAQHGPSHPNPEDCRHRFNHVEERSEFRPQTVAATSSLSIAEEAPSIRRVPSASGRSISRDARFEGSISQ

SEQ ID NO: 91034 - protein, 402 aa, unidentified
MNAVGIDVSKGKSMVAIMRPFGEIVSAPFEIKHTASGINSLVELINSVEGESRIVMEHTGRYYEVLAHQLSEANLFVSAINPKLIKDFDNDSLRKVKSDKADAVKIARYTLDKWQNLKQYNVMDELRNQLKTMNRQFGFYIKHKTAMKNNLIGILDQTYPGVNTYFDSPARSDGSQKWVDFASTYWHVDCVRKMSLNAFIDHYQNWCKRKKYNFSQSKAEEIYGKAKELVPVLPKDAITKLIIKQAVDQLNSASTTVESLRTLMNETASKLPEYPVVMAMKGVGTSLGPQLIAEIGDVSRFTHKSAITAFAGVDPGVNESGSYEQKSVPTSKRGSSDLRKTLFQVMDVLIKTHPQDDPVYQFLDKKRAQGKPYYVYMTAGANKFLRIYYGRVKEYLASLPES

SEQ ID NO: 91035 - protein, 369 aa, unidentified
MTDLTLFIGLDVHKKTISVAVVEGSAGAAVRFYGTVANTPDSLRTLCRKLSRSGQQLHFCYEAGPCGYGVQRQLTRLGYRCDVVAPALIPRKVGDKVKTDRRDAMMLAQTLRAGQLTAVWVPDEAHEAMRDLVRLRAQAVRDLRKTRQQLLSFLLRHGLISPYGHWTKMHRRWLGELVFAHPAQHLAHEEMLQRIERAEALCDRLRAAILELVPQWSLAPVVEAIQALRGVSLIVAATIVAEVGCFGRFESPRALMAYLGLNPSEHSSGATIRRGAITKTGNTLARTCLVEAAWTYRFPARVTQIIRNRLQGLPEPIRNVAWKAQVRLSARYRKLAAAGKPAPKVVVAIARELVGFIWAIARMVEPKFA

SEQ ID NO: 91036 - protein, 349 aa, unidentified
MRQVSQVGVSQVGVSQVGVSQVGVDVDSEKLVCMMQRVGQRMLLPTFANTAAGHKKFIRWATKRARSARVCLEAPGIYSLQFALALHDAKNVEVMVVNPRAIKDFARACMQRAKTDAVDAGGILEYLERMPFTAWQPPAPEILQLQAINRRIVQLQTELTREKNRGHASEFAGASGDAVANDIEVNIRHLERRIERMHDSGLQLVHGVPALATKLAHLISAKGIGEASAMRLLAELLVLPADLAAPQWVAHAGLDPRPYESGTSIHRPRRITKVGNRHLRAALYMPALVAIQHEPNVKAFYNKLVAAGKKPMQAVVAVMRKLLHAIWGMLKHDQDFDGNKFFRLAEKTA

SEQ ID NO: 91037 - protein, 332 aa, unidentified
MENFYFIGVDVSKKKLDFCVMFEGKVVHEEETANHQGAIIALLHQLEEEYGIAGGQMLVCAEHTGQYTFPLACACKAVECKLWLENPAEIKYSSGVQRGKNDKVDAKRIAIYAKRFQDRVQYYERPTEDIERLKQLEDERTLYVTDLAKYKGQLKDQKDYMPRKLYERKMKRLQALMDDLEEAIQAITDEMDEVIASCPVLSRQRELLMSIDGVGCVVATNMIITTEAFTRFDDPRKFNCYAGVAPFSYSSGSSQHSKARVSHRADKVMKRLLHLAAVAVTHRVGGELKKYYERKVAEGKNKMSVINALRAKIVARMFAVIKRNEKYKPILS

SEQ ID NO: 91038 - protein, 381 aa, unidentified
MTTAATHDEQSNATEATLFVAFELSEKTWKLGFTTGHGQKPRERTVTARQQERVLDEIAQAKRRLGLPDSAPVVSCYEAGREGFWLHRFLQAHEITNHVVDSSAIEVNRRQRRAKSDGLDVRKLLSMLMRYHSGEHQVWQVVKVPTVEAEDQRHLHRDLETLKQERASTTTRIQGLLSSQGLRVTSLTKLPEQLEALRLWDGSPLPPGLRRRVLRVYAHHTFLSEQIAAVEVERRTQLQASTDTSIDKVRQLMQLKGIGINGAWLLVMEFFGWRAFKNRREVGGLAGFTPTPYQSGERAREQGISKSGNRHVRWMTTELAWSWLRFQPDSALSVWFRARFGGGGKRLRRIGIVAVARKLLIALWRFLETGVIPAGAVLKEA

SEQ ID NO: 91039 - protein, 370 aa, unidentified
MGKHSEIFVGLDVAKAKNAVAIAEGGRNGEVRYLGEIENTPEATRRLIAKLSKTYGKMTFCYEAGPTGYGLFRWICDLGHECIVVAPSLIPMKAGDRVKTNRRDAENLAKLLRAGELTAVWVPDARHEAIRDLVRAREAAAQDQTRKRQQVTSFLLRHGRIYPRKKTWGATHARWLTEQAFEHVEQRIAFEELAMAARQASERVARLEAAIAELVPKWSMAPMVEALQAMRGIDLLAASILMAELGDLTRFDSPRQLMGFLGLVPSERSTGDSVRRGGITKTGNTRARRVLIESAWSYRLPPKLGTRKRFLAARAPQAVREIARKAQTRLSARTRALTAKGKRSTVVVAAVARELAGFVWAIGREVAPGR

SEQ ID NO: 91040 - protein, 360 aa, unidentified
MKIVGVDRHAKQQSIAMLDTETGELIEKVIHHEGKAVREFYSALEGLIVVGIEATGSMQWFLELLDELGVQYRVGHPAKIRAAEPRKQKHERRDARLILELLTANRFPDIWMPSIEQRDLRILLRDRHQWVKMRARLQHTLQSIALNHALRKGTSLWTAAGLEAMRKLPLPPYTSERRNQLLRLYAQLQKRIQELDRQVEEQAQQRPQARRLLTHPGVGPLTALATEVFLGNPSRFTTAKQVASYIGMIPREYRSGQRQRLGNLTKQGNSLLRYLWTEAALHAVPKDPELKRFYRRQLIQKGMGKARVAAARKLGIRLGIMLRDQIAYEEFCRRGKLRQNGEAQAGMPDFNRGPATTVTG

SEQ ID NO: 91041 - protein, 365 aa, unidentified
MTSMHWIGIDDHADKWTIAQYRNVEGKPAREFELVPNDAGYKKLIRFAKSLEGEVRIVYEAGPCGYELYRRLSKAGLQCQVAAPSLTPRKPGERVKTNRRDAAKLGRYLRSNDLTFIAVPDETRESLRDLIRARGGVQKDLVSIRNRITKLLLRYGQRYRDGEAWTVRFWTWLRAVKLTGEYSQLVLDEMIVTLEQRQAQRARYDGMIEAAAKRPEYESFVRAFTVLRGINTLSAMTILAELGDLRRFASAPQLMAAVGLVPSEYSTGDKTSRYAITKTGNAHMRHIVVEAAWHYQRRPSEGPRIKARRKNQPQALVDIAKKCDLRLNRKFHRMTSRGKRSTVAAVAVARELVGFIWAIGQIAHP

SEQ ID NO: 91042 - protein, 342 aa, unidentified
MRLFIGLDVSLDKTAICVISEHGEIIREAEAASEPEVLSRWLAELDGRVAVVGLEAGPLSQWLHRGLMEAGLDAVLMETRQVKGALKAMPIKTDRRDAEGIARLLHLGWFRPVHCKSVSAQETRAVLGARKAIQQNMIALEMSLRGLLRNFGLKVGAISRGRFEVRIRELADGNPMLETATAPMLRARETLRQELATLEKHVRQFAQDDPVCRRLMTMPGVGAVVALTFRAAVDDPTRFRSSKRIGPWVGLTPSRNQSGERDVSGGITKAGDVNLRRALCQAATVMMNRGRSTWLRTWGAQLAQRRGRKIAMVALARRIAVILHRIWIDGSVFQPDAAPKMI

SEQ ID NO: 91043 - protein, 410 aa, unidentified
MKMAGIDVHKKVLMVVVIETTSPEEKPERRRFTTLPGDLSRLSSWLRAQDVQETVMESTAQYWRSVWLELEPHMLLHLAHAFSNRAPRGRKHDFKDAERLVRRLFADELILSFVPNGEQRIWRNLTRMKMQLTRDRIRLQSQMECLLEEMRIKLSSVTDLLGASGLRILRALAAGETEAKRLAALGDNRLKCTEEQLLDALTGSSQPMHREMLALQLERLQLIDTQIAKLNNLIAQGMKPHQEAVMRLAEVPGLGVDSAQQIIAEVGAQAGTFSSAAELTSWVGTCPGKDESAEQNHSSRSAKGNKYLRRVLNQAAHAAVKKRGSYFQVVFRRLLPRLGYQSAIWAIAHRLCRVVWKILHEGARFIEKGSQPDAQTKKKRARMLLQALRRLGYDVAITATHLATQNAMQV

SEQ ID NO: 91044 - protein, 455 aa, unidentified
MMEDALATRNRSLSRKALELTHPNAAGIDIGSASHYVAVPPDRDDDPVREFASFTADLQRLADWLSACGVDTVAMESTGVYWIPLFELLDARGFTVLLVNARHVKNVSGRKSDVLDCQWLQQLMSYGLLRGAFRPDDQVCVLRALARQRATLLKTQARSVQHMQKALVQMNIQLANVIADVAGASGQAILRAIVAGERNPYVLAGLKNCRVRATEEEIARSLQGTWRAEHLFALRQALDAFDFCGKQLQQCDEEIEAQLQRLHITAVEPDKGKKRSKARNAPKFDLRTRLFQMCGVDLTRIDGIDVTTALVVVSEIGTDMGRFPTDKHFASWLGLCPGTKITGGKVMSGKTKRCANRAAQALRLAAAALRTSQSALGAYFRRLCARMDKPKAVTAAAHKLARLIYSMLTKGEEYTDQGQAYYEERYRQRVLHNLNRRAQQLGMTLVPTAPAAQAA

SEQ ID NO: 91045 - protein, 418 aa, unidentified
MERIVQRCVGLDVHKASVTACVRVATATSEGEEPHQETRKFSTTTGGLLELRDWLASFEVELVGMEATGVYWKPVYYMLEDDFECWLLNARHLKNVPGKKTDVKDAEWICQLVEHGLVRPSFVPPKEIRELRNLTRYRKRQIEERAEEVQRLEKVLQEAGIKLSSVATRVLGASGRAMIEALISGTTDPEVLAELAKGRLRSKIPALKEALEGSFSAHHAFMVGNILAHVDYLEESIARLSAEIERVIAPLCEEVALLSTIPGVDRRTAETLIAEIGVDMSRFASSGHLASWAGMCPGNEESAGKRRSGKTRKGSKWLRSALTEAAHAAARTKGSYLSAHYARIRGRRGSKKAAIAVGHSILVICYQLLKRKVPYEDLGEDYYVRNRRCSSEAHTKRLVRQLERLGHKVALEPLVQSA

SEQ ID NO: 91046 - protein, 443 aa, unidentified
MRTIGLDVHKRFAEVAILDQGERVVRRGERIDATASALRAFARTLGPEDQVVLEATVNTWAIADLLRERAGRVVVSNPMRTRAIADAKVKTDRIDAAVLAQLLAADFLPEVWTPDEATRGRRRQVAHRSSLLQQRTRLRNRVQAILHRNLLDCPFSDAFGKGGRRWLAEAALPTGERGQVESALRLLDALEAEVAIADTEVAEETLGDERVQRLMTIPGVGATTAFALVAVIGDVGRFPRPNQLVGYLGLDPRVRQSGDRPAHTGHISRQGQAHARGLLVEAAHSAIRTPGPLRAFHERTRARRGPQIAAVAVARKLAILAWHLLHSGTEYRWAPSGLTAAKLRRLDLTAGAPRRRGGWDARATDAERQIHSRQSAEERRALAQAEEAYRALVAGRRHQEDAAAANGERLCGAKPDARRRSHPHPPHFSTGSDRVPDQASASS

SEQ ID NO: 91047 - protein, 322 aa, unidentified
MRVIGMDVHRSMAVIAVVEGNRLSRGGRIDLTRDAVIKFGRKLRSDDEVVIEATVNTAMIVRLLRPSVRRVVIANPLQVRAIAHAKIKTDKIDAAVLAKLHASGFLPEVWMPDEATETLRRLVAQRAQVIQQMTRARNRIHSILHANLIPPYQGAMFSVAGRAWLDTQPLALDEKLTIQRHLADLDGRASDLGVIDRELAQRALNDKRVERLMTVSGIDLTVALGLLAAIGDISRFASSEKLVSYLGLNPSVRQSGNGPAHHGRISKQGRAHARALLVEAAWAAGRAPGPMRAFFARIQSRRGKQWQPLPRPAKSPSSLGIC

SEQ ID NO: 91048 - protein, 341 aa, unidentified
MKQNVCTVGIDLAKKIFHLVGTDTTGKIVWRKRLTRHALISFMAQLPPVTIGMEACGGAHYWARQLRHQGHEVKLMAPQFVKPYVKSNKNDMRDAEAIAEAVTRPTMRFVPIKDVAQQDIQALHRVRERLIGARTALINEVHGLMQEYGIVLPKGVAKFRQAVVEKLETEKDKLTPLSQEIFWKLVKEFVALEDQIAFYQEKLETLATTHPESQRLMTIPGIGPLTATALVAAVGDVGVFKNGRQFAAWLGLVPKQHSTGGQSLLLGISKRGDSYVRKLLIHGARATLRWVKLQTDSRSQWIRGLLARRGWNRTAVAVANKNARIVWALLSRGGVYGASAS

SEQ ID NO: 91049 - protein, 359 aa, unidentified
MDVMITRCAGLDVHKATVVATVRVPTDGGGRRIVTETFGAMTPDLMALRDWLQAFGVTHVALESTGVYWKPVYYILEDAFVLLLINMQELKRVPGRKTDVKDSEWLAQLLECGLLRSSFVPPPPIRELRDITRYRVQQTRDRSREVNRLHKVLEDAGVKVTSVLTNVMGVSGRAMVEALVGGTTDPIVLADLARGRLRQKLPALQRALVGHFRPVHAFLLQQILAKIDYLDEALDRLTTEIDRRVAPFGPMLIALDTIPGIDRIGAISLVAETGGDMHRFPTAAHLCSWAGMCPGHDESAGKRRSGKTRKANRYLRSTLIQAGVAASHKRRLRVADPLCACQESSWTQESGGRRGTSDS

SEQ ID NO: 91050 - protein, 394 aa, unidentified
MRTVALDLGVRKICFCEIDDGAVVRRVTARSLKDLDPLLGEGTAPARVAFEACREAWHVHDALKARGHQPILIDTTRVLRIGVGQHRAKTDRRDAEALARALERGDIPVAHVLSPARRHLRDELCTRGAMVETRARYVTTLRGIARAHGVMLPSCSPEAFVKRVRGAALPPELLRLIEPVLGVMEALQARLVEVESRLETLARSAPEVALLATVPGVGLIVAATFVAALDDAGRFRDAHAVEAYLGLVPCEDSSGGRRRLGAITKQGNPWARAALVQSAHVMLRTAPDDDPLKVWALAVQERRGKNVAVTALARRLAGVLWAMWRRRRSYDPRRLAARSAAGLEQASEETARQADEQTAIARAEHKIFRRTRARRAGKPPRSRGAASTEEVTGR

SEQ ID NO: 91051 - protein, 465 aa, unidentified
MTINKKLWQSRKERKELARHLRSEDPGLEVVHPHAAGIDVGNGAHYVAVRPDRDPKPVRRFECFTADLYRLADWLQGCGVQTVALQSTGVYWIPLYDILEERGFEVYLVNARHTKNLPGRKSDVQESQWLLKLHTYGLLNNSFRPTSEIRVLRTYWRQRAEHVRGMGTCIQRMQKALTQMNLQLANVISDVSGVTGQKIVRAILAGDRDPRKLAELSDPRIHARKEEIAKSLEGNWRQELLFVLQQEVDMYDIYQRRIAECDQQLQKHLAHFADTVPPPAKAEEAQKKKGKQNKNNPPFPLADELQRITGVDLTRIDGIDVMVAQTLVSEVGLDMSRWNTEAHFASWLGLCPDNRISGDKVLSRGTRHVVNRAATALRIAATTLLRSQTYLGAQYRRLRSKLGAPKAITAMAHRLARLVYRMLKYGQQYIDKGAEYYEQRNRQQQIDFLRKKAAQLGLQVTAAHP

SEQ ID NO: 91052 - protein, 368 aa, unidentified
MTKSITFVGLDVHKNSIAVALADAGRNAEVHNDGIIGGDLDDLHRLVKKLATPGRELHFVYEAGPCGYEIFRSLTAKGFDCAVCSPAHIPKSPADRIKTDRRDAMLLARLHRAGELTYVFVPRAEDEAMRDLTRCREDAKKAQRVAQQQLNGMLLRLGFKYQKTRWTKAHFGWLADQKMPTPPQQVVFQEYIHAINETTDRVGRLTQQIATLVPDWRMAPVVTALQALRGVSMIVATTVIAELGDLTRFESPKQLMAFLGLTPSEHSSGETKKRGKITKTGNGHARRVLVEGAQAYSFRARMTRLIGKRQEGVSQEVRDIAWKCQVRLCARFRRLSERGKSRNTVVTAIARELAAFMWAIANKTPITR

SEQ ID NO: 91053 - protein, 338 aa, unidentified
MNIVFLGIDLAKNVFQLCGLNQAGKPVYTKRTGRKELLQALANIPACLIGIEASTGAFYWQREFEKLGHKVKVISPQYVKPFVRGQKNDGNDAQAIAVALTQPTMQFVPPKSPEQQDIQALHRARQRIVNHRTATVCQIRGLLLDRGIPIGSAVSRARRAIPLILGDAENGLSSRMRRTIAELYDLFNDLGRRIHFFDKEIETVFRQSEACQRIAKVKGIGPKTATAVVAAIGKGTEFKNGRHFAAWLGLVPRQHSSGDRQVLMNMTKKGDRHLRTLFIHGAPAVVRVATNNNDGHMNQWVNQLKERRGFNKTTVAVANKNARIIWSMLRNDTGYQVV

SEQ ID NO: 91054 - protein, 457 aa, unidentified
MAYSTNATPPVKQGRLITTPTSQVVVNALYPSAVGVDVHHDLLVCAYQYLDLEKSEICTELNEFRCSSPRSFADFAQWCCERTPDVILMESTGVLWRAPYESLEDVGFGAEQLALVNARDIKAMVGRKTDRQDAIRLAEYARLGKFRKSFVPTREIRDQRLIARDFRKCKNDESRHRNRVQKTFNALGLRLSAIFSNFTGKAATAILDAWCDGVDNLKEVVEIKGGRLKAGTEAILEMLSKAIPEIVMPHLRKQREHLTYLQKRTDDVMATLRKAQQPYQESIDLLTTIPEIKETAARLIFAEIGDDLSSFPNAEHFASWIGVCPGNNESAGHAHRSGTPKGNKYLRTVLIECAQAVGLMRKGVLFQRFQAFAIKKGRLRGVMAMAHLLARIIFSILKSRTPYREVSSTTLRDVNVKKVTAAMTTAIRTAGLTLRDGLLVVEKTGEILVDVEDCARA

SEQ ID NO: 91055 - protein, 338 aa, unidentified
MSKGNQYVGLDVSLKQTSICVIDDADKIVWRGQVDTTPEAIVSTVTQHAPHAVRIGLESGQLSNWLFHGLKQAGLPVICVDARHAKAALSLKVNKTDANDALGLAQIMRVGWYREVTVKGLDCQAVRALLVARAQIVSQITTLKNCVRGILKTFGRVLPKGLRSQFPARVRAAIEGHPVLGAIIEPTLQVLEAARAQLLVYDRAVIQRARSDDTARQLMSAPGVGTVVALAYMTGVEDPARFKRSSSVAAYFGMTPRRYQSGEVDHAGRISKCGDGMVRGLLFEAAKVLLGRSSRPNALKTWGEALGKRIGLKKATMAVARKLAVILHRMWTTGATFQ

SEQ ID NO: 91056 - protein, 343 aa, unidentified
MQVSTIGVDLAKNVFQVHGVDSAGKVVITRQLRRKQVIDFFSKIPACLVGMEACGTAHHWAREVSKLGHIVRLMPPSYVKGYVKRSKNDAADAAAICEAVTRPSMRFVPIKSADQQALLMLHRTRDLLIRQRTQLINALRSHLAEFGLVAATGREGLAQLAAIITDESNREALPSAMKQALQAIVDQLAALELQIGTLNRAIHAHHRANDMSCRLETVPGIGVIGATAIASTVTDPNDFKSGRDFAAWIGLVPRQHSTGGKERLGGISKQGDRYLRRLLVIGATAVVRHARQHPQKHPWIMRLLAKKPAKLVAVAVANKMARIAWAIMAKGGCYRAPELAAAA

SEQ ID NO: 91057 - protein, 347 aa, unidentified
MMVVLGTDAHKRTHTVVAADGGGAEVGSITVPATSEGHLRALQWAAQWESRRWAIEDCRHLSRRLEADLLAAGELVVRVPPKMMAGARRSARTRGKSDPIDAVAVARAALREPDLPTARLDGPAREVKLLVDYRESLVRERTALQCRLRWRLHELAPGSEPSPGSLDVSKTLDQVEEILGAHHGMVADLALREVARIREITREANQLKNEITARVGEIAPSLLELPGCAGLTAAKLVGEAADVTRFKNRDAYAMFAGTAPIPVWTGNNQKFRLNRGGNRQTNAAIHRIAVTQLRIHPPAQQLIARHIANGKSKREALRILKRRLTDVTYRTMINDTHTAQAAQPVAA

SEQ ID NO: 91058 - protein, 346 aa, unidentified
MKVLIGVDPHKTSLAVAVVEEDTGELFERASFAQDRTGLRTLERWAKRFPERRWAVENAGGLGRHLAVRLAGSGESVVDVPPKLSARVRVLSTGNARKNDELDALATALAASRNERLAQVDPEAASEALRLLSERREDLLAERTRALNRLHGLLRDLLPGGVARTLSADRAARILRGIRPQGASARLRRRLASEVLRDVRTLDRKIADLNERIEAEVEASGTTLTQIFGVGPILAARIIGTVGSVERFPTKAHFASYSGTAPLETSSGEVVRHRLSLAGNRKLNYALHMVATCQARSDVRGSTYYRKKIAEGKSRKEALRCLKRRVSDAVFRSLSTDSRAHSQRAA

SEQ ID NO: 91059 - protein, 360 aa, unidentified
MMKYMIKTQTPCLTAFKTIVSVNFETPIAIGIDVAKNSLMICYRYADNHILTKNIGNNDSDIKKLIKELKLLNFSGKIVSESTGRFHMLSAVMLSEKNFLMYVINPLMSKKYNSASIRKVKSDKRDAEILAEIAIKEEKLPDVFTADRKKLMIKKKISLVATMDKQIQAMQATVKEYQETAKTLKIKLTKAEKGILGVVKNLKEEKEKLEKEIENIFNEQSSVDAINIRRQEIFSSIPGVSNYAATLATVFFLEDYCQNPKQWIAYSGLDISVKQSGQWVGKGKLTKRGNGYLRKRLFSAAWGTIMHDAKFKEYYNYLREKKHSYVESLLMIARKIIRIMFYLSKNNCMYNPNKIVFTTN

SEQ ID NO: 91060 - protein, 322 aa, unidentified
MVIYQNFIGIDIGKFNFVVAVHGDKKTHEYAYDASSITKFLKDLKDILPQSLVILETTGGYEMELLLTLCDKDYQVHRANTRKVKSFILSFGQSAKTDSLDAKALAYYGFERHQCLDCFTPASKHMSDLYSLIQRRKDLKQMLVAEKNRLQSPKASLINNSCQAMIAAIAEQIKNISQQIEELISSEQTLLVRQELLKTIPGIGDIIAQELLVMMPELGTMNRRQAASLAGVAPKAHESGKLKRYRRCQHGRDIIKPMLFLAAMAARRSNSQLKVFYENLIARGKKKMVALTALMRKIIVIANARLAQWQKEQMVENTQMPS

SEQ ID NO: 91061 - protein, 354 aa, unidentified
MDNYTIGCDAHKRYSQITVLDQRAKVYKQARVEHQPGEIRRYLAQYPSGTPVAVECVGNWYWIVDEIEASGCIPQLTNAWKAKLMMGNVNKTDKLDSYGLALLLHNGTLPTVWIPTSQLRDERELPRTRMAFTKQRTAMKNRIHATLSKYGIRLEEESDIFSKKGRVALQEAMDGLPTETHQCVTDELALLDEIQAQIEKLEKRIRQKTKLTPTMQLLQSLPGVGDILSIVIEREIGLVERFPSAEDLASYAGTTPKVSSSGGKTYYGPMRKESNQYLKWAFIEAANVVARFRHFPSWRNRHVVRLYERTAHRKGHFIAIGAVARHLAEATFWMLSKGETYHEPHSTKTPPKQG

SEQ ID NO: 91062 - protein, 429 aa, unidentified
MNYTQNEKILQVGEGNLIVGIDLGSKKHYARTFDWRGIECSKKAFVFTNDAEGFAGFLEWTSQMLEKSGKETVIPGMEPTGHYWFDLAKFLQDNGMRPVLVNPLHVKRSKELDDHLPSKNDRKDPKTIAKLVIEGRYTYPYMPEGVYADLRNASNMRFQVEAELTRNKNRIQKWFSVYFPEYNEVYGSFDAISSMMIIKQAALPCDIISLGAEKINQIWREAKLKAVGKKRAQTLVEAAQRSIGYTEGLGTARIEISMLLDDYEKLKVRLGLIMELIEKLVSKIPYAEKLMNIKGIGMKTVSGFIAEVGDISRFTNAKQLQKLAGQAIVENSSGKHKGKSRISKRGRKRLRYLLFEAALSLAATNPEFKELHRYYTSREQNPLKKIQSLMALSNKLIRVFYTILKNGADYDPEKLLNDIRRPEGMSKVA

SEQ ID NO: 91063 - protein, 404 aa, unidentified
MAMNMQYERAFGLDLSKKTFHGCILDGPDLAKRHFFTGEMGPKGKAKLAGRLCKGDLVLMEAGSSSFSLARFLLENTEAEVVVLNPAKLYNIFNSTLKTDKVDSEKIVRIARNMPRDEWPTVSVPTKGEQAERSAVSMEVFLAQEITRLVNRVYALFNSMGHPFISKKDLKDEETRLVLANRLLCEEPMAFHQLLMLSEQIKVVTGHLEECKQTLREICLAHPTQALSLLSLPGVGLMTAASQIAFLGDASRFNSPDSYVNYVGLSERRFDSGNKVSKGHISHMGNRCIRRNIIQAAWVATTKTKANPLSRKYDDLRFRGKSKPVAAVAVAKKMIQLSYILVKSEGIYEFTKQQGLEAFRRKLQNHGLVQLLEHLPETTRRQMEEVDRIKKEEVAATTSPRKLA

SEQ ID NO: 91064 - protein, 326 aa, unidentified
MQGKEASEQEANCKVNAGIDVGKDWLDVHVLPGGATLRLPNTNEGIRRLKRWLARFAPALVVVEATGKWHRPVRRSLAASAIPVAVVDAFRVRMFAKAQGILAKTDRLDARVLAQFAAVMAPPVRAAAPERLEQLRELVVARASAVEQQSALKNQLAAATVKFLQRQLQRRIERADGDIAALDAAILKRIKVDEGLARRYAILTSIAGIGFVAAATLLASLPELGSSTNKQIAMLAGLAPIADQSGQRDSVRVVWGGRASVRRILYLAALSATRFNADMKAYYQRMIAAGKPAKLAIIAVARKLAVLANALVSQDRTWLPTSPKYA

SEQ ID NO: 91065 - protein, 433 aa, unidentified
MIKINYMSTLFVGIDVSSKSNVVCAIDFDENKYISSSFQNNQPGAEELAAMIADCMAHHKNLNTVVATLEATSVYSVHIANFLSTCETLMPYRPYVFCVNPKMTANYRKSYIGMDKTDPLDAYLIADFARCGRIKKCQPWRGSQFLALKRLTRHHLHLAKCITREKTYMVSNLYLKFSELQLLDDDSQPFSNLYGATSSAVLTEYLSPQEIIDSSEEVLLQFLSLKSRNRIADLSKTSELLKKAARDSYRLDKCMYEPLNVSLASSFNCIHTYQKEMKLVDQAIEKSMNGMNPNAFTILKSIPGIGPVWAAGMLSEIGDINVFHSSDALAKYAGLTWRKSDSGDFSSEDNPITRAGNAYLRYYLGEAANSVRRHIPEYGEYYAKKYAEVTKHQHKRALALTSRKFVRLVFGLLVKNQLYTGEQLDAEYNIESN

SEQ ID NO: 91066 - protein, 433 aa, unidentified
MLKLNYMSTLFVGIDVSSKTNAVYAMDFEENKYISSSFGNNQPGADQLVNMIAECMQKHKNLDTVLIVLESTSAYSVHISTFLSASEVLMPYRPYVFCVNPKAASNYRKSYIGMEKTDPTDAYLIADFGRVGRTKKLEPWRGGQFISLKRLTRHRMHLSECITREKTYMVSNLYLKFSELQLLEGDDKPFGSLYGATSSAVLTEFLSPQEIIDMPEEDLLTFLAGKSRNRISDLSKTSELLRKAARDSYRLDKCMYEPLSISLASSFNCIHAYQKEIKLIEQAIEKCINGMNPNALLILQSIPGIGPIWASGILSEIGDITVFHSSDALAKYAGLYWPKGDSGDFTSEDNKMSKAGNPYLRCYLGEAANSVRKHIPEYADFYARKYAEVTKHQHKRALALTSRKLVRLVFGLLVKNQMNNKKKLDTEYNIESN

SEQ ID NO: 91067 - protein, 373 aa, unidentified
MRLTKCDVMTSYRSLEQPAIFYSDILKYAIGGKNMRHIGVDLHTNSFTACYLQEGKPEHIQTFRLKDLDNFTKDLQETDEVAIEATGNSCFFYDAVSPYVKRIVIIAPGQFEVVRRSVNKTDKHDARAIAFFLSKDMLPEARCKNKQCQQLASLLQTRDQLVKSRVSLINKVHGLFNYHGIKIKKEVLTTKVGFERATQKHNWDPLEKVEIEVISYHLEAIRESLKKLEKEIIAFAKQLPGFSNLIGIKGIGPISAAVFIVTIGDINDFRRPEKLTAYFGVVPRVSQSNQQCTIGRITKRGSKIARTSLVQCTWIAVRYSPYLKSFYEHIKKKRGSAKAITATARKFLITIFYTLKNNWVFKDFTKFEISIGQ

SEQ ID NO: 91068 - protein, 374 aa, unidentified
MSNHSEAFVGFDTSKLRNAVAIADGGRTGEVRFFGEIDNTEGATAKLVKKLAAKYQRVTFCYEAGPTGYGLYRQIKDLGHECIVAAPSLIPKRPGDKVKTNRRDAVNLAKLLRAGELTAVWVPDRHHEAMRDLVRAREAAMLDLRCKRQRVSALLLRQGRPYAGRTPWTKAHMNWLASQTFDYPEQRIAFEEMMLAIRQAQERLDRLEQAIRGAVPDWSLAEAATALMAMRGIDLIAATTFLTEIGDLWRFRTPHELMAYLGLVPSEASTGNTIKRGPITKAGNRRARRMLVECAWSYQHPPRVGRAKQQKVDAASPKVREIAWKAQCRLYRRYRALIRRGKLKTVAITAVARELAGFIWAVGHEITSARVAAK

SEQ ID NO: 91069 - protein, 342 aa, unidentified
MKDTMIGVDLAKRVFQVHGATMRGEVKFRRKLTREQFRAFMAAQAPAVVVFEACGGASYWARQMAGLGHEVRLIAPQYVRPFVKRQKNDAADAEAIVVAAQRPEMRFVTPKTADQQARAVLFRSRERLVRQRTELVNALRATLYEYGHTIPQGIAHIKQIEAILDAPHSELPALVRHECRDLLAQIAEQTARIDERARKIKTLAAETDAARRLQTMPGVGPMTALAVEAFAPEMAQFRRGRDFAAWLGLVPRQHSSGGKERLGRVSKAGQADIRRLLIIGAMARLTARARRSIPEGSWLAKMPGKKPRMLVAIALANKMARTIWAMLTKEEDYRDPARAAAA

SEQ ID NO: 91070 - protein, 386 aa, unidentified
MQTVADRPEAPTAIRTDLGAIFVSLELSRSTWLITSLSPGGGEKMSKHVVRGGDVAGLLERFAQLREKTRARTGKVFSFVVIQEAGLDGFWIDRVLQNEGIESHVVDPASIATSRRRRRAKTDGIDGEALVRALLAYKRGEPRVCAMVKAPTPEEEDRRRLCRERKVLIAERVRHVNRVKGLLFSQGISGYEPLRRDRRGRLDTLQTGDRRLLPDHLKAQVLRELDRLELLLEQIKAVEAERDVLLAAQQAPAPAAMLLDIKGIGPEFAAILWSEGLFRHFDNRRQVASYAGLAPTPWQSGSVDREQGVSKAGNPRLRTTLIQLAWLWLRHQPQSALALWFEERVRRNGGRLKKPTIVALARKLLVALWKYVTAGVVIEGAVMKAA

SEQ ID NO: 91071 - protein, 361 aa, unidentified
MNETYYIGFDVHKKSVSYCVKTASGEIVQEGQFTARREVLRMWAAAQPGPWQGAMEATLFSAWIYDTLKPYAQQLHMGHPARMKAISAGKKKSDRLDARTLADLLRCNLFPDCYVLSPEMRDLRRLLRYRHLVVRESVRMQNKMAGLLMETGTPFVKAKLHGKRYFTQLLQTLEEVPESVKDLLKMSRGALEMFEATQKRLVKHLLADPVLQARVERLCTIPAVGAITALTWALEIVDPFRFPSIGDAVSYCGLTGPFRSSADQVQRAPLSKQRNAWLQSTLIEAAKLAPRWNPPLAVLHQKELERGHRNRATLQVARKLVAYILAVDKSGQPFQMRSAPTPVEVFSTKKEMPARTALPPA

SEQ ID NO: 91072 - protein, 356 aa, unidentified
MSRDIKYIGMDVHKEAVVIAVLNSSGKLVMESIVETKASSILQFIHGLRGELHVTWEEGTWAAWLYDLLQPQVAQVLVCDPRRNALLKEGNKSDKIDARKLADLLRTGMLRPVYHGEHGLRTLRELGRSYRTISQDLNRVMNRIKALYRGWSIPCAGTQVYAPRYREQWLQKIEHAGVRRRAELLYQQLDGLQTLRRTLRPELLAESGKHKAAKLLRQIPCIGPIRAARLIALMQTPHRFRSKRQLWTYSGLGIETRDSAQYRYVQGQLQRTKKPQQIRGLNQNHNHEMKEIFKGAATRASCGVGPLRDFYVALLAKGMKPEMARLTLARKIAAIALTLWKKEERFDAEQLKPQAA

SEQ ID NO: 91073 - protein, 347 aa, unidentified
MTDILKQVAGIDVAQNELVVSLGRISQSLEIEIHASKTFANKASGFTALEVWIKKHTDPKIAVRFVMEATGVYHEKLAYYLSGQAHQVSIVLPNKISNYFRTLDIKTITDKTASQAICRFGLERKLEVWQKPKKIFKDIKQLTRERDQLIADRTVLKNQLHAEKAEAFPSESSIKRITKRIQLINKQELEIKAEIAELVKNDNALVKKINTITTIPGVGKLTALIVLAETNGFELIRSIKQLVSYAGLDVRLKESGTSVKGKPKISKKGNRHLRKAMYMPALAAMRANEHHKAVFVRLVSKHGIKMKAAVAVQRKILELIYIIYKTDKAFESNYQETKNTQEQVPNS

SEQ ID NO: 91074 - protein, 408 aa, unidentified
MDLTPMHKRVIALDVHQAKITACAVVEHEDGRVQLTKRDFGAFKRDRRALAQWALQIRPEVVVMESTGVYWKSPFAALESVGIIAWVVNARHVKAVPGRKTDMADAQWLATLARAGLLRASFIPPVQMRQLRLVARQRQKLVGMCSAEKNRLHKVLVDAGIRINVLVADIHGASARAMIKALIAGKPLHEVLDCKGRLRASRDELFEALSTEQFSAVHRFVSEEIMQHIEQLEQRIARLDRYLLEGLQPWQPQLKLLQTLPGIDEQGAAMLLVEIGADMSVFGSAERLASWVGICPGNNESAGKRKAGRIRKGNAWVRRLLCEFAQAAARTRCALKAKFDALAIRKGRKKSVVALAHKMLRTVYAMMADGTHYQDKEVDYEALNVQRNAPRWIKMLRKHGFIATPCAA

SEQ ID NO: 91075 - protein, 446 aa, unidentified
MEVVFPYCAGLDVHKKRVTACRLVSDSTGQVPEGVAELQTFGTMTHELLALADWLVEAGVTHVAMESTGEYWKPVSNLLEGIVTIFLVNASHVKNVPGRKTDPSDARWLAKLMRYGLLQASFIPPIAQRDLRDLTRYRTKLVQERAREVNRVQGVLERANIKLASVASDVLGVSGRAMLEALIAGQADPATMAALAKRRMRSKIPALEQALTGTVRDHHRRLLAMQLRHIDFLDEQIAVLNSAIAQCVTALSQEAAESPAPLSPMTIDVPTPADPPPSLTFTRAVELLDTIPGVNQRGAEMIVAEIGIDMARFGTAPRLAAWSGVAPGNNESAGKQRSGKTRKGNQVLRAGLTQLAPGAVRTKGTYLSALYRRLAARRGKRRAILAVAHSIMGSVFHMLSRNEPYRELGATYFDERRRHYTVDRLTARIEHLGYRVHLEPLPTAAA

SEQ ID NO: 91076 - protein, 367 aa, unidentified
MTKRSTTVGLDVHKESIDVVVAEAGADGEVRHYGTIGGDLAAVDRMVRQLRAAGRRLRFVYEAGPCGFHLYRHLQAQGVECTVVSPSMTPKRSGDRIKTDRRDAEALARLHRAGELRAIYIPGADDEAFRDLVRAREDGVTSQSRARHRLKALLLRHGYRYEGRAAWTFRYRQWLSNVKFPTAAQQIAFQEYIDTIGEAERRVERLTEQIRELLPEWRRGPVVAALQALRGVSMVTAVTLVAEIGDITRFNNPRELMAYLGLVPSEYSSGAKTRRGAITKAGNGHVRRILAEAAWAYRGQARVGQALMCRQNGLPRPIIEIAWKAQLRLTGRFRRLAARGKSLPKVATAVARELTGFVWDIARHAAA

SEQ ID NO: 91077 - protein, 398 aa, unidentified
MIEQRFSIGIDISADDFYVSLMWFDGKRTVVKGSRKFSNNHKGFVSFLEWTSKKTKGEKTLFVMEATGVYYEELAYYLHTEGRSVAVILANKIKHYANSLNVKTKTDKVDAKIIAQFGFERRPVLWKPMSSELRNLRYLCRERLSLKKELTRIKNQLHALTYSYNANTMVMDLKQQHITFIDSAIEKVEKQIIALIDSDEELKEGVRKLETIPSIRKLTIITVLCETNGFWGFNSIRQVVSYAGLDVKHHQSGKFAGKSKISKQGNVYIRQSLYMPALSATMYNEPMKQLYERIIERNPNIKRKGIVACMRKMLALVFVLWKKGEEFNPNYRWNGSGQEKKLSNNEKKSSDKDITSGKDEKTSPLVLQIEELKKKEVGITPTSQDKHRFKESKLSSCL

SEQ ID NO: 91078 - protein, 340 aa, unidentified
MIIGCDFHPRFQQIAFVDRETGEYGELRLSHVEEAERFYRSLTGQAVQIGVEATGNYRWLRRRLRELGHEVLLGDATAIRASNPRQQKTDRRDARHILTLLRENRFPAVWQPPEENEELRQLLLHRCRLVQMRTRAKNQLDSVAKNEGLLSKRVWNAKRRGEIEGLPLTGWRGQRRTDLLAMLEDLNRRIAPLDQAVAEAAEQNAEARLLMTHPGVGPVVSLAYVLAIGDWQRFARGKQVASYLGLIPAEASTGGKQRLGKITKQGNPMLRWLLVEAATTAQRYDAGWHRQYVRLSMTKHHGVAKVAMAHKLAVRLYWMLRSGENYEQVVERGSHAGQSV

SEQ ID NO: 91079 - protein, 425 aa, unidentified
MPYRIAGIDVHKKMLAVVVADVEVDGDFHFTRQKVGTTPTDLRALADWLVEQEVEEVVMESTAQYWRPVWEALEQHWRPRRRAREGASRLSGTLHLAQAQSNRGPGGRKKDFPDAERLVKRLVAQELTLSFVPDAEQRLWRTVMRRKYQVTRNRVQLQNRLEALLEEAHIKVSSLVSDLLGISARRMLQALADGETDPAALAALAAPRLRATAEQLCDAFTAAPTLHPVYRRLLKLTLEDLRLIEDHLGQLDQQMAHLLAAHHEAVQRLAEVPGLGVDSAQQIIAEVGATAVTFPSPKHLASWMGACPGNEESAGVNYSHRCPKGNRQMRRVLNQAANAAVKARGSIFAVAYRRLVPRLGHAQTIGAITHRLCRLIWKILHERVRYEERGPAVSAEAKKVRARKMIRELRSLGYRVDLISPAPSV

SEQ ID NO: 91080 - protein, 344 aa, unidentified
MEEISRIFVDTSKQVFQLHGVDVSEQVVVRRKLRRAQFLAFFAGLRPTVVGLEACAASHHWARELMALGHEVRLIAPQHIKPYVKRNKNDARDAEAGCEAMSRPTMGFVPAKTVEQQGGLMLLKHRERLVAERTRLSNAIRGHAAEFGWVAAAGLDKIPALVTQALEAAQAPAAVQGIFRRLGARFAELQGEIAELDREIRAWRKRSAISLRLAELPGVGELGSMMLPLKTPDPCGFKSGRDFAAWIGLTARDHSTAGKLRLGVITKAGDEALRAVLVAGAMSVIRQVLLGRGPQWPWLAELLQRKPRKLAAVALANKLARIAWKMMVSGEAFDPARLSPAAAA

SEQ ID NO: 91081 - protein, 361 aa, unidentified
MKRHPQYFISKSPCRGSRVGMTIGIDLGDVWSHYCTINEEGEVIDRGRFRTNPSGVDKRFRDLEPIRIAMEAGTHSIWISEQLRDLGHEVIVANVRELRAISHSDRKSDSVDAEKLARYARLDPEILRPIAHRTVAQQETLTLIRGRDVLVRLRTSAVNSVRGLAKPCGYRLPASSTLCFAKRCLAMMPSGLAVALSPLLHQIGDMTVKIKEYDRAIKKLTETKFPETQALIKVYGVGHLTALTYVLTLGKKERFRRSRDVGCYLGLRPKRSQSGDSDPQLGITKAGNGYLRQLLVECANHVIGPHGKDSTLRRWGLSLGARGGSHARRRAVVAVARKLAVLLHRIWITQEAYVPFYAAAA

SEQ ID NO: 91082 - protein, 409 aa, unidentified
MALICVGIDVAKGKSTVSAFEWGDAVLIKPHDVPHTASALGELADSLKRLPGDVRVVMEHTGRYWLPVAQVLHKAGLFVCAVNPKLIRDFGDNKLRSIKNDKADSKKLSRYGLRFWTDLIPYAPAEVARQKLLEFSRQLDASNKLLTGLKNNLQAIVDVTFPGVRKLIRSSARDDGHIKWVDFVCTFYHCDCVGKLNEAKFMERYRSWCKRHGYYFTARGARKIFSIAHNQVPTLPRDADTKLLISETARQLTSVSAAVETWRSKINALASTLPEYNCVMSMYGCGKTTGPQLMAEIGDPARFKGKKTLVNFAGIAPGTNQSGEYQQKSVPASKKGSPHLRKTLFQIMDCLIKRSPTDEPVYQFMNRKRAEGKPYYVYMTAGANKFLRQYFAKVRDFIASASDDAEFNT

SEQ ID NO: 91083 - protein, 241 aa, unidentified
MAKIICGVDVSSKTLDARIGQDGPSRSFDRTPEGIQALAAFCKSHDVEFVAMEATGGYEKLPFSLLWLAGVPCAILNPRSVRRFAEAMGTFEKTDDIDTGVIAHFAEVKRIVPQTPASATQQELEALVTRLRQVTDLRTSQTNQRRLVTDAGVLEGIDELVALLNRQIRALEAKIAQSIDADPLWKALDAAFRSIKGVADRTVARLMADLPEIGTISGKKAARLVGLAPLANDSGKVKRVS

SEQ ID NO: 91084 - protein, 351 aa, unidentified
MNHQTTPPKDFWVGVDLAKDGFQASRAPLGLATATWHGLPQAAFANTTQGQREFAQWVACQAQQLGGRCLGIAVEATGGLSRRFVEALATLKKALPTPSILNPAFVKSFGKSLGQRSKNDKLDAAVLAVFGAVHQPAPAAPLSPAQERLRELDRLRQGLVEQQTAWLNSRREAREELARRLIDQQLKLVEKQIERLEHEMDQIVKNDPDLKRQHELLDSVPGIGPRVAITLLAELGDLSAYQRDELVGYAGLFAREHRSGASVRRRGELVKGGGARVRRVLGMAAMAVGRSKSELKRFSQHLIEAGKTKLCAMGALMRKLLLIARAVIVSGKPYDARQALRKQSKKVMVSA

SEQ ID NO: 91085 - protein, 345 aa, unidentified
MTAKDRLYVGLDVHKEFCQACVMDAEGTIRSNDRIPSTVEDLDAFLDGFEDASFVLESTGIWEFVYETIERHGFEAVLAHPLKVRAIAEAKVKTDKVDARILAHLLRADLVPRSYIPSKDMRDLRQLVRQRAYLVQRSTSFKNRIHAELLRRGIRRPKELVKPFTQKSTHWMRSLAIPTVNSSLDCLEAIQTQVEQLNEQLLQEFDRRREAQLIATIPGIGFYGALLIWAEIADVHRFPDPEHLCSYAGLTPTVSQSASKSHYGGVSKEGSKHLRWILTESALIHVWNCPDSRLSRFHARVARRRGKQKATSATARKLLHVIYWMLIKDEEYHGQGFNPESKPAA

SEQ ID NO: 91086 - protein, 422 aa, unidentified
MLAESEDREEIIARVAALDIGKAELVCCVRLPAARGRRKRLQEVSTHSTMTASLTELANRLVELGVQRVVMEATSDYWKPVFYLLEAHGLDPWLVNARDVKHLPGRPKSDVIDAVWLCKLAERQMLRPSFVPPQPIRRLRDLTRYRVDLVAARTAEKSRVEKLLEDACIKLSVVASDIFGVSGRAMMAALIAGERDPKVLAQLARRRMRTKIAQLEEAFNGHFDEHHRFLLARMLARIDGIDADIAAVDEQIEAHLAPFAAAAARLDEIPGIGPIAAAAIIAEIGVDMSRFPTAGHLCSWAKFSPGLKASAGKTKGNASTGHGNRYLARILGEVAVTAAKTDTFLGARYRRIARRRGKKRATVAVGRSILVIIWHLFADDDASFTDLGPDYFTKHLNPNTQKRNHIRQLEALGYKVTLTPAA

SEQ ID NO: 91087 - protein, 348 aa, unidentified
MNYTQNSKIAQVTERTLVVGVDIGSETNFARAFNWRGQELSKKVYRFSNILEGSQGFLEYLGRYQDMASAEQIIVGCEPTGHYWFNLARYLNAQHINLVLVNPYHVKQIKELDDNSPKKTDLKDPKTIAKLAVDGRYSYPYLPEGIYAELRKAVSSRNRIVMELNAATNRMKRWLKIYFPEYLTVYKNFSAESGLTVLETAPLPKDVVKLGAEGVNRLWRDKKLRAVGMKRAQTLVEAAHNSIGLDGGACARMEMQMLLEDYRAKQVQPAKVTAVLEAETLEVPYAEKLPSVQGVGLITVAGFLSEVGDIRRFDSPKQIQKLAGLELKENSSGKHHGRSFISKRAEKS

SEQ ID NO: 91088 - protein, 322 aa, unidentified
MSTTRRTTYTYVGIDVSKANLDVAILPIGECFVASNDEVGIDELIGKLAEVPEALVLLEATGGFERPVAAALAASGIALFVVNPRQARDYFAKATGQLAKTDALDAFVLARFAQAIRPTPRAIPDQEAREFGEILAGRRQIVRMMSAEKNRLGASGSKAVRGRIEAHIRWLEKELARTDRDLDETIENSPTFKANEALLRSVPGVGPVLCRTLLAELAELGSLSPRELSALVGVAPLNRDSGTLRGRRTVWGGRARVREALYMGALIASRFNPVIKEFYERLLEAGKPKKVALVACMRKLLIILNAVMRDRTPWRCPHILNP

SEQ ID NO: 91089 - protein, 311 aa, unidentified
MSTLAATAGFDPHLDVIAAAVIDRLDHPLDTVSVPNSPDGWDRLAEWCARWDVTMVGIEGASGYGRRLAQTLTGAGIEVREIPTRLTARTRRLDGAGKTDPGDARAIARAAARREGAIWVDRPDSEAVRLLVNHRDNLVAAQTRDINALRAILVEVDPDRAAQLPRLRSTAAFETLTQVSYDGDIHRRTASQLIGELAAGCRDRLTQIRDLTARISALHHPLTDAFARIPGVGAVTAAILVAELAGTDGFATDAKLAAWAGTAPLDASSGRQQRHRLNRGGNRQMNRAIHTIALTQLRHHPPARAYLDRRG

SEQ ID NO: 91090 - protein, 424 aa, unidentified
MFGTAGRARKRWKLQRKFELFVGVDWGSERHRVCIVNPTGEILDERWVEHSGQSLAELVTWLRSKTTASPDNIAVAIELARGPVVETLIEQGFAVFSINPKQLDRFRDRYSPAGAKDDRRDAFVLADSLRTDMPCFHAARLDEPATIRLRELSRLDDDLRREQNRVHNQLREQWHRFFPQLLQLSPAADEPWIWDLFQTAPLPGQAVKLPTTRVQRILTKNRIRRIDAPQVQAILAATPLSVAPGAAEAASEHALLLLPRLRLLQQQRAIIRKRIDTLLAQLAKPDQTDGETIEHRDAEVLLSLPGVGRQIAATMLSEASQAIAERDYHGLRCYTGAAPVTRQSGKKKVVLMRHGCNERLRNAIYHWSRVSVVCDPKSKVEYAAMRAKGHSHGRALRGIADHWLRVLLSMLRHHTLYDPQQRPA

SEQ ID NO: 91091 - protein, 353 aa, unidentified
MDSKKYIGMDVHKESISIAVRNDAGKIVMECVIETKASVILEFIHGLRGELQVTFEEGTWATWLYDLLKPHVTKLVVCDPRNNSRQGNKNDRIDARELADRLYMNKLSSVYHGEAGVRTLKELARSYLTISKDLARVMTRVKAIYRSWGIACAGKQVYAPRHRAEWLAKITEVGVLRRAEFYYQQLDALRLLRHEVRRDLLAESKKHKATKLLCQIPSIGPIRAALLIALIQTPHRFRTKRPFWKYSGFAIEMHSSADYRSVKGQLERTPKHISVRGLNRDCNHDLKNLFKSAATIASVKPGPFQEFYAALLARGMRPEMARLTLARKIATIVLIVWKRGVCFDAQHLKSQTA

SEQ ID NO: 91092 - protein, 424 aa, unidentified
MKVTYQTCCGVDVHKSFLVATIVKTTGGIEPSYQKKRFSTFNNSILEFKQWRLDNDCHDVCMESTGKYWVPVFNLLEDDINVVIANPKWVKAVKGNKDDTKDSKWIGDLFRLGLVKGSYIPCKKVRILREYTRYRYKLVSCRSSEKNRYQNALTVCNAALDSVVSDIFGKSSTSIIDYLLEQSGSSINHEEIASKLLRSLKSKEDAVIESVEGYQMTDAQKYRMRLVRAHMDYITAEINDVDKMIENMISSNTDFENAVQFLCTIPGVKRDSAITIISEIGTDMSQFSSSRRLCCWAGLTPGSNESAGKKKSVRFTRAGVYLKPALVQCAHAAVKSDKSPYYKKKYESLVKRRGKKRAIIAIARMILTAIYQMLSTGEQWNPSDLYKIDMPVALVEKQKAKAIKQAKKLLQREGLLPPDEPFAS

SEQ ID NO: 91093 - protein, 322 aa, unidentified
MLIVGIDISKATFDCVVLDKDILPHRQFVNDVTGFKALSIWLKQYQEARLFCMEATGIYGVLLAKYLHQQDHNILVVNPIKTHAFAKMAMTRNKTDKVDAKCIAHFCQHLVNQGDWQRQLFRPKALGFERLQHLVTRLEQLNKLLNQENNRLQVSQDKATTKSITAMIKSIKTQLRCVEKTLSEITEQEPELKNQVALLNTINGIGNKTAWAILAYLGDITLFDNAKQVASYAGLNPKIEQSGSSVNRSRLSKIGNPRLRKALYMPSLVAIQHNPLMTQLYERLQQNGKPKKVALCAVMRKLLVLSYGVLKSGEAFDVNYAK

SEQ ID NO: 91094 - protein, 401 aa, unidentified
MQETTQHDAVDVFVGVDVGKGQHHAVALDRNGKRLYNKALPNDEVKLRALIAELKTHRRLLFVVDQPSTIGALPVAVARAEGVLVAYLPGLAMRRIADLHAGEAKTDARDAAIIAEAARSMPHTLRSLRLADEQLAELTMLRGFDDDLAAQVTQTSNRIRGLLTQIHPALERVLGPRLDHPAVLDLLERYPSPSALAAANEKTLANRLTKLAPRLGKNWAAEIVQVLNEQAVIVPGTQAAAIVMPRLAQQLAALRKQRDEIAAEVERLVLAHPLWPVLTSMPGVGVRTAARRLTEAAPKAFATAAHLAAYVGLAPVTRRSGSSIRGEHPSRRGNKVLKRALFLSAFAALRDPVSRAYYSRKIQQGKRHNQALIALARRRCDVLFAMLRDGTIYPPKSAPNA

SEQ ID NO: 91095 - protein, 431 aa, unidentified
MLKIVYPVCCGIDVHKTFIYCCIATTDNKGITTYKSNRFSTFTNQLKRCATWLKENDCKDVCMESTGKYWIPVYNILELSCNIVLTHPKYVKAIKGKKTDKRDAKWIADLFKFGIVRSSYIPEKDIRILREFTRYQYKLVNMRSSEKNRFQNALTTGNCKLDIVFSDIFGKSASAIVDTILSNNPYTSEDILSKVHAGCKASHEDILSAVEGIQLNQFQKARIRIVQKHMEYLDSLLDEIQHHIDLMVANYEEYIQLLCTIPGINRKSAITIISEIGTDMSQWSSHRKLAAWAGLAPGCNESAGKKKSVKISKAGVYLKPCLVQVAHAAVKDKNCDYYADKFNKISKRRGKKRAIIAIARKILIAVYHLLKTGEVFNPTDMADVETTKKQRIEYVKNNLRNAFNQLSRTGLSEAEILQLIRKESTNSPQIE

SEQ ID NO: 91096 - protein, 362 aa, unidentified
MNQSSWLVAGMLPGIERQPRKKLEPSAERLLGLLHRWRDEAVKAGRKITRIALAFEAGRDGFWLARWLRAHGVEAHVIHPSSVAVSREHRRAKTDRLDTELLKRGFLGWLRGERGHCTMARIPTIAEEDAKRPNRERECLVRERTRIVNRMKGTLARLGIRNFKPTLRKAAERLATLHTPEGSVLPPNVSAELQRNMARLGFVVSQIKEIEAARQKRLEQEPETEPHAMVRHLARVVGLGVETADILVNEVLSRPMRDRKAVARYAGLTGSPDESGAKRREQGLAKAGNARVRRGMIQLAWRFLRFQKESALALWYRARTADSRVGTRKTMIVALARKLLIALWRFVTTGEILEGVILRPAG

SEQ ID NO: 91097 - protein, 463 aa, unidentified
MRIIGIDLAVKAEHRAVVVDARGHCLTPVLKITTRAEALDRLLTRAREGAPRSKLCAVMEPTGMAWFPIAVYLIRHGVTVYLVNSQAVMDLRRVYHRHAKSDRIDTRVLAQLPLHAPETLHELRLAGAAALACQRGCTQLDRWGHHIAALKNRLKATLRFAWPGIEAVFADLYAVDARWFAEHWLDPDAVRRAGVAQLQQAWHESGLNPGDSGAWVPTLVTLAQDVVALYGPEPRYLDFAYLQAEVQRELALLTYLETQVDTLRLKTVRPVYRQLQPERLLETIPGVGQDGAAVYASFVGSADRFASARLFRGWAGMVPQSKESAEVESKGLAINHAGPRLIKKYAYLDAEVARQWDPQLAALYYDQMVNKGKHHNQAVCTCDSHLLNRVFVVLRDHKAYEVRDLEGQPVTPAEARTLITEKYTVPEAVRRRTTKRYRQARRDQRAEKKQKREEARTGVRSKP

SEQ ID NO: 91098 - protein, 414 aa, unidentified
MFAVGVDVSNGRSMVAVLQSKLKVVMKPFEVQHTSEGFAALAEKLNGLGGETRIVMEHTGRYYESFAMSMHQAGFFVSAVNPLLIKNYQDGITVRKVKTDKADAVKIASFALDKWELLPQYTPMDTIRYDLKTLHRQFQLSSKTRTALNNNLIALLEESYPGANRYFDSPVRPDGSQKWVDYVDTFWHVDCVAKVSQKTFVERYEKWCNRHKYNFSEQKAIELHEDAKRKFALVPKSDTCKLLVKEAVSQLNAVSRTVEAYRAEMNRLASQLPEYETVMSMYGVGKSMGPQLMAEIGDLRRFTHQKSLVGFAGTDPIKDDSGDKVSASNPASKRGSPYLRKTLFVIMTILLQLQPQDDPVYQFIDKKRSEGKKYYVYMTAGMTKFLRIYYGKVRDCLKEKGLWDQPSMDEVNPG

SEQ ID NO: 91099 - protein, 386 aa, unidentified
MQASHVSTPIAGHNGTIFVAIELSQKDWLVTLHSPDKDRMSHYKVEVGDGAGLLALLERVRERAGRKLGALPGVKSCYEAGYDGYWLHRFLQANGIENYVFDPGSIAVEQRSRRTKTDRIDGEQLVRTLRSHCRGEPRVVRIVHVPSAGQEDARRATRERDRLIKERTGHTNRIKSLLRLLGMAVGNPLRRDWLTWLARQRDWQGRPVPPQILAEIEREHARPMLLREQLSKLEKSRTEVAPTPELAETARREEVLCRLRSLGPAFTGTFTYEVFYKDFTNRRQVGSYVGLAPSPWRSGGTNREQGISKAGNPRARHKAIELAWLWVRHQPESALTLWFRERTAKASKRVKRIAIVALARKLMVALWRFVTTGLVPTGARLKPATA

SEQ ID NO: 91100 - protein, 400 aa, unidentified
MISVGIDVSKEKSTVCILKPYGEVVSRPFEVCHVEKELSELTSMLLRLNDDVRVVMEATGIYHLPVLCYLKEKGLFVAVINPFEMKEYRCQGLRSVKTDKQDAITISNYGIDHWYRLKNYEAEESVYAELKLLGRQYRHYMRMRVESVLELTHLLDYTMPGIKTLLKGWNETNGKDKLGDFAEEYWHYDNITKKSEEQFIESYLKWAKEKGYHQSQDKAVKIYALAKEGIPTVPSDTPSTKMLVQEAVRVLREVDNTLMTILTQMQALAKSLPEYPVVRAMGGVGNVLAPKLIAEIGDVRRFHSGKALIAHAGIDAPPYQSGQFIGTERKISKRGSSSLRKIGYEVMRCLKTHKEPEDAAVYRFILKKEKEGKSKRAAKIAGLNKFLRIYYARVMEVYQN

SEQ ID NO: 91101 - protein, 337 aa, unidentified
MEYFGGLDVSMAETHVCVMNRDGAVAYEVKVPSTPADIAAALAQAPTCARVVFETGRMAPMLYHGLSQLGLPIVCIESRQAYHALKSLATHKTDRNDARGLAHLARTGFFKAVHVKSLSAHALRSLIFARKKLVGQRVTLENQIRGLAVVFGVRLPRALTAAFIRQALRASEGIIGLSAAMRGLVATRTAVLAAVAAIDADIRQLARASAACRRLMTIPGVGQLTALAFTAAIDDPGRFRRSRDIGPYLGLVPRRYQSGEVDYTGSISKCGDRRVRTLLYEAANVMLTRYKRPLKLKDWAFAIGKRSTMRKARIALARRLAIIMHAMLRDGTEFKPA

SEQ ID NO: 91102 - protein, 347 aa, unidentified
MKFYTKNHQYYCGIDLHARCLYVCILDQQSEILVHKNIKANPESLLKLITPYRDDLVIGVECMFTWYWVADLCQREGIAFILGHALYMRAIHGGKAKNDKIDSHKIATLMRGGMFPEAYVYPREMRGTRDLMRSRMHLMRKRSELLAPVHNTNSQYNLPEISKNLRYAFNREGIAERFSDASISKSIELDLNLIDFYDKQLSKVEWHILQQAKACDQHGLILLRTVPGIGQILLLVILYELHTIERFPTVQNFASYCRLIKCRRESAGKSYGTGGAKIGNAYLKWAFSEAAVLFLRKNPQAQAWLEKKAQQHNKARALTILAHKLGRAVYFMLKRKTVFDQERFLNS

SEQ ID NO: 91103 - protein, 409 aa, unidentified
MERVIERGAALDVHKKSVTACVRVPGADGGRRQEVQTFGTTAAALLALRDWLSAHGVTHVAMESTGVYWKPVYYVLEEMFTCLLVNAAHVSKVPGRKTDVRDCEWLAQLLEHGLLRGSFVPPVPIRELRDFTRYRQVLVQDRTREANRLHKVLTDAGIQLASVATNVLGKSGRAMLAALVEGTTDPAVLADLAQGKLRRKLPALREALAGRFRTHHALLVSQLLAHLDYLDEALDILTTQIEEALAPFAREAARLDAIPGVGPRTAEILIAELGVDMRQFPTARHVASWAGLCPGTHESAGKHRAVRTRKGNRWLRAALIEAALAAINVRDSALAARYRRLVRHCGHKKAIVAVAHKMLTTAYVLLADGRTYQEPGAGYYDAQRKDRSVRRALQTLERCGYRVSLEPAA

SEQ ID NO: 91104 - protein, 341 aa, unidentified
MKCNLVSIDLAKNIFQVCTFNNERKIIFNKKVKRSTLIYELSKIEPTRVVMEACYSSNPWGRRIEKLGHKVFLVPAFMVKPFVVGNKNDHNDSIAIGEAFFRPRIRFVQVKTVEQQDIQSLEKIKTLLNKQKTATSNQLRGLLAEYGLVCPKTIPVLIKTIPDFLEDAENELSCVGRSFIYRLYTHLNDLIVQVKKITLELNNLVKTKEDYRRLLTIPGVGPTIAASLMGSVSDPNCFKNGRQFAAWIGLTPSQHSSGDINRMGKITKRGNSTLRRLLIHGARTVLNWCEKKEDTLSCWLKKLKQRMHNNKAVVAFANKLARIIWSLMSKKENFNINMACA

SEQ ID NO: 91105 - protein, 363 aa, unidentified
MLKTPDRVVIAVDPHKASWTAAAVNASLQPLDIIRVPVSRDGYRALRRFARRWPDPTWAIEGASGLGAPLTARLRADGADVVDVPAKLAARVRMLSTGHGRKNDDADAVSVGIAALSARTLNTAAVHATVTALRAVVEHRDDLVKTRTQTINRLHVLLTHLVPAGARRELTADQAAELLRGVRPHDAAGKALRGLAADLVAEIRQLDRYIAKAAANIQTAVSASGTTLTELSGIGTLTAGKILGRVGTIKRFRSAAAFATYTGTAPIDGSSGDVIRHRLSRAGDRQLNLCLHVMALTQIRQDTPGRAYYQRKRAAGKSHKEAMRCLKRRLSDVVYRQLVRDETRLEAGPGGHSGAALLSSAAS

SEQ ID NO: 91106 - protein, 335 aa, unidentified
MEFTFFLGIDVGKATFTYCLRNQAGVLDQGEVENTLRAITNWVSSLKKTHKRNLEQFILCMEYTGIYNSILLRVLQQKGLRVCMEGASNIKLSLGMQRGKNDKVDAQRIAEYSLRFTDRLKEWSPRREVVEKLGHLMSSRARLVNARKTLCVPNHEAELFLDKRISRELHHHVAGTLKAIDKNINLIESEMKEVIENDENLKLLMDLSTSVPGIGFITGCTLIVKTNEYKSFDSAKKIACTAGIAPFEHTSGSSVKGKTRVSHRAHKDLKTALHLAAMGAVRSKGVIQDFYIRKVAEGKNKMLVLNAVRNKLVHLVFAVIRDNTMYQKNYQYGNV

SEQ ID NO: 91107 - protein, 407 aa, unidentified
MMAAELEAAGPRLWAGIDAGKGHHWVCVVDGAGETVWSGKVINDETVILDTLGAVVALGGEITWGIDITGTASGLLLTLLAAHAQTVRYVPGRTVNRMSGAYRGEAKTDARDAYVIAETVRHRSDLAPVEVPAEIVAELRLLVALRADLVADRVRLINRLRDTLTGYFPGLERAFDFGRRKGAIVLLTRYQTPDGLRRAGRVRVASWLAKRKVRSAAEIADTALDAADAQHTTVPGQKIAAQIVAEHARALLALDARITTIDAQVDDTFHAHPQAAIIESMPGIGPILGAELIVAAGDLSAYADAGRLASAAGLVPVPRDSGRRTGNMHRPKRYNRTLRRVFYLSAQTAIVRDGPNRDFYLKKRAEGSKHVSALLALARRRVDVLYALLRDNRTFTIEDPAKTATAA

SEQ ID NO: 91108 - protein, 361 aa, unidentified
MHATTVAVDLAKSVFQLAVADGSWKIVETHRLTRTQFERWFANRDVGLVVMEACGSAHHWARWLERLGIAVKLLPAAHIRAYVKRNKTDAADACALLEAARASDIVPVKVKSVEQQALQSLHRTRSLWMSTRTSRINALRGFCREFGLAIPQGARTGVEAISRVLADPNSAVPGLIRGSMKLLVEEIRLLEARIAQLERELHEVVKQSPACTTLLSIPGVGLLTATAMVAATGGQVSHFKDARHFASWFGLTPREFSSGNSRVLGRISKRGDRYLRMLLTHGARSVLRAAATARTVGRSLDGLRTWATAVQARTNHNKAACALANKMARICYATLRDATPYGQPAPRQQRKIERLSFAVAA

SEQ ID NO: 91109 - protein, 355 aa, unidentified
MDSTKSVGMDVHKDTMSIAVMNSAGKVVMESVLETKAVTLLQFIQGLRGNLLVTLEEGTWAAWLYDLLKPHVTKVTVCNPRKNALLKSGNKSDRIDAQKLAERLRHGSLCAVYHGENGLRMLKELARSYLTVSKDLTRVMNRLKALFHSWGIACAGTQVYAPRHRLEWLSKITEEAVRGRAEFTYQQLDGLQALRQAVRRDFLAESRKHPAIKRLREIPGMGPIRAALWVALLQTPDRFRTKRQLWAYSGLAIETHGSGQYCYLEGQLRRVKKPVALRGLNRNHHHDVKWIFKSAAVKVSSPTGPLHEFHEVLLAKGIKPSLARLTLARKIAAITLTIWKKGVRFDAEHLKPQAA

SEQ ID NO: 91110 - protein, 347 aa, unidentified
MITIGIDPHKSSHTAVALDETGALLGEVRVPADSSTLARLQAWAASWPQRVWAIEGACGLGRLLAQRLVGSGETVLDVPAALAARTRVLQRGHGRKSDGIDARSVAVVAQHRDGLSRVAPDDHCAVLRLLSDRRDELTSERRRAVNRLHRLLRDLHPGGAPRQLSADRASRLLATIRPSGAVDIERKAMARQLIADTRRIDRALTENRRRCAQAIAASGSSLTEIFGISEVLAAKLIGHTGDITRFANADHYASYAGTAPIEVSSGDQRRHRLSRAGNRSLNHALHMAARVQTMHPGPGRTHYMRKQTEHKTPAEALRSLKRQLAKVVYRHLQADHTHQTSPSPGLT

SEQ ID NO: 91111 - protein, 428 aa, unidentified
MKKADLLLSTLYVGIDVSSRNNVVALMEFESQKPIMTFAVANNRPGAMELAEKLSGFLGERKDLHRLIIALESTSFYGIHVANYLSSCQMLAMFQTAVYCLNPKLVANYKKSFVDPGKNDYIDAFVIADFARAGRIKIKPWRGSQFLALQRLTRHRLHLAKSLTREKAYMLSNVFLKFSEFSLLDKEEQPFSNSFGATAEAVLTDFLSVEEIVDMPLDELISYICKKSRNRFSEPEKTAKLLQQAARNSYRLDKCLYEPLTVSIASSFNLVSTYENEIKAVNKSIEKTLRGIEPTAYQSLLSIPGIGPVMASGILAEMGSVDAFKSESALAKYAGLVWREGQSGDFSADDTPLSKAGNAYLRYYLIEAASHVKNNCNEFAAYYQKKYDEVKTHQHKRALALTARKLVRLIFGLLAKHQLYSPSGVGQA

SEQ ID NO: 91112 - protein, 400 aa, unidentified
MKWYLGIDIGKYVHEAILCDNEGKPRAKSVRFNATRDGYHALFLYIKKAVAGNALQEIHAGMEATGPYWLSLYEHLIKLGIAVTVLNPLQVKAYRNEGIRGAKTDRIDCLLIVKVLKFGDYKESDVPNEDIFALRQLTRLRADLVHMTSGLKVKVIAIFDQVFPEYKTLFYDMFATTSQALLKEAVVPEQITAISTEKLTALLDTASRGRQGAKEADHIKAVARQSIGITIALDAFALSLKILLAQIHHLEEQVKQLDREIVQKITAQQTTLITIPGVGETTAATILSEVGNFERFVQDKDGGEKLVALAGLDPKTKESGTMKGKATMSKRGSPYLRQAVRNASFVAACGSRPDPMFKAIYDKQVKRGKPFEVALSHVENKMLHVIYSLLKSKKEYKPYI

SEQ ID NO: 91113 - protein, 336 aa, unidentified
MKQVKQVVGIDVSMDEFEVQFGITDQELHHEYPAGAQFANKVTGFRRLERWAQKLSRGSKAPVWFVMEATGTYHEQLAYYLHERGHRVVVVLPTKLKYFMKSLDNKSKTDRLDARAIAQFGLERTLEPWTPPSAQLRTLKILAREYDALVQQAVKVRNQMHAKDHAYTPPPETIARLREQHRLLVRQMKAVQAQIRAIVTQDQELSGRIANITSAQGVGFMTAVRVIAETGGFHLIHNAKQLTSYAGYDVVIRQSGKRVGKPAISHKGNAHLRRAVYMPALAAIRCNPALRRFYQRLTRTKANKKIALVAVARKLLCLIYALWRTNAPYDPHYAGA

SEQ ID NO: 91114 - protein, 453 aa, unidentified
MPVMGVPEQIEDEEHEQRLERVAAIDVAKASGKVCTRVPHESKAGSRVTLVWDVAATTNAICELAAHLVEQCIERVVLESTSDYWRPFFYLLEAAGLCVWLVNASDVKQVSGRPETDKLDAVWLAKLNERGMLRPSFVPPADIRRLRDYTRLRLDLTRDRTRNKQRMEKLLEDALIKLSTVATDIFGKPGRDMIEALIAGNNDPKQLAALARGRMRVKHAALVQALDGRFDAHHADLARILLDQVDRLDTQIQRLTTTIDELIAAMPTAAASDQAPTDTGGGGSEQQPTTTLPVIARLDEVPGIAKHTAQVIIAELGLDMAQFPTAGHLVSWAKLSPRTIQSGARQRGGKTGKGNPYLKGILGEAAAAAAKTDTFLGERYRRLVKRRGKLKALVAVARSILVIVWHLLADPTIRFRDLGPDFHTRRVNTDRKIRSLVHQLEILGHTVSLQPAA

SEQ ID NO: 91115 - protein, 427 aa, unidentified
MPYRIVGVDVHKRMLAVAMADVDVDGDWRFERRQFGTSPRQLQMLAEWLVDCDVEEVVMESTAQYWRPVWDALERGWQAVRRMRPAAAPTAGALHLAQAQSNNGPRGRKKDFPDAERLVKRLVAHELTLSFVPDVTQRLWRTVTRRKFQLTCNRVQLRNRLECLLEEMHVKVSSLVSDLLGLSARRMLRAVGAGATDPATVAALGNPRLHATPDQLRDALGACTDLHPVYRRLLALTLDELDGLEAHIRQLDEELAQLLRAHQAAVQRLAAVPGLGVDSAQQIIAEVGPTAATFATAKRLASWVGACPGHDESAGVNHSRRSPNGNRQMRRLLNQAANAAVKTKGSLFELVYRRLVVRLGHAQAIGAIAHRLCRLVWKILHDGVTYEERGPAVTKARAQWRAAKMIRDLRKLGYRVEPAFAPASPQA

SEQ ID NO: 91116 - protein, 387 aa, unidentified
MIKKRGRVVGLDVHPDSFAGAVVEGSDPANAQVLSTSTRVELERLEQWALRHTRTDDTLVLEASGNAFSVAERLRAIGRKAEILDSHRAGKVGKVYCANDRVDAVKIARIYLSALSPIVWQPDQKTLERREVFSAYQAVVKESTRAKQQLRSMLNEHCVRLEKGFRLCHPNAITRLLRLREWTPARTMLLQQLHGSLISARARRTLLRRHMAQEIVAEESLLRLTRLCGINLITLYGVVAAVGDVRRFAHSKKLVAYLGLNPSVSQSGNFEGGGALKRHGRGALRALLIQSGKKLLEVNNPLQKWGLAVAARRGRNKAAVAVARKLCVALWHVLMGHIVGALERLDMLETKLSKFATEMGPAALSALGYHNKADFVEKKLYVLRSYS

SEQ ID NO: 91117 - protein, 382 aa, unidentified
MPAYADPTPKPISADTIFLAFELSGTSWLVALHAPDADKVERHRLPAGVAAEVLGLIARTKARVTRRLGTTPRVACCYEAGRDGFWLHRVLEAEGITSHVMDPSSLQVDRRARRAKTDRLDAQALLRALMAWSRGERQVCSMVRPPSPEHEDERRLSRERGTLLKERLRLSNRIKGLCAAQGIYDYEPLGADRRERLARLVTGDGRALPGRLAAEIGRQLDCFELVLRHLAEVEAVRDARAAQAREEGGSKLATLLRLKGIGPELATVLELEVFHRHFANRRDVAAYAGLAPSPYASGGTSREQGISKAGNRRARKALIELAWLWLRHQPESALARWYRDRVGTATGRVKRIAIVALARKLLVAIWRYVETGLVPAEATVRT

SEQ ID NO: 91118 - protein, 338 aa, unidentified
MDRQYVGIDFHRRRSVIVRLNSAGERLAVARVGNDPFEFASAIAAAGDAPAVVIEATYGWYWVVDLLQDLGATVHLANPKALNWGDRRVKNDVVDATDLADMLGMGRLAHAWIAPAAIRELRELVRYRAKLVQLRSGLKAQVHAVMAKEGVLPGTLDMFCQRGELQLDAMDLGRNYAVRVQSLRELIGHYDRDIVTLERDIHQHLRGDRGYQAVQAINGVGRTIAAILVAEIGDVSRFPTPAHLCSWAGLTPRHHESDTKTRRGKISKQGSRLLRWALIEGISRYHGGDVLKHSYQRIAKRRGTNKARVAVARKALTLAYYGLRDGEIRCLAPAQEAA

SEQ ID NO: 91119 - protein, 347 aa, unidentified
MKHLNTVGVDLAKNIIQVSVISSFGKEQLNRSLTRRKFAEFLGKQKTSLVAFEACATAHYWARVAKRHGHQVKIIPARAVLPFRQGHKTDPNDALAVAEAALRPKVQKAPLKNLEQQGLQAVQRSRELLVQERTALSNHVRGLLMEFGVVIPQGFAALHRQVPEILEDGENELPDIYRPTLHRLYGRLCDLREDLHFLDQQIDELVKQHPSCQRLTAMEGVGPISSILLFATLGTGEAFKNGRQFSAYLGLTPKQYSSGGKTNLVGISKKVANKRLRSVLIQGARAYVHKLKEPRSPKDQWLWSLIQRAGHGKAAVALANKNVRTAWALLTEGTEYDRQRGMLQQAA

SEQ ID NO: 91120 - protein, 421 aa, unidentified
MSKQNVEIAAFIGLDWADQKHVLTLQEAGSDQRHRFTLDHTPEALQSWIQLLRNRFGGKPVAIAIEQTRGGLIYALMHVEFIHIYPVNPQTAAKMRQAFYPSGAKDDPTDADLLLEILMTHRQHLRVWVPDDVLTRSIQLLTEGRRRLVEERTALTNQLTAALKEYFPQALDWFGDLNTARACAFLQRWPSLQDLKQATPSSIRKFYKTQGYRGQDKLEQLITNIKHAQPLTEDDAVLLASAMMVHALVMAIPSLTDSIERYDQKIAALFDQHDDSTLFGSFPGAGPTLAPRLLAAFGSDRDRFEDAADMQQLSGIAPVTEKSGKGIWIHWRLACSTFLRQTFHEFAAQSIFQSDWARAYYDQQRQRGKSHHAALRALAYKWIRIMFRCWKTRTSYDEAQYCNSLKIRRSPLAAELAAAEK

SEQ ID NO: 91121 - protein, 405 aa, unidentified
MINAVGIDVSKGRSTIAVLRPGGITIRRPFDVSHSSADLSSLVQYIGSLEGDTRAVMESTGRYHEPVLHALSDAGIFVSAVNPHLIRNYGNNSLRKVKTDPADAMKIARYTIDNWSELREYTGMDNIRSQLKILNTQTAFLMKQKTAVKNNLIALLDQTYPGVDKLFTSPVRTDGSEKWVDYVYSFWHVDCVRKIGIKAFSERYAAFCKRHGYNFQKGKPQELFDASKELIATQPKDLICKKMIQNSIEQLKLLSRHIVELRSEMDRLASTLPEYSTVMEMYGVGPVYGPQLIAEIGDVSRFPRRESLTAFAGVDPGKNDSGQRISKSVHASKCGSSRLRKTLFQIMSTILQLGDNDDPVYRFLDKKRSEGKDYLVYMTAGANKFLRIYYGKVKGCLRQQTNATE

SEQ ID NO: 91122 - protein, 502 aa, unidentified
MINTLSRLGDSRLFEPLLPRAYHPSNLKLGKNAMRKDTQNRKCKSKKISRKVQLKLPKHLKHINKMAAGIDVGSKSHFVAVPEGCDEITVREFLSFTSDLHALVDWLEECGIETIAMESTGVYWIPLYELLESRGFEVMLVDARHVKNVSGRKTDVLDCQWLQQLHTYGLLSGAFRPNEQICALRTYLRQRNMLIEKTAAHVQHMQKALSQMNIQLHNVIGDITGQTGLKIIRAIIQGERNTKVLASYRDRRCKNPIEIIEKSLEGSYRDENIFSLQQAVDLYDYYRNKIQECDDRIEKELSQFETKKEITEEDLATLSMKRKASNKNAPQFNLKAHLIRLSGVDLTAIPGIEAYTGLKIISEIGLDMNRWKSGKQFASWVGLCPGNKVSGGKQLSGKSKRTANRAAAALRMAASTLYNSKSALGAFLRRLKSRLGSPKAITATAHKLALIVFNMLKNGRNYFETGQDYYEQQYRKRLVRNLNTRAKELGFLLIEAPINSNG

SEQ ID NO: 91123 - protein, 355 aa, unidentified
MQKYNFSFKGQNIYVGIDVHLKTWHVTTLTESGCKYSFAQHADAKELFDRLNRKFPEAHLKSAYEAGFCGFSAHYALTDLGIENIVVHAADIPTTGKEKAIKTDAVDSEKIAWALKRGELKGIYVKDKRYMDDANLMRLRQRFIADLSRQKSRTKHLLYTQGVTYPERFRTSRSHWSRNFMKWLREEVELLSEQKLSLLLLCEQVENTRKAILKVTREIRRLSTTERYKENYDLLTSVPGFGMIVSMSMLTELDNDIMRFSNERRFVSMLGLIPTCHDSGEKKVSGEKINRGNKHLGPLIVEASWVAIQRDLELGAYYSNCCQSMKPHKAIIKVTRKLACRAYAVLKTKTRYELP

SEQ ID NO: 91124 - protein, 376 aa, unidentified
MLPPCQRKMLAKGTEDKEYAMSQKLNSAIAAIGIDIGKNSFHLVGQDRRGALVLRQKWSRGQVEARLANLPPCLIGMEACVGAHHLSRKLQALGHDARLMPAKYVRPYSKGEKNDYRDAEAIAEAVQRPTMKFVATKTADQLDLQALHRVRERLVGQRTGVINQIRAFLLERGIAVRQGLHFLRAELPSILAKRTDVLSPHMLRVIEDLAGDWRRLDERIENLSDEIAALARQDKGCERLMTVPGIGPIISSAIVAAIGSGDAFSKGRDFGAWLGLVPKQMSTGDRTILGSISRRGNRYLRWLFVQAAWVVLVKITPEGWERYGLRSWIEAAKQRLHRNVLAIALANKLARIAWAVLHKGRAFECVKTNATASQAA

SEQ ID NO: 91125 - protein, 432 aa, unidentified
MTNRLQVGIDFSQKGADFCLLFPDGRPLEMHQAFDNSRSGYSLAKQLLRDALDSYLFDGVDVSGEATGYYWLPFFLQLAADPDLEPHDLKLFLLNPRWVRWFKKCFAQDHKSDEKDPFYIAERTRTRRPDVAWSPNVEALALRFYTRLRFHLVQNLAREKCYFSAFLFLKASSYRRLKPFSDVFGVTSRLVLTQTPSLDELTALPVEDLALHLHELSGHHLSDPSTNARKLKRVTQQSFALADILALPVQRILDLTLQHIRFLEAQIEQVNAWIATELESHPAICQLATIPGVGPVFSSGIGAEIGDTQRFLQAPKWDKKRKRYRPRNLRDAEDAVAKIAGLWWPRFSSADFEAEDRRMAKSGNRYLRYYLIQAADKMRKYIPDYADFYARKYREASKHHHKRALVLTARKSVGLFVGLLHRNESYRSQEEQ

SEQ ID NO: 91126 - protein, 391 aa, unidentified
MGRAWIGVDIGKDFHWALAIDETGRELSSRRVENEQGDIERLIEQALGLGYELVWGVDMSHGPVALLVASLLAAGQEVVFVPGLMVNRCRGAFVGANKTDALDARVIAENARMRHDLATFGVKDDLLVSLRMLVERRKDLVTDRTRSVTRLRSVLITVFPGLERTLKIKNKGTLILLTHYQTPEAMRRAGEKRMAEWLLKRGVRGANKLARTALAAAKAQTIVLPGTDTAAALIARMATELLDLDARLATATKELESCFFSHPQARIITSLPGMGPSLGAEFLAAVGDIGRFASADRLAAYAGLAPVSRDSGKTQGRLVSTRAGNHSLKRVFFQAAFASLHEPRSRAYYDRKRSEGKRHNQAVLALARRKVDVLWAMLRDGTFFESCARAA

SEQ ID NO: 91127 - protein, 318 aa, unidentified
MPDSIVVGIDVAKRSFDAALGVAGSIKTFSNEDAGHDALVAELGGQCVELVVMEATGGLERDLACALQAAGFAVAVINPRQGREFAKAMGYLAKTDRIDAKALAELAQVLSRHPERERFVRALPSAEQQTLQALVARRRQLVTMQVAERQRLSTSHAAARSSIEAMIIAIRAQLDALEAELSAHIERHHGELAHQLGSVRGVGPATVASLIAEVPELGRLSRREISALIGVAPFNRDSGQMRGKRTIYGGRAQVRRGLYMCALSAIRFNAVIRAFYTRLVLAGKPKKVAIVACMRKLLTILNAMVRSGKSWDDSLHSA

SEQ ID NO: 91128 - protein, 430 aa, unidentified
MVPGTGETFTILAGKGVICMTLFVGIDVSAKDFKVRVLNSTGEEPAKRFKAENNLPGSQSLIAYLLPICRQHHVSRLVFGLESTSIYSWHLQMFLAEQDSLAAFAPQVYVFNPKVVANFKKAYVDLSKDDWTDAWVIADRLRFGRLPEHSQVDFRYLPLQRLTRFRCHLIQTITREKNYFLSNLFLKFCSLSQDGVFSNCLGASAEAVLLEFFSPEEIAASSLEDLIDFLMDKGKNHFRDPAKTALALKQAAGRAYRLKASLLEPVNLILATSLETIRTLELQVKKIDRAIENELSHFPSTLASMPGLGPVFVAGLIAEIGDIRRFPNEAALAKYAGLTWRTHQSGDFSAEDTPLTKTGNSYLRHYFVQGANSVRQFDPIFREFYARKVSESSKHAHRRSLVLTARKLVRVVDALLRSHQVYLPQGGRRA

SEQ ID NO: 91129 - protein, 521 aa, unidentified
MATKAPRRPGRRPHEIHKPNGSVHPRVQKVGPEHFGIVAVDCAKARSKWMFADFYGNVLIGPTELDHAKPAFQGAADQVRQACVTHQVLDLIVVVERTGRYHHVVRDAFSGFGFETRVVHPFATKQFRQPADPGNKTDDTDLSAIHRAAVNGFGLAEPAPDPTHDRLKLLARHRRDLVRKAVALRCKIREHLNVFMPGFERCFADPFEGDVAWTCAHRLGSPRAVREAGASGLERILRDAGVRFQRRTLDRVVAWAGRAPDPSEDAPVHQRIAIALEDDRRAKLREITTLESDLAELLARTPYLLLVSIPGINVVSAAEFAGEMGPIGHYASSRSITRRAGLVPSRYQSDQVDRKDGPLIRQSNRSLRRAILTIADNLMSCNDDFRGLAARWREAGKDPRHSHVKVAGRFCRIAYQMVAGGRVFRHPCCQRRDYVLSKLLKFQGEHVTPLVQAQATLASAVGQLPRDEYAAEAAPLAEELESACRKRGRGPCLIGELLPAVLARLGVDLVESTSSGEADPR

SEQ ID NO: 91130 - protein, 326 aa, unidentified
MKNFIIGIDVSKDTLDFCMLEKDSRRKLQQGVIANKEKEILTWLKNLDKENVVVALEHTGHYGALLSWLLEEQLFTYYLINPLDLQRSLGLQRGKSDVVDAYRIADYIITNHHKLSPFKLPCESLRKLKALMTARERYVKMSVQIQNSLKAEMILSEKVALKQLIKLEQKQLKSIKNTIQDLERQMMEIVKSSQDLSTTYTKISSVIGVGTITSIKCIIETDNFTRFTDARKFNCHCGLAPFPYQSGSSIKGRTKTHFLRDKTLKSILFKAAGSAIQHDPQLKKYYEQKLEKGKHKLTALNAVANKIVLRIFAVAKRNEPFVKLIA

SEQ ID NO: 91131 - protein, 424 aa, unidentified
MANTIKKRKEPIMKEKIYVGIDLAKGDSKVAVIDDSGEAIFKPFNITNSKEGIRKLLSKLSSYKTGQIVCGMEVSSNYWENMCSYLKEKDVAPILLNPYQVKKYRQAMGFKIKTDPIDAIAIAGLICGRKYDSLYISDDNMMELKELVRIKYSFQRRVKDLKKSTSSLLYLVFPEYNKIISYPFSKVSIEILSKYPTSCHMAKTSVSKLVKIFRRYQGCNFNLDKAKDLISATKDSFYSGKAFRSRGMTITMQLDEISSLSLKIKDIENEIMSILDPKDPKEGSSDYDILNSIKGVGIGTIATFKGYVGDVSRFSSSDKLISFIGFYPNIFESGKYRKKNPTIQKAGPKELRYMLYLASVACIKHNSQLRKYYHDNVSTGMPAKKAIIKVAVKLARMMYSMLKHKTEYESSRVFMESLPLKKAV

SEQ ID NO: 91132 - protein, 350 aa, unidentified
MLIIGCDYHPAFQQIAFVDTDTGELQERRLQHREEAEKFYRELAVQGMKVRVGMEASGHARWFERQLAELNFELWIGDAAEIRTKRVRKQKTDRQDAQLILQLMLEDRFPEIWVPSGENRDLRQLLWHRHRLVQARTRMMNQLQAVALNEGLRCRKKLFREAGRKQLEAFRLAPWASRRRRDLLELLDRLTPTIAELTQAIEQEVEKCPAARRLQTHPGVGPLTALAFVLIIGKADRFQCGKQIASYLGLVPLEKSSGNQRRLGHITKQGSSLLRFLLVEAAQVTARSLPGWRSKYYHLSMRRGRKIAKVAMARKLAVRLYWMMRKQWDYGQLTKFGSYAGKPENRDGVK

SEQ ID NO: 91133 - protein, 373 aa, unidentified
MREYSGKFTGITIGLDLGDKYGQYYTLDESGDNIDTGRVTMRVSGLEKRFGQMERSRIVMESGTHSGWVSRLLESLGHEVIVANARKLRLISENENKDDAVDAELLARLGRVDPKLLYPIQHRGAAVQADLALLRAREALVKVRGQLINHMRGAVKSLGGRLPQCSTASFHRKAEVEIPAELEAALKPLLEILEQISGQIRVYEQEVERLCREVYPETELLRQVGGVGALTSLCYVLTLEDPHRFARSRSVGGFLGLRPGKDKSGQQDPELRITKTGNPQLRRLLVQSAQQILGPFGADCELRQWGLKLAGRGRKNAKKRAVVAVARKLAVLLHRLWINGEVYDPFYQAQQQRAKAGSPSLTAAPRATVPALI

SEQ ID NO: 91134 - protein, 329 aa, unidentified
MSKNTIKTMQTNPAVIYAGVDVAKATLQLHLQGQQSEFSNTLKGLRELCAKLQEVPNVHVICEATGGYERALVKLLHQEQIPVSVTNPARVRAAAQAQGQRAKTDRIDARVLTDYGQRYQPKATPPTSATQDQLVAQTQWLKQLIHGRALAKTQAEHHQDPFVRRQHAKLMTHLDSQIEAVEKQIEALLEQDAALQQRVNCLDEIQGVGPRTAWMVLAHMPELGQLNHHEVAALAGLAPWTRESGTMKGMRCIGGGRPEVRLALYMAALSAARCNPVLRTLYKRLRAKGKLSKVALTAVMRRLLTYMNQRIKALLSETATAQTEVLQKA

SEQ ID NO: 91135 - protein, 347 aa, unidentified
MLAEDIAHVIGVDTHKASHTAAIVDRLGGVLASTTIATDAFGQRRLLAWVEARSERPRVWAIEGTGSFGAGLTTFLLEQDESVVEIDRPARPARRNGAKSDELDAVRAAREALARPHLAQPRRRGTREAIRVLLRTRSGAVRARSQAISHLKALVVTAPEPLRKSLEPLATDDLLARGARLRTAIGHSPEHRATVVALRSTARRALALEAEAADLESRLEELLQDLAPRLLEEPGIGVISAAELICAWSHPGRIRSESAFAALAGAAPIPASSGEVVRYRLNRGGDRQLNRALHTIVLSRLAHHGATKAYAERRTAEGKTAREIKRCLKRYLARGLYRLLEHSMHDA

SEQ ID NO: 91136 - protein, 439 aa, unidentified
MPSSEAHGCYPRAAGIDIGCRFHVVAEPSELDDEPVRKFTSFTKDLKLLAEWLLLIGVTTVAMESTGIYWVPLYEILVAKGIEVYLVNARHAKNVPGRKTDICDAQWLQQLHSYGLIRASFQPDQRIAELRTYFRQRDLLIRYRSSHQQHMQKALMQMNLQLHHVVKDITGLTGRRIIDAILSGERDPQKLASLRDQRCKESQDTIAAALQGNYQEDHLFELKVAVDLFDSYTAKIKECELAGQSLLTQLAGDQFVAPDKQAGDWRIRGNGFSFNPKALIESISGHNLLSLPGLGPTTVITLISECGLDMTRWPSEKHFVSWLGLSPQNKISGGKVLSSRTRQGATRAGSAFWMAAVPLSRTNTALGAFQRRLAARIGKSKALIATARKIAILYYKTLRYGMSFQDPGASSYQQATRERQLQGLQRRAKAMGYQLVATS

SEQ ID NO: 91137 - protein, 350 aa, unidentified
MIIIGVDFHPGFQQIALVDSESGEFQEKRLAHREEAESFYRGLASAGQKVRVGMEASGYARWFERLLSELQIELWIGDATEIGRKRARKQKTDREDAEHILQLMLKDDFPKIWVASWENRDLRQLLWHRHRLVQMRTRIMNQLQAVALNEGLSCKKRLWRGSGREQLEGFQLGPWASRRRHDLLELLDRLNPTIAELSQAIEQEAEKCPEAQRLMSHPGVGALTALAFVLILGQADRFECGKQVASYLGLVPLEKSSGKRRRLGHITKQGNSVLRFLLVEAAQATTRKNAEWRSKYFHLALRRGRNIAKVAMARRLAIRLYWMWREGRSYQQTKSFGSHAGQPGNPYGVQ

SEQ ID NO: 91138 - protein, 427 aa, unidentified
MEEITEEPVQVVARVCAIDIGKAGLVACVRVPHVSRPDRRVQEVREYATVTPALLALADWLRVEQVELVAMEATSDYWKPVFYLLEAEGFTCWLLNAKHVKNVPGRPKTDRLDAVWLAKVVERGMCRPSLVHPKPVRQLRDVTRYRRSLVREQTRERQRLEKTLEDAQIKLDSVISDLHGVSGRQMLQAMVDGQRDPKVLAELARTSMRRKIPQLREALTGHFNDHHAFICATMLRRIDALAADIAELDVRIEQMIAPFAQAVDKLDEITGVGVRSAQEIVAELGVDMSVFPTAAHLVSWAKFSPIDAKSAGRKKGNSTGKGNPWLAGALGEVVAGLARTDTFLGQRYRRLVRRRGKKRAIVAVGNSVLTIVWHLLSDPNARYQDLGPGYYESRISKQRRQRDLIRQLEQLTGQKVNLQPQPELPAA

SEQ ID NO: 91139 - protein, 319 aa, unidentified
MTPTLVFVGLDVAKATLDVALRPSGEHWSVPNDEAGAGALVERLRPLHPTLVVCEATGGFERAAIAMLAAAGFPVVVANPRQVRDFARATGRLAKTDRLDADTLALFAERVRPTPRPLADEAAQLLDALLTRRRQLLEMLVAEKNRLGFAPRPLHHGIQQHIRWLERQLDDVTKDLADQIERSPVWRTKDDLLQSVPGVGPIVSAVLLAELPELGALSHKQLATLAGVAPLARDSGMLRGKRLVWGGRAGVRTALYLAALCGRRWNPQLRVFYERLVAAGKPKKVALIACARKLLTILNAMLRDSTRWVAPAPALQHSC

SEQ ID NO: 91140 - protein, 408 aa, unidentified
MEAIVERCCGLDVHQATVVACLLVGSAERRPRKVTRTWGTSTSELEELRAWLLAEGCTHVGMESTGVYWVPVYNVLEDCFELVVGNAAHIKNVPGRKTDVKDAEWIADLVRHGLIRKSFVPPKWQRALRDLVRYRRKLVESETAERNRLLRLLETCNIKLSSVASDVFGVSGRAMLRALIEGTATPERMAKLARGSLRRKTDRLTLALRGQLEEHHRFLLRLQLERVERIEADIAVVMARIDQALAPYLEQLERLTQIPGVDRIGAATIIAELGIDMSVFPTARHAAAWAGVSPGNNQSAGKRAGNAKRRGNVHLMTALVQAAFGASRKKGSYLKERFWRLKARRGERRAAMAVAHSILVAAYEMLRRHAQYRDLGAAYLDHIARAVTEKRLVRRLEALGYRVTLQTA

SEQ ID NO: 91141 - protein, 390 aa, unidentified
MQPTQVQDFTRDEEVLAVSLELASKSWKVGLDDGKRNSPAVHGVDHATPEGRLEEAIAVIEKRKQKWGLAPGVRVVVMYEAGQDGFWIQRALSERGYEALVVDAASIPVERKARRAKTDRLDAIRLVVTLRAWLRGERDRMKVVRVPPVEAEGQRHLVRDRGTLQKEIGQHRDRMRKLLRTVGCWGSIEGDLKGRLERGEVTGYDGNALPAWLQERLVRECVRLKLVEEQLAKLEKTLPEQLPEAVRQRMVQLMQLKAVGPVGAQRLMLELFWRQFANRREVGACVGLVPQPYDSGESRVDQGISKAGNRRVRALLIEMAWLWLRWQPRSELAQWFAQRTRGTGSNKRSKRMAIVAVARRLVILLWRYLKNGVLPEGVQLKPMKVTLKAA

SEQ ID NO: 91142 - protein, 419 aa, unidentified
MSKSNIARQLAQVQPGTLHAGVDLALENNVVVVINEKAERLDHFSFPQDRGGYDYFLRRLEGLRQKYQASEVVAAMEPSNYFWKLLARELEEKKITYHLVNSYTVKKHREGDQLDRSKDDRRDAGQIAELSRNGKYTGTHLQKGAYEDLRLYATLYDQSVQAIRREKQVLWGLVGQVFPELSQVFKNLVGEMGQALLITGASAATIRQLSVEDFIAQIRAAYSGKRLFVSKLHRVHQLAVTSIGLTEGLGAFQLAIQVHLAELQTFQKQLKRVTTAMTACLATLPETPYLLSVKSMQAVSTAIFLAEVGDPKRYQSAAQWVKLAGIQPAPNISGKKQRSQTPMSRQGRARLRTMLYFTCLRMVRFDKHFAQIYAHLQRRQKNPLTKMQALGVLMNKLLHILWALIHNQTFYNPSFGQSI

SEQ ID NO: 91143 - protein, 348 aa, unidentified
MRFYTKQHKFYCGIDLHARTMYLCILDQEGKILLHRDIKTNPDIFLKTIAPYREDIVVAVECIFTWYWLADLCSDEDIPFVLGHALYMKAIHGGKAKNDKIDAYKIAALLRGGMMPMAYVYPSDMRSTRDLLRRRTHLARKRAELIAHIQNTNHQYNFADMGRIARKCDRIKIGIADRFTDPSVQKSIELDIALIEHYDKLLNHLEHELSLIAKVHDADSYFRLRSIPGIGRILGLTILYEIHDISRFPSVQDFVSYCRLVKSAKESAGKIIGSSGKKIGNAHLKWAFSEAAVLFLRRNPEAVKYRAKLERKHGKAKSLTILAHKLARAVYNILKKKEVFHPKVFFAK

SEQ ID NO: 91144 - protein, 408 aa, unidentified
MNAVGIDVSKGKSMVAALRPMGEVALLPQEFLHTEVGLEQMAYAIIALGEDTRVIMEATGRYHEPVAAALHEYGIYVCVLNPLFIKQSGGGSIRKVKTDKADAMKIAKYGLDNWVDLREYTPMDTVRQQLKLCSRQYNLYMKTVVSLQNNLISLTDKTFPGVNELFSSPERADGHQKWVDFVMTFWHCDCICRVSEKAFTERYQKWCKRKGYHYSAEKALDIYAGSCGHFTTLPKNDNTKLLITTAAQQLLAGKMTLAALHAEMARLARQLPEYDTVHAMYGVGEITAAQLMAEIGDVRRFPRRSSIVGFAGVDPAVNQSGKHAAQSTPTTKRGSPHLRKTLYQIVCTYLRKAPEDEPVYQFLDKKRAEGKPYFVYMTAAQNKFLRIYYARVKECLEDFDAQQNSAQS

SEQ ID NO: 91145 - protein, 346 aa, unidentified
MNQIIRIGMDTSKHFFQLHGVDAAERPKLRRKLRRNEVLAFFAKQSPTIIGMEACGAGHYWARELGKLGHEVKLIAPQHVKAYVKRNKNDGRDAEGLCEAMSRPTMQFVPVKTEEQQAALMLAGMRERLVTQRTRLGNAIRGYAAEFGLIAAKGNDKIEPLLADIAADATLPVLARELFAMHGKEYAQLQAELKNIEARLMAWHRADACSRRLAQIPGIGPIGATALVMKAPDPRLFPSGRHFAAWIGLTPKDHSTAGKTRLGKITRAGDEMLRSVLVAGATAVIQQAKHGRGRPSPWLLALLARKPPKLAAVALANKIARIAWRLLVTGESYHAGCKPIAAANAA

SEQ ID NO: 91146 - protein, 371 aa, unidentified
MLGSPALMNKCHLNTELSSHEGTRCQFNGSTGVIKLGIDAHQDFYVVVMQEGGANPKPPQRFAKQAFLHWAAKLRSQAKEVHAVYEACGFGFTLQRQLSALGINCYVVCPQKLDERNKRVKTDGLDAKALCLKLDRFVEGNQDALALVRVPIEKEERLRAIHRQREQLVKARKQLEAQGRSLMVNHGIEPVQQWWKSRAFALLQVPEGMKELLQNSQPILLGLEEKVRALTVQLQSAAALNQPCELGKMTSVVIDREIGDWRRFNNRRQVGSYTGLCPAEYSSGNTRLQGCVTKHGNPRLRAALVELAWRLVRFQPNYKPILKWRRILAKGALATGAARKKAIVAVARQLAIDLWRIRTGRCTQEQLGLTK

SEQ ID NO: 91147 - protein, 312 aa, unidentified
MAKLVSKITLGVDVSKVKLDICNWETQGLLSLSNESAQIRSWLKGLHGPVQIAIESTSDYHLALVDEAQALGYEVFLVNGYQLSHYRESLNVRNKTDPKDAWLLARYLAHEGSQLRLHPPRCRKAQELWNLVKRRAKVVEVRKEMQQSMANVSVSTKAFFTCLKQLLQYFDKRIKALIQELGWWDDYQRCQSIPGIGPLNAAALITAYHRGAFASSNAFVAFIGFDVRLRESGKYKGKRKLTKRGEAELRRLLYCAAKPAQSYAPFDQYLQKQLDKGLPKIAAKVCLARKLARIAFSLIEKQQSFKKLEIAY

SEQ ID NO: 91148 - protein, 367 aa, unidentified
MKTNGEKIQTQFGVTTPELDRLRDLLVEAGVSRVAMESTSVYWKPLWRILSMDFHIVLVNPYLIKQLPGRKTDVRDAEWIATLLAKELVRESFVPDETQSALRQYERRLHRLNRQIVHAESQMDNQMQACNIRLSNHVSDIGGKSYRKVVQALIEGETRPEELLKLIHGRTVNRCGSDTLIAALTGFVTGVDRDMLRFYMEECLLYERQREECLKSMEDICQEHYKEQKELLETIPGVSAQSAMCVLSEAGHDMATFPSASALVGWAGLRPRNQMSAGKIKGRKITHGNRFLRIVLVQCAWAAARCQGTRFALKYEGLKRRMPAQKALVAIARKLLVVIWNVLAKREKYRRNLYETASEDERKGKRH

SEQ ID NO: 91149 - protein, 312 aa, unidentified
MTDITIGADISKDHIDLQSLPDGGTLKVANDRKGFAAIVRWIGTKGVERIVYEPTGAYHKAFERFMMVQGLPLSKVNPRLARRFAEATGRLAKTDRIDAGLLAHYGALLAPRILQANTQIHNDLKELHVARLALIKDRTAAKNRAKNLSNLLLKRHNADRLRQIQRQMTAVDEAIMALIGADVSLKARFDILVSIPGVSQITAFTLLIEMPELGELDEKAAAALCGLAPMSRQSGRWTGRAFIAGGRAIVRHALYMPALVACRFNPDFKTKYEDLTKAGKPPKVAITAVMRKLIVLANALLRQNRKGQPKPA

SEQ ID NO: 91150 - protein, 352 aa, unidentified
MRTSQKPAGIITTIGIDLGKNTFHLVGFDQRGVIILQQKVSRAQLERRLANIPGCLIGMEACSGSHHIGRQLAALGHDVRLIPAQYVKPFLKGHKNDYRDAEAIAEAVQRPTMHFVAIKTPEQMDLLALHRVRSRLVSQRTGVTNQIRGFLIERGITVRQGVAPLRKALPDILSSQTGPLSPRMVSLIVDLVQDWRRLDERIAAVSAEIEALAQQDDSCQRLMTVPGIGPIVSSAVVAAIGNGAGFQQGRDFGAWLGLVPKQESTGDRTILGKISKRGNKYLRTLFVQAAHVVLERRPRAAMRGLWPWIEQASKRLHRNMLAIALANKLARIAWAVLARGRAYQPRIAANAA

SEQ ID NO: 91151 - protein, 366 aa, unidentified
MKKTSTVRVNGNMIFKGHKLTIGVDLGDRWSNYCVLDEAGEVLLEQKLATTPEAVKQTFERMPRSLVALETGTHSPWLSRLLKELGHEVLVAHAQKVELISKSNRKDDRHDARTLARLARIDPELLGPVRHRSAKAQIHLTVIRARAELVRARTALVNATRGLAKSYGERLRKCGTEQVNRELTAELSAELREVLEPLLKEIESLNERIKEYDARMEKIARESYPQVALLKQVKGVGTQIALTYVLTLDDPYRFAKSREVGCFLGLKPGRRDSGESQPQMRISKEGDRYLRTMLVQGAHYILGPFGEDSDLRRWGLRLAERGGKNAKKRAVVAVARKLAVLLHRLWVSGEVYEPLRNSHKAMRAAA

SEQ ID NO: 91152 - protein, 421 aa, unidentified
MPPVVPDDFAAFIGLDWAAAQHDVGLQAAGSAQRESVMLEHPPETIDAWGSRLGTQFKGQALAICLERNKGPRVSALRTYDLLLLLPIPPLTLARSREACTPSRATDAPTDAALPLELRLTHRDKRRPLTPPSPSMRAREPLVAHRRCVVHDTGRLTTRLPSALQNSCPQVLPWFQDTDTVLFCDFLQRWPTLTAAQRARRSTLATCFHDHHGRSADVIATRLRAITAAMPLTTDEGVIAPHALLVQTLVSQLRVTLHAIAAFDTAIAQRAQSHPACALFPALPGAGPVLAPRLLVAFGAHRERSASATAFQQSAGVAPVPERSGKKSWVHWRRQCPTFLRHTCVEWAAEAIRHAFWARGYDQQQRDKGTAQQAAVRALAFQWMRMLSRGWQERSPYDESPSLQALHRRGSSLIHNLAKVS

SEQ ID NO: 91153 - protein, 361 aa, unidentified
MRIIGCDLHARQQTLAMLDTETGEMVNLTLMHEGNNVREFYSKLAHPVLVGIEATGSMHWFLNLMEELGIECRVGHPATIRAAEPRKQKHDRRDAELILKLLAENRFPAIWLPTKELLDLRALVLHRHQWVRIRTRIQNALQAIALANGLRRGPGLWSYDGQAKIAFLPLMPHASYRRSALQALYRKMDEEIENLTQQVAEQAEQRSGARRLMTHPGVGPVTALATDVFLGDPKRFLDGKALGSYVGLIPREYSSGERQRFGGVTKQGSPLLRFLWCEAGTHAVRRDPELKRFYRRKLVQKGLGKARVAVARKLGIRLWIMLRDEIDYEEFCRRGQKQQSGAACAGMLDVAYGANSHRPVD

SEQ ID NO: 91154 - protein, 322 aa, unidentified
MAMLSFGGIDVSKDRLDVMVLPEEQCSSVSNDATGWDKLIEQLRGSSIAAIGIEASGGYERGVMRALLAADLPVRQVNPFKLRQFARASGVLAKNDPLDARMIASFVAIMPTRPAQRPAPAAERLTEMLAVRRQLSAEKVAAENASRLLEDAMLRRLSRRRITRLAADIDLLDKHLVEIVGTDAALAHRYQLLTSMPGVGAVLACTLIALLPELGRMNRKQVAALVGVAPYAFESGTLKGRRCIWGGRAPVRQVLYMAAMSASNWNPAFKTFHDRLKAAGKLPKVAIVAVMRKMITTLNAMVRDDVIWADRLTGRHSVPTAR

SEQ ID NO: 91155 - protein, 344 aa, unidentified
MTYYVGLDVALRSVSACVIDDKGEIIKEAKLDSEVEPIVAWLASVRSEIEIVGLEAGTLTQYLTYGFQAAGYPIVCMEARGVHAALQAMRNKTDKNDARGIAQILRTGWYRSVHVKSIESHRIRALLSSRKAVLNKCIDLENEVRGLFKIFGIKLPPKLKHGAFDGAVRSIIEADPALSLALLPLLDARLVLYRTFLVLDLRARKMAQQDEVCRRLMTTPGIGAISSLTFKAAVDDPTRFKRSRTVAAHFGLTPRRFQSGEMDNMGHISKAGDRAVRIVLYAAANALLTRTTGYSSLKAWGMGLMKTKGRKRALVAVSRKLAVILHRMWIDGNDFQWGTEGGQS

SEQ ID NO: 91156 - protein, 346 aa, unidentified
MTVKCIAGIDLHSNNLFCAIVDLNGKRVFEKRLPCDLASVLQALKPFQKRLEKIVVESTYNWYWLVDGLQDHGYTVVLANPAAMQQYNGLKHADDKSDGFFLAEMARLNILPTGHICDRAVRPVRDLLRRRMGLVNKRTSLMLSLKSLHTRMTGRDLSTGRIKALEPQDGEKLFEHPADQLITRLDLQLVEQLGRSIQEIETRILAEVKRMPNYQVLQTMPGVGKILGLTITLETVDPRRFASPGDYASYCRCVDSRRLSNGKKKGENNSKCGNKYLAWAFVEAAQLARRHDLACRKFHDRKSAQVNGMVATKALACKLAKAAWHMMSGNTPYDSGRIFPQVKMNK

SEQ ID NO: 91157 - protein, 333 aa, unidentified
MYYSGIDLHSDNCYITTIDDSGAVVKRQRIENNNDHVLAYFDSLPGPHQAVVESTTGWYWLNDLLQDNDIELILAHAKYLKAISYAKVKTDKVDSQTLALLLRQGLIPRAHKISRELRGLRDTMRIRLRLVQQRTACLLRLYSIHAKFNGNVPDPYRFQIAVLEHTRDTFSDQILALEKSLHPMLLPNDDIQRLLYIPGIGKLSAFTIYLEIDGIERFASDKHFGSYCRLVPAADNSNRSVHHRSSKDGNKYLKIAFSDAAVHAVQYYPEYKRLFQKLARRANEPTAYAVIAKELAKIVYYVLKNKTPYKGLKGQPISRQKSQQWPRLASPIS

SEQ ID NO: 91158 - protein, 355 aa, unidentified
MDRTKYIGMDVHQASISIAVRDASGKLVMESLIETKAATILEFLQGLKGTLWVTFEEGTSAAWLYDLLKPHVVKVIVCDPRKNALLKTGNKNDRVDARKLSHLLHAGLLTPVYHGESGVRTLRELARSYLTLTKDLTRVMNRLKALYRSWAIPCVGEKVYSPRHRSAWLEQLSEAGVRRRAEQLYQQLDILLQIRRDARRELLRESRKHPAHELLRQIPQLGPIRVALLIALVQTPHRFRTKRQLWAYCGLALQTRSSGEYRFTAGQLQHSNRLPALRGLNTNHNHDLKNVFKSAAMHVSTSPDALGDFYRSLLAKGMKPAMARLTLARKMAAIVLTVRKKGARFDPGELKRQAA

SEQ ID NO: 91159 - protein, 375 aa, unidentified
MTRMPERLPASHPTTTPATSPVVIAGVDTHKDLHVAAVIDTGERVLATKSFSTTRAGYRALIRWVRSFGDVARVGVEGTGSYGAGLTRHLVEAGFDVLEVDRPDRSERRRKGKDDDLDAISAARAALHGRRTSVPKGKDGAVESLRVLRVTRQTAVRARRNALQLLRMSIVSAPEELRDSVRNLTRMQLIRTCAAWRPDTTDAADPVTATRIALKSLARRMLELGDEIAMLDDLIAPLVTELAPQLLERVGIGIEVAGQMLVTAGDNRARLRSEAGFAMLCGVAPLPASSGMTQRHRLNRGGDRQANSALHLAVISRMRLDPRTQAYVAKKTAEGHSKMEIIRCLKRYLVREIYYLLNPGQPNAVTEPRNPQIAA

SEQ ID NO: 91160 - protein, 342 aa, unidentified
MGSVLRKRRSRHVMSAFVCGLDVHKDSTYATILSPEGKIVNQMKMNNEKVLSYLSHFNVGKVAMEASTPVAALYRQLAGKGFDVVVSHPKKTRYIAEAKIKSDRVDSRAIAELARLDALPLAYMPDREISVLREQVRRRAFLVRQRVKLKVKIKSVLTYEGVKWPSEYGLFTRKGVEWLHLLNLDPIESYLRIMRAFDDEIRLFSRQLRGLAKEDEDVKLLMTIPGIGYYSALLVKSEIGDVNRFPFGDRLCSYAGLVPSTRASGGVVRHGGVTKEGSRWLRWVMVEAAQAHVHKYDTAITRAYHRIAERRGRRAATVAAAHKLLLCCYSVLKNKREYYDQT

SEQ ID NO: 91161 - protein, 341 aa, unidentified
MEKFIRTAIDLGKNYFQVHGLESEGGRSISRKVKRSKMHEVYSQIEPCRVGMEACGSAHYWARQLTAMGHEVVLIPPAYIKPYVKRGKNDVVDAAAICEAMSRPDMRFVPIKSADQQAVLMLHKTRELLVKQRTMAVNALRGHLAEFGIVAAKGIGRVDELLALAKADAALPHIAGAAVACMARHLEGLDLSIETVDEEIAKAHRQNPISRLLDEIPGIGTLIASATAASVPDPGVFKSGRDFAAWLGLTPRQNSSGGKEKLGAITKQGNRYIRKMLVTGATSVLRVAGKRKGALADWINALRARKPERLVAVALANKLARICWAIMTTGEGFRTDTYVKA

SEQ ID NO: 91162 - protein, 363 aa, unidentified
MRFYREQRRFYCGIDLHASKMYVCVLDDQGNVVLHRNMRAEPEPLKRALAPYRASLVVGAECMFSWYWLADWCRAEGIEFVLGHALYMKAIHGGKAKNDRIDSEKIARLLRGGTFPLAHVYPKEMRGTRDLLRRRTLLVRRRAELLAHVQNTHTQYNVPTTSGKGRDRVREGIAMSAFEDPSVQVMLDADIEVIKQLDETIARLETHVLKHAKVHDPARLHMLQTINGVGKVLSLVMLYEIRDVNRFENIGQFVSYARLVSCAKESAGKKQGSGGRKIGNAHLKWAFSEAAALMIRSSPEAKAFMEKMTRQRGKARAVALVAAKIGRAVYWMMKRKQPFDARKLWKSSLPKGVRTTEGAAMTG

SEQ ID NO: 91163 - protein, 415 aa, unidentified
MKVVFPTCCGVDVHKTFLVATIITTPADSLQPNYQKKRFSTFNSDLNRCADWLLEHNCLDVCMESTGKYWVPVFNILEKRGIRVVIANPKWVKAVKGNKDDTKDSKWIGDLFRIGLVKSSFIPDLNIRILREFTRYRYKLVSMKSSEKNRFQNAFTVCNVALDSVVSDMFGKSATAITDYLTSDESFDPEHCVSLLQRSLKKKAEQVLESIEGFSIADEQKARIKIIREHHDFIEEMIATVDTRVNEMVAKYEGNINLLCTIPGIDRRSAITIISEIGTDMGQFGSSKRLCCWAGLTPGNNESAGKKKSVRISRAGVYLKPALVQVAHAAVKDNDHPYYKLKYERIAKRRGKKRAIIAIARMILTAVYSMFCTGEVWNPVDLYKVDMPGCLKEQQLAKAIKQATRFLEKQGLSVA

SEQ ID NO: 91164 - protein, 375 aa, unidentified
MKEKLRFLGLDVHAETIAVAVSEPEGEVRSLGTIPNRAESIRKLIKKLGPAAKLRACYEAGPTGYVVYWQLAELGVECEVVAPTLVPVKAGDRVKTDRRDAEKLARCYRSGDLTAVWVPDEGSEALRDLVRAREAAKQDQTRARHRLSKFLLRSGQRPPTGVRPWTRPYLIWVAQLRFTQIAQEFTRQDYLHEVEHMRERVARLEQAIMEAVKLATPALQQVINDLQALRGIADISAVTIASELGQVSRFESARQLMGYCGVVPSEDSSGKRTRRGGITKTGNAHLRRIVVEAAWSYRRPPGIWYGLRRRQETISEEAKEIAWKAQHRLHKRYIRLGAAGKDQRKIVTAVARELLGFIWAIGTRAETGVRPQVAA

SEQ ID NO: 91165 - protein, 411 aa, unidentified
MDVIYERCCGLDIHKRTVVACLIVPEPGGPPRKEVRTFGTMTEDILALGDWLAAAGCRHVAMESTGVPWKPLYNLLEGAFELRLANARHIKAVPGRKTDVRDCEWIADLLRHGLLPASFVPDRPQRELRELTRYRTTLVRERTAEVNRLQKTLEGANIKLAAVASDVVGVSGRQMLAALVAGTTDAAALAHLARGRLREKLPHLARALTGRFGPHQRFLVAAQLAHLDFLDDAVARVSAEIAARLRPCAAVLERLDTIPGVGRRTAEVLVAELGTDMRRFRTARHLASWAGMCPGNHESAGKRKSGRTRKGSPWLRVALTEAAHAAARTKRDTYLKAQYRRLAARRGKQRAIVAVGHTLLVIVYHLLTDGTPYRDLGGRYFDDRDRRALERRLVHRLQGLGYRVSLEPTAA

SEQ ID NO: 91166 - protein, 328 aa, unidentified
MNYIGMDIHKQFTVAVVKDEQGNKLNEDKFTNSEDNFSKFMQCYEPEETKIVIESTCVWEYIYEILEAKKYEVKLANPLRTRAIAEARIKTDSVDASPLADLLRANLVAESYIPPKDVRRLREITRERRTFVKQTTQIKNRIHAILIKRGIKIPTATLCKSTLLWLKEKFKDDTSMLHYVNLLEYHSAELKSADDSIKELAEKNSDVKLLMTIPGIGSTRYLDIIGEISRFPTADKLCSYAGLVPSIKQSGNTLRIGRLVKQASKSLKGTLIEASWNIVRTKESNPLQEFYKKLAKKKGKQKAICATARKLCCVMYAMLKNKEEFRHS

SEQ ID NO: 91167 - protein, 405 aa, unidentified
MKIWCGIDWAEHHHDIAVVDEAGTLLVKRRIGDDLDGFGQLIGVLTELAGAQHLEVPVAMETANGLLAASLLDAGYSLFAINPLAVSRYRDRYSPSRAKSDAADAYVLANILRTDPAAHRRVPADSEQAKAIRVLARAQQDAVWERQQAQAKLRSLLREYYPAFLAAFPDLADRDARAALAIAPSPAAAARLRRPSLRAALARNGRQRNLDHQVERILTELRVEHMRQPARVEAAMSAQALAHLRSLDAAVANAAALEASTAAEFATHDDAAIITSMPGLGPVLAARVLAELGDDHSRFADAKSLKAFAGTAPVTRASGLKRSVTRRVVRNKRLGQAGHLWAFSLLTSSPGARAHYDRRRAAGDSHNAAARNLANRYFGVLHHCLQNRVPYDEAKANPTPRAVAA

SEQ ID NO: 91168 - protein, 346 aa, unidentified
MKNHSVESQLAVLGIDLAKQSFQLHGVDRNGQTVLKKKLSRKDLVQFVAQLPVCTIGIEACGGANHWVRLFERFGHTVRMMAPQFVKPFVKSNKNDAADAEAICEAVQRPNMRFVPAKSIEQQDLQSLHRIRSQAVARRTAQANQIRGLLIEYGVILPKGISHIRKSIPSILEDAENELTVIFRSLLAELYDEMVHLDARIEGFEVQLKTLCDQNKDCQRLLTIPGVGLLSATAMVAAIGDISVFKSGRELAAWIGLVPKQHSTGGKPTLMGISKRGDTYLRTLLIHGGRTVVRVADKRQDQRSQWITRLDARRGKNITAVAVANKNARVAWALLTSQSFYQDKAA

SEQ ID NO: 91169 - protein, 388 aa, unidentified
MSKPFDLSKSLAALDQDSTLIVVIEMSQSSWLVAARAPGLARDPLKKLAPEPEQLFKLIDRWREESRKAGRVVRRVCVAFEAGRDGFWLARLLRQHDIEAHVIHPTSIPVKRDHRRAKTDRLDTELLMRAFLGWLRGEADHCSMAAIQTLAEEDAKRPTRERESRVNARSRLVNRMKGALARLGIRGFNPKLRKAAEKLEELRTGAGEPLPPNTLAELRRDMAQLRFVADQIKQIEKAREARLEKAPREGAHPMVLMLASIKGVGLETAEMLVAEVLSRKLRDRRAVARYGGLTGSPDESGSRSREKGLARSGNARVRRGMIQLAWRFLMFQKESALAKWFEARTANGPRGVRKTMIVALARKLLIDLWRFVEDGTVLVGVELFDSRA

SEQ ID NO: 91170 - protein, 412 aa, unidentified
MTAINQFAAHVGLDWADKKHDVCVQFKNGERIFQVVEHTPEALDIWLNELHQKVKGRIAIALELKKGPVVYALQKYPFVTVFPVHALSLARYRQTFWPSGAKDDPQDTELALELMLRYPQKIKAIEPDNGDIRLLQQLVEQRRLLVEDKRRFVNRIINTLKQYYPQPLEWFSHRGSLLLCELIIRWPSLQQLKRARRDTIRNFLNAKGGRAMALTEERVASIDNAIPLTTDPSVIEANALMATALATQIKVVSEIIKTYDERIETLFDTLPDAGLFKSLPGMGPCMGPRMLAALGDNRDRFNSAEEIQNYAGIAPVTERSGQKSWVHWRWQCAKFVRQTFVEWAAKTVNSSYWARLYYQGLREKGKSHQSAIRALAFKWIRIIYRCWKTRTRYDEVKYLLALEARHSPLLKP

SEQ ID NO: 91171 - protein, 345 aa, unidentified
MNYLGLDVHKKTISYCLRQADGTIVREGMIEATREALSALLESMPPSWSAGLEATMFSAWIYDHIRAQGGTVKVAHSTMLKAIAAGKRKNDRLDARKIADLLRCDYFPECHMAAPEIRNRRRVLRYRNLLVRQAVRMKTKVSGLLMETGIPYNKAKLHSKKYFYQLLEERRTEMPESLPELLQLSRASIETLTRMDYKLLSALEHDRLLAARVKRLMTIPGVGTVVALTWALEIGDVHRFASLKKIVSYCGLCGAERSSAGKQRRTPISKQRNHHLQTVLVEAAKLAPRWHSELALVHEREKQGGNRNRATLAVARKLAAYLLAVDRGEREFQKTASPHELSRVA

SEQ ID NO: 91172 - protein, 319 aa, unidentified
MDVECFVGIDVSKARLDGCVRRRQSFQQDNTAAGIDRVAALLGNYPVTLVVVEATGGLEVPLVRALQKARIPVAVVNPRQTRDFAKATGALAKTDAIDAEVLAHFAEALRPEPRQLTNDQTLLLDAVLTRRRQLIDMRTMEQNRLSSCADAKVRRDIQAHLDWLNQHIDDADQAMCDAVRDNPAWQAQDRLQQSVPGIGKVVSRTLLASFPELGQASSKKLAALAGLAPFAHDSGKHRGKRHIFGGRGEVRAKLFMAAMSVSRSEGPLAEFYQRLRAAGKEFKVAIVALARKLLTVVNAVVRSGIPYQTAYHSAQLCEA

SEQ ID NO: 91173 - protein, 344 aa, unidentified
MQTTEAQKPLYCGADLHGKNVFLTVCDDEGQRVMQRRVRADLEAVNRALAPYWERVQQVAVESTYNWYWFVDGLRSQGRDVRLAHPAKMAQYSGLKVGNDSSDAGWIAEQLRLGILPESYVYPAEVRPVRDALRRRMLIMRQRTQTLLSLESLFARQGLACPGADELKGWTGAEVKALKLDAFTDLQVESLLGVLRQQDHVVRQIEQRVRQAVKPKAEYARIEQVPGIGPVLGMVVVLESGEFGRFASAGDYATYCRTVQSERLSNGKKKGENNRKNGNRYLAWAFAEAAVFAIRFYPRIGAWYERKKRRRNVPVAMRALGCKLAKAVWHVMRGKDFDEVMLFG

SEQ ID NO: 91174 - protein, 369 aa, unidentified
MEQCSTIVGLDVHKETIAAAVLPHGAERVVETLKIPNTQSALEALVRRLQPRGSLAFVYEAGPCGYEVQRQLSVLGQPCAIIAPALTPRRPGDRVKTDRRDAEKLARWYRAGELVVIHVPSRAEEAARDLVRVREDALEDRLRARHRLSKFLLRQGRVYRATKAWGVAHRQWLKAQRFDWAALQQTFEAYVRTLEETEARLAALDEALQDLAQQAAYRPAVAALRCLKGVNTLTALTLVVETQDFRRFPTAAAFMSFTGLVPSEDSSGARVQRGSITKSGNAHLRRVLVEAAWCNRHGQVVSRELTLRRQGAPPAVLRIARKAQARLHRRYWRLLHRGKLHTVAVTAIARELAGFVWAIGQHIGVTTTG

SEQ ID NO: 91175 - protein, 342 aa, unidentified
MTIVAGFDVHRAQITFDALDTDTGELRRGRIDSTPAAVERWIGRLSGDEVHVALEACTGWLFVARALQRAGAVAHLAEPVETRALRGRKRRAKTDREDARWLRQLLGEGRLPESWIPPEHVREWRSRARLRKALLDERTRWLQRIRATLFHHGVDGAPERLRTGDGREFLAQLELPADARERIEIALEMVDSLERQLRPLEAELRKLARRQAGCRALMGLYGMGELTSLVTLTELGDVQRLSASRKAVRMAGIDIGVHRSDRRTRVGRLNRQGSPQLRWALYEAAQSACRPSSPDRKDYLALKARSLSHTRASLTIARKLARRSFHVLRALGPAALEPIPTA

SEQ ID NO: 91176 - protein, 339 aa, unidentified
MKKSDCPTFLGIDVSKGSLDCCLYNGTDHKTRCFKSNKIATIQKIITHFKISPDSCRVVLEATGVYHSAAVVGFVKHGFDVVVENPLRIRSFATMRNLLRTKTDPVDARTIAEYGFVNKPEPTKLKEAYQYKVLAKLKLIGFFRKLIAQNRNYLEAINNNSFECDAASLVTPIKNEIDHLKVAIRAVKKDVEKILIENCPELYQQYMSIPGIGPAVAGAIICYYGDFSGFSDSKKAAAFAGICPRVCKSGSSVDKQCSISKKGNSMLRTLFYLASLSAARCNDACQKIYLKLTQAGKPAKVALIATANKLLRQAMALARKGEFFIENYKEISPCTAKTT

SEQ ID NO: 91177 - protein, 400 aa, unidentified
MNYFLGIDIAKTNHVASLINNNGDVVIRAIKFTNSNEGFNKLLNTIQSKLGDLSNIEVAMEATGHYWLSLYSALTDNNFNVSVYNPYQIKSYRGAYNNRKQKNDIIDSIIIADYLRVFGSKESKFPEEKLLSLKQLTRFRANIVANVSSLKVQVIGLLDKVFPEYKKLFCDTFGNTSKQLLLNCPTPDDIINISTTKLANLLSKNSKGRFNKDTALHIKEVAKSSFGIKFTTDACSFEIKQLINQIVFLESQIDAVSKEIKELYNELDSHLLSVPGIGDNLAPIILAEIGDINKFDKPSKLIAFAGTDPSENQSGNKLSSNDKTSKRGSPYLRHAIYTASLVAISNEPELRAYYDKKISEGKHHFVALAGISRKLLTIIYYILKEDRDYIRYDNIKDKLN

SEQ ID NO: 91178 - protein, 337 aa, unidentified
MKKYIGLDVSLEETKIHVLDDTGARVWRGTCQSHPDAIEAALRKHAADAERIGLETGPLTTWLWTDLTGRGLPMVCLDARQAKKVLDIRINKTDANDAEGLAQIVRSGWYREVRVKSRDAMLSKTLVAARDQLLQMSTGLSNQIRGVMKTFGLVVPKGGGKVYEANIRRLLDGEDALAAVVMPVLDAWRAVRSRTAELDRLLRRHVRDNTDCRRLMTAPGVGAVVAASYVAAIETPENFKRSRAVGAWLGLTTSSYKSGEAEYDGHISRRGDARLRSLLYEAATVILTRVRTTSTLRSWGLALRKKVGYKRAAVAVARKLAVILHAMWKSGMDFAAA

SEQ ID NO: 91179 - protein, 388 aa, unidentified
MHPTGPCPEQDPPRDRHHQATLYASLELSRSTWLVTSLAPGDRKMSKHSVAAGDGAALLALLARLRGRVERSAGGPVGVVVVQEAGRDGFWLHRLLEAEGVESHVVDPASIAVPRRQRRAKTDAIDGETLLRTLLAWRRGEPRVCAMVVPPTPGEEDRRRLTRERGALLEERTRHTNRIKGLLAGQGIYDFEPLRPDRLERLGALVTGDGRPLPDRLRAERRRELERLELLRRQIAEVEAERDAAAVAESEAGPSPVALLAGLKAIGPQTAAVLYHEGLYRSFANRREVAAYAGLAPTPWRSGKVAREQGISKAGNPRLRHAMVELAWLWVRHQPESAPSRWFRARVGHERGRVRRVAIVALARRLLVALWRYLAHGEVPEGAALKAT

SEQ ID NO: 91180 - protein, 346 aa, unidentified
MDKFDPCGIEVSAQELVVALSRDGRAERLRSFPNTAEGHAALLRYLHSGSQRVRVALESTGLYGLDLAYALHRDAQIEVMVANPRAVRHFASALMQRSKNDRLDAEVLREFAARMPFQAWVAPSAHCFALCAVTRRLETLTEQSTAEKNRLHAASLSVAFPPAVRRDLQRSVRSIQRALARLTREAQRILEQDPLLNSSYHLLLTAKGIGPTSALRLLAETALLSEDLDVRQWVAYAGLDPREYQSGSSVHKKVRISKTGNRHLRRALYMPALVAVRHEPHLRAFYQHLLAQGKCKMQALVAAMRKLLHAVYGMLKHRQPYDGAKLYRLAENLYAPSSGHCSAEAA

SEQ ID NO: 91181 - protein, 311 aa, unidentified
MTDDTIGIDISKATLDIHRLSDGKTMSFSNCPAGFKALSRFCAKTAVARVVYEATGAYHSGLERALGAHLPLVKVNPLQARRFAQAQGLRAKTDAVDAKMLADMGNAFALEPDEPAAEIQHDLKELRSFRSGLIKDRTGIMSRVKTQTLSITRRQSKARLAQVDKQIAEINAEIERLINSSDTLAHSMKILRSIPGVGAICAATILIEMPEIGSMDRKQVASLTGLAPMTRQSGQWRGKSFIQGGRKIVRDALYMPALVAMRHNPDFKAKYQALIKAGKPPKVAITALMRKLIELANALIKADRNWVTKGA

SEQ ID NO: 91182 - protein, 416 aa, unidentified
MKIVRPICCGMDVHKNIIVATIGITNKKTRITEYIQETFSTLNPDLLNLKQWLINHKCFDACMESTGKYWIPIFNILEDEINIYLTHPKYVKAIKGKKTDKKDSKWICDLFKHDLIKFSFIPPKEIRALREISRYRYKLVGMRSSERNRYQNCMTVSNIGIGSVFSDPFGKSAQAIMKEVLESDIIEDEKILKCVHGLCKNKDKILDSIKHCNIETDQRFKMNESMTHMEELQVHIDNCEIEMMKRAAPMFDQFMHITQLPGISTLSAILIISEIGVDMKQFESDKQLTCWAGLAPANNESANKKKSVRISKAGQYLKPLLVQCALGAIKDKEGYFGIKYSRIKKRRGHKKAIIAIARMMLVSIYHMILTGETFNPSDYESFRNPNPPIKQQVLTEESPIEFLKKSGFDVSKLTKP

SEQ ID NO: 91183 - protein, 328 aa, unidentified
MILVPNALFVGIDVSSDSCEIAFVDDQGKQLGRSFSVSNDLDGACKVGEMVCLSAEAQEGSEVRIGLESTSVYGWHLRDFLFDLDSLRKYSTLVYEINPSMVASFKKSYSHKPKTDSLDAFAIAQRVRFGGLRPYSKTQMTTAPLQQLTRLRLHLVQTLTAERNRALSLTLQNVDFLRSQVKKADALIARELEAFPQTLTTVPGLGPVLVAGIVSEVGDVFRFKDDGALAQFSGLTWTKYQSGDFEAEEHSLTKTGNRYLRYYLVEAANSLRVHNEEYKRFYQRKYQEVPKHQHKRALVLTARKLVRLVFSMLRKGQIYRPEVMKQTV

SEQ ID NO: 91184 - protein, 430 aa, unidentified
MKSNTQNTKIKAITETTLVLGIDVGSETHYARAFDYRGIEYSKKPFKFSNDEAGFVMFKAWILDIKEKHGKDKVVPGMEPTGHYWFNLGKFLQDNEMKPVLVNPHHVKKSKELDDNNPTKNDRKDPKVIAGLVREGRYMIPYLPEGVYADLRTASNMRFQLQAELTRIQNRISRWFNIYFPEYKTVYGQPDAKSGMLILKVAPLPEDIMTLGIDGVNQIWRDAKVRAVGKARAKTLIEAAEHSVGSKEGEISARMEIRMLLEDYESRNTRLQEVVALIEELVKKIPMAEKLLEIKGVGIKTVSGFLAEVGDISRFNNPKELQKLAGLALVENSSGKHKGEATISRRGRKRLRYLLFEVAMSLVSKNPEFRELHSYYTTRKLNPLKKMQSLMAVAAKLLRVFFAMLTKGVDYDPKKLVGDIKRPAVYLQVA

SEQ ID NO: 91185 - protein, 358 aa, unidentified
MNNVLNQDSVVVGVDVHKFNHMAVAMDCFGQEKGSLPFSNLRLPEFNSFLYSLGEKENTIVALEDTNGYGVRIVESLVAEGFKIRYVPGILTERDRKQSIYRDKSDVFDARRVGKVILTKYEETLPARESISSLEERMLSTELDLLLTERNDLVKTKTILKNQLHGLTHQLLGDGYMLDFKKGFTKRKIPVYENLVKREKQSPLTRTVLRRLERLSLVHDQILSIDKEVLKASTNQPVIEALRKGVLGCGQTSAATIISQVMTINRFGSSAKLAKYAGIAPTQKSSGRKTRLKTSPFGNRILNRAIHTIALYQISKKSTEGRIYFERKVSEGKTKLWALRCLKRQVVNRVYHVLKHAN

SEQ ID NO: 91186 - protein, 341 aa, unidentified
MEQATIIGIDLAKRVFQVHGSASDGRPVLRKKVSRAQLLSLLARQPRALVAMEACATAHFWGRAIGELGHEVRLIPPVYVKPFVRRQKNDAADAEAIAEAASRPTMSFVSVKTEEQQARSMIFRTRDLLVRQRTQLVNALRGHLAEHGIIAAQGLGQVKVLAAGLCETTTLHPIVRDLGHRYVDHIARLDAEISELDKQLRRCTKEDETTARLQTVPGIGPIAAAAIEAFAPPMATFKRGRDFAAWLGLVPRQHSSGGKPRLGRTSKMGQRDIRRLLIIGAMAVIRWAARKGAAKGSWLERQMAKKPRLVVAIALANKMARSVWAMLTRGENYRGSALVAA

SEQ ID NO: 91187 - protein, 463 aa, unidentified
MARINKGKMHKKPIHSLKAIQPDAAGIDLGSREHWVAGPPLEDNTPNVQRFGTTTPELLRLADWLKEQKVKTVAMESTGVYWIPLFEILDSRGFEVILANARQVSHVPGRKTDMLDCQWLQLLHACGLLRGSFRPSDDICRLRALFRERNTMIDQRSDWVRRMQKSLDQMNVCVHHAVSDITGVTGMAIIRAIVDGERDPRTLAQMRDRRCQKSEEQIAEELTGNWRPEHLFNLRQALKMYDQFCQIVTEYDTEIFAYIKTLQPGVDDDQTAPPPASKSKARNIAKKGQEPMRQALYQLTGFDMTIINGIGVDTASVVLSELGFDYSAFPDEGHFVSFLRLAPNLSISAGKKVPSKLKGTTTSRVATALRMAALALRNSKTALGAFYRRISRRKGASVAVFATARKLAQIIYRFVCHGQAYIDIGAKAYEAQFNNRQLKYYTKALKDMGYKVKPLAAETVLAA

SEQ ID NO: 91188 - protein, 371 aa, unidentified
MNHVTSIGLDVHARSVTAVALDSITGEVRSQKFGYSPAEIAGWILQLDSPKAVYESGVTGFHLVRELREMGVDCIVGAVSKMHKPASDRRKKNDRNDAEFLARQLMAHNIVEVFVPDVETEGARNLSRALEDIRDDLTRAKHRLTHLLIRWGYIWNEFNEDGKRRGSWTHAHWEWIRGIELPDAAARESLDYYISEVRHIESQKKAIEKRVAQYASKPRWRDRVEALRCMKGIETVTAFALTVEAGVFSRFDSARAFASWLGLVPSEHSSGERASRGGITKAGNSHLRKLLVEASWHYARATKERKRSLYDESVPASISNHAAVGVKRLVERRRHLSCELRKRPVVANVATARELACWTWALGRMSEGALA

SEQ ID NO: 91189 - protein, 431 aa, unidentified
MFLLVGWVSMLEQAEDEEEIITHVAGVDIGKASLVCCARVPDEARPGRRLQEVRTYATMTRSLVGLAERLAVLGVTRVVMEATSDYWKPVFYLLEAHGFEVWLVNARDVKHLPGRPKTDKLDAVWLCKVAERQMIRPSFVPPSPIRMLRDLTRYRVDLIAEAGAERNRAEKLLEDAQIKLSVVVSDLFGMSGRAMMAALIGGQRDPYTLAELARSSLRRKIPALQEALTGHFTDHHAFLLGKMIARVEAIEADIREVDARIEDQLGPFASAAARLLEIPGIGAAAAATIIAEIGVDMTRFPTPAHLAGWAKFAPGVKESAGRRKGNGSTGHGNRYLARVLGQIAVTAARTDTFLGERYRRIARRRGAKRAIVAVGRSTLTIIWHLLSEPGARFHDLGADFYLSRTDTERRKRNHIRQLEALGYRVSLDLAA

SEQ ID NO: 91190 - protein, 443 aa, unidentified
MRTLYERCAGLDVHKKSITACRRWTKRNGQVAQETRTFGTTTPELLLLLNWLLEFGCTHVAMESTGEYWKPVYNILEGKVETLLVNARHVKSVPGRKTDVSDAEWLAELLSCGLLRGSFVPPRPQRELRVLTRQRHNLVRERASVVNRLQKVLEDANIKLASVATDVMGVSARAMLEAIVAGDIDPTMVAELARGRLRNKKAELEQALIGRVRDHHRFLIAAHLTHIDFLDEQIGQFSQAIASHVEKMPPATTPSNGSTPFPSNPDESDQNSMTVAQAIALLDTIPGIDRRIAEGIISEIGIDMSRFPSANHISSWAGVSPGNNESAGRRRSGKTPPGNPALRKWLTLASHAASHTKGTYLAAQYHRVAARRGKKRAIVAVAHSILVIVYHILSRCEPYREIGGNYFDERKRESVVNRLVHRLEKLGYQVALETQPRIAVAAT

SEQ ID NO: 91191 - protein, 353 aa, unidentified
MITIGVDAHKRIHVALALDARGQEINKWQGPNSPGGWQALLEWGRSLGEPRQWGIEGAWNYGRGLAQYLVEGGETVYEINARWTALRRRGARRPGKTDRLDASAVALFVRQEAPDLPRVTQDDSSAVLNLLATERGAAVAEAIRLRNQLHALLLQLDPQYRRWLSSLSSRSGLDTLEKYQFPGANPLQEERAAAVRRLVERLRLVMSQVKEVSEKIRKQAQEGFSPLTQVFGINLLTAGTLAGILGPGCRFSNDAELAAYAGVAPLETSSAGVVRHRLNRSGNRRLNHIVHLIAWTQIRSWQPAQTYLERRISEGKSRREATRALKRFIIRAIWRRWMECVGGETVVTAAEAA

SEQ ID NO: 91192 - protein, 336 aa, unidentified
MNILKQIVGIDVSMDTIEVRFGTTDTNQDQQIFNSIIFNNSKLDFKKLIQWTNKNIISKDIPLFFVMEATGVYYENLAYFLFLNKYNVAVILPNKISNYAKSLQSKSKTDSIDAASITSFGLARKLNLWKPPTPIIKSIKSLCREYYSLKANITEVKNQLHAKNHSHKPDKLTINRKTKLINLLTKQSREIETQLKSIIQQDKDLSEKIDRIIKIKGLGFISVVTTVAETNAFQLITNQKQLASYAGLDVVFNDSGIKKGKTSISKKGNKFLRKAVFMPALSAVRHNHKMKELYKRLVSKGKNKKLALIAVARKLLLLIYSLWKNNTEYIPNYKSA

SEQ ID NO: 91193 - protein, 338 aa, unidentified
MAMYCGIDLHSNNNFVAIQDGEGRDVACRRLRNHLETVLSFLEPHREELEAIAVESTFNWYWLVDGLMEAGYDVRLVNTTKASKYSDMKYTDDRHDARWIAHLLALGILPEGYIMPPKERGLRDLLRRRSFLVKKRSALYLSIKTIFTRSTGKRVSIQDIQHWDAETVLGFFDDFHVAESIIVMLPIVRLITAQIKKIEKIALAEGKLRDEFRILHTAPGIGDILALTIMCETGDISRFAKVGNYGSYCRCVKSEHTSNYKKKGKGNRKNGNKYLSWAYSEAAHHATRFEPGAKRYFERKKSRCHQMVAARALANKMARACYYVLRDQVPFNPSRTFH

SEQ ID NO: 91194 - protein, 377 aa, unidentified
MATTRTVLRGQLTAKPGDLYMSLELGDKHWHISIGGERRSVSHYIVEAGHTEEVADCIAKAAARLHTARVHSCYEAGRDGWWLRRWLTELGVDNIVVDPASIEVNRRARRAKTDRLDADKLLAMLVRHHRGERVWSVLREPSPSDEDARRAHRELQRLTHERIAHTNRISSLLVLHNLRPRIVIGGRDWPVWWNAHREQVPPTLRAELEREAVRLKVVKEQVRAIEAARARELAEGKQPLVAQLVRLRAIGAKGAWVLVKEVFGWRHFANRRELAGSLGLVPTPYASGDSEIEQGISKAGNRRVRALLVELAWSWSRLQPGSALTQWFNRRFAGAGKRMRRVGIVALARRLAIALWRYLQTGEIPIGAQLKPAGSGI

SEQ ID NO: 91195 - protein, 465 aa, unidentified
MTAGKRLWRNRKERKEWARRLQSEDPGLEVVHPHAAGIDVGNSAHYVAVRPDRDPQPVRRFECFTADLHRMADWLQSCGVKSVAMQSTGVYWIPLYEILEERGFEVHLVNARHTKNLPGRKSDVQESQWLLKLHTYGLLSNSFQPVSEIRGLRTYWRQRGEHVRGAATCIQRMQKALTQMNVQLANVISDISGLTGQAILRAIVAGEHDPRKLAALSHPRIHASPEEIAKSLEGNWRPELLFVLQQEVDMYDTYQKRIAECDQQLQKQLAGLTSVTPPGKEPTQKPKAKPAAAKNAPRFDLSSELQRVTGVDLTRIDGIDVMTAQTLLSEVGLDMSRWKTESHFASWLGLCPDNRISGDKVLARGTRRVVNHAATALRQAANTLIRSRSYLGAQYRRLRTKLGAPKAITAMAHRLARLVYRMLKYGQAYVDKGTEYYEERFRQQQIQLLRKRAAKLGLQVAEIQA

SEQ ID NO: 91196 - protein, 383 aa, unidentified
MRSVALDLGVKETSFCEVSRGLVVARRTVSELRNLEDLLGPGSKRATVAIEACREAWFVHDVLTQWGHEVVLVDTTRTKRIGIRHHGRKTDRIDAELLARAVEQGGIPVAHVLSPARRELRDVLGVRRALVETRAQYITTIRGLARSRGERLGSCGAEDFLAKLAKTQLRPETRIIVEPLASALQRVCVELARTNQRLEDLARQEPTIERLTTAPGVGLVVAAAYVSVVDEARRFDGAHQLESYLGLVPREESTGGKRKLGAITKQGNGYMRQLLVQSASSILRVGDPDDPLRRWGRQLVARRGRKIAVVALARRLAGILWAMWRKGTVYEPARLGRRTVPEQDASVEALAMKNAARKARLQTRDTTRALRIAAAAARKEAYA

SEQ ID NO: 91197 - protein, 409 aa, unidentified
MNAVGIDVSKGRSTVAVLRMFGEVVISPFEVNHTGSELKALAKTLKSLPGETRIVMECTGNYHLPIARTLQAAGLFVSTRNAILLKKYDNDTIRKDKNDPADSIKCANYCLDRWLKLTEYVPEDEVRQSLKVVSRQYTKYSKIKTTLVNNFICLLDLSFPGLNKLFTSPVRKSDGHEKWVDFAAEFWHSDCAAKLSLKAFTERYKKWCKRCDYYAVNASGIHNFARSCVPSLPKNDSTKLLITESAMQINFISETLNIFAQEMKRLAESLPEYSVAIGFYGVGEILAPKIIAEVGDIRNYPKKSSTVRFAGLEPVDNDSGDFHGDKKISKQGTPHLRKALFQVMDCLIQNSPADDPIFQFLDRKRSEGKHYYSYMCAGSAKFLRIYYARVKEHLTNIGEWNDISAYATT

SEQ ID NO: 91198 - protein, 545 aa, unidentified
MGMIRLRVPVRCTIHWGVYDCPAKKIACRPSGGPIKEIGVSLMTSPASSGKDGQRVPAIFTEPEYPNRRRRMIKSVGIDFHQGKHVVRCLDERAQLCDGFSFQTTPEGLDTFEEHIFHDGSNPVIVFEPAGLTWFLMAICIRARHPDCRLVRAKGQKVAALRRYLRGSSKSDRIDALTLAKMTFIDPEQLDEVYLPPAKIHALQRLARQRRRLGSDIAARKTRIGAIVESYVPGVRKTFSDPWSVQARAFLHCQLNPLAVAHDGEKALHAFLVRARHRNKTDKEESHRIYLACQSAADLYELSSRAEAVDDEFFCVFQEEIERELRLMELEEAESEAIAKRMEELYQELHPSDNLRSILGVGRITAPMFLATVGDPARFHNQSAFVSWTGVVPRTRESSDVQARGLRMTKAGPAIMKWALFQAGDIGRRFDPQLASLYYREMVHHGKNHKQAMGAVMSHLAARVLKVLQDDRLYELRDNEGKAISPAEAKKLILLNYQVPENIRHERRRRNPVKRGHLKSQGTALPRTNEAAIAPQPVKVTIPEN

SEQ ID NO: 91199 - protein, 344 aa, unidentified
MDHFAGLDVSVKETSVCIVDDTGRITKEVKVASEPEALLKVLGNPAYRLKRIGLEAGPLSQWLFSALAEAELPVVCVETRHMQAVLKAQINKTDRNDARGIAQMMRVGLYRPVHVKTLRSQKLRMLLTHRKLLQSKAIAIENDLRGTLRNFGLKVGMVGKVRFEARIQELVENIPDMAVLVESLLIVRRALREQIVILHRRLLAIVRDDEVCRRLMTTPGVGPVVALTYRATVDVPARFRKSKAVGAVFGLTCARYQSGEIDWSGRISRCGDEMMRVMLYEAAQSMMRSKKWSWLKAWAMQIARRRGMKKAIVALARRLAVIMHRIWVDGTEFRWTREQAAAAA

SEQ ID NO: 91200 - protein, 364 aa, unidentified
MIVIGVDVHKRTHTLAAIDGITGREIGRLEVAATDAGHVLALRFAVGLGKDVVWAIEDCRHVSRRLEQALLGTGAEVIRVPPAMTGESRKGQRTPGKSDPIDALAVARTVVREGVEKFAVAFLDEDAMEIRLLHDHREQLIGERTRVINRLRFHLVVLDPELEADLAPRTLHFAAVQARIRRHLTKLGQTAQTRVAASELAHIVKLTKEINALHADLDRLTACHSPALRAEAGCGPVCAAMLIGHTAGARRFATDAKFARLSGAAPIPAMSGNTRRFRLHRGGDRQLNRALHVIAMSRARNDPETRAYLNRKRAEGKTNPEAFRCLKRHLARRIWKTMFAAAPEAQLHSNRVTVGAPASMPCTG

SEQ ID NO: 91201 - protein, 360 aa, unidentified
MKVGQEVLVCSVVGGVDTHKDLHVAAVVDERDHVVGSRCFATTRHGYKQMLAWMRSFGQLRRIGVEATGTYGAGLLRYMQNAGVEVLEVTTPDKHDRRKRGKNDDLDAQNAAHAAFTGKRTVTPKSRDGMIESLRVLKACRKTAVAARRVALQMIQNTIVCAPDELREALRKMTRMQLVRTLAAWRPDLTDYRNVVSAYRIALKSLGRRYLELHDEIADLDTMIIAITDELAPTLVARNSIGHGSAAQLLLTAGDNSERLHSEASFAALCGVSPVPASSGKTTRHRLNRGGDRAANSALHIIAIGRLRTDPRTKAYMAKRIAEGHSKLEVIRCLKRYIAREVFSLISQRRREINQAQVPA

SEQ ID NO: 91202 - protein, 313 aa, unidentified
MTAALAAGVDVGRDYFDVAFAPAGRTFRAPNAPSGIEAIVGRLRRAGVRKVVMESIGSYGARLVRALAEAGFEVGVVDPRRIRALRLAEGKRAKTDRLDAELIARFALTMQDAARPVPSAQALQIRALSTRRRQLVEMAAMEKTRLKQVLDPELATSCRTIIAVLAAERARIEVELKSLMAGDEVHHRREALLRTIPGVGPAVSMTLLADLPELGHIDRRAIASLAGLAPHPNESGTRRGAAHIQGGRPCVRVALYVAALTAARSDKGFKAEYQAMRAAGKPAKVALIAIARKLVVAANGMLKADRPWKANQP

SEQ ID NO: 91203 - protein, 338 aa, unidentified
MSIFAGLDVSDKTTHLCVVDADVVILKRDVVASDPDLLAKWLGKHCPGLVRVVLETGPLSTFLYHGLAERGIPVECICARHAKGVLAARVNKSDVHDAEGLAQLARTGWFKRVHMKASATHIDRAALRIRAQLITTRVAMGNQLRGLLKLFGLRLGAARTPGKRRERVAALYQQRPDLEPLFAPLVASMEVIEDQLRASNRLLESRATEDAVCSRLMSVPGVGPITALTFTASIEDPHRFARNEDVGAYAGLVPRRSQSGERDVRGNISKAGDPMLRRSLYEAANIMLCRVQRPFALQQWGQRIAESKGNKRARIAVARKLAVLLHSLWLNETEFRWA

SEQ ID NO: 91204 - protein, 366 aa, unidentified
MTSTETVLGNGRFSTDRAGYAAMVKYAKQWPDRVWAVEGCQGIGRHIATRLLADGERVVDVPPKLSARARVFATGQGRKTDATDAHSIALVGTRMAGLRPLVNDEQLAVLRILVDRRRSLGEDHTRMVSQLHQLLLELIPGGAKKSLSAAQAKALLATVRPRDAAGKARRRVAAELIADLERVYQRAKQADKELKELVSSTGTTLMDLHGIGPSGAARLLVEVGDVTRFPDRGHFASWNGTAPIDASSGDQVRHRLSRAGNRQINRVLHIMATVQLRNPTEGRAYFDRKKATGKTSMEAMRALKRRLSDVVYRQLINDVTATGPGGHRGTSTNSSVTSSHPHTGSSEKSLPEPADNKLKASMQTTS

SEQ ID NO: 91205 - protein, 405 aa, unidentified
MIYVGIDWSDTHHDFCILDESGKKLDSFVVSHGQDGFELAHKHIAKHASADQARVAIETKDSLLVDFFNELGYTLHFLNPKQTDRFRDRHRMSRSKSDSFDAYVLADAVRTDLHLFNVLSPLDEESLRLRVLTRTREGLVRRKVAVSNEITTYLKRYFPVALDLFGGIDNLEAISFLMQYPTYEQARSVSEIRIASILSKGAGVSKAIALRHSQHVREKLQQLQPLAAASIIRSYPLAIKSLLRQLRAIIDEIARLDNDIRESYNDHPNKDLIGSIPGVAETLGPVIAAEIGADMTRFHNIKILKAYCGSSPVTVQSGKYRSIRFRRACNEHIRRALHLASQSAIRTAAWARQLYDRNRAEGKSYGRALRAVADQLLEMLYVMLIKRTPYDEAYHLKMKELHGHP

SEQ ID NO: 91206 - protein, 350 aa, unidentified
MIVLGADTHKRSHTVGAVAAATGELLGEQTVPVGLRGFGALLRWARSLDGERAWALEDCRHVSGSLERFLIERGERVLRIPTHLTANARRSARQRGKSDPIDALNVARAALREGLESFPAAHLDGPELDLRLLVDHRERLVRHRVELNSTLLWHLHDLWPELQLPGGALFSKKWSTRISRRLARAEQTMRVRIARDELRRLRELTQAVTGLEREITELVGQLAPQLLSEPGFGPRSPPSSSARSPAPSAFATPARLARAAGVAPIPASSGNTQRQRLDRGGNRQINAALHRVIVTRARCHPPTRDYIQRWRSEGKSTREAIRCLKRYLARRVWRLLQPTTPPRTSTRSIS

SEQ ID NO: 91207 - protein, 352 aa, unidentified
MEKITTVGLDLAKQVMAVHAVCADGRRVLRKALRRDQLLNWSEALSPCVIAMEACGGAHYWARELARQGHTVRIIAAEFVRPFRKSGKNDANDAEAICTAARQANMRFVAMKSVEQQAALCAHRLRQGLVEERTALINRLRGLLTEFGVVAPLSPEKLRRELARCQDPEDPRLPATVRELVSDQLTALDQLEERMSVYAEQIAAQACGSEVAKRLQTIAGVGPTTAAALVATVGEPQEFRNGRQFAAWLGLTPKQHSTGGKTRLGRITKRGDAYLRTLLILGAKSALQAALRKPPAVRHRLQQWIVTVLDRIGYHKTLVAIANKHARIIWALLVKGEDFVVQHLTPKVVAGA

SEQ ID NO: 91208 - protein, 386 aa, unidentified
MWPVGVTLFRLSAIEHVGQIGAPARFILLVRTVSWAIAVFCVSPHTREVKMEAMREVLGIDVSKSKLDIELLKNGKVKTKVLQNTPAGHKSLLEWIDKSKASRSLLHVCMEATGVYHEALALTLYDAGIKVSIVNPACIKGFGHGENIRNKNDEIDAGLIARYCLAMNPEPWTPPPLEQRQLRGWTLRVQALKDIRQQEENRLEAHTIGGMEDVATHVKTHIIWLDVEIKKLEKEIDDHIDRHPGLKNDAQLIASIPGLGTTTIARVLGHIGDIRRFKNAKAFAAFLGVTPKQRTSGSSVRGRTVMSKTGSSSLRAALFMPSMVARRHNPILRQFADRLLATGMAKKAVIGAVTHKLAHLIYGVIRTGKPFDANFLSNRLAIQDGI

SEQ ID NO: 91209 - protein, 330 aa, unidentified
MNKSEMVWVGIDVSARELVAAVRGPEAEHRFANTGSGHEALVRWLRRQGSRTRVCVEASGNYSLDLALALSRQSQLELQVVNPRLARRFAESLGKRSKTDPVDAHVLAEFAARMPFAVWCAPSTAALQLRSLVRTIAALTRIATQEKNRQHAAAASRVLAPMVARELQRHARYLEQRIAKLRQKAQRMVLRDPQLQRRWQHLLSVPGIGEVSALQILGELAVLPATLDARQWVAQCGLDPKHHESGSSVQATPRISKAGNRYLRAALYMPALVAVRYDAAAAAFYRRLQQRGKAKLAALTAIMRKLLHGIYGMFRRDQDYNGLELFPART

SEQ ID NO: 91210 - protein, 437 aa, unidentified
MKSTASSPTEAVAAWIGLDWADQQHVGCLYDVASGQQESFTLESSAEAIPLWLAQLRQRYGGRRVAIVLEQRRGALIHALLGCDFVMLYPINPQSLAKYRQAYFSSGAKSDTEDAPLLMELVRHRPDRFHPWQPDDAETRSLQLLTEARRRWVDQQTALTNQLTQLLKGYYPQALELAGELSSPGACQFLKRWPTLAALQKARPSQIRQHYQKYGRLSAEELDRRLERIRQAQPLTGDSAVVLHGSLTLRAVVAQLLPLFDTLREFEQQIAALFAQHPDRPLFDHLPGAGKVLSPRLLAAFGTQRDRWQQAGEVLTYWGIAPVTEQSGRSRRVHWRLACPKFQRQSWHEFAAHSRQHCGWARAFYQQLRARGKGHHAALRALAYKWIRILFRCWQTRTPYNEQIYLKALKQKNSPLLAAMPALSPDTVASPAAGGSL

SEQ ID NO: 91211 - protein, 332 aa, unidentified
MAITAWLGIDIAKQKFDVALNWNTRRRAKVFRNDAEGWQALLRWLKDLGVDQVHACLEATGRYGDGLALHLHDAGHRVSVVNPAQIKHFGRAKLGRNKTDRADAALICDYCRLFEPAAWTPPSAALRELRDLVRTREALTASRVEWTNRRGSGQGSTAADAAMAGVIARLEAEIAALDQAIVHVIGQDEDLRARHDLLISVPGIATHTAAVILSELPGPAVLRTAREAAAYAGLNPSHRQSGSSLDAPSRISRIGNATLRAALYFPALAAIRWNPLVAALRQRLKDQGRLKPKQIVGAAMRKLLHLCFGVLKTGKPFDPDHATSTEEAAATT

SEQ ID NO: 91212 - protein, 387 aa, unidentified
MDAAGKITAEFTIAHSADGITQLIRRLARYGDPASIPIAIERPNGRLAGLLPEAGHPVVPVSPNAIRTWREGEVLPGAKSDAGDAAVIAGYLRLRRHRLRVAVPCSGQTQALRTVVRTRTDLVDMRVAATSQLSALPEASWPGAQAIFADVESPISLAFLTRYPTPAPAVHLGEKRIAAFCASQGYSGKRPAAGLLARLRPAPAGTAGPALTTALGTAVLALVAVLRALNTAVKDLDRSAAARLGEHPDGEIFTSLPRSGQVNAAQMLAERGDCRQAYDGPGSVAALAGVTPVTKESGKHRAVHFRWACNKRFRKAMTTFADNSRHASPWAAKICNDARAAGKDHPHAVRILARAWIRVIWPCWLNHTPYDPARHGAAAALAEPIAA

SEQ ID NO: 91213 - protein, 407 aa, unidentified
MDLLKTVFGIDVSSRKSNVCIMVNGQKVNDYAISNDMVGFNRLLGDLKQVTKPQIIFEATGVYSRRLQAFLDMHELRYVMMNPLEAKRKTKDDLHQNKTDKLDALYLAKLQSEHPQRLAYVQNKEYQELMANNRIYEQASHDLITNKNRLHKAVQLTFPEIEHLLANPRGKNYWSIVLRFPHPDIVLETKEADIIDFLKGLTGIGKKRANDIAQSLIRLAKVACPAVKKNSAHIRGLKMAINNILSAEEECQTALQEMAKLAPKRDLEILTSIPGIGENTALRIISELGDIRRFNNPSQLNAFVGVDPQVYESGNLTAHLSISKRGTAIGRKVLYLAINQIQSAKKAGNPCHIADYYEKRKRSSETASHKKAAIASIHKLLRTIFALIKNDQLYSYDVAKHNQRLLS

SEQ ID NO: 91214 - protein, 344 aa, unidentified
MPIVGGIDIHREQLTFDYVDTGTGEVRTGQIRPADREHLRWWLGRHAAAGPEDMLAFEACTGWRYVAEEITRAGATALLAEPADTAAARGRKKRAKTDKADARLLRVLAERGQVPACWIPPGHVLEARALLETYHDLRAEHTAWVQRIHAVLFHQGAPAVHGFTGPGGRQQLERAAAAHLSPSGRRQVQAALQMIDGLDEQLDDLRHELRAAAKRLKGAVALQELWGVGPLTALALVCWLGGAGRFTSSRQAVRFTGLDITVYSTGGKRTRGHLSRQGPPVLRWLLYEAGKTHGRAGHGSDHGYYAQVKERSDGKRAALSEARKITRRACHVLASLGDDAFTLV

SEQ ID NO: 91215 - protein, 399 aa, unidentified
MTVVGIDVSKGKSMVAAMKPGGELVAAPYEVRHSDIELSRLALDVLCMEPDTRVVMEATGRYHEPVAALLHSEGIFVSILNPLLIKQSGAGSLRKVKSDPKDALKIAKYGLDNWSTLREYTPTEAIRQQLKLCERQCDLYSKNIVMLTNNLISLSDKTFPGVNELFSSPEKADGHLKWVDFYRTFWHCDCINRMSPDAFGERYKKWCKRKGYHFSADATDALYAASCGLYTTLPRDNNAKLLVTVAADQLIALRENQSKLEAEMLNLCKQLPEYEAVMAMYGVGKSTGPHLMAELGDIRRFPHRSSIVAFAGVDPGVVGSGKMQLSSVATSKRGSPQLRKALFQVVSTYVKRKPENEAVYQFYAKKRNEGKPFFVCTTAAANKFLRIYYARVKELSERC

SEQ ID NO: 91216 - protein, 343 aa, unidentified
MQSISTIGLDIAKSVFQVHGVDAAGQVVLRRQLKRRYVLAFFQGLPPCLVGIEACASSHHWSRELQALGHTVRLMPPAYVKPYVKRQKNDITDAEAICEAVTRPNMRFVPTKAVEQQSCLMLHRARHLFIRQQTAVINSIRAYLAEFGVVAPVGRRGVVQLLEVVADPADRRLPEVARVCLAALGSQLRALKAQILEFDRRIIAWHRSNATSKRLDAIPGVGPALATALVASIADPRAFRSGRDFSAWVGLVPKQNSSGGKDKLGSISKQGDRYLRSLFTAGALSVIRYAKIHGTAHRPWLTGLLARRPTKVAAIALANKLARMAWAMMVRNECYKEPAALTA

SEQ ID NO: 91217 - protein, 324 aa, unidentified
MTTPTYLGLDIAKRKFDAALLDDGHTRHKQFPNSPAGFTQLHTWLRHYARSHVHAALEATGIYGDALALCLHQSGCRVSVINPARIKAFAQSELSRTKTDAVDAALIARFTAALQPAAWTPPPPEQRQLQALVRRLDAVHAMRHQEHNRLELENAANLITASLRDHLAHLDHQIAQLQHALRAHFQAQPALARQRELLETIPGIGETTATKLLAEIPHLRDYPSARQVAAFAGLTPRHRQSGSSVHGQTRLSKIGNAHVRRALYLPAVVAMHHNPLLQTFAARLLAAGKPKMAVVGAVMRKLLHQAYGVLKHGTPFDPQHLAAH

SEQ ID NO: 91218 - protein, 422 aa, unidentified
MLEPAGDTEVIIERVAALDIGKAELMCCVRIPADKPGGKRLQEVKPYSTMTRSLLLMADRLAELGVSRVVMEATSDYWKPVFYLLESHGFEVWLVNARDVKHLPGRPKTDKLDSIWLCKIAERQMIRPSFVPPPPIRRLRDLTRYRIDLVNTRGSEKNRVEKLLEDACIKLSVVASDIFGVSGRDMMAALITGERDPKVLAQLARSRMRTKITLLEEAFTGHFTDHHAFLLTRMLGRVDAINTDIAALDARIEEMIAPFVQAAARLDDIPGVGAIATAVIIAEIGIDMTRFPTPGHLVSWARFAPGVKESAGRKKGNGATGHGNRYLARILGEAAVGASKTNTFLGERYRRIAKRRGKKRAVVAVGRSILVIVWHLLADPESTFHDLGPHFYHTRTGVDRARRNHIRQLEALGYKVTLEPAA

SEQ ID NO: 91219 - protein, 335 aa, unidentified
MKEITTVGVDLAKTVFTVHGVDAMGRVVLRKTMRREQLVELIAGLPPCLIGMEACGGAHEWGRKFQSYGHRVGIMMARFVAPYRKSSKNDGNDAEAICEAVARPNMRFVPVKSAEQQAILSLHRVRQGFIEQRTATINRIRGLLAEFGVVLPQRAEQVRRAAVVMAEGLPVLAREAIADLRAHLTYLDERIIRYERQLVSLARQREAAVRIQRLPGVGPLTASAITASISDGHEFANGRQFAAWLGLVPRQYSTGGKPRLGRITKRGDPYLRTLLMLGARAVLQSAAQKTDRLSRWALALRARRGYHRAIIAVAAKNARIIWALLAKQREFVLPV

SEQ ID NO: 91220 - protein, 421 aa, unidentified
MLTTTQDNEEIIERVAALDIGKAEVMCCVRVPDEDHPGKRLQEVQAYPTMTRSVLGLADHLASLDVTRVVMEATADYWKPVFYLLEAAGFETWLVNAKDVKHLPGRPKTDLDAVWLCKVAERQMLRPSFVPPPPIRKLRDLTRYRADLVAARTAEKQRAEKLLEDACIKVSAVIADIFGVSGRDMLTALAAGERNPKVLAQLARRSMRAKITVLEEAFTGHFTDHHAFLLRTMLGRVDAISADIAALDDRIAEQAAPFADAAGRLDEIPGISLASAYVILAEIGTDMTRFPTAGHLASWARLAPGIKESAGKKKGKGSTGHGNAYLAAILGNAAAGASKTDTFLGDKYRRIARRRGSKRAIVALGRSILVIAWHLLSDPDAHFYDLGPGYYAAGIDPERRKRSHIRQLEALGYTVTLEPAA

SEQ ID NO: 91221 - protein, 341 aa, unidentified
MENCGIDLHQKSSQVTVVDEEGEVLERASIPTTRAGLERWFGKRERMRILVEASGSSPWVVRRLRELGHEVDVIDPRRVRLIAQSTLKTDRIDADILAELARLRTKLRTLVWQRSELTQRQRGHLRVRRALVEARARFIVTVRGLLRSFGFRVASCRSDRFAARCEATAIPPELAEVITPLLTAIRDLDARIAAMDEVVEQVGHLYPAVESFQDIPGVGPVVALAYLLSVEDPSRFRRSRDVPGYLGLRPNLRASADVVRRGRITKEGDSDVRRLLVQAAHAHLRSHADTALKRWAESLIPRIGKRKAIVALARKLAVLMHRLWITGEVYQPFPNHTAMAA

SEQ ID NO: 91222 - protein, 415 aa, unidentified
MEPVLDSCAGMDVHEKKVDVCIAHGPLEKSPKFEIRTFSTMTSDLEDLKSWLKKYNVTTIGMESTGVYWKPIFNIMEGEFTIVLANAQRLKAIPRKKTDIMDCKRIAKLLRYGLLPNSFIPPREIRELRDLNRTRRKLVGMMTSEKNRLTKVLESSNIKLSSVVSKISGVSSMAMIRSLLEKDRLSKEEISQLAKGSLKKKVDLLEKALDGKLTDHHRFLLKMHMENLDHLARQIAKIDEQIERKMIPFQKESNLIQSIPGISKVSASAILAEIGTDMSQFPDEAHLSSWAGVCPGNNESAGKKKSGKTQKGNSFLKGTLAEAAWAASKVKRSTYNAFYQNIVRRRGKKRALVALAHRMLMDIYRVLKTGAPYQDTGAEEANERATKRKERSMIRLLEKAGYEVVRTCTSEIAAA

SEQ ID NO: 91223 - protein, 335 aa, unidentified
MGQLLVRQCFGIDIAKGDFTASLCRHYSAGDVLFSDTVTFENSRKGFNQFLRWCQKVSEPSVPATYLMEATGIYFEPLAYHLHRIHKHVSVLLPNKVKHYAKSLNIKTKTDAVDARVIARFGTERQHPEWQPPKEIYKKLRELTRLCGDLKKERTVFSNRTRSTEAGESPNSFVLKANNRVIKELDNLIEKCEKEIAALVEGDIELRERFEKLMTIKGIGLTTLAVVIAETQGFALISNRKQLASYAGYDVVQRESGSSVKGKTRISKKGNSRIRAAMHFPALVSCRFNQNMKDDYLRIIEHKTSKMVGATAVQRKLLLLIYTLWKNNDTFKEEM

SEQ ID NO: 91224 - protein, 408 aa, unidentified
MNAVGIDVSKGKSTVAALRPMGEVALLPQEFLHTEVGLEQMAYAIIALGEDTRVVMEATGRYHEPIAAALHEYGIYVCVLNPLYIKQSGGGSIRKVKTDKADAMKIAKYGLDNWVDLREYTPMDTVRQQLKLCSRQYNLYMKTVVSLQNNLISLTDKTFPSVNELFSSPERADGHQKWVDFVMTFWHCDCICRASEKAFTERYQKWCKRKGYHFSAEKALDVYAGSCGHFTTLPKNDNTKLLITTAAQQLLAGKMTLAALRAEMTRLAKRLPEYDTVRAMYGVGETTAAQLMAEIGDVRRFPRRSSIVGFAGVDPAVDQSGKHEAKSTPTTKRGSPHLRKTLYQIVCTYLRKAPEDEPVYQFLDKKRTEGKPYFVYMTAAQNKFLRIYYARVKECLEDFDAQQNSAQS

SEQ ID NO: 91225 - protein, 321 aa, unidentified
MQAPIPIIGVDVAQAELVVSAHAQGSSRPVPNDPVHIQRWLRTLPAGSVIAMESTGRYHRTLAQLAYEAGMQVYVLNARDIYYYAKAISARGKTDRLDAAVIARYVAEHREQLRPWQPAAGVTQQLQALLGRRQLLTDQRVMLRQSLGELPQLQQATQELLLAYQRMIEEIDRQMRCLVDSDATLREGVRRLGTITGFGAQASTLLAALFSRLHFDNADAVVAYSGLDPRPCDSGTRHGTRRLSKRGPALVRRLLFLAGFSAAHSKALGPIYVQLRARGFASTQATLILARKLLRVAWAVWNSGKDFDPRLVGAQQACQKT

SEQ ID NO: 91226 - protein, 407 aa, unidentified
MSNSKKICCGLDVHKETIFAAINANGKAGQVKEYSTLTCQIRALSEWLKANKVTDVAMESTGIYWIPVWNILEAEGFRLILVNPYFIKQMPGRKSDIKDSQWIAQLLAKDMLKSSLIPCHQIRTLRAYSREYVKRQQSITRIVVGMERTLETANIRITSMVSKIESKTVLNIIELIIKGETDIGKLLEKVHGRTKNRKGDLVAQSLEGFVLPEHRFLLNQQLEEYRMYYKQADELQKQMLIICKEHYSKEMDLLKTMPGTDDQSVMQLIAETGGDMNAFETSNRLSNWAGLCPRNDESAGKIKSKATTKGNKYLRRIIVQVAWAASRTKNSSYYNKYNQLAIRKGRKKALVAVARKQLTVVWNILKYEQPYDINKQPVITPELLLAKKKYHEKELGKLNVLAITVNQ

SEQ ID NO: 91227 - protein, 420 aa, unidentified
MKVTYKTCCGVDVHKSFLVATIITTTGGIEPSYQKKRYSTFNNSILEFKQWLLYNDCHDLCMESTGKYWIPVFNLLEDEINVTIANPKWVKAVKGNKDDTKDSKWIGDLFRLGLVKGSYIPCKKIRILREFTRYRYKIVSCRSSEKNRYQNALTVCNVALDSVVSDIFGKSSTSIIDYLLEQSGNSINHEEIASKLLKSLKSKEDAVIESIEGYQMTDSQKYRMHLVRAHMDYITAEINDVDREIEKLISSDPDFENAIQFLMTIPGVKRDSAITVISEIGIDMTQFSSSKRLCCWAGLTPGSNESGGKKKSVRVTRAGVYLKPALVQCAHAAVKSEKSPYYKKKYESLMKRRGKKRAIVAIARMILTAIYQMLSTGESWNPSDLYKIDIPEALLEKQKAKAIKQAMKLLQREGLYPPPE

SEQ ID NO: 91228 - protein, 454 aa, unidentified
MKMKKKVSYRKHQERKRNIAGIKVIGIDPAKEKHQVTVIDEQGIQMGNSFAITVSHKGFNEDLWKKLGKILGKFRKEEVVFAIESSCDIWRVFAGYLHNRGYAVLLVSPLITYKTRSTINNDFSKTDPKDAYLVAENAQGGKYNEYMSYTPEINKLHSLCIAHDKLTKDRNRIILRLRALMEEIFPEYLKCVHVEIKTSLYLLGKYFLPEHFQKLDVDEEEWNIRRISNGKHNADTLKKIKEHARNSIGARKTGEEDGVRITLDAWISQLRLINENMKTIGSKMIELAKETEFFEILVSVPGISDISATRLIGECRDLNLFDHYKQIEKMAGSNIRVSDSGKSAGMRRLNKLGNKRLLKLIYIMTTQAARFMPEVRIKFLKRQIKKKSYRKNIFAASSILMRILMVLIKEKRTYELREDKVQEMERLELKYNPEKKDKKKGRKRNKKKTIKKAA

SEQ ID NO: 91229 - protein, 364 aa, unidentified
MHSISNTELSSLEETRCQFNGSKADIKLGIDVHQEFYVVVMQEGGSNPKPPQRFAKGAFLYWAAKLKQKSGAEIYAVYEACGFGFSLQRQLSALAIQCYVVCPQKLDEANKRVKTDGLDAKALCLKLDRFVQGNRCALALVRVPTEEEEQRRAIHRQREQLVGARKRLEAQGRSLMVNHGFEPVQNWWKPRPFAALDVPQWMRELLSNSQPILVALQQKIAAQSVQLQCAAAPDQPRGLGKMTSVVLDREIGDWNRFHNRRQIASYTGLCPGEYSSGNTRLQRCVTKHGNPRLRAALVELAWRLVRFQPNYKPILKWKRLLAKGALSTGAARKKAIVAVARQLAVDLWRVRTGRCKPQALGLVI

SEQ ID NO: 91230 - protein, 346 aa, unidentified
MEHYVGVDVSLELSSLCVLDVAGKVIREAKVASEPEALVAFLRGLDLTIARVGLEAGPLSQWLYDGLHEAGLAPVLLETRHVKAALSAMAVKTDRRDARGIAQLLRMGWYRPVHRKSVPSQEIRALLGARKQLQIKVIDLEQTVRGLLRGFGLKVGDVSRGKLPARIRELAAGHVMLEKIVEPLLAAREAMWREFAKLHREVLLIVKDDQICRRLMTVPGVGALVSLTYRAGVDDPGRFAKSKSVGAFFGLTPKRYQSGETDVTGGITRVGDASVRTALHDAANALLTRAHRFSTLKRWALDVAKRRGMRRAKVALARKLATVLHRMWADGTEFTWGKDPAVSPAA

SEQ ID NO: 91231 - protein, 323 aa, unidentified
MIYLGLDVSKDTVDAQIGADLRYTYLKITNDAAGWQLLVDTLRALPDQDVHACCEYTGIYYLGLARAIHAAGYKISVINAYSIKAFAKMMMARAKTDKKDAQLIAQYCQTNKPRAWSPPSGDVADLKALNRRLHQLNKMRTMENNRLQVAEEICAASHRAMLLFIEEQICETRAKLNEMIAACDERRRRQKRLQTIPGIGPVTAAALQALLADVEKFPTAKHFISYIGLSPVIRESGKSVKGKVRMSKMGDAYIRAVLYMPARSACLRSRAFRDWARKKMQAGKPPKVVYAAMMRRLATFAYYVVRNDEDFKLPPGCGGDAPV

SEQ ID NO: 91232 - protein, 388 aa, unidentified
MHGGRAEMDDITYVGLDVHKATVCVATAEGGRGGEVRQVGVFENRPDILCKLTARLGKGGRRLSFCYEAGPCGYGLQRLLTGRGHSCIVVAPSLIPMRSGDRVKTDRRDAVMLAKLHRAGELTAVWVPDAAHEAMRDLVRARVTAGRVLAQARQHLQGFLLRHERIYRGPRAWTLAYRRWLTTVRFDHPAQQIVLQDYIHAVEDAEARRDRLTRQIEELMPSWSMAPVVEALQAMRGVALVVAVTVVAEVGDFRRFANARQLMAYLGLVPSEHSSGAAIRRSGITKAGNALARRVLIEGAWTYRMKARVSRKLHDRLEPLPAEIRDIAWKAQVRLCARYRRLAALGKPGVVATTAIAREMVGFIWAIARLVQPVDDQPLIEHAGAPRC

SEQ ID NO: 91233 - protein, 357 aa, unidentified
MGQSNRISFKGQNIYVGIDVHLRSWSVTILSETSVLKRMSQGADPDALHRFLASHYPEAEYHSVYEAGFCGFWIHDRLTELGIHNIVVNPADVPTMGSEKLRKTDAVDSKKLAVSLRARQLKGIYTPDGEALEIRSLIRLKNSITKDTTRQKNRIKSQLRYLGIEIPAEYLEPHSNWSKRFLNWLKEVEMRTPSGRHSLDILIMQFEALRKQKAEMTRKLRELSHTERFEETLKLLMSVPGIGQATGLALISEIVDIARFANAEQLAAYVGMIPMCHSSGDHEGVGDITLRKHAILRSNIIEAAWVAIRKDEAMQLCYLNNCKRMVPSKAIVKVARKLVNRIYFVLKRRQPYVNAVA

SEQ ID NO: 91234 - protein, 348 aa, unidentified
MTHSTITTVGLDIAKNVIQVHAVDAKGTSIIRKSLKRHQVLPFFANLPPCLIGIEACGGAHDWARRLMALGHTVKLMAPQFVKPYVKANKHDAADAEAICEAVTRPTMRFVPVKTPEQQALLALHRARQGFVTARTAQANQIRGLLAEFGLVIPKGMAALKQRLPDILEDAENGLPDACRELMQTLSAHLNELHRQVEAITQRIAMAHQANPLSRRLAQIPGIGPVIATALLAAIGDIREFASGRQLAAWLGLVPKQSSTGGKTRLLGISKRGDTYLRTLLIHGARSALSAAQRSKEPGATWVTRLADRRHPNIAAVALANKNARIAFALLAHDRDYQPGHSPVRATA

SEQ ID NO: 91235 - protein, 379 aa, unidentified
MTRMTIGAATTDKGVSATIYIAIELSGSKWVIGVHTPLADKISIYRLTGGDAQGLLKLIAHVREKVERRLGRSATVLSCYEAGYDGFWLHRLLKAHGICNHVLDSASIQVSRRARRVKTDRIDAEGLIRVLMAYDRGERQVCAIVRVPSLEDVDAKRLHRERERLVRERVQHTNRIHGLLATQGIRTFKPMRKDWERQLEGVFTGDGRPLPPQLKMEIRRECRRLAMVLDMLKEVERERDTGVASEAKMGLLAKLQGVGPTFATVLVREVFYRAFNNRRELGSYVGLTPAPYDSGDVHRDQGISKAGNPRARTLAIEMAWLWVRYQPDSALSQWFRERVGVTTGRVRRIAIVALARKVLVALWRYLETGIVPSGAMLKT

SEQ ID NO: 91236 - protein, 358 aa, unidentified
MDTVKRNKVDFTGQPIYVGLDVHKKSWSVSISTQYGQYKSFSQPPEVDKLVHYLQQHFPGAQYWSAYEAGYCGFWIHDRLREKGIGCLVVNPADVPTKNKEQRRKRDRIDCRKLSRSLRNGDLEGIYVPPRGKLEDRSLIRTRLSMVRKQTRCKNQIKSMLLFYGVVIPEEKEMGHWSRRFIRWIEGIRMERASGDMALQIHLEELSHLRQIIAKLDRAILALARTEEYRPWVLLLRTVPGISTLTAMILLTEIGEITRFPSIDELTSYVGLIPDTKASGEKEHIGGITQRSHSQLRWMLIEASWKAVQKDPALMMAFDQYCKRMRKTKAIVKIARKLLNRIRYVLKNRSEYVPAVLE

SEQ ID NO: 91237 - protein, 358 aa, unidentified
MSHYRVGCDAHRRYSQFAILDQDGQLQRQARVDHEPGAIQAFLENLPDGTPVALETVGNWYWIADEIEAAGCLPLLTHAAKAKVMMGNINKTDKLDAKGLAKLLHLGSLPTVWLPPSEIRDERELHRTRMALSKLRTVLKNRIHATLAKYGITSTEHSDIFVGAGRAWLKTTLSQLPPETGRCVAQELEALDGLQIQIAQLEKRIQERIALNPSIQLLKTLPGVGNILAIVIEREIGSVDRFATAGQLASYAGVVPTVHASGGKTRFGHMRKPSNQYLKWAFIEGANVIVRHRHHPAWKTKYVCRVYDQVCRRKGHAVAVGAVARHLAEASYWMLKRQEVYHPPASRQASPKQVQGRA

SEQ ID NO: 91238 - protein, 342 aa, unidentified
MDEVTIVGLDLAKRVFQLHGARQDGGVGFRRKLPRGQLLTFLVKLPRCIVAMEACATAHYWAREIAAVGHGVRLVPPAYVKPFVKRQKNDAADAEAIAEAASRPTMRFVEPKTEHQQARAMVFRTRDMFVRQRTQMLNALRAHLAEHGLIAAKGIGNVQELRRIVETAETGIDGLIIETAHLYLEQIEQVSSHISKLEKALKAEADHSHRSKGLMTMPGVGRVTAMAIEASAPSLSVFRRGRDFAAWLGLVPKQNSSGGKQVLGHTSKMGQRDIRRLLIIGAMSVIRWFSRNTPEADTWLGCLLRRKPRQLAAIALANKMARSLWAMETRQEIFRDPRLVAA

SEQ ID NO: 91239 - protein, 344 aa, unidentified
MSIITVGIDLAKNVFAIHGVDEAGKPVLVKPKVRRDQLLALIAQLPPCVIGMEACSGAHHWARLFRQHGHTVKLIAPKLVAPYRMSGKRGKNDAADAAAICEAVTRPSMRFVPLKDEHQQATLCLHRTRQGFIEERTATYNRLRGLLSEFGVVLPQSPERLRKEIGSHLDGLPGWAKRCMSDLLEHAGKIEDRLSEYDRAIGEIARADERSRRLMQLRGIGPTTASALLASIGAGHDFRNGRQVAAWLGLTPGQYSSGGKERLGSITKAGDAYIRSLLVLGARAVMANLGDKQDHFSRWVRNLIERRGYWRAAVAIAAKNARMAWAMLKYGDAFRHEVGDAHNA

SEQ ID NO: 91240 - protein, 421 aa, unidentified
MRRKNDNRQVEKRQRITDATLVIGMDIGCEFNAMCLMSKEGTILGRYPKIYNSRKGFDYFHGIVESMKEKYGFTDVLIGMEPTGHYWRKIAYFAMDKQYEVRFIRTTALKHQRELDESSSAKNDIRDAYTIANIAREGKYIDTVIEDNIFRQLRTLAHTREKIQRISTGAKHALKGMLEDYFPELKHIFWSMKAKGLWALLEHCPFPEDVLKTDIDTVTELIAQSTRRKIQAHEKALQIYKAAQHSIGLQRVGDADRWRVAAYLSEIRHSETQLKEIEAQMEALLKKIPFAEYILSMPGIGALTCGVFLGELGNPCNFTNPKQIVKYAGYDPKEHDSGQRTGRRIISKKGRWLLRKYLYFMAMRVVHRSPFLKDYYENKQKTMTKKEALCAVVIKLIKVIFALLRDKRTFTEKQSCLKQAA

SEQ ID NO: 91241 - protein, 373 aa, unidentified
MPRYSTAFGMDVHLRSTTVCALNAETGEAVARRFRGNPWGEVAERMSGFPGPSLAAYESGYLGFAPQRELSALGVDCVVAAVSKVPRSAADLSSKNDRNDAARMAKAILSHDVTPVWVPSPEIEGLRDLAAAHDAATARLAAAKQRLLAFLARRGYVYGGTTPAGNPRKYWTYDFLRWLDKVRPADDGGIRALAALRNEVEAADEAREALLAEYRAAVAAGPLSAEVEALQSIKGCGFVLAAAFASEAGDFSRFRSGRQVTAYFGLAPKQRSSADSVRLGGISGASNALVRRLAVEGSWRYAQAGHQPKLMPKGSGVPLEIRMHGRKGSERLLRRREEMLERGMPQAKANAATAAELVRWLWALGMMCGEGAE

SEQ ID NO: 91242 - protein, 419 aa, unidentified
MAQRHDKPIISVVHPICCGLDVHKASIAVCCVATAADGSEDMEIAEFDTFTDDLIRLRDWLIERDCPVVAMESTGVYWRPVHNVLEAYVKVVLVNARHTKHVPGRKTDLADSQWLAGLLRHGLLRGSFIPPQQVRQWREMTRLRKAYQESLADFKRLIHKLFECANIKLGVVVSDLFGATGRYIMNLLATGEAELSADDIAAGAHGQLKQKINELCRAVQGFFTDHHRYQLRLLLATVTELEHHIEQIGQHVKELMADHHPVLSRLQEIPGVSEVAAATILSEVGATLEEFPCCAALASWSGLCPGNNQSAGKRKSGRSPVHGHRLKTIMVEVAWSAVRKPGSYYKDKFQRLRARRGAKRAIVAIAHRLLKAVYYIIKEGRHFRDLGAEYLTHKHQTGKLGSLKKQAKLLGYELTPLAA

SEQ ID NO: 91243 - protein, 422 aa, unidentified
MRAATLEQPPLPNPGMSRGVARSRSKGAVPLARRGNAALGSPAQRKAAAKDEGPGRPMTLRSSRPWESESRRASLGNELEQMRGPRARIRQDETCPIRHPPTAEEVRRPVEQFVGIDVSKAVLDVAVRPAGDAWSVANSPEGIAQLVDRLREIAPKLIVLEASGGLERRAIAALAGARLPVVAVNPRQVRDFAKATGRLAKTDAIDAEVLALFAERIRPEVRPLPDEETQELQALVVRRRQVVDMITAEKNRLSAAPPSKRVRTAIGKTIKWLQKQLEEIDNDLDGAVRKSPAWREKDDLLNSVKGVGPVLSRTLLSMVPELGTLGRRQISALIGVAPLNRDSGTQRGRRSVWGGRASVRAVLYMCALAAIRSNPAIRAFYERLVAAGKLPKVAIVACMRKLLTILNAILRTKTPWTSEKAA

SEQ ID NO: 91244 - protein, 317 aa, unidentified
MDVAFKSFVGIDIAKRTLDVHVLPERTSLKPPNDSKGRGQLREKLPPPGECLIVVEATGGYERALVAELIDAGHQVAVVNPRQVRDFAKACGILAKTDRIDAVVLARFGQAVVPRTQTKIPEKQLELQDLVVRRRQLVELRTAEMNRKENVASKFVKKSLQESVDALTKQIRRFEKRIAALVQSDDEWKQKAEIVQSAPGIGPGTSATLIAEVPELGKLSRRKISALVGLAPFNRDSGEFRGRRAIRGGRSSVRCSLYMATLSARRSNPVIRAFSDRLKALGKKPKVIITACMRKLLVILNTMVKNNTHWNPAISTT

SEQ ID NO: 91245 - protein, 436 aa, unidentified
MRGCRCSMIMGFTKPIEHFNLQRKKVITMNTLYVGIDVSSKSNVIYLMLPNGDKHSNFPVANSHEGSTQLVKRILSALTSHSLDTVLIGLEATSVYGDNLVYFLREDATLAPFNRKIHVLNPKQVKKFHDAYNDLPKNDYVDSFVIADCLRFGRINKEVYMGDYRYKALQNLTRARFFAVQNLVKEKQRFMNVLFKKYSTMTQEKVFSDTFSTTALAVYDEFESAEALANMDLHELTDFIIEKGKNRFPDPDAVAKAIQKAARSSYRLPKTVNDSVNQVLSISITSMKALESQIKEFDKAIKAQMELLPNVLISIPGIGPVYSAGIMAEIGDINRFNSQAALAKYAGLAWKQHQSGGFESEVTRLIPSGNRFLKYYLCEAAFSLVRCDKEYSDFYRLKYKEVNRCQHKRALALTARKFVRLVFRLLKDNRLYCPAK

SEQ ID NO: 91246 - protein, 318 aa, unidentified
MRKVFVGVDVAKDKLDISITLDGLKYDPLQILNNESSILGFFDYLKATYKKSELFFGYEATSNYMHVLQKLLTVHDFKQIMINPYMMSHYLKHLNSRKKSDLADSFGIAKYIQTLDQEEFKTIFNQSDKTLRKYTSAINLLRKLDTQLSNFVHSQKENPIVSLDSFLCILKLKILEIKKGLEKEAEKVLKELFPHVVELQKEIKGVGYALLLELVPIFLKSQNYTLKQLQSFVGLSPRVFESGTSVHKKESMSKRGSSLVRKLLYLCAMSAIRFNPIIKEKYTRLVESGKNKMVALVACMSHLFRAVYVKFHQGLVNA

SEQ ID NO: 91247 - protein, 435 aa, unidentified
MEEVEDEPLFCDRVAGIDIGKATVMVTIRVPSEARAKGRQQETREFGTTRRELLALADWLRCWQVERAGMEATSDYWKPVLFTLEQEGFDCLLYQASQVKALPGRPKTDKLDSVWLARITEQGSLAGSFVPPEEIRRLRTHTRYRRKLVQMRTAQKERCEKLLEDAHLKLSAVISDIHGVSGRDMLRAIAAGERNPKVLAQMARGVMRSKIARLEQALDCSFFTGEHAFILTMMLDSIDSLTAQAGVLDARIADMCQPYQRQLEQLDEIPGSGTTTAQDLIAEIGTDMNVFPTAGHLASYARQAPRVKESAGKRKGKNATGRGNPYIGGALGEASISAGRTQTFIGEKYRRLTRRMPKRKAQVAIMRSQLVIAHALLSDPDARYQDLGPDYYERKADIRRRARNHARALERLGYKVTLEAIDPGTGELHLVATAG

SEQ ID NO: 91248 - protein, 356 aa, unidentified
MTIVAHAHPFVIGVDAHARNHAVAVVACPTGEVVDEAQFPATVAGLQRAVSWVARRTGGDLDVLWVIEGVGTYGARLARVANDTGYAVAEAGRMNARANRGVGKSDPLDARRIAQSVLAVDEGMLRRPRADDGVRAAVRVLIASRDHLSAERTSAVNALTALIRVADLRIDARRPLTAAQITAMAAWRGRDEDLATAVARREAVRLAKRVIAADREIAANTKQLTDLLNASPARVLLDQPGIGPVTAAVTLAAWSHPGRVRSEAAFASLAGVNPIPASSGNTVRHRINRGGDRRLNRALHMATVTRIRMDPRTRAYVEKRTAEGRSLREIRRCLKRYLARQIYRQLNAAETALNPT

SEQ ID NO: 91249 - protein, 429 aa, unidentified
MTKTHHKTEQPVLVAIDIAKHRNEVLIAMPGRQRRRRLTVRNIKEDIDRLVETLAAFEMPVQVGFEPTGDYHRPLAWRLHQAGFELRLISSLSLARTREAMHNSWDKNDPKDAQVMLHMMQTGLTQIWHDPLVHGVNDIQELSKTHAVISQTKTEFWHRLRTHYLPLYFPEIERFMGNSRSDWFLAFLEQFPTPGSITCMPEQAFTEAAWDVVGRKVAKARLLADMYATAAESIGLPVDPTMPAISMFRLVLNQGRELIAKRDQIEQQASDLLGTHPDFVRLRTIPGIGPINALTILAEAGDLRRFGHHRQFLKYCGFNLSTQQSGVFRGQTKLSKFGNARLRRTFWMAGQVAIRQRENGFRDKYERYIARDHSDPHLKRKALTAVAAKIARTAHSVIKTETDYRPFFEGRGPRRKDPALQVPLRHASS

SEQ ID NO: 91250 - protein, 323 aa, unidentified
MQGKEPSQQSATTRVYIGIDVCKARLDVYIHPLGKKLALANDAAGLRQLKKAIVGFDVALIVMEATGKFHRLAHRNLHDSGFKVAVVNPARSRKFADAIGLLAKTDRIDALMLALMGESLALDAVAPAPETMESLQELANGRQGAVATRTALLNQIGASKTTVLIGELKRQLRAVETAIAKLQAEIEQRIEADPVLARRFQILTSIPGIGPVAAISLIAGLNEIGQLSAKEVAMIVGLAPIACDSGKRSGAREIHGGRGHVRNALYMPAHSAAQHNPDLKIFYDRLIENGKCAKAAITAVMRKLVILANTLVQQDRLWAPRRP

SEQ ID NO: 91251 - protein, 448 aa, unidentified
MKQSAKKVTRNTTAKKTTRHIPARSQASSGTNGDHSAPVILVGIDWADGEHAFRMLAPDGSTHEGSFEQQPAAIAELLTAWLQKYPQARIDICLETPRGALINALLEYPQVNIFPVNPNALANYRKAFAHGGGKNDPVDAKLILQYLQHYRDQLRPLQQNGPHTRELAALSEDRRRLVNQRVALANELKSLLKTYFPAILQLAPAKVYADFIVRLLLKYPTLQQAQAAGRTRLRKFFFGVGTKDKVEQRLDTLIDAMPLSRDEVLLRTSARRAQAICGQLDALNRSIAAYNVELSTLVKAHADYAIVSSLPGAAAKTQARLIAALGDDRARYQDAQSLQAAAGIAPLTTQSGKQRYVSCRWACSKFIKQTFHEYAGLSIGKCAWAKAYYEQQVSKGNSKQMARRALAYKWMRIIYRCWQTGEAYDDARYLTRLKATGSPLVERINAAA

SEQ ID NO: 91252 - protein, 366 aa, unidentified
MNDPTTSTVAVGLDVHAASIRLAALAAGELLAERTLPYDHDAVERELERWPGARVCYEAGPTGFGLCRHLTARGIACAVVAPGLVPMRPGDRVKTDPRDARKLARLHAGGLLEPIWVPSVELEALRDLVRAREAARIDRMRDRHRLSKFLLRHQRRMPHRSWGAGRRKWLGEQSFDQPAQQLAFDTYLQTLDLVDRRVETLDRQLAEVAEQGEWARLVSRLRCVRGIDTLTALGLVAEVGDFDRFASAEAFMSFVGLVPSERSSGDKRRQGSITKAGNAHARRLLVEAAWHARRRPKVSYELARRQRNQDPAVLERAFTCQQRLHRRFHRMASRGKPQQKIVVACARELAGFVWAIATDQPLRKGG

SEQ ID NO: 91253 - protein, 427 aa, unidentified
MKSATNTQSSELSTAPISLPEFPVNDVTAGIDWARDDHAACIVDGRGRRVAATMVEHTTAGLRDLVAFLGRHGVGEVAIERPDGPVVDTLLAAGLTVVVVSPNQVKNLRSRYGSAGNKDDRFDAYVLADTLRTDRARLRPLVPDTEATIALRRACRARKDLIKHRVAAANQLRAHLRNVFPGAVGLFKDLDSAISLAFLSRFDTQDRADWLTPKRLADWLGKQGYSGKVDPTVLRQRLLAAPRGATGDHATSQAHITASYVAVLRTLVEQIKTLADQIDRQLDAHADAHIFTSLPRSGRVRAARLLAEIGDCRARFPTPESLTCLAGAAPSTRQSGKLRAVGFRWSCDKQLRDAVVDFAADTRHANPWAADLYDRARARGHDHAHAARILARAWLHIIWHCWQDGVPYAPDQHRALQRVMAAQTATG

SEQ ID NO: 91254 - protein, 444 aa, unidentified
MAMRKRAEQVYPSAAGIDVGASSHWVAVPPHLAEQAHCDSTRQYGPMTDDLEAMADWLLAIGVDYVALESTGVYWIPVYEVLEQRGLKVWLVDARQLRHAPGRPKSDVLDCQWIQRLMALGMLRAAMRPEAEVRVVRAVVRQRDVLGASQAQWVQRMQKELVQMNIQLTEVLSDVMGQTGQAIIRAIVAGERDPAVLASHRDRRVKASVEQVSRALTGTWREEHLFVLAQALSMYDDIERRLAECNAKLQELLDRRASHNVDIGPLPRAGTKVRKEYEVRQMLANWAGVDLTRIDGLGVGVVMTLLSEIGPDLSRFASVKQFCSWLGLCPGTKISGGKMLSSASKRSANRARQALKLAAQALSHSKSALGAFYRRLCARMDKPRANTAAAHKLARLVYFMLTRGEAYVDQGQQRYEEQQRHRSIAALKRRAASLGFELAPASAQ

SEQ ID NO: 91255 - protein, 350 aa, unidentified
MEPRALDVYVGVDTHADTHTAVAVDGIGRVQATIEVSADRAGYRQLLSWARSHGAIARVGVEGTGSYGAGLCRHLEAAGVEVIEVDRPNRQRRRRHGKSDPTDAEAAARAVLSGEATTIPKDRTGLVETIRILHVTRRSAVKVRTQAGNQMKDLIVTGPDSVRDQLRPLSTRRRVTTCARWRPGPVIDPTTATRRALHDLACRWLVAHDEITMLDRQLRTLLEATVPTLLAEPGVGTEVAAKLLIAAGENPERLRTEASFAALCGTSPVEHSSGKTHNHRLNRGGNRQANNALHIVALHRSRTCPETRTYLAKLHANRKSARAARRCLKRALARRLYRALMTDLHPHPLT

SEQ ID NO: 91256 - protein, 409 aa, unidentified
MRLFVGLDVSSFDMKVCFLNGEGEKLDSFSVSNDLPGAQVLKERLLQCTTNQEVENLKIGLESTSVYSFHPSMFLHHDEDLKRFGTKVFLLNPKQIANFKKSYSDMNKTDEIDAFVIADYLRFGRNQMSIVKESQYVALQQLTRARYQLVRMLTKEKQHFLQHLSYKCNTFSQEVDSSIFGNAMMKLFLEKFSLEELADMPLEELAEFLQEKSKNRFGDPKCVASTIQKAVRTSYRLDKVVEDSIDILLGTSIEIIRTYQKQIKELEKSIKRIMAGLTQTLESIPGIGPIYAAGIIAEIGQIERFDDETKIAKYAGLYWRTYQSGRFTAENTSLSRNGNHYLRYYLVEAANSVRKHVLEYQEYYTKKYNEVPKHQHKRALVLTARKFVRLVDALLRNHQLFTPERCVKV

SEQ ID NO: 91257 - protein, 368 aa, unidentified
MKKRITFVGLDTHKNSIEVALADDGRNTEVRLYGSIGGDLASLDKMIRKLQATGTELRFVYEAGPCGYQIYRHLRAQGLQCDVVAPSMVPKRSGDRIKTDRRDACNLARLYRAGELTAIYVPQEDDEAMRDLVRGRQDAITAQRKVRQQLGGFLLRHGFRYPGKCAWTLAHRRWLAGVRMPHPAQQIMLQEYIHSVEECTQRVHRLTEQILQLMPDWRMRPLVGALQALRGVAPVVAATAVAEIGPMGRFEKPRQLMAYLGLVPSESSSGGSVRRGAITKTGNGHARRALIEAAQAYSHPARISRVMCKRQEAVPEPIRQIAWKAQLRLCARFRKLTARGKSRNRVVTAIARELSGFMWAIAKQVPVP

SEQ ID NO: 91258 - protein, 351 aa, unidentified
MLVVGSDAHKRSYTFAAVGAGTGELRSSETVQAPSAGHERLLAWARALDGERVWAVEDCRQVSGKLERFLLARGERVVRVPPKLMAGRRRGSREAGKSDPIDALAVARAALQEGIDTLPTARLEGPAWEVKLLLDHRDDLVAERTRIQNRLRWLLHDRWPELELPAGCLDRLVWLDRLSGRLARCEQAADVRVMRHQLRRLRELARDAAALERELALLVAAQQPKLLELPGCGALTAAKLIAEVAGIERFRNPAKLARLAGIAPIPASSGNTQRVRLDRGGNRQLNAAVHRIAVTQLRCHGPARRFVDRKTAEGKTKRQALRCLKRHLVRTIFNTMTPTTTNPPTPTPALT

SEQ ID NO: 91259 - protein, 369 aa, unidentified
MEKDTTYVGLDDSKRKIVAGILRPGDAQPELREIANDPRQIRRLFERLTREGPVAACYEAGVSGYDLYRQISALGVACAVMAPALTPRRPGQRIKTDRRDAAKLVRLFRAGELTAIHVPAEAEEAVRDLVRCRDDIRRDVLRWRHRVLKLLARHGRAYLAGKNWSQAHWRWVREQRFDLPPLQRAFEATLFALEQALARQAELDKEIQALATTAPYREPVGGLRCFRGIDTLSAMILVAEVVDFQRFRRPRELMAYLGLVPSEYSSGETQRRGALTKAGNSHARRVLVEAAWHYRHRPTIGRALASRSQGQPDEIVSHAWRAQQRLHRRYRHLVGHGKRTPVAVAAIARELVGFIWAALTRHESRHQAA

SEQ ID NO: 91260 - protein, 313 aa, unidentified
MTNKQEYVGIDVSKDTLDVACNGSKAFRQFKNTSRGISKLIEWMETIQPKLIVLEATGGLELACVAELSHADLPIAVVNPGRVRGFAKSIGQLAKTDKLDAMVIAHFGQATNPVPRKRPTEQEERLSALITRRRQLIEMLTAEKNRLHSARFNTRSLIEKHIDWLKAELSDLDGEISTYIHQCPAWKHKADLLMSVPGVGKVTVATLLALLPELGTINRQQIAALVGVAPVNKNSGKRSRKRRVFGGRANVRSVLYMAALSASSHNPRIKAFYDRLLENGKEKKVALTACMRKLLVMLNAIIRSDRYFEVLMS

SEQ ID NO: 91261 - protein, 330 aa, unidentified
MVELGIDVSKTKLDCTLLLDVDTLRCRSKSVPNTVEGVKVLLQWVQRHSGCAAEQVRAALEPTGVYHEAAALALYEAGVRVFVVNPAQVRDFAKGHAVRTKTDAKDSLVLALCVAQVKKLIAWQPAPAQIRELRALMSRLDAVEGELRAELNRQEKAQIAADPALVLSSIAQAISFWQAERERLQQAIDEHIDRHPGLKNEQERLLSIPAVGQKTANRMLCMLHGGQFRSASQLAAYLGLVPVEHQSGTSIRGRPRLSKAGNARVRAALYMAAVTAIRHNPDVRALYERLLSRGKAKMSALCAAMRKLVHICFGVFKNHQPYHPQIDQIA

SEQ ID NO: 91262 - protein, 427 aa, unidentified
MPYHIAGIDVHKKMLAVVVANVEGEGDYRFERHKVGTSPGELRALAGWLVEREVEEVVMESTAQYWRPVWEALELHWRPKRRTRDGASPISGTLHLAQAQSNRGAGGRKKDFPDAERLVKRLVAQELTLSFVPDAEQRLWRTVMRRKYQITRSRVQLHNRLESFLEEAHIKVSSVVSDLLGTSARRMLHALAEGETDPAALAALADQRLRATPDQLRDVLGACADLHPVYRRLVKLTLEELRVIEDHLAQLDQQMADLLGQHHDVVHRLAEVPGLGVDSAQQIIAEVGAAAATFPSSKHLASWMGACPGSEESAGTNYSHRCPKGNRQMRRVLNQAANAAVKAKGTIFAIVYRRLVPRLGHAQAIGVIAHRLCRLIWKILHQGIRYEERGPAVSEQAKKARARKMIRELRSLGYSVELLPAGSISPA

SEQ ID NO: 91263 - protein, 338 aa, unidentified
MEQLTTIGLDIAKNVFELHGVDAAGNVLLRKQLRRGDVLRFFSGLSPCLVGMEACATAHYWARELAKLGHTVRLMPPAYVKPYVKRGKTDAADAEAIAEAVTRPTMRFVAVKTDERQAVLMLHKVRDLLVRQRTMLINALRGHLAEFGIIAARGPGGVTAAIVALHETQDSLPVLARVALHGLVDQLRIVRDEVVKVEKRIVAQHGANDASRRLAAIPGIGPITASAIAAAVPDATLFKSGRQFAAWLGLTPRTHSSGGKERLVGITKQGDGYIRRLLVIGATAVIRLARQDNASKSWAAKLLERKSARLVSVALANKTARIAWALLARNQSYVAPAM

SEQ ID NO: 91264 - protein, 344 aa, unidentified
MEHFAGLDVSVKETSVCIVDDAGRIVREAKVASEPEALLAVLNNPSYRFRRIGLEAGPLSQWLYSALGEANLPVICVETRHMRAVLKAQINKTDRNDARGIAQMMRAGLYRPVHVKTLRSQKLRMLLTHRKLLQSKAIAIENDLRGTLRNFGLKVGVVGAVKFETRIKQLVENLPDLALLVEPLLVVRRVLREQIAVLHRRLLHIVRDDEVCRRLMTIPGVGPVVALTFRATIDVPARFRNSRAVGAVLGLTPCRHQSGESDRTGAISKCGDEMMRVMLYEAAQILLVRSTRWSWLKVWAMQIARRCGLKKAIVALARRLAVIMHRIWVDGTEFRWARQAAAAA

SEQ ID NO: 91265 - protein, 480 aa, unidentified
MANDIKQPKKLKTKSVKFGELQRINQYAAGVDIGASSIFVCANTKDDRHEVREFLTFTADIRAAAAWLKECGTKTVAMESTGSYWIPVYDIFEEEGLEVILVNAHHLKAIPGKKTDVLDCQWIQTLHSYGLLRGSFRPDGNGVTFRAYVRHRSKLIELASMQIQLMNKAMIQMNIRLDQVFSDISGTSSMTIIRSIVRGERNSAILAKHRNVNCKKTEQDVRKALEGNYRPEHIFSLEHALRAYDFIHSLISECDTRIQEILENEKPLEQKNFQPMSSGQISGSDKITNNEKERKPKKKRSGKNAYKFDAATALKNFLKVDLTNIPGVDANTAIKIISEIGTDMSCWSTEKQFISWLSLCPGNKISGGKVLSSHTSPTSNKARQAFKMAASTLYRSKTAIGAFFRRKRAQLGAPAAIVAAAHKLAKIVYQMLKVQKEFHDIGQDVYEQQFEKRKLANIKRMAREMGFDLCPREERAHINA

SEQ ID NO: 91266 - protein, 367 aa, unidentified
MFQLSTRQEESEMNATTVAVDLAKNVFALAVADGNWKIVECARLTRAQFERWFDNRKVDLVVMEACGSAHYWARTLRARGIEVRLLPAQYVRAYVKRNKTDAADARALLEAARASDIKPVAVKSIEQQALQALHRTRSGWMSTRTGRINTLRGFCREFGLVVPEGASTGLACMARYLADEHSGLPELLRPSMRLMIEEIRLLEARIGQLEQALSQLVKHSPACQVLQSVPGIGLLTSTAMVAAVSDPKSFASGRRYASFFGLTPREFSSGNSRYLGRISKRGDRYIRMLLTHGARSVLRAATVARRTGRPLDRLRTWALEVQQRTNHNKAACALANKLARIAWAVWVKQENYRATRVPSQSTEALSV

SEQ ID NO: 91267 - protein, 411 aa, unidentified
MQVIYERCCGLDVHKRTITACRLKWLGSEWQKEIRQFGTMTKDLLALSDWLVKEGCTHVAMESTGVYWKPVYNILEGQLELLVVNAQHLKAVPGRKTDVRDAEWIAELLAHGLLRGSFVPPPSVRELRELTRYRSSVVRDRARTVNRLQKVLEAANIKLASVVSDIDGVSARLMLEGLVAGKTETEELASMAKGRLKEKHGQLVEALSCRLQPHQSFLIAEHLAQIDYLEGAIERLSGQIEEKLRPFEQQIGWLDTIPGINRRTAEVLWAETGGDMSRFASARHLASWAGMCPGNNESAGKRRSGRTRKGSPWLRHCLVEAAHGAAHTKNKYLRSQYHRIAARRGKKKALLAVGHSILVIAYHLLTRKQAYADLGANYFDERDRQAVTKRCVNRLQKLGYQITLEKLQMAT

SEQ ID NO: 91268 - protein, 422 aa, unidentified
MNFGPVVGIDVSKRFSDMCILSPDNQIFAQTKIYHDSTSMKRAEALLKKATEAFGGRPAVVMEATSHYHLILFQFFSDCGYDVLVVNPLQSSSMKDFSIRKRKTDKVDALKLAMLYRTKTLRPSQIPQSAIRALRLLCRERVELLNDVTRYKNRLTAFLDQIFPGYDKVFSDVGSITSRAVLSHFPTPAILLASDEYELVEVIATASKSGYKFAKKKAEALIKTAETAKVLGIHTCADESMILSIIPMLNTLSDSVTYLEQSIGNLLAQVKTVRKNVELLQTIPGVGPHSASLIMAEIGDISLFKKPKQLAAYFGLDPSERQSGTFRGTKNKLSKRGSPYARAALHMAVVNAVFRHANAPAANPVLSGYYEKKCKTKPAKVALAASMHKLIFIIFAVLRDQKPFELRTPEQHAREQGFIKAA

SEQ ID NO: 91269 - protein, 458 aa, unidentified
MAPRFKGNPPNAKSSHSKSLHVLHLHAAGIDIGAREIYVAVPPDSCADNVRSFTTFTEDLHALRDWLKQCGVTSVAMESTGVYWIPLFQILDASGIEVCLVNARHCKNLPGRKTDVQDCQWLQYLHSVGLLRGSFRPTDQVCSVRTLLRHRDAIVRGAGRCVSHLHKALTQMNVQLHHVITDLTGVTGQAILNAVLNGERDPQKLAALKDHRIKASRDVIAKSLRGDWRAEHLFTLKQTHALWLQHQSLIAECDAQIEAMLKAFDSKADVQAAPLPPAKAGNKKAQRNEPQFNARTECYRILGVDLTSVPGFASPTVLVLMCELGPEFAEKFPTAKHFGSWLGLCPDNRITGGKVYSVKTRDVKSRVAEALRLAAQSLWQAKNYFGDLYRRWKARLGSPKAITAMAHKLARVLWHLLKYKQPFNPEVFAKEEAKMKRKKLQRLHTMAESLNYRIIPIQ

SEQ ID NO: 91270 - protein, 320 aa, unidentified
MEKNTSLFVGVDVAKDQLDIAFSNGVKSRCVPYDAQHLQRLIEELMVLAPALVLLEATGGYEKPLVYALEAAGLPYRVANPRLVRDFARATGKLAKTDQIDAQVLVEYARKLKPEARTLADPARLVLRELVLRRQQLLDMKAQEENRLRTAPKTVAVSIRAIIRVLEKHIHKLEQQMNDFLDQHPMLIAETELLESVKGVGPVLSRTLCGLVPELGHVNHKQIAALIGVAPFNCDSGRFRGKRSCWGGRAEVRRILYMATIIAVRYNPKFTIFYQRLREAGKPFKCAIVAAMRKLIVLLNAMMRDFYATQNASSATCHAK

SEQ ID NO: 91271 - protein, 352 aa, unidentified
MQTKINTQAKLYIGLDIHKRSWKIHTSTDLFDGKTISCPPDPQALKKYVDKHYPGHQVSIVYEAGCFGYSAHRSFKSFGWCSLVVNPADISKTGNAHYQKTDTIDARLLCRELKDNRLTSIEIPTVEQEQLRCLFRRRIALVQDFRAIKSQIKMQLLYLGIDIPHHFDQQAKWTKAFLKWIETQTCSYPTATSSIQSQLSQYKFIDQQIKEVSNQLRAYCRKHYKKDYFLLRSIPGIGKLVACSILSEIGNLRRFKNFKQLASYVGLCPGIHQSGDNHKNMGLSTRGNRILRSYFVEASWIALRYDPVLQKYWRTHAGKEPKKILIKVARKLLSRTYAVIKTETPYEIGVIK

SEQ ID NO: 91272 - protein, 341 aa, unidentified
MKVSTLGIDLAKNVFQLHGVDHEGHTILRKKLTRAKFVQFVIQLEPCLIGMEACSSSHYFARLFTRYGHEVKLIPPQYVKPYVKTNKTDAADAEAICEAVTRPNMRFVQIKTEEQQAVLALHTERGILIRERIACANSLRATLAEFGITIAAGQNHLTRELPAILEDGENGLSPFVRTSIYRQSKHIRELEEQVKQVEEALASWYRTQEACQRMAKIPGVGMLTATYVVAAVGNARQFSTAKQFASWLGLTPKEHSSGGKQQLGGISKRGDGYFRYLLVHGARALTAWVNRNGAVEKNSWLQGLLERKHYNVAVVAMAAKTARIMWSMLSHNTEYQPRQLA

SEQ ID NO: 91273 - protein, 369 aa, unidentified
MDDITFVGLDVHKATICIAVAEGTRGGEVRQLGVFENRPEILRKVVSRLSKGGRRLSFCYEAGPCGYGLHRLLTGYGHECVVVAPSLIPMKAGDRVKTDRRDALMLAKLHRAGELTAIWIPDAAHEAVRDLVRARATAVRVLVKARQHLQGFLLRHERIYRGARAWTLAYRRWLSTVRFDHPAQQIVLQDYIHAVQEAETRRDRLTQQIEELLPNWSMASVVAALQSMRGVALVVAVTVVAEVGDFRRFANPRQLMAYLGLVPSEHSSGSSVRRGGITKAGNALARRVLIEGAWTYRMSARVSRKIHDRLEGLPAAVRDIAWKAQLRLCARYRRLAATGRPKVVVTTAIAREMVGFIWAIARVAQPALV

SEQ ID NO: 91274 - protein, 464 aa, unidentified
MNEDSKAASEQKGGKNEEGIAALGRRVAGVDVGSQGHWACAPVREGEGREVQVFGATTAQLEKMADWFLERKVESVALESTGVYWIPIHEVLEGRGLEVVLVDTRVLGRVPGRPKTDRRDCQWMQRLHSCGLLQGAFLPPEQICMLRTLVREKGNLVAEQGDWVRRMQKSLEQMNVRVHRAVADLTGATGMALVRAIVKGERDPRQLAKLRDPRCHKSEEEIAEQLTGHWREDHLFSLGQALKMYEAIQERIEDYERAILEKLKAMEREECRGQEPPELKNQQKAKTILKRGQEPLRQALYRVSGADLTAIDGIGVEAVQAVTSEYGTDLSAFPKEKQFVKHVLLAPNQPTSGGKPVKKKKKAYSASSRVAAALRMAALSVRHSQTALGAYYRQIARHKGGDVAVFATARILAVLIYRMLRWGKNYVDEGVEAYEKRYREARLRSLTSTARQLGYQLTPLTAQP

SEQ ID NO: 91275 - protein, 333 aa, unidentified
MKSPIAIAAAALGIDIAKLKFDVCLIKPNGKAKHKVFVNTRHGFEQLIRWLDSHQVTNLHACLEATGTYGEPLALFLFEAGRLVSLVNPAAVRAFANAGLSRTKTDKADAELIARFCLAQQPKAWQPPAPEVRQLQALVRRLESLVEMRVAEENRLSSGVSAAAVRQSLEEHIAYLIEQIKQTEALIRQHINHHPDLKEQSDLLDSIPGIGETTAALLLAEIVNIKQYTSARQVAAYAGLVPRERRSGTSVRGRVCLSKIGNARLRKALYFPAITALRCSDFFKAWAEPLRTRGKSKMSVIGAAMRKLIHLAYGVIKTGKPFDPNWAKAIEIA

SEQ ID NO: 91276 - protein, 340 aa, unidentified
MDATTYGLDVAKRVFQMYWVEAETGEIVNRRFGRDELIRFLAQRPAGRVALEACGSAHWWARKIKALGHEVVLLHAKFIRPFVQTNKTDAADARAIWTAVQQPGMRPVATKTEDQQAMLSLHRMRALLVKFRTMQVNQLRGLLYEFGATFRAGRAAGLAEIRARTAELEDALPGTMMCCLQDQLRRIEELQLDIDLLEKRIGVWQKQDAACHAITAIPGIGRLTATALVATMGDAKAFRSGREFAAFLGLVPRQSGTGGKVRLGPMSKRGDPYVRTLLIHGARSVMYNAKVPTPWQRDIQARRPANVAAVALASKFARTAWAILARGQEYQRDYVSVRPA

SEQ ID NO: 91277 - protein, 405 aa, unidentified
MEFVVALDVSMGKSYSVIYQDQRCLYEEEISHNQLGFQQLFDHIQTLPGSVTVVFEATGIYSKPVESFCQRNALRYCILNPLEAKKQLELGTLRSWKTDKHDAHLLAQSHSLHRREEKRTQSAIYQNLRDFSRFYQEIEEEIKRMRMYLHNALQLSFPELEQFFSSRVTPYALSLMELFPHPDLVLDSSITKIKNQLILHTSKNISQNRAKQKAVEIMSYAHSSYPSVPPESVQTQKVRYYARQLLHLLEEKERVAKELIEEAKNLPEFELFLSVPGIGEISAALVMGELGDLSRFSNHKKVNAFVGIDIRRYQSGKYHGQDHINERGNPKGRKILYIIIRNMIRQQKAAPNHIVDYYYKLKKQPTPKKDKVAVVACMNKLIKCMYSMAWNHTKYDYSHAVSMDQ

SEQ ID NO: 91278 - protein, 355 aa, unidentified
MLYLGIDQHARQITISLRDEHGDVLQARQVSTQPDKIHAFFQQLTRERLHKDEQFVAVLEVCGFNDWLIRMLKDYRCHKVILIQPDERKKRKTDRRDAAALSELLWVNRDRLLHGKPVRGLRQIDMASSTDQENRRLTTLRKEAGQARTRLVNKIKHMVRRHNLQWEMPTKRLPSKSAIAWLKQLVLPEIDRLEMDQLLADLEQIQQRLKELEGVIAKRCGVSKEAVLLSSIPGVAHFTATSLACRVGRVERFPRSHSLANYWGLTPGCRNSGENNQRLGSITKAGSAMARWLLAQVTHKVLRRDTRLREWFKRLKRRRGASIARVAVMRKLATIIWHMLSKKKTYAECRAHVAA

SEQ ID NO: 91279 - protein, 371 aa, unidentified
MYHLSHAVQMNGCQNHCKLMKTETTAFNPKLYIGIDVHKKSWTFHYQTDLFDGKTITQPASPGKLVEWVQKHYPTHEVTCAYEAGFSGYSAARLFQKQNWNVLVLNAADIPMPQKQSIVKTDKIDCRNICKQLKNEALKSITIPEEQRESFRSLFRERNNFVMGLRHIKLNIKSYLMYCGITIPEEFDNASWSKNFIEWIKNQSNEYETGALKISYLLKRYEFMYQESLSVSNQIRLYARKHYKKDYYLLMSIPGIGGITASAILAELGDLRKYNRFDDLASSVGFVPGIYSSGDKTIVKGITPRAKSLLRSYLIEASWQAVRFDPVLQEYYRSHYGKQPNKIIVKVARKLLSRIHAVIKTETPYQIGVIK

SEQ ID NO: 91280 - protein, 417 aa, unidentified
MKKNSKSPTKKEPKAKRAKAQRPVQRETKEVLSELVEKLRGKLELKPTPASPVKAGQRPERSPNLDQLTVGVDLGDQWSRYCILGLQGETLSEGPLQTRQAELAEFFQAFPPARVVIEVGTHSAWVQEVIAAEGHEVLVANPRLMEGSKRRKRKNDRIDAHKLARLGRVDPQSLHPITHRSREVRQDLVLLRAREALVEARTELINATRGLVKSLGTRLPQCSSRSFGHKVGDAIPAEAREALLPLVQLADGMSACIKDYDRRIEELASEKYGHTKLLRQVKGVGPITSLAYVLTLEKPERFPKSRDVGPYVGLVPKQEDSGESQPQLGISKAGDTMLRKLLVGSAHYILGPFGPDTDLRRYGLRLCERGGKNAKKRAAVAVARKLAVLLHRLWVSGEVYEPLGYASSAAMVQKAAA

SEQ ID NO: 91281 - protein, 372 aa, unidentified
MNYNTVYVGMDVHKESFTLCSCKYEDEKASHYQRTPASYKNVLRYLAFLRTIYGEDTRFVCGYEAGCLGYSLYHQLENFNVECVILAPTTMLEQRSKRRIKTDKRDAEIIAKSLAQHNYSPVHIPTKMDNQTKEFIRMRDDHKAELKKIKQQILAFCLRQGYQYDGSGNWTAKHVKWLRSLKPAGLYKEILDEYLLTYTILTDKLNRLDQRIEELASKEEYTESVSKLTCFLGIKTHTALSVIVEVGDFQRFVSARKFAGYLGLVPGQHSSGDDRNGLGITKAGNTHVRRLLVESAQSYTRGKIGYKSRVLRSRQAGNSPQVINYADRANERLRRRYYKMVLKDGKKYNIAKTAIARELACFIWGMMTDNIY

SEQ ID NO: 91282 - protein, 454 aa, unidentified
MGIDVSKGYADFMIIDRQKNSVIKAFQLDDTFDGHRCLYKTLQRFFAHHPDSTMFVGMESTGGYENNWYQSLTRFQGSLNIQTARLNPFGVMHNSKADLKKNTTDRISAQNIAEYLVAHPEKVAYQKEDQLSGLRRQWGFIQMLTKQCGQFLNQLNSLMYTACPELLHYCQTGVPDWMLKLLVQYPGSAKLKRARIKSVAKIPYVTQKRAQQLITEAKSTVASATDPAIQQLIVATARQILHMRKTITDQTKQLVDQCNLPEVELIKSFPGINNASAVGLLIEIQTVKRFANVKKLASFFGIHPVYKTSGDGIGGIKMSKQGRKAPRQILYMIALSAIQHNPLVRQVYEKHREQGTHKMAALGICMHKILRIVYGMLKHNKPFDPQIDVANQQRCGRIENEECEKATDRRFQTYDTNAPISRRQRKKRLERERPHSVDDAKFGVTAPVPLTNIS

SEQ ID NO: 91283 - protein, 366 aa, unidentified
MKKISTVEVERIQIFKEHQLTIGLDLGDRWSFYCVLDEGGKIILEQRVATTPEAMKQTFGKIPRSLIALETGTHSPWVSRLLTELGHEVIVAHAQKVELITKSNRKDDRHDARTLARLARIDPELLGPVRHRSAKAQIHLTVIRARAELVSARTALVNAARGLVKSFGERLPKCGTYQVNEKLAEGVSAELRDVLVPLLREVESLSERIKEYDEQMEKIAKEVYPEVSVLKQVKGVGTQIALTYILTIEDPYRFAKSREVGCFLGLRPGRRNSGESEPQKKISKEGDRYLRTMMVQGAHYILGPFGQDSDLRRWGLKLAERGGKNAKKRAVVAVARKLAVLLHKLWVSGEVYEPLRNNRKAMAAVA

SEQ ID NO: 91284 - protein, 504 aa, unidentified
MVPASGDETIGGAAQAKTPINSIPAEGWPDLVADKEEIAMRKPRLARKRRIPEPQRSELPRINLDAAGLDIHQAEIWACVPCDRAEEPIRCFGTYTPDLESLADWLQACGIKTVAMESTGVYWIPIYEILEQRGLELYVVNARHAKNVAGRKDDVCDAQWIQTLHSYGLLSRSFLPDATWRPLRAYWRHRMGLIQHRASHIQHMQKALQQMNVQLTQVLSDITGVTGMQIIRAIVAGERDPVTLAQFRDRRCAHSTENIAKALTGNYRAEHVFALKQALALYDFYTAQIAECDAEMERLYAEMQDVSGPDGDPLPPLGPRSNNNSHSKNAPIFDLRTHLYRITGVDLVAITGLEESTIQTIISETGIDMSRWCTVKRFGSWLGLAPRNDISAGKVLRTKTAKQRNRAGQAFRMAAQSVNRSNTAIGAYYRRLAARVGVQQATVATAYKIARIFYTMLKKRTQFQETGADEYERRYRERAIARLGKKAFTFGYRLVPVETEAAAA

SEQ ID NO: 91285 - protein, 416 aa, unidentified
MRKAAVVYTDITELHPVHDRVAALDVHLNQITVCVMLREPDGQVRMQFREFGGFKRDRREMAEWIASFQPQAVSMESTGIYWKSPYAALERVGIRAQVVNAAEVAKTPRRKTDMLDAQWLALLTRAGLLRGSFLPVEKLRHARQLARYHTSLVNDLVRQKNRLLKVLADGGMRLSAIVSDPHGKACRAMIDAILDGASPEQAVRHAGRLRATHAELRAALDHELTEVHLHLARQIRQYINFIEASMSDIEAALMQEVLPQGSLIAQLLTLPGIDRLAAAKLLVEIGDDMSHFAKPGRMAVWTGVCPGNEESAGNRKRAKTRKGNCHARRVLIEIAHAAVKTQCYFKDKFQSLKPRLGYKRAIVAIAHKIIKVIYCMLSRGELYRDRSVDFEALQTRRNAPRWIRQLQKHGVLPANA

SEQ ID NO: 91286 - protein, 331 aa, unidentified
MKKEDFLHFIGIDISKDTFDVAVLSGGETASFVFDNTQKGINAFLRSLRNQKMVLAQCLICTEHTGVYGRLLIARLVEKNAFLCVEMSLRIIRSLGIRRGKSDRIDAVRIAEYAQKNVEELEIYEPLPQILEKVRILLTVRERLVKNRADLNKYPNELKRFAPELAKLAQQNIKNTSATLTAEIKRIEAEMQALILSDDRLNKTVGLATSVPGIGKITALQLTIYTNFFTRYENPRQLACYCGVVPFEHSSGTSILKRARVNNMANKTLKRQLHLCALAAKTYDPELKSYFKRKVEEGKSKMLVINNIRNKLVHRVCAVIKRQEPYVKLTA

SEQ ID NO: 91287 - protein, 388 aa, unidentified
MEPTSIHPTAVRTDLGAIFVSLELSRSTWLVTSLSPGSGEKMSKHVVDGGNVAELLDRFEQLQQKARLRTGKSFPIVTIQEAGLDGFWIHRVLEANGVESYVVDAASIATSRRRRRPKTDKIDGEALTLTLLAFKRGEPRVCAMVRAPDPEDEDRRRICRERKVLIAERVRHVNRVKGLLFAQRISGYQPLRKDRRKRLEELQTGDGREIPRHLKAQVNRELDRLELLLEQIATVESERNSLLSTHEQPAVEAITPAAMLLSLKGVGAEFAAVLWTEALSRHFDNRRQIAAYAGLTPTPWMSGTIDHEQGVSKAGNPRLRTTMIQLSWLWLRNQPASALSRWFVDRVQSNGGRLKKAAIVALARKLLIALWKFVTAGVVIEGAVMKTA

SEQ ID NO: 91288 - protein, 407 aa, unidentified
MEVVYRRCCGIDVHKKLIVACLNKEGKRELRNFGTTTQAIKELAGWLSNEGCEMIAMESTGVYWKPLYNLFELMGLEAMVVNAAHMKALPGRKTDVKDAEWIADLLRHGLLRGSFIPSREQRELREVARYRKSLIEERAREVNRLQKILEGANIKLDSVVSDITGKSARKLLRLITANEELTADEVSRLLHGSMRPKLDRIVIALEGITTPLQRRLLTQVIDHIDDMTRRIEEMDDIIKEYMQQYEDAIAAIDELPGIARRSAEVILAEIGLDMHRFPTAAHLCSWAGVCPGNHQSASKRKHGKTTKGNKTLKTMLTQCAKAARNVKDSFFSAQYQRISVHRGKNRATLAVAHSMLIAIYHVLRYCEPFRDLGSDYYDHYNRERKIKGYLKRLQSLGWTPDLTTTVA

SEQ ID NO: 91289 - protein, 330 aa, unidentified
MTIHYWIGVDLAKDSFHAALAPEHSKTEQWKYLPQQSFEHSPDGLTAFVGWVHAQGVTLEQVVGVCVESTGNLSWRWLLALDQRLGAVSIVNPYFIKSFGQSMGMRNKTDRIDAAVIALYGLQREPAPTPLPSKDQQRLRSLHRLFVGLQKELVGHKNRLQDFAMDPVVCSHIETHIEGLERLIQQIEQQMDHLVQSVPALKKDAQLLLSIIGIGPKTVRLILAELGDLRKFSRKQIVAFTGLYPKLFQSGSSVHKKTRLAKGGGAIIRRNLYWGAMAAKKYNPKLKIFFNRLVEQGHTKKSAVVAVMRKLILIARAVVVSGQEFNSDIA

SEQ ID NO: 91290 - protein, 358 aa, unidentified
MRFIIGCDYHPRFQMIAMLDTTTGEVKVLRLEHENGEAKAFYLSLPKGTRVGIEATGSTQWFERLLGECGHELWVGDPAQIMARVVRKQKTDERDALHLLDLLMTNRFPRVWVPCPADRDARQLLQHRQKLVRMRTAVKNQLHGLAMAQGLCRKHKLFSQAGRRLLESLELGPWASRRRNELLTLLDQLDPQIAELDKAVEAEAARRPEVQLLRQQKGVGVITGLAFVLTIGPVERFARSRQLVSYLGLNPSEGSSGGHQYLGHISKQGNSMMRWLLVEAGQTAARLDVKLSRVYKHIKFRRGANVAKVAIARRLAVRMYWILRPAREAAPPVRMSGSSTHSVVDPRSGSVGTTPSSL

SEQ ID NO: 91291 - protein, 417 aa, unidentified
MPNNWQEVLMQVLYPRCAGLDVHKDTIVACVRCISPPMHQEVRSFGATTAELLKLADWLAEHDCTHVAMEATGVYWKPVWHVLEDEFELVLANAAHIRNVPGRKTDVNDAMWIADLLAHGLIRSSFVPPQAIQQLRDLTRTRKQLVREVSQHSLRIQKVLEDANLKLGSVLSDVLGKSGRAMLDAIVAGETDPACLAALAQGTARNKSAELREALRGRITDHHRTMLRLHLQVVDALQRTLAELDAAVGKALAPIQERARLLTTMPGISDLTASVVVAEIGVDMSRFPTAGHLVSWAGLCPRSDESAGKRRSARVRKSGTWIKTTLVTAAWSAVRVKTSYLRAQFLRIKARRGAKKAILAVAASMLTAAFHMLRDGTEYNDLGSEHFDRQDKSKTIRRLLKRLQDLGCDVPELAHTA

SEQ ID NO: 91292 - protein, 343 aa, unidentified
MGEVSTIGLDVAKSVFQVHGVDGTGAVVMRKRVGRAKVLGFFADLSPCLVGIEACPSAHYWSRELQALGHTVKLMPPRYVKAYLKRGKNDANDAAAICEAVTRPSMRFVPIKTQDQQTGLMLHRTRQLLVRQRTMLSNAIRGHMAELGIISAKGRNGTAELLQIIGDVADDRIPPVARFCLELLARQYLTLVAEVASIDKRIQAWHRSCEESRRLEEIPGIGPIVATALVAEIGDWRAFRSGRNLAAWIGLVPKQYSTGGKERLGSITKQGNRYLRWLLVAGAMAVIRYARAHGTKRPWLTQIMDRRPAKVAAVALANKIARMAWAIMVRAERYKEPKLLLAA

SEQ ID NO: 91293 - protein, 411 aa, unidentified
MEVMYPRCSGLDVHKQFLIACVMYAQADGKLKQERKRFETTTNELRALVAWLQSFGITHVVMESTGVYWKPVYNLLHPHFTTWVVNASHLAQVPGRKTDDTDAQWLTKLMRYGLLQPSFIPEVEQRDLRELTRYRTRLLQEKSAALNRIQKVLEDANVKLAAVVSDIQGVSARLMVDALIANTLDTIQTAELAKGQLRSKIPQLVEALTGQVRPHHRFLLAEVLTHLDELNERITTLNQRIRTLVLPHEALIERLDAITGVGCTTAEIVLAEVGTSVDSWPTDRHLMSWACICPGNDESGGKRRSGRRRKGQKWLVPALIESAWAASHTKNTYLGAQFQRLRARRGAKRAAVAVAHSILQIIYHLLKDPTAVFTDLGGDYFLTKNKEYEQRRALKTLESLGFAVQLTPATA

SEQ ID NO: 91294 - protein, 351 aa, unidentified
MEEYIAFDSHKHYTWVEHEQVATGRVRQYRLQHAPGAIRRVLAGCEPGTPVALEATANWYWIVEEIEQAGLRPQLVHPRKAKLMMGLINKTDKLDAHGMNRLQRNGTLPTVWIPPGRLREFRELTRTRVVLVAQRTRWKNRLTATLAKYGAPSSEYSDPYGKGAREELDSRIERLPEQTRWAARQMLAQLDTLSEQILQFEGRLKELVEVTPEMQRLMTLPGVGVILAATIALEIGEIERFPSAEHLASYAGTTPRVHASGDRVRYGRTRPDVNRYLKWAFAEAGNSVAVNHTRCPARHVSQLYLRLRLRKGHGKAIGAVARHLAEAAFHVLSRQEAYQDPTVRPGRTREV

SEQ ID NO: 91295 - protein, 345 aa, unidentified
MGMVIYVGLDVHLNSIAAVWGKAKDKPRSMTIVPGDEGFKALTEAVGTGQVWGVYEASSCGFEAYDQLRALGWKMSIAAPTHITKSAHSKKRKTDLRDAKHLWELLMSHGELGTELAEIWIPSRELQEEREIVRRRLKLSENSCRVKNGILSLLRMHRIKRPEGMKSAWSKKHIAWLRGLTKGGTLKAPVRTVLESCVRELEFLGTEIETLQKAVEALASEPKYYREVERMTEVPGVGILTALTFLVELGDLRRFDNRRQVGSYLGLVPACYESGEANDRKGHITRLGPSRVRKVLNQAAWHLVRLDPLWRRRYEEIAARRGAKKAITAVMRKLGIELWQRAKAA

SEQ ID NO: 91296 - protein, 331 aa, unidentified
MTITTTPSNGERFNRVIAFEVSKADLVVYCAPQDVSSTIPNTKSAVRRYLKKQTRTKPGPEVSDLLVVCEATGGYERFVLEAAAELGLACHRAHGSRVRAYARYRGTHAKSDAIDARLLADYGLHGENLKLYQPPSPAQDRLRALLGRRTELRRAMEAEQCRLDHALDKDIAHSIKALIAVLQRLLAGIEAKIVLLMKEDADLAEKARLLQGVKGIGPITAATLLGYVPELGSLSRGAAAALLGVAPFDRDSGKIKGKRHIFAGRGEARSCLYMAAISAMRYNPKFKEFATRLKQRGKPFKLVAAATMRKLATVVNAMLRTAAPKIAQTLA

SEQ ID NO: 91297 - protein, 419 aa, unidentified
MVHVHGAQAQRLVQATHGIDPAGLVAVPVDVGKRAAMALVCDFTGELLARPFAFPMTMAGVRLLVERVQAATDGRAVRLIRVGVEAAGHYHQPLTSAGVLPADWQLVQVSPTQVASQRQLTGRRRLKTDALDLVAISDLLRAGHGAGQARRSVVMGELAAWVAHRERRVTARTALKNQLLGQVDRAFPGVSGCVSSLFGTKVGRLVLAEFTDPVRLAALGVAGFQQAAATRGVQVLGPVAERLVAAAQVAIPTDQAPMARTMIDRDLTLLAAFDAQIAEADQHLASLLPRTPFAVLCSGPGWRVVRAATYGAAVGDPDRWPSARQLYRASGLCPTTYASAGRRHDGAISREGSVTLRRAVLSLGVGLWRLDPAARAYAASLRARGKPPGVIATAMANRANRIAFAMVRDQRPYDPDRWR

SEQ ID NO: 91298 - protein, 412 aa, unidentified
MLYLGIDVGKTWHEAALLSDTDEVLWHLRFRSNRAGLERLAERLAPLDPADLTVALEATGVYWITLHRHLLSRGGTQLLVLNPLQTRAFRNANLRGSKTDRIDAVSIARLIRWAGRTLSTHVLPEERRAAAREISRVRGEMVRLRAEQLIKLDSVLERIFPEFGEVFSSLSTKSAQAVLARWPTPRLLAQNSAEEITAVLEQARGRRTSPDVAQQLLRQAAESVGIEDPLDASAAAIQALVAHVAHLEEQIASLGARLDTLLEPDAARNALLQSIPGIGIETARTWLAEALPIEQFEGRDAAQKLVATLGIDAQPRESGQSAGKVKMSKRGNRHLRRAVLLAARSACRSDPQFRAMLNRQLARGKHYNVAVSHVARKMVHVIYSVLKNQRPYELPPEYRLGIVEPQLCASGA

SEQ ID NO: 91299 - protein, 351 aa, unidentified
MKDTMIGVDLAKRVFQLHGAAMTGEVRFRKKLTRDQFRIFMAAQPAAVVVFEACGSASHWAREMEALGHEARLIAPQYVRPFVKRQKNDAADAEAIVIAARQPEMRFVAPKTADQQARAVLFRGHERLVHQRTELYEYGHVFPIGLCHVKRIAAVVDDPGCDLPALVIAECQDLLAQIAEKTERIEAKTETLKALAAETDTARRLQTVPGVGPLTALAVEAFAPDMAQFKSGRDFAAWLGLVPRQHSTGGKARLGRISKAGQSDIRRLLIIGAMTRIMGRARHKVPACWMSLRTDPALSRYCTLRSGNSLWAGALSPCWGMPQQGLPILVFHGVAERPWRSANGQTKGYGG

SEQ ID NO: 91300 - protein, 425 aa, unidentified
MNDDVMIAVDPHKASNTAAVLDPVSKTVIESARFANTADGYGRLTAFAARWAQRRWAVEGCFGAGRSLAQRLVADGEMVLDVPAKLAARVRVYSRGHGRKTDKDDAVSVGLAALDGTGIRLVTCDDALVSLRLLCDRRDELSALRTQAVCRLHRLLAELTPGGMRRELSANKAQALLARIRPAGDVGQVRVHIARDHLADIRALDARIKYIGTQIAALVTASGTGLTGLYGIGPVIAGRILAEAGDVARFATKDAFASYNGTAPIDVSSGDQIRHRLSRAGNRRINHALHMMAVTQIRNRGSQGRSYYERKRLEGKTGKEALRCLKRRLSDLVYYQLIGDRRGTIGPCGSPMTPPPTRPTSISPATRSREAAPPPRPLHRPTPKGSSRSTGKMAASSASRSSTPAPDSTTTSSTRPKSTAKTAAS

SEQ ID NO: 91301 - protein, 381 aa, unidentified
METLHSHCAGLDVHQKEIVVCIYIGNSETELTKEIRTFPTFTKHLFEMLQWLEELHITHLAMESTGIYWKPVFNILEDYFDITLANAQRIKNVPGRKTDVADAEWIAKLLRYGLIEKSFVPPSDIRELRDLTRLRKKMIGNMTAEKNRIQKTLECSNIKLGSIISDVFGVSGRKLLTRLVEQGYVNSHEVEENIHGSMMPKASQITESLFGTLNPHQIFLIRQSWNHILFLEESIKQLEEKIDELLLPYSEQVELLLTIPGVKKHATASIIAEIGVEMIQFPSAQHLASWAGLSPGNHESAGKKKSSRTTKGNPHIQSMLCEVAWAISRTRHTWLSGKYWSLAARRGKKKALIAIAHKVIKIIYHILDQRSGFIEYSKILS

SEQ ID NO: 91302 - protein, 394 aa, unidentified
MKLIGIDIGKNKHFFCVMDQQTGEIISQPVSFSNDKEGFDFLVQKIKSYPKDSILIGMEDTGHYHFALLKHLLDLQYTVALINPKTTDFNRKMQGGITKNDKLDTINICDVLDTPERKKQYRITKVNSFDLYEQKQLTRHHHNLKEEENVYKNRLQKCIDIVFPEFNKLFNSKYGIVYMNILKMFGSAENIANTDIRTIRKCFEIEGRGNRISLTPERLKECARSSIGISSSAEVIQIKHLTAQIELIEEQLTEIDKKIEEFSIQNNSPILSIPGISHFSGTSILAELGDISNYSKPSQIIKFAGVAPLHYESSQFNAQHTAITKKGSKYLRKTLYQIILPVIRHNPVFNKYYQLKISQGKGHRCAQGHCVRKPLRIIYHLLKTNQQFDPQLLR

SEQ ID NO: 91303 - protein, 337 aa, unidentified
MEQQTQYVGIDLHRRRSVIVRRTGAGETLDTVRIDNDPVALAKELAKAGEHPEVILEACYGWYWAADVIQECGGNVHLAHPLGNNWGNRRVKTDERDATDLVDLLRLGRLAESWVAPPPQRELRELVRYRAKLVHLRTSLKAQVHAVLAKEGVPVPMSDLFGVGGRRLLDDVHLGEAYRFRVNSLRDLLGHVDRQIELVENQVAPIFAGDLGYHAVQAIPGVGPVLAAVFVAEIGDVSRFTSARHLCSWAGLTPKHKESDVMVRRGHITKQGSRLVRWAAVEAVARQSTDSPIRRHHRHVGERRGTKIGRVAAARKLLIYVYYGLRDGEIRCLAQGE

SEQ ID NO: 91304 - protein, 416 aa, unidentified
MKYAQILVLAETPPGGLTAGIDWGSADHAVCVVDTAGQVRARFTVAHDRAGIGKLIAGLRAAGVSEAAIERSDGVLVEALLEAGLTVVVVTSRQMRNLRSRYGSAGAKDDRFDAFVLADALRTDRARLRPLVVDTPATAALRAAVRARRDLVAHRIAACNQLRAHLAVAFPGAVGLFASLDSPISLAFLARFGSHDAAGQLTEDDLAAWLHTVPHRGKAARPGQLRARLQAAPRGATGPDGAALVPVTGALVATLATVSAQVQALEAEIAVQLAAHPDAHIFTCLPRAGTVRAARLLAEIGDCRARFPDPESLAGLAGVAPVTRRSGKHISIGFRWAVNRQLRDAVCDFAGDSRHASPWAAAIYDAARARGKDHPHAVRITARAWTYVIWRCWQSGSAYDPAKHAALQRVLEQRKS

SEQ ID NO: 91305 - protein, 398 aa, unidentified
MELSGKSIRGQCENNSSDIRTTLEEIRNEVQQHGDYQIRVLCESTGIYHRRLLQLADELGMRTALVHGEAVAKFRTIQFADHGKTDQRDPKAVLTVAKVGKLIQDRKLDKHYAQLRELHRLVLRCEARIKVAKCELHADLRSLFADLRLDKSVLYGPTGRALIEQFAGNPHAILAVGEEAFYGRMKACSKHTKKATLKKLWRAANDTASTQKDDLAATLAEIRATAVQQLYTEITTFLQQQRQIESQMQELYLTLQSSDPRLPAPRKGVVTLRMLSRLVAEMGPPDDFRTVSQLMRYAGLNLCERQSGKWRGRTTISRRGRSELRYVLNLMAIPLVGRGKLFGDYYWKKKEADKMPGQKANVCVMRKILKMFYGWYKSGEPFDPGRVFVMASEHAKAA

SEQ ID NO: 91306 - protein, 375 aa, unidentified
MKNKVRFLGLDVHAETIAVAIAEPDGEVRSLGTIANRAESIRKLVKKLGSAEQLKACYEAGPTGYVLYWQLAELGVACEVIAPTLVPMKAGDRVKTDRRDAERLARSYRSGDLTAVWVPDEGSESLRDLVRAREAAKQDQLRARHRLSKFLLRMGQRPAVGMKAWTAPYMAWVRQVHFTQVAREATMLDYLHEVDHMSERVRRLEQAITEAVKLATPAVQEVVKGLQALRGIAEISAVTIIAELGSITRFDTPRQLMGYSGAVPSENSSGKRTQRGSITKTGNAHLRRIVVEAAWSYRLRPAIGPRLRKRQEGVSEPIKEIAWKAQVRLTKRYARLAAAGKDQRKIVTAVGRELLGFIWAIGIKAEAAGKLQMAA

SEQ ID NO: 91307 - protein, 363 aa, unidentified
MATTSLPQQHERRQQPRSGSEVIIGVDTHKDVHVVAVLSPTGALLDTASFSTTLAACQELIEWVRGYGAPAVAGVEGTGSWGAGLTRVLRGQGIAVIEVNRPDRSMRRQRGKTDTVDAEAAARAVLSGQATVTPKSHNGMVEAMRLYKLAKNSAVKARTQAINQLKGVLVNGDPLLREQLTGKTTHAQVMHCLTLTCDGLDPVRAASHRTLRTLAQRIRHLSSEVRELEKLLTAAVAETAPRLLDLFGVGHDSAATLLIAAGDNPDRLTGEASFAALCGVSPIERSSGKTQRRRLNRGGNRQANAALFRIALTRLRTDPRTRAYVQRRTTEGRTKREILRCLKRYLAREIFKIIIGVVGPTLA

SEQ ID NO: 91308 - protein, 385 aa, unidentified
MTQATLQAEHNASVAKLCVALELGGTRWKLVASSGGTKITETSVPAGDIEGLEQKIRAARARHGLPSEAPVVSCYEAGRDGFWVHRELERGGVQNVVVDSSSIEVNRRARRAKTDRLDGRKLLTMLWRYEGGERTVWRVVRVPTPGEEDARRLHRELDRLIKERTAHVNRIRALLVLHGLGHSIGRRTVTARTALAHLTTCTLRDGQPLPPQLRAEIEREGQRWELVDAQIRTLETERQHRLQTTETAPVRQVQQLTRLQGIGEPSAWLLVQEIFAWRQLRNRREAGALVGLTPTPYASDGTQREQGISKAGNRHVRRVLIQLAWGWLRYQPQSALSQWFQARFGRGQGRMRRVGIVALARRLFIALWRFVAFGVVPDGARLRAA

SEQ ID NO: 91309 - protein, 331 aa, unidentified
MEQVTTIGVDIAKRVFQVHGVDASGAVVLRRQLKRHQVAEFFAKRPGCLVGLEACGTAHHWARQLRRLGHDVRLVPAAYAKAYVHRNKTDPADAAAICEAVSRPSMRFVPIKSEEEQAVASVHRVRERLIGQRTMLLNGLRAQMSEFGIIAAQGAGHVREMLERVDELPAMLRPALLGVARLLAGLEREIAAVERQLLEWHRNSELSRRLASIPGLGPITSSALAARVLQPQRFASARDFSAWLGLVPRQNSSGGKIRLGGISKKGDGYLRRLLVNGAQALLNSKRAKTDPWIARLLATKPRLVAAVALANKLARIAWAVMVTNTTFRVAA

SEQ ID NO: 91310 - protein, 336 aa, unidentified
MNAVGIDVSKSKSVVAIMRPFGEIVSTPFEIKHTASDIHSLIELINSVEGESRIVMEHTGRYYEVLAHSALEANLFVSAINPKLIKDFDNDSLRKVKSDKADAVKIARYALDKWQNLKQYNVMNELRNQLKTMNRQFGFYMKHKTAMKNNLIGILDQTYPGVNTYFDSPARSDGSQKWVDFASTYWHVDCVRKMSLNAFIDHYQNWCKRKKYNFSQSKAEEIYGKAKELVPVLPKDAITKLIIKQAVDQLNSASTTVESLRTLMNETASKLPEYPVVMAMKGVGTSLGPQLMAEIGDVSRFTHKSAITAFAGVDPGVNESGTYEQKKCSYLKTRFR

SEQ ID NO: 91311 - protein, 460 aa, unidentified
MNRKRSKSRVDRTLPMMHPNAAAIDVGATIHMAAVRADRVPEPVRCFGTFTTDLHRLVDWFTECGVETVVMESTSVYWIPIFELLDARGFSVFLVNARDAKHVPGRKTDVSDAQWLQRLHSYGLLRASFRPKGQIAELRAYVRQRERLLEYAASHIQHMQKALTEMNLQLHHVVADITGSTGLRIIRAILAGERDPEVLACLRHYSCHSSAETIAKALTGSYRTEHLFALEQALALYDAYHEKASACDVRIEAVLKELSIHRGRDIGSVPPASRRRHRTDQANALAFDVRAALFALLGKDITRIDGLGPYLSLKLIAECGDDLSSWPSAKHFTSWLGLAPSNKVSGGKMLSSRTRRSGGRAAALLRLAAVTVGRTDTALGAFYRRLSSRIGKAKAVTATARKVAVLFYNAVRHGMEYVDPGASSYETRYRMRVVNNLHRRAKAFGFVLQPLEPKADAVVS

SEQ ID NO: 91312 - protein, 382 aa, unidentified
MKQYSKYVGLDVHADTIAIAVAVRGRSSEVRALGTIPNEASTLKRALAKLGKAEELLVCYEAGPCGYAIYWLLAAMKIDCVVVAPTLIPVRSGDRVKTDRRDAMKLARLLRSGELVAAWVPSQQDEALRNLVRTRTAAKRDERRAKNRLSKFLLRMNKRPPKKTKSFGEMHCQWLAGLAATFELESNRLTFEEYYAEWLHQHERVRRVEKHIDATVEKLSPAQREVFQALCSLRGVAKTVAVTALAEVGSFSRFDSPRQLMSYAGVVSAEYSSGNSVKRGRITKTGNAFLRHVIAESAWSYRFCGRAGRALRERRKECSATIVGIAEKADWRLSSRYRHLLANGKPAQKAATAVARELLGFMWAVAVAAENNAATRQQAKAA

SEQ ID NO: 91313 - protein, 419 aa, unidentified
MVAVGPERDPEPVRSFRSFTKELHDLANWLKHVGITTVAMESTGVYWIPVFEILEAYGFEAVLVNARDVKNVPGRKTDVKDAQWLQKLHTHGLLRASFRPRHDVATLRSYLRQRERLLEYAAAHIQHMQKALTLMNLHLHHVVEDVTGATGMKIIRAIVAGERNADELAKYRDVRCRASVETIRNSLIGHYQAEHVFELTQALALYDFYQTQVAQCDERIELALKHLQTGVEPPTAPMPAARARTKQPNGFAFDVRAALYGMLGVDLTQIHGLGPYVALKLFAECGNDMSRWPTVKHFTSWLCLAPGNKISGGKILSSKTRRSSSKAAAALRLAATTVGRTDTALGGFYRRLSARIGKTKAVTATARKIAVLFYNTLRYGMDYVDPGAAYYEERYRQRVLSNLTRRADSMGYVLQPKAG

SEQ ID NO: 91314 - protein, 344 aa, unidentified
MEIRSVGIDLGKTSFHLVALGDKGKVLLKKKFTQKQLITFTANLQTCLIGMESCSGSHFLGRALREQGHEVKLIPAQFVKPFVKSHKNDFVDAEAIAEAVERENMRFVPIKTDDQLDLQSLHRVRERLMTRRTALINQIRGFLLERGIVFAKRPIRLMEAMPEVLENIHENLTPRMRNMMAMLWSEWKDLELQIAEMNDEVERIASSDAACRRLRQIPGIGPLVATAIVASIGNGAAFRKGREFAAWLGLLPNQRSTGGKAKLGAISKRGNCYLRKILIHGARAVVLRCKRDRIAMGAWMTSLETRAPRNILIVATAHKLARIAWAVLSTGQDYRAALPAAVAA

SEQ ID NO: 91315 - protein, 417 aa, unidentified
MDTLFVKVAGLDVHLKWIQVAVRCRQESGQLFQEVRSFGTMTKNLKALADYLESLGVTHVAMEATAVLWKPVWNILEGRFTLLLVNPRHLKKVPGRKTDVTDAQWIAQLLQCGLLQGSFVPPRPLRELRDLTRQRAQLAGEHTRVANRIHKILEDANIKLSAVATDVLGKSGRIMLRALLNGQDDPGELADMALGRLRAKIPELKLAMEGHCTEHHRYLLGHLLGHLGYLERRTQQLGRRIAERLQRMLPLETFDRLDAIPGIDRKGIENIVAEIGVDMTIFADEHHLVSWCGMCPGNEESGGRRLRSKMRKGNRWLRRAMVEAAWAGSRKKNSYLKAQYQRLVRRRGKKRSLVAVAHTLLVIIYHVLKYNVEYQDLGPDYFDRLEPDRLRRYLVKRLQGLGFEVTLSPLNPDNSAA

SEQ ID NO: 91316 - protein, 332 aa, unidentified
MENFYFIGVDVSKKKLDFCVMFEGKVVHEEETANHQNAIMALLHQFEEDYGIAGGQMLVCAEHTGQYTFPLACACKAVECKLWLENPAEIKYSSGVQRGKNDKVDAKRIAIYAKRFQDRVQYYERPTEDIERLKQLESERTLYVTDLAKYKGQMKDQKDYMPRKLYERKMKRLQTLMDDLEKAIQAITYEMDEVIASCPVLCRQRELLMSIDGVGRVVATNMIITTEAFTRFDDPRKFNCYAGVAPFSYSSGSSQHSKARVSHRADKVMKRLLHLAAVAVTHRIGGELKKYYERKVAEGKNKMSVINALRAKSVARMFAVIKRNERYNPILS

SEQ ID NO: 91317 - protein, 310 aa, unidentified
MGQTFIGIDVAKDRLDVHVRPSDEAFTVARDSEGLARLIERLRPLDAYLVVIEATGGFEQTLAAALVSEAMPLAVVNPRQIRDFARATGQLAKTDALDAKAIARFAEAIKPEPRPVPDDQARALGELVARRRQIIEMMTAERNRRRQLSSRRLIKSVDRLLAVLQKELAELEADIGESIRGTPAWRERDELLRSVPGIGDVVARTLIADLPELGRLDRKQIAALVGIAPLNRDSGRMRGRRTSWGGRAKVRSVLYMAALVGSRRNPVLKAFYQRLIAFGKPKKLALTAVMRKLLTILNAMVRDNKRWQNA

SEQ ID NO: 91318 - protein, 352 aa, unidentified
MLIIGCDFHPSFQQVAIFDKQTGEYQEKRLGHRAEAEQYYRSLAGQRVRVGMEACGHYPWFERLLAELGMELWVGDAAKIRATVVRKQKTDRRDAEQVQVLLREDRFPRIWVPTLEERDARQLLVHRHKQVQARTRTKNQLQALALSQGVQKKRKLWTEAGRAELEKLELLPYAAIRRQRLLESLDRLEAEIAALNRQVDEEIQQRPAALRLMTHPGVGPVTALAMVLTLGPAERFESGRQVGSYFGLIPSEHSSGGRQQLGHISKQGNPFLRFLLVEAGQSAARYDAELGRFYRRLAARKHRALAKVAVARKLATRLYLMLRENWNYAQLCRAVVQVSPSHFVDGRQKPTA

SEQ ID NO: 91319 - protein, 362 aa, unidentified
MLIIGCDYHPSGQQVFGIDTESGEVFADRWIAHSGNELEEFYGGLPAGAVVGVECSGNMLWFERRLAHYGHRLRLGDAAQIRAKETRKQKHDRRDAELIARLLLENNFPDLKWVPTLAERDQRQLLTHRHKLVRMRAQVKNQLQHIAMNQGQQKKRQLWTKAGRELLEHLPLEPWTARRRDDLLRWLDLLNRDCEGLEREVEQAAEARAEARLLMSHPGIGPVISLAFVLTIGSIERFQRSRELVSYLGLNPSEDSSGERRRLGGISKQGSSFMRLLLIQGAQTAVRGDEDLRRQYRRLAGKKHRAVAKVMVARKLAVRMFWMLKTQKTHAELVRTRGSSSHPGVGKTDCLSERPASPRIQP

SEQ ID NO: 91320 - protein, 410 aa, unidentified
MDALIPRCCGLDVHQKTVVASVRILGPTGEVTRETRTFGTTTRELEALAAWLRPWQVTHAAMEATGVLWKPVWHILEPEWELLLVNPQHLKRVPGRKTDVQDAEWIAQLLQCGLLRGSYVPPAVIRELRDLTRTRTTLEDEGTAVVNRIHKVLEDANIKLATVATDIMGVSGRAMLRAIIAGETDPTRLADLARRRLRLKRNALIEALHGRVTAHHRFLLERLLKQVEFLEEEIRHFDQRVVELTAPFAEALARLDGIPGINRRVAENVIAEVGHDMAPFPSVPNLVSWAGICPGKRETAGKSRSARMRKGNRWLSRTLVQAAWAGRRKKNCYLAAQFQRIARRRGEQRAAVAVAHSILGAIYFILRDRVEYRDLGPEHFHRLTSDKVVRDLVKRLEKLGHRVTLEKIAA

SEQ ID NO: 91321 - protein, 489 aa, unidentified
MSTARKQQGKKKDPTLKARAPQRKVRGRHCQQGKGNQRGSELTITNPDAAGIDVGSQVHYVAVPEGRAQVSVRSFGAYTAQLDELVQWLKELRIKTVAMESTGVYWIPLYQKLEEAGFEVLLVDARQAKHVPGRKSDVQDCQWLQQLHRYGLLRAAFRPEDSVCRLRTLQRHRKNLVESAAMWIQHIQKALNEMNLHLHHVLSDISGLSGLAILDAILAGERDPRKLASLAHYRVQKSQAQIEAALTGDYRPELLFVLRQSLQNYRQIQQQITQCDLSIEQQLAKMADGKNPNQASEPTPQSQELSGGKPRKRKSPVTLEISLAGHLKRILGVDLTTIPGLNVLAILTLVSEIGTNMTKWRNEKAFVSWLGLSPNNKISGQRVLSSRTRKVVNRAATILRLAAMIAGKTNTPLGSFYRRKRAQLGGPKAVTATARKLGCLIYRLIKNGQGYNEPDIHTYELKYKDQILNSLRKRANTFGFDLVELPKAA

SEQ ID NO: 91322 - protein, 326 aa, unidentified
MKNYVGIDVAKTSLAVAFASPTGGWTNTTFTNTPEGIRILIQQLPAQAHCILEATGSYSVLVTYMLCQAEINVSVINPKQSHNFAKMQMSVTKTDPRDAVLLAEYGRLIQPPLYHMAKDSLLRLRQKRALLRQYHKQRRTLQNLQHSFDVLPVKDSSTEQSLQTMIDSFERAIIHLQQEVCQLCEAEYHEQYQRLLSIKGISHKVATALIETTNGFQDFQSAKAVAKFIGLAPTTFQSGKMSTHRGICRTGDSHLRSLLYMASWSAIRCNKACREFYQRLKAAGKPSKLALIAVANKLLRQAFALVRFGEDFDDNYQPKFRSAPCI

SEQ ID NO: 91323 - protein, 384 aa, unidentified
MEEVTDEPLYRDRVCGIDIGKAGMAATIRVPSDANPARRAQETRSFGTTKREVLALADWLRCWQVPAVVMEATGDYWKGPFYRLEAEGFECVLADARQARNLPGRPKRDPSDSRWLAACFERGAVTSCFVATEEFRIIRLHTRYRRDLTDERTREKQRAEKLLESAAVKLSSVVTDLHGVTGRDIMEHLIAGERNPRVLAQLARARARRKISQLEEALEGAEFFTDEHAELLATMLARIDRVNEEIDALTAVIERLLAPYEEQLQQAGSMPGWGRRAAQDAVAETGVDMTRFRTGAHLASWAGRTPLDNQSGKRNGRSKSKKGNRYLAGITGETAVAAGKTQTREGARYRRLARRRGKPKAQVAVGNTQLKVYHKLLSSPGMRY

SEQ ID NO: 91324 - protein, 345 aa, unidentified
MPVTSIPQTASSAHDSSPGEVILGVDTHRDIHVAATVSALGALLDTKSFPTTAAGYRRMLTWARGYGSVRQAVVEGTRSYGAALSRHLQAEGVAVIDVNQPDRATRRKRGKTDTIDAEAAARAVLSGRATTVAKTGDGLVEAMRLLKITRDSAVNARTKAINQLKSIIVGADPALRESLVGLGPATLIHACADIDDPGEQASEAHRTVVYTLRLLANRILALKAESYELHKRLRALVTRRAPEMLDRPGVGPDSGAALLIAAGDNPERLRHEASYAALCGVSPVEASSGNTQRRRLNRGGDRQANAALYRITLSRLRWDPRTQNYLQRRLTEGKTRREIIRCLIG

SEQ ID NO: 91325 - protein, 317 aa, unidentified
MTTPSEAYVGIDVGKAWLDVALWGSDEVWRVSNDEAGVAKIMERVTVLDVRLIAVEATGGYEQLAVQAMLLNSLPVAVVNPTRVRALSKATGKLAKTDVIDARLIAEYAFKIQPEAMAPKEANEIRLNALVTRREQLVEMRTAEQNRLGTVHNSLQVDIREHIEWMSARIQELEVQIKELVDSLPEWRAQAERLDSIPGVGLITAVTVMAEMPELGQLDRQKIAALAGLAPFNRDSGQKRGKRRIFGGRKGIRRVLYMACLSATKCNPVIRSLFQRLMKKGKLFKVAITACMRKMLTIMNAMTRDQVNWRVPEPIPS

SEQ ID NO: 91326 - protein, 348 aa, unidentified
MQRSGYWIGVDLHSRVIQVCVLDAQGTVVLEERCKGASLAEGRKLVEELAERFPEGQVAVEALGCNRWFVAACREASLKVTVANASKLQLKKAGKKTDRRDAYEMARRLRLGDVARNAKTYYPTDQEYGLRQLLRRRHGLVQLRTALVSQIRAMLRSYRAPQPRGDLYGKQSLQSLRATELINPLETVVLRTQVNALEALQASVSNLDRLVASESKKGASAALRLLPYVGPLTAATLVAELGDVHRFRNSKAVASYAGLVPRVIESGQRSYHGPLVNHGNRELRFVLGEWAVQLLARHELIKRWARPRLKRSPKNKVRVALARRLLVGVWHTLRTGEVFDLERCLALN

SEQ ID NO: 91327 - protein, 343 aa, unidentified
MAYYVGLDVSLKTTAICVVDRDQNIVWQGSADTHPEMILNALDRWIGSIVRIGLETGSSSPWLARALKARNLPVIVMDARRAAAALKARPVKTDRADARALAEMLQSGWYTEVFVKSEESHRMKALLSARDQLVRNKRTFFGQIRGMLRPFGIRLPARQGTRKFDEAARAACRHDDLLYACVNALLEALGAIEAQIAALDKRVRAMVQTSKACWYLTSVPCVGPITALAFAAAIEDPGRFRRSRDVGAYLGLTPRRWQSGEKDIVGVISKQGDAMARHCLYEAANCLLTTWGGRSALKSWGLRLVKRVGAKKARVAVARKLACLLLGLWKAESHYDEDQVRTA

SEQ ID NO: 91328 - protein, 410 aa, unidentified
MEVLYPHCAGLDVHKDTVVACVRHMVNGTVKREVRTFKTTTTELLALSDWLAAEKCTHIAMEATGVYWKPVWHILSDGDFSLVLANAAHVKNVPGRKTDVNDATWLADLLAHGLIRGSFVPDQQTQEMRDLLRTRKQLTRERSRHVQRLQKTLEDANIKLDSAISDIMGLSGRKMIEALIAGESDPERLAQLAHRRIKATPEALREALRGRVTRHHRFLLRLHLQQIDAIDEVISDIDREVDVLVEPFRTTVLLLTTIPGIDELSACVILAEIGRDMSRFPTAAHLISWAGLCPRNDESAGKRRSTRMRKGAAWLKTTLVQCAAAAARRKASYLQAQFHRLRARRGAKKAIGALAASILTIVYHMLLGGELYHDLGPDHFDRRAKSTHIKRLVTRLQNLGYAVQITPLAA

SEQ ID NO: 91329 - protein, 473 aa, unidentified
MESVTLGIDVACRADHQASLADEQGRFVWSGVRFTTRTEELDRLWARVPARAAVTVVLEPTRNAWAPLAAWFTARGARVVLVPSTQSADLRAYYAKHTKNDRLDSRVLARLPLLHPDGLRPVSGAGPADALRRATRRRASLVQRRTAVMTRLDALVELLGPSWHDTLCPSGAWEKTALAVLARYPDPVQLHRLGRARLEAFLHTQSHGHWGRAKAVELLATARESIALWDGALDFGALADDIRAEAAQHQFLTGQIAAVDARIAEQLAQRDPEGILTSAPGVGPVIAGIIAGRIGDPHRFSHLSAVRKFAGLVPSVSCSGILTGTGKMTKSGDALLRHGAFLAADSARRTDPQLAAKYVRLMNEQRHHNDAVTHLAAILLTRVVACWRDGVPYVIRDLDGTVITAQQGRAIVAAHHQVDPALRRKRRTTSTAKTVKGRTARDRRAAGRARQESPSAPTLRPTTTHQTSRLASL

SEQ ID NO: 91330 - protein, 361 aa, unidentified
MTTISAERPDTEVAVILGVDTHLDFHAAVAVDHLGRRLGEASVPTTVKGYERLLCWAEGFGPVRCAGVEGTSSYGAGLARHLRAREIEVLEVERPKHRRRSSRSNVEKSDPSDAERAARAVLSGEASGVPKSGDGRVEMIRALRAARRSAIKARTQAGNQLQGLRVTAPEELRNRLCGLSTKELVSVAARFRLGDGPRNVPTATKFALRSVARRYEVLSAEIAELEAHLDRLVAQVAPELLSLPGIGTENAATLLIVAGDNPQRLRSEASFASLCGVAPIEASSGKVVRHRLNRGGNRQANRALYMICLARMRRDRRTQEYLARRTAEGKSKREIIRCLKRYVAREAYRVLIHSISGSSAA

SEQ ID NO: 91331 - protein, 384 aa, unidentified
MEVIYSRCAGLDVHKQTVVACIRIAGNGPPTQEVRTFATTTSGLLALADWLDSVAVEYVAMEATGAYWKPVWHVLDGHFQVLLANAAHVKNVPGRKTDINDAMWLADLLAHGLIRASFVPPTPVQDLRALMRTRKQFVRERSAHIQRIEKVLEDANLKLSVVLTDIVGTSGRAVLQAIIDGHRDPEYLASLVSARVRATRSEVLEALRGYIRPHHRFMLKLHLGHINTVDAAIAAIEQEVGNGLDSFRQAAQLLSTIPGLSDVSAHTVVAEIGIDMSRFPTPAHLRSWSCLCPRNDESAGKRRSTRLRPGANWLKNHSRSSRLGGGQGQAQLPASIVPSPQPSPRRQESHRCRRRLDAHRHLAHAARRHRLERLGCRLLRPKRS

SEQ ID NO: 91332 - protein, 452 aa, unidentified
MDQGNNGLSRGDRNRNARLAALRVVLPRDRAILGIDLAQSRQAAVLADHDSRVLARWRPRCSSWKLGELLDRALRKALAAGFSGITVACEPTGHRWMVIAQLAAERGIPMVCVQPLVVARAREAEDYTRGKSDDRDAVLIARLAAELHCYLPEQADQGWARLRHLGARRSRLIDSSTMCIQQLRDLLEVAWPAVLSAAAEPLESATWLACLQVALERGDGDLGAVHAMGQDSFTAAARGGLGAWGARRICQRIAAAVYAALADPARVAAQRPGALERAFSVLGGWKTVRGELADVNARMLQALEAMGVLEVAGSIPGVSALQVAAILAETGDPSRFPAARAMVKHAGLAPCENSSGNHAGQAGISRRGRPALRLAAWRAVWGALRHNRVYAARHASLTGRAEGQLTDQQARAAIAAALLRQIHAIITRRIPWDADIAAGRRRPGQEVTARAA

SEQ ID NO: 91333 - protein, 331 aa, unidentified
MMDVYYAGIDVSARTLDSALALPDMPVRQGHFANTPSGHRQLIKWLTKGGRSVRVCLEATGLYSLGVALALHEHRHCEVMVVNPKAIKHYAQARQQRAKTDVLDAQLMLDYGQRLPFVPWQPPAPEILHLQAITRRISQLKVESTRERNRLHADAYRTGMTDLIKRDIQVNIRHLERRRARLEAEGRALVLAAPSLCAPFQRLLSIPGIGETSALRLLAELAVLPAEMKPPQWVAHAGLDPRPHESGSSVLSPRRITKAGNKYLRAALYMPALTAIRHQVNIKAFYDKLVAAGKKPRQAITAVMRKLLHAIWGVWKYDQNFDGQKFYKIAA

SEQ ID NO: 91334 - protein, 350 aa, unidentified
MNVSHYIGFDVHKKSISYCVKAPDGTIVEEGKLSAKRATLCEWASQRSQPWHGAMEATLFSGWIYDTLKPYAGELQMGHPAMMKAIAASKKKSDKLDARKIADLVRCNLLPACYVAPAELRELRRLLRYRNLVVAQAVRMKNRISGLLMETGAEYSKKKLHGEKYFTELVDSLEEVPESVKDLLRLSRGTLEMFQTTQEQLLARLEKEPRLVARVELLRSIRGAGVVTALTWALEVGEPQRFPSIGDALSYCGLTSALLSSADKQQRGPISKQRNVHLQTVLIEAAKLAPRWNPQLAAIHEREIQRGHRNRATLAVARKLVAYLLAVDKSGKPFEIRTPAIVEQEVKPAA

SEQ ID NO: 91335 - protein, 418 aa, unidentified
MEIVYERVAAIDVGKKIIAVAVRTPGERQGKRRQQLRKYNTYHQTLIEMVAWLVSEGVTHVCMEATGVYWKPIFHALCEADRPLEVLLVNARHVKNVPGRKSDALDAVWLAELTECGLLRGSFIPPQQIAAIRELTRYRKKLIEQRTSELQRLAKVLEDAGVKIDSVASALTTLSARDMIEALINGERDPAVLAELARGRMRSKIPDLTLACAGRFGDQHALMCTLHLEHIDHLADMIARLDTRIDEASLPFARQTQLLATIPGISERAAQVVISEIGVDMTRFPSDAHLASWAGLCPGNNESAGKHRSGRTRKGNSELCTILTECAWAAGRTSTYVGAQFRRFHRRFGKKGGQKAATATAHTLLVIIWHVLNTGIGYHDLGSDYFTRRVDNPHAREQRLVRALEALGHKVTLEPAAA

SEQ ID NO: 91336 - protein, 358 aa, unidentified
MRTMEQQNNGLTLEKKVYVGIDVHKENWHVTIRTLGEEVFNGRIPGSYISFKKVLDRYRGNSVKVAYEAGPFGFWLYDRLTEDGVEALVVPPSTIPIESGNKVKTDKRDSRKLAILLERNMLKRTYVLSEEEREHRDLLRTRRQIVDHRNDVARQIKSKILFYGIPVPFSPKTRLTHRYIAWLKTLAFGTTYLKESLDLLIQLYEYLTQQITRITRKVVALCREKKYHERIKLLCTAPGIGKLTAIELLVELQDMARFKNASQLASYIGLTPAEYSTGEKTRQGRITRCGNKRVRTYLVESTWILITKDPWIRAKYLKLKAIRGGKRAVVAIARRFIIRLRRMLLDNVPYNATCALAA

SEQ ID NO: 91337 - protein, 342 aa, unidentified
MKIVTIGIDLGKNVFHLHGVNERGKVILKKKVSRSKLIETIVNIPSCLIGLEACSGAYYWAREFTKLGHTVRLMAPQFVKPYVKSNKNDYADAEAICEAVTRPTMRFVAIKEVEQQDILSLHRIRERLIKQRTALGNEIRSLLHEYGIVIRQGFTHLRKSLAELSDTIDSQLTPTIKRLIISLYEELNELQQRIIKYEKQIDSIYQQDERCQRLGSIPGVGKIIATAMVASIGNAHFFENVRQLAAWIGLVPAQRSTGGKSILLGISKRGDQYLRTLLIHGARSVLNYLKRKQIKTRQDQWLEELSARRGKNRATVALANKTARIIGVVLTKNQTYQPQLAS

SEQ ID NO: 91338 - protein, 354 aa, unidentified
MYYLGLDLHKRYVTACALDSAGQVVAAERRLPTTLDALLGFVEALGGPATVAVEATLHWGWVHDQLTAVGYPVVVAHPQQVKLICHARCKTDPIDAKKLADLLRTNLLPAIWVPEAETRARRQLLRGRAFLVRLRTKLKNRIHAYLAEQNERVEATDLYGQAGRAWLATVPLPREVREQVELLLELVDHLTDRLRRLDRRIRDRVTLSAEAKQLMTIPGVGPYGAWLILAELGPIDRFPSAQALASYAGLGPSTRSSGGKTAHGSVGMAGSHWLKWILIEAVQTLQRRPGPVREQYERLLRAKGKQKATVAAARKLATYIYWMRREGWTYEQWLAQHQTAKREGRPIHSLATVA

SEQ ID NO: 91339 - protein, 402 aa, unidentified
MKEFTPVEMGIETASALTVVTDGLARDEYAAYIGLDVHKDTIAVAVARVGREAAEYRGEIANKPKTVEKLIRRLSEEFDGGVLLFCYEAGPCGYGLDRQLMGSGHECLVVAPSLIPRKAGERVKTDRRDALKLAQLLRAGELTAVWVPDQEQEAMRDLTRARTDMKVQQRKARQQLNAFVLRHGHHWPSNKTRWTQGHFDWLESLQFAHDWQQVVLQEYIDAVRAASRRVADITEQLMRAIPRWSLAPVVDCLVALRGVDKVSAVTLLAELGDISRFDSPKQLMGYLGLVPSEHSSGGRRHQGGITLAGNGHARRTLVESAWSYRFPARQTKHLKHKAAQASEPAKAIAWRAQKRLCGRYRTLTQAGKNPKVVTVAIARELIGFIWDIVRIEMPRIQARQAA

SEQ ID NO: 91340 - protein, 498 aa, unidentified
MEPEYRRCCGIDVHKKTLTVCVLPPEGKHTGEVRSEVFRTFTRDLKRLRTWLIKCEVTEIVMESTGQYWRPVWNILEGGFKRLLLVNPQHVKGLKGRKTDRIDAKWLARHLERNELWGSFIPTREFRELRELTRLRVHWLQDLNRVQNRVEQLCESGNIKISSVASKLFCVSGRKMLASLALGELDAAAMADHACGTLRGKKWQLELALQGTFTEHQRSVLARLLHQVQYLQESILEITQEIAKRMLGYAEIVQRLDDIPGVDHLTAWTVLAEIGVDMGVFGSARQLASWAALCPGNRESAGKRQSGKTRKGNAYVRRALCQSACAAIRDSDSHLAALFRRIRARRGESKAIMAVAHELLTIIFHMVRDGTVYQERGAHCYDLQNKPKITRKLVDRLQHLGYYVTLQDTDAPAPAPTPSPAPMTSVLPEQPTSVQPSPPPGPVPQSGPRRGRPCKCAERHIPCKHGRVSIPKTPSNKSPKILRNQGGAKNANLGIHDT

SEQ ID NO: 91341 - protein, 363 aa, unidentified
MKIMTGIDLHSNNALCGLMDESGRRLVHKKLPCELPAILQLLEPYKDRIATVAIESTYNWYWLADGLQDHGYPVVLANPARMKPYDGLKHTDDVSDAYFLTELLRLGILPTGHLYDRKHRPVRDLLRRRLLLVRQRTSLILSFKSLNERTLGQRVPLARVKTMSAEDARARFTEPADQLLGGQQIELMDQLQQAITKIEQHVLGVAGKWNSYQRLQELPGIGKILGLTIALETGDAKRFAGAGNFASYCRCVKSLRQSNGKKKGENNRKCGNRYLAWAFVEAAHFACRYDERCRRFYDRKAKQTNPIIATKALACKLAKAAWHVMKADVPFDADRVFGPGRKEAFGETGREPAKGSGRQSSQD

SEQ ID NO: 91342 - protein, 385 aa, unidentified
MGNQRFIPRDYDVFAGLDVDKKSISATFIDHQGFLKSLNMPYKVEHLLNYVRKHYPDKKVAFAYEAGPTGYGLYDGLEAQAYPCLIASPSMIPKAPGQRVKTNRLDSRGISENLRGGQLKSIHVPSVLYRELRHLTQLRDTFVSELVAMKQRIKSLLLMEGLEFPPAPAGSQWSFMVKAKLRKLPCSSTVRFKLDELLDGLEFNEKRVVKTTQQIRRFCQNDPELSQCIEYVVSVSGIGQIVASQLLARIGDWRELGNVRQLGAFLGLVPTEHSTGERTDRGSITHSGEPRLRSKLIQAAWSAIRKDGELREFFRSVCQSHARPLASRVAIVAVARKLTVLISVVLMEQRPYVVRKKVHSAPLIQEETVPQGTPRRQAEPGEKNS

SEQ ID NO: 91343 - protein, 361 aa, unidentified
MELHVGLDVSLETTSLCIVDETGKKVLETSVASDPEAICIALRPRVSEVVRVGIEACSTGIWLARELRNEGLPVTVVEARHMRSALSAMRNKTDRNDAHGIAQMMRMGWFRAVHVKPVETQRLKTFLANRRLLKRKLIDLQNHLRGALRSHGLKVGTVAAGKFDSRVRELIEGSGDYMFQTMIESMLDVRAVLFEGFRKLHRILLLLVKHDPVCRRFMTVPGVGPVSALSYKVTIDDPTRFTRSRTVGAHLGLTPRKYQSGTSVDWGGRISKMGDVDTRGALCEAAASLLLRVQSYSALKAWGMRIAKRSSMMCAIVAVARKLAMILHRMWIDGTDFDAKSGAKITQKRKRDPRTGRLMPC

SEQ ID NO: 91344 - protein, 343 aa, unidentified
MDFIGIDLHKHIFTVCVLDENEKVIDEMIDIETNEKGLDLFISRHPPDNCRIVFENLTRAHFAFHYLYDRGYAVDVAHTGHGALKEIANCNFKTDRIDAYKLALVCKDIWSGRRFIRRTHISSDDNMRIKGIVRVHNECANIRDEMYLRIGEYMNLHNIPPHPKYKDIKGKRYSDYLISLGDVALSSMVRMMRSAIDEIEGTEDELKKYASVSEDARILMSIKGISELTAMTILSAIDGIYRFETPESLVSYFGLAVTHKESARKMSKVGSITKEGDPLVRKYMANVITNHSTRCPDSDLSRFYRSKKESMPHWKAVTAAMRKLTCIIWAMLSKKEQYRFHPN

SEQ ID NO: 91345 - protein, 318 aa, unidentified
MPIVGGLDIHRKQITFDYLDTVTGQVRRGQVAPADRAHLRAWLARFAGRDDVAFAVEACTGWRYIAEELAAAGIAVHLAEPADTAFARGRKRHAKTDKTDSRHLRMLLAEGRLPECWIPPGHILEARALLELYHDLRAEHTAWVPLRAAAAGCLSPAGQLQVATALEVLEALETRMHAVRHQLLAAARQLTGAKVLAARLYGVGPVTALAMTCWLAGAGRFSSSRQAVRFAGLDITVRSSDRKGPPGRLSRQGPPVLRWAVYEAGKTHARSSAPDHRYYATVKDREGGKRAALSEARKILRQACHILAELGDDALSAA

SEQ ID NO: 91346 - protein, 362 aa, unidentified
MRIIGCDLHARQQTLAMLDTTTGEVMNRTLTHEGNNVREFYSALPHPVRIGIEATGSMMWFVNLMEELGIECRIGHPAEIRAAEPRKQKHDRRDADLLLTLLVEDRFPAIWLPSKELLDLRALLRHRHQWVRIRTRIQNGLQSIALANGLRRGSSLWSQDGQNTIASLPLAPHTAYRRSELQAMYVKFETEIEKLNRRVEQQAWERPGARLLMTHPGVGPVTALATEVFLGDPSRFADSKELASYVGMIPMEYSSGKRQRLGGLSKQGNPLLRFLWGEAGIHAVRRDPELKRFYRRKLMQKGLGKARVAVARKLGIRLWIMLRDEIDYNEFCRRGQMQQKNGGACAGMPEMRYGAKSHRLID

SEQ ID NO: 91347 - protein, 326 aa, unidentified
MTLSDLTDNTFVGIDVGGAGLDVAWHRGDSAHYANRPDAIATLVERLRTGPEVTRIVLEPTGGYEKPLVKALRQAQLPVEVIHTTRFNAYRALVGVKAKSDTSDARLLASYAAAPDEVRGRKAGYVELPEDAIREALSELASRRDQLKHMIHAETCRLGTVRLAELRQAITAHLEALRAEDKQVHRMMLELVRQRIDLRRDQRLLKTIKGIGVKSALGLLASVPELGRIDNKAAAALIGVAPFVRKSGTMSAPARIHGGRAAVRSILYMAAVTASRHNPVLRPFYERLIAKGKPPKLALIAVLRRLVVFANAVLRSGQPWRGASAT

SEQ ID NO: 91348 - protein, 348 aa, unidentified
MILIGCDFHPSWQQVSWVDMTTGETGEQKLVHASGDAEKFYRQLPTPALIGMESTGNCQWFVEMATAAGHEVWIGDAAKIRASDVRQQKHDKRDAELLLRLLIEGRFPRIWTPSSQQRDLRQLLIHRYKLVRLRAQAKNGLQHLALNQGVQKKRRLWSKTGQKLLRELPLKPWASRRREDLLSVIAMLDKQVQSLDLAVSEAAEKDQNARLLMTQPGVGPVTSLAFVLTMGDVSRFPRGKQVASYLGLIPREYSSGGHQRLGSISKQGNRFMRMLLVEAAQVAVRCDPGLRNEYLHRCHTKPKGVAKVAAARKLAIRLYWMLRTQKGYPEIVRIESSSRVPLVVRHGG

SEQ ID NO: 91349 - protein, 356 aa, unidentified
MAKYSLSALQTFVSSHQSEPFWVGVDVHKRSYHVALLRADNKTTTFTTTASPEAFVEQLQRWNISVAGVVYESGPTGFSLARALMTQRIPVTVAAPSKIPRSARPGAKTDRLDCLKLAHYAAKGLIRSIAIPTAEEEAQRALLRRRHQLVDRVRQCKQRIKGFLLYHGFKETTVIRNWCSGYEEQIAAFPLMPEGRLTIDSHLRELTFLQQELSEVAEQLGHLTGQSEHHAAIRALTSVPGVGTVVATSFRLELFRPERFHRKEEVTSYLGLAPTVRHSGETTPRGYLVPVGQKRLRSLLIEAAWMWRAKDVRAGELYNKLLGKTGVPQKAIAALARRLAIILWRLSIEQRTYRPA

SEQ ID NO: 91350 - protein, 345 aa, unidentified
MTLSPTYMCFVGIDIAAKTFAAAWVLPGQAPSPAHTFDQTDAGFAAVQAQLPPAIPAAQILMVMEATGSYWIRLAVTLHQAGYAVAVLNPKHVHNFAKSLPRRSKTDALDAQLLARFAAERQPPCWTPPPAVYHELRQRLMARDALMEMRQQARNQQHALSQWPVVVAAVTIRFDAVMTALDEQLHTLDHEIGTIVETGAWAASAAIVLSIPGIGIQCTAWLLVSTLNFTLCATPEALVAYAGLSPLQYESGSSVRGQAHVGHGGNARLRTVLYLASLSASRYNPPMQVFYTRLRERGKAVKVARCAVARKLLHLAWALVMKGQRFDPAYPLAQRDRATGELSAA

SEQ ID NO: 91351 - protein, 353 aa, unidentified
MEYIAFDAHKHYTLASVARPDGQLVREQRIAHERGALQRFLERCERGSPVAVETVGNWYWIVDEIEAAGCIPRLVHARKAKLMMGEINKTDKLDVRGLNQLQRTGTLPTVWIPPGELRDQRDLPRTRMVLVRQRTQLKNRIHATLAKYALHDLEVSDLFGARGRALLRQRLELLPPCTAYTTQHLLEQVERLDHQVREFEQRLRALFKPTPAIQRLLTLPGVGLTLAVVIALEVGDVARFPTAEKLAAYAGTTPRVHASGGKTRFGPSRPDVNRYLKWAFVEAANAICLNRGRAPHRHGTRLYERVARRKGHQKAIGAVARHLAEATYWVLTKQEFYREPQPTTVSSTGDKRG

SEQ ID NO: 91352 - protein, 366 aa, unidentified
MENNVTHLGLDVHKDSIAVAVLRPGELEPDQRVIANTPDALRKLIRRVSDRSTLVACYEAGPTGYGTQRLLASLNVACDVIAPSLVPKRSGDRVKTDRLDARNLARLHRAGELTPIRIPSSEEEALRDLVRLREDLKDDRRRMQHRIKSFLLRHDRRCPDHRRGWSRRYRLWVSSQRFDDPNTQLTFDHLLAALNTRTVQLDDIDRQLTEASQRPPLGDAIARLRTFRGIDTLSALTIASEVCDFRRFPSTRSFMGFTGLVPSEHSSGLRERRGSITKTGNAHLRRVLVEAAWSYRHKPFVRPAMAERFAGQPPHVVAYSWQAQVRLHERFRSVAARKNRNVAAVAVARELAGFVWGLMNERTDAV

SEQ ID NO: 91353 - protein, 340 aa, unidentified
MAAATYGIDIAKNVFQIHGVDEDGQIVVKKRLSRAQLKRFFSNHPPALIAIEACCGSHYWARVLSGEGHDVRLIAPQFVKPYVRGNKNDGNDAAGICEAVGRPDMRFVAVKTPEQTSILMLHRVRDRLIGQRTALINQIRGYLAEFGIVIRKGASCVRRELPSILEDAENAIPWSAREMFAGLYEELVALDDRLKKQDGRLRAVFDADPQCKKLAAVEGVGVLTATAFVATIGDPAVYKNGRQVAAWLGLTPREHSSGGKQRQFGITKRGDCYLRKLLIHGARSALRVTPRRQDRKSRWVESLRARTHDNVAAVALAAKNTRILWSLLANEGEYNPALPA

SEQ ID NO: 91354 - protein, 342 aa, unidentified
MQWTVAIGVDTHKDGHVAVALDRFGAQLDSFKAAASSSGYLAVHEWAHNLGEPVFALEGAGSYGAGLARFLQASGGSVFECERPRRAARGRGKNDLIDAALAARRLLSGERLGAPRGFSGPREDLRLLLLERRSAIRARTATLNQLQAALVTAPERLRARLGGLAGEQLARALLRLRRGDGEQAVLRGVLRRLARRVQSLDTEIAELERELEEIVAGLTPELLEECGVGTVCAAQLVVSSGDPARMVSEASFAALAGTSPVDASSGRQQRHRLNRGGDRQLDRALHVIALSRVRWHAETAAYYERLLASGKTSREARRCVKRMLARYFHRKLCSLPALALTT

SEQ ID NO: 91355 - protein, 375 aa, unidentified
MGEITRGGVVRVGVDLAKRVIQVHAVDAAGRRVVGRALKREQFMAWCAQLPAGCLVAMEACSSAHHWARKLRSLGLDARLIAAHFVSPYRMEGKSGKNDMTDAAAICEAASRPSMRFVAVKSCEQQGVMSLHRVREGLKEERTGCINQIRGVLAEFGLVFAQSPKVLRTALADVIEDASNELSAMARRVLQRAFDHWRELDEHMRWCDRQVGQHVRSSPAARRAAKITGIGEFGASALTAGVGDFHQFKAGHQLAAWVGLVPRQNSTGGKTSLGRITKRGDDYLRTLLIQGAKAAVMSAGKRDDPTSRWLVQLTARVGWQKACVAMANKNARILWAVMTRDAGFDPRHVSDKPQAKSSAKERLAASTPNMTPCPA

SEQ ID NO: 91356 - protein, 371 aa, unidentified
MKEFSKYVGLDVHKEAIAVSIAEAGGGEVRYFGEITNAPEAVAKLARQLAKGAARLSFCYEAGACGYGVYRQLRELKHDCMVVAPSLIPRRAGDRVKTDRRDSLSLARLHRAHELTPVWVPDGAQEALRDLTRAREDMKHVQRQVKQRLLAFLLRHGKRYSDKSRWTQAHFCWLETVKCDHPVQQIVFQEYVDTVKAMTKRVEAFDKQIESAARESVFWPVIEALMALRGVSLLTATTVVAEIGDLRRFASAPQLMAYLGVVPSEHSSGGRRSRGGITKTGNGHVRRVLVEAAWTYRHPARKSAVLQRRAQCTSEAVQTIAWKAQTRLCQRYRRLEGKGKLKVQVCTAIARELAGFIWAIGQALPRHAAQA

SEQ ID NO: 91357 - protein, 337 aa, unidentified
MNEITTIGLDLAKRVFQVHGADATGRPVLQKKLRREEVLSFFAKVPPCVVGMEACASSHHWAREIRALGHDARMIPASYVKPYVARQKNDAADAAAICEAVTRPAVRTAPIKSLTQQALRVLHRTHELLSRQRVSLINAIRSHMAEFGVIAPAGPQHVGSLIERISDPKTPIPDAVRAPLGILVDEYVALNARINALEAEMRKSCREEPESARLLTIPGVGPITVSAILAGVPNIRGFRSGRDFAAWLGLVPRQNSSGGKDRLGRITKMGDRTIRRLLVIGAMSTIRWSRSKQNFAQSWLGRIIARKPIKLAAVALANKMARIIWAVMTREETYRPA

SEQ ID NO: 91358 - protein, 397 aa, unidentified
MYIVGIDIAKRKHEAAVIDGEGAVIIKPFSFTNNCSGYNRLLAMLAKAKLPLDEVSFAMEATGHYWLALFTRLQKEGFRVQVINPVQTNSIRSFYIRQAKTDPRDALLIAEVIRFGHFSESTLHPENIYELRELCRGRHAIVSMQADVKRKVIALLDQVFPEYETAFTNLFGDTSMAILQACPTPKELSEMPLKELCHLIEVSSHKRFRMAKARELQELARNSFGFAMAGDVFSTMIRLYAKHLDFLKQQVREMDRKIAEIMETLDTPITTITGIGPTLGAYILSEIGDISRFSSAAKLAAYAGIDPTMRQSGEYNGVRNRMSKRGSPYLRHAIWLAASSAVLHDPALKLYFQKKRDEGKPYMASVGHACRKMVSIIYAVMRDNKAYTPYIPNEISA

SEQ ID NO: 91359 - protein, 409 aa, unidentified
MEVLHSRCAGIDVHKKQVTVCVRVGEGGKTRKEVREYGTDTASLLRLRDWLESEGVTNAAMEATGAYWKPVWHVLEGAVELLLANARDVKNVPGRKSDVKDAEWLADLLAHGLIRSSFVPPEGIMELRDLTRTRKQLVRERGRHVQRIQKVLEDANIKLSSVVSDVTGLSGRKMLVALIEGETDPDRLAALGSAWLKASKEELRAALHGFVREHHRFMLRLHLDQINALDAAIQSLEGRAETCLEPFRKVVEHLTTIPGVSDTTAAVIVAEIGDDMSHFPSADDLVSWAGLCPGQDESAGKHRSRKLRKGGQWLKATLVQAAWAAVKKKDSYFHAKYLRIKRRRGAKKAAIAVAAAILTAVYYMIQRDEHYHDLGGDYFERFDRQVLARRLIHRLHELGLDVHVRTRAA

SEQ ID NO: 91360 - protein, 368 aa, unidentified
MTDVITYVGIDAHKKDLFMAMLSGTQTTPVTWTTANEPRAVRRLVKKLEREAPGAVRVFYEAGPCGYALQRQVTTTRVRCDVVAPALIPRKPGDRVKTNRRDACKLVELGRAGLLTPVQPPTPEDEAVRDLARARDDAREDLQRCRHRLGKLLLRRGLHCAARNWTHAHRQWIASLTWTYAAERAVIDDYLLAIDHTEARLRELDARLAALAETAPYREPVGWLRCFRGIDTLTAMLILAELHDVRRFASAPALMAYLGLVPGEDSSGETHRRGRITKTGNALVRRLLVEVAWHYQHRPGVGPALTRRRNGQPAWVIAIADKAQHRLCRRFRKLAAEHKPAPKIAVAIARELAGFVWAALRPATLPVK

SEQ ID NO: 91361 - protein, 607 aa, unidentified
MSTIASLDRIGVGIDTARYGHRVSFLRPDRKPAAKPLTVMENRAGYQTLQDRLNQLHEQHPTAHFHVRIDAAGQYAVNLELFLRGLKLPMTISVGEPKRNKDYQKAHFPKRTTDDTESQAMARFAVIELPNATPAPSTPMILLREVAGRLQSKVKQTTQAINRLHNLLARVFPELATLTEDMSVGWVLKLLDKYPTAERIAQAQIASLEKIPYLSVEQAHAVHQAAKQSVASLRGELAEALVRDHVNQLRLCQKAEQHLHQLLLEAFADLPASPHLQVLTITGIGDATAAALVAKIVDINRFATPNHLVSYFGVFPEESSSGVDKRGRPLPPGTLIMSPKGNDLVRFYLWNAARNAIQHNPAIRALYRRLRAKGKRGDVAFGHCMRKLLHLVYAVWKTDRPFDKEHFPWEGSSDTQPSATTPPSADAGTTPSGNEKAVGHKRDLPAEAVVTTADSTLEPASPAVKPASQSAAPRPKVDFACVREHVTMEQVLQHLGYFASLRGRGRQRRGPCPVHSQPTAPERTFSVHLGKNAFQCFHAECAVKGNVLDLWAAIHRLPLYEAALDLAETFQVPRNREEEPVKGTSSPRTATAKTSAPAAATATGGAK

SEQ ID NO: 91362 - protein, 474 aa, unidentified
MIKSVGIDFHQGKHVVRCLDEMAQLCDGFSFQTTPEGLDTFEEHIFHDGSNPVIVFEPAGLTWFLMAICIRARHPDCRLVRAKGQKVAALRRYLRGSSKSDRIDALTLAKMTFIDPEQLDEVYLPPAKIHALQRLARQRKRLESDIAARKTRIGAIVESYVPGVRKTFSDPWSAQARAFLRCQLNPLAVAHDGEKALHAFLVRARHRNKTDKEESHRIYLACQSAADLYELSSRAEAVDDEFFSVFQEEIERELRLMEFEETESEAIAKRMEELYRDLHPSDNLRSIPGVGWVTAPTFLATVGDPARFHNQSAFVSWTGVVPRTRQSSDVEAKGLRMTKAGPAIMKWALFQAGDIGRRFDPQLASLYYREMVHHGKNHKQAMGAVMSHLAARVLKVLQDDRPYELRDNEGKAISPAEAKKLILLNFQVPENIRRERRRRNPVKRGSLKSQGTALPRTNEAVVTPQPVKVTIPEN

SEQ ID NO: 91363 - protein, 407 aa, unidentified
MELVALYKRVIGLDIHQAQITACALIEESDGSTRIEQRQFGGFKRDRRELADWAASLRPDEVVMESTGIYWKSPHAALEAVGIRAKVVNARHVKNVPGRKTDVGDAHWLAMLARAGLLRGSFVPPAKLRELRLIARQRQKLVGQLASEKNRLHKVLTDSGVRLGVVVSDLHGQSARAMVKAIIAGEPPSEVLRHASRRLKASRDEIFEALQGDLSASHRFVLDELMHHIEEIEARIGRFDARLLAELESERNSLALLQTIPGVDLIGAAMLLVEIGTDMDVFGSPDRLASWVGLCPGNNESAGKRKSGHVRKGNLYVRRLLCEFAHAASRTTSVFKSKFQSLVIRRGHKRAIVAIGHKILRTIFFMLKRREHYRDSATDYEALSVQRNAPRWIKALTKFGFIATANT

SEQ ID NO: 91364 - protein, 436 aa, unidentified
MDTEHELVLERVCAIDVAKDSGKVCVRASKRVSKVWDVPARTGAVAELAEHLLAEGIEKVTVESTSDYWRIWFYVLEAAGLSVQLVNARDVKNVPGRPKTDKLDAVWLAKLTEKGLLRPSFVPPAPVRELRDYTRLRIDLTRERSRYWQRLEKLLEDALIKVSAVASTLDTVSVRDMLEALIAGERDPRRLAGLARGRMKPKYGALVEALTGRFDDHHAELTRMMLDQIDALATQIGTLTTRVDELLTVMEPQARADEPDTPGGAGAVADGARESTTIERLDEIPGISPGLAQIILAEIGLDMSRFPTAAHLVSWAKLCPRTIQSGAIQRGGKTGRGNPYLKGALGEAAAAAAKTNTFLGERYRRIVKRRGKLKALVAVARSILVIIWNMLNDPTARYADLGADYHATRINTERRTRTYVTQLMAMGYRVTLEPAA

SEQ ID NO: 91365 - protein, 343 aa, unidentified
MDQYVALDVSLQKTAVCVLNASGSVVIEAELPSEPAALTAFIQTHAPRAARVGLESGPTSPWLWHSLKAAGLPVVCMDARHAHAALSVRPSKSDRNDARGLAEMVRMGWYREVQVKSLAAHERMALLGVRRRLVDMRVEIDGQIRGILKTFGLVVGSGNKGAFAQRARMLVQDHPVLSALVDKLIEVRAVAVAKVAALDKEIRRFVRDDPTLRRFMTVPGVGPVTALAFRSTIDEPDRFKRARDVGPYLGLTPRRYQSGETDRQGRISKCGDRFTRTCLYEAANVLLTKVQRWSPLKAWGTRLARRIGSKKARVAIARKIAVILQCIWTDGTEFWWTKEPATA

SEQ ID NO: 91366 - protein, 405 aa, unidentified
MRIVHERCCGLDVHKRTVVACVLTPDGQQTRTFATMTRDLVALSEWLQSLGVSQVAMESTGVFWQPIYNVLEDTGMNVLVANARYIKSVPGRKTDVKDADWIADLLRHGLIRGSAIPSRARRELRELVRYRLSLSRQRAQVAHRIHKVLEGANIKLSSVVTDIMGVSGRAMLEALITGTDSAETIADLARGPLRRKRNDLIAALEGLVGPNQRLLLASHLRNLEFLTHEIERLTTEIEEQLRPSQELIERLDTIPGVGPRVAQAMLAEIGNDVSRFPTGSHLASWARVCPSNDESAGKRRSSHIGPGNPWLRATLVEAAWAATHAKHTYLAAQYRRLAARRGAKRALVAVAHTILIIAYRIIRDGTTYEDLGSNYFDERDRRATLRRSVQRLERLGYKVTVEEAA

SEQ ID NO: 91367 - protein, 356 aa, unidentified
MQTQVTKKIDFKGKDLYIGLDVHKKRWSVTILVEGMEHRTFTQPPDPRILFNYLQKMFPGGTYYSAYEAGFCGYGIHRALNDLGIKNIVINAADIPSSQKDQLQKRDPVDSRKIARALEKGLLRAIHIFDRDREELRSLNRTRFYLMRDLKRSKNRIKSFLQYYSIFIPPEFDNNQWPLKFIDWLKQIKMKTLSGQDAFSNLISSYEYHRQQILTLSRQIRVRIREYDNELYSLLKTISGIGPLTSSALITELGDINRFPHINHLSSFVGLVPRVKQSGESSYNAGMTFRCNEYLRTLLIESSWQAIRQDPALMQYYHQHIINNKGQKVIIKVARKLLNRIRYVMKNRQPYVTGVA

SEQ ID NO: 91368 - protein, 349 aa, unidentified
MMKKVLKQVLGTDVAQKELVVTLGRMYDDMSVELLACNIFKNTDAGITALLKWVQKLTTVEVKVRFVMEATGIYHQKFAYYLDEHGFEVSIVLPNKISNYMRTLELKTINDKTCSQAIARFGLERTLDQWKRPKEIYKLLQQLTRERDQLVAERSVAKNQLHAEQAEAYPNKNTVKRMKARIRFLNTQEKEIKQEIDGIVKSNPELKNEIDNICTIPGVGQLTAAIVLAETNGFELIRNKRQLVSYAGLDIREKTSGTSIKGKPRISKKGNKNLRRAMHLPALGAIKHNAVHRTIYTRLVSRSGIKMKGVVAVQRKLLELIYTIYKNKTVFQPDYEESKRGQPQLATPL

SEQ ID NO: 91369 - protein, 316 aa, unidentified
MTSLPLFVGIDVAPPTLDVAVRPTAETWTVPHDAAGMTALVTQRQARQPTLVVLEAPGGFQAALTAAWAAAALPVLVVNPRQVRALAHAVGLLATTDRLDARVMAHCADAVRPTPRPLPDAATQDLRALLLRRRQRIEMRPAERNRLASAPACLPDELGQPIAWRTDRLAGLETTLAQTLKASAVWQAQEDRLPRVPGVGPVLSRTLVAQVPALGTLSPKPLAALVGVAPCKRDSGTLRGRRTISGGRAPGRAVWYRGTLVATKPHPVIKALYDRLCAAGKAKKVALTACMHTWLTILNAMMKHHTPWQPREVPIA

SEQ ID NO: 91370 - protein, 318 aa, unidentified
MTGFNFIGVDVAKDKFDISFYNGKRRAHHVFSNNESGFSSLLKKTQSNPLSPWVCMEATGIYSEGLAEYLVGKGVRTSVVNPLQIKYFAKSILSRNKNDKVDSETIAAYVEKQEPEQYKPKTKVQKEMRELLQVIDMLSKQSTECKNKLHAARTSPAKQVLKQMIFSFEKKKQKLMGKVAGLVELDQNIKQAVQLICSIKGVAEGTAYRLLAYLPDIKGFSSAKQLAAYIGVSPRQSESGLHKGETHMSKLGEAHIRKALYMPAMSAKRNNTYLKPFISRLEKNGLKPKAIVGAIMRKLVHLIFGILKSGKAFDPKLV

SEQ ID NO: 91371 - protein, 343 aa, unidentified
MDYFAGLDVSVKETRVCIVDDAGKIVREARVASEPEALLQVLTNTIYRFKRVGLEAGPLSQWLYSVLAEAGLPVICVETRHMRAMLKAQINKTDRNDARGIAQMMRTGLYRPVHVKTIRSQKLRMLLTHRKLLQSKAIAIENDLRATLRNFGVKAGMVGTVKFEARIKELVENLSDLAVLVEPLLIVRRVVREQIGILHRRLLAIVRDDDVCRRLMTVPGVGPVVALTYRVTVDVPARFRNSKAVGAVFGLTPSKYQSGESDRTGGISRCGDEMMRMMLYEAAQSMLVRSMKWSWLKAWAMKIARHRGMKKAIVALARRLAVIMHRIWVDGTEFRWTREVAAA

SEQ ID NO: 91372 - protein, 449 aa, unidentified
MNQHQLDQKRSWITGKFIVGIDPAKDKHQAAIIDSNGSAVGKSFSFNHNAWGFHEQLWFKLKRYLGPEFMHPDQLIFAVEAAIDFWQPLVDYLHRQGYSVVIVSPLTTKNSRALPGHDFTKTDPKDARLVAESAFRGHYHHYVDHPDQIKAMKTLSLTYNKLRKDLSRNQQRLRSIVNRVFPEFLSIVPLDTDTAHFLLSNYLHPHDFLNLDVSGTVVSMLKVSNQQHGMETLSDLQRAAPTSIGIPRDTLEIISDRLTVNSWLIMINTHKQQLKIISAKLIELAKQTPYFDTIISIKGISDLTAALFIAEVKDLDLYRHYKQIQKLAGLNLRLCVSGKSRGRFKINKIGNCRLRWIIYLMTQETIKYIPEVRIKYLKRQIKQSSRTRSIIACSSQLLQLIMALIKANHQYECIPENQALAWELEYHYDKMKKNRNRNKITPIYIPASI

SEQ ID NO: 91373 - protein, 376 aa, unidentified
MMDESGKVVFKAFSFPNTSDGGHALFSKLASYSPCPDDFEIGMEATGHYWLSVYSFLFEKKFLLHVINPIQTDGWRRGTEIRKRKNDIIDSVLIADLIRYGQFVETRLADEDLFSLRSLTRFRTYLVESISDLKRKVVCVLDQVFPEYQSIFSDIFGKTSKEILLQFSSPIDFESVSSQTLAELLAKLSRKQVGPAKAAQLKAAASCSFGVTFAKSSFTFQLKALIEQISFIEKQVKETETEIAGIMEKLESPITTITGIGNITGAAIISEIGDISKFDSPRKLVAFAGLDATVTQSGEFEAAHNVMSKRGSPYLRKAIFQAALVAAFKDPVLSAYYQKKRAEGKHHLTCIGAVARKMCNIIYAVVKNNQPYVPKA

SEQ ID NO: 91374 - protein, 398 aa, unidentified
MKDLKCIALDVSKDSSHIQAFSSDLLKLSKVEVIDHTLEGFNEVIRLYELLDHPMVVFEATGVYHRGLQKFLIDSEIPYVMINPLVSAKIRKQSLRSIKTDKKDCRTIAKAYFTADLKDTLVEPLVESLHNQMRQLNRYYVDSMVHLVKAKVSFNAQLDCVFPGLKKVFPDLYSDAAVVLITRYKHPDIIKGKKSDDIAKYLKKNTRHGEAYCKRKAIAVLEYSKRTCSGCKKDDIDCDILVDLMGTVSFFNAKCKNILSQLVELSRETDIFEPILSIPGIGENLAARIVAEIGDITRFKGPKQLIAYAGTDPHVYQSGIRDGLHLSISKKGNKNLRTVLYLAVSCHLRTKTKNTTVITEFYEKKKQQGKPHRVAQVASLNKLIKVIYSVSINKTIFH

SEQ ID NO: 91375 - protein, 418 aa, unidentified
MSRTLAKKLAQVKPGTLFVGVDLGLDRNVAVMVNEGGQRLVKFAFPHTQDGYAYFRRQLEKLRAQHQAPATLVGMEPSNYLWKLLAAEREKHELPYRLVNPFTVKKHREGDQLDRSKDDVRDAFTIADLLRTGKYTETQLLHGGYAELRQYATLCGRLDCEMTRHKNRLHSVVGQLFPELKRVFKDLTGRTAVAMLQNHAAAAVVRDLSVEDFIAAVRHDYVGPRLCVSKLRQAHRLAAISVGLQDGVQSLQLMVQQQLQALALLERQSTEAQKAMIDCFLALPESRYLLSIHGLGLVSAAVILAEIGDPSQYHNGRQWIKLAGSQPAPNVSGRRTRSRTPMSRKGRSRLRTTLFFAVMRLVQIDDSFAREYLRFRQRQENPLTKMQALGALMNKLLRILWALVRQQTLYNPAFMHTG

SEQ ID NO: 91376 - protein, 372 aa, unidentified
MNYNTVYVGMDVHKESFTLCAYTIDAEKGSHFQRTEADYKNVLKYLEFLRTVYGNDANFICGYEAGCLGYTLYHQLTEHDVNCVILAPTTMLEQRSKRRIKTDRRDAEIIGKCLAQHNYSPVHIPTATDEETKEFLRMRDDHKLALKKVKQQILAFCLRHNYRYDGNSHWTAAHIKWLKSLNPEALYKEILDEYLLTYTTLSDKVERLDKRIEELASKDEYRGSVKKLCCFIGIKTHTALSVLVEVGDFQRFASAQNFASYLGLVPGEDSSGDGQTRLGITKAGNRHVRMLLTEASQCYARGQIGFKSKELKSRQAGNSPQVIAYADKANERLRRRYYKMVLGKSKKHNVAKTAIARELACFMWGMMTEHIA

SEQ ID NO: 91377 - protein, 337 aa, unidentified
MVYGAIDLHARTCQIRVVDAEGQVLREGRVSTTAEALIAGFTDLGPVRILLESSTESEWVAQALEAAGFAVIVADPNFAPMYGERHRKVKTDRRDAAVLADANRRDCYHRAYRRSAAQRTMQQRLKARRLLVGARTGVISETRAILRQLGLRLGAGGSADIAKRLARLALPPAVERVLAPLARMVTALTQEIAGLDADCATAAAGDPVVTRLQTVPGVGPVVALTFRAFIDDVARFQHAGQVSAAIGLVPREDSSGERRHRGHITKAGPSELRSLLVQAAWACQHTRRSGPLRLWMAAVAQRRGPRVAIVALARRLSRILYAVWRDGTDFSLAALTA

SEQ ID NO: 91378 - protein, 318 aa, unidentified
MLIHYIDIAKRNFVIAVSSLSKTKTETNNPKGIAHTIEYLKKHKVALVVTESTGGLEIPAAKAIRRAGIAVIIANPGQTHQFAQSQPLTKTDAKDAKMPAFFTQMMTQKEDWQTMPYQPPTEAEEVLEALVNRRNQSADMRTAEKNRLHQVHETQVGSVKQLIAHFDRLIDELDKQIDNHTHTHFDGKAQVAEQIKGIGSITTATLMAMLPELGRLSHKRIASLVGIAPHPRESGETKFKSRCFGGRSAVLKALYMATVAATRFEPLIRDFHQRPLSEGKPYKVAVTACMRKLLTISNARMRDYFAENDTAENGIRTA

SEQ ID NO: 91379 - protein, 400 aa, unidentified
MNRTRTVAGLDVHKDSIYLCIMGYDQAIIWENTYGVLTPDLRQMHHDMRAHGVTEAAMESTAVYWVPVWTELCESMELRLVNPYFIKQLPGRKSDVKDARWIAECLLKNLIKGSFVPEPIVQDMRKLNRRIMDLCEDTTYNSNKLDAALQRCGFRLSNYVATTKSKSYRSVLKAIIDGQTDPDELLSLVHGRILNKHGRERVKAALTGSFSETDLIVLRQLKETLDLIEEQTADCQQELVRLCKEHYPKPYERLQTIPGVKERAATAIIAETGVDMKMFATAASLVGWCGLKPRNDVSNGRFKSRKVTHGNRYLRQILIEIAWAASRTRNSFFSHFSYLQTTVKKKNKMKIQVAIARKILVALWHMLSKEEDFIDIYLKRQEELKRTEGQIKLLESYMAD

SEQ ID NO: 91380 - protein, 427 aa, unidentified
MLSGGSYLSFKIFKFNCCGLDVHKTWIYACIGITDSNNRTEYKQARFSSFSKCLHQLCVWLVKYNCNDVCMESTGKYWIPVFNILEQHKIRVTLSHPKYTKPMKGNKTDRKDAKWICDLYMCGMVKPSFIPPADIRELRDLVRYRFKLTCMITGEKNRAQNCLTVSNLKLDDVFSDVFGKSSRSITEQILQHPGEKFDVSPFVDSRCKTPIEEIQAAVDGNISKEQDVKLRQCLDHIDELQKHISEVEQEILRLSDKYEAALNLIRTVPGFDKNPMTAIQVLSEIGGDMSVFPTAKHLVSWAGCCPRNDKSDRKIKSTRISCAGSYFKPVLVQIANALIKLKKHFEFTTRYKRIKTRRGHKKAIIARCRMILTAIWHILTDLKPYTSDGFLESRPVKKEKVLTTSQALNLLRQRGYLIKDEPRRSPN

SEQ ID NO: 91381 - protein, 432 aa, unidentified
MKSMRLRGRKRQAVPDREQGIVIGIDVSKGKMTYGAFQLEGKTKVVTAKQDAAGFRRLGEAVAGLREQGYDPWLAYEPTGPYSTCLREWLVSEGLRVVQVNPYHVRRTKEVRDNNPGKSDGKDPGVIADLVWQGCYLEVRPLGGVYAELRAASAEWAALSKQRTALRNEFQGLLEVWFPELREIFADAVGQSVRALVRHYASVEAVAQGGVVRLRRILCQASRGRTKGRVMAIWEACQDSVAPKAGQQARHRHLLCLLDLLEVVEKRQGRLQQEMEIWLRQLPEACFLLSAPGVGMVSAAGLLGECGDLGGYANHKSLEKHLGLDLYEISSGQRQGQRRISKRGRSLARYLLCQIVLTQLKRGGLYCEFAEALKRKGKKGREIRVAAARKLLRLLYALARDRAEYNVQRWVSGNGTGDGLTNHPGRPAQIAA

SEQ ID NO: 91382 - protein, 369 aa, unidentified
MKKHITFVGLDVHKNSINVALADEDRNGAVRYYGAIGGALDDLDRVVKKLSSSSRELHFVYEAGPCGYDIFRSLTNKGYACAVASPSHIGKKPSERIKTDRRDAMMLARLHRAGELTYVFVPHAEDEAMRDLTRAREDAIKAQRVARQQLGGMLLRLGFRYQGKTAWNPAHFRWLADQKMPSPSQQVVFQEYIHAIDETTKRVERHTQQVENLVPSWRMAPVVKALHALRGVSLIVAATMIAELGDLTRFENPGKLMAFLGLVPSEHTSGQKKRQGAITKCGNGHARRVLVEAGQAYSYQARITPLLLKRQEGVSKEVKDISWKCQVRLCARFRRLSATGKNRNTVITAIARELAAFMWSIAKQVPISA

SEQ ID NO: 91383 - protein, 312 aa, unidentified
MAPLYLGLDVAKTTVQLASEPAGLGGQFATDPSGLAVLVAQCQAQPVALVVLEATGGYEAPLAAALATAGLPVAVVNPRQVRDFARALGRLAKTDRIDAQVLALFGARVQPAPRPLPDEATQELEAVLLRRRQLLEMLHAERQRLPRARGREVRRNLRAHIRWLEHSLIDTDATLEALIQASPLWRVQDHLLQSVPGVGPTLARTLLAQLPELGHLDRRQIAALVGVAPLARDSGTHRGRRQCWGGRPALRSVLYMAALVAARWNPVLRAFYARLRAAGKPGKVALVAVARKLLTILNAMLRDQRRWQCTHA

SEQ ID NO: 91384 - protein, 384 aa, unidentified
MKNDSIVFVGMDTHKEFTEVAYSLDGRDNDIIHLGRIQSTKQGLLKLARQLQSKYPHATLHFLYEAGPCGYWMYRLLSQQGHCCYLVAPSLIPKKPGKRVKTDKRDAMDLCRLLKNGDISPIYVPEPEDEAVRDLSRARETAMKDLNDARYQLKALLLRNNIRYEGKANWTLKHLRWLTEMILPHHCQQIVLQEMIQTITERMNRLERLDNELTHQVKLWRYYPVVKAIQVLRGVRLLVATGVISELGDLSRFDSPRKLMSYVGLTPSEHSSGGSRRLGGITKCGNGRARRLLIEGAHSYRYTANVSTSLQIRQEGLPKEIIDMAWKAQLRLCKRYQRLMARGKHRNVVATAIAREMIAYIWAISREVVLPKVDTKLLKVRIPA

SEQ ID NO: 91385 - protein, 385 aa, unidentified
MSELNDLSRSLTSLEQDKTIIAVIEMSQSSWLVAGIVPGIERHPLKKLEPSEEELVRLLMRWRTEATKNGHTITRIAVAFEAGRDGFWLARWLRARDIETYVIHPTSVAVSREHRRAKTDRLDTGSLKRVFIGWLRGEPDHCHMAAIPTLAEEDAKRPNREREGLVRERTRIVNRMKSCLARFGIRNFKPTLRKAPERLAALSTPEGVSLPPNTLLELRRDMARLRFVMDQIKEVEEARAQRLEQAPQEQTHAMVRLIARVIGVGIETADMLVHEILSRQLRDRRAVARYAGLTGAPDESGNKRREKGLAKAGNARVRRGMIQLAWRFLVFQKDSALARWYRTRTESAGKKRKTMIVALARKLLIALWRLVTIGEVPAGVVLRAA

SEQ ID NO: 91386 - protein, 347 aa, unidentified
MPNYNQLHQFYAGVDLHARSMFVHVLSAKGKTVFERDLPAEPDAFLDAIKPFRKNLVVGCECMFAWYWLADLCEDKRIPFVLGHALAMKHIHQGKSKSDKIDAGKLAAMLRGGMFPLAYVYPRAKRQTRDLLRRRSFFVRQRSQLITHIVNTNSQFNLPPLTKKLTYAANRSEEIATRFADPSTQLSIHADLNLIDAYDVQIATLERHLIQSARVDDPVTFGFLRTIPGIGPILGLILLYEIDRISRFPEAGNFLSYSRLVRCAHESAGKVKGFGGKKIGNAHLKWAFSEAACLMLRSCVPVKAWLARQEKKRGKRKALSVLEAKIGRTVYHLWRKQRAFDVKRFLA

SEQ ID NO: 91387 - protein, 416 aa, unidentified
MNSPAKSTSQRFLALDLHKHYLVVGGVNSRQQVVLNPRRISLEKWPAWAKANLLPCDAVVLEATTNAWDIYDQIVSLVARVVVAHPPKVKWIAEARVKTDRLDALRLAHLLAADLIPEVWVPPVEVRELRALMAHRQRLVQMGTRARNRLHSLLHRHNLKPPAGKIFAQKHREWWQKLDLSPTQLMRIRHDLATLDHVQGQLAEIEQELSRLSTAEPWADQVPFLLQLPGFGLIVSLTVLAAIGDISRFSHPKKLVGYAGLGASIHDSGEKHRTGRITKRGRKELRWVLVEAAWRAADTHPYWKAQYERLERRIGPTKAAVALARKLLVAVWYVLTQRTSDRHADPDKVAFKYIMWSWKLDDVKRNGLNTRQWTRYHLMRLQLGEDLTHILRGGHRYPIAPGEELRALLPELQAAD

SEQ ID NO: 91388 - protein, 349 aa, unidentified
MRFYTKTHNHYCGIDLHAKTMYLCILDKDGQILLHQNMQSCPEDFLAATQPYRADLVVAAECMFTWYWLADLCRQEGIEFVLGHALYMKAIHGGKAKNDKIDAFKIATLLRGGNLPKAYVYPPAMRATRDLLRGRLHLVRRRGNLLAHIQNTHHQYNLSAPKAKIAYKANREGVAEAFPDPDARKSMEVDFLLIEHYDKVIRDLERHLERRAKQHDPQAYHRLRTVPGIGKILALTILYEIHDIGRFDRVQDFLSYTRLVKCDHSSAGKKLGTGGAKIGNVHLKWAFSEAAALFLRNNPEGQKHLRRVAGRHGKAKALSILAAKLGRAVYFMLRQERAFDMGRFLARKN

SEQ ID NO: 91389 - protein, 345 aa, unidentified
MGPMYYIGLDVHKRMISYCVKDSSGKIYFEGSIPATRLDLDRWLKTLPQPWSAAMEATLFSGWIYDHLKPHAAALKVAHPLMLRAIAAAKKKNDRIDASKICDCLRCDFLPECYMASTEIRERRRTLRYRNLLVRQMVQIKNKIAVLLMEAGVSYNKQRLHKAGYFRELLATNPDLDEGLRSLLRLCREAVVRLEKTESALVRSLERDCLLRERVERLMTIPAVGPITALTWALEVGDVQRLSSIKKAVSYCGLCGAEQSSGNTVQRTPLSKQRNKHLQTTLIEAAKMAPRISPDLAALYDRERHKGNPNRATLAVARKLVAYLLAIDRRQESFLVVKNEDRTAA

SEQ ID NO: 91390 - protein, 320 aa, unidentified
MEQGGIYVGIDVAKVRVDVAIRPGGGRCEVSNDEAGIAALVVQMQELNPAAVVLEASGGLELPLVAALAAASLPVVVVNPRQVRDFAKATGRLAKTDTLDAAVLAHFAEAVRPPLRPLRDTETQDLNSMVTRRQQVMSMLVAERNRLSSAAMAVRPSVEAHILWLKQELDDLDKGLRETLRQSPVWREKDDLLRSVPGIGEQISLTLLAYLPELGTLNRRQIAALVGVAPFNRDSGTLRGKRTVWGGRAGVRTALYMGAMVASRHNPVIRDFYQRLLSAGKPKKLALTACMRKLLTILNSMLKHGTSWQHPDIKSIAHSY

SEQ ID NO: 91391 - protein, 352 aa, unidentified
MRKYYVGLDVHKVSISIAVLDAHGKLITRTVIETSTEAVRDFFRNLGGEIHLTFEEGNQAAWLYDIVEPLVRRVVACNPKHNRIEGSRSDRVDAVKLAELLRLNALKPVYHGEHGTRTLKHLMRCYECLVKDITRVKNRLKALYNSQAIKQRGRELYHASKRQSWLEKLPNQGQRTRAELFFQQLDELKVIKRAAQKAMVAESKRHPAYRVLSQVAELGPVRIAQIIPTVETPWRFRTKRPFWHYSGLAVVTRSTADHEIEDGRVRKRKKQIIQTRGLNEDYNRRLKSIFKSAATHACHCGAYREYYEGLLKTGMREEMARLAVARKLSATVLAVWKSGESFDAGRILRKAV

SEQ ID NO: 91392 - protein, 343 aa, unidentified
MEYYVGLDVSLKQTSICVVDQTGAVVREGVVGSDPEAISAYVRSRAPDAVRIGLETGPTSTWLWTELKLLGLPVVCIDARHAKAVLKMQINKSDRNDAIGIARIMQTGWFKEVHVKDIDSHSVRALLASRALLVKIKRDLENHVRGLLKNLGLIIGRAKFNVFAVRAEELIEGRPELIAAIRPLLEARNAVGQQVSELDRKVMKLARHDEQVRRFMTVPGVGPITALAFKATIDDPARFARSRSVGAYIGLTSRRHASGEVDWTGRISKCGDAMLRSYLFEAAGVLLTRVPKWSAVKAWGVRLAKRNGLRKAKVAIARKLAVILHRMWIDGTEFNWSKKEIAA

SEQ ID NO: 91393 - protein, 318 aa, unidentified
MPNLIHVGIDVSKNSFDVSLGVGGELCRFSNAGEGFEQVLERLKGFEVRLVVMEATGGYEAQLACALQAAGLSVAVVNPRQARDFAKALGYLAKTDRIDAAALSAFAQTLDQHPQRERFLKAVPNPLREQLAAWVTRRRQLVEMLTAERNRLALSHKAARRSIEAIIKALRKQLDDVEAQMARHVREHHADLEALLASAKGIGPQSIAVLIGELPELGRLSNRQISKLVGVAPLNRDSGAMRGKRTIFGGRSHVRSSLYMPTMSAIRYNPVIRAFYNRLLARGKQKMVAVVACMRKLLTILNSMVRTGKSWDASLHNA

SEQ ID NO: 91394 - protein, 361 aa, unidentified
MRYYTGNHPFYCGIDLHSRTMHVCILDHEGNAVVDQGIACNPKAFLKLIAPYRQGLVVGVESIFCWYWLADLCQEEKIAFVLGHAFYMKLIHGGKGKNDRIDAGKIARLLRCGSFPLAYAYPKGMRETRDLLRRRMYLVRHRSGLLTHIHIVHSQYNLPAPDKQLHWHSNQAGVAERFASASVRQNVSVDLRLINHLSQVIVELEEYLIRTARVEDRQTYERLQTIPGVGRVLALVLLYETHDWSRFSSVGQFLSYARLVRCLHESAGKTVASGNNKIGNPHLKWAFAEAACLMLSVSERARRWKQRYQQKRGAGKAMSVLAAKLGRAVYHMLRKQEAFAEERFWNSGRRAGNQPALAAKA

SEQ ID NO: 91395 - protein, 347 aa, unidentified
MNSVGIDLHRKRSHVAALDERGGELFSRRIVNDPDVFVALLDGLDGESKIALEATYGWEWLADLLEDHGYELHLAHPLRTKAIASARVKTDAVDARTLAHLLRADLLPESYVAPRELRDLRDLLRQRVVLTQMRTALKNRVHALIARQGIQRAHADLFGPGGRRFLDDLELRPDPRARLGTLLRLIADFDREIDALAREIDRRAKHDPRVDVLCQIYGIGRYLGMLIVAEIGAIERFPSARHLCAWAGLTPTVRSSDARTRLGHISGLGSKALRWALVEAAQKACQGGGPLRQDFERIAKRRGRKIAKVAVARKILTLCYYGLRDGEIRCLKPSGRASALKVTAPSS

SEQ ID NO: 91396 - protein, 406 aa, unidentified
MDVVYTHVCGLDVHKKNVVACVITPETKEIRTFSTMTDDLILLVDWIKSKGCTHVAMESTASFWKPIYNLLELEEIQTLVVNAKHMKNVPGRKTDVKDAEWIAGLLRHGLLQGSFIPSRDQRELRELIRYRRSLIDERAREVNRVQKVLEGANIKLSSVASDVLGKSGRAMIEAMIAGEENPELLSELAQRRLKNKKEDLKRALNGLMGNHQKLMLAAQLRHIDYLDEEIGRLDEEIKRRMLPFEEDLELLDTIPGVARRTAETIVAEIGTNMDQFPSAAHLCSWAGLCPGQNESAGKRKSGKTRKGNKKLRSTLVEAARAAGRTKNTYLSSQYHRIAARRGANRAVVAVAHSILMIAYYILKRRQPYIELGPTYYEERKRDTIIRQSLKKLESLGLKVTEESVAS

SEQ ID NO: 91397 - protein, 403 aa, unidentified
MVFLGIDWAEAHHDVCLLDEQGKVLGKRRVVDGLEGVRRLHELVAEHAEEPEQVVVGIEIDRGLLVHALVAAGYQLYAINPLAVSRYRERHGTSGAKSDPADAKLLADLVRTDRHNHRPLAGDSELAEGIKVLARTHQNLVWSRQRQVNQLRSLLREFYPAALEAFGTDLAAADAIAILERAPTPYQGRSISQAKITSALRKAGRERNLESKAAEIQTGLRAPQLEAPALLAQAYGRSVASTIRLLRQMNQELAALEQELAASFELHPDTEIYLSLPGLGKVLGARVMAEFGDDRTRFKNPKARKSFAGTAPITKSSGRRKTVLRRLACNHRLLDACYLWAFASLRRSPGAKHYYQRLRNRGQSHPQALRALANRFVGILHGCLDHRELYREELAWPLLRAAA

SEQ ID NO: 91398 - protein, 336 aa, unidentified
MYCGIDLHSNNNYVAIQDGTYEDVACGRLRNDLGTVLKFLEPYREELEAIAVESTFNWYWLVDGLKEAGYDMRLVNTTKASDYSGMKYTDDRHDARWIAHLLALGILPEGYIMPREERGLRDLLRRRSYLVHQRTSLYLSVKTIFARSKCQKVTTQDIRTWDSETVRRMFDDPHVAESVVAMLPVVRVVTAQIKGIEKIALETGKLRDEFRLLLTAPGIGDILALTIMCETGDISRFRKVGNYGSYCRCVKSEKFSNNKKKGKGNRKNGNKYLSWAYSEAAHHAKQYEPLAKRYFDRKKSRCHPMVAARALANKMARACYYVMRDQVPFDPSRTFC

SEQ ID NO: 91399 - protein, 344 aa, unidentified
MTYYAALDVSLRSVNICIVNDAGEIKFESKVDSEVEDIVTCLRVFKGEISQVGFEAGVLTQYLTYGLQAAGYEVVCMEARQVKAALSAMRNKTDKKDARGIAQILRTGWYSRVHVKSLESHHIRALLSSRKAILTKCVDLENEIRGLFKVFGIKLPSTLGHGPFDQRVRGTIEQDPALCHALLPLLEARLVLYRAFLEMARRARKMAQDDEVCRRLMTAPGVGPITSLTFKAAVDDPTRFKRSRTVAAHFGLTPRRFQSGEMDNMGRISKVGDADVRAALYVAAHSMLTRTTSWSSPKAWGMALIKKKGRRRAVVAVARKLAVILHRMWIDGKDFRWTTEEITT

SEQ ID NO: 91400 - protein, 346 aa, unidentified
MERYVGLDVSLKLTAICIVDRTGKIEHEGVVRSDPEAIAAFIKSNAPHVARIGLETGATSTWLWTELNKLGLPVICIDAKHAKAVLKMQINKSDRNDAVGIARIMQCGWYKEVCVKGLDSHAVKALLVSRALLVKIKRDLENQIRGLLKNLGLVIGPAKMNVFALRAAELTKERPELALAVTPLLTARMAIEQQIADLDRKVMKLARSNAQVRQFMTPPGIGPVTALCFLATIDDPTRFKRSRSVGAYVGLTTRRYASGEIDWTGRISKCGDKMLRSYLYEAANVLLTRVAKWSALKAWGIRLAKRTGLRKAKVAVARKLAVILHRMWIDGTEFRWSSKQTAVQTA

SEQ ID NO: 91401 - protein, 365 aa, unidentified
MEKCITKSVICGMDVHESTIKTCTAAGNGAAEVKTFSNSEAGRNSLIRYLHGLAKKHGCRQVVTAYEACMLGFGLHDELSGAGMVNYVLAPSLMRKSRKDVKRKTDEADARMIFETLRGHVLAGNSLPTVWVPPPELREDREVVRARLELGNKTTKIKEQIQMLLKKHGARKPSGMGGAWTMVHRRWLHGLLTCGGPELPPGAKIVLSSLLRQLAMLEKEIKTLDAAVETLSHKPRYQVACQALVKQIKGVGLLTAMVFLTEIGDLGRFHNRRQLGSYLGLAPTSNESGETSDRKGHINRCGAGRVRWVLCQASWVRLQHDEAESAVFERIRKGTKKLTRVAQTACMRRLAVLMWHTAKDALAAA

SEQ ID NO: 91402 - protein, 339 aa, unidentified
MNNSVIGLDIAKNIFHLFTLLDDGKTLKKKLKRHELLAFFANYPASIIGIEACGSSHHWARELTKLGHEVILLNARFVKNYVVGNKTDFNDAEAIHEAVLRPNKRVVAIKTVARQDIQLIHNIRKDLVDQRTALVNQTRGLLSERGIVINQGIEQLREQLPLIIEDAENSLTDLSRELFAEQYEKIKTLDAEIKAQDQRINRLCNANDLSKRFLDVPGVGPLTATIVAADIGDGGKGYKSSRDYAASLGVVPKQHSSADKQHYLGISKRGNRYIRTLLIHGARAVLKNCGKKTDKLSLWLQALVAWRGFNKAAVALANKNARILWAMASNGKDYEALVA

SEQ ID NO: 91403 - protein, 312 aa, unidentified
MNRVVCGVDVSKDWLDAFVRPSGVFERFSNDAAGIGALAALCRVEGVELVVMEASGGYERSAFLLLWELGIACALANPRHVRRFAEAMGFLEKTDRIDAAMIAHYAEARRLSALPPPKAAQLRLSALMTRLSQVTSDLTVQRQRRSTARDQQSVASLDEVIALLVRQSRALEGEIASMIDDDPLWACLNQAFRSIKGVADRTVARLMAELPEIGRISNKAIVKLAGLAPIANDSGKRSGPRPVRGGRSGPRGILFLVAATAARYDPHLAAFRQRLQSAGKPKMVIRIALARKLLVILNAKARDARREFECAT

SEQ ID NO: 91404 - protein, 407 aa, unidentified
MRVVHERCCGLDVHKKNVVACVLTPRGEEVRTFGTVTRELLRLLDWLQEEQVTHLAMESTGVYWKPVFNLLEGHGIELMVVNPGHMKAVPGRKTDVKDAQWIADLLRHGLLRPSRIPERPQRELQEAVRYRRSLVEMRADEVRRLQKVLEGANIKLGDVAADVVGKSGRDMLHALAAGVTDSAQMAELARGRLKGKRTELGAALEGSVDHHQRFMIEHLLQHIEFMERRIEEISAEIGARMRPFEPALAALQEIPGVGPLSAQTIVAEVGIDMRHWPNAKAFAAWAKLCPGNNQSAGKRRSSSIGHGNQSLRGALVEAAQSAVRVKDSYFAALFHRLKARRGGKRALIAVAHAILVVVYHMLRDGTVYRDMGSDYFDRLDREAIVRRSVRRLENLGYQVTLHDPVAA

SEQ ID NO: 91405 - protein, 342 aa, unidentified
MDHFAGLDVSVKETSICVVDDTGRIVREVKVASEPEALLQVLKNPAYHFKRIGLEAGPMSQWLYSALAEAGLPVICVETRHMRAVLKAQINKTDRNDARGMAQMMRVGLYRPVHVKTLRSQKLRMLLTHRKLLQSKAIAIENDLRGTLRNFGLKVGMVGKVRFEARIKELVDNLPDLAAMVEPLLIVRRTLREQFCVLHRRLLAIVRDDEVCRRLMTTPGVGPVVSLTYRATVDVPARFRKSKSVGAVFGLTCAKYQSGESDWSGRISRCGDEMMRVMLYEAAQSILHSKRWSWLKAWAMQIARRRGKKKAIVALARRLAVIMHRIWVDGTEFRWTREVAAA

SEQ ID NO: 91406 - protein, 412 aa, unidentified
MKRYYIGVDWGDRLHQVYVGDEEGEKVKEVKVQESPEGLAEIGRWLDERRAEGIELWAAIEKPAGRIVDFLLDHGVEVYPVNPKAVDRVRDRHRMSGSKSDAFDAYVLAEFLRSDHAHLRALRPSSEKAQELKLLSRDQRRVGRHKTRLLNQITTTLKEYYVRPLEVFEDLETEIALDFLQQYPTPAHLSALKRKQFNRFATTQHHLSKQRCEELWEKLQKPQLRVPEHVVRAKAQLLEVLIEQLRASIKAVKIYHHKVESFFASSPAAEFAKTLPGGKSGTLVAAIWAELGDAQGRWESSRHLQAEAGAVPVTKASGKSRVVHFRFACNKHLRYTMYWFSFVSLNQSEWAKLYYRGQRDKGHRHSQALRALGAKWLKIIFVMWRDHTPYDENYHLANIARQKMRQAAWKIF

SEQ ID NO: 91407 - protein, 415 aa, unidentified
MEGLQALHRRVAGIDVHRMLHVVTVLIEQPDGSIEQTNREFGGFRRDCRALAEWLAELRVELVVMESTGIYWKSVHAHLENAGIAAWVVNAHFIKHVPGRKTDMSDSQWLAVLARFGLVRASFIPPKDLRELRLVSRYRRKLTQMHSAEVNRLHKVLDDAGIKLGGVVSDLNGVSATAMVKGLIEGQDIASLLGMARGALKLKRDELQAALDGDLSARHLFVLKHIHAHIESLQRELADIDAYLLEAMQPYALAHGLLQTIPGIDQMAAALILIEIGDDMARFGCAERLASWAALCPGNNESAGKRKSGRTRHGNGVIRYILCECANAARWTKSTLAAKYRSLTVRKSHKKAIVAVAHKMIRLIYVLLTCKQAYLDPHTDYAAMSARKNAPRWIKQLKLIGKWPASQDAATVASA

SEQ ID NO: 91408 - protein, 381 aa, unidentified
MDEHIAAFVAFDTSKLRNAVAIAEAGRTGEVRFFGEIDNTAEATAKLVKKLAAKYERMAFCYEAGPTGYGLYRQITDLGHECMVVAPSLIPKRPGDQVKTNRRDALGLAKQLRAGELTAVWVPDSRHEAMRELTRARGAAVQDVRQKGQQVSAFLLRLGRHYDPDKKTWSKAHMNWLASQKFEHPEQRIAFEELLLAVRQAKERVGRLEEAIRLAVPDWSLAEVVVALMAMRGIDMVTATAFLAEIGDLSRFRTPRQLMAYLGLVPSERSSGDTVVRGPITKAGNRRARRLLIESAWSYRHPPRVGKDKQAKVAAAPRAVAEIAWKAQYRLYARYRALTRRGKLKTVAITAMARELAAFIWAVSREVANTDRAAAQQGIRG

SEQ ID NO: 91409 - protein, 382 aa, unidentified
MKKELDLGLDVHKDCIITAVAEEGRKGEVRESGAISNDLHAVEKWIGRLRKAHGKETLLRGCYEAGPCGFGLARRLRQLGVECQVVAPSLTPTRSGERVKTDKRDARKLARLLRAGELTPVYIPDARDEAIRDLCRARSDAVDDRRRSRHRLKGFLLRYGYRYQGKSSWSAAHERYLRELVLPHPAMKVILEEYLQAIAAAGERIERSEEAMSALLEKWRLVPAVRALMAMKGFQTVAAMILVSELGEVHRFAHPRLVMAYLGLVPTENSSSDRRRQGHITKCGNAHARWLLVECAQHYVAPPKVSKELSRRQQAQSAEVRAISWRVQNRLHNRYRRLLARRLQRNKPIVAIARELCGFIWELLRTQPCYQAQTTSLSTTKG

SEQ ID NO: 91410 - protein, 416 aa, unidentified
MAEEVEWFVGIDWASQSHQVCLIGARGECLGERSVAHGGPGIEELCDWLIARTGATPEVIGVAIEMTQGPVVEALLERGFCVYGINPKQLDRFRDRFTVAGAKDDRRDAHVLGDSLRTDRHAFRRLSNDEPVIVKLREWSRMTDDLQQERIRLASRMREQLWRYYPQMLELADDLAADWFLDLWNQAPTPAKAARLRQTTIERFIKAHRLRRWQAPEVLRILKQKPLSVAPGVVEAASDHIRTLTVRIRLVNQQLKAAHRKLDELCAQLIPSEENEPGQQCEQRDVVILRSMPGLGRIILAVLLAEVWQPLRRRDYHALRSLSGVAPVTRRSGKTSVVVRRYACNKRLANALYHWARLATQHDALSRRRYAALRQRGHSHGRALRTVADRLLSVTCTLLEQQTLFDPAYEGRDAGA

SEQ ID NO: 91411 - protein, 394 aa, unidentified
MDSFLIGIDVSKALFSAAGIDSEGNESFSGSYSMDSSGFGEFLKTITSHCEDLSKVIIGMESTGCYHINLYSFLTSQQIHTMVINPLLIANYAKLSLRKTKTDKKDARTIAKFLLDHRQEISQLSVSQDLQDLRDLSRERESLCHLMSATKVEIKRVIRTTFPELESMGDLYTRTMIRFLQEYPSARLVRAAKSKAIAKALKRPSVGNKLTLTAEEIVKAAQSSVATVSPAKEIILRGKIATLLHLQERLAEVSKLLTELCQSTKLEDLEILRSIKGVGPNTAAPLLAEMGEVKNYSSHKKIIAYAGMDPSVHESGKYVGMSKLSKRGNRHLRRAIYLMTASVVSQNVFFKAYFLKRKREGLAPQKALFATAHKLIRVIFAMLSQRTHFKVKEA

SEQ ID NO: 91412 - protein, 344 aa, unidentified
MDHYAGIDVSLECSSVCVVDANGKIVREAKVASEPEALIGWFGSLGFGPARIGLEAGMLSQWLYAAMKQAGLAVELLETRHVYEAFKSMPVKSDRNDARKIAQLMRLGWFRPVHCKSITAQEIRAMLTARKLVQSKLLDLENSLRGILRGFGLKVGKTTRTNFAGRIEELVKGHPDLQTIGEALLRVRAVLLAEFNAFEKRVRAISRLHDKARLLMSTPAVGPIVSLTFACAIDDPSRFTSSKQVGPYLGLTPKKYQSGETDYTGRISKHGDASVREALYEAAHIMLTKPIKGCSELKSWAMRIARRAGINKAKVALARKLAVIMLRMLKDNVPFNPAAKAATA

SEQ ID NO: 91413 - protein, 430 aa, unidentified
MNSTQNKKIRQVTEKTMVVGIDVGSEKHYFRAFDWRGIELTKKPFPFTNSMEGFNSFSNEIYSLMERFHLSETLVGIEPTGHYWFNLGQYMSGKSIKFVMVNPHHVHKSKELDDNSPSKNDCKDPRVIAGLVREGRYYYTYMPQGIYAELRNASNRRFTLVEEQTRIKNRLYRWISVYFPEYKGIYTQINAKGGLLILKEAPMPEDIIKLGIDGIIEIWKKAKLRANGRKKAMVIYNAALKSIGYREGLVEARMEIRDLLEDHEQNEKRLKQINDLIENLALKIKNVEKLLEIKGIGIITIAGFIAEVGDIMRFDNAKELQKLAGLELVADSSGKRNGMTRISKRGRKHLRYLLIQAAISVVGKCEEFKEIHNYYTTRNSNPLKKMQSIIAVACKLIRVFYVILAKGIDYDASKMLEDIKHPGETPNLVA

SEQ ID NO: 91414 - protein, 347 aa, unidentified
MSEIHVVGLDLAKQIFQVHAISSEGAVVVRRQLRRSQVLTFFSKLSSCLVGMEACGGAHFWAREIAKLGHQVRLMPPNYVKPYVKRGKTDAGDAEAICEAVSRPTMRFVPVKTAEQQAAAMVLKTRDLLVRQRNQAINALRAHLSELGIVSGTGVSRVAGLIGIVRDPEDARLPVIARQVLVDLSDHIEALTERLHRLDREIVARSREDADLRRLTAVPGIGPISAASLKALVPDPSGFVSGRHFAAWLGLTPRAHSSGGKERLGRISKMGNPTLRTLLILGATTVLRHARNGGKASPWLQALLSRRPPKVAAVALANKTARIVWALLTKGSHYRNPGLAASSAMGA

SEQ ID NO: 91415 - protein, 335 aa, unidentified
MEPMYYVGLDVHKRKISNCVKDVGGQLHGEGAMLATRSELDRWMKTLPQPWTAAMEATMFTGWIYDHLKPHAAAVKVAHPVMLRAIAASKKKNDRIDAKKICDYLRCDFFPDCYMASTAIRERRRTLRYRNLLVRQMVQMKLKISSLLMEAGVSYNKQRLHKAGYFRELLASNPDIDPGLRALLQQCREMVVRASKTENALIRSLRQDRLLAERVERLMSIPAIGPITALTWALEIGEVGRFSSIKKVVSYCGLCGDQKQSGSFVQRMPLSKKRNRHLQTTLIEAAKMAPRYSPTLALLYDREKQRDNANRATLAVARKLVAYLMAVDRGRRIFW

SEQ ID NO: 91416 - protein, 426 aa, unidentified
MKLEEKELEKPIRAWIGIDWADEKHDVSLSDVATGKQEALTIRQSPEALQEWLGQLRSRYEGGYVAVVLEQGRGGLLNALMGCEFLVLYIINPKSLSSFREAFYGSGATSDPVDAELMRDMVRQNPSRFRAWRPDDVMTRSLRLLTEGRRNLVNQSTALTNQLTALLKGYYPQALAWVGTLDTAWACDFLQQWPTLQSLQASSRRQVLRFYEKHPRASLNLNEQLKQIQDARALTQDEAVLESSALMVQALVSQLRPLLASIAEFDRKIAMIFHKHPDRPIFESFPGAGAALAPRLTAAFGTDRDRFQAATEMQELAGIAPVTEKSGKKSFVHWRYACPKFMRQTFQEFADHSRRWCKWAKAHYELLRQRGKSHNAAVRALAYKWIRILFRCWKNRQPYQDEVYTKALLKHGSPLSSLLAQYVENP

SEQ ID NO: 91417 - protein, 399 aa, unidentified
MFYCGIDIAKYKHEASVIDMSGKALSNSITFANDRQGCEKVLAIFEKSEITPDNVVIGMEATGHYWLSVYTFFLELGYTVKVINPIQSEAFRKMYIRQTKNDSKDSYIIAQIMRFGEYSATTLSEDNIIALRQLSRYRLALVDACGDCKRRVIALLDQVFPEYDKLFSDTFGKTSSELLLNCPTPEDMLAVSTRKLTNILNKASRGRFGKEKAEELKDAAKNTFGIAFAKDAFSFQIKQLMQQIIFTEKQLSELEEQIANLLHETNQYITTITGIGDVLGAIIVSEIGDINRFERPNQLVAFAGLDVTVKQSGEFSGTKNRISKRGSPYLRRAIWLAAQRAAFCDPILSEYYQSLKARGKHHLTAVGAVARKLCNIIFVILKENRPYLPIPPKKSQNLS

SEQ ID NO: 91418 - protein, 370 aa, unidentified
MARKLWAGLDVGVETTSICVISDTGEVLQEATCPTHVKSVHSEIRWLRRRRFARVGLEGSCGLTLARGLRSLGYCVDLYETRQLSKFLRARRNKTDAGDANGIAQAGRIGASLVSRVYLKSLECQSLQSRLVVRRHLVRARAAAVSLLCRQVEAYGGRVRSATHSMQLGLKVNAELSKLFGRSPNPLVSELRTLLVHCEQLISYQRSVDQDLRRVACDNEVCRRFMEIPGVGPLCALTFFAAIGDPKRFRRSVDVGSYLGLTPKIHQSGLSLRRGRISKMGNSEVRGLLVQAATAFMRWEKDGSRLRAWASDIEQRRGRGKSRVALGRKLAVVMLAMWKSGERFEARSSEQDQAPQEPAADSDPVKPQAS

SEQ ID NO: 91419 - protein, 319 aa, unidentified
MTTNAVVVGVDVAKDRLDVAVRPSGETWSAANDEAGITALVARLRPLAPALLVCEATGGFERAAIAALAAAGLPVVVANPRQVRDFARATGQLAKTDQLDAAILALFAERVRPTPRPLPDAAAQLLDAVLTRRRQLLEMLVAEKNRLGFAPKPVHRGIQAHIRWLERQLDDVTKELATLIEASPVWRAKDDLLQSVPGVGPIVSYTLLGELPELGTLSHKLIAALAGVAPLARDSGTLRGKRMIWGGRASVRTALFMAALCGRRWNPALKVFYDRLIAAGKPKKVAIIACARKLLTILNAMMRHNTQWMSRETQLQYSC

SEQ ID NO: 91420 - protein, 371 aa, unidentified
MKKNTTNSARLKPRQTASKKTTTKLTVGIDLGDQNSAYCALDAGGDVLSEGTVRTTESGFAQQFEKLPSCRMALETGTHSPWVSRLLKKYGHDVIVANARQLRIIYDSDRKNDKVDLRTLARLARIDKELLHPIRHRSEKAQIDLAMLRARDALVQVRTKLINCARGMVKSVGGRLPGASGECFAKKVREHIPDAIRDALTPVLDQIEQIGAQLRDYDKRIEQMAKTDYAPTMLMRQIPGVGVLTSMAFTLTIDDPHRFDKSRDVAAYLGLLPRQSDSGESKPQLSITKAGDHMVRRLLVGCAHYVLGHFGPDSDLRRWGLSLAARGGKNAKKRAVVAVARKLAVVMHKLWVTGEVYEPLREANRVKAAAA

SEQ ID NO: 91421 - protein, 328 aa, unidentified
MGIDLAKASFDFCLLSSHGAVLWRGHLSNDANGIKEFLGQLKAGRWKVSLIHFGLESTGVYGNRLISGLHQAGLALSVLNPAQVKFFAISLLRRTKNDRLDAQIIARFCLERKPLATRPLRPIEEQLKLLVHERESRVCEQTRERNRAKKDPFQIQLPLLISHQRQDHLKQLQKELTQLDRAIHKLMASDLDLKTQSKRLCSIPGIAETTAAKLLSELAGKEFHSARQLAAYAGLTPSQFLAGGSCYGKTHLSKIGNAFLRKALYLPAAVARRWCKPLKPWVTLLERRKLSDLAIRGAIMRKLLHIAFGVLKHQTTFDPSLVFLPKTI

SEQ ID NO: 91422 - protein, 407 aa, unidentified
MRIIGMDIHRVAAEVVSLLDGKVVKLGRVQMLRNKLEEFARKELTHDDHVVIEATGNAAAVAEVLSPYVDRIVIANPKQVHMIAHAKVKTDTIDATVLAKLYASGFLPEVWVPDPGTLALRRQVTRRTQLVRQRSRLKNLIQSILHAHLIPPCPHGNFVGISGRKWLTRQILPADERAAIERHLGLINQINEALTVVEADIAVHALQDPTIRRLMTLPGLDVTVAASVAAAIGDIRRFSDPQKLVAYLGLNPSVRQSGEGPAYHGRITKQGRGHARGMLVEAAWATVRSPGPLRAFHKRIASRRGKHIAAVATARKLAMIIWHMLSKDTDYIWARPALLARKFRSVELRAGLPTSHARRGTAFDYNIPAKRAEERSRVEKAEAAYAAETSRWRARPERQKAVEKAAE

SEQ ID NO: 91423 - protein, 339 aa, unidentified
MEVTTIGLDLGKDVFQVHGITADGTVVFNRSIRRRQLLKFFETLPRCLVGIEACGSAHHWARELTAIGHDVRLMPATYVKPYVKRGKTDAVDAEAICEAVTRPTMRFVAVKSKEQQALLTIHRVRQLIVRQKTQMLNVVRGLLREFGYGIGNGPVAAMRFIKTFQADDDLDMPDVAKSMLKTLCEQVVALDERVVFYDKLIEYHSRIDERAKRIRTVPGVGPITASAIVATIGDGKQFKNGREFAAWLGLTPLNRSSGGKERLGRISKKGDRYIRRLLVMGMTSQVQRARGYPERVHPWIMQLLERKPVRLATIAMANKAARMIWAILTKDTYYRQAAA

SEQ ID NO: 91424 - protein, 314 aa, unidentified
MSTLVFVGIDVSLARLDIAVRPGAVWSITHDEAAIATVVAQLHTLSPTLIVLEATGGMEIPLTSALATAGLPVVVINPRQVRDFAKASGHLAKTDALDAQVLAQFAEVMRPQPRPLPDAEARALAALLTRRRQLVERLTAEKNRLLSASSPIRKRVRTHIAWLDRELARTNSDLTQAIQQSPVWREKDQLLQRVPGVGPVLTSTLLASLPELGTLTHKQIAALVGVAPLNRDSGTLRGRRTVWGGRAQVRAVLYMGAIVAARFNPVIRVFYQRLQRAGKAKKVALTACMHKLLTILNAMLKHRTPWQEVGAHHA

SEQ ID NO: 91425 - protein, 339 aa, unidentified
MEVYAGIDLHANNSYLGVLDADGKRFFKKKVPNDPEMILGALEPVRGDLAGVVVESTFNWYWLVDVLMDQGYRVHLANPSAIQKYKGLKHSDDVHDAFWLAEMLRLGILPTGYIYPKEERAVRDLLRKRGHLVKLRTSLSLSLKNIVARSCGQGVKQNEIIQLKRDLVAPYLEGNEDLALAGKVSKEVIDCLTDRINRIERFVEGKIRLESRYQYLTTIPGVGRVLGLTIMLETGDIRRFPKVGNYSSYCRKVPSRWISNGKSKGKGNTKNGNKYLAWAFSEAVELARRYSPEVQAYYNRKLQRSNRMVAHTAVAHKLARAAYYIIRDQVPFDPAKLFA

SEQ ID NO: 91426 - protein, 416 aa, unidentified
MKKVQNTRGYERYMALDIHREYILVGAWNQEKDWVLTPRRVSTEKLPEWAKKNIRAGDIVVLETTTNVWATYDIVAPLASRVLVANAAEVEEIAKARVKTDKEDIKKLLKLLIGGIVPEVWVPPMEVRELRAFISYRGRLVKTSAMIRNRLQSLLHKHNLKMSGTGLLDQTWWEAQKDISPLEKMQIRQELALLQEVEKLKVAVDEELQRQSTGEIWGKPALQLMQLPGVGYIVAMTVLSAIGDISRFESAKQLVGYAGIGAGVHDSGKTHKDKKITKKGRRELRWALVEAAWRAVGMSPFWKAEYEKYLSRLRKKNQAIVVIARKLLVAIWHVLSKEETDEHASEEDLAYKMLLLSWSLKEDTRMGLTYKQFAKYALMKLGVETDITRFVRRDVPRRLAQREEVLARMTELGLTA

SEQ ID NO: 91427 - protein, 412 aa, unidentified
MRVLYPTCAGMDVHKKDIKVCLVTRDNQEQRQEDVRSFRTMTRDILAMRAWLQAHGCTVIAMESTGVYWKPIFNLLEGDFTVLLVNPAHIKQVPGRKTDVKDCRWIAELLEHGLLRGSFIPPIEIRDLRDLTRYRRQLVNTHSAEVNRLQKVLEDANIKLASVATDVMGVSGRAILRALLAGVVSPEALAELAKGRLRKKKPDLQAALQGRFRPHHTQLLTHILAHIEFLEESIAACEAQIEARCRPVAEVITLLDTMPGVSQRTAQDLIAEIGVEMAWFPSAKHLCSWAKVSPGNNESAGKRKSGRTGKGNKWLRALLVECAHAAGHTKETYLGTKFRRFASRKGKKRAAIMVAHRILEAAYFILRDKVPYRELGDQYLDTHHREHIIRHHVRRLESLGLHIDIRELPLTA

SEQ ID NO: 91428 - protein, 400 aa, unidentified
MTQTDSSAEPQFAAFIAIDWADQKHAWSLQAAGSDQRESDEMKHTPEAVGAWVSMLSARFAGQPIAVGLEQSHGALVFMLSQFANLHLYPIHPRAAAQFRAAFYPSGAKDDPVDADLLLDMLVLHRKHIRPLRPDNEQTRLVQHQVEARRRLVNEKTRQVQRLTAKLKLYFPQVLDWFDKVDSPLVGALLLRWPTLPDLQRARPDTIRSFCTQHNCRDSKRIEERIQKIRQAVPAISDQAVIQPAVTMTRNLVALIATLRAGIAKFDQQIAKAAAVHPDFLVFDSFPGAGPVLAPRLLAAFGSCRERFLNAAEVQKLSGIAPVVNRSGKAESVHFRRACPKFLRQTFHEWGRTLHRLLRLGSRLLPAAEATGSRPSRCCPGAGIQVDPHCLPLLAGRCPL

SEQ ID NO: 91429 - protein, 341 aa, unidentified
MKNLFIGIDFSKEKVDVAIIFADGLTETAARVFNEFKTTVSGYKQLVKWVEQNSYGIDPSLWLFCGENTGGYSNGLCKFLYGRGYDMWLENAKSIKDASGLRRLKSDRADASMIAEYAMRNHDKAVMYKPLNESLEQLRELFLFRQTLVRYRCSFQVRREEKRLTMDKSPVKTMISQIGRHMVTTLEKEIEKVNKRIADLIKSDDELTEVFTIVTSVPGIGTQNAVCLMVYTDNFRRFNYDSRKIACYYGIAPFGKDSGTSVHSDPHVHYMANRQIKAMLTQAALAAVNYNPVIARYYKRLVERGKKKQVALNNVKNKLVHLVSAMVRNRQLFSPEYKISA

SEQ ID NO: 91430 - protein, 369 aa, unidentified
MGDRIRYVGLDVHKEGIVVAVAEGGLRGEVRDYGRIANTPAALRRLAHQLGQDGLTLRFCYEAGPCGYGIQRQLSALGHECVVVAPSLIPKRAGDRVKTDRRDAASLARLHRAGELTAVWVPDPGHEAMRDLVRARLDAVRALRRARQQLSGFLLRQGCHYGRPAWTKLHRRWLAGLKFDQAVHHIVLEDYIAAVEAGEARRDRLTAQIEAMLPDWTLAPVVAALQTMRGMALVNAATLIAELGDLSRFANPRQLMAYLGLVPSEYSSGASIKRGSLTKAGNSAARRLLIEAAWTYRFPARVSRELRLRQEEQPRPIREIAWKAQLRLCARYHKLARSGKPANVVTAAIARELAGFIWAIARRVPPAAG

SEQ ID NO: 91431 - protein, 345 aa, unidentified
MVEITTIGLDIAKNVFQVHGVDATGQVAVRRQLRRAEVVKFFGGLPPCLVGMEACGSAHYWARQVAALGHEVRLLPPAHVKPYVKRGRKNDAADAAAICEAVGRPHMQFVPVKSAESQGALLLHRTRDLLVRQRTMLICALRGHLAEFGVVAGQGKGNFARLVTRLEAVEDAALPELARTALRLMAMQIDDANRKIEALEKAIVARHRADEASRRLASIPGIGPITASAIAASVPDASVFKTGRQFAAWLGLVPRQNSTGGKDRLGGITKAGDRYIRRLLVIGATGLIRYKRRNIPGGLDWLIGLLARKPVRLVTVALANKMARIAWAVLRRGEVYREAATTPAA

SEQ ID NO: 91432 - protein, 405 aa, unidentified
MKVYIGIDWSEQKHNLCFMNEAGGTIVETQIAHTPEGFLMLEQEREKLGVTLQDSQVGIETGHNLLVDFLVEKGYPVYVLPPGLVKSSQGRQGVAGAKDDRRDARLIADIVRTDRSRLQVWLPQSALVQHMKAKVSLIHFLSQSCVRYSNRLRAVLLRYYPAALQVFAALDTPITLAFVQTYPTPQQAAQLSFEQFQAFLRQHHHCQPSKWAGSYARLKLPAPDPSPEAVETYQGEAMLLAGMLATCVKAKQLAIQELQGLYSQHPDRHIFASLPGTADFLQPALLAKLGDHRSHFPSPAVLQAVAGTSPITRQSGKHRSVSFRFACDRELRFIAQQWAKASINKCDWANTYFSQAYRRTHSKNDAYRRLANRWLAILWKLWQSNQPYDESFHLQQRMLRALPRS

SEQ ID NO: 91433 - protein, 402 aa, unidentified
MTAVLGIDVSSSTSMVVLMVDGTRIKDFKICNDAIGFSRLKNELNNYREPQIVFEATGVYSRRLAFFLQTNRYSYTQLNPLQAKKEMDGLRMNKTDKNDAYHLAETQFRLDRAKTIVQDPIYSELMDQSRFYQEIVSDLVTEKNRLHRILQLTFPEIESLLSHPSGQLYWHLLIEFPISILVEEYDLNYLTNIILNLSDKNISVQRAHKIAVSLTKLASIAVPAVRGDSLVVHQVQYHAQRLLDLQYKQEEIVNSMECLAKQLSEYEILCSIPGISTTTATSLIGEIGDIRRFSSPNQVNAYIGIDLRHYESGNFTASDTISKRGNPYARKILYRSIGNIASASRTHPTHINDYYQKKKQSSSSKGAKKIAIAAVGRLIRTIYHLVLNNETYDYTKTQHGKV

SEQ ID NO: 91434 - protein, 415 aa, unidentified
MSDHRQWYAAVDWASASHHVFLADGDGRRIGERAFEHGGDGLGQMTAWLMATSDASEAGQIHVAIEVPHGPVVETLLERGFNVYAINPKQMDRFRDRFTLAGAKDDSRDAEVMASALRTDGYCFRPLAVADPVVVELREWSRIAEDLGRERNRLTNRLREQLWRYYPAMLELDADLGAEWLLDLWELVPTPDKAARVRERTIAQLLKRHRIRRFDAAQVLAMLRQPPIKVAAGTTEAASAHIAMLIASIRLVNRQLKQAHHQLDTLTGHLIPTEEAEPGQHKQHDVEILASLPGVGRIVLATLLAEGSDVLQRRDYAALRSLAGVAPVTKRSGKSCIVIRRQAYHHRLANAVYHWARVAVQHDPRSRAKYAALRGRGHSHGRALRSVADRLLNVACAMLRSGTTFDASITAKETA

SEQ ID NO: 91435 - protein, 327 aa, unidentified
MKEHSTTGSTDSPSVGLYWGVDVASDKLDLGCHGTAEVMSYENSADGIERLLAEVRLQPAASIVLEATGGYEIPLAAALADAGLPVVRINPRQLRAFATAVGELAKTDAIDARLIARFAHDVRPTVRPLPTKEQRFFADLAARRRQLIGLRTAELNRRRKTHQQELLASIDAILTVVDEQIALLDTQLAKLIATDQSWQRRDQILQSVPGVAAVTSHVLLADLPELGQLEHKQIAKLVGVAPLNRDSGKFRGHRTIVAGRRTVRTALYMAALSASRFNPQIRQFYQRLRQAGKPFKVAITACIRKLLTILNALVRDNNPWRKPAMNT

SEQ ID NO: 91436 - protein, 344 aa, unidentified
MDHFAGLDVSVKETSICIVDDTGRIVREVKVASEPEALLKVLGNPAYRFKRIGLEAGPLSQWLFSALAEAGLPVVCVETRHMQAVLKAQINKTDRNDARGIAQMMRAGLYRPVHVKTLRSQKLRMLLTHRKLLQSKAIAIENDLRGTLRNFGLKVGMVGKVRFEARIQELVENIPDMAVLVESLLIVRRALREQIVILHRRLLAIVRDDEVCRRLMTIPGVGPVVALTYRATVDVPARFRKSKSVGAVFGLTCARYQSGEIDWSGKISRCGDEMMRAMLYEAAQSMLRSKKWSWLKAWAMQIARRRGMKKAIVALARRLAVIMHRIWIDGTEFRWTREQAAAAA

SEQ ID NO: 91437 - protein, 418 aa, unidentified
MKKHNKSSQRSEPSLKPTKARGPVQRDVKEVLAEVLGKLTGKLNAPAVSTSAKENRRANTVGPNRDRLTVGVDLGDRWSQYCILGLEGETLAEGQLRTTQEDVREFFQALTTARVVIEVGTHSAWVQDVITEWGHEVLVANPRLMEGSKRRKRKSDRIDANKLARLGRVDPQSLYPIRHRSREVRQDLVVLRARDALVSVRTELINTARGLVKSMGTRLPRCSSPSFADKVKDAIPDEVREALLPLVQLVETVNDCIERYDQKIEELGQKKYGHTTLLRQVKGVGPITSLAYVLTLEDPQRFSSSREVGPYLGLVPKQEDSGDSQPQLGISKTGDRMVRRLLVGSSQYMLGAFGPDTDLRRYGLRLCERGGKNAKKRAVVAVARKLAVLLHHLWVTGDVYEPLHHTGTEIRTAQATAA

SEQ ID NO: 91438 - protein, 318 aa, unidentified
MNSHNKVETTEPVRYVSLDISKARLDYAIAGQQCRKVPNTAAGIATLITAIAPLPGVRVVCEATGGYERRLLEQLHQARVPVCRLQPGRVRSFARAEGTWAKTDRIDVGVIYRYACSMHPRVEKPLLPEVTALRELMDYRRQLVEQSTQTGNRLETAGAILQALLVVQHEQQQVALGQADELIAQHLRAHPGLQAKSARLQQVQGVGPVLATTLLAYLPELGEEDDKRIAALVGVAPFAHDSGESSKARHARGGRVEVRNVLYMAAVSASQHNPVLAPFYARLRAAGKPANVCLLAVMRKLIVVLNRMLKDPNFTLVS

SEQ ID NO: 91439 - protein, 406 aa, unidentified
MSAAVFVGHDWAEDHHDIHIEDRDGTRLHVCRLEDGLDGVRRLHAVLAEFTNDPSEVLIASETDRGLFITAMVSAGYRVIALNPMSTARYRERHSTSGAKSDRGDAHTLAAVARLDGHNHRLLEPDSALAEAIKHTARAHQNLIWTRQRQLNQLRSVLREFFPAVLATFPELAHNDCLATLAIAPTPTAASKLGSARIASALRRGGRKRGADAKAPRIRSALQAEALRVPEQLEAAMGSHVLALVAVATELSHQIDRLEDERAELLDQHPEAEIIRSIPGLGTKLGARLLGEFGDAPDRFPDARSRKNYAGTSPITKASGRTHLVIARRIRNSRLADTCHQWAFAAISHSPGARAFYDQRRHHGDSHNRALRALSNRLVGIAHGCLTHQTPYDEHTAWGHRYGPVT

SEQ ID NO: 91440 - protein, 455 aa, unidentified
MAKQKTERPPTIETVNIGAAAVDIGSREHMAAVNPDVTDAPVRAFGTFTHDLHDLAYWFKSHGVTSVAMESTGVYWIPAYEILEQHGFEVILVNARYAKNVPGRKTDVSDASWLRQLHSYGLLRGSFRPTAEIATLRAYLRQRERLVEYAAAHIQHMQKALMEMNLQLHHVVSDITGVTGMKIIRAIVAGERDLDVLAAYRDVRCKASTETIKAALNGNDRPEHIFALTQSLELYDFYQAKMLECDRHLEATLAALGAVTEHDPSELPRPRTKTKQVSTPSFDVRAALFGVLGVDLTQIHGMGPSLSLKLVGECGTDLRAWPSAKHFTSWLCLAPGNKISGGKVLSSRTRRSSSRAAALLRLAAVTIGRSDTALGAFYRRLAARAGKAKAVTATARKIAVLFYNTLRHGMTYKDPGASHYEERYRNRVLSNLKRRAKSFGYDLQELPLEADMAVS

SEQ ID NO: 91441 - protein, 424 aa, unidentified
MSKKKSRVAGLQALYARACGLDVHKKLVVACVRILDSKDGTVQSTLRKFGTMTADLLELRQWLAELKVTHVAMESTGVYWQPVFNLLEGHFKVWVVNAQHIKKVPGRKTDMKDAEWIAQLLQCGLLRPSFVPERQQRELRDLTRQQTKLVQQRNAVDNRIQKVLETANIKLGSVASDVLGVSGRKMIEGLIAGEKDVTALADLAQRQLRGKIPELQRALEGELNDHHRFLLRQLLGQYDFLEKEIASISERLGAVAPPSFRAAVEQLDAIAGVGERGARALLAETGTDMSRFPTHKHFASWAGRCPGNHESAGKRRSGKTPAANRHLDAVLTEMAHAAVRTKNSYFKAQYHRLAGRRGKKRAIGAVKHSLLVTVYFMLRDNRPYKDLGVDYFDKLNPQQRIRYHVRRLQELGQEVELSPIADAA

SEQ ID NO: 91442 - protein, 413 aa, unidentified
MEVVFSRCAGIDVSKRDAVVCVRVQGRGSTATSATVKSWGVSTPQLVRLREALQAAGVQRVVMESTGDYWRPVFYVLAEALDVQLLKASEVKAIPGRKSDVSDAEWLADLAAHGLVRGSFVPPEAQRQLRDLTRARAVLLQERTREVQRLEKDLEDACIKVSGIVSSLQGVSARQMLEALVHHEHDPAVLAELAKGRLRRRIEELTEALTGQFNDHHAFMVQLRLRRIDAATADVATLDARIEELLIAEPGFSLARELLLSVPGLGLHGATDLLAEIGPDMSVFATPQALASWVGVCPGNHQSAGTKKPIGVLPGNRYAKRALGIAAKSAARQNNGFLAARFKRLAARRGYGRALVATEHAMIIAIWHMLTNNQPYHDLGSAYYLRNTPQRVLRHKIAALEAAGYTVTKNEAA

SEQ ID NO: 91443 - protein, 349 aa, unidentified
MRFIIGCDFHPSYQQLALLDTQTGEVVEKSLTHANQEEVKAFYAGLPGPARVGIEASGQSQWFERLLAELGHELWLGDAAKIRAREPRKQKTDRRDAQLLLDLLQQGRFPRIWVPTPAERDARQLLLHRHKWVRLRTQVKNQLQALALNQGVRRKGKLWSVAGRAELEGLPLPPWTQRRRADLLKLLDDLQPGILDLDRDVAEQARARPEVRRLMTHPGVGPVTALAFVLTMGPVSRFPRGKQVASYLGLIPSEHSSGGKQRLGHISKQGNAFLRGLLVEAAQSAVRYEPRLRREYLRLAQRKGRAIAKVAMARKLAVQLYWMLRGEKDYAQQVQVRVQDSPRHPVVVA

SEQ ID NO: 91444 - protein, 410 aa, unidentified
MYFVGLDWAAREHAVCVIDERGAVASRFTVPHSAAGMTDLVARLGKHAPPSELRIAIERPSGIVVDTLVDGGFAVVPIHPNAVKASRPRYSAAQGKTDLGDAYLLADVLRTDGHRFRTLTPLSDETKALRGIVRLRDDLVGQRVGAANQLRNLLGDFWPGAAAIFADVDSPIALDFLDRYPTPQSAASLGEKRMAAFMARHRYSGRRTAAELVARLRGAARSVAGELEAEAKGECVRALVAVLRPLVEQIATLTAAAEHAVEAHTDAKVVTPLFRSGRVCAAMLLAELGDDRGRFVSADHLAAEGGVAPVTRESGKHRAVGFRWACNMRLRAALTTLADSTRHTNPWATAIYQRARDRGCEHAHAIRILARAWCRVIWQCWQQRVAYDPMKHRAARQLGSTPRLVGKEAA

SEQ ID NO: 91445 - protein, 395 aa, unidentified
MFIVGIDIAKRSHEAIIIAEDGQVVRKAFSFRNNCTGYNLLLEQVRRLTLVKSQIVFAMESTAHYWLALYARLLKDGYAVMVLNPIQSHSLRELYIRKAKTDARDSLIIADLVRFGRCKASNVPQDKILALRELCRSRAYLVDMAADLKRKLIALLDRIFPEYESLFDSVFSKASIAVLSKYSTPQKVKNANLRKLTDILMESSNGHFGEWKAHQLKEAACSSFGIDDSGGVYSTLLGMFLEQILSLTAQADSLEKQISVFFQEFNNPLTSIPGVGTVLAATILSEIGDITRFSSADKLLAYAGLDPSVKQSGEFKSNQNRMSKRGSPYLRRAIWLASTVAVHRDPMFQTYYEKKISGGLHYMNVIGHVSRKMTAVIFAVLRDGQPYQPILQSAG

SEQ ID NO: 91446 - protein, 344 aa, unidentified
MNQIIRIGMDTSKHIFQLHGVDATEQVVLRRKLRRNQVLEFFAKLPPTVIGIEACGAAHYWARELRKLGHEVKLMAPQHVKAYVKRNKNDGRDAEGLCEAMSRPTMQFVPVKTEEQQAVLMLAGVRQQLIARRTQLGNAIRGYAAEFGLTAAKGLDKIEPLLAQIAQDETLPEMARELLALQGRDYARLQIELKAIEAKLMAWHRANPDSRRLAQIPGVGPIGATALVMKAPDPRLFPSGRHFAAWIGLTPKDHSTAGKTRLGKITRAGDEMLRSVLVTGATAVIKQAKHGRGSPWLLALLKRKSPKLAAVALANKIARIAWKLMVTGESYDGGRMLGVSAFAA

SEQ ID NO: 91447 - protein, 368 aa, unidentified
MIKTLVHHQGAAAPAAARTQDGRTPATIKLGVDIHARLYVVVAQYDHALPKPPQRFAPEEFLPWVEGLLARGHTVHVVYEACGFGFGLYRQLTAAGAHCYVIAPRKLDEAHTGVKTDPRDALTLCQRLSRYLEGNTRELAVIRVPSEEEEQARHVSRQRAQLVRHRQKLEAAGRGLLVSHGLPAPAHWWKAQTWTYRLTPHLPAWILPHLETYRPILLALDAQISALTAQLEAAAPRDLPSGLGKLTSVVLSHEVCDWHRFKNRRQVSSYTGLCPGEHSSGGRRVQGSVTKHGNPRLRAALVECAWRLVRFQPQYPPVRKRLAILAKGAKATGAQRKKAIVAVARHLAVDLWRLQTGQCRAAQLGLTA

SEQ ID NO: 91448 - protein, 362 aa, unidentified
MGKNTIVGTQNRKKQRSTIGLDLGDRSSRYCVLDQQGEVVSESSVATTRKGLAQAFGSKPRSRIALEVGTHSPWVSRCLKDLGHEVIVANARRVRLIAESNRKNDRLDARTLARLARIDPELLSPIQHRGEQAQADLMLIRARAALVEVRTRLVNCARGMAKSYGERLRSCGTPVVREELSEALSEPLRDALKPLLAEVESVSGRISEYDKRIENIAQSRYPETELLKQVHGVGTLTALTYVLTVEDPQRFGRSREAGAYFGLRPKQRESGGCQPQLGITKEGDAYVRKLLVQCSHHILGPFGPDSDLRRWGLKLAERGGKNAKKRALVAVARKLAVLLHKVWVTGEVYEPLRVGKAHRAAA

SEQ ID NO: 91449 - protein, 387 aa, unidentified
MQASTVDTPTAGHCGTIFVAIELSQKSWLVTLHSPDKGKMSRHKLEGGDHAALLALIGQVRERAARALGAVPAVVSCYEAGYDGFWLHRLLLAAGITNYVFDPASIAVDQRARRVKTDRIDGEKMLRTLMAYLRGEPQVVRIVQAPAPEQEDARRTSRERGRLIKEQTAHTTRIKALLRLLGMAVGNPRRRDWLSWLSAQRDWQGQAVPPRMLSEIRHEHARLMLVRERLEELAQASAQADPAPAAAQMTERSELLLRLKCLGPAFATTLTSEVFYKDFRNRREVASYFGLTPSPWQSGGTDRDQGISKAGNPRARCAAIELAWLWLRHQPESALTRWFRSRTHNNASKRNKRIAIVALARKLMVALWRYLTTGMVPEGAVLKAAKA

SEQ ID NO: 91450 - protein, 389 aa, unidentified
MIYVGIDVAKDKHDCCILGSEADKLFPVFTIPNNKAGFDELYEKMFSVTDDKTKIKVGLEATGHYSLNLLGSLIDKGLPTCVINPLHTNLYRKGLSLRKTKTDKVDARSIAMMLMTNKTLKPYSDISYHNEELKSLTRYRFDKVQERAKLKSSVARLVNILFPELEKLVPSLHMASVYSLLSKLPGASYITECHLTHLKNLLETASKGHYGRDMAITLRNTARDSIGSVIPAKSMELKHTIHLIKVMTEEIDEIEDSIKSIMDTCNSPIMTIPGISYRMGAMILAEMGDFTRFNYADQILAFAGLSPSTYQSGQLDSSYSHMEKRGSRYLRYALFNAAKFVCKWDENFGAYLSKKIGEGKHYNVAIGHATKKLVRTIYRMELTGEAYRR

SEQ ID NO: 91451 - protein, 430 aa, unidentified
MKSNTQNAKIEAITEKTLVLGIDVGSETHYARAFDYRGIEYSKKPFKFSNTEAGFVTFKEWILDLKERHEKDKVVPGMEPTGHYWFNLGKFLQDNEMKPVLVNPHHVKKSKELDDNNPTKNDRKDPKVIAGLVREGRYMIPYLPDGVYADLRTASNIRFQLQAELTRIQNRISRWFNIYFPEYKTVYGKPDAKSGMLILKAAPLPEDILTLGIDGVNQIWRDAKLRAVGKARAKTLIEAAEHSVGSKEGAVSARMEIRMLLEDYESKNMRLQEVMVLIEELVKEIPMAEKLLEIKGVGIRTVSGFLAEVGDISRFNNPKKLQKLAGLALVENSSGKHKGKTTISRRGRKRLRYLLFEVAMSLVAKNPEFRELHNYYTTRRLNPLKKMQSLMAIAAKLIRVFYAMLTKGVDYDPKKMVSDIKRPAVYLQAA

SEQ ID NO: 91452 - protein, 426 aa, unidentified
MKRAKARGPVQRDAKEVLAEVLGKLRGKRDAPAVSTRAKENRRGNTVGPNRDRLTVGVDLGDRWSQYCILGLEGETLAEGQLRTTQEDVREFFQALTAARVVIEVGTHSAWVQDVITEWGHEVLVANPRLMEGSKRRKRKSDRIDAHKLARLGRVDPQSLYPIRHRSREVRQDLVVLRARDALVSVRTELINTARGLVKSMGTRLPRCSSPSFADKVKDAIPVEVGEALRPLVQLVERVNDCIARYDQKIEELGREKYGHTTLLRQVKGVGPITALAYVLTLEDAQRFSSSREVGPYLGLVPKQEDSGDSQPQLGISKTGDRMLRRLLVGSSQYMLGAFGPDTDLRRYGLRLCERGGKNAKKRAVVAVARKLAVLLYHLWVTGDVYEPLHHGGGRNPDSPSNGCISRTQQCSPIVNRRNREQTETQ

SEQ ID NO: 91453 - protein, 346 aa, unidentified
MEHYVGLDVSLKSTAICIVDRTGKIKREGVVSSDPEAIAEFIKSHALDVERIGLETGPTATWLWTELRKLALPVICIDARHAKAALKMQINKSDRNDAVGIARIMQCGWYREVRVKGLDSHAIKALLVSRALLVKIKRDIENQIRGLLKNLGLVIGRAKMNTFYLRAAQLTEGRPELAAAVGPLLKSREAIEQQVEDLGRKVLRLARNNVQVRRFMTAPGVGPITALCYLATIDDPTRFKKSSSVGAYAGLTARRYASGEVDWTGRISKCGDKMLRSYLYEAANVLLTRVAKWSALKAWGIRLAKKSGLRKAKVAVARKLAVILHRMWIDGTEFRWSSKEATNQSA

SEQ ID NO: 91454 - protein, 402 aa, unidentified
MPMLSIGIDVSKGKSTVCGMKPGGEIVYTPFEVQHTREGMSELVSLLRGSGEEVRVVLESTGSYHCPVVAALLENGIFVSVVNSLRMKRFCSQSIRRVKTDQIDAMQIALYGLAYWQELQPTRLPENTYRELQLLARQYYQMTSLLIKAKVDFNALCDQVLPGMQELMNDHAGRHKLSDFVLRYRHTTHILEMGETRFRKDYCKWAEKKGYRNHERMAALIFATAQNGIPVLPDAPSTQIVITEAIRVLHTVEASRDAILTQMQALAKTLPEYSLVREMPCIGDTLAPRLIAEIGDVRRFHSKRALIAYAGIDAPPYQSGKFSANNRHISKRGNRYLRKTGYEVMQSYVMHKPANDPIFTFIEKKRSEGKCGKLAMVAGLNKFLRVYYGKVTELYRSLSAIE

SEQ ID NO: 91455 - protein, 386 aa, unidentified
MDAVDQQPAAPAPPRPWGVAGIDPHKRTFTVAVLDERGGLHGVASFDTSDQGLAEALSWLGSVGFDLARVGVEGSAWLGSQVATSLAAAGYDVREVQASRTAERRRRRRRAKTDAEDAQAIARETLAHPDLPPAGKQHTPDPDWDELLALRNQRRSLIAQRRRLLNEAESVLVGLPLVVRTVLPATSQVRPQLRALAQGAADQLELTGADRVHLAWLAASTADIARLDQRIRQLDQRIPAVLARHCCTLTEEVGIAAVGAMELLVEVGDPTRFTTEARFARWCGAAPVAVSSGEGDGEPERHRLDLGGNRRVNSVLHTMHITQARCHQPAKDYVAAKRAEHKTAREARRAHKRLLANVVIRRMWADHQRRRSRTLNVSDQTTPKAA

SEQ ID NO: 91456 - protein, 475 aa, unidentified
MARQAAYTSSNVVPLFPHETLYVGIDIGKFRHVAGLLSRTLLKHHDHFEGCPIFVFDQSREGFRAFVDRLRELVPLEQVRILLEHTGHYHRLLEQYLLELDITVYRIHVQRRPKGREKSDKRDALSLANRLYTQLELGAQVEEKMQLVRRAYPPTKAASQLKGLIQHRYELSHQSTQLRNKLTAICDELFPEFTQIFRDPNREWALAYREKFPTPQALATASIAMLQEVRARNFPSDAQLLKLQQLARETIGTKDRDRQHGLLIEQGLLIKELRVVQEHLDILQTTISEVVANSREGQILLSIPPIGPIQAATIIATVGNIANFEKASELKSYFGWAPERSQTGVSFDTSKLSKRGVRPMKQMLFLMVGRAITLECEWARIYQRLLPRLAIYDERTKDYRGKLRVIGRIAGQMATMIFALLKTDDETLSQVPAGETPPPPMLYDPTIHRKHQEGHYRALKPGTRPRKIIQLPRLS

SEQ ID NO: 91457 - protein, 360 aa, unidentified
MSFNGTSVGLDVHALSVVAHAVDEESGLVERARLCPDHGEVLRWLGQLRGPLRVAYEAGPTGFGLARALAEARIECVVVAPSKLIRPAGDRVKTDVSDAAHLTRLLRWGEITPVTVPEAGVEAVRDLVRAREDARADLMRVRHRLSKLLLRQGRVYSGGQAWTGRHETWLRQQRFTDAHTAAAFDHHFDAVLSATAARDRLDQQIVGVAASPRWADTVDRLGCLRGISALTGLALAVEIGDWSRFTGSSIGAYVGLVPTEYSSGASRVLGSITKAGNAHVRRLLIEAAWHHRASYRHPGPTMRARWAKVDPALKARGHAGNRRLHQQWCRFLERKKHPAVANVAIARQLAGWCWSLATLD

SEQ ID NO: 91458 - protein, 407 aa, unidentified
MFYVGIDIAKNSHEAAILTDSGEMVGSTLKISNTTPGAQKLLSNFIKAGVTADNVVIGMEATGHYWLAIYSFLVVQGYCVKVINPIVTDAYRNMSVRKAKTDQIDAVVIARVLRLGEYKESPAADEQTLALRQLCRFRAYEVDLCSDLKRKSIALLDQVFPEYAKLFSDTFGVASREVLLNYSTPEELGQINTRKLANLLDKASKGRFGKDKALQIKDVAAHSFGITIATDAFAFQLRQLLEQISFIEDQVDLLDLEIAAYMKQSDSFITTIPGIGPVLGAVILSEVGDIARFDDGKKLVAYAGIDASISQSGNFEGTQMHMSKRGSPYLRRALYTAANVAAFHDPELSAYYQRLRLRGKHHGVAVGAIARKLCYIVYGVLTENRPYEQRLYNAASDGLLPDHSSEE

SEQ ID NO: 91459 - protein, 353 aa, unidentified
MKPNTETTAAPLAVIGVDIGKEVFHLVGFGTDGKIAFRKKIRRLDLKGAFEQLPPCIVGMEACLSAHFVSRTLRALGHEPRIIPAIYVKPFLKGQKNDYNDAEAIAEAALRPNLRLVKEKSQDQLDLQACHRVRSRLVSRRTATINQIRAFLIEQGIAVRAGARALRNSLFAILENRKDEISPRTAKLILGLYEDWCHLDERIESVTEEIESLGKAEAKCQRLISVPGVGPLISTGIVAAIGSGEAFERGRDFAAWLGLVPRQHSTGGRSILGRISKRGSKYLRTLLIQAARVLLMRPHNWPRFSFGAWLKTASERLHRNKLAVALANKLARIAWSVLRHDKAFDTHLKAAAI

SEQ ID NO: 91460 - protein, 358 aa, unidentified
MQTKVTKINFNGQNIYIGIDVHLKSWTVTIMIENIIFKTFSMDPSPEILANYVQKNFPGGNYYAAYEAGFCGFSVQREIEHLGIHCIVVNPADIPTKDKEKKQKEDKRDSRKLAKSLHSGDLEGIYIPSKKMEELRGLIRYRKTLVKEICRHKCRIKAYLHLNGIRIPENLNNASQHWSGKFTEWLKTVRLTTQYGDIVLNETLDTTEHLRNKLLKINRQLRIINKDSEHSGILKFIQTVPGIGLIMAITLIAELDNLLRFKSLDKLCSFIGLVPSTNSSGEKERTGSITSRANSSLRSNIVECAWISIRNDPALAYSYNELCKRMKSNEAIIRIAKKLLSRIRYVVKNETEYVQSVI

SEQ ID NO: 91461 - protein, 412 aa, unidentified
MDVVHPRCCGLDVHKQTVVACILLASPSGPPQKLVRTFGTLTDELLALGDWLTSESITHVALEATGSYWKAVWNMLEGRFELLLVNTQHIKAVPGRKTDVKDAEWIADLLRHGLLKPSFVPDRPQRELRELTRYRTSLIQERAAEVNRLQKVLEGANLKIGDVATDVLGRSARQMLEAIVGGATEADAATLAQLARGRLREKIPHLERALAGRVAPHQRFLLAQQLAHIDFLDETIERVSSQIAERLCPFDESLANLDAIPGVGRRTAEILLAEIGTDMTRFPSPAQLASWAGMCPGHAESAGKRHSGKTRKGSPALRHALTEAAHAAARSKNTYLAAQFRRLAARRGAKRAAVAVGHSIRSIVWHLLQHGYPYHDQGGNYFDTRTEPAVARNLVRRLKALGYTVKLEHPAA

SEQ ID NO: 91462 - protein, 419 aa, unidentified
MTDPPLQSWLRFIAIDIHKHYLMIGAIDAAKQVVLPPRRVELARWPKWAHANLLSTDAVVIEATTNAWAIYDLLAPLVGRAVVVHPAKVKLIAAARVKTDKIDVLSLAHLLRADLLPEVWVPPQHVRDLRALLAHRRRLVSLQTTAKNRLQSVLHRLNLRPPDGDAFAHKQRAWWAELDLSPTERLRVNQDVATLDHVVAQIAAVDAELRCLSTSELWAEQVPYLVQLPGIALLSAMTILGAVGDITRFATAKKLVGYAGLGAGVHDSGKTHRDKAITKQGRRELRYVMIEAARAAVQSHPYWKDEFAQLERRIGEAKAIVAIARKLLMAVWHVLLAKSADRRADAEQVAFKLMVWSWKLSDAQRGGLSTRQFIRAHLIRLGLGAELTHITRGGIKRSVATIEEVLALRPELRGPPDTA

SEQ ID NO: 91463 - protein, 315 aa, unidentified
MNGKRVIGVDIGKSWLDAAAEGCERVQRYGNNAAGIAALIEQLDPVQNVVVFERTGGWERNLEAALADKAITWAVVHSQRVKAFRQVQGIKAKTDRIDARLLRDYGRDRLNAGKLRFGHREDVTLDLMARQRQLKAMRHAESCRLATAALDEVRSSIEHMIAYLDDALTAIATELARHEDGHTELAFKEEILCGQIGVAEQTARGLLAELPELGRLDRKGITALGGLAPRVHESGSIRKRRGLAPGRTSIKVILFNPARAAMRFDPQIKEFCSRLRARGKPGKVIMVAVMRKMLVRLNAQLRHAMTQAPAAAAAR

SEQ ID NO: 91464 - protein, 348 aa, unidentified
MKNYQMGIDISKEKLNICLKRGTETVREEEIPNTAAAVRKCVKRINKENGVAVDEMLACAEFTGRYIYPLVCACDELGLFLWMEDPTRIKNSFGVTRGKDDRVDARRIAEYAYRFSDKAVAYEMPDRTLVSLKNLLADRDTLAADRKKYEMQLHDQKGYMDPSDYARKKRSWAAVVRTLDKQIALIDADIQRLVESDEKIRHQKELLKSVDGVGDRVAVYMIVVTMAFTRFETPRQFNCYAGLAPFRYTSGKSIYSKSKVSQRANKQIKALLHLAAVSASTHMKESEYKEYYRRKTGEGKHPLCVLNVVRAKLVSRMFAVIKRDEAYQRHYNISTPNDKISQKTIANS

SEQ ID NO: 91465 - protein, 441 aa, unidentified
MQSLAQVNREIAHSKVPNLIRAGLVIFVFTMLTTGLVGRRSDNRIDEGGLPSAAVRSTADHGVAMRPKLKEEGSPMESYVGLDVHSKRSVFVIEAEDGRVVARGDIPTTPAGFRQLRQQHELAAETPVALETGTVAFYAARELARVGLRPVVIDAHEVRVKAHRPRQKSDRRDAFELCEGLRRGHYRAIVHVPPAPIGALRETLSRRRHFVAVRVAEVNAVKRLLRAAGLGHLSKSLGTDAAWEKLLAALATEPALRTYVAQHHALWRCAQEQIVALEETLAAQPATIAKVAARLQTVPGVGPIVSLTAVAVFSDVHRFPSAKHAASYAGLVPSTDQSGDRDTHGHITKRGSAALRIMLCEAAHHAQRPNHPLHPYFARLCAQRGYKMAVVAVAHRLCRILFALLRDGADFDVAKLAVEEGVFRRTTVQRFRLKRATASRA

SEQ ID NO: 91466 - protein, 413 aa, unidentified
MEGLQPIYRRVAGIDVHRMLHVVTVVIEHPDGSIEQISKEFGGFKRDCRALAAWLVEWNVELVVMESTGIYWKSIYAHIERAGIQAWVVNAHFIKHVPGRKTDMNDSQWLAVLARFGLVRGSFIPPQDLRELRLLSRYRRKLNAMRASEVNRLHKILDDGGIKLGGVVSDINGVSARAMVAGLINGVGIEQLLDMARGALKGKREDLQAALDGDLTLRHMFVLKHLHEHIDTLQRELAELDAYILGAMTPYQWAHRLLQTIPGIDQIASALILIEIGDDMTRFGCADRLAAWAALCPGNNESAGKRKSGRTRKGNGIIRYILCECANAARMTKSSLAAKYKSLMVRKTHKKSIVSIAHKMIRLIYVLLSRKEAYHDPKIDYNAMSARKNAPRWIKQLKLIGKWPDNKSATANA

SEQ ID NO: 91467 - protein, 343 aa, unidentified
MKLMRIGVDLAKNVFQIHGVDCHELPVWRQRLPRDRWLQTVLEKIEPGCEIGMESCGGAHHWARQLQAHGFRVKLVAPQFVKPYVKSNKNDANDAEAICEAMSRPSMCFVAIKTIEQQDIQATHRIRAGLIEQRTAKANQIRGLVAEYGLVAPKELLMLRRAIPCWLGDADNGLTARFRRLLDGLWDDLRALDGHVCQLDGEITAIATNEPSAVRLQQLRGVGPMIATALVVALGDARQFANGRQFAASLGLTPRQHSSGGKDRLLGISKRGDTYLRTLMVHGARSALRTAKSKEDRLSQWAVRLAERSHPNVAAIALANKTARMAWAMLRHGTDYQPNQAAA

SEQ ID NO: 91468 - protein, 346 aa, unidentified
MIIVGCDFHPAWQQVAWVDTESGETAERKLEHSNGEARGFYASLSAAALIGVEATGNCQWFLDLMTELGHQVWVGDAAQIRASYVRKQKTDKRDAAHVLKLLLEDRFPRIWVPNREERELRQLLLHRHKLVEMRTRVKNELQHLALNHGVRKQRKLWSEAGQELLRSLPLQPWAGQRRDDLFQLLAMLQRHIGLLDQAVKEKSQLDKMAQLLKTQPGVGPITSLAFVLTIGDVSRFQNGKQIASYLGLIPREHSSAGKQRLGGISKQGNRMLRMLLVEAAQTAVRSDPEFRKQYLHRCHSKPKAVAKVAAARKLAVRLYWMLRTQTPYPEIVRIECSPRVPMVGAS

SEQ ID NO: 91469 - protein, 345 aa, unidentified
MKNTVIGVDLAKEVIQVCIYTNKKVQSNKEMRHNEFLHWLFTTKQAVVIFEACGTSNYWKQKAIEAGHDARLISAKLVATVRQNQKTDKNDALAIVQAAQLPEIRFIKGKSQEQQQLQSVQRLRDLAIKQKTALNNQLTALLLEFNLRVSNKNGGLKGLIERELEDAENGFSSEFRQALEIAWTQYAQILESIRVYDESLESSIKEHKECKRLLKLEGVGTLNAINLFIALGCADLGTFSKGKDASACIGLTPLQHSSGGKMKLGSIGKHVKNSMLRSQLIAGATSAIQQIVKREPVTKKEKWIQDLVDRKGKKCAAVALANKTVRTAFAMLTQGTEYKAELLAA

SEQ ID NO: 91470 - protein, 349 aa, unidentified
MKIIGCDLHARQQTIAMVDTETGEITEKTLSHEGNAMREFYAALEPPVVVGIEATGAMQWFLELLEELGVECRVGHPAKIRAAETRKQKHDRRDARLLLDLLLMKDRFPEIWMPSTEQRDLRTLLRDRHQWVRMRARLQHTLQAMALNHALRRGPALWSVAGQNALQALPLPPYSSQRRTELLRLYVQLQKRIQALDKEVDVQARQRPQARRLLTHPGVGAVTALATEVFLGDPNRFDSGNQVASYIGMIPCEHSSGKRQRLGKLSKEGNSLLRYLWTEATMHAVGKDPELKRFYRRKLMQKGMGKARIAAARKLGIRLWIMMRDQIDYEEFCRRGRLRQEGESPCGDA

SEQ ID NO: 91471 - protein, 345 aa, unidentified
MAQVYIALDTHCSTTDMAVVTANGKVIKQDRCQTTIPALWSAITSVPRPRSVTFEEGPLAGWLSRHLRGAVDELLVCDPRRNALIAKDNDKTDPIDALKLAQLFRGGYLKPVHQASTQERALLKQHVSLYHDRVRDRVRQGHQLIAQLRRHGVMDSIDKIVEEAQRPAWWKKLPSGPVLHQDLKLLLAMYGLYCQQEEELRKALIRLARQEEPVRRFQEMPGVGWIRAVTFYVYLDTPHRFANKSKLWRYCGLGLEKRGSGSGPMRTRLCRQGNRYLKGTLIGAAQSVLGGESPYAQRYRWWIEQGLPYSTARRNVARHLATTLWCLWKEGGRYDPARVCPLNTK

SEQ ID NO: 91472 - protein, 341 aa, unidentified
MKNLFIGVDFSKEKVDVAILFADGLVETAARVFNEFKTTVSGYRQLVKWVEQNSCGIDSSLWLFCGENTGDYSKGLCNFLYGKGYDMWLENAKSIKDASGLRRLKSDRADASMIAEYAMRNYDKAIMYEPLSESLAQLRELFLYRQMVVRHRCSFQVRRGEKRLTMEKSPIKTMISQSGRHIVSELNKEVEKIDKRIAELIKSDEELTEVFTIVTSVPGIGTQNAVCLMVYTDNFRRFNYDSRKIACYYGLAPFGKDSGTSVHSDPHVHYMANRQIKGMLTQAALAAVNFNPIMARYYMRLVERGKKKQVALNNVKNKLVHLVTAMVRNRQTFTPEYKISA

SEQ ID NO: 91473 - protein, 370 aa, unidentified
MQVLYERCAAVDVGKDVIAVAVRLPGDGPDGRQTVKRTFKTFYGVLAEAARWLVSEGVTHVAMEATGIYSMPACHALLEHGAFEKVLVCNAGHVKNVPGRNTDLADAEWLVQLLECGLLAGSFIPPADIKAARDVIRYCAKVVQSKTSQVQRLGNVLQDAGIKTDSVASSIVTKSGRSMIESLTDGERRPEVLAELAIGRMRPKIPDLAMALEGRFGEHHALMCRLHLDHIDHLVAMIAKLDAQIEAMMAPFRAARDLLTTIPGIGPLAAAAVISEAGAGIREYFPDAAHLASWAGMCPGNHESAGKHRPVKRRKGNQHLQPVLVECAWAAARHDGYLKSLYHRHVMKWAATAPSSPRRKPSSWSRTPSW

SEQ ID NO: 91474 - protein, 403 aa, unidentified
MNSVGIDISKGRSTIAVMRPFGEVVISPFEVRHTGSELSKLARQLKSLDGETRVVMEATGNYHASVAKLLHDAGLYVSVVNAKLVHDYGNNELRRVKTDRKDAVKLANYGLDRWLTLPRYIPEEDTRLLLKNCYRQYRQYSKVQTVLKNNLISLLDTVFPNVNRLFSSPIRGDGSEKWVDFVAEFWHCRCVSEKSQKAFTNKYQRWCRKHGYNFSEAKAHTIHAETCGHIDVIPKSETTKLLVEQAVSQLRATSTALAALKHEMQSLASQLPEYPVVMDLFGVGPTLGPQLIAEIGDVRRFYSKKALVAYAGLDAPPNDSGDVTGRHKSMSKIGASSLRRTLFLVMSIYLQTAPLDEPVYQFMDRKRAEGKPYRVYMMASANKFLRIYYATVKAYLESLEHTA

SEQ ID NO: 91475 - protein, 343 aa, unidentified
MAIVILGIDLGKNICSLVGVNEDGAVVLRRRMRRQTVLTFAAKLPSCVVAMEACCGAHHLGRLLTAQGHTVKLMSPEYVRPYVKAQKNDDRDAEGIAEAASRPTMRFVDLKSQEQLDLQSLHRVRSRLVGVRRTLLNQLRAILLERGHIFPQGRRRFEAAIDTLVADPAYEISSRIRQLVIDIRSEWQALDSRIEALNGEFVAIARHDETARRLVTIPGVGVLNATALVAAVGDGAAFRRGRDLGAWLGLVPKQHTTGGKPKLLGISKRGNKYLRMLFIHGARAAMPSLSASQSPLGEWLRGLLARTHRNIAIVALANKLARIAWATLRRKTSFDLRHLAVAG

SEQ ID NO: 91476 - protein, 371 aa, unidentified
MTEAVKYVGLDVHKETIAVAVADGERGGEVRFVGTVANDDDAIRKLVKRLIGPGVTLNVCYEAGPCGYGLHRLLTKLGQISIVIAPSMMPRRPGDHVKTDRRDAMTLARLLRAGELTAIWVPDEAHEAVRDLIRARRSAQEDAIGAKQTVRSFLLRHDRRFGGKAAWTKMYWRWLSEQRFDFPHQQLAFQEMQKRVLEAQARVGRLEAALAEAVDAWCFAPLVRNLQVLRGIRLVSAATLVAEVGDLTRFDNPKQLMAYVGLVPSEHSSGARTKRGRITRAGNAQARTMLIEAGWSYRLPAREERRYRERVIDLPEDIQAIGWKAQVRLCQRYRRLAATGKPQPKVTTAIARELVGYAWDIARRVSPAVAG

SEQ ID NO: 91477 - protein, 387 aa, unidentified
MPKSNDLSKSLVALDQDSTLIVAIEMSQSSWLVGGIVPGIARDPQKKLAADPELLLRLVYRWRDEAEAAGQKIRRIAVAYEAGRDGFWLARWLRARGVEAYVIHPSSVAVSREHRRAKTDRLDLGLLKRAFLGWLRGEVKHCSMAAIPTLAAEDAKRPSREHEKLVGERTRLVNRMKGALARLGVRDFNPKLKKAPERLAAVRTPEGAALPPNTLAELRRDMQRLRLVNDQIKEIEAARLARLQAAPETDGHRMVHLLSRVVGVGIETADTLVHEILSRDLRDRRALARYAGLTGSPDESGRRRREKGLARAGNARVRRVMIQLAWRFLRFQPDSALAQWYRERTASGQRGIRKTMIVALARKLLIAFSHLVKTGLAPEGVVLRPAA

SEQ ID NO: 91478 - protein, 407 aa, unidentified
MISIGIDISKDKSTICALKGGSETIWKPFDLRHLQSDMQSFISKLEALTGELRIVMEATGKYHLPILYSLKSKGYFVTVVNPLKMKQFCRSMSFRKAKNDNIDSRLIAEYGLIYWHKLEEYKLDREVYQNLKHLNRSYHHYMDLRISQMNFLDTFIDQVFPGLKKLLPHGSGDFNKDKLLDFLEVWWHKDVVISKGEEEFIKDYQKWAKEKRYHPNAKKAQAIYKVALEGISTQPSNSPYIKADVYESIQLVKRINQSLNCILSQMLDLAEPLEEFQEAKKFSGISDKLAVQITAEFGDLSKFRNKKCLISFVGIDAPTYESGDFKGNRRKISKRGNAILRKVGYQAMKCMMGAKNPENPVYCYMVKKEEEGKAKKVSKFAGLNKFLRIYYARVIEAKEEKTSKKAA

SEQ ID NO: 91479 - protein, 391 aa, unidentified
MVCVGIDVAKDKHDCCILDSDGTIRADCITIPNNMDGFKQLLQTIRDCTKKSDKIKVGLEATGHYSYNILGFLLDNDLAVYVMNPLHTNLYRKSLSLRKTKTDRVDARTIATMLLSDVDLKSYTDTAYHNEELKSLTRYRFDKVRERAKLKQSVSRLVTILFPELEKLVPSLHIASVYALLSEYPGAKQISEIHLTKLTNLLATASKGRYGKDKAIQIRDAARTSIGSVMPAKSLELKHTIKLIRELTSEIDEIEVSIQKIMDELNPPILSIPGVGIQSAAMILAEIGDFSNFESPDKILAYAGCSPSTYQSGKLTNCYAHMEKRGSRYLRYALYNATKYVCYWNPVFAEYLAKKRAEGKHYNVALSHATKKLVRLIYALQKSGKAYLTAA

SEQ ID NO: 91480 - protein, 407 aa, unidentified
MEVLHPRCAGLDVHATNVVACVRLTSGRSVTYEHRTVSTTTRGLLELADWLTAQGVTHVAMEATGVYWKPVWHVLEDDFTLVLANAMHIRNIPGRKNDKNDATWIADLLALGLIRSSFVPPAPIQELRDLTRTRKQLVREITRHTQRIQKTLEDANVKLTEIISDILGTSGRAVLQALVAGETDPERLADLTAGRLKATRAQLVEALHGRVTDHHRFMLRLHLTHIGALDTAIAEVEARIREALTPFRAAVSLLTTMPGVSETAAAVILGEIGDDMSKFPSAGHLLSWAGLCPRLDESNGKRRSTRTRQGAPWLKTTLVQIAWPAARKKNSYFHAQFLRLKSRRGPKKAIVAVAASMLTDVYYMLRDGVEFHDLGDQYFVQHDKTRLANRLLQRLRDLGVEVEVKAA

SEQ ID NO: 91481 - protein, 346 aa, unidentified
MTIVEAARGVTGGVDTHLDVHVAAALDPLGALLGSEPFATTPAGYKQLLGWLEGFGDVGKIGIEGTGSYGAGLARFLRRRGVEVIEVDRQNRQARRRSGKSDPLDAIEAARAALGGRAQGHAKSKDGAVEAIRVLVIAKRSARQARVKALTQMRHLTVTAPDQLRCRLRGLTVPTLVVEGAKLRPGRSTDPVTSATKASISSLAHRIQTLEREIDELDELLTPLLATTAPDLLALFGVGPDTAAALLVAAGDNPERLRSEAAWAHLCGVSPLQASSGKVTRHRLDRGGDRQANSALWRIAMVRIAHDPETTAYFERRVKEGRSKPEVIRILKRYIAREVYRHLPRG

SEQ ID NO: 91482 - protein, 341 aa, unidentified
MTVAGGLDLHRGQLTFDYVDLGTGEARRGRICPADRASLRGWLLRFDGAQDVEFSVEGCTGWRYVVEELQRAGITAHLAEPAETANRRGSKRRAKTDWADARLLRDLLIDGRVPESWIPPAHVLEARARVRLYKDLLEERTSWQQRVHATLFHQGIPVVPKLGTADGQRRLDAAELSAAGRQAVQAGVRQIERLSQEMTPLRRELARLSSRQPGCRALRKAHYGLGGLLSVAVWAELGDCRRFSSSDDALRHTGLDITVHDSDGKRTRGHITRQGPPVLRWALYEAALYASRPASPDYAYFCRVRERIDGQRALLSVARKLARRCYHTLRDLGEDALQPAA

SEQ ID NO: 91483 - protein, 420 aa, unidentified
MAFKILRKNCCGLDIHKTWIFACIGITNSNGRTEYKQARFSSFSKGLQDLADWLAKYSCSDVCMESTGKHWIPVFNILEKTCWVTLAHPKYTKPQKGNKTDRKDAKWICDLYMCGMVKPSFIPPPDIRQLRDLMRYRMKLTNMLTGEKNRAQNCLTVSNLKLDDVFSDVFGKSSRSIIQHILDHPGQQFDVAAFIDRRCKHPVEEIQAAVDGAVSREQAAKLKECLLHIDQLNEHREHIETEILRLAEPYPHQLELIRTVPGFSAAPLTAVALISETGVDMSVFPSAKHLVSWAGCCPRNDQSNKKVKSTRISRAGCYLKPLLVQIANSVIKSHKYPECKERYRRIKARRGHKKATIAVCRMLLTAIWNVLSKLEPYSAKGHLNDKITEHSVVISKAQGLQLLRKRGYIFTDEVNIPAVT

SEQ ID NO: 91484 - protein, 338 aa, unidentified
MNYVGIDHHRQYSHITWLDEKGGVVKSGRVANLRRELEGFLQGIGDVRAVIEAGRSSYTMVDVLADLGISTTVAHPKDVKAIAKAKIKTDERDSYKLAHLLRTGYIPEVHKRSRENRSCQRILRQRAFYVGKQTSVKNRLRALLAQQGEEIRSEVERVENLFTDKGMKVLKGLALPEREAKLVGALLRTYHHLEERINETNALVKELYEAMPSAQLIQTVPGFGIFLAVLVAVEIEDIGRFEDVSKFHAYAGVIPSTHSSGERSWHGKIIKEGNRWLRWAAVEAVWPALRADFDIRCFYDRLKRRKGANSAKVATARRLLTIIFRMLKENRPYIPYKR

SEQ ID NO: 91485 - protein, 346 aa, unidentified
MSHYVGLDVSVKSVSICIVDAQGTILARGETASDPDRIASFVHEHAPDPERVVHESGILAIWLTRELEKRGLPIVCIDARLAHKALSGRINKSDPGDAEGLAHLARTGWFTQVHIRSEASERVRVLIGTRERLIRMRKDLEGHVRGILKTFGICMSAVHRTRLREGFRDQLAEAATTDPAISVMAEMFNPIHKALCAATDAMDEELKTIARESDLARRLMTVPGVGPVVALSFIATLDDAGRFRRSRDVGAFLGLTPRRHQSGEMDWSGRISKCGDRDLRRLLYSAATTLITQVRKPSPLLAWAKRLQERKGFKKAAVATSRKLAVILHCIWRDGTVFETKMEVKT

SEQ ID NO: 91486 - protein, 401 aa, unidentified
MRGTGRASEGDRGLPADRLWPQGSIGVGRFSTTTQGLLALSAWLVEAKVTHVAMEATGVYWKPVWHVLCQDFSLVLANASHIRNVPGRKSDANDATWIADLLAHGLLRASFVPPQPIQELGDLTRTRRELPREIVRHTQRIQATLEEANIKLASVISDILGFSGRRILKAIVAGESDSRRLAELGHSRLACTREDLAAALDGRLRDHHRFLIGQHLKTIEQLEGTIAQFDARLEAALAPFLDAAERLKDIPGFADNVTQTLLAEAGADMTAFPTADHLISWAGMCPRLDESAGRKRSKRLRKGAPWLKPVLVQAALAAIKVKNSSLRARYYSLKPRLGHKKAIIAVAAAMLRIAYHMLKDGTFYQDLGPDYRVRKNPERAAQNLAKRIRALGYDVELKKAA

SEQ ID NO: 91487 - protein, 320 aa, unidentified
MGIGMDTKQEESFVGIDVSKNTLDLRLEPSGESLHITYDDVGVADICRRLKHVSPTLVVMEATGGLETRLATELVAAGLPVAVINPRQARDYAKATGQLAKTDQVDAAILCAFARAIRPAVRPLKDTDTRDLDDLVTRRRQLIAMRVQESLRLGSAGTKAFQKSLNIHIAWLDKRIADLDDDLTRRLRASDVWRTKDDLLRGIPGIGAVTTLTMLTKCPELGHLSRREIAKLVGVAPLANDSGNHHGKRFIWGGRADVRTVLYMAALSAMRCNPAIKAFAERLKKAGKPSKVVIVACMRKLLTIMNAMLKTNVPWTARVA

SEQ ID NO: 91488 - protein, 352 aa, unidentified
MVVAVQYRRPSLNKNVMVQIYGIDLGMSSFDVSFLSESGSVRHLSGVKNTVHGISKFLLSLPSSAVLCAEHTGVYGDLLLRLCTLNRTCLCFVPGYQIKHSLGLQRGKSDPLDACRIREYAERFYDLLRPCFYPGEEMSELQELYRTRSLLVESRKRLDTLNIGDNCKSSVSLAADHARRAVLAELNTQISGLDHEIEALIQNSSEFSRNYQILTSIVGVGPVTSCELIIKTENFRKLDTAKKCAAYAGIAPYPKESGKMKCGHKISPMGDKQLKTLLFLCACSAKEHNKEIRLYFLKKHKVEKKHFFVAMNNIANKLLRLIYSLIQKQQTYDRDYIQRDPRCVVISDTNKC

SEQ ID NO: 91489 - protein, 347 aa, unidentified
MSITMIGLDTAKAVFQVHAVDAAEQVVTRRKLRRNELIAFFEKQAACTVVMEACGAAHHWARVLTGLGHDVKLIAPEAVRPFVKKGKKNDAADAAAICEAASRPGVRFVPIKSLEQQGILALHSARTLLVKQQTMLANAIRGMAAEFGLTVPLGMGKLGELMALVDADEAVPERGRQALSALFDQCRALDESIETFEAEIVAHARRDDTARRLATIPGIGPITASLIAATVADIGVFKSARHFAAWLGLVPRQHSTGGKIRLGRITKTGNREIRRLLVLGATSIVYRAPQWNSAAGVWTRAILERRPVRLVTVALANKMARIAWALMTRSEVYHAKGRVAIAAQAVA

SEQ ID NO: 91490 - protein, 355 aa, unidentified
MTASYDYHIGVDYHKSYSHLVVQDSSGKTLRSGRVKNDRQSLGGFLERYRENSHAVVEATRNWMVMYDWLDDICDDVVLAHPLKVKAIADAKIKTDKIDATVLAHLLRADLVPEAWAPGERARELRVALRERMFYVRLRTMTKNRIVTVFDRYPEQTAQLKKLGDLFGKAGRAQLAEVNVSPIDRIQINRGLDFIGDIDVRIKQSEATIRAMTKANANVKLLKTIPGIGEFFARLIDAEIDDISRFRNPKKLAAYAGLVPSTYSSGGKTFHGKIIKQGNKWLRWAFVEAVTPAIATDPQLRVQYEHLKIRGTNKARVAIARKLLTIAFQILRDQRAYEPRGISTTEGASTISRLS

SEQ ID NO: 91491 - protein, 361 aa, unidentified
MHATTVAVDLAKSVFQLAVADEHWRVVETQRLTRTQFERWFQNRDVGLVIMEACGSAHHWARWLNGLGIEVRLLPAQYIRAYVKRNKTDATDAAALLEAARCADIRPVRVKSVEQQALQGLHRIRSLWMGTRTSRINALRGFCREFGIAIPVGARTGVEAISRVLADPHTAVPDLIRGTARLLVEEIRLLEARIAQLERELAVCAKHSPACTTLLSIPGIGLLTATALVAATSGDVSHFQDARHFSSWFGLTPREYSSGNSRYLGRISKKGDRYLRMLLTHGARSVLRSAKVAEGAGKPVCGVRRWALDVQARSNHNKAACALANKLARICYATLRDKEPFGEATVRLSKKVNRESFAMPA

SEQ ID NO: 91492 - protein, 343 aa, unidentified
MQTITTIGLDIAKSVFQVHGVDAGGQVVIRHQLKRRSVLAFFQKLPPCLVGIEACASSHHWSRELQALGHTVRLMPPAYVKPYVKRQKNDMADAEAICEAVARANMRFVPTKTPEQQSCLMLHRTRHLFIRQQTAVINSIRAHLAEFGIVAPVGRKGVTELLRIVADPSDKRVSEVARACLAALGSQLLSLKQQIVAFDRMILAWHRSNQTSKRLHYIPGVGPMLATALIASVADPSTFRSARNFSAWIGLVPKQHSSGGKDRLGSISKQGDRYLRSLFVAGALSVIRYAKIHGTGHRPWLTALLARKPTKVAAIALANKIARMAWAMMAKGERYKEPIALAR

SEQ ID NO: 91493 - protein, 409 aa, unidentified
MKLYVGIDVSSTDLYTCIMDQEGNTCAQFKADNHLLGATFLRDQILLWANKRQPSEILIGMEATSVYSWHPAMFFHQQEELKSWNVKVFTINPKLIRKFKEAYTDLDKTDGIDAWIIADRLRFGRLKVTAVMQEQFIALQRLTRMRYHLVHQLTREKQYFLQHLFYKCSSFTQEVDSSVFGHAILELLLESFSLDEISQADVQQLADFLRQKGRNRFADPECIAKSIQKAARSSYRLSKCVEDSIDLLLGLSIQSIRSLQAQIKELDKAITRHLEGIPNTLQTIPGIGPVYAAGILAEIGQIERFDNQAALAKYAGLTWSKHQSGRFQAEETSLIRSGNRYLRYYLVEAANSVQRHDASFRAYYRKKYEEVPKHQHKRALVLTARKLVRVIDALLRNGQIYTPRKGEDR

SEQ ID NO: 91494 - protein, 387 aa, unidentified
MAQVNDLSRSLTAFDPISTLVVVVEMSKASWLVSGVVPGVERQPLKKLEPDATALLRLIERWRNEAVRAGRPISRIALAYEAGRDGFWLARWLIARGIEAHVIHSASVAVSRERKRAKTDRLDAAMLMRVFLGWLRGERGHCGMVAVPTIEEEDARRPSRERESLVDERSRITNRMKSALARLGIRGFKPHLRKAPERLAGLRTAEGTGLPANIIEEFRRDMARLALVREQISSIEKTRAERLERAPDTGPHAMVRLLARVIGIGIETADMLVREILSRKLRDRRAVARYAGLTGSPDESGLKRREKGLAKAGNARVRRGLIQLAWRFLMFQKDSALAQWYRTRTEGPSGARKTTMIVALARKLLIALWRLVTTGEVPDGVELRPAA

SEQ ID NO: 91495 - protein, 316 aa, unidentified
MICGVDVSSKSLDARIGRDGAAACFTNNPKGIEELAEFCRCHEVHFVAMEATGGYEKKPFALLWAAGMQVAVVNPRAVRNFAHGMGLLEKTDRIDAGVIAWYAQTKGCVAVSPASAEQQQLKAMVTRLRQLTELRAAQRNQRLLVTDKVVLKSFRKLLDLVQQQIHDLEVAIAGLIAADAVWHKLDQSFRSIKGVADRTVARLMAEMPEIGTLSNKRISKLAGLAPLACDSGQWKGKRSVRGGRRTVREILFVVAAGVSRHNADFGAFRERLAAAGKAKKVIRIALAHKLLVRLNAKARDVLQQLREAPPAAVLLS

SEQ ID NO: 91496 - protein, 333 aa, unidentified
MKDLSTFQHFIGCDVSKDTLDFAIYERGKDYRRFEHIQVPNSTEGFQKMRKWLRQFKINVKDAVIAMEHTGFYSNALAEWCFKKGITFVLLHPMAVKNAGATGRNKTDQDDARFIADYAYTMREKLTPSSPEAPVIKQLRQLRNERQLAVRARTGYLNQLKTVTDKATRQRMEKVSATFTQQIKAIEAAMKTLIESDPEIKTSYDLLVSIPGIGMLNAVTTIINTGNFTRFQTARQYAKFSCVSPLTVSSGTSVQHGDHVSRVGHNEIKSMLTEGARSAVAHDPSLRAYYQRKRAEGKAHGTVMNAVKFKLICRMFAVVKRQSPYVNTEAYRS

SEQ ID NO: 91497 - protein, 443 aa, unidentified
MSKIKNHFELTHPNAAGIDIGSSSHFVAVPPDRNEQPVREFPSFTEDLYALADWLTACGVDTVAMESTGVYWIPLFELLESRGFTVYLVNARHVKNVSGRKSDALDCQWLQQLMSFGLLSGAFRPQGDFCALRAVARLRDMLLRNQAKHIQHIQKALLLMNLLLTEVISDVVGETGQKIIRAILAGECDGQVLAKYRNNHIKASEEDIAKALQGNWREEHLFALKQAVALYDAYAVQLMECDQQLEKMLKDLARNDLKAEKPKRRGGKSKNAPNFDARTLLMQMCGVDLTRIDGIDVTTAFKVLAEIGADLSRFKDAKHFASWLGLCPGTKISGGKKISAATSRTTNRAAQALKMAAVNLRASQSALGAYYRRLCGRMDKAKAVTACAHKLARLIYAMLTKGEDYVDQGQEHYEEKYRQRVIKNLTKHAEKLGFQLIPVPEGV

SEQ ID NO: 91498 - protein, 355 aa, unidentified
MHYVGADLHKEQTWFFVMDHNGTKIISKSIANRPELLQEFFQTLPKPFSLAVEATYNWYFFVDIAERFSQNVYLANSFELKAFAKRHKKTDKIDARLIADVLRKGFLPTVFIPSPQIRELKETLKYRVNLVRDRSRNIFRLKNTLDKIGKDSTGNFTTEKQLKAIQVDSLPEHYRYITNGYIERIITLSKRIYSMKTYLRNELFDDQEIKNLITIDGLDYFSAAIVKSEIVDINRFRSFNRLCAFSGLAPRVSQSGNKTAYHGTLLSNRRKLLQWILLETVFHFIKASPERKMRYEKLKCHKGSNTAKIIFARQMLKVIYHVMKEQRPYYPEKLIQQENENYQIQSVAATALSGV

SEQ ID NO: 91499 - protein, 315 aa, unidentified
MAMPVSISKPIVGVDVAKNELVIYNAELDLLEEIPNTKAAITKWLKALPGAVAIAIESTNIYHLAFADLAHEAGCVIYMIGGYELHHYREGVKVRAKTDALDAKLLARYLKNEQQELRPWTPPSPLYRQLLSLFRRRAALVQARVGLEQSWANEPLLKTAFAEQVKSMQQLETLVEKTINDQLKEAGLVGQLKRCLKVEGIGFLTGARLIAAFQRGDFRNADAFVAFLGMDLRVSKSGQKDGRRSLTKRGDPEARRLLHNAAMSASRTKAWKGFYESQRARGFSTTQALVMLARKLARVVFALLKGQGEYRPKVS

SEQ ID NO: 91500 - protein, 354 aa, unidentified
MTQLRRLALGIDISKADFHVALVPADGNANAPVVARATFPNNAKGFGKLNSWLKGCSKTLLRGTPKGSVTLQYHACMEASGHYGNKLAFHLHALFAGTPHSVSVVRGQLPKAFMQSIGQRSKTDKQDSIGIARYCAAQTPEPWRPPTPEEQELKALTRYRDELKTNVNQETNRLDGANNIVKKEMKKHIAYLEKAIKGLDTEINALLKKSEAFQAPLQLLLSIPSIGPVAAAHILAEIPDINNFDTAAQLVAYAGLNPTQHDSGSSVHKKSRISKQGNVHLRTALFMPGLVAMQGCNPALNPLIERLIAAGRPHMVIVGAAMRKLLHIVFGVLKSGKPFDRNYAQNHLQLALTT

SEQ ID NO: 91501 - protein, 412 aa, unidentified
MLHPKMRKLFIGVDIHKRTHVAVIINCFTEKLGELRFENNKKGFEKLIEFVKSHLKRGISPCFGLEDTSGNGRNFAIFLLNLGYTVKSVDASLTYTERRNQAIAHKTDGHDAFCVAKVLLNQLDTLPDASIHDDSWTLQLLVSRRNSIVKIRAASKNQVHSYISHHYPSYPKFFTVTYCKAGMEFFQNFPSPSKLKGITKEELAEFLSIHSSGFFGIEHAEKILMLVAKDGDTSTEYQETRDFIVSHCIKEIKHCNEELEVIEAEIKKHMKQFPYRLETMPGINTITAAMLISEIGDIRRFSSSDKMCRYSGISPVSCSSGDKDKNFRNKQGNRRLYEIFRDIASRNICRGRDKKSPINETFLEYYNKKISQGKTKRQALIAVMRQIAKVIYSMMIHQREYIKPTISKTENT

SEQ ID NO: 91502 - protein, 423 aa, unidentified
MEMTPPASEGQGAEITYVCGIDIGSQSCSGCITRPDKSVVVKPTTFANAREGWDLWEEKLSRLDAAPSQIMIGMEATSRSHENLSHELEQRGYQMCLLHPGQTHHFHQQRGLRAKTDRLDAMTIARTLLSGEARIGYIPGEQVATYRELVRLHTQLSEEAARYENQIQALVVVLFPEFTQVCLPTRADRAPWRCSKPIPMPSPWLRQEKPRCTKCCERFLPLMRGRPTAQKLVALAKASVSSGHALRGRASSLRILCDQLEHTQANLTRLEQELEELITTDPGAKGLQQMPELGPKTIAVLRAELGEVDRFAYIDQAIAYAGMDIKIRESGKWKGKAKLSKRGSGLLRQMLYLAAMRSISLQGSALGAYSQHLVARGLEEMSALMAVMRKMVAVATHLMQTGEDYDPGKGYCQVAEGWKSLLN

SEQ ID NO: 91503 - protein, 347 aa, unidentified
MRFYNRQHRHYCGIDLHVKTMYVCILDTAGQVLVHRNVKSNPEAFLETIGPYRDDLVVAAECMFTWYWLADVCAAEGIPFVLGHALAMEAIHGGKAKNDKLDSFKIATLLRGGLLPQAYVYPAAMRSTRDLLRRRLHFVRKRGQLLAHIQNTRAQYQLPEFRRRLAYPANRAGVSEHFTDPNVRKSIDGDLALLERYDDLITDLELTIVREAKRHDGDAFHRLRSVPGIGTVLALTILYEIHDITRFDRVQEFASYARLVKCAHQSAGKTYGTGGAKMGNVHLKWAFSEAAVLFLRHAAGGKKLLAGIEKKHGKGKALSILAHKIGRAVFYMLSRRTVFSLEKFRAA

SEQ ID NO: 91504 - protein, 419 aa, unidentified
MNDWDTITQYAGLDWASDHHDVAVVDRRGQVVRQFRIMHTAEGWKELASKLQESGTVAVAVETNQGFTIERLLALGMTVYPVNPKSAERYRERKAPSGVKNDQLDAWSLADALRMDGHGWKALAPEDPLIAELRLLTRDEVALIDQRTAMVNQLIAALRDYYPAALEAFDDWTLPATWAFIEKFPTPQALVTGGKRAWERFLHTHKLYRPETYERRLEVFARADQFAGSVATAAARSLLATTLAALLRTLEEQLKLYRKRIEERFAQHPDHGLFGSLPGVAAKLGPRLLAELGSDRSRFGSAESLQCYAGTAPLTVQSGQMIKRKIRHACHHSLRATVHLWANTSRRACTWAQTYYQAHREKGKSHACALRCLGQRWLKILWKMWQTKTPYDGELHARNQQKHGSWVLTLDTTITQKPK

SEQ ID NO: 91505 - protein, 315 aa, unidentified
MTEKTERFVGIDVSKQTLQVCVLPDSVQRCFENSPSGHLELLQYLASVGPQLVVLEPTGGYEMEPLCALWQAGIPVAVVNPRQIRDFGRSLGKLAKTDMLDAELIARYAQTVRPPVRPIPDEESQQLQALVVRRRQLVETRATEQARKHLAKSRVRASIESLIAYLSAQIDELDDELQKLVESHPAWHKHDEILQSVEGVGDVTSATMIALLPELGTLNRKQISALVGVAPLNRDSGRKQGKRQIWGGRAAVRAGLYMATLAATRFNEQMSSYLQALRQRGKPFKVAMVACMRKLLCILNAMLRDGRPYNPQLQT

SEQ ID NO: 91506 - protein, 404 aa, unidentified
MIFVGIDWSESHHDVCVMDVEGRVLATGRVPEGVEGLARLHELVATQAEEASEVVVGIEIDRGLLVGALVAAGYAVHAVNPLSVDRYRDRHRTSGAKSDPGDARVLADLVRTDRHLHRQVAGDTDLAEGVKVLARAHQGLIWSRQRHLNQLRSALREFYPAALEAFGTDLASADALAVLGAAPTPAAGRSLSVARIAAALKRGGRRRRSSERAGEIRAALRSPQLEAADVVSRAYGEVVRSTVRIVAEMTEQVEALARELEARFEEHPDAKVLRSLPGLGSVLGARVLAEFGDDPTRYADPKARKNYAGTSPITKASGRSRVALARFARNRRLADALEMWAFCSLTTSAGARRYYDALRARGHSHRRALRSLANRWVGILHGCMRHREPYSEHRGWPRVNEVAA

SEQ ID NO: 91507 - protein, 346 aa, unidentified
MEYIALDVHKKYTWARVENAEGERLYESRLAHAHGTVKGFVSRWTAGSPVAVETVGNWYWVVDEIEAGGGKAQLVNARLAKLMMGSVNKSDKLDAKGMNRLQRTGTLPTVWIPSASVRDARELPRTRMVLSRQRTQLKNRVHATLAKYGYVVEGASDAFGKKGRKIVEELLLKLPPHTGQALRLILDELDHVTDNLKQIEKQMTETFSPCPQTQWLKSLPGVGDTLAVVIWTELGTMERFSRAEQLASYCGLVPRENSSGGKIRFGAVRRDVNVYLKWAFVEAANSALLNAERCGYGHISRLYQRLKPRRGHGKAKVAVARHLSEASFWMLKKGEPYREPMSSTQR

SEQ ID NO: 91508 - protein, 321 aa, unidentified
MSTHTPTPLYVGIDVSKATLDVAILPLGRHFVLSNDEAGIEELLGSLEDPNKPALVVLEATGGYERPVAAAIAASGMAVAVVNPRQTRDFARATGKLAKTDRLDAKALARFAQAVRPEPRSLPEEEAREFSAILARRRQLIQMMTAEKNRLGVAVSKAVAKRIEAHLRWLEKELSRTERDLDEAIEGSSTFKENEALLRSVPGVGPVLCRTLMAELPELGSLAPRELSALVGVAPLNRDSGTLRGRRAVWGGRARVREALYMGALVATRYNPHIKEFYERLVGAGKPKKVALVACMRKLLVILNALLRDRTPWRYPHALNP

SEQ ID NO: 91509 - protein, 377 aa, unidentified
MSTVRFLGLDVHADTIAVAIAEPHGEVRSLGMIPNRPESIQRLVKKLGAVESLRACYEAGPTGYVIYWQFTALGVKCDVVAPTLVPTKAGDRVKTDRRDAEKLARCYRAGDLTAVWVPDAAHEALRDLVRAREAAKKDQLRARHRLGKFLLRHGRRPPTGMTAWTQRHLAWIKTTVHFEQPAQEATLLDYLHEVEHVAGRIERLEGAIDAAVKTAPAQMRAVIDALQALRGIALVSAVTIVAEVGALSRFARAPQVMGYSGMGAREDSSGGRTRRGGITKTGNAHLRRIVIEAAWAYRHRPAVGSALRKRQAALSDEVKAIAWKAQHRLHGRYRTLLGRGKCQQQVVTAVARELLGFIWAIGVTVETDQPHPKPIAA

SEQ ID NO: 91510 - protein, 438 aa, unidentified
MMEQVDESGELVERVAALDIGKASVMACIRVPHEDGRRRLQEVREYATTTRALLALAGQLHSQGVTLVVMEATSDYWKPVFYLLEAEGFTCWLLNARHVKNVPGRPKTDKLDAVWLAKVAERGMCRPSLVHPRPIRELRDLTRYRRSLIRERTAEKQRVEKLLEDAQIKLTSVASNIFGVSGRQMLAAMLEGQRDPQVLARMAHGRMRAKIPQLQEALAGNFTAHHAFLLQMMLDRIDGQTARVEEVTARIEEQIAPYARAVEQLDEIAGVGITSAQELIAEIGVDMSRFRTAGHLVSWARFAPIDRSSAGKSKGGSTGKGNPWLAATLGEIVTAAARTDTFLGERYHRIARRRGKRRAIVAVGNSILTIIWHLLSDPDASYHDLGHGYYQARSDSRHRERDLIRRLERLTGKTVTLQPVAGQEQQPDYLRKLTPAVS

SEQ ID NO: 91511 - protein, 454 aa, unidentified
MKKISYRSVAIEKISVAVLVGLLSGAKKLVVSIDVAKTKMMAGFGSEDGTVVRLVRFVNPCQTRAFVDLVVQTGKALGVPTEALMEPTGTYGDGLRRLLGEGGVAVWMLSPKRVHDAREVFDGVPSLHDAKSCVVMAQLHRQGGSRIYEEASEERRGFRALVDRRQVWTKPLQMHLGQLEALLSRHWPELLSTMDVWKRRTPLRLLAEYGCPAEVVAHAQEARALMRSASRRKLNEAKIAAVIDSARASIGLPVLPSERVLIAEVAQEALRLRDAIGQLDKEIEAQATLSEVTEPIAAVVGRVTAVVLVAYLGPLSEYGSAAALEKACGLNLKIKSSGNVSGRPSITKRGSPIARAYLYLAAVRMVRLDARVGAWYRSRSSYREDRKIVALVAVMRKLVRALWHVARGASFDSSKLVDVRALPAGAVPVELLLREAPLPTTHDAICFTQSNAMP

SEQ ID NO: 91512 - protein, 348 aa, unidentified
MNVTHYIGFDVHKKSVSYCAKTGDGQIVEEGRLLATRQALRRWAQQRTEPWHGAMEATLFSGWIYDTLKPFAAELQMGHPAMMKAIGASKKKNDRLDARKTADLVRCNLLPACYVAPVEIRELRRLLRYRNVVVAQAVRMKNKMSGLLMEVGAPYNKQRLHGKQYFSELLDQLEEVPESVKDLLRLSRTTLEAFEATQQQLLVRLRQDPLLTARVKLLTGIRGVGTVTALTWVLEVGEPQRFSSIAHAVSYCGLTSALVSSADKQQRRPISKQRNAHLQTVLIEAAKLAPRWNPQLAAVHARELAGGHRNRATLEVARKLVAYLLAVDKSGQPFKVRAPAAQEAETVA

SEQ ID NO: 91513 - protein, 351 aa, unidentified
MPMLADLVDAVIGVDTHTDTHTAAAVDRLGAHLATIEVSADAAGYAQLTGWASKHAPGPRIAWAVEGCGSHGAGLARALAAAGYLVIEADRPKKARRRGGKSDELDAIRAARQALAIPDPAQPRTGDTREALRILLATREHATKTRTATVNTLKALILTAPEDLRAQFRGRPTAAQARAALALRPRPGQPVSEQHLREALRQLARQITDLDAALKTSLKNLRSLVRAWMPALLAEPGIGPVSAAQLLVTWSHPGRFRTEAAFAALTATAPIPASSGRTARHRLNPYGDRNANRALHTIAISRLRYHQPTIAYAARRTTEGKTTREIRRCIKRYLARNLYRLMEHQPALDKP

SEQ ID NO: 91514 - protein, 313 aa, unidentified
MSKVYVGIDVAKESLEVAVRPSGASFSERNDARAISRLVKRLLPLKCERVVVEATGGYQNVLVGALRVAGLPVVVINPRQVRDFARGAGILAKTDRIDAQVLARFGEQHNPPLRELPDPQTEALRALWVRREQLVEMHTMESNRLKQAAKALRGEIEGHLEYLEKRIKHTDDEMDRAVRNSPMWERYQLLQSVPGVGRVLASALLAELPELGRLNRAEIAALVGVAPINRDSGRHRGKRMIEGGRHRLRGKLYMATVASVRCNPTLRAFYSRLRDDGKPFKVALVASMRKLLLILNEMTRTATPWRASCTAVA

SEQ ID NO: 91515 - protein, 400 aa, unidentified
MDDIDDVGVFLGLDVGKSAHHGHGLTPAGKKVFDKQLPNSEPKLRAVFDKLAAKFGTVLVIVDQPASIGALPLTVARDTGCQVAYLPGLAMRRIADLYPGEAKTDAKDAAVIADAARTMPHTLRSLQVTDEITAELTVLVGFDQDLAAEATRTSNRIRGLLTQFHPSLERVLGPRLDHQAITWLLERYGSPSALRRAGRRRLVEVIRPKAPRMAQRLIDEVFDALDEQTVVVPGTGTLDVVIPSLARSLAAVHEQRRALEAQIAALLEEHPLSQVLTSMPGVAVRTAATLLVTVGDGTSFPTAAHLASYAGLAPTTKSSGTSIHSEHAPRGGNRQLKRAMFLSAFAALHDPASRSYYDRCRARGKTHTQALLRLARHRISVLFAMLRDGTFYEPRTPRLA

SEQ ID NO: 91516 - protein, 337 aa, unidentified
MDYFAGLDISMDETHVCVLDREGVVVRESRTESTAQAIAGELAKAPSCHRIVFETGRMAPILFHGLNQLGLPVVCVESRQAYQALKSLATHKTDRNDARGLAHLARTGFFKPVHVKSLQAHALRSLIIARKKLVGQRVTLENQIRGLAVVFGIRLPRALAAAFIDQALKASEGIAGLSAAMRGLITARTAVMTAVAAIDADMRRMTRASAACRRLMTIPGVGQLTALAFVAAIDDPSRIRRSRDVGAYLGLVPRRYQSGEVDYVGSISKCGDRRVRTLLYEAANVMLTRYKGQLKLKDWAFAIARRSTMRKARVALARRLGIIMHAMLRDETEFVLA

SEQ ID NO: 91517 - protein, 348 aa, unidentified
MDHYAGIDVSLECSSVCVVDTNGKIVSEDKIASEPEALIAWFASLGHELARIGLEAGPLSQWLYATMKQAGLAVELLETRRVRDAFSAMPVKSDRNDARGIAQLIRLGWFRPVHCKSIGAQEVRAMLTARKLVQSKLQDVENSLRGILRGFGLKVGKTTPRSFAGRIRELVAGHANLHSIAQALLSVRAVLLRELGAFEKRVRYMARADAKSKLLMSTPAVGPIVALTYASAIDDPARFKSSKQAGAHFGLTPKRYQSGTIDRTGRISKIGDASVRTALYQAAHVMLTKPIKDCSELKSWAMRIARRGGHNKAKVALARKLAVVMHRMLADATTFNPTAKTKMMAAAV

SEQ ID NO: 91518 - protein, 362 aa, unidentified
MFRPHTLYIRIRIVRKVSEPAFAMKDQDVTDVIRRKQQTAMRYIGIDVSKATFVVAYSSDKGGEIRIFNNTTTGIKQFIGALPKDSSIHCVMEATGNYSAMLLYLLNVAGIAVSMENPLKIKNFARAMLSTVKTDKIDARLIALYGEKMNPQPFKIQGEAILRLRQKRTVIRQLTKQITAMSNLRGSLACLPVPDKGATHTVDETIEFLEKRRDRLQSELTDLVEVEFSRQLALLTTIKGIGITLATALIITTGGFTYFQNAKQVSRYLGICPTYEQSGTSVNIRGHINRNGDAYTRGLLYVAAWTASRFNTKCGETYTRLRQNGKPGKLAMIAVANKLVRQAFAVVTHDKEYVDGFVSNRP

SEQ ID NO: 91519 - protein, 423 aa, unidentified
MEVLHECVAGLDVHKDSVVGCVRTVSGDKTTREHRTFDATTDGLLALLEWLTSCRCELVAMEATGVYWMPVWRILSDGAFKLIVVNAAHIKAVPGRKTDMKDSTWLADLAAFGLLKASFVPDEEQHELRALMRTRKQLVREQTRHVQRIQKTLTEANIKLDSVISDIMGRNGRRMIEAMITGVRDPRKLAALADQRLKATPKQLYDALHGRLTDHHRFLLQLHLGQWDTLDATIKGVDREVATRVFRMDTEGMAAKANFSELIDQLVTIPGVSRLSALTILSEIGTDMSRFATAGHLVAWAGMCPGQNESAGKRKRTRLRKGASWLKTMLVQCAWAAKRKKDSYYKAQFFRLQSRRGPQKAICAVAASLLTAIYHMLKDGTIHQDLGSGYFDQRPPEIKVKRLVNQIAKLGFEVTLQPIAKAA

SEQ ID NO: 91520 - protein, 459 aa, unidentified
MRRNQAAGKGRQSLPVVHPHAAAIDVGATMHMAAVGPDRTDEPVRSFGTFTADLHRLADWFEVHGVTSVVMESTGVYWIPIFEILQDRGLEVFLVNARDAKQVPGRKTDVNDAQWLQRLHAYGLLRASFQPKAEIAELRAYLRQRERLLEYAASHIQHMQKALTEMNLQLHHVVSDITGATGLRIIRAILAGERDPGVLATLRDIRCHSRSETIEKALTGHYHRAEHLFALEQALALYDTYQHKVAACDQRIEAVLKALSPRKPDPSTVPAPRRRMSRQPNEPSFDLRGALYTVLGQDLTRIDGIGPSLALKLVAECGTDLAAWPSAKHFTSWLCLAPGNKISGGKVLSSRTRRSGSRAAALLRLAAVTVGKTETALGAFYRRLSTRIGKAKAVTATARKIAVLFYNALRHGMDYADPGASYYEERYRKRVIDNLHRRARALGFVLQEVAVDASVGAVS

SEQ ID NO: 91521 - protein, 379 aa, unidentified
MDLKYSVGLDVSSKKINGCISLIDNNQKVTVKSSIVFNNDLKGFKSFEDWMIKHRRELEIPLVICMEATGIYHENCAYYLFEKGFDTSIILPNKAKKYLEAIGLKSKNDSIDAKGLSQMGAEQCLEQWEPFGKYFYELRLYTRQNQNLQELKTVISSQLHALKQAMYTNPIVIEQLESTIDLFDLQLKELEKKIKLHLESDAEIKQKVANIIKIKGLGILTIATILAETNGFDLFKNYKQLVSCAGFDVVESQSGARIGKTKISKKGNSRIRRALHMPSLVVITYKEKPFLDLFERTYAKHGVKMKSYVAVQKKLLTMIYYLWKKNEMYNPDYQNNIQEKELEFPSLLAFEKGTKNSLKKVEAIQGKHPVKNRSMFPLC

SEQ ID NO: 91522 - protein, 369 aa, unidentified
MLDTTTFVGLDVHARSIKAVSLDVMTGEVRCATFGYDAGAVAEWVRSVDPGARCVYESGVTGFDLQKRLSGLGVDCAVGAVSKMIKPSADRRRKNDRNDAEFLARMLSVGDVVEVWVPDDECEAARDLTRALEDARDDLSRSKQRLSKFLLRHGLAFDERTPTGRRRGNWTRAHWSWIESIRFAEGADNDALAYYVDAVRRAAEEKARLEGLVGAEARKPRRRRVDSLRCLKGVDTATAADLVFEAGEFSRFRNARSFAAWVGLTPSEHSSGESDRRGAITKAGNKHLRKTLVEAAWHYLTCSGRPKDLAKGQAPDRGARRHAAKGVRRLVERREALLARGVHGNKANVATARELACWVWAVGLMAEEA

SEQ ID NO: 91523 - protein, 400 aa, unidentified
MHLTANISVPQKNFIAIDLHSDNAVICVRRNALNKAGELIGKNIWCGRVSIRDGLDNFIMALLPYCQDFDHVAVVESTCNWYCLADVFEERGWLLRIADPSTVSQANLKASDERTDAQYLAERLRVGSLKHYLPLSYSSRALRDLCRYRMAMVQDCASLKIKLINLYRNQLSKNLCVADLLERCQPHMQSNYRFDPDILEEFKDPNIRLRVAFQVSRIAMLEEMIEECNAEIQKQCKDQELVKLCKTIPGCGPVLSAVICTEIGTMQRFKSAGDFVSYCRLCSTSKLSNGKSKGLGNAKNGNAYLSWAFTEVAQYASRNPVIREILQRLLRKYGGLRVKAIRTLAAKIARVTFYVLKNRQPFNAAQCFGDELTKGIKKKLALKPLSKDDSVVLPIVAGLA

SEQ ID NO: 91524 - protein, 370 aa, unidentified
MGNRNMFVGLDVHKETIDVSIAEGDRLGEVRHYGVIKSDLEPLDKVVRALRAPDRRLHFVYEAGPCGFGIHRHLTHRGEDCVVVSPSMIPKRSGDRVKTDRRDSQMLARLHRAGELRAIYIPDATDEAMRDLVRARADAVGVGTQAKYRLKAFLLRQGRRYPGREGWTLPYRRWLTDLSFPSAAQHIALQEYRDAIGETEQRIERLTEQLRQLAPTWRWAPVVDAFQALRGVSFITAVGLVAELGDLTRFRQPRELMAYLGLVPSEHTTGPRVRRGAITKAGNPHARHLLAEAAWAYQGIPRIGRQHAYRQETLPKVVCDIAWKAQLRLTTRFRRLVAKGKAKPKVATAIARELTGFIWAIAQEVSPAPQ

SEQ ID NO: 91525 - protein, 355 aa, unidentified
MTRYFGCDAHKRYSIFTFVDDTGTPGPYVRVENERSLFRGYLKMIPPRSQIAVETVGNWYWMVDEMEKAGHIPLLTNAGKAKAMMGQINKTDKLDAKGLALLLRNGTLPSIWIPPGELRDQRELPRMRMTLVRMRTMIKNRIHATLSKYAIEIDEVSNVFGVAGRKLLEERIRELPPQTHHSVEKQLELLDDVEDQIKESERQIKAVVQETPAMQLLMTFPGVGMILAVVIAMEVGDVNRFSGPDRLASYAGTVPRVKSSGDKIFLGRVRPDVNRYLKWAFIEAANTIVLFHKRWTGRHVVDLYVRLREKRGHAKAVVAVARHLAEATYWVLKKGESYRERNLKRPVSSTREQAR

SEQ ID NO: 91526 - protein, 421 aa, unidentified
MLGVGIDFAEEFHLVALGRPSEGVIEVARVDHTPAALESLVARIAALEPDPAEVRVVLETSHGALVERLLDAGYVVVPVNPDLVARRRGPARKKDDAEDARIACLLALDRHATLRPLIPHGPLAAELRAIARDDERAARDERRLLNRLRADLIATFPAALAIAGDDLGAPTMLRLLERWPTAAELRAAGRAELVAFAREAHHGWPERFAGRVADALAAEQFVARDYLVRAKTATIRLAAGQLLLLGAQRRAWERRMGELLLGAPRTGRAREPHAERGEQFPGGEIYLSFPGLGDRLAARVAGEIGDHPEMFASPNGLQCYAGKAPVTRRSGKSELVVSTRLACNGHLRDAVQQWAFCSLPYSGWAREFYDGQVAKGKNHHAALRALGNRWLEILWHCLMRRVSYDEAIHVANRNRALQRAA

SEQ ID NO: 91527 - protein, 321 aa, unidentified
MNTRTSLGIDVSKAKLDCALAVGSKYRTKVFANTQQGFAQLSDWLHHHGADQVHACMEATGIYWEAAALYLADAGQRVSVINPALAKAHGQSLGLRSKTDAMDAKLLADFCREKQPPMWTPPSEAERRLRALVLRHQSLVEMQTQEKNRCESLREEVRSSVETHLTWLASELARIEQAIARLLDDDDHLRGQRALLASIPGLGERTIAVLLAYGVNGERFQSARQFVAFAGLSPRLHESGSSVRGKPRLSKIGHAFLRRALYMPAMVTLYKTAWGQRFRQRLATHGKPPKLIIGAMMRKLAQVAFGVIKSGRPFNPAFHGA

SEQ ID NO: 91528 - protein, 408 aa, unidentified
MKTLHQRCAGLDVHKQEVVACLRLGRRGRVEREVRRFPTTTRGLLELADWLEAARCTIVAMEATGVYWKPVWHILEGRFELVLANAAHIKGVPGRKSDVNDATWIADLLAYGLIRASFVPPQPIQDLRDLTRTRKQLSREIVRHEQRLQAVLEEANVKLTSVITDILGASGRRILKAMIAGETDPSRLAELGSRRLGCSRETLVEALDGHVRDHHRFLLDQHLKTIEQLEETMAAFDARLEAALAPFRDTVECLTQVPGLSTTAAEVVIAEIGLDMRRFPTAGHLLSWAGLVPGLDESAGKRRSTRVTKGAPWLKPVLVQCAWAAARKKGSYFEAQFLRLKGRRGPKKAAIAVAASILTTVYHMLRDGTCYQDLGPNHFIRRDPARTAHKLADRIRSLGYVVEIRSAA

SEQ ID NO: 91529 - protein, 411 aa, unidentified
MENVFACCAGLDIHQKSVEACVRRLEPAGPLHQQTRHWGTMTRDLRAMADWMAAQGVTHVAMESTGVYWKPIYNILESRFTVLLVNAQHLKQVPGRKSDVRDCQWIAQLLQHGLLKGSFIPPRAQRELRDLTRHRTQLVEEKTRTVNRVHKVLEDANIKLASVATDILGVSGRAMLEALMEGQEDPVKLADLAQRQMRGKIPELEKALEGHLTEHHRFLLRLLWKELAQQEELIAELDRKIEEHTRPFADEIERLDAVPGVDRRVAEVVLAEVGSDVKPFPTHSHVASWAGMCPGNEESAGKHLRRRITPGNRWLKRSLVQAAWAASHTKNTYLASQYRRLAGRRGRKRALVAVGHSILVIFYHMLKERTTYKNLGGDFFDRLEPERLTRYYVKRLEDLGHKVTLESGVPA

SEQ ID NO: 91530 - protein, 481 aa, unidentified
MAKRKQSTFERLTSGKLNRKQKKDLIRKLYSDDPGLEVVHANAAGIDVGNESHFVAVRPERDAKPVREFGSWTADLHAMANWLKSVGVTHVVMQSTGVYWIAVYEVLESHGFKVCLTNARDTKNLPGRKSDVQESQWLLKLHTYGLLRNSFRPGEEIRKLRTIWRLRSRQVQDASGEIQHMQKALTTMNVQLANVISDISGLTGQAILRAILDGERDPYKLAKLRHYRIQASEEEIARSLEGNWQDDVLFELRQAVEQYEFHQRQIAACDTELEKYLGSLPSRTIEGGEEGEGEAEGNSGGKRSRGGKPRKNQPQFRLEEELTRVCGVNLTSIQGVDVMTVQTWVAELGVDMSPWRTEKHLVSWLNLAPKRQISGGKLIRHERNQSRNRVADALRMAASTLRESDSYLGARFRSLRGRLGPARAIKAMAAHLARLMYRMLKHGEGWVDVGAAEYQKRREERERKALEKRAKALGFVLAPAA

SEQ ID NO: 91531 - protein, 340 aa, unidentified
MMGTIKLGLDVHAEQITVCQQSGGQVPKPAQRLSWPVLLERVQALRASGAQVFSCYEAGPCGYGLHRQLTALGVSNVVVVPQCWDEQNRRVKTDRRDARALCDRLDRYLRGNTAAFSVVRVPTPEQEQRRAVGRQRAALVKERQRCVVRGHGLMLGQGIQAPPGWWEPKHWPVFAPKLPGWLRAPVQCWQQQAVRLDQEVSRWTKRVEEHGAGQVAPKGLGQLTAGLIEMEVLDWTRFTNRRQVASYTGLCPSEYSSGERRRQGGVSKHGNPRLRHQLVEAVWRLQHWQPEYRPLRKLRAAAGPRARKRAAVAVARRLAIDLWRINTGQCPAEKLGLKLR

SEQ ID NO: 91532 - protein, 344 aa, unidentified
MQPNMTIGLDIAKHVFQVHAVDAAGAIVIRRKLRRSDLLSFFEGLEPSLVGIEACATAHHWARSIMALGHQVKLMPPAYVKPYVKRQKNDAADAAAICEAVSRPSMRFVPVKEVDQQGVLVLHRTRDLLIRQRTMLINALRAHLAEFGIIMRQGRAGVTALVASVEEGKAEHLPELARTALMSLIAQLRDAHARANEIEREILTWHRNDERSRRLETIPGVGPITASAVVATVTDPSMFASGRELAAWIGLVPRQSSSGGKERLGRISKKGDPYVRRLLVVGAHSVLRIARAKKPGSSNLITWGAELAARKPYKLAAVALANKMARIVWALMAKNEVYRRQMPA

SEQ ID NO: 91533 - protein, 347 aa, unidentified
MDQQCHYVGLDVSLETTSICVVDDAGAIIWRGKCSSDADTITATVRQHAPGAVRVGLETGQLSNWLTLSLRRRGVPVVCMDARHAKAALSLQINKTDANDAFGLAQVVRTGWYREVAVKSMDAHTLRMLLVARSRLVSQRQATANTIRGLLKTFGLVVVKGSKGLFPVRVREQIAGNPALIAIIEPLLAVWYAIRDQIMMLDRQMLARARNDDVARRLMTIPGVGVVIALAYTAVIDDPARFRRSVSVGAYLGLTPRRYQSGEVDTTGHISKCGDGLLRGYLYEAAAVLLHRDARASTLKSWGLGLAKRIGMRRAKVAVARKLAVIMHRIWSDRSEYRWTAIPPTAA

SEQ ID NO: 91534 - protein, 320 aa, unidentified
MQTTVTPPLYIGVDVSKDVVLSCVHSSAVRRTLANQRSAIDAWLKALPAGSAIGVEATGSYHELLADLAHRKGLRVYVLNPKDVRHYAKGVGMRAKTDRVDATLIARYIAHEHTKLHAYRPPSPEQRELQRLLTRRAKLSRSRASVQQSLQGVAGLKAPLRQLLERFDALIALIDARIGALVTACPQRQAACQRLRSIKGVGPVVAPALLCPLERFAFAHADSFVAYTGLDPRPDDSGKRHGRRRLSKHGPSELRRLLYNAAMAAVTSSAWKPLYHHHLAKGLSRTEALVIIARKIACTAWSIYTHNTTFDPQRITSSLT

SEQ ID NO: 91535 - protein, 350 aa, unidentified
MTTLPPRITGGVDTHLEVHVAAALDHQGALLGVESFETTPAGYRALHDWLSGFGDVEQVGVEGTGSYGAGLTRSLHREGVRVVEVDRPNRQRRRRRGKSDPQDAITAARAAQSGDAHGQAKTRNGNVEAMRVLRVARTSARKARTQALNQMRSLISTAPDDLRGELRDLNVYRLLERCSVYRPGTGRDPRTLTKVTLRLLARRALSLEAEVAELDRILEPLVGDTAPELVARVGIGTECASALLVAAGDNPDRLRNEATFAHLCGASPIDASSGKQERHRLNRGGDRQANSALWKIVITRMVYDPRTRDYVQRRTKEGLTKKEAFRCLKRYIAREVYNCLPRHQLALDGP

SEQ ID NO: 91536 - protein, 355 aa, unidentified
MSSEKYIGLDVHQATISVAVMDSQGKVVMESILETKASTILEFLAGLRGSLFVTFEEGTWAAWLYDLLKPHVSEVLVCNPGKIPLLKQGNKSDKIDARKLAERLRLHDLKPVYLAKPGVRMLRELARSYLTVVKDLSRVMNRLKALYRSWGIPCAGRDVYYTRHRSQWLEKIPEPGTRRRAEQLYQQLDMLQHLRQQARRELLAEGRKHTISAKLRQIPALGPIRSALAVALIQTPHRFRSKRQLWTYSGLGLETRDSGEYHYVRGQVRRRKKQATIRGLNKDYNHDLKSLFKGAAPWASVQPGPLQEFYQRSLAKGIKPTMVRLTLARKIAAMTLTLWKKGEDFDIHKLNSQAA

SEQ ID NO: 91537 - protein, 355 aa, unidentified
MNDEKYIGLDVHQATIVVAVMDSTGKLVMESILETAAATILQFFAGLRGTLSVTFEEGTWSVWLYDLLSPHVDKLVVCNPRKNALLKDGNKSDRIDARKLAELLRGNQLKPVYHGETGVRMLRELSRSYLTIVKDRSRVMNRLKAVYRSWAIPCAGRDVYYRRHRAQWLAKIREAGVRRRAERLYEQLDMLQHLRQQARRELLAESRKHAITAKLRQIPYLGPIRSALAVALIQTPHRFRSKRQLWAYSGLALETRISAEYRLVEGQVRRSKKLLSIRGLNKDHNHDLKGLFKGAATMASVRPGPFQDFYQATLAKGIKPTMARLTLARKIAAITLTLWKKGENFDAEKLKSQAA

SEQ ID NO: 91538 - protein, 470 aa, unidentified
MSKVKAKKTKAQDIISMQVVNPYSAGIDVGDKEMVVAVPEGLSEPRVRTFGTMTCDLHEIAAHLKVCEIDSVGMESTGVYWKPLFRLLIHEGFEVNLVNAAHVKNVSGRKDDENDAMWIQKLHSCGLLKSSYLPDEEQEALRTLVRHRKTLVQDSCRFVNRMQKSLELMNVKFHTVISDIVGETGRAVVEAIIGGERNAANFLPLISKRIKADLSTIEKSLQGNWLEEHLFTLKQNYEMYKIFWEKIAVCDQQIEKQLQQYEAKCNEGVIEEPKTVKEEPTVTPVGKKGKVVKKYGDKNRPRFDVHGYLERIYHVDVMAIHGINSTSALDIFAEIGTDLSKWKNEKHFVSWLNLCPNNKISGGKLISSKLFHKKPNPASLAFRAAANGVQKSDNWLGDYFRRKKAKGGNKYAIIATANKIATIFYKMVRHKEDFKPVDLEQYQQKYKQVKIAFLKRKLAQLEQETEKVAA

SEQ ID NO: 91539 - protein, 420 aa, unidentified
MKSFVPVAGVDVSKRFSDLCVLSPDNNVLLRQKIYHDMVSMKLAEKKLHEIELECGARPVVVMESTSHYHLILFQFFTDAGFEVVVVNPIQSGALKNINVRKVKNDRVDAYRIAMLHRLKVLRPSQIPTSSLRGLRLLTRQRSELKGDVARFKNRLTAYLDQIFPGYGEVFSDVGGSASRAVLHMCPTPEKLLNADGSLLAKAICEAGNKGPKFGAEKAAKLREAAGSAQVIGVRSASNASLIKNVLDIIEGLLAAIQRIEGEIKELVTQDTRLDEDVKLLCSIPGIGFSSAVVIVAEMGDISLFRKPKQLAAYFGLDPGERQSGTFKGRKNKLSKRGSPQVRAALHMAAVSSVSRNRDGTYRNPVLAEYYERKCAEKPCKVARVAVMRKLSNIIYAVLRDRRPFELRTPQEHMALLAAA

SEQ ID NO: 91540 - protein, 341 aa, unidentified
MDTVSLVGIDLGKHCFHLHAQDASGRMVFRKKLTRSQMFALLGNFPSCTVVMEACAGAHWIARRLQALGHEAKLISPHFVKPFRQGNKNDFADAQAICEAASRPSMRFVSPRNEAQQVVSALHRVREALVRERTGTINQIHAFLLEFGISLPRGMAVIRRLPAVLETQALPPRLVAVLERLQAHFKYLDEQIGQLEHELLTQLHEDERSERLLEIPGIGPITASVLMSELGDAHQYGSARQFAASIGLVPRQYSTGGKPTLLGISKRGDKGLRRLLVQCARVIMLRIERRTDSLGTWVRSLLARRHSNVVACALANKLARIAWAILAKGTHYRSAPAALAA

SEQ ID NO: 91541 - protein, 430 aa, unidentified
MRAQAPAQTKETMMRFYTQAHRFYAGVDLHARTLAVCILDQAGAVVFEDNLAADPRAFLQAVAPFRAGLAVACECMFAWYWLADLCAAEGIPFVLGHALYMKAIHGGKSKNDQLDAHKIAILFRGGMIPQAYVYPKGMRETRDLLRRRMFLVHKRAEAVTHIQITNSQYNLPVFGKKLVYAGNRTELAVAERFTDPSVRKSIEVDLALIDHLDASIGELELYLTRTAKVDDVHTYERLKTIPGVGPILALVLLYEIHDMRRFDAVGQFLSYARLVRPEHASAGKKVGFGNKKIGNAHLRWAFAEAVCLFLRQNEPAKKWQAKKAKKHGKGKTLAILAAKLGRAVYHMLRKEQPFDAARFWGTPPAASAAATASRTGEPASWGREPEAPGSRPQTPTLLPSLCSVPREEAHAHRPGRRSPTPNGGASGRAR

SEQ ID NO: 91542 - protein, 358 aa, unidentified
MTPTMIDTQVVVLGVDTHQRTHHAAIVAADGRPLADREFPTTAAGYTEMWQWACGFGRIEYAAVESSASYGAGLTRMLTDQGVAVIEVNAPDLPRRYAHGKTDQLDAYAAAMAVITGRATAVAKDTRGTVESVRMLTVTRTSAVEEATRIGNQIRDLCTTAPVEFADQARQARTITARAAFIAGLPVPADQDDLSGPAAAFVRAARSLLERHRLAQREVCSLTRELERLLATVVPTLLSRPQIGPVTAARLVITAGDNVERMRTEATFAKLVGAAPLPASSGKTSRHRLNRGGDRQANSALHMIAVGRMKSHAPTRAYVERRSAEHKTKKDIIRCLKRYIAREVFRDLTTDLGTLDKL

SEQ ID NO: 91543 - protein, 335 aa, unidentified
MYYVGLDVHSGRSSLEILDADGKCFKRMDVHGSWTDLEKKVSELPGPMALCYEASCGYGHLYDRLSRFAQRVVVAHPGQLHLIYRSKRKNDRVDASKLAKLLYLDMVPQVHVPNVDVRSWRAMIEFRQKLMARRTMAKNQVRALLRGRGIKSPRNLWYGPGLAWLKALGELDGVAALQRDMLLEELSELNSKVKRVEKELAKFADRHPAVTLLMTIPGVGLRTAESFAAYVDDISRFARSHQLGVYFGLVPCQDASAAKNRLGHITCDGPSTVRKLLCESAWQAIRHSPTIKGWFERISGADPDRRKIAITAVARKLAVVMGAMMRSGETWRENK

SEQ ID NO: 91544 - protein, 352 aa, unidentified
MRILAIDLGKSKSVACDFEAATSQAKFYGLRTVPGELRELLVRCRPDRVVIEVCNQAGWVGDEVLAAAIDLQVVNTNGSAWRWQNVKRKTDRDDALKLAQLSAMNQLKLVHLPARPVRQWRSLIGYRQTLVDRRTAIKNRIRSILDAQAISMPAGKSGWTHKSVQALREMALPIEHCPPGDFWRAELDEELKQLDGVEAGLKRVTAELDKRGEQDERVRRLRTIPGVGRRLSEMVVAAIDDPHRFASGKQVASYAGLVPKQYQSGMMERHGRITGHGNANLRRLLVEVSWIGLRLNPRMRAVYERVRQGGKTRKKIAIVAVARRLLIWCWAMLRDKQDWEQFPEGSPSVRAA

SEQ ID NO: 91545 - protein, 388 aa, unidentified
MPQPYDLSRSLTPFVQGTTLVAVIELSLSSWLIAGVVPGVVRQPLKKLGPDEAGLLRLLRRWRDEAVRNGATIERIAVAYEAGRDGFWLARWLRAHEIEVHVIHSTSVAVSREHRRAKTDRLDTAMLLRVFMGWLRGERGHCGMVAIPTMDEEDAKRPHRERENLVGEQTRIINRMKATMVRLGIRGFKPELRRAAKKLDGLRTPENQPIPTNTLDEIRRDMARLAMVREQIGLIEQARQARIAQAPETRPNAMVRLLASIIGVGIETADMLVQEVLSRNLRDRRAVARYAGLTGSPDESGSKRREKGLAKAGNARVRRGLIQLAWRFLLFQKDSALAQWYRARTEGTKGARKTTMIVALARKLLIAMWRMVTTGVIPDGVRMRPVAA

SEQ ID NO: 91546 - protein, 419 aa, unidentified
MSFKILKNNCCGLDVHKTWIYACIGITDSFKRTEYKQARFSSFTKGLQELCLWLAKYNCIDVCMESTGKYWIPVFNVLEKNNIFVTLSHPKYTKPQKGNKTDRKDAKWICDLYMCGMVKPSFIPPADIRQLRDLVRYRFKLTCMITGEKNRAHNCLTVSNLKLDDVFSDIFGKSSRSITEQILQHPGEVFDVAPFVDSRCKTPIEEIQAAVDGAISHEQAVKLRQCLKHIDELEMHKAEIEREIFRLSQKYESVLDLIRTIPGFDKNPLTAIQVLSEIGADMSVFPTAKNLVSWAGCCPRNDQSSRKIKSTKISRAGSYFKPVLVQIANALIKSKKHPEFTTRYRRIKARRGHKKAIIAICRMILTAIWHILTDLKPYTPEGFLESRPVNKEKVLTISQALNLIKQRGYIIKDDVGPVT

SEQ ID NO: 91547 - protein, 420 aa, unidentified
MTVDLERGYKRRELCGPKQYLNLLLRSVLMIYVGIDVAKDKHDCFITNSDGKVLFPVFTIQNNRDGFDVLFSRIQSSSSDVSNIKVGLEATGHYSYNLLGYLIDKGLHTFVINPLHTNLYRKSLSLRKTKTDKVDSRTIATMIMSDMNLKPYSDTSYHNEELKSLTRYRFDKVRERAKLKSSVSRLVNILFPELETLVPKLHLTSVYSLLSEFPGASHVAYAHLTKLTNLLSQTSNGRYGKDTAILFREAARNSIGSVMPAKSLELRHTLRLIGELDSEISEIESEIKRIMDQISSPILTIPGISYRMGAMILAEIGDFSRFSSADKLLAYAGMSPSTYQSGQLDNCYAHMEKRGSRYLRYALYNATKYVCHWDETFKTYFEKKRSEGKHYNVALSHATKKLIRLIFAMEKSGRTYIPAS

SEQ ID NO: 91548 - protein, 347 aa, unidentified
MNSVGIDLHRNRSHITVIDEQGELSLSRRIVNDRATFLELLAGLEGESRIAVEATYGWEWLAELLEDAGYEIHLAHPLRTRAIAAARVKTDAVDAKTLAHLLRADLLPEAYVAPRELRDLRELLRHRIALTGMRSALKNRVHAILAKHGITRQHSDLFGPGGRRFLDQLQLRAAPRRRLDSLMALIDDFDREIAQTTAEIEQRAKADDRVDVLTQIRGVGRYTAMLIIAEIGEIERFPDARHLCAWAGLTPTVRSSDGKARLGHISRQGSPALRWALVEAAQKCTTGGGPLRESFERIAKRRGRKIAKVAVARQILTLSYYGLRDGEIRCLARRSRASARKKLTVAA

SEQ ID NO: 91549 - protein, 386 aa, unidentified
MPQPKDDLSRSLVALEQDKTLIAVVELSSATWLVGGMVPGIQREPLKKLAPDEEALLALLHRWRDEAIAAGQAITRLVVAFEAGRDGFWLARWLRSRGVEAYVIHPTSIPVSRERRRAKTDRLDIGLLKRSLLGWLRGEKKHGSMAAIPTLEEEDAKRPTREREQLVGKRTGIVNRMKAALVRLGIRGFNPKLRKAPERLATLRTPEGCPIPPNTLAELTREMAHLRFINDQIKQIEDERLQQLKHAPQQGSNAKVLQLQQVNGIGVETADMLTHEVLSRDLRDQRAVARYSGLTGSPDESGSRRREKGLSKMGNARVRRGMIQLAWRFLFHQRDSALAQWYQASVAAGKKRKTMIVALARKLLIALWRFLTTGEVPEGVVLRPIP

SEQ ID NO: 91550 - protein, 384 aa, unidentified
MSNKVIFNLDELFISVGIDVGADFSWMSIALPNQQFVGKPYKILHNSMNFLTTAVSKIKEAEELYSLESRIFLESTGIYHYPLFCYLRDKGFNCSVINPIITKNSTNMNIRKVHNDRFDSKKAALVGLKPDLKVSLTLLETYTSPNAFLEADKQEIIDTIRSTARFGLTYAEKKYNTIIQAANAANEFGYIIDSNIKRIRLYISLIRKYDEEIEGILDALHDLVNANENTDFVKQIHLIETFKGAGFLSAVSLMGEIGDFSAFNKPKQLFAYFGLDPAVKQSGKFEGTKVQMSKRGSAIARRVIHILALQSISISQNGEAKNPVLRDYYLKKCESKPKLVAMGAVSHKVCNMIFAILRDNKPFKIITPQEHIKQYNAAKCNVAA

SEQ ID NO: 91551 - protein, 333 aa, unidentified
MNYVGIDVGCKELVMAISVKGQFKKTKTFENTGSGHKLIIKQLSKLKEHSQICIEATGIYHFDLAVALSRAKDIDVMVINPKVSHSFSNVLMKRSKTDAIDAEILATYCERMPFASWQCPADELISLRAISRRIAALSKLKSQTKNQRHALNATEGTPDIVIEHTDDLIIVLDSQILALRDSALRLILQYDELAEAFRLITSIKGIAEASGIQILSELMLLPRDMNQKQWVAHAGLDPRHFESGSSVSKKPRISKAGNKYIRQALYMPALVATRHEPHIKAYYTHLIDDNRLKKVQAICAVMRKLLHAIHGMFKTGQVFDGRRFYTMKNKVEA

SEQ ID NO: 91552 - protein, 413 aa, unidentified
MLKIVYPICCGMDVHKSFVYACIASTNEQGVTTYKSKRFSTFTKDLHFCAEWLAENNCKDVCMESTGKYWIPVYNILEQTCNVVLAHPKYVKAIKGKKTDKKDAKWIADIFKHDLVSGSFIPPADIRQLRDLVRYRWKLTNFVVGEKNRAQNCLTVSNIKLDDVFSDVFGKASSNIITRMLENPSEKITDVANFRTKGMKATDEEVLAAVDGEFCPEQAEKLRIIRSHMDSLELCKLNVESLILSVAEKYIPQIDLVSTVPGIQTFAAIGIISEIGVDMSVFPSSKHLCSWAGLTPQNNESAGKKKTTRIGRAGDYIKPLLVQCALAAIKSKKNSEIRNRYLSIKKRRGHKKAIIAIARMLLTAIYNILKKNEPYNIDLYTRSNDPPAHRTVSVDEAIFILQRQGYLVTPATS

SEQ ID NO: 91553 - protein, 348 aa, unidentified
MHFYTRQHQYYCGIDLHARSMYVCIVDQTGTVVFHRNLPTDLQHLLEAINAYRADIVVAVECIFSWYWIADVCAEQAVPFVLGHALYMKAIHGGKTKNDKIDSQKIAGLLRGGMLPLAYAYPQAMRSTRDLLRRRMYLMHHQSELLAHIQNTNSQYNLAAFEKRINYRRNRVELSDHFPDPLVRKSIEADMEVLDTLHQVLLKLEAAVLEQARDHDPVALQLIRTVPGIGKVLSLVILYEIQDIRRFSTAGNFISYARLVKPARESSGKKSGSRGSKIGNVHLKWAFSEAAVTFLRNNEPAQRYHHKLVARYGKGKALSIIAQKLGRTLYFMLKHKEVFDPIRFYQGG

SEQ ID NO: 91554 - protein, 428 aa, unidentified
MASADKPKEEKSIAAFVGIDWADQKHDIAFRAAASQGKLERCRIESHPEALNDWVLQMRERFGSQGKILICLEQSRGALIHFLMGFDCFELYPINPKQLDNYRKAFRPSGAKDDPLDAELLCQFLSLHHEQLRPWRPNDEQTRKLALLCEKRRQAIDARTALSNQLKSELKQYFPLALAVLDNDLTTVLAADFLLQWSTFESLKKAAHHKVRKFFYAHQCRSEQKIQARLERIQAAQPLTRDGAIIEASSLTVEMLARQLKDLAPYIARYEKQIEQLFAQHPDRGLFDNLPGAGRQLAPRLLSAFGSDRARFSSALEALTFFGVAPITERSGKTTWIHFRWACPKFLRQSFHEFAGHSLRFCDWAAAFYEQQRARGKGHHAAVRALAYKWIRILFRCWKTRQPYNPDLYLAALSLRSSPLATAVKNSP

SEQ ID NO: 91555 - protein, 339 aa, unidentified
MKKLYGGIDLHGHNSVVVVLDEADQVLYQKRLPNELAKILPQLAPFRTQLQGLVVESTYNWYWLVDGLQEAGYVVHLANPAAMQQYAGLKYTNDDSDARWLAHLLRLGVLPTGYIYPKEDRAIRDLLRKRSQLVRQKTANLLSLQNLLTRNTGQAMRGNQIKQLTPATIGQLVSLPEHALALQVTVAVMQHLTEQITQVERAVHARVKLRPAFQALLTVPGIGQTLALTIMLETGEIHRFPTVGQFASYCRCVGSIKLSNGKRKGQGNTKNGNKYLAWAFVEAAHFAIRYEPQIAQFYQRKRAKTKVVVARKAVAHKLARACYYLMRDTVPFDVTRAFA

SEQ ID NO: 91556 - protein, 470 aa, unidentified
MAARKDKADGAGVPGHGGDGAEVAEELTQVVEYAAAIDVAKGSGMVCTRVPGSRPDRRRQKVWQVGATFGEVTALMDHLRCEGIQRLVLESTSDYWRIWYYLAEAAGLEVWLVNARDVKHLPGRGKSDTADCVWHCKLNERGMLRRSFVPPEAVRDLRMLTRTRSRLAQDQARHQARVEKILEDALLKISVVISDLFGVSGRRFLDALVAGERSPAALAALGDPRLKASRQQLEGALTGRFRDIHATEIAVHLRLLDAINAEIALLDEQIEQHLPSVPRTAPVCTACGLAGGGHAPDCDDLGILLLGLADRLDEVTGIGAVNGRAIIAELGTDPSQFPTPGHAAGWARLTPRSRQSGETSRPGRTGKGNPYLRGGLGQAAMTAAKTDTRLGAMYRRIARKRGKQKAIVAVSRVICEIAWILICDPSARYTELGPDYYRPRSPARQTRDKIREIERLNPGKKVILADDDAA

SEQ ID NO: 91557 - protein, 429 aa, unidentified
MMDEDRNWFVGVDWASETHLVCVLDAQGNKSGERSFRHGGGGLAEMAAWILGLTKTAAEAVHVAIEVPHGPVVESLMERGFVVHAINPKQLDRFRDRFSPAGAKDDSRDGHVLADALRTDPHCLRRLAPVDATVIELREWSRMAEDLTQERTRLTNRMREQLWRYYPQFLELADDIAHPWLLELWALVPTPKKAQRVREATVAKLLKRHRIRRIDAVGVLDRLRERPIVVAAGTAEATTAHIKTVAQRLALVNRQLRQAHHRLDQLTERLGAETEPRHNAEQRDVTILASLPGIGRIVLATLLAEAFDPLQRRDYHALRCLGGVAPVTKRSGKSKIVIRRLAAHRRLGDALYHWARVAIQHDPVSRAKYAALRQRGHGHARALRSVADRLLAVACTMLQNKSLFDPNHPRHNNVAPSSRGYSPATVTLD

SEQ ID NO: 91558 - protein, 366 aa, unidentified
MGWMAPLRHLSAKLLSDRISSEWEPSMGEVTTIGLDLAKHVFQVHGVDAEGATVLRKQLRRAQVLAFFSRLPPCLVGLEACATAHYWARELRALGHEVRLMPAQYVKAYVKRNKHDAADAEAICEAVVRPTMRFVPVKTADQQAAVLLHRGRERLVRQRTGLVNALRGHLAEFGVIAPQGLRNVGKLIAIVRDERDARLPDLARQVLQVLAAQIEQLEAAVAAIEKQLMAWHKSNPVSQRLASVPGIGPIIATAIAATVVEPSGFRSGREFAAWLGLVPRQNSTGGKHRLGGISKRGNQYLRRLLINGASANLLRSKATNADPWVIRLRQRRPSLVVAVALANKTARIAWAVMHRHENYQRVAAAA

SEQ ID NO: 91559 - protein, 351 aa, unidentified
MLIIGCDFHTRFQKIAMMDSTTGELVKRRLEHGTGEAESFYAALAAPVRVGIEATLATQWFEKMLRHYGHELWIGDAAEIRAAMVRKQKTDDRDALHILDLLIQNRFPRIWVPSPAERDVRQLVRHRHKLVRFRTSVMNQLHALAMGQGLCLRKKLWTTVGRQKLESLTLDPWASRRRRELLELLDQLDPSIGELDRAVISEAESRPTAVCLMQQVGVGPVTALAFVLTVGPVSRFPNSKKLVSYLGLNPSEESTGGRQRLGAISKQGNTMLRCLLVEAAQTSARLDPELRRNYQRLKLRRGNSGVAKVAIARKLAVRLYWKLREADRPNTAARMQGSPVTPVVGESLSAN

SEQ ID NO: 91560 - protein, 447 aa, unidentified
MPLDCCERARGSVSWQRFPPDRRRQARVASRTGRRDVMEVMFDRVAGLDVGKDSVTVCVRTPGPRGGRRSVTRTFKTMFGSLRVMRDWLVETGVTIAAMESTSTYWKPPFYCLEEVMEVWLLNAAHMKAVPGRKSDVRDAEWIAQLLEHGLLAPSFVPPPEIRRLRMLTRYRDQLMADRVREIVRLELMLEDASIKLSSVVSSLKTVSARAMLTAMIDGESDPLRLADMAKGKLRRKIPDLAQALTGHFDANHARLARSMLRRLDLVEQALAELDAVIVDACRPWQRQIELLQTIPGVGPKVAQVIIAETGGDMSRFPTAAHLAAWAGLAPAMHESAGRQTPTGKRHGNKWLAAMLVEAAGSVGRMHGKNYLAAQHARLLKRRGMGRAQVAVAHSILIAAYWMLKRDEPYHDLGADWHRRRNDDAHTRRLVAQLEHLGHTVTLSPAA

SEQ ID NO: 91561 - protein, 370 aa, unidentified
MNRLFVGMDVHKEKIVAVGLPEEGNHPVMREEFGGNDLSRLVKRLRQLAKIYRVDACYEAGPCGYGLARALLGAGMECRVAAPSLIPRRPGDRIKTDGRDARELALAFRADTLSFVRIPSREEEEVRGLIRCREDIAKEVRRIKHVIAHWLLIHEQRPPKGVKGWTQAHWRWMRGLTFSSLDRTVLDHYLDVLHLLVERLKQIEQQVVALAETAPYRERVTRLRAFKGFSPLAAMRVIAEVMEFRRFPRAAAFMKFTGLVPSEYSSSDRIRRGRITKAGNSHLRCVLVEAVQRGTRNAHPGRDLLKRMACVSGPLREVALRCLTRLQHKFWKLTRRGVAGGKVKVALARELAGFVWAMMTLPETPGAAVA

SEQ ID NO: 91562 - protein, 391 aa, unidentified
MTYFVGIDIAKFKHDCFIQDHNGVVIRHSFSLRNNQDGFNILLDALNGLDHSQEIKIGLEATGHYGSNIKQFLNSNDYSFMEFNPLLIKRFSQATTLRKTKTDKIDAALISSFLMTVDYKPITHTSYHTSALKSLTRLRESLVKERSLTLVRITNVLDIIFPEFKPLFDNSLKSSTCMYILENYSSPDRISRMNVESYNKMKSKLRKTISYDKFLKIRDAAKSTVGTTDEIYVYELQILLGIYKELDSRISDLENKIIQYYRQFNSHIHTIKGVSELSAAAIYAELNGVTGFRNPDQILAFAGLDCSRIQSGESDKNGRMVKHGSSALRCVLMRCADSFALHNPVVYEYKLKKMNEGKFFRVALSHVAKKLIRTIYTLEKNDLDFDQSKLR

SEQ ID NO: 91563 - protein, 336 aa, unidentified
MSQQYVGIDLHRRRSVIVRTDAAGTVLGEARIENDPLALAAEIAKAGPAPEVALEATYGWYWAADLLAECGARVHLAHPLAIKAFEHRRVKNDRIDATLLAELLRMGRLPEAWIAPVPVRELRELVRYRHKLVDIRSGLKSQVHAVLAKEGVRVPMSDVFGVAGTQLLDDLELGDAYLVRVESLRDLIINIDHEVLMLDRRIHERLATNPSYRAVQQIPGVGPVIGAVFVAELGDVTRFRHANQVASWAGLTPRHRESDTKIRRGQITKQGSRLVRWAAIEAARAPRAHSWLKTHYHHLAQRRGKNIAAVAIARKIVTLAFYALRDGELRCLTRTA

SEQ ID NO: 91564 - protein, 316 aa, unidentified
MKFCGIDWANDHHDALSIDEHGRQLGRIRVAHSPEGLSQLDGYLEQIAGPGGKDQVACIVETTHGLLIAHLLEQGWAVYPVNPRTVERRRAPSGAKTDLIDAYLLAKTGRADFADLRRLNADSEQIQELKTLTRDQDGLVQMQTRLVNQLTACLKAYYPVVLELFGKIQQPSTLAFLRAYPTLQAARSASVEELAATLKQSRYPGARQKAQQIATHLQLPCLQASEVTTRTKSRLMLALLDQLEPLLKQIAEYDKEIERLFLRHEDLELFQALPGAGLRLAPRLLAELGDDRSRYDSAASVQALAGTSPVLFQSGT

SEQ ID NO: 91565 - protein, 410 aa, unidentified
MEVLYQRCCGLDVHKETVVACLRIVSGGEVVREVRTFETTTASLMALSAWLAENGCTHVAMEATGVYWKPVWHILDDGDFQLILANAAHVKNVPGRKTDVNDATWLADLLAHGLIRASFVPDTQTQELRTLLRTRKQLVREKSSHILRVQKTLEDANIKLDSVITDVMGMSGRAMIEALIAGESNPAKLARLANYRLRAPQEKLREALRGRVTKHHRFLLRLHLNQIDALDAAIATVDQQVQAGIAPFRCAVELVTSIPGVSDIGAQVIVSEIGTDMSRFPSESHLISLAGMCPRNDESASTRRSNRVRKGAPWLKTTLVQCAWAAVRKKDSYLKAQFLRIKARRGPKKAIMAVAASILTATYHMLKDGTLYQDLGSNHFQTRSKGQQTKRLVQRLADLGYDVALTPLAS

SEQ ID NO: 91566 - protein, 372 aa, unidentified
MDEGIKFFIGLDAHKDSTSVAACEAGREPARFAGTVGPDVRPLLKVLAKAGDPAQVSVVYEAGPTGYGLYRELRRRGYRCEIVAPSLIPRRPSDRVKNDRRDCTRLAELSRAGELKPIWVPDEAHEAMRNLWRAREDGLGMRLRARQQLKAFLLRHARRYPGKTSWTTRHERWIAEQCFDHEADRIALAEYQLAAQSADQRVQRLTFALTEATRGWRFEGVVAALRALRGIDTVSAIGLVCEIGDIGRFASARQLMGYLGLVPSEHSSGNSIHRGSITKTGNAHARRLLTEAAWNYRFPARLSGQLRERSKALPEPVRNHAWKAQLRLCKRFANLSSRGVQPNKVCVAVARELTGFVWAIAHQASPKASPVQ

SEQ ID NO: 91567 - protein, 663 aa, unidentified
MFSLKAPKNAAAAPATSTSRLDLHPVAHIADCLLDYQKQLSTSEVHSLDELQSITQAFQLVLDENAALREKLDSFHELFGDVDRASGEFASVKSDIASSVGLAQQRVDGLKDSSKEVQERFLEMQNTFSDFQVSVQKIKDCMAQIISIANQTNMLALNASIEAARAGEQGKGFAVVAEEVKNLASEIKSLVSTVDISIGDVEQGTANLNTSISTSQDALNQSMENVDSTYEVFDQITTAAGGADTVHQQITTAMSAAEQKLDEVSQSFSLEERQFDAVMEHINHANDLGTTKSSLFEDMTNLLTQIAPLTEELEKKTNEEVVAVYEATGVYTKPLERFLEKNEIKQYSISPLQSAKQRKTEIHNKKTDKKDPESIAEVYYIKELREDEKEADLYHELRTANRVYEDCLVHLRKYKVTFQSHLSIVFPGYMKLFQDGYSQISLQLLEMYPHPDRLKNKQPEKVAKKLNKQTDHSFEVCLKTAEKAIEFANKTYPGCDKEDAWVAVLVDDIHPLQDTMEEAEAKLDKIIELAKATPYYSIILSIDGIGPNLASRIIAEFGDISKFKTRGAMVAYVGNDPNRAESGDIEGYHLSISKKGNKRLRCILYLAVTCSIRSRKENPINAFYQKKRQQSTPLKSKAAKVACITKLIRTIHGMCKTGTVFTS

SEQ ID NO: 91568 - protein, 338 aa, unidentified
MELYAGIDLHSNNSVVTVLDAADRTLYAKRLPNDLGTIVAALRSCRGTMHGVAVESTYNWYWLVDGLQDAGFTVHLVNTTGVKQYEGLKHSGDFSDARHLAHLLRLGILPEGHIYPREQRAVRDLLRKRSQLVRYRSAQILSVQNLQARNLGARARCNEIKRWRPASIDALELLEEQKQSLKATLAVMRCIDAQISAVERSVLAKVKARADFRALKTVSGIGDVLALTIALETGDIGRFAGAGNFASYARTVNSARESNGKKKGQGNVKNGNAYLAWAFVEAANFARRYCVEARRFYERKKARTNGVVATKALAHKLARACYHMLKENTPFDVKRCFA

SEQ ID NO: 91569 - protein, 345 aa, unidentified
MASMYYIGLDVHKKTISYCVKDVSGRVQGEGTIPATRIDLDRWMAALPQPWTAAMEATVFTGWIYDHLKPRAAALKVAHPLMLRAIAAAKKKNDRIDASKIADCLRCDFLPESYMASTEIRERRRTLRYRNLLVHQMVQMKNKIAVLLMEAGVSYNKQKLHKVGYFRELLDTHPEIDEGLRPLLRLCRETLVRLGKTESALIRSLQRDELLRERIERLMSIPAVGPITALTWALEVGEVQRFSSIKKAISYCGLCSAEKSSADVLKRSPLSKQRNRHLQTTLIEAAKMAPRNSPALALLYDREKRNHNANRATLAVARKLVAYLVAVDRRQKDFLVIENQNCSAA

SEQ ID NO: 91570 - protein, 442 aa, unidentified
MAMRVSNELIIQHPNAAGIDIGGSSHFVAVPSDRSEMPVKEFGCYTQDLQDMAAWLLGCKIAIVALESTGVYWIPVYEVLESHGIEVMLVNARSIKNVTGRKSDVLDCQWLQQLMSFGLLSAAFRPPADVCALRAISRQRDMLLRGQASCVQRMQKALTQMNLQLTNTITDITGKTGLDIIRAIEAGERNPYALAKLRNYRIHASEAEIAKSLEGTWKEEHLFCLSQALKLYDSYQALIAEADAKLKALIAPLRRQDTGADEKKSKKRGGKNAPNFDVRDALREWVGVDLTEIGGIDVCTALKVLVELGPDLSKFKSAKHFCSWLGLCPGTCISGGKRLSGATKRIPNRVARALKLAAQGLHHSQCGLGAYYRRMAARLGKGKAITATAHKLARLVYAMLTQGNEYVEQSQAQYEEKFQERTLKYLQQKAKTLGFDLVPAAV

SEQ ID NO: 91571 - protein, 344 aa, unidentified
MEHYAGLDVSLELTSVCVVDERGGIVCEAKASSDPEDLVRYFQSLKLSIVRVALEAGPLSQWIHAGLTGAGFATVLLETRHVKAALSAMSVKTDRHDARGIAQLLRSGWYRPVHAKSVSAQEVRALLTARKLIQTKLLDVESGMRGVLRGFGLKVGPTSRGRFQMRIRELVDGHAILETASDAILAARAALEAEFKRLHRALLALVRDDPVCRQLMSVPGVGAITAITFKSAVDDPLRFKHSRDVGPHFGLTPKKYQSGELDVTGSITKRGDRMVRTALYEAASVMLTRTVRFSALKAWGMAVARRRGSRKAKVALARKLGAILHRMWIDGTDFRWSNQEAAIA

SEQ ID NO: 91572 - protein, 400 aa, unidentified
MNPVVGIDVAKEVSEVQAFLDKGKPYGKSFSIKHNREELDGFIHFLGEIKSLTGQMPVVILESTGHYHIPIIQCLEENDLLYILLNPIISHQAKKSSLRKVKTDAFDAYQLCVLYYKEDFEPYKLRGIQLMNLRNLSRQQEIVTNMYVEAKLQFHTILDQTFPEYRKVFGDLFSKVSLSILREYPTSEKILEADEEDLAERIKGYCPTRSIQWAREKARKLIHSATQNPFQKVMYQSHLINLNMYIDILFHYQGHLSELENQMISLANEIEEYKIIQSIPGIGEKIAATIISEIGEIDRFNHPKKLVAYAGIDPSVHSSGKFTATTNHITKRGSSRLRHSLYLAVLCGIRSSRNKKLKEFYDKKRSEGKPSKVAIVACINKLLHWIYALLKGKEHFLDIA

SEQ ID NO: 91573 - protein, 405 aa, unidentified
MNSVGIDISKGKSMVAAITMTKEVAVKPREFEHTELGLEQLLGVLAPLTLEGETRVIMEATGRYHEIVASTLYEAGIYVSVVNPLLIHDYGNNSIRCVKTDRKDALKIARYGVDNWGELREYTPVDSARQLLKLLSRQYNQYMKVMVSQQNNLIALLEKTFPGANDLFKSPRRDDGHQKWVDFVQVFWHSDCVIRLKEHEFIERYQKWCKRKGYNFSEDKAFDIYVYAACCGYTLPKNSSTKALVSVAVEQVIACSKSVAAVKAEMLKISAQMPEHNVVLSMFGVGDITAAQLIAEIGDVRRFNNRGALVAFAGLDPSTFQSGKYASKSGKTTKRGSAHLRKTLFQVVGTYLKRSPADEAVFQFLNRKRAEGKHFYVYMTAASNKFLRIYYARVRAFMESIDHNN

SEQ ID NO: 91574 - protein, 402 aa, unidentified
MWYAGIDWSDQHHDVVVIDADGRKVAARRFAHSVEGLADLTAFLGGVVPALDQLACIIETTHGLLIAALLDAGLAVYPVNPKTVDRRRSASGAKSDPIDAYLLAKTGRSDLVDLRRLRPDSALIQELKTLTRDQAALIESQTRLVNQLTACLKAYYPVALEFFTKLQQPSTLHFLQTYPTPEAAREASLEQLTQTLKTVGHSRAEAVARAIRQRLQQPHLTADPVTTRTKARLMLALVAQLQPLLGQIAAYDAEIQRLFLMHADSQIFTSLPGAAKRLAPRLLAEWGDDRTRYTDCGSVQALAGTAPVAYQSGTYAKAHTRSACLKPLRNALQQFAWQSTKLEGWARAYYSRKRSEGKSHSMALRALANVWVRIIFALWQSERPYQTAVFEAARQQHMRKAA

SEQ ID NO: 91575 - protein, 424 aa, unidentified
MKSEDEVVFAGCIGFDWADQKHVIKMQAADSTKIEEDEVEQRPEALVEWVGKLRERFGAGKIAIAIEQTRGAVVYHLMQYDFIELYPVNPKTLAKYREAFNVNKASCDASDADLLLELVRMHRTRLRRWVPDDKQTRLLSMLVEKRRDLVDAVTEHTNRLTGLLKNYYPQALELAGSLNTKKACDFLSTWPTLELLKAADTKQLREFYKNHRSAKEAEMEKRFKLISEAQPLTNDEAIIEMSVMMVKAIVGQLRALNESVSEFDERIAEIFAEHPCAPIFSSFPAAGKALAPRLTAAFGTNKDRYCFASEIQQFSGTAPVTEQSGKSKWVHRRYASPKFLKQTFHEFAGHSIHWSVWAKAYYDQQRMRGKRHHAAVRSLAFKWIRILFRCWKNNQPYDEQVYLDALARRGSPLVANLQLAVDHN

SEQ ID NO: 91576 - protein, 339 aa, unidentified
MKLYAGIDLHSNNSYLAISDEEDKRYYKKRLPNQEDIILAELEPYRNDLAGIVVVSTFNWYWVVDMLMDNGYKVHLANPAGIQKDKGLKYSGDKHDAFWLARLLRLGILAEGYIYPKEWRPVRDLLRKRGHLIKLRTSLINSLQGIISRNCGCQLPGKKIKQVRTNHVAPLLDANEDLALSGLVSKECIDYISQRIRDIEISVESRVELLAPFRGLQTIPGIGRIISLTIMLETGDIGRFEKVGNFSSYCRKVPTSWTSNGKKKGSGNGKNGNKYLAWAFSEAAEFFRRYDPSARAFYNRKTAKKNFMVAHAALAHKLCRATYFIIRDGVEYDPDKLFA

SEQ ID NO: 91577 - protein, 417 aa, unidentified
MNSPPETNPIQRYIGIDIHKYYVMIGGQNRHQEWTLRPRQVQMARFRSWAEKNLKPEDEVVVEATSNVWDIYDIVVPLVRKTVVANAYKVRQIAEARVKTDKEDIKRLITLLIADIVPEVWVPPMYVRELRSLISFRWRLTKQITMSKNRLHSVVQRFNLDPPEGGLLTDKNKSWWDRQEFSDLTGFQVERDLEILEHLEGQKEAIDQKLAELSNTEPWASDMVYLMQIPGFGLIFSMVILSAIGDISRFARPRELVGYAGLGAGVHASGEKYQEKSITKEGRKELRWALVEAAWVAVRSDPYWKAQLKRLEKRMHRNKAIVAIARRLLVSIWHILTKREPYRHFDEETIAYKMLIWSWAMDEKSRDGMTPQQFAKYGLLRLGIGQDLERIIRGGAPRRIAPTEEILALKPELAPPI

SEQ ID NO: 91578 - protein, 350 aa, unidentified
MKKLAFLGMDVHARNCVLGHMDSNGNFLGNLRFSTSEQNIIKALKTIKAKEKYLAIEEGNLTYWVAQVAKPYVKEVISSDPKKNALIFRSPHKKDKIDTQKLCRLLRLGELKRVYQPENDDRAIFKAAVQHYIDLRDQQTELKQKIKAMYRHWGVVSIENKAIYGEKRSEYLKMVKQVTIRNQLINLYALMDEAEATQKKAFKTVKKLGQKYPEIKEFQKIPGIGEILAHTFDAYIQTPHRFADKHKLWRYCQLGIIDHSSDGKPLGYNKLDRSGISELKALSYRAWLAALRGDNEVKQFFLGSYKNTLNRNHARLNTQRKILATMYGLWKRGEAYKPQLFLNPSEMGVV

SEQ ID NO: 91579 - protein, 607 aa, unidentified
MTDARNQDSPGSVVNFQSRERNGAFGLAARVGDMGRGADGTKSGVERRIWKVIKGASTGEPSLAGFGGVVFQGEAKAGKSDTVSTGIHPLARRARKGSPQPAVNSCAAPMKNRSVQVLPPEYNSSGGIAPHGARSGKSYLAKVTPSSPARAAAPVPKSERTIAREAPGIRLTYDSATMPKEKGKTMKEWQSITHYAGFDWARDHHAVVIVNQQGQIVADFEIQHTQAGWKAFFEKTAAFPDLAVAIETNQGAAVDQLLQAGYTVYPVNPVAAKAYRQRKAPSGTKTDHLDGWSLADALRVDGQGWRVIQPTDPLSAELRLLCLDEVTLICQRTQLVNQLQQALVEYFPAATEAFDDWTLPACWDFVIEFSTPQALFQAGRRRWEKFLHTHRMWRPETAGKRMEIFARADQFAGSAPIIQAKSRLALSLCKLLRTLQQQLDDYRKQIEELFARHPNHDLFGSLPGAKKVLAPRLLAAIGSDPARYANDAVVLQAFAGTAPISFQSGQRNQVKMRWACDTFLRHVVHLWADCFRHVSSWGQVYYQNKRHAGMSHACALRCLGQRLLKIVFRMISDKKPYDAELHARNQQKHGSWILALANKTSAASAGE

SEQ ID NO: 91580 - protein, 418 aa, unidentified
MNEENDTRTLRRYVALDIHKHYCVIAAVDREGRVVLPPVRVEHADLEGWLKKNLRASDYVVIESTTNAWHVYDLLEPLVARVLVANPIQVKQIARARVKTDIRDTLILARLLAANLVPVVWVPPLHVRQLRQLLSQRRQFVETHTQIVNRMHSVAHRHHLSHPAGKRFNEQNTAWQKDKRLSQIEQFQLGLEMENRVYIEKQINKIGREIAKMSHQKPWAESMTYLMPLPGFGVITAMTVLAAIGEIQRFETPRHLASYSGLTPGLEQSGTKNRGKGITKEGRKELRWAMVEVAQRAVKSDPLWKRRFQELQQRMHRNQAIVAVARRLLELVWYVLTRRQPYRHFSHERIAYKYLTWAWQMDEEARDGLTRQQFTRYYLMRLGIGQDLTRIALNPKYPRKLASEAELLALRPDLKHIE

SEQ ID NO: 91581 - protein, 397 aa, unidentified
MANVWAGVDAGKSHHHCVVIDADGKRLLSRRVANDEPELLALIGDVIRLADEVTWAVDLPDGGAALLIELLAAHDQALLYIPGRTVNRAASGYRGEGKTDARDAAIIADQARMRRDLHPLRAGDEISVELKILTTRRADLVADRTRVINRLRSLLTSIFPALERALPDLTRAGQLTLLTGYQTPAALRRIGRARLETWLRARNVRNPGKIATVAVEAAHRQHAALPGEALTASVIAALAKEVLALNEHIAATEQLIDSHFHQHKLAEVITSMPGIGTLLGAEFLAATRGALDSFGTPDRLAGLAGLAPAAWDSGRIHGNLRRPRRYHRGLQRVFYYSAQISIASCPESRRFYDRKRAEGKRHTQAVLALARRRVNVLWALLRDQRPYQPLPPATAAA

SEQ ID NO: 91582 - protein, 348 aa, unidentified
MVHFVGLDVSVQATSVCVVDDAGKVILEQKVATEPADIIALLSSFGVPFGRIGIEAGPLSQWLVNALTAADLPVICVETRHMKALLTAQQINKTDRNDARGIAQMMRVGLFKPVHVKTLVAQEQRMLLTSRKLLQRKLLDVESDLRGTLRNFGLKVGVVSGGRYEARIRELVVGFPRLAAIVEPLLSVRRVMRQQLAVLHKMLLDTVRDDPVCRRLMTAPGVGAVVALTYRATVDQPQRFVHSRAVGAHVGLTPKRYQSGETDYDGGVSKCGDALLRTMLYEAAQVLLTHGSKWSWLKAWGMRVAQRRGLRRAIVAVARRLAVVLHRMWVDGSEFCWSKDSAAAPTVA

SEQ ID NO: 91583 - protein, 358 aa, unidentified
MMDGRQRRRPKHGMVVMKQYVGLDVSQKETSVCVVDESGKVVFQGRARSDPGALAELLSKRAPGAERVGFETGAMSSWLWHELNRIGLPVVCIDARHAKAVLSVRMNKSDENDAQGLAELVRVGWYREVKVKSPESQATRSLLVARSRLVAIRRDLENQVRSMLKEHGLQFSRSIGSQFRRKVLELLAEDHPLRSVIGTLLRVHEQTCEEQEKLDRQVRRLAHDDCTTRRLMTVPGVGVVTALTYRHTIDDPSRFSSASDVGAYLGLTPRRKQSGETDVSGRVSHWGDRLLRTYLYEAASVLMHRTKKWSTLKAWGIRLSKRIGMKKAKVAVARKMAVLLHCIWVDGTSFQWGSEKTA

SEQ ID NO: 91584 - protein, 409 aa, unidentified
MDVVHSRCAGLDVHQATVVATVRVSAERGGRRVVTQTFGTMTADLLTLRDWLQAFGVTHVALESTGVYWKPVYYVLEDAFVLLLINMQELKHVPGRKTDVQDSEWLAQLLECGLLKASFVPPPEIRELRDLTRYRGQQARDRTQEVNRLCKVLEDAGVKLTSVVSDVMGASGRSMLTALVKGTTDAAVLADLAQGKLRKKLPELRRALEGRFRTHHAFLIEQIFAKIDFLDETIRRLTAELDRRLGPFEPMLVALDTIPGVDRKTATIIVAETGGDMSRFPSAAHLCSWAAMCPGQNESAGKRRSGKTRKGNRYLRAALIQSALAATRKKNSALQARYLRVKRHRGHKKAVVAVGHQMLEIAYYIMRDGVSYQELGADYLDRRHTERAARRHVRQLEALGFQVTITKAA

SEQ ID NO: 91585 - protein, 472 aa, unidentified
MSKGSGSGMTRGDRRRNARRERLRALLPRDGAVAGIDLAEDKQALAVIDHDVRVLARKTVRVKAFGLGEALDWAVGQARAKGFDRVTVACEPTGPRWMQVQRLCAERGLPLVCIQPLISHIAREQQDYTTHKTDESDCVMIARLAVELHCYIPEELDETWAHLRHLGRRRQQLITAQTASGQRIMDFLSVAWPAVTETCAGPVESRTWLAALEVVTARCGADPGTLAAMGREGFTALTRGAVAGWGITRAHGPICARVFAALTDTEGAVTWSRRGLLRRVADELGDLKRTRVQLRQVEADMVAVLDELGLSRLADIPGLTAVGAAAILAETGDPRRYDSSSSLVKHAGMSPSDNASGAFSGQAHISRRGRPGLRLTVWRAVWPMLQYNPVMAAKYQAMTRAADAAAAGAGPRQGTAAQAAARARRAKARVACAASLLRWIYCMVVHDTSWDPAVASGAASRHDTARTQAEAA

SEQ ID NO: 91586 - protein, 440 aa, unidentified
MPTPSLPVLDPTAAAIDVGSEQLHVSIAGGPPKVFGTTTGQLHALRDWLKENGARSVAMEATGIYWLCPYEVLEKAGLAVVMVNGKYVKNLPGRKTDMKDCQWQATLHAHGLLKPGFVPPEHIRRLQDYLRLRTDHITMAASHEQHMQKALERMNLKIHDVISDLTGVSGLKMIEAILAGQRSPVALLALCDPQIQKKKADRLRQALEGAWKDEHLFALRQAYELWQFYQKKIAECDTAIEAVLKELAGPEDPTQPAPPPATKRGGVNAPQIAGLHGLLWRLCGQKDPTQLPGVADYVLLQLLGEVGTDLSGPWKSEKQFTAWLGLAPGSRQSGKRCGSQKRGRNRAGRLFCVIARSVGRSVDKALGGFYRRLKGRRGGLVANLALARKLAEMFWRLMVHGRAYVEAGLKKYEEKVAQTEQHLLQKLARKYNLVLQPAAN

SEQ ID NO: 91587 - protein, 351 aa, unidentified
MLIIGCDYHPSFQQIAWVDTETGECGEQQVQHSNGEAEKFYRELKLRGVHVRLGMEATGHARWFERLLAELKYELWVGDPAQIRAARVRRQKTDRRDADHILKLMVEDRFPRVWVPSPENRDLRQLLWHRHRLVQMRTRVMNQLQAIALNEGVRRKKGLWSQSGREQLESFRLAPWAERRRRDLLELLDRLNPRIGELTTAIEQEAGRRPEARRLMTHPGVGPLTALAFGLIVGPVERFGCSKQVSSYLGLVPCEDSSADRQRLGHISKQGNTLLRFLLVEAAQAVVRSDPEWRGRFLHLVMRRGRPIALVAMARKLAVHLYWMARQGTEYQASPVSVRTWGSSKLGHGVK

SEQ ID NO: 91588 - protein, 316 aa, unidentified
MSQFSVFVGIDVSKEHLDVHLLPDEKSWRVANDETGCAQMSERLKALPGPVLVVMEATNVYWRLAATRLASAGLSAAVVNPRQVRDFARATGQLAKTDAIDAQVLALFAQRIEPPVRALPNEQCQVAAELLSRRAQLMGMRVAEKNRLSTARAAKVRKDIAATIAFLEKRLGALDAEIDHWLKSTPIDQSRANLLKSFTGIGENTAKTLLISLPELGSLSNNQIGALAGLAPFARDSGNKRGQRQIRGGRASVRGALYMPAITAIRCNPVIRALYQRLINAGKHHYVAITACMRKMLVILNAMLRSNQPWRNPQET

SEQ ID NO: 91589 - protein, 440 aa, unidentified
MAPLSNQQFKAFVGLDWADTKHDICLQQAGDDRREFDCIPHQVTRIDEWAKALHQRFGGPIAVALELATGPIVSVLQKHAFVTLFPINPAMLAKYREAFKPSRAKDDPTDAELALDLLLRHPERFSPLRPQSAGMRSLLSLIEQRRELVGDKTRFTNRLTNALKQYYPQALEWFDDIDTVLFCDFLTRWPTLPAVRRATRKTLETFFHAHNCRRAQLIEGRLESIRCAVSLTDDPGIVAPHRLLALMLVAQLRTALAAIDVFDREIAAVARTLPDFDLFDSLPGAGPHLTPRLLAAFGEQRERFKGADELQKYSGIAPVTERSGKKCWVHWRWQCPTFLRQTFVEWAGQTINKSFWAGAYYRQQRAKGSSHQAAVRALAFKWIRIIYRCWQTGTRYDESIYLNALRKRGSPLLGNLGLPGVARSGRRVTQLLPGPWVATA

SEQ ID NO: 91590 - protein, 355 aa, unidentified
MTNTKYIGLDVHKESISIAVLNSAGKVVMECVIETKASTLLQFIHGLRGDVHLTFEEGTWAGWLYDLLKPYVTELVVCNPRKNALLKEGSKSDRIDARKLAELLYMSKLSSVYHGEHGLRLLKELSRSYLTITKDLGRVMNRLKALYRSWAIPCAGTQVYAPRHRAAWLAKISEAGVRRRAELYYQQLDALRPLHQQARKELLAEARKHRATKLLRQIPGIGPLRAAHLVALMQTPHRFRTKRQLWTYSGLGLETHDSAQYRVVEGQLQRSNKPVTLRGLNTNHNHDLKDIFKGAAMRASTAAGPLHDFYENLLAKGRKPTMARLTLARKIAAITLIVWKKEVRFDANYLKPQAA

SEQ ID NO: 91591 - protein, 341 aa, unidentified
MEITTIGVDLAKKSLVMVAAGQRGKILVKKKMNSEQFFNYLLSLERSVVVVFEACGGSSYFARKVRELGFKAMLVNPLKVARLRLTQKNDFNDCIAIIELAQREGTRTIAVNEIWQQDIQSVHRIRSRIVKSRVELQNQVHGLCLEYGIVLPEGTKFKIKFYEAIESADNELTARMRRILKNLYEDFIGLEKRQEELGKEIDQIANEREECQRLMEVPGIGGITATAFIAAVGQANNFKNGREVSAWLGLVPRQNTTGGHVKLGRITKKGDSYLRQLLVHGGRSVLVSMKKFPNKHDENFKKKIIRISTGGGFKKASVAVANRNARVMWSLLSTGQSYKIA

SEQ ID NO: 91592 - protein, 388 aa, unidentified
MTQTPVPQPTYSAADFDRTLILALEVSEKSWVVAAHVPGLQGSKPRRTLSPTAEALLEAVETYRARAARVGRDVGRVVLVYEAGYSGFWLARWLARRGVETFIVQPSSVPVDRRVRRAKSDGIDAELLLRTLLAWLRGEPRVCSMVPIPTEADEDARRCVRERQDLLGERVAIANGIASILATLGARGYDPMRRDRRQRLEGVRTALGDPLPPQARARIGRMLDRLELVLTQIAALERQRDAVLDEAAPGEAERMIQRLVRLRGIGVQSATLLVREAFVRPFANGKALGAYAGLSPTPYSSGGTEREQGIGRAGNARLRTVLVELAWIWQRYQPGSAIVGWFRDRLGGAARRLRKVMVVALARKLLIALWKFATQGVIPEGAALKPAA

SEQ ID NO: 91593 - protein, 356 aa, unidentified
MSNHRRAVAMASSTGMVFCGIDVSAATLCAVAQREGEWKAEPRQFPNSGAGHRQLMGWLRKSGGAVRVTLEATGVYGLDLALVLDEAEGFAVEVLNPKKASDFARSLGRSKTDKTDAAALAEYSRRMPFVAWRRPERPVLELRALGRHMISLSEEHARLLNRLHAAQASRTAPLCVRQDLKRAMAGIQKRLLRLRREARARICRQHDLERKWLRLIAIPGIGETSAVQILSELAALDERMTVRQWVAHSGLDPAHEISGTSVRKASRISRQGNRYLRKALFMPALTAARFDPHMKAFYQQLLARRKAKLQALTAVARKMLHAIYGIFKTDTPYDGAKLFPALAASVVLQPQTIHTC

SEQ ID NO: 91594 - protein, 354 aa, unidentified
MRVLRRRHPMELHTIGIDLGKTVFHMVGLNLRGEVVVRKKFSRTQLLRFTANVRVGLIGMEACGGAHFLGRALREQGHEVRLIPAQYVKPYVKTNKSDYIDAEAIAEAVARPTMRFVPIKTDDQLDLQSLHRVRERWVMRRTAVINQIRGLLLERGITLRKGRCHVGAALPGILEDADAKLSSALRMLLAQLKLELDHLDMRIDEADALIKKTARENEACQRLVAIPGIGPVTATAVIAAIGNGGAFRKGREFAAWMGVVPREHSTGGKQKLLGISKRGNSYLRRLFVQGARAVLQQHTKQSSGLSVWLAQLISRSHRNVAAVALANKLARIAWAVLAKNESYRPPVLADVAAA

SEQ ID NO: 91595 - protein, 391 aa, unidentified
MIYIGIDVAKDKHDCFITNSDSEVLFKAFTIFNNLDGFNNLYQKIASVMDDVTKVKVGLEATGHYSYNLLGYLIDKGLPTYVINPLHTNLYRKSLSLRQTKTDKVDARTIASMLMSDVNLKSYSDTSYHNEELKSLTRYRFDKVKERAKLKTSVSRLVCILFPELEKLVPTLHMASVYALLSEFPSAKHVATAHLTRLTNLLSKSSKGRYGKDTAITFRDSARASIGSNMPAKSLELKHTIKLIQELDSEIDEIENEIKIIMDEINSPILSIPGINYRMGAMIIAEIGDFNRFDSPDKILAYAGFSPSTYQSGQLDGAYAHMEKRGSRYLRYALYNATKYVCHWDPTFAAYLAKKRAEGKHYNVAISHAVKKLVRVIYHLEKTKQQYIKAA

SEQ ID NO: 91596 - protein, 430 aa, unidentified
MKSNTQNAKIEAITEKTLVLGIDVGSETHYARAFDYRGIEYSKKPFKFSNTEAGFVTFKEWILDLKERHEKDKVVLGMEPTGHYWFNLGKFLQDNEMKPVLVNPHHVKKSKELDDNNPTKNDRKDPKVIAGLVREGRYMIPYLPDGVYADLRTASNIRFQLQAELTRIQNRISRWFNIYFPEYKTVYGKPDAKSGILILKAAPLPEDILTLGIDGVNQIWRDAKLRAVGKARAKTLIEAAEHSVGSKEGAVAARMEIRMLLEDYESRSIRLQEVMTLIEGLIKQIPMAEKLLEIKGVGIRTVSGFLAEVGDISRFNNPKELQKLAGLALVENSSGKHKGETTISRRGRKRLRYLLFEVAMSLVAKNPEFRELHNYYTTRRLNPLKKMQSLMAIAAKLIRVFYVMLTKGVNYDPKKMVNDIKRPAVYLQTA

SEQ ID NO: 91597 - protein, 401 aa, unidentified
MESPIVSIDVSNGNSHYMCFIKNNKRFGKVKKIDHDIEGFKRLLEDIQKLEAETNEKVCAVFEATGVYTKPLERFLSKNSIKTYIINPLESARKRKEEIHNKKTDKLDPISISKVYYDKEEMMELTKKDETYNWLRKKNRLYEDQLNHLRKYKVTFQNQLSICFPGYLDLFKDGYSDIPMTILKKYPHPDLLKNKKAETVARYLEKNTCHTHKVSLEYALKIIEFAKKTYPGCEKDDVEVEIFKILLDKVIETQRECEKTLNEMITVASTLEEYRYISSIDGIGPNLAARIIAEIGDIEEFKSREALVAYAGLDPHIYQSGDQDGKHLKISKKGNKYLRCLLFLAVGCSIRGAKDNPVNRFYQKKKQQSNPLNSKAAKTACTAKLLKIIYGICKNKTTYER

SEQ ID NO: 91598 - protein, 372 aa, unidentified
MNYNTVYVGMDVHKESFTFCAYTIDAEKGSHFQRTEADYKNVLKYLEFLRTVYGNDANFICGYEAGCLGYTLYHQLTEHDVNCVILAPTTMLEQRSKRRIKTDRRDAEIIGKCLAQHNYSPVHIPTATDEETKEFLRMRDDHKLALKKVKQQILAFCLRHNYRYDGNSHWTAAHIKWLKSLNPEALYKEILDEYLLTYTTLSDKVERLDKRIEELASKDEYRESVKKLCCFIGIKTHTALSVLIEVGDFQRFASAQKFASYLGLVPGEDSSGDEQTRLGITKAGNRHVRMLLTEASQCYARGQIGFKSKELKSRQAGNSPQVIAYADKANERLRRRYYKMVLGKSKKHNVAKTAIARELACFMWGMMTDHIT

SEQ ID NO: 91599 - protein, 327 aa, unidentified
MKGTRLAIDLAKGVFQAVLADGRSKIVWKARWRRHQVLKKVARLEPCVVVMEACGSSHYWAREIGRLGHEVVLIPAHRVKAYRQGQKNDLTDALAILEASYRADLKPVPVKSESQQALHAIYMIRRRLIGNRTALANQIRGLLGEFGHVLPKGLGTLRRRLPELLEEVDRHLAVMMADQYEELRALDERIKQVTRRLEQMAKQDERSRRLMTLPGIGPITAVLLTAHCCPQAYKNGRGYSAVLGLVPGQHSSGDRIRLSPITRSGNQEIRMSLIHGGRSVVRCSDRHDDEISQFARRVRDRRGKNIAAVAVANKLARQAWAELKAAA

SEQ ID NO: 91600 - protein, 413 aa, unidentified
MEGLQPLYRRVAGIDIHRMVHVVTTLIEQADGTIQQETRQFGGFKRDCRALAAWLVEQDIELVVMESTGIYWKSVYSHLERAGICAWVVNAHFVKHVPGRKTDVTDSQWLAVLARFGLVRGSFIPPQDLRELRLVSRYRRKLRFMCGTETNRLHKILDDAGIKLGGVVSDLNGVSARRMITGLISGVSIDTMLSMAHGALKCTREDLRESLDGELTGRHLVVLKHIQHHIDMLEHELAEMDAYLLAAMQPYQWAHQLLQTIPGIDQIAAAMILIEIGDDMTRFGGADRLAAWAALCPGNNESAGKRKSGRTRKGNAIIRYILCECANAAAKTKSSLASKYKKLMVRKSHKKCIVALAHKMIKLIYLLLTRMQTYFDPQIDYQAISAKKNVPRWIKQLKLLGKWPDKVQPTANT

SEQ ID NO: 91601 - protein, 378 aa, unidentified
MPSETTIHLAIELSVSSWLVAARPPGVEKSRLHHIEGGDTTALLALIAELRTRASTKLGKPAEVVCCFEAGRDGFWLHRALTMHGVTVYVLEPTSILVNRRARRAKTDRLDAEGMLRVLAAWLAGDRQVCSMVRVPTPEEEDAKRPHREREHLVQERLRIENRIAALLFTQGIRKRPSLRSWERDIAELRTGDGRALPSLLRVELNRLRRRLVLALELIREVEAERVEALAETADDEMTQKIAALQRIRGIGTNFAAVLVREVLYRSFANRRQLASYVGIAPMPYQSGGMDRDRSISRAGNPRARTTLIQLAWLWLRYQPGSALAAWFRERVGTLQGRTRRIAIVAMARKLLIALWRYVETGVTLDGVEFRAEADVIA

SEQ ID NO: 91602 - protein, 345 aa, unidentified
MTNNIQFSSVCGIDIAKSVMQVYKVTSDGVVSNKAVKRADFLNEFRNIPPALIGMEACGGSQHWARELQSLGHTVHLMPPKLVKPYVTGLKNDKNDARGIYKALEMSVREVPVKSAAIRDLALLQTMRTKRQREKIAKINHIRGILTEYGLVMGKSINAFLAKAGSLIVQLKERADVSPYIVSELTALFREVKEAMEKIKELETNIDSIANTLKQYDLFRSAPGVGPITAATMLVLLCNPAVFKNGREFAAYIGLAPKSSGSGGKNFVTHIPKKCECNNDVRALLVQCAHSICRCKHKSDWVSSILARKPKKVAIIAIANKLARQLWIMAKKGEKFEKRFILAAV

SEQ ID NO: 91603 - protein, 349 aa, unidentified
MKYYIGLDAHSKTCTFVVLNESGDVTHRTIVKTSEGALLGFLASLVGEKILAVEESHVSQWVYVLLHEEVDKLIVCNPLHLGKHHGPKTDYRDALRIAQELRGNFLRPVYHDESKWIQLRVLVSGYLDLVTEIVRTKNRLKAVFRSEAIDTSGSKFYSSKERSKELSHEHGRFVAESLFSQIEYLEQRKLEFKAIFAKNMKIYRPLKNLASIPGIDAIRANIIMAIVCMPHRFDSKYKFWAYCMLVRYVQISDGRVYGSKKIHARYELKSLFMGAAENALLMKSGTLIDYYEDLRKRGIDHRSAKIALARRIAASVLSVLKNNAKYDDLYHEVQTERTKLRKTLNQVSI

SEQ ID NO: 91604 - protein, 355 aa, unidentified
MNDSKFIGLDVHKTSISAAVLDHDGKLVMQSIFATHAAAVLSFIHGVRGSLRVTFEEGTHSSWLYDLLRPQVSEVLVCNPRKNSLLKSGNKSDQIDARKLAELLRAGLVSPVYHGQTSTVTVKELGRTYTALTEDTTRVMSRLKALYRSQAIATEGKKLYTKRRREQWLKELTQAGRRYRAERMFEQLDALQGFRRQARRDLFVECRKHAATAILTSIPFLGPIRAALLIARVQTPFRFRGKRQFWAYCGLALETRSSADYRLVEGELHRAKKPVFIRGLNLNHNHDLENIFKAAATTASACPGPFRDYYETLLGRGMKPEMARLTLARKIAAISLIVWKKGERFDPEQLKAQAA

SEQ ID NO: 91605 - protein, 356 aa, unidentified
MQNDHQSSESVILGVDTHLDIHVGAVISQAGKLLGSHIIQSNHAGYLEVLDWARSFGILERAGIEGTGTYGAALTRYLIKNDIYVVEVNRPDRSKRRLEGKSDPLDAENAARTVLSGSSKAIPKMQSGACEALRIISVARRSAVKARTQAINQLRALLVSGPQDVRDKLWKSKPHECVAACINSDESESSPLRIALYSTLRSLAKRWMALTEELNELDESLDKLTRKYASHLRSQFGVGPQTAATLLAVAGDNPERLKNEAALASLCGVNPLPASSGKTVRHRLNRGGSREANNALWTIALVRMRSDPRTKIYVDRRTGEGLSTKEILRCLKRYIVRELYPLILADLTYANRPLLT

SEQ ID NO: 91606 - protein, 343 aa, unidentified
MQSISTIGLDIAKSVFQVHGADAAGQVVLRRQLKRRHVLAFFEKLPSCLVGIEACASSHHWSRELQAMGHTVRLMPPAYVKPYVKRQKNDTTDAEAICEAVTRPNMRFVPTKTVEQQSCLMLHRARHLFIRQQTAVINSIRAYLAEFGIVAPVGRRGVEQLLEVVADTADRRLPEVARACLAALASQLRALKAQILELDRRIIAWHRSNATSKRLDAIPGVGPALATALVASIADPVAFRSGRDFSAWVGLVPKQNSSGGKDKLGSISKQGDRYLRSLFTAGALAVIRYAKIHGTGHRPWLTGLLARRPTKIAAIALANKLARMAWAMMARNERYREPAALAA

SEQ ID NO: 91607 - protein, 351 aa, unidentified
MSKRTKAVAISTIGIDTGKNTLHMIGLEEKGSIVLREKISRHRIAARLVNVPPCLVGIEAGMATHYMARELVALGHEVKQVPPTFAKPFRQGHKNDFRDAHAIAEAVQRPSTRCVPIKTDDQLDLQALHRVRSRLIGDRTAVINQLRGFLLEHGIAVRQGHRFLRQQLPQILATRSDVLSPRMIRIIGDLVEDWARLDERIETVTDEIEGLARADVSCRRLMTVPGIGPIIASAMVAAIGDGTAFAKGRDFAACLGLVPRQMSTGDRRILGRITKRGNRYLRMLFIQGARAIQLHPASWAKHSFGPWLTAGARRLHCNVLTVALANKLARIALTVLVQGRNYETRIETVAA

SEQ ID NO: 91608 - protein, 432 aa, unidentified
MNNVAGIDVSKGKSMVSVLRPFGEVVAKPFSIGHTGSELKELADYLKSLDGETRVVMEHTGRYYEPVARFLHDEGVFVSAVNPKLIKDYGNNTLRKVKTDKADSRKIARYGIDNWAELRQHTPMDTIRMQLKTLNRQQSLYTKTKTMMKNNLIALLDQTYPGVNALFDSPVREDGSQKWVDFATTFWHVDCVRNMSLTAFAERYRKWCKRHGYNFSQSKAVEVHAGAQDLIAMLPRDALTKTMVRQAIDALNAISASMERLKAEMQALAAQLPEYPVVMAMHGVGDSLGPQLMAELGDVTRFTHRNAITAFAGVDPGADQSGTHEAKSTRVSKSGAPELRRALFLVMDCLLKTQPQDDPVYRFMDKKRAEGKPYLVYMTAGANKFLRIYYGRVKDIWHPWREIKEASFLVGERYCIYAKNHLMTERERLRCF

SEQ ID NO: 91609 - protein, 408 aa, unidentified
MELTPMHQRVVALDVHQAKITACALVEHDDGRLEVIQREFGAFKRDRRALAQWALEIAPQVVVMESTGVYWKSPFAALEAVGIVAWVVNARHVKAVPGRKTDVADAQWLATLARAGLLRASFIPPLLMRQLRLVARQRQKLVGMCSAEKNRLHKVLVDAGIRLNVVVADIHGASARAMVKALIAGRPMHEVLDCKGRLRASRDDLFEALSTEQFSAVHRFVAEEILQHIEQIEQRIARLDNYLLDGLKAYEPQLRLLQTIPGIDLQGAAMLLVEIGADMDHFGSAERLASWVGICPGNNESAGKRKSGRIRRGNAWVRRLLCEFAQAAARTRSALKAKFESLAIRKGHKKSIVALAHKMLRTIFAMLSTGTHYQDKTVDYEALSVARNAPRWIKMLRKHGFIATPASA

SEQ ID NO: 91610 - protein, 400 aa, unidentified
MLLFFEVITMIFVGIDVAKDTHYAAVSDDSGAVLVKPFAFQNNAEGFCLLLKKLSEFDRSKLLIGLESTGIYSENLICFLYESGFRLAVINPIQTATLRKTAIRKTKTDKVDTMLIIKSLMVNSYRLYSQRDADFLKLKTLCRFRQNLKKSKARLKIQLAGYVNLVFPEFGKFFKSGIHIAASYALLKKYSSPKEIAALRTSTLCTLLSKASHGRFGKDTAEALKSLALSSVGVKNPYISIQIAQTIAQIELLEQQIKDLNSAIEEAMESINSVLMTVPGIGAVNAACILGEIGDIKRFSKPCKLLAYAGLDPTVRQSGQFTAKSTRMSKRGSALLRYALINSAWQLTLNDTTFKAYYDLKRSQGLNHYGALGHVAHKLTRVIFKLLTSDTPFNPAKLVA

SEQ ID NO: 91611 - protein, 321 aa, unidentified
MDKYTEIYGVDISKDVFDYYGSKTGYGQFSNAEKGFASFFKLLPKGALVVVEATGYYHYCLAAYLYNHGVVVSVVNPLSVKRFIQMKLSKVKTDKSDSKLICEYGVQQEVPLYTAPKAVQSECLQLFSLLAIYLKKLTATKNKKKGEEVLGIPSDYVYNSLKRNLEHLNKEITGIETRLLELVKKEQQKQLTLLTSIPGIGIKTALYLIVITDGFSRFETASQLCSYTGITPTIKHSGSSVRGRSRISKVGNKRLRNLLFLCAFSACKQNRGCREIYERLVGKGKSKKLALIAVSNKLLKQSFAIAKSGLPYDESFVSKLA

SEQ ID NO: 91612 - protein, 361 aa, unidentified
MPGTMTYVGFDVHARSTHAAAIDVMTGELTRMRFGAGIDAPVDWLKTLSGPVRACYEAGPTGSGLYRAAVAAGVGIEVIAPGLTPRGKGDRVKTDRKDAELLARCLIAGSLHPIVVPSMHVEAAREVTRAHDACRRDLMNARHRVSKMLLRHGRVYPEATTWTQKHRRWLAAQQFREPMSEFTWADLIACVDGLTARKKTLTERIGKLATDPAWWPTVARLRAFRAVDTLTALAVHLELGGDWARFEKATRVGSWLGLTPSRSQSGEHDYHGSITKTGSQLARRLLVEAAWHYGREPRVGATLANRQEGQPDHILQISNRCQHRLHHLYTSMRARGKHHNVTTVAVARELSCFLWAAATAP

SEQ ID NO: 91613 - protein, 344 aa, unidentified
MDHFAGMDVSVKETSVCILDDAGKILKEVKVASEPQALLKVLGNPAYCFKRIGLEAGPLSQWLFSALAEAELPVICVETRHMQAVLKAQINKTDRNDARGIAQMMRVGVYRPVHVKTLRSQKLRMLLTHRKLLQSKAIAIENDLRGTLRNFGLKVGIVGTVRFEARVQELIEIVPDLVVLVEPLLVVRRALREQIVILHRRLLAIVRDDEVCRRLMTIPGVGPVVALTYRATVDVPARFRKSKSVGAVFGLTSSRYQSGEIDWSGRISRCGDEMMRTMLYEAAQSMLHSKKWSWLKAWAMQIARRRGMKRAIVALARRLAVIMHRIWIDGTEFRWTREPATAAA

SEQ ID NO: 91614 - protein, 312 aa, unidentified
MTKIICGVDVSKRRLDAHVVPSGAFESFDNDATGIAALAAFCHRHGVALAAMEATGGYERVPFLLLWEAGIACGLTNPRSVRCYAEAMGILEKTDRLDASVIARFAVAKELRPTSPPTQSQQRLTALVARLRQVTDDLVVQKQRRSSAMNAEMTTSIDEVIALLKRQARTLEGEIASLIDDDPLWSQLDAALRTVKGVANRTVARLLAELPEIGIYSNKAVVKLAGLAPIAHDSGAKTGQRHIRGGRAGIRSILFLVADIARRFDASLAEFHQKLTKAGKPKMVVRIALARKLLVRLNAKARDARELYALAT

SEQ ID NO: 91615 - protein, 346 aa, unidentified
MRFYNRQHQYYCGIDLHVKTMYVCILNATGEVLEHRNVRSTPEALRPLIAPYREGLVIAAECMFTWYWVADFCAAEGIPFVLGHALAMKAIHGGKAKNDKIDSRKIASLLRGGLLPQAYVYPAAMRATRDVMRRRLHFVRKRAELLAHIRNTRAQYNAPAIRDNLRLHTVRAAVSLRFADASVRTSIEADVSLLNHYDAVIAELEQHIGREARRHDAAALHRLQTVPGIGEILGLTILYEVHDIARFPRVQEFVSYARLVKCAKQSAGRITGTSGAKIGNVHLKWAFSEAAVQFLRHTREGKHVLRQIEQHHGKRKALSILAHKLGRAVFYILSRDVSFSMDRFVA

SEQ ID NO: 91616 - protein, 341 aa, unidentified
MTILNKNNEQESNGHYAGIDVGAKELVLVTRSNASSCKAQKFPNDAKGRARLVGKLVMLPGVRVCMEATGVYYLNLANDLDDAGIALMVLNPKASYNFARALMKNSKNDAVDAETLAQYVERMDFVPWIRPTKEKIALRSLSRRIESLTKQKAAAKNHLHALTSSQETPKVVLKDVKKGISQLEKRIEMLSKETRSFIKKHPELEHVFQLLTSIKGIASTSAIALMGELLLLPQGLSNREWVKFAGLDPCSFTSGSSVHKKEKLSKTGNYHIRSALYMPALCATQHDPYVKAYSQHLIANGKEPLQALCAVMRKLLHAIHGMLRYNKPFDNTRFYAIPESA

SEQ ID NO: 91617 - protein, 343 aa, unidentified
MGRKIGVDLHKNSFRVCYYQNDKKYDFETYHVSVKGLEHFKKGLRKTDELAVESTGNTGHFFRAVEGKVNRIRVVNPMQFKVISQSVKKTDDEDALKIAKFLSKDMIPEVRMKSKAESQLGSLIGTRDKFVKLRTALKNKVHNILNANGIVTKTELLTSDKSLDKVLGHKLDETCLFELEIITKEIRNLNEAIVKIDEQIKDKGSKLDGHKNITSITGIGDTSAAIFLNTIGDVKYFKDDKALASYFGIVPRMRISNETAHMGRITKMGNKIARTALVQCSYVAIRYSPYLRAFYDRLKAKKGSGKAIIATARKLLGIIYNTLKNKWVFEDFASYKLAPQCAL

SEQ ID NO: 91618 - protein, 317 aa, unidentified
MTGCYDTNKKLQIVNRPYTDAGIELYIESLPQDSHIVMEHTGNYEQRLAQALINAGHKVSILPGVTIRNYAKTKGMGNKTDKQDVKVMLMYSEKHLDSLPIYRIQSDNIANAKQLRSLLEGLTKRLQATKNQRDAHLLIPNASKVVTQSYDRQVESIEEEIALVTTELDDLNINQADFNRAVPQSIDGVGKKTVDEIQLLFNTTTGLTIENIPQFIKLTGLAPSSNDSGSSVRGSRKISKGGFGKLRSTLYMVGLGICTKSKKDSVFKDMYLRLRRKGKCFKVAITAVMGKLLKVILTLVIRNEMFDPKKHISSIAK

SEQ ID NO: 91619 - protein, 349 aa, unidentified
MAESRFSSTGERVYVGIDVHKATSTVSCVCQRRIVKTATVPADPARLAVSVPRWFPGATLSSAYEAGFSGFVLHRALTQAGITNIVVHPASVAVAANDKVKTDRRDAQQLALDLADGRLRGISIPTEAEELARLLPRTRAQIVAHRATITRQIKAKLHQFGLITPASRRLMSSRYLREIAAWELPTELRISLTLLAEQWRFATRQLLEVRRLLREQAKAQVVLETVYRSVPGVGEIVARTLATELGDMTRFANERALFSYTGLTPSEYSSGTAIRRGHISRQGVSRLRHVLVETAWRALPRDPILQAMFDRIAATRGKQRAIVAIARRLIGRIRACFRHGTTYAVGTAG

SEQ ID NO: 91620 - protein, 343 aa, unidentified
MKLIRVGVDLAKNVFQVHGVERKEKAIWRRRLRREDWLKVLLETVEPGCEIGMESCGGAHHWARRLQEKGFTVRLIAPQFVKPYVKSNKNDANDAEAICEAMARPSMRFVAVKTVEQQDIQAAHRIRSELTKQRTAKANQIRGLVAEYGLIAPKELSHLRVALPLWLDDMHNGLSERFRRLLNGLWGDHLALDARVGELDREITQIAQSDPVAKRLQQLRGVGPIIATALVAAVGNGEQFANGRQMSAAFGLTPKQHSSGGKERLLGISKRGDAYLRTLLIHGARSVIRTAKDKDDRLSQWVTRLAARRHPNVVAAALANKTTRMAWAMLRNGTDYQPDRVTG

SEQ ID NO: 91621 - protein, 307 aa, unidentified
MYVGIDVAKDRLDVHVRPTGEAFIVARDGEGLAALVIRLGALAPRLVVLEATGGFEVTVASALAAAKLPLAVVNPRQIRDFARATGKLAKTDALDAAAIAHFAEAIRPEPRPIADEQAQALGELVARRRQVVEMIGAETHRRRQMTQAHLRRRIDRHLAVLQAELSEIERELDDSIRGTPVWRENDDLLESVPGIGPATARPLLAELPELGTLGRKQIAALVGVAPLNRDSGTMRGRRRTWGGRASVRTALYMAALVAARHNPVIAAFYQRLRAAGKPAKVALVACMHKLLLILNAILRDRRPWQHT

SEQ ID NO: 91622 - protein, 370 aa, unidentified
MNDLIRIGMDTSKSVFVLHGVNSAEQPVLRRKLRRRQMHEFFAKLPPVQIGIEACGAAHYWARELMALGHEVRLLPPQLVKPYVQRGKNDAADASAICEAMSRPRMRFVPVKTAEQQAALMLVGVRDQLVARRTQLSNMIRGYAAEFGVTAAKGLDKIEPLLARIAREAGVPEEAKTLFAVLGEGFAALKPKLRKLETELRSRYRHNELSRRLAEIPTIGPVGAVLLPMKVPNPHAFRCGRDFAAWLGLTPKDHSTAGKQRLGVITRAGDEALRSVLVVGATAVIQQIKKGRGNPSPWLIALIRRKPPKLAAVALANKTARIAWKLMVSGERYNRQHPRNGFVPPTGSLAPGAHRQGRVAPPAAVACGQP

SEQ ID NO: 91623 - protein, 372 aa, unidentified
MTTHHIGLDVHCQFTEFAVVTSSGRVTKRGQCPTTIPALVAAIESVKRPRYVAFEEGPMAEWLYRSLLPSANGVTACEPRRNRWIAHDGEKDDPLDAAKVAQLHRGGYLKAVHHPESEQRSMLKGHVSVYHDRVRQRVRTANRISAQFRSHGVVIQEDHFATAAQREGLLRRLPADPLLRKDLKLLWESYDLTALHVAELERSLKQLARKHEPLRRFQEVPGIGPVWAATFYAYVDTPWRFRSKEALWKYLGIGLERRHSGNGPVQLQVPKAANRRLKWMILSAAVSANITKLPTSHANIVTHYPRSASRTNALPPVGMKPISKKSFSEHDLWCNRLASPGRLLARAETRGKRQSSTRFTPGILLDPDRQLQ

SEQ ID NO: 91624 - protein, 424 aa, unidentified
MSKKKQTAAGLGAIYARVCGMDVHKDVVVACVRILAMKDGTVQSTLRRFGTMTADLLELRQWLAQEQVTHAAMESTGVYWQPVFNILEGHFEVWVVNAQHIKKVPGRKTDIKDAEWIAQLLQCGLLKPSFVPDREQRELRDLTRQQTKLLQQRSAVANRIQKVLERANIKLGSVATEVLGVSGRKMIEALIAGQRDVGKLAELAEKRLRHKIPQLQRALEGELTEHHGFLLRRLLDQYDFFEKEIARISERLAAIAPPSFRAAVERLDAGAGVAERGAQALLAETGTDMSRFPSHKHFASWAGRCPGNRESAGKRKSGKTPAANRHLDAVLTEIAHAAVRKKGSYFKSQYHRLAGRRGKKRAIGAVKHSILVSIYFMLRDNKPYTDLGANYFDKLNPQQQIRYHVRKLKELGQGVELSALNDAA

SEQ ID NO: 91625 - protein, 368 aa, unidentified
MKQQTSATTETGNKIRKIVSFTGKTVFVGIDVHKEDWQVAVYHEGIVLGNHRMRADSQQLIEHLNKRYWGASFKCVYESCAWGFELHRELKAADIDCIVVHAADVPGSNKELLNKDDSNDALRLARHYATGLIHGIYIPQEEVQKHRNLIRFRKKLVNDLNRSRNRLKSLLKYQGIIIPEQFDNAQWSNNFLEWINHQAERDVLLRDTIWLMLEQIKQLRQLLLKAERKVRELMRDKKYNQQARLLMSIPGIGCITAMLFLLEIGNLRRFKSFDQLNSFVGLYPGTFSSGERNRDTGLSFRRHNQLRTHLVEASWQLIRRDPAMMESYQQLIKTMKGNEAIIRIARKLLRRMRAVLLNEKPYQMGLIA

SEQ ID NO: 91626 - protein, 415 aa, unidentified
MDVIHERCAGLDIHKKTVVACVLRSLPGGVPERQVRTFGTMTAELEQLREWLIECGCSHVAMEATGVYWKPVYNVLEERGDLQLLVFNSQHLKTVPGRKTDVKDAEWIATLLRHGLVRASFIPERGQRELRELTRYRTALIRERANEVNRLQKTLEGANIKLAAVLSDITGVSGQRIIEALLEGQTDPEQLAELAHTRVLLHKRAALEQALVGRLSTVLRFVVRQQLQHLHDLEAQIEACDAELQELLRPFEELLQRLCGVTGVGPRTAEIIMVEVGLAIQRFPTARHVAAWAGMCPGNRQSGGKRQHARARKGSPWLRAALAEAAWGASKSKRGGYLPALFRHLAARRGNKRAIVAVGHSILVTCYYLLTRGGAYEDLGETHFDERDRQAVVRRSVRRLQALGYSVHLEQSEAA

SEQ ID NO: 91627 - protein, 373 aa, unidentified
MNSILYVGMDVHTSNYTICTYAPEEDRVFALVQVEPDHLNIVRYINRLKEHHGQGTRIVCGYEAGGLGYSLYRALKAYDVECVILAPSTMPKAPNERKTDHRDAAKIARCLAYNMYRPVYVPDKQDEAVKEYIRMRDSTKDQIKRLKQQIAALCMRWHKVFNGTKKLWTIAHYKWLQRLQFEDPIAQEAFDEYVIQLNEANARLKRYDAKIEQWAELPRYAQKVSKLTCLCGIKTLVALAAIAEVSDFNRFPNANRFASYLGLVPGEHSSGAHINRLGITKQGNSHIRRLLTEAAQCYSRALPGKTSAALMKRQQGNDPKVIAYANKGNERLKRKFRSIAAHKPKPLAVTATARELACFIWGMMTDHLEQVCR

SEQ ID NO: 91628 - protein, 364 aa, unidentified
MSSLSQRSLVHLGMDVHKDSISIGILRPDDSMDVERIFHDEESVRRFIARMGEPSRLTACYEAGPTGYELERLLKRLQVRCDVVAPSLIPKAPGDRVKTDRRDCRRLARLHRAGELTPIRVPTREEEAVRDLCRARGDVVIDLDRARRRLSAFLLRHGQVWRGGSKWTLKHEDWLLGVRFHDAALATTYGHYRSIVHECRLRLDALEADLLVYCDKDPYAEGIHRLCCYRGVNTIGALTLVSEVCDWRRFAKASSFMGFVGLVASEYSSGERTQRGHITKAGNEHLRTQLVESAWAYQSGPYVGPRIRRAQEQCPPATAERAWAAQVRLCGRFRRLAARKNVKSVVATAVARELAGFLWGEMTA

SEQ ID NO: 91629 - protein, 346 aa, unidentified
MKKIFIGIDFSKEKFDATLIKAEGLKECAPSMHEVFDNKTSGFRRLVKWVKGLSEKLPVDTWLFCGENTGAYSIGLSNYLYASGYDMCLENAYKIKHSAGILRIKNDKADSKAIAEYAMRNYDKVRLHKPQSASLTCLREVFLYRHSLVRQKVALTVRRDEKRFTQEKSDARAFMSFTSKHLITEINKAIDKCDQKIKETIASDDELREIFDIITSMPGIGVQNATCLMVYTDNFQKFDMDSRKIACYYGIAPFGRQSGTSVNSRPKVSPFANRMIKALLSQAALAAIKSDINIHNYYQRLIERGKHPQLVHNNIKNKMLHALVAMVRNRIKYNPDYVYQTNKSVA

SEQ ID NO: 91630 - protein, 373 aa, unidentified
MKKIIFLGIDVDDKAFHATAILGEGKKEQVMQFKTKPSVSALKSKLQKYIDEGSKVKACYEATYIGFNLARDLKDLGIDCEVIAPSSVPRAPGQTAKTDRIDSGKLAKYYKNGLLTVVNVPDEKAEHVRNIVRSRMFLAQQLKDLKRHILSTCRRGRLDYRKSVEFKNPAFFTNLHMQWLETELNKSEFEELQFNIKMLLSEMRQLELQISKYDDEILRYSEMPEYKKKVEALACYRGLDVLGSMSLITELGDIRRFDHPTKLASYAGMDLREYSSGGRERKYGISKMGNRRIRTTAIEACQRAYKIPIISKRLKARREKTEPKFIEIADRCMKRLHKKSTRMIFAGKPINKVKVAVARELLCFVWESLRVAA

SEQ ID NO: 91631 - protein, 418 aa, unidentified
MKFTWKLRETICNDPQVCRIVDLPVYYELETNNGNRDYRIQIGGHYMNYNTVYVGMDVHKESFTLCSCKYEDEKASHYQRTPASYKNVLRYLAFLRTIYGEDTRFVCGYEAGCLGYSLYHQLENFNVECVILAPTTMLEQRSKRRIKTDKRDAEIIAKSLAQHNYSPVHIPTKMDNQTKEFIRMRDDHKAELKKIKQQILAFCLRQGYQYDGSGNWTAKHVKWLRSLKTEGLYKEILDEYLLTYTILTDKLNRLDQRIEELASEEEYKEPVSKLTCFLGIKTHTALSVIVEVGDFQRFASARKFAGYLGLVPGQHSSGDDRNGLGITKAGNTHVRRLLVESAQSYTRGKIGYKSRVLRSRQAGNSPQIINYADRANERLRRRYYQMVLKDGKKYNIAKIAVARELACFIWGMMTDNIY

SEQ ID NO: 91632 - protein, 467 aa, unidentified
MSKGSGMTRGDRRRNARRERLRGLLPRDGAVIGIDLAEEKQAIVVVDPDGRVLARKTVRVKAFRLGAALDQAVEAARAKGYAHVTVACEPTGPRWMQVQRLCGERGLPLVCIQPLMSHIARQQQDYTTHKTDEADCVLIARPATELHCYIPEELDETWAHLRHLGRRRAQLITAATASVQRVRDFLSVAWPVAPEACAGPFDSLTWLAAVQVVASRCGGQPGKLAAAGLAEFTAAVRGALPGWGGKRISGRVCRAVFAALADTEGAVAWCRRGLFRRVADELGDLQRIRAQLRTVEADMVSVLGELGLSRLGDIPGLTAVGAAAILAETGDPCRYDGSSSLVKHAGLSPAENASGAFEGQAHISRRGRPGLRLAVWRAAWPLLIHNPVLAARYQAMTADADARAAQAQPGTGSRQASAAAAARAQRAKARVACAAALLRWIYSMVVHGTGWDPAIASGTASRPAQAA

SEQ ID NO: 91633 - protein, 423 aa, unidentified
MEEIFGEEEEAEPVARVAALDIGKATLTACVRVPHEDKPGRRRQEVRTFATVTGSLLELRDWLTCQGVTLCVMEATSAYWKPPFYLLEDAIECWVVNARDVKNVPGRPKTDRLDAVWLAKLAERGMLRPSFVPPPWQRELRDLCRYRRTLIQERTREKQRAEKLLEDTQIKLSSVISDIFGKSGRDMLDALIAGQRDPHVLAELARGSMRGKKSVLQEALTGHFRDHHGYLLKMMLDRTDALTAQIEALTGRIDEAIAPFAHQVTQLDEIPGIGKTGAQELIAEIGTDMTRFPTAGHLVSWAKYAPRARQSAGKNKPGTTGKGNPWIAGTLGEAGIGAARTKTFLGSRYHRLARRRGKPRALVAVGNSILIIAWHLLSDPDARFTDLGPNWHDRLAPLRRKRQLVAELERLSGKKVLLQEATA

SEQ ID NO: 91634 - protein, 421 aa, unidentified
MSKRRYQSKEFKSVDWSEVDQRIESERVVVAVDVAKEDFVATVLDGAQEALVTFKWRHPQDTAEVLACVLSLGKGRRLEAVLEPSGTYGDVLVWQLRQAGVALYRVSPKRVHDAAEIFDGVPSLHDAKAAYLIGRLHLQGISQPWQEPSEERRELKAIQARLSVCKGREQAACNRLEAHLSRHWPEILCILPLGSATLAVLIGAYGDPASVAAEPSAAEELMRRTGRPGLSEEKIQAVLDSAQNSLGVVPVGPERALLQWLANDSLAAHQEVAQVEREIEQRLAHDTLLAILAMVIGKVSAAVLLASAGSPLDYPNAASYLKALGLNLKERSSGKHKGQLKITKRGPSLARFYLYFAALRLIVRDPLVKRWYQLKSNRPGAMKNKIVIALMRKLAKALWHSARGARFDTNKLFNLKTLAGA

SEQ ID NO: 91635 - protein, 269 aa, unidentified
MSSFHLGLDVAKAKPDCALRLPTGKLRHKVLSNNAAGFGALCKFLAEHKAQEVHVCMEATGTYWEAVAEFLADRGYQVSVVNPAQIKTFGQSLHTRTKTDKVDAGLIARFCAQRTPPAWQAPSPAQRALRALVLRLDHLQSMHTQESNRLDVAREAVREDIVKHLQWLQQEMDGLKQRIDQQLGGGGDDAGLKAKRDLLDSIPGLGERTIAVLLAFYGDLRRFGNARQAVAFAGLDPRQHESAAACMHRPDCPRWAMPSCARACTCPPW

SEQ ID NO: 91636 - protein, 317 aa, unidentified
MWFVGIDVSKATLDAAALSGTGEIHRTKADNTNQGHAELVRWLQEFPDVLVALEATSAYHRTLVATLQMAQLTVSVLNPAQASYFVKSQHRRNKTDKADALWLAVYAKERRPTPSLPTSYLAQSLTRELQALDKDLTRLKNRLEAAEAGDVHPEILASLRRRIEMLEQEKKALEERLERDTKETRGHELTLLTSNPGIGTRTACHLLAELGDVHRFANARKLVAFAGLTPARFESGTSVGGYTAISRLGSSSLRRMLYMPSLAAIRFNPVIKAFFEKLVSRNKPRKAAVIACMAKLLKIAYGVLASATPFAAKPTPA

SEQ ID NO: 91637 - protein, 343 aa, unidentified
MEYGAIDLHTKESEIRIIDEKGAMMFERRIATTRTRLTDVFGSRAPLRILLESGTGSEWVAQHLEGLGHEVVVADPNYTPMYGQRTRRIKTDRRDVAALAEANRLGIYRAAHRVSAPQRDVRRWLRVRDQLVHVRRQAINLMRAQLRSEGVRVPTGAAETFAARFQASEASAAVRAAMAPLLELLAALAPLLGRAEQWTRSAAKADPVTRRLMTAPGVGPVVALAFQATVDDVGRFATPGAVTSYLGLVPREDSSGERQRKGAITKAGPSRMRVLLIQSAWHLWRSPAGSATLHAWARRLGERRGRRIAVVALARRLGRILWAMWRDGRDFDPARVGRLAVAA

SEQ ID NO: 91638 - protein, 357 aa, unidentified
MRRYRLAVDKRKPQRTSQIFIGIDVHKIQWHITIRTEDVELFSGSIPGKWEALKKLLDRYADCQKQAVYEAGYFGFRLYDHLMDYGVDCVVTPPSLVPQEYGNHVKTDRRDSRKLAHLLAKGLLKRVWVPSPEQRYERQVIRRRKQLVADRVRTQNRIKAELCFYSIELPAPTGQWSKAYVGSLQHLRFDNRWMQESFARLLEEYEFLTQQIERQTKLLRELAETDQYEERVKILRSTPGIGLISSMEYLLELQDLKRFQRGNRLAAYVGLTPSQYSSGEKLRMGRITAIGKNDLRGTLVEVAWRLIAKDPAMREKYERIKARAGSKRAIIAIARITLLRTRRMLLDRQPYVVGLAA

SEQ ID NO: 91639 - protein, 343 aa, unidentified
MEHYVGLDVSLELTSICVVDQRGKIVREGVVASNPEAIGAFITSRAPHVVRIGLETGATSTWLWTELNKMGLPVICIDARHAKAALKMQINKSDRKDAMGIARIMQCGWYKEVCVKGLDSHAIKALLVSRALLVKIKRDLENEMRGLLKNLGLVIGRAKRNTFAVRAAELIKDCPGLAAVVGPLLKAREAIEQQIADLDRKVMRLARDDVQVRRLMTAPGVGPITVLCFLATIDDPARFKKSRSVGAYVGLTTRRYASGEIDRTGRISKCGDKMLRSYLYEAANVLLSRVAKWSTLKAWGLRLAKQRGLKKAKVAVARKLAVILHRMWIDGTAFNWSAKEAAA

SEQ ID NO: 91640 - protein, 487 aa, unidentified
MKIKRAKVSRSILLQRRGQEGPIRSAARLPVINPHAAGIDVGSMEHWVCVPEDSVPEGEANVRPFGAYTRDLDRLVEWMRACKIETVAMESTGVFWKPLVQKLEAAGIPVILVCARHLKYVPGRKTDIKDCQWIQQLHSYGLLNGSFRPAEDICCLRSLMRHRQNLVASCGREVQHMQKALLQMNVHLHHAVSDMVGVTGLRILDAILAGDRDPKKLVELRDNACRKTTSADLEKALEGDWREEHLFALKQGLQTYRHLLGQVVECDEQIEKALAAVEIPKPVETTSPAPKNPQAKVADSAKPKKKRFHPNKTGPSLKKDLSEELTRICGVDLTQITGLNVLGVLLILSEIGADMTRWRNAKAFCSWLGLCSRNKISGGKVLDSRTAHVVNRVAILLRTLAPAVGKTDTWLGIFHRRMRARLGPAGANTATARKLACLIYHLLKFKEEHIDVDQILLQEKIRKLRIVRLRKQAKELGLELVDKQQSA

SEQ ID NO: 91641 - protein, 412 aa, unidentified
MDVLVERCAGLDVHRDSVMATVRLPGERSRQREQHTRGFGSTIAELHALGDWLQGFGVTLVGMEATGIYWRTVFDALEPRFRCWLLNARHLRNVPGRKSDVIDSAWICQLVEHGLVRPSFVPPPEIRRLRDLTRLRKAQIEERTRAIQRLEKVLQAAGIKLTSVASQAYSVSARAMLEALLGGVTDPAELAELARGRLRLKIPQLREALAHRFDLAHHGVLVVQLLTHIDSLDLAIETLDQRIAHVTEPMAELIELLCTIPGVKLRTAQVLIAECGSDMSVFPTVGHFASWAGICPGTNTSGGKRYSGKTRPGSKWLRQALSESAQAAARSKGTYLASHYWQIRGRRGTPKAIGATRHDILVAYYHIVRDRVPYRELGPDWLARRYSPEHRARRLVRQLEALGFNVSMEAAA

SEQ ID NO: 91642 - protein, 316 aa, unidentified
MAQEMYVGIDVSKAELVVAVRPSGERMTLSNDRTGIKRLVGRLGELKPQLVVVEATGGLQRRVVAGLWMAGIAVAAVNPSWVRNFAKGRGVRAKTDRKDAELLALFAERERPEARPPADAETQALQELVMRREQLVEMSVAEKQRLHRASGTMRKELRHHIAYLEGRIKELEQDIDKTVRRSDGWRRKSEIVRSVTGFGPHFSAMVLAKVPELGTLNRKQIGALIGVAPMPDDSGSRHGRRAIAGGRFEVRNKLYMCAMVAARSNPVLKQFYERLVARGKPKKLALAAVMRKLIVILNAMIKTNSLWRPQCPAANV

SEQ ID NO: 91643 - protein, 343 aa, unidentified
MQAITTIGLDIAKSVFQVHGIDAAGNVILRRQLKRRYVLAFFQKLEPCLVGIEACASSHYWSRELSALGHTVRLMPAAYVKPYVKRHKNDAADAEAICEAVTRANMRFVATKTAEQQSCLTLHRARHLFIRQQTAVINAIRAHLAEFGIVAPVGRNGVEQLLAVVGNSNDKRLPDVARACVAALGAQLRMLKAQILEFDRLIMAWHRSNEASKRLDDIPGVGPALATALVASVADPKAFRSGRNFSAWIGLVPKQHSSGGREKLGSISKQGDRYLRSLFTGGALAVIRYAKIHGTKHRPWLTALLARRPTKIAAVALANKIARMAWAMMAKGERYKEPAALAA

SEQ ID NO: 91644 - protein, 332 aa, unidentified
MWYLGLDVHRRSVTLAGINSEGTHLASRSYPSEDPTALLEAVQRLRPYHAVVEACGSYHWIYERLRQGGEVTLAHPYKLRALWTARAKTDKLDAIRLAQLLRADLIPAAYVPPPSYQRLRDLVRSRVRMVRDRAEVYHHLHSILARFNWHSPYVQPFCKRGVAWLRTLDMPTPFDLVRRELLDRLTHYDQAIRQLEEQMDTLAADYPQIEALTLLYGIGTFSALLIVAELGEVDRFDRGEEVAAYAGLTPHVRQSGSQEHRGAISKSGSPWLRWILVEASIKVIRKDPALHDFHQRVRRRSGWRRARVAVARKLAVICWKRLRAWEQQHPAA

SEQ ID NO: 91645 - protein, 311 aa, unidentified
MYYIGIDVSKKDLSVFNGKDLNFTNKEGLKSFKKYLKKKYNLSEIAIIFEPNGIYSFYLKEFCAENSIKAYIINPKQSHNFARALGIRPKNDKIDARTLYKFRKLIDLNDIKVPVIDQQVKTLSGYLVSYEFALKQRISLSNHLESLQDKRLIALIKKDLKRAKKLEDNLFNDILEYVSKNQNLKEDYQRFLTISGVGDKMAIALLTLFKTYQGTNRVQITALAGLDPVRRESGTSVKYREKISKNGKGIYRKIFYLPTICATVHNQKIRVFYQRLLANHKTKKLAIIASMRKLLLIAHAMYRDKTEYIAV

SEQ ID NO: 91646 - protein, 355 aa, unidentified
MTSTKYIGMDVHKESISIAVRNSAGKVVMECVIETKASTILQFIEGLRGDLQVTFEEGTSAAWLYDLLKPHVTKLVVCDPRKNKSMREGNQSDKIDARRLAELLRLNHLTPVYHGEHGLRTLKELVRSYLTVTKDLARVMTRVKAIYRSWAIPCTGKQVYARCYRAEWLGKINEPGVRRRAEFYYQQLDALRALRQEVRRDLLTESKKHKAWKRLCQIPAIGPIRAAVLLGILQTPHRFRSKRPLWNYGGLAIETHSSADHRSVDGHLERSKKQVLVRGLNRNCNHDLKNLFKGAAAVASSKPGPFQEFFTALLAKGMRPEMARLTLARKIATIVLIVWKKGVSFDAQHLKPQTA

SEQ ID NO: 91647 - protein, 405 aa, unidentified
MNQFSAEGMKDAGPVSGLAGVRQAVEQAADVYGVYIGLDVHKETIAVAVAECGRGAPEYYGEIPNTPKKVARLLERLSARYGGERLLWVYEAGPCGYGLYRQILTTGHDCEVVAPSLIPQKAGERRKTDRRDALGLARLSRAGELTAVWVPTPEQEAIRDLTRAREDMKKLELKARQTLGAFLLRHGKVYPGKSRWTQAHFRWLETVTFDSPVQQIVLQEYIEAVRVAQRQVAGLEQQMREALPHWSLAPVAEGLMAMRGIGLISAMTILAELGDISRFDSPRQLMAYLGLVPSEHSSGSSRRQGGITRTGNGHVRRVLVEAAWNYRFPARKTREIERRAEKASVKVQGIAWEAQKRLCGRYQHLMRAGKLKQQVTTAVGRELAGFIWAIACEVMGRDHGSRATA

SEQ ID NO: 91648 - protein, 337 aa, unidentified
MKVTLIGIDLAKSIFQVCGVNQAGKRVFNRQVRRAKLMALLIQHPDATMAMEACSGSNYWGRELQQRGFQVKLIPPQHVKPFVKGNKNDRNDAFAITEAARRPNLRCVEPRTLAQTDMVQVHRVLDRMIRQRTALINQLRGFLNEYGVVVSRGKEKLLAAMPDLLEDGDNGLTPSSRALYQAIYDDWRQMNAAIDRVEKVLKGQAKADETAQRLMQMKGVAEKIATATIAHAGNGTSYRSGRHFAANLGLVPKEHSSGGKQSLGGITKRGNRYLRRLLVQGAWSVIRNVDSSDDRMSRWAKQLIERRGKHKAVVAVANKMARIMWSMLYHQTAFRAN

SEQ ID NO: 91649 - protein, 336 aa, unidentified
MQHYCGIDLHSNNHVVVVIDEEDKRVLEKRLSNDLSLTLKVLSPYRETLQSVAVESTFNWYWLVDGLQEHGYNLQLVNTAAVKQYDGLKYSGDHQDAFHLAHLMRLGILPTGYIYPKAQRAIRDLLRRRLSLVRSASAQLISVQSQIWRSAGIRIKSETLRKPDFKAMLLDGYTLQAANAGLAVYAAIQREINALEQSAYQAVKLTKNFEVLQTIRGIGKILGLTIMLETGDIHRFASAGNFASYCRCVDSTRISNSKKKGTGNAKAGNKYLSWAFSEAAHFSVRFEPLAQRFYERKKAKTNGIIAIRAVARKLARASWMMLKHQQPYDAKLMFPG

SEQ ID NO: 91650 - protein, 349 aa, unidentified
MGEVSTIGLDIAKSVFQIHGVDADGTVVIRRRVGRAKVLEFFSDLPPCLVGMEACATGHLWARELKKLGHDTRLMPPTYVKAYVKRGKNDAADAAAICEAVTRPSMRFVPIKSVEQQSALMLHRTRDLLIRQRTQLINALRAHLAELGLVAAKGREGLQQLVTAVTESSDERLPSNARFTCQSIVTQLHELQTQINGLDKRITQAHRANADSKRLDAIPGFGVILSTAVVATMTDPKAFKTGREFAAWIGLVPRQNSTGGKERLGSISKQGDRYLRRLLVLGAISIVGTARTRPDKYPWVTELLGRRPAKVVAVALANKMARTAWAVLARGETYRALTRSSSAAIAAAA

SEQ ID NO: 91651 - protein, 370 aa, unidentified
MAKSTPLFVGLDVHKDSIAVAHAAGGRPDPPVFVGAIGTRQADLDRLIRRLQGKGPELRFVYEAGPSGYGLYRYLTGKGLACDFVAPSLIPRRPGDKVKTDRRDAVELARLSRSGDLTAVYVPTVEDEAIRDLCRARDTARITLKDAKLRLKAFLLRLGLHYVGRADWNAAHKRYLAKVVCPTPAQQIVFQEGVRAVDEQVDRLQRIEAELQALAPCWPRYPVVEALQALRGVQWVVALTVVAELGDLTRFDNPRQLAAFVGLVPSEYSSGSARRQGGITKAGNGRARRVLVEAAWAYRHPAKVSLHIQQRIDRLPKALQDLGWKAQVRLCKRYRRLIARGKHPNVVVTAIARELIAFMWAIARAMPARA

SEQ ID NO: 91652 - protein, 355 aa, unidentified
MNDAKYIGMDVHTATISAAVRDASGNLVMEATLETKCETILEFVHGLRGSLHVSFEEGTCASWLHDLLKPHVTEVLVCDPRKNALLRVGNKNDREDARKLSELLFLNKLHPVYHGETGIRTLKELARSYLTLTRDLTRMMNRLKAIYRGWGIACGGQQVYAPRYRAEWLAKITEAGVRRRAEIYYQQFDVLVALRQGVRRELLAESRKHPARRLLRQIPSIGPIRAALLMALMQTPHRFRTKRQLWAYCGLALRTYDSGEYRFVGGQLKRSKKAVTIRGLNKNHNHDLKNIFKGAATRAAATAGPLQNFYEARIANGMKAPMARLTLARKIAAITLLVWKKGVRFDAEQLKQQAA

SEQ ID NO: 91653 - protein, 324 aa, unidentified
MDKINHYCGIDVSKDTIDVKSIQTGHKVYDNNFKGFRKLLKESFPKTHFVMEATGVYHEKLAHFLYNKGCSVSVVNPLVIKRFSQMLLRSTKTDKADSEMIFKYATKNHPNHWKPLAAYIEACKDLNGVLSLLLKQRTALLNKQHSLQSKGCKETITLRCIKHCIKNLNLRIKLLEDQMEHYIELHEPGLYNRLKTIPGIGKKTAVFLIVITDGFRHFESSKQVSSYLGLSPSILTSGSSIKGQSRITKSGNGHIRNLLFLSSFTACKYNPACKSLFDRITQKGKSKKLALIAVANKLLKQAFAIAKSGESFNPEYVSMHPTMR

SEQ ID NO: 91654 - protein, 359 aa, unidentified
MTAMSIVAHTHPFVVGVDTHARNHVYAILSANTGALLESRDFPATGAGINRAIDWVARRTAGSADTLWVIEGAASYGAILAGTVASHGFPVAEAPRMDARKRRGVGKTDALDAHQIAISTLPLPVDKLRRPRLHDGIRQSVRILVTARGSMSKDRTRSINALNALVRGNDLGIDGRKKLTSTQVTEVSKWRSREEELSLSIARTEAVRLARHVLLLDEQLTANENQLDELVKVSEAAPLLEETGFAAISAAKCLAAWSHEGRVRNEAAFASLAGVNPIPASSGNTVRHRLNRGGDRSLNSALHMVAVTKMTHDAKTREYAEKRRAQGRTNKEIRRCIKRYLARHIYRTLNASATATATP

SEQ ID NO: 91655 - protein, 405 aa, unidentified
MYPRWDLMIMSAPNKDAGSRARSMRGMMVWTRPFNNGVKCARMSDTFIQTYKERAMRELTTIGIDIAKNFIQVHGINSKGKCMLKKRVSRDNFLAFMANLPRCLIGMEACGGAHYWAHELINLGFDVKLMSPRKVKKFVDNHKNDSKDAEACAEAVTRSNMRFVPVKTKVQMEIQALHRIRSFYIKQRTGLTNMIRGILLEMGIAIPKGKSALVKRLCILLDADTAHLSDKMKIVFQDLYDDLKRLNEEVDRHTASLETLAKKDEYCQRISTLPGIGPITATAMIAKIGNGSEFKKGRELSAYFGLVPKQHSSGEKQVLGSISKHGDRYLRQLLIHGGRSSMKAAMKKDKKTGLFEKQDEHSQWIRKLVERIGKNKTSVAVANKNARMIVALLKNQTTFAPALAH

SEQ ID NO: 91656 - protein, 346 aa, unidentified
MRYSTTVGVYLAKNVIQISVVSGRGKELSNRSLTRKKFAEFLGKQKPSLVAFESCATAHYWARAAERHGHEARIIPAKAVAPFRQGHKTDSNDALAVAEAARRPNIKEAPIKTVEQQGLQAILRARDRLIQECIAQSNHLRGILLEFGIAIPQGFAALLRTLPEVLEDGDNELPDFYRPTLHRMYHHLLELREDIDAMTREVGHLVKNHPVCGRLTDIEGIGPIGAMSLYATLGSGAAFSKGREASAYVGLTPRQYSSGGKANIIGLSKRVGNRKLRSVLIQGALAYVYRMKEPRTSKDRWLKELIERAGPRRAAVALANKNVRTAWALVAQGTEYQRRGQLEMAA

SEQ ID NO: 91657 - protein, 400 aa, unidentified
MISVGIDVSKGKSTVCILKPYGEIVSKPFNITHTQKDLSELSSMLFRLNDEVKIVMEATGIYHLPVLTYLQEKGFFVSVINPYLMKSYRNESLRKAKTDKIDSRIIANYGIDHWFKMKEFQTSGEIYEELKLLGQQYRHYMKLHLLSLAELTHLLDLTMPGIKNLLASWNETNRKDKRSDFVERFWHYDVITSMSEQEFTEEYILWAKEKKYIPSQEKAKVIYTLAQESIPTLPSETSSVKMLVTEAVRVLKEVDATLGLILSRMQEIAKTLPEYSVVREMGGVGNTLAPKLIAEIGDVRRFRNGKALVAFAGIDPPPYESGQFVGCNRKISKRGSASLRKVGYETMRSLKMRSRPEDPVYRYVVKKESEGKSKKSAKIAGLNKFLRIYYARVTELYKNI

SEQ ID NO: 91658 - protein, 402 aa, unidentified
MNCVGIDVSKGKSTIAVMRPFGEVVVSPFEVCHTVNELSELARQLKSLDGETRVVMESTGYHHTPVAWLLHDAGLYVSVVNAMLVHDYGNNSLKRAKTDKKDAVKLANCGLDHWLTLPRYVPEEDTRLMLKTCYRKYQQYSKVQTMLKNNLISLLDIAFPDANRLFTSPPRADGSEKWVDFVATFWHCECVCGLSEKAFTAKYQKWCRKHGYNFSQDKALDIYASACGRFGVMPKTNTAKLLVEQAISQLQTTSAALAALKQEMQSLAASLPEYPVVMEMFGVGPTLGPQLIAEIGDVRRFHSKKALVAFAGIDAPPYQSGQIDVRSRSISKRGSASLRRTLFLVMGVLLQCAPMDEPVYQFMDKKRSEGKPYRVYMMASANKFLRIYYASVKAYLDSLEHD

SEQ ID NO: 91659 - protein, 343 aa, unidentified
MKRSYTVGIDLHKNSFTYVMLDPRGQISRREKVTIHAKSVERFLQQLPQKSETTLEATSSWGWLADALQDRGHRVHLAHPLKVKVIAECRAKTDKVDAEALARLTAVGWLPEAYLAPADVRQYRRLLRHRAALVSQRTQLKNRVRALLAQYPFVEVDLSRAFSQKSRRALRQIQLPQGDQRCLDSLLDTMAALDERIKEAEGWIEEQMRGNAQVNRIRQIPGIGLILAHTILSEIGDIQRFKSAKALCSFAGLVPTVRASAEHVFYGRLTKQGSRWLRWALIEAAVHAAGKVPQWKNSVESLRARKGAKVARVEIARKIAKAIYHMLKEDRDFYIQPSDSACR

SEQ ID NO: 91660 - protein, 343 aa, unidentified
MKYVGVDLHKQTISLCVVMQKAGQRVVVKRETLRCDEPRRVQSWFRRLGAFQVTVEATSSYEWFVQLVEPLADRVVLAHPKKLRVIAESTRKTDKLDAQVLAEFLSLGMIPAAYRPSPRLREHRALVRQRQYIQRRITSAKNRLRHILSHYNADVKYLFSEKGQAYLGELPLSAADRFVVRQLQASLKHWNSQLVEIHTELRKFAKKAPEVEREARQVLESMPCVGPVTIEVVLSELGDVRRFRSQKQVAAYAGLAPGIRESASRTKQLGITKEGSGLLRWVMIQTAWRLVGKTRRWGVVYERLKARTGSKKAIVAIARRLLGVMVAMLTSGRRYCLASEGRT

SEQ ID NO: 91661 - protein, 464 aa, unidentified
MGHARARKIPAQLVEDEEYQLRHERVAGIDIAKAKADVCTRLPPQRDGGRRASRVEEVPATAKAILALAVRLIADGAELVVMESTSDYWRMWYYLLEGAGLSVQLVNPAHARQLAGRPKTDRLDAQWLARLAEMGLLRPSFVPPPEIRALRDLTRTRLQLVRDRSREWQRLEKLLEGALVKLSSVVHSLAKVQSARAILEAIAAGERDPKALAALAHPNVKGGRAAVEEALGGMALGDHHPMLIRVHLDHITLLDRSVAEVEDEIEAALDAIPAAWGTDPGGETGPDAGRGPDPAVLPAAERLAEIPGVSPALARAIIAETGLDMTRFQTADHLVSWAGLAPVARQSGPRSRKPKKGQGDAYLRGYCTQAANGAARTDTFPGERLRRLSRRLDGNRARCAVARSILVIVWHLLASPDDRFADLGPGWHQRKTDTDRRTRSLMNQLRALHPDADVNITIVPGTAA

SEQ ID NO: 91662 - protein, 406 aa, unidentified
MSTVIHFIGLDVHKESVSVSIAPANSTEVRFYGNIGGALDDVDRLIKKLAQPGVELRFCYEAGPTGYPLCRHLRKRGYICEVVAPSLIPKKASDRVKTNRRDSDSLARLFRAGELTGIYVPDAADEAVRDLVRCREAARIEQLKARQRLKGFLLRHGFRYAGQSSWTEAHRRYLATLAMPFAAQRIAFQEYIEAITVAGERLARLTSAVEDAAVGWSCEPVVRALMSLRGVNVLTAMILVAEAGDLTRFDSPVQLMSYFGLTSCEESTGDKRVLGGITKCGNGACRRALVEAAQHYRLAPRVSVGLQRRQEKQPREVRAIAFKAQQRLHARHKVLSGHRKKACVVVTALARELCGFVWAIACQVSAPQKVKMRVEKSTPGKKSARTYELDARKSFVKKERAGQDPK

SEQ ID NO: 91663 - protein, 368 aa, unidentified
MKDYTGKTIFVGMDVHKKTYSVTVICDSCIIKRDTLKAEPEDLISYLKKRFGSGKIKTAYEAGFCGFHLHRTLEAAGIENIVVHAAGIETSNSRVKTDKRDSLKIAVHLSEGKLRSVYIPTVEQEDHRTVTRLRDTFCKERARIGNQIKSLLFLHGLIPADNKKKASQKWIESLSRFEMPPGVKFAIEKFVAMWLEFNEKIKEIDLEIKKQAIKDQAVDAIYQTASGIGPTSARVLANELGNLQQFKNERQLFSYIGFTPSEHSSGEHTRQGHITKQGKPIVRKILVQAAWVAIRHDIELQNIYEKIAVKSGAKRAIVAVARRLIGRIRACFRTGELYEAKKVERPTLKFKKLPKTKIQSTLKHKLVA

SEQ ID NO: 91664 - protein, 405 aa, unidentified
MRYYLGVDWADQTHAVWVVDESGTKIAARAVSHTAEGLGEWGRELDEWRAQGIALWAAIERPDGRVVDCLLDHGVVVYPVNPKALDRARDRFRQSGAKSDPFDARVLADFLRTDHAHLRALQPSSEAAQELKLLTEDCQRHIRQQTRLVNQLTATLKAYYPRALEVAEVTSALAREFLPAYPTPEALTALTERQWQRWARAHRLPEARAGELWAVLRQPQLPVPAHVVRAKARLMQTLMEQLRPVVAAVAQYRKAIDDFFASMPAAQWARTLPIGKHGITAPTLWARLGDAPGRWESFRHLQAHAGTVPVTKRSGKQQRVVQFRFACDKALRYVVDQVAYLSLLSSAWARPYYDQQRARGHAHRQALRALGAKWLKIIFIMWQRQVPYDEQYHLATMTRQQLGRR

SEQ ID NO: 91665 - protein, 489 aa, unidentified
MKRTKKTSTTNTRSSSRKRSKAWRIVHPNAAGIDVGASSHYVAVSPDAVPDGKPAVRSFESFTVDLDALVEWLKACGVETVAMEATGVYWKVLFQKIEAAGIEVLLVNARHVKHVPGRKTDVKDCQWLQQLHSYGLLEGSFVPPDEICRLRTLVRHRATLVSDAAQAVLHMQKALTEMNIQLHHVVNDLCGETGMRILRAILKGERDPEELVKLRDSQITRSTPEQMKQALKGTWRQELLFVLQQSLQAFDFYHQQMDECDRQLEEVLKALPAAPALPKPSPGQANDPLAAQNPKPKGYQSRKRNEPERDLGPELARICGTDLTKAHGLRVLSVLVIVSEIGTDMRRWRNAKAFSSWLGLCPNNKISGGRVLSSRTRQVVNRAATALRMAASGVAQTETWLGSFYRRMRARVGPAAANTATAHKIATVVYHLMKHQRPFVDRDLALYEKRVYRTKLARLRKQAATLGYKLVEIPEDQDVKSADERTLSE

SEQ ID NO: 91666 - protein, 347 aa, unidentified
MRFYTQQHPHYCGIDLHARTMYLCILNQAGAIVLHRNMKADPDSFLSAIAPFRDQIAVTVECIFTWYWLADLCAREGITFVLGHALYMKAIHGGKAKNDKIDAHKIAVLLRGGMIPQAYVYPADMRSTRDLLRRRMHLMHQRSQLLAHIQNTNSQYNLPEIGKKIAYKSNREGVAERFADVSVRSSITFDLRRIDFYDGLLNEVELEILRHAKLHNPNTFHLLDSVPGVGKILALVLLYEIHDICRFPRVQDFVSYCRLVKPKKESAGKTYGFIGAKIGNAHLKWAFSEAAVLFLRNNPQGQAYVARLEKTHSKGKALTILAHKLARAVYYMLRRNEAFEMKRFLNH

SEQ ID NO: 91667 - protein, 404 aa, unidentified
MIFVGVDWAEAHHDVCVMAEDGRVLEQARVGHSVAGLGELHALAGAHAGDGEPVAVGIETDRGLVVTALLAAGYQVFAVNPLAASRYRDRHSVSGAKSDRGDAKVLADLVRTDRHNHRQVAGDSDLADAVKVLARAHQAAIWSRQRQVNALRSALREYYPAALAAFGTGLADRDAVAVLAIAPSPEAGRALSRAKIAAALRRAGRQRNTEHRAQEIQAALRADYLQARPAVVAAYAAAARSAIRLITACTAEISELEAELSAHFEQHPDAKIVRSLPGLGTILGARVLGEFGDDRTRFASPKSRKNYAGTSPITRASGLSRIVLARHARNRRLADALEQWAFCSLRQSPGARRYYDQLRRRRKNHHQALHQLANRWVGILHACLAHHCDYDETAAWQHLQANAA

SEQ ID NO: 91668 - protein, 410 aa, unidentified
MRKENIIYVGIDLHKETHTAVMLDCWNHKLGEITFENKPAQFHKLTRKVSRFVTEEKTAVYGLENAYGYGRALAVWLFEKGFVVKDVNTALSYAQRKSVPMYQKSDSYDAEAVALVLINMLDRLPDAIPDDKYWTLSQLVNRRDNINIHQQRLKNQLHEQLCMAYPSYKKFFQDIGRPTALYFFHEYPSPVHLRGKTAEELAGELRPVSHNNCSVKRAEKILELVKSDGETCRDCQESRDIITRSLAYDLEHYRKQMEEVEAAIEAMLPEFGCTLMTMPGIDIITAANILAEIGNIDRFPNAKKLAKFAGIAPINFSSAGKGKDMCPKQGNRRLQAIFYFLAIQMVQVAPSGTPRNALFREYFLKRLEEGKNKPQALICIARRLVNIVYGMLKNHTEYREPERKTGEETV

SEQ ID NO: 91669 - protein, 342 aa, unidentified
MDHYAGIDVSLECSSVCVVDASGKIVREGKVASEPEALIDYFGSLRLPVVRIGLEAGPLSQWLYAAMRQAGLAVELLETRHVRDAFKAMPVKSDRNDARGIAQLMRLGWFRPVHCKSLAAQELRAMLTARKLVQSKLRDVENHLRGILRGFGLKVGHTTARSFAVRIRELVEGQANLETIAQALLAVHAVLLREFNGFEKRVRTMAREHVKARLLMTTPAVGPIVALTYAGAIDDPARFKSSKQTGAHFGLTPRKYQSGQTDVTGRISKIGDATVRTALYEAAHIMLTKPIKGCAPLKSWAMRIARRSGMRKAKVALARKLAVILHRMLVSATPFNAAAAAA

SEQ ID NO: 91670 - protein, 321 aa, unidentified
MIDAENKVLYKQRHRNDVPSILSALDPFREDIQGVVVESTFNWYWLVDALMDHGYRVDLANVSAIKQYEGLKQIDDRRSSLWLANLLRLNILPTGYIYPKEERPTRDLLRKRLQLVRHRTSHVLSVKNILARNLGIRMKTYDIKKLKASEVSTLFADTEMRLAILSSIGLIQHFQEEIDRIETVLTKKFKVKEEFKKLLTVPGIGEILGLTIMLEVGHIDRFPTVGDYSSYCRCIRSIHTSNGKVTGYGNSRNGNKYLSWAYLEAAHFARRHHERIQRYYERKRAKTNKVVAIKAVSHKLARASYYVMRDGVDYDEARLFV

SEQ ID NO: 91671 - protein, 392 aa, unidentified
MIYVGIDVAKDKHDCFAMNSDGEILIEKLTITNNLDGFETLYNSLMNFSDSLDNIKVGLEATGHYSNNILNFLTEKGFNIYLINPLQTNLYVKGQSLRKTKTDKLDAHVIATMLVSDNLKPYIPVSYHISELKSLTRHRFRLVKENSKFKTSLVRLVDIVFPELSKIVSSVAQKSCLALLYELPSAKDIAECNLTHLTHLLSDNSNKKFDREKALQIRDLARKSIGLNSNSVSFELKQTISIIQFIQEQLDDVEKRIKEILKEINSPILTIPGISFKTAGSILAEIGDISRFDSPAKLLAFAGLEPSMYQSGKFFSTHSVMVKRGSKYLRFALMTAARMVCLNDSTFNAFKDRKMTEGKHYMVAMGHVAKKLVRVIYYLLKTNNVYQASKVA

SEQ ID NO: 91672 - protein, 316 aa, unidentified
MAKDGGEVFVGIDVGKARLDVHIRPLGQHFVVGNDEAGLAELAMRLEAHAPELIVLEASGGYERLAAITLIERGLPVAVVNPRQTRKFAAALGQLAKTDKIDAAMLAHFAEAIRPAARAVTDDAIDRLQKLLARRRQLVVMRNAEKQRLGKATDPITQRSLKAMIASLDKQLGVIDKAIGRLIEADPALAEKLARLKTVPGIGDVSARTLLAELPELGLASRHEIAALSGVAPISRDSGRFRGKRRIQGGRVEVRAPLYMATLVAIRHNPVIRPFYRRLRDAGKPAKVALVACMRKLLTMLNAMLRDRRCWAPAEA

SEQ ID NO: 91673 - protein, 355 aa, unidentified
MTVTIVEEARPVTCRTAITGGVDTHADTHVAAALDPVGGLLGVEEFPATAAGYARLLGWLGGFGTVCLVGIEGTGSYGAGLARHITAAGIRVVEVDRSDRQDRRRQGKSDPLDAVSAARAAQSGRARGAPKGRDGAVEAIRTLMVARRSAAGERTRTINQARALVLTGPDDLRARFARHKPAALITGLAALRPRPGDVAGHATRIALRELGRRAQFLDGQLVRLDELIIPLVTARAPGLLAIYGAGPRTAALLLIAAGDHPERLRSEAAWAHLCGAAPIPASSGKVTRHRLNPGGDRQANHALWRIVFTRLGSDPATRAYAERRTAEGKSKAEIIRCLKRYVAREVYRQLRLAAG

SEQ ID NO: 91674 - protein, 269 aa, unidentified
MIKYHKHIGIDIGKYNFVVGIEGIKDTKEYENTSSGIFEFINDNKDILANSLTVVETTGGYELELLYSLCERGYVVHRADARKVKNFIRSYGNSAKTDKLDAKALGLYGKERADKLEVFKPESKQNIQLFRLVQRRNDLKQMLVAEKNRLQQANTDKFVKNSCINMIDVLSNQITEITNQVEVIISSDQLLKAKHEILKEINGIGNIVAFELLILLPELGKLTRRQIASLAGLAPKANDSGKYQGYRKVGHGRAGVKPILFLAAMSVSP

SEQ ID NO: 91675 - protein, 340 aa, unidentified
MKDLTIGLDLAKHVFQVHGVDNAGSVILRRRLRRSEVLAFFERLPSALIGIEACSGAHYWAHQLKALGHEVRLMPPSYVKPYVKRGKNDAADAEAICEAVTRPTMRFVPVKSAEQQSVLMLHRTRDLLIRQRTMLANAFRAHLAEFGIVAAQGLSNLATLAAIASNRDDRRIPPLARSCLLAIIGQLADLQTRIIEIDQAILVWHRANEASRRLQTIPGIGPITASAIAATITDPTLFSSGRHLAAWFGLVPRQRSSGGKERLGRISKQGDPYIRRLLVVGAHSVLRYARGKNASSKPWLVGLLARRPYKVAVVALANKMARIAWAILVNGDTYRRPATV

SEQ ID NO: 91676 - protein, 423 aa, unidentified
MDKNDDSRLQMFRQMTREIRGSDDYLLVGIDVAKDRHDAFFGSARGKTLFKKVVFDTTHEGFEKLCIHADSIKAAHGLKKIAFGLEPTADYHKPLGEYLIRQGRTVVLVAGNAVKRNRELLDGRWDKHDAKDAANVADLIGQGKCLFYEFPSPDLQELRSLLSLKRKLKKTAQSYRVRIRNHLIAQYFPEMDSYFTCGEGPAIVKWCLDPKELAALPFDEFARMVSSRNGGQKQVIRLREIYEKAASSIGCEVHPSVAFEAQTLLETMGRLHVTILATDKKIAEVCGRFPEYPFLLSMPGLGPDISAKVLGAIGDPHRFQNHRQVLKTAGLDLSADRSGKRNDTTPVISKRGKADLRYGLYQAALVAPQKNPYFMRYFASKVEGRQREKGIGTKMRIKLAAKMLVIAWTLMKKKEVFDPGYLK

SEQ ID NO: 91677 - protein, 432 aa, unidentified
MSTEPSPSPDTEPIWFAGFDWGSEKHRVSLFARDGTLIGRRDVDHSARAYAELGDWLLRTTQAQPAAIAVAIETTHGPAVDALIDRGFRTFAINPKQLDRFRDRYSAAGAKDDTRDSDTLGRSLRTDRPAFRELSPDHPLIVQLRETTRLASELTRDRVRLTSRMREQLWRYYPQMLDLADDPAEAWLLELWQLAPTPAKGARLHKETIARILKAHRIRRIDAEQVRAILRQPPLPAGPGATEAAVGHIRSLVPRIRLHNQQIKAAHAEIDALCVALAGPPVVEPGKSAPGQSPEQRDVAILNSVPGIGRIVLATLLTEAAEPLRRRDYHALRALAGQAPVTKRSGKSCFVQRRLACNKRLANAMYHWGMIALVREPRSKQRYAALRARGCSHGRALRSVVDRLLNLVCTLLQRQVLFDPNHAPTTKQAAAG

SEQ ID NO: 91678 - protein, 411 aa, unidentified
MNNTLFVGIDISKRSNVATFMNCEGKVVGRLTFSNSGSGADRLVAKILSYYEKEDFEAIRIGMENTSVYSKNLVWFLYEHEALNEHKLSIIPLNALMVANYKKSFLDMDKDDITDSFAIADFIRIRPGLLPFKLDDRQEALKIMTRSRYNYVQALSRMKSQFLTRLFLSFSEMEAGKPFYSIFSKTSLSLLEEAFTLDELAEKPIPELVEFLQEKGGGKFQNPEEIAKVLKKAASSSYRVPAMVRESLNRTMASDMEIMRILENEIHNCDKNIEKLMKSVPAILVSIPGIGPVLAAGIMSEIDDISRFQKQESLGKMAGFKWKRNQSGKKESENKAAVLSGNKKLRYYLVEAANRVRIHDPVFEAYYRKKYAESKTHAHKRALILTARKLVRVIFYLLKENKLYKPDVGIS

SEQ ID NO: 91679 - protein, 446 aa, unidentified
MAKRKVKDGMVESDSVVVFEDDEVFYERCAGIDVHSGQFTVCLRIGRRSEVKEFGTTTGEIRQLVAWLKESGCQMTAMESTGPYWKPLYNIFEQEEVPTMVCNAYHIKNVPGRKTDVADARWIARCLREGLLNPSFIPDREQRELRDMTRFLKSQTEERARNINRLQKFLEGANIKLSEHVSDIEGISATELLELVIGKPDFTLDDVRSRMRRNMKSTPEQIFAALEGYMTPIQREFFKHVMQIIREQTKQIEATRALVDSVLGENYKIAIEALDDIPGIGTATALTIVAEAGTDMSHFRNQHSFSKWAGVAPGNNKSAGKAKNSKTTPGNKTLKSALTQSAKAAAKNKSSFFSAQYRRLVSHLGKNRASMAVAHSLAIAVFFVLSGQEFKDLGADYYNRFNREKKINSHVRQLSKLGVNIPDDIIRQAVEKSPDISTVGAKQAAA

SEQ ID NO: 91680 - protein, 413 aa, unidentified
MNVLHPRCCGLDVHKSSISACILLRESGREQKHQRRFGTMTQELQELAEWLQQFGVTEVAMESSGVYWKPVWNILEGQFTVVLANAQHIKNVPGRKTDQKDAEWIAQLLQYGLLRASYVPCEIIRDLRDLTRMRASLSQEASRISSRIQKVLEDANVKLASVATNVLGKSGRAMLEDIITGEDNPEQLASLAMGHLRVKIPQLQLALEGKIRSHHRFLLRRLLDQVQFVEHEIALLDERLEDIGRQRPDLAHAVARWDTIPGIDRVAAWALLAEIGDNMGQFPTAGHLASWAALCPGNHESAGKRLRGTTRQGSPWLCRMACQCAWAAARTKNTYLSSQFRRLAARRGKKRAIIAVAHTLIVIGYHLQKNQSNYDDLGGNYFDRIHSDGLKRYLVKRLQQLGHKVTLEPIETA

SEQ ID NO: 91681 - protein, 459 aa, unidentified
MTKTRKKKMELDIINPKAAGIDVGSRSHYVAVGQSLEDVKEFGVYAEDLTALCLWLLSYGVNSVAMESTGDYWQNLYAELMKHGIDVVLCNGKFTKHAKGKKTDVQDCIHIQKLHALGLLTSSFLPDETTEKLRTYCRQRSNLLSSAAGTARKMQKYLKFLNFRLDVVVKDVCGLTGLAIIEDICKGNLDPESLAEHRHYNCRKSKKEIAKALHGNNREDFLFGLKQEYQAYQFFQKQIKACDKNIDQFVKQELKRSPEKIKLKTTDKPYKRQNKNAISIKNFNQIAYQYFGGVDLMAIEGLSHSTVLSIMSEIGPEGFKKFATSKQFVSWARLAPNNKISGGKVLSSKVPKGSNRIKIALRQAANAIGNLKDTHLSDFFRRIAFRKGRQAAVSATARKLGVIIWTMVTKQVPYTPPNEYLFLDQKRKLKMVSRIKKNITKFDIKPEDVGFDNTMIISP

SEQ ID NO: 91682 - protein, 455 aa, unidentified
MKIPQSTIRLLTGRLVKILLNREVSTMKSNTQNKKIEAITEKTLVIGIDVGSETHYARAFDYRGIEFSKKPFKFSNNEAGFEMFKAWILDIKEKHEKDKVVPGMEPTGHYWFNLGKFLQDNEMKPVLVNPHHVKKSKELDDNNPTKNDRKDPKVIAGLVKEGRYMIPYLPDGIYADLRTASNMRFQIQSELTRVQNRISRWFNIYFPEYKTVYGKPDAISGIMILKKAPLPEDILTLGVEGVNQIWRDAKIRAVGKKRAQTLVEAAGHSVGTKEGTTAARIEIRMLLEDYESRNNRLQEVMLLIEELVKQIPMAEKLMEIKGVGIKTVSGFLAEVGDITRFSSPKELQKLAGLALIENSSGKHKGRSRISKRGRRKLRKILYQVMIPLLARNKEFQTIYDYYVTRVKNPLKRRQAMIAVSCKLIRVFYAVLTKGVDYDRFKIMSDIHHERGVIAA

SEQ ID NO: 91683 - protein, 338 aa, unidentified
MKLYGGMDLHSTNVVTQLIDEHDRGVYRNKQGCDLADILRGLESFQDVIEGLAVESTYNWYWLVDGLMEAGYRVHLVNTAAVQQYEGLKYTDDDTDAFWLAHLLRLGVLPTGMIYPKECRAVRDLLRKRSQLVRQRTAHIVSIENLYARNTGTRLNSNAIKRLTQEQVQQHFADPNLALAVESNRVILMALSEQIEVLETAILAQAKLDPRYRYLLSISGIGQVLALTIMLETGCIERFRQVGNFASYCRCVGSEKLSNGKKKGRGNTKNGNKYLAWAFIEAANFAIRYNDRAKRFYQRKAAKCNRVVALKAVAHKLARASYYVMRDHVPFDDMKCFV

SEQ ID NO: 91684 - protein, 414 aa, unidentified
MALPESACYVGIDWGSAEHAVCVLTEAGRVRTEFAVTHTAAGFADLVRRLARLGEAEDIPVAIERPDGRLVDLLLEAGHPVVPVKSNAIKAWRDAEVLSGAKSDPGDAMVIAEYLRLRHHRLRPARPFSPQTRALRTVVRTRDDVVRLRVMATSMLASLLDAFWPGAKTLFKDVESPIALEFLTRYPTPASAAALADKRMAAFCVKHGYSGRRTAEELVKRLRSAPAGVMAEHHTEAGRDSVIALVTVLRTLGSVKKDLDRSVDAHLGQHPDGRIFTSLPRAGRVNAAQMLAEWGDSRDAYDSPDAVAAFAGVAPVTRASGRMRGVSYRWACNKRLRQAITTFADNSRHESVWAADVYQRARARGMDHPHATRVLARAWVRVIYRCWLNHEPYDPARHGAAQHFLPQPELAQAV

SEQ ID NO: 91685 - protein, 361 aa, unidentified
MTGSGLSAVAARVGAVVPAAGLVKVGVEAAGHYHRPVLDHRWPDGWEVLELNPAQVAEQRRVQGRRRVKTDVIDLEAITELVLAGYGRVVTDRDVVIGEVSAWARHRRRRVATRSATKNQLLGQLDRAFPGLTLALPDVLGTRIGRLVAAEFADPARLAGLGVNRLIRFAATRDLQLRRPVAERVIAAAHDALPTRDAVIARRILAADLVLLADLDIQIDAAETALESLLPRSPYATLTSVPGWGVIRVSNYAAALGDPQRWPGPRQIYRASGLSPMQYESAHKRRDGAISREGSVALRRALIDLGIGLWLNDQAAKNYARGLKDRGKHGGIVACALAHRANRIAYALVRDHVTYEPPRWA

SEQ ID NO: 91686 - protein, 391 aa, unidentified
MSMYFIGIDISKYKHDCCIISAATQKVVSKVTIKNNKAGFDELLSIINSLSNPEDIRIGFESTAHYALNLELFLENANHSFMEINPVLIKDFKKSQTLRRTKTDSIDCELIARWLMTVEYKPHSKGFYHAYSLKSLTRLRDKLIRQRSFYLVKITNVLDHTFPEFKPFFHEHFSKTALYLLENYGAAEKMARMNSASYEKLRSLSRGKFSPQQFLQLKELAANTVGVSNSIFDIELNSLLSLYKSLVKEIDTIEKEINKLIEEVHPHYMSISGIGPLSATVIYSEYGDISNFANPGQMLAFAGIEPGINKSGTESHGGRMVKRGSSQLRYTLINCCLPLIRFDMTFATYYAKKRGEGKPHRVAITHVAKKLIRVIYALERQDIDFNTQKLH

SEQ ID NO: 91687 - protein, 373 aa, unidentified
MGWTPPPDDGIDVPEWKCHQPLEPEGASTMQITTIGIDLAKNVFQVHGANERGKAVLRKQLRRDQVAPFFANLSACLIGMEACGSAHHWARKLQALGHTVRLMAPQFVKPYVKSNKNDAADAEAICEAVTRPTMRFVPIKNIEQQSVLSLHRVRQGFVKARTAQANQIRGLLGEYGLIVPQGIAHIAKRVPDLIEDATNELPGGFRQLIDRLLEHLKLLDQQVDEIEVQIKAWHRDNEISRRLEQVPGIGPITASALAATVGDAKNFDNGRQLAAWLGLVPRQHSSGGNATLLGMSKRGDAYLRTLLIHGARSVIYRARQKNDPDSWLFKLIARRNVNVAAVALANKTARIVWALLVHDRQFRPDYTSAAAAA

SEQ ID NO: 91688 - protein, 334 aa, unidentified
MANGTVVGIDVSKNTLDVVIGRDGVAAAFSNDERGHQALVAALRRQPISLIVMEATGRYQFACACVLQAAGFRVAVVNPRQARDFAKAMGRLAKTDRVDALMLAELAEVIYKRPDRDRFTKPMADETQQCLHALVTRRRQLVRLQVSERQRKYASHADVQPGIIELMNILKRQVQDIDVRIAAHLSKHQASLTKLLQSVKGVGPATTAALISELPELGQLKAKQISSLVGVAPMNRDSGQSRGKRMICGDRATVRSALYMAAIVAMRHNPVIRTCYERLVAAGKPKKVAIVACMRKLLIILNAMVRTGRPWKEKAATAQNDAEADIVPPCGLLA

SEQ ID NO: 91689 - protein, 312 aa, unidentified
MDSIVIGIDVSKDRLDVATPDGTTQWPNDPDGHQQLIKHFAKWPLEAIVLEATGGYERAVVAELAVAGLPVLVVNPRQVRDFARATGRLAKTDAIDAGILAQFGQAIRPEKRPLPSEKQLKLQQQLARRRQLVGMLTAENNRWQQATDKLVRKSIEAVRKTLCTQLDQMDDQLQRTIEQTPAWREKENLLRTVPGVGPQTALALLAELPELGTCSRQQIAALVGVAPFNRDSGAKRGQRTTWGGRPAVRTALYMATLVATRHNPVIREHYQRLQSNGKRKKVALTACMRKLLCMLNAILREQKPWRNQLATT

SEQ ID NO: 91690 - protein, 348 aa, unidentified
MLHAGLDLSRRRLDYCLLDELGARVEVGAAPPDVDGLIGFARLVEERHGPVTVHAAIESMNGARFVHDTLERCGWEVEVADAQKVKGLAPLACKTDRIDAWVLAELSRRELVPAVWLPSFEQRQERERARWRLFLVRKRSSLKHRVHAQLLAFGHSCPVSDLFGVRGRKLLERLEFPEPWAGGVLAAVAMIDELDREITGIERELKALGAEHRYVPLLMSVPGIAWVLGYTIAAEIGEIDRFASPKKLCGYSGLCPKVYQSGSTDRRGHLTHAGPKYLRWALMEAAANACKHPLYRERYQRNKRRLGKQRGAKVAQVDLARRLAEAIWHMLTRDQPFAPAGATPALAA

SEQ ID NO: 91691 - protein, 346 aa, unidentified
MNKLDVGGIEVSAEQLLAELQREGAARLRREFPNTPEGHEALRRWLVLPGHRVRVVMESTGLYGLDLALRLEGEPRVELMVANPRAVRHFAHALMKRSKNDPIDVEVLREFAARMPFRRWVRPSPAALHLHALARRLESLTQMQAAEKNRLQAAPLSEALPQAVERDLQRSLRGLERALNRLTRQAVAVIAQDPDLNLRYQLLLSTCGIGPTSAVQILAQLAVLSPDLDVRQWVAYAGLDPRQYTSGSSVHKKTRISKTGNRHLRRALYMPALVAIVHQPHVRAFYQHLLDRGKSKMQALVAVMRKLLHAVYGMFKHQQPFDGAKRYRLPDDITVPQLAFSTAEVA

SEQ ID NO: 91692 - protein, 317 aa, unidentified
MPQVDEIVGIDVSKRKLDWCIRDVAAGTTAHTPNDCNDLAASLVERGIKVAIMEASGGYEQTIALILREAGIAVRIIDPKRIRSFAEAGGSYAKTDKIDAKMIAWFGATFPEKEREPDDIDREPLAALVGMREDLVSMRSEWLNRAEHGLSGLAQKVHNGLIKNFNQAVAKLDAAIAKAIEAQPGLAQDAELITSVPGLGLQTAAATLAWLPELGRIEHEQISALVGVAPYDDSSGERDGARHIAGGRHRLRRALYMATLGAATQHNPVLKAFYNRLRAKGKSAKVALVACMRKLLGILNAMLAHKQAWAPPQPAVA

SEQ ID NO: 91693 - protein, 460 aa, unidentified
MHTRIIGIDLAVTAVHKAIVLDQTSNRFVSKLLKFHTDPAEIDRVLAAAQADAPEDVRRVAVLEATGMAWYSVGTYLERHGVEVYRVNGQQVADLRRVYQRHAKSDRIDARVLARLPLLCPERLHLCFFPTGPQMALQRACREVARLTAQVAAGKNRVLATDQFAWLGLSAVLPPYEAAAFWVRANWYDPWRVLAAGEETITQAWCAVSSKQPADTSWIPALLRQAERVVALYGDPDRVPYALLQAHLQREQERIRVAQAQVDHLRLKVVRPIYRQLHPQRHLESLQGVGQDSAAVYIAFIGDILRFPSLRDFRGWSGLTPYSRQSGNAQAKGLHITKAGPNLVKAIAFLDAQVARLWDPQIAAVYYKHMMVHGKHHLQAVCACATHLLDRIHAILVEDRPYELRDVDGTPVNKREARRICLEQYRVPDEVRRRNNQRARKARRERQVERRYNRRQNKDK

SEQ ID NO: 91694 - protein, 410 aa, unidentified
MDVLYTHCAGLDVHKKTVVACRLGRDAQGQKVSQTLTFSTMTCDLLRLCDWLAEGGCTHVAMESTGEYWKPVYNLLEAHFELLLVNAKHVKTVPGRKTDVNDATWLAELLAHGLIRASFVPDGQTQELRVLLRTRKQLVRELSRHIQRIHKTLEEANIKLASELSDVLCKSGRAMLDAMVAGETDPVRLAALAHGTVKSPQARLQEALRGRVTHHHRFLLQLHLRQIDGLDAAIATIDREVEANLAPFRIAVELISTIPGVSTLSAEVIISEIGLDMSRFPTVGHLLSWAGLCPRNDESAGKRRSGRLRKGAPWLKTMLVQCAWAAKRKKASYLQAQFLRLRSRRGPQKAVCAVAASILTAVYHMLKDGTVYQDLGPDHFIRRSKTTQTQRLVKRLEHLGYAVDIKPLAA

SEQ ID NO: 91695 - protein, 379 aa, unidentified
MWHSGIDQHQQYCVITTYGPEGPRVKQARVPSTPLALQLYFAEFPGPHKAVVESTGSWYWLADVLAALGVELVLAHATRLKAISAAKVKTDQVDSDVLALLLRADLIPVAHMIRPEQRGPRDLMRTRLRSVEKRVSAQNSIDRLLEKFNVQTVAELDELYQLQAACHEAQIKLLTEQIATLERALYPYLIPNDDVQRLLWIPGLGKVNAFTLYTEIDGITRFPSARQFFPYCRLVPGADNSAGRTRHRSGSKAGNRYLKLAFSHAGLRAVQYNPEIRAFLKAKARRKPIRIARTLVALELARIVYHVLTKQEDFNGRFKNQPLSHRKLAKWPRRASPPAYLTPLQGGHAHDWEARRCANDVSGTVSVRGDDSRSTAAGR

SEQ ID NO: 91696 - protein, 356 aa, unidentified
MFNKFNNSVDFSGHNVYSGLDVHGKSWDVDIVVDDIEHRKFTQPPDPIALYNYLSSHFPGAKYFSAYEAGFCGYHHHRKLLELGIHNIVINAADLPVTNKEKVNKRDPIDSRRLANALKNNQLTGIYVFDPKHEQFRSLFRMRWTAAKENRRVKNRIRSFLHYYGINPPSYLNPEYWSLSFINWLNQLTLATEAATLSLKYLLNAYQYTRAQLLEVTKQLRKLVKTYYPDIYKCLLTIPGIGPIVAMCLIAEIGDISRFKSYKHLASYVGFIPRSHQSGDKDPSGSLTYRSNKYLRSSLVEAAWVAMRYDPALLKYYKDRIAKYKSQIVIIKIAHKLLNRVRQVWMNQNKYQIGLS

SEQ ID NO: 91697 - protein, 378 aa, unidentified
MKRILKIGMDVHTTNYTLCAMEPIIGEDDRVFATIKVTPDYKNILLFIENLKTKLGLNDEYDIQCGYEAGCLGYSLYKQLTAAGVKCVILAPTTMLTPQGVRIKTDMRDAYMIAQCLSYGGYHAVYIPTEDDDSVKEYLRMRNDHKLALKKIKQQINAFCIRHGFCYDGTKWTLSHLKWLKKLEITNGLYRETLDEYMASYEEQEAKIERYDKRIGEIAEQTRYHDKVKKLGCFLGIKTHTALSLIVETGDFERFAKGNQYASYLGLAPGENSSSDNIHRLGITKAGNSHLRQLLIEASGGICKGAVGHKSKELRARQNGNTAEVIAYADKANTRLRSRYYKFIRHGKKRNVAVAAIARELACFVWGMMTDNIEMKAA

SEQ ID NO: 91698 - protein, 328 aa, unidentified
MQNVALIGIDLGKHSFHIHCQDKSGNALLRKKFTRTKLMQFLVTCPSSVVVMEACAGAHFMARRISDIGHDVKLISPQFVRPFVKSNKNDFIDAEAICEAASRPSMRFVQPRTETQQAMRALHRVRESLIRDKVKTTNQIHGFLLEFGISLPTGDAVIKRLSLVLAEHEIPEYLSRLLMKLHAHYLYLIEQITELESELNQSIKADATAQRIMTIPGVGPITASLLSSQLGDGKQFSCSRDFAASTGLVPRQYSTGGKSTLLGISKRGDKNLRRLLVQCARSFMMRLEHQQGRLAEWVRKQLDNKHSNIVACALANKLARIAWAITVL

SEQ ID NO: 91699 - protein, 410 aa, unidentified
MEVVHAHCAGLDVHKDTVVACVRHMTDGKVTTTIKTFNTATQELLALSDWLSAENATHVAMEATGVYWKPVWNILSDGEFELVLCNAAHIKNVPGRKTDVKDAAWLADLMAHGLVSGSFVPDQTTQEMRDLLRTRKQLVRERTSHTQRIQKTLECANIKLDSVVSNVVGVSGRRMLEALIAGQTDPKELAAMAHGRLQATPAELEAALRGRVTAHHRFMLRLHLDQIDSFDEAIARIDKEVKDNDKNFRAAVELLKSVPGVGSLAAEVIVSEIGIEMTRFATASNLVSWAGLCPKNDESAGKRRSNRLKAGAPWLKTTLVQCAWAAARSKGTYLHAQYVRIRARRGNQKAICAVAASILTTVYHMLKDGTFYEDPGPDYFDKRNKDQQANKLVNRLQNLGFNVTIQPAAA

SEQ ID NO: 91700 - protein, 455 aa, unidentified
MAKKGKKTKPMPDNMLIIHPHAAGIDVGAEEHWVCVPADRDAQPVQKFSAFTCDLHRLADWLTACRITTVVMESTGVYWIPLFQILEARGFEVALVNARHVKNVPGRPKTDRFDCRWLQKLHTYGLLAPSFRPPEDICQLRSLLRHRENLIRMTVKHIQHMQKSLDQMHLHLHHVMSDITGVTGMRISRAIVAGERDPRTLAQYRDYRIKSSADTMTKALEGDDRAEHVFTLTQSLELYDFTQQQIAACDQEIERVLATWDSQVDPDEHPLPPPTTTHRHPQRNEPAFDLRTHLYRITGVDLTQVPGFQAPTIHIILAEVGLNRHKWPTDKHFASWLGLCPDNQIRGGKVLATGSRRVQNRASRALRMAAQSLRTSPSYLGAFYRRMRSKLGPAKATTATAHKLAKIIYHMLQEKTPYLERGAEHYMHKDHERKIRQLRKQAKHLGFDLVPQTSN

SEQ ID NO: 91701 - protein, 323 aa, unidentified
MVPVLGIDIAKATCALALERPDGKVQHKSIPNTPDGHARLVTWLAQHAGGPVHACLEATGPYGDAVALALVDAGHTVSIVNPAAVAAYARSELRRAKTDRTDADVIRRFCAAQQPRPWVPPAPEVRTLQALARRVVAVEAMRQQEANRLAAYQPHDAVRQSIAAVLADLTAEVARLRQLIHDHIDQHPGLRTQRDLLTSIPGIGDITATTLLAELFAPRPGLSVRQLVASAGLAPRVCHSGTSVHHRGRLSPLGSRRLRKALYFPALAALRHNPVVQALAHRLTAAGKPKMVIVAAAMRKLLHLAFGVLKSSQPFNPAIALNH

SEQ ID NO: 91702 - protein, 346 aa, unidentified
MKQVSTIGLDLAKHVFQVHGADNEGSVLFNRKLRRTEVLRFFERLPPCLVGMEACGGAHYWAREIAQLGHDVRLIPPAYVKPFVKRGKTDAADAEAISEAVIRKTMRFVPIKTAEQQADAMVLKTRALLVQQRTQSVNALRAHLAELGIIAAGGLPNVAALMTIVREAEDTRLPTAARFALTAIVDQIDALAIQINVLERTIVTESKRDESMRRLTTIPGVGAITAATIKALVPDPGGFKSGRHFAAWVGLTPRPHSSGGKERLGRISKMGNPELRVLLVLGATAVLRIARNDEKARPWLKALLVRRPFKVAAVALANKMARIIWALLNKGGFYDPPEPSPNVAAT

SEQ ID NO: 91703 - protein, 410 aa, unidentified
MEVVCARCCGLDIHKKNLVACLSLPGPQGAASTTVRTFGTMTADILALSDWLVEAGCTQVAMESTGVYWKPIYNLLEGVFTLLLVNPRHMKAVPGRKTDVTDAEWIASLLRHRLLTGSYVPERVQRELRELTRYRTTLVRERTAEANRLQKTLEGANIKLASVATDILGKSGREMLAALVAGATDAAAMAQSARGRMREKLPALAQALVGQFGAHQRFMVAQQLAHVDFLDATIAEVSAEIERRLQSVDDLVARLDTIPGIGRYVAEALIAEIGTDMSRFPSAGHLASWAGMCPGSHESAGKQHGGKTRKGNAWLRAQLVQAAHAAARKKGTYLEAQYRRLAARRGKSRAAVAVGHSILVIIYHIVRDGTVYEDLGPHHFAERDRQGTERRLVHQLEGLGYTVTLEPRAA

SEQ ID NO: 91704 - protein, 341 aa, unidentified
MKNLFIGVDFSKEKVDVAIIFADGLTETAPRVFNEFKTTVSGYKQLVKWVEQNSCGIDSSLWLFCGENTGDYSKGLCNFLYGKGYDMWLENAKSIKDASGLRRLKSDRADASMIAEYAMRNYDKAVMYEPLSESLAQLRELFLYRQMIVRHRCSFLVRRGEKRLTMEKSPIKTMISQSGRHIVSELNKEIEKIDKRIAELIKSDEELTEVFTIVNSVPGIGTQNAVCLMVYTDNFRRFNYDSRKISCYYGIAPFGKDSGTSVHSDPHVHYMANRQIKAMLTQAALAAVNFNPVMARYYMRLVERGKKKQVALNNVKNKLVHLVTAMVRNRQIFTPEYKISA

SEQ ID NO: 91705 - protein, 374 aa, unidentified
MADHSVAYVALDTSKLRNAVAIAEAGRDGEIRYLGEIDNAPAATAKLARRLAKQHATLTFAYEAGPTGYGLYRQLKSLGHDCIVVAPSLIPQKPGDRVKTNRRDALSLARQLRAGDLTAVWVPDPHHEAVRDLTRARGAAVREQRAKRQQVAALLLRLGLHYPGKTTWGRAHMAWLAGQKLAHLEQRIALEEMLHAVRQAGDRIARLEQAIRTAVPDWSLAPSVTALMALRGVEFIAATTLLAEIGDLTRFRTPRELMAWLGMVPSEHSTGERIRRGPITKSGNRRARSILVECAWSYRHPPRVGRDKLARLEAAPPAVRDIAWKAQSRLTARYRALRRAGKLDVVAITAVARELAAFIWAVGVAVGSGRTPEV

SEQ ID NO: 91706 - protein, 434 aa, unidentified
MEPQFAALIAIDWADQKHVWAMEIPGQTKPQMGSLSHTPEAVDAWAAELASRFGGQSIAVALEQSRGPLVFMLTKYPHLIIYPVHCSTLANYRKSFRPSGAKDDPIDAQLILDILARHRDKLRPLRTDTVETRTIQFLVEERRKLVDQKTACTNRLTAHLKMYFPQALGWFGELGSPIAVAFLERWPTLSDVQKSRPATIRKFYTSHNSRTGGDYLDKRIDEIQTAISATHDEAVIAGYSVAVLAWTGLLKQFLLAIKDYDQRIDLLASKHPDYALMKSFPGVGPVSAPRLIAALGSQRDRYESAYQIQCYSGIAPVVSSSGKKHHVHCRWACPAFLRQTFHEWAQHSMAGSQWAREYYEHQRKVGKGHHTALRALAFKWIRILFRCWKNNVNYSELVYTNAAALKKPKPKSSSPVEIKWETKMGMSKFTGLAT

SEQ ID NO: 91707 - protein, 369 aa, unidentified
MNKNILFIGLDVHKESIEIAIADGSSQEVRRYGRIGGTHDAMRRALRKLVSSGKELHFCYEAGPCGYELYRYLVAEGHDCWVIAPSLIPKKAGDKVKTDKRDAVQLARLFRAGELTPVYVPDREDEAIRDLSRAREDAMLVQKSARQRLKSFLLRHDIRYQGKTSWTEAHLRWLADEVHCPSAAQQIVFQEYVNTVTEAQHRLQRLNEQIEIFVKQWRLYPVVEALMSMRGVKMIVAVTVVSELGDLSRFDNPKQLMSFLGLTPSEYSSGPRQSRGRITKTGNGHVRRILIEAAWCYRYPAKVSREMQLRQDQLPLSIRDIAWRAQLRLTQRYQHMQRKGKPHNITVVALARELAGFMWAIANEVEYPR

SEQ ID NO: 91708 - protein, 345 aa, unidentified
MDITTVGIDLAKNVFQVHAVDARGKVVLRKQLRRSQVAEFFVNLPPCLIGMEACASSHHWGRTLERFGHTVRLMAPQFVKPYVKTNKNDAADAEAICEAVGRPNMRFVPIKSIEQQAILSVHRVRQGFVKARTAQANQIRSLLGEFGLIIPQGIRHVAQRVPALLEDASNELPLAFRQMIERLTEHLKVLDEQVRDFERQIVEWHRGSEVSRELEKIPGIGPLTATALLASIADARSFDNGRQVSAWLGLVPRQSSSGGKSTLLGISKRGNVYLRTLLIHGARSAILAAKRQSECKNPWLKNLLNRRHANIAAVALANKNVRTVWALLAHGRTFQADYVPIRIAA

SEQ ID NO: 91709 - protein, 340 aa, unidentified
MAILAGFDVHRAQITFDALNTETGEVLRGRFRADREAVGEWVGQFAGEQVQVAVEACTGWLFVYEVLAGAGVMVHLAEPAEASALRGKKRHAKTDRADARWLRTLLAEGRLPEAWIPPAHVREWRTQTRLRKTLIDERTCWLQRIQATLFHHGIVNVPDQLLRANGRAFLHTLTLPPASLQRIEIALAIIDELDRQLVPLERELARLARRQAGCQALMRQYGVGPVTATTVLCELGDVSRLSASRKAVRCSGLDIGVYRSDRRSRTGRITRQGSPALRWALYEAAQAACKPASPDHADYLALKARGLSHTRASLTIARKLARRSFHILRELGPDALAPTA

SEQ ID NO: 91710 - protein, 393 aa, unidentified
MFIVGVDIANRSHEAIVIDNSGSIVRKAFNFKNDSAGFSKLISVLADISENPDDFVIGMESTSHYWLALYSNLQKLGYTVHVFNPIQSNALRNMYIRQIKSDEHDSFIIAEVIRFGRYTEGGLPPSELYELRELCRARFFVVDMTSDLKRKVIALLDQVFPEYETVFTDIFGRTSSELLLNCSTPEEILAIDTEKLAEIIEAPSRKRFSIPKAKEIKELAGNSFGIVAGFDTMGLLIKQHMEHIRYTEMQIAELDAKIEELFSRFNTCITTISGIGSTLGATIFSEIGDISRFSSPAKLAAFAGIDPTVKQSGEFVGTHNHMSKRGSPYLRRALWQASTIAVRCDPALKAFFQKKLAEGKPYMNAIGHVTRKLTNIIYAVLRDGKPYYSRLEG

SEQ ID NO: 91711 - protein, 353 aa, unidentified
MTSTVYCGVDFHARVQTIAYCTSTDGEVHLCELDHRKDDVQGFYAQFSGEVVIGLEASGYSSWFERMLEELGHEVWLGHAAEIRRVANRRQKNDRRDAELILDLLVKGDFPRIHRPTAQSIEILRMLRYRHRLVKIRTMIKNNLQALAIGSGLTLRSRLLTRSGRSRLLAAQMSPSHSRQREEWLSLLDNLDARIASVVKWLEQQAKDDSKVQLLRTHPGLGLLTSLGLVHTLEPVSRFPNQRKVVAYLGMEPMERSSAEKKRYIGISKAGSRLVRFLLGEAAQTAARDDQELKRFYRRIVARRGKPKALVAVGRKLLIRGYIMLRDNVDYAEFLRRGVEARPARKTHRDVNA

SEQ ID NO: 91712 - protein, 347 aa, unidentified
MRFFTDRHQNYCGIDLHARSMYLCVQNLEGKVVLHRNMQAGPEQFLKAIEPFREDVVVGVECIFTWYWLADLCAEHNIPFILGHALYMKAIHGGKAKNDRIDSRKIAALMRGGTFPVAYVYPAKMRATRDLLRRRNHLTRKRAELLSHIQNSNSQYNMEPFEANISYKKNRIGVAEQFADPDVRMSIEADFELIALLDELKNRLELHITRNAKDHDPQALYRLRTVPGIGSIISLGVLYEIGDINRFARVQDFASYARLVKCTRESAGKRYGTGGGKIGNAHLKWAFSEAAVLFLRGNPEGMKFKKRLEKKHGKAKSLSILAHKLGRAVYYILKRDQAFDMNRFLKN

SEQ ID NO: 91713 - protein, 343 aa, unidentified
MEVVIGIDPHKASHHAFAVDEREVELAQLSVRATRTQTQRLLAWAEPFEQRVWAVEGAEGLGYLLSQQLIAAGERVVNVPATLAARTRVLGSSKSNKTDPNDARSVALTALRHGDLRVVEAVGHSEVLRLLAKRNVDIGDRRTQVVCRMHSLLVELAPGGIAKEINASDVDGFLAGLSPSSPVEQIRFDLAVELLAEIRSLDAQLKVSHKRIEIAVRASGTTVTDLFGIGPIIAAMLIGFTGDIRRFANRDHYAAYNGTAPVEFSSGGRTVHRLSQRGNRNLNHALHMAAICQLRQPHSEERAFFDRKVAAGKTKREGIRALKRQISNAAYRQLLIDARRARS

SEQ ID NO: 91714 - protein, 451 aa, unidentified
MSKASRLSRGDKRRNDRLSKFRGIVRRDYAVAAIDLASKKQVVAVVDHDSRIVARRTFHCAPPQLATAIEWSRTAATAAGFAGIVIACEPTGHRWKTVRDLTAAVGVQMVCVQPIAVARARETEDFTHDKSDDKDALLIARLTTQLHIYLPEHADEQWTRLRHLGVRRSQQLTRRGAAQQQARDLLEGAWPHALDCAGQPFKSVTWLAAMAVIGADPTPLTAQGSREQAVAWLREQVRAELPCWGGRRVTTRILVAIVDAAFAVQTETTITAEAGALERARYALADFHHARTACEQVEAAMIEVLTGLGLHELAGSIPGVSAVSVAAILAETGDLTRFDSARAVVKHAGLCPRENSSGAYRGATRISGRGRPLLRVAAWRAAFAALTHNEVYAARYRHLTSREANRLNPNQARVAIAAALLRQLYVVITTATPWNPDIAAGRTRPVERTAA

SEQ ID NO: 91715 - protein, 375 aa, unidentified
MQNKVRFLGLDVHADTIAVAIAEPDGEVRSLGTIANRAESIRKMVKKLGSVEQLRACYEAGPTGYVLYWQLVELGVNCEVIAPTLVPMKAGDRVKTDRRDAERLARSHRSGDLTAVWVPDEGSEALRDLVRAREAAKQDQLRARHRLSKFLLRSGQRPAQGMKAWTQQYMIWVKQIRFSQVAQESTRLDYLTEVEHMSERVVRLEKAIMEAVKLASPEIQEVVKDLQALRGIAQISAVTIAAELGNISRFEGARQLMGYSGTVPSENSSGKRTQRGSITKTGNAHLRRIVVEAAWSYRLRPGVGPALHKRQEGVPEEIKEIAWKAQHRLHKRYSRLAAAGNDHRKIITALGRELLGFVWAVGTKAEAAVKQQRAA

SEQ ID NO: 91716 - protein, 353 aa, unidentified
MTNGSSLNETMGLDLSDKTGVYVVLDHEGEVCRECKVALTRQALSRAFGGGSPCLVAIEVGTHSPWVSRELALLGHEVVIGNPRQVKLISQNKKKSDREDALLLARLARLDRRLLRPVQHRGEQAQADLAMLRARSLLVAGRTSLINSVRGMVKTTGLRLPRCSAESFAARAQPHLPRELVPALEPLLAEIASLTARIKQITHAIEHAAAERYPETQQLRQVPGVGLICSLTYVLTLEEPQRFRRSRAAGAYLGLVPRQRQSGEQQPQMHITKAGDVALRSVLVQSAQYILGRYGPDSDLRRWGLKLAGEGNKARRKKAVIAVTRKLAVLLHHLWSTGQVYEPLRQADLQTVG

SEQ ID NO: 91717 - protein, 318 aa, unidentified
MTNITYQFNIGIDIAKQKFDVSFSDQKVASFENNLAGFKRLLKEITDNSQTRVVMEATGGYEKPLAQFLQGQGVAVSIVNAKRVRDYAKALGLLAKNDVIDAKVIRMFADSVNPKLLSATSDTQQALDAQVHRREQLVKQRAMEKQHLETVSNKDAVRSIKRTIAFLDKEIERIEKAIKALIKTDSALTEKVDRLSGVKGIGDITALTLIADLPELGQLTNKEISALVGVAPFCHDSGTQKGKRTTWGGRTQVRSILYMAALSAVQYNPPLKAFYNRLLMKGKTKKVALVACMRKLLTVANSMLRNNTEWNPNHGKLA

SEQ ID NO: 91718 - protein, 367 aa, unidentified
MKKISTVAMERIQIFKESQRTIGMDLGDRSSHYCILNEAGEVIWESKLPTTPKGIEEVFSRIPRSRMALETGTHSPWVSRQLTELGHEVIVAHARNVRLIGESSRKDDRLDARTLARLARIDPGLLSPVRHRSAKAQIHLTVIRARATLVSARTALVNAARGLTKSYGARLPKCGSEQMNREIAQGLSQELREALDPLLAEIESLNERIAEYDRRIEKVAKEVYPEAALLRQVKGVGPLIALTYVLTLDDPHRFRRSRDAGCFLGLRPGRRNSGMSEPQMHISKEGDRYLRTLLVQGAHYILGPFGQDSDLRRWGLKLAKRGGKNAKKRAVVAVARKLAVLLHKLWVSGEVYEPLRNNNHKVVAAVA

SEQ ID NO: 91719 - protein, 345 aa, unidentified
MGEISRIGMDTSKHFFQLHGVNANEKAVLRKKLRRKEMVAFFRTLAPTIIGIEACGASHHWARLLQSFGHEVKLIAPQLAKPYVKRGKNDAADAAALCEAMSRPTMRFVPVKTAEQQAALMMVGLRDRLIRNCTQLSNAIRGYAAEFGVTAAKGMAHLDPLLERIQADESVPNLARELFALQAKEYAQLQAQIDDVDAKLMAWHKADECSRRLAKIPGVGPIGAALLTMKTPAPQLFKSGRQFAAWIGLTPRDHSTAGKVRLGVITRAGDETLRSVLVVGATAVIQHVRRGGRGSPWIADLLKRKPPKLAAVALANKMARIAWKFMVTGESYAAKSAPAALASAA

SEQ ID NO: 91720 - protein, 344 aa, unidentified
MTTIDYIGFDIHKKTISFCVKAQDGTILEEGTIPALRKKLLAWAKARPRPWMGAMEATLFTGWIYDLLKPLAHALKVAHPPMLKAIAAAKKKNDKVDARMIADLLRCNLLPECYMAPVAIRDLRRMLRYRNLVVRQTTRMKNRIAGLLMETGTAYNKERLHGKAYFSELLGSLQEVPRSVVELLKLSRGQVEFFAAIQRRLLKGLREHPELSQRVLRLQSIPSVGEILALSWALEVGEVSRLPSIARAVSYCGLTSAQHSSAGKEQRGPISKQRNRHLQTILIEAAKLAPRHNSQLAAVHDRELQRGNRNRATLAVARKLVAYLMAVDKSGQPFQMRASDQEAA

SEQ ID NO: 91721 - protein, 338 aa, unidentified
MKLYAGVDLHSNNNYLGIMDKKEKKVYKKKLPNDLSEVLKALNPYRKDLEGIVVESTFNWYWLVDGLMENGYRVHLANPSAIKQYEGLKHSDDARDAFHLAHLLKLGILPEGYIYPKEERPVRDLLRKRLQLVHHKTAHILSFKNLVSRNLGFQMPSNDIKKLSEEDVEGMFKEEHLVMAGQANIATMHFLKERITEVEKAVLKRAKLKEEYHNLLTVPGIGKILALTIMLETGEITRFPEVGNYVSYCRCVGSTRISNGKSKGEGNRKNGNKYLSWAYVEAANYAIRLYPYVRRYYQKKTAKTNNIVAIKAISHKLARASYYVVKDQEVFNPKKAFG

SEQ ID NO: 91722 - protein, 389 aa, unidentified
MLKYCVGIDVSKNELQCCISTIDQLQKVTVKSSGKFANTQAGFMQLHHWICSRHKNKEVPLVVVMEATGIYYEQIAMYLFEQHYALSVVLPNKAKKYLQSTGLKSKNDQIDAQGLARMGAAQCLELWQPMQTYFYELRELTRQHQRLQELKTRINNQLHASQSGMCQHQVVIAQLQALITTLNQQIKELEAAIEQHIEHKEEVKHKVDNICKIKGLGTLTVAVILAEANGFVLFKNSRQLVSYAGYDVVENQSGDHRGKTKISKKGNSRIRRALHMPAFCVVNYEQHPFVGLFNRTLEHHGQKMKSYVAVQKKLLVIIYALWKNNTSYELNYKPHTHTGEQEQVLSSLPGLAQADPTGGQKNSASLQEQTALHKVNILSNDRSLLPLCQ

SEQ ID NO: 91723 - protein, 408 aa, unidentified
MLHCGIDWAWEELTLVIVDDNGIHLKEFKIKNSLDAFFYALSTIRQLCGEQEIIFGIETSNHRIVDFLASYGYKLYLINPNSMDKFRKRYKISGVKSDYLDAFVIANVLRTDLGTLKIITSKDELTEELGIVLRDRESLVELKTRLTNQLRACLREYFPQALKLFSDIACGLSLEFLEAFPTHEEALNGTNKQIESVLRRSKSYSHDKVQEIYEALREQQFPPSKAVIRAKRGLTLALISQIKPLIKQIEAYDKRINSLFEQNPDSQLFLSLPGVGNTLAAGMIALLGDERARFHSPRQIQALGGTAPITKSSGSYSHTQFRFSCNKDLRKVLSQFAFTSITKSIWARSYYNKKRREGKTRSHALRCLANAWVKVIFAIWRDNSLYDENLHLASVSRHIINQNSLSLT

SEQ ID NO: 91724 - protein, 427 aa, unidentified
MTDRVQSKAYGSWMAIDIAKDFNVVMVETIDGNTRRFRMANSAKDHDRLVEVARSLPQPCRIGFEATGNYHRTLAFRLMSEGFDVCLISSLASARFREVMFNSWDKNDPKDAGVLLELLKRGVVQTYMDPILTGFHDIQELSKTYYHITLSRTRLQHSILTHYLPLYFPEMGKWWNSTRTAWWINYLLHFPTPASVTKYSVEAFGELASPVIGRKVNKAAKLLELYDTAQHSIGLPITEDSIACQTFRLQLRRYQELNALRQELEQQAESTLNGHPDYVVLKSVPGIGPIIALTILAEGGDLRRFAHHRQFLKYCGLDLAKNQSGTFRGQEKLSKRGNARLRLALYMASVNAIRQPENSFRNKFHRYTAASPNDADLKRKGMTAVMAKMARVIHALIKSGTPYQGYFEALPSGLIPLCRAVGAYRTP

SEQ ID NO: 91725 - protein, 457 aa, unidentified
MSQRKGKARKSKINVNSLPPHLRHINLHAAGIDIGSDRHLVAVPEGSDDVSVRQFGAFTSDLEEIADWLKKCGVTTVAMESTGVYWIPLFELLEQRGFDVKLVDARHVKNVSGRKSDVLDCQWIQQLHTYGLLQGAFRPPDEVCVLRSYARQKEMLTQASTMHIQHMQKALQQMNLLLHNVVSDITGVTGMKIIKAILAGERDPDVLALNRQEGCRNSKETIAKSLVGNFRDEHMFALKQAVDLYEIYQAMIAECEQALIKHLERRPDVTDDQPPDSGKHVRLRERMRADVDVREKLFKMTGVDLFAIPGLAADTLLTLASEVGLNMEPWKSQKHFTSWLGLCPGTKISGGKRLDRKTKRNSNRAALAFRIAASSLARSQTALGAFYRRIRSRTDGRRAITATAHKIARIYYSMLTKGTAYVEAGQQAYEQAYKERRINALKKQAHSLGFQLQPCGS

SEQ ID NO: 91726 - protein, 365 aa, unidentified
MDNAYYTTIGMDVSDRTTKVCVMAKAGRGRRIVMETTIPTTKDGLARFLSTQDVASPVAFETGTHCRWMNEVAQGMGFKVYVANPCRLRMVTDSKAKNDKNDARMIARLALADPGLLHPVRLRGAEYQRMINLHEMRSLLVKQRSGIIVQLRAVAKSMGFRIAKTSAAGFHNLDRAAWPKELRDIAWPMLKNLEQLAVTVKTYDKLIRELAGTPAFKAQVDRLMEIHCVGILVATAFVAVTGGDMDRFKRPRDVGPWSGLAPKQDQSGDVDRQCHVTKAGSPLLMRLLVESAQLIMRDCSSDTDLKAKGLRICARGGKIARRKAVTAVARSLAVLMTAMLKKPDAPYVPLSERCEKELLAMRAMV

SEQ ID NO: 91727 - protein, 368 aa, unidentified
MDKITTSFVGLDVHKDCVAMGVAPTGRDAPRFVGTVVPQWAPLCKALRRLGRVRELQIVYEAGPCGYTLARQLRSHGYACEVIAPAKVARRPGDRIKTDRRDALLLARAARAGELVSVTIPDERDEALRDLSRAREDAVRARLKARQQLKALLLRHGHRYAGKSSWTAAHERYLAEVSFAQPAQDIGFAEYRSAVREAQERVERLTEALRAQLEHWRMRPVVEALMTLRGIDLIAAVTLVAEIGDFNRFARPCELMGFLGLVPSEYSSGSKRRQGAITKTGNSHARRVLVEAAWNYRFPARVSRVLQVRQEGQPKAVRDIAWRAQLRLARRYRHLSARKLALNKICVAIARELSAFVWDIARQVKPIA

SEQ ID NO: 91728 - protein, 452 aa, unidentified
MFIMPKTPAPTLVHPDAAGVDIGAAEIFCAVPADRDESPVRRFASFTPDLHALVRWCQHCRIRTVAMESTSVYWIPLYDLLVAAGLEVYLVNARHVKNVPGRKSDVQDCQWLQQLHSYGLLRASFRPGPPLCALRVLVRQRDTHLRGAARQVQHMQKALKQMNLQLSEVLTDITGLTGLTIIDAILAGERDPAVLAQYRHHHVKASEATIRKALTGHYLPEHLFTLQQALALYRFYQELIVQLDEQIEQRWQALAAHVTVEPPPLPRSAKSNRGRRAGNDPHFDVRALIYRIVGVDLTQIEGIGPSVLQGFIAEVGWDMRRWKSAKHFASWLGLCPYNKITGGRVIATGTKRTTGTAKHLLRLAAQSLKHSKSLLGEYFRRLRARLGAPMAITAMAHKLARLLYAMLSRGQNYDPKQLQQQQQRHQQRLVRNLKKRAAAFGFQLVPTPLPST

SEQ ID NO: 91729 - protein, 343 aa, unidentified
MNSIYYIGLDVHKKSIAYCIKDVTGKIVCQGMVKAERRALQQWLVDLPGSWVGALEATMFTGWIYDFLKPYAVELKVAHPAMLKAITAAKKKNDRADAEKLADLLRVNLLPECTMMSEELRELRRILRYRNMIVRTASKMKHKISGLLMEVGAVYDKRKLHGKRYFGQLLERVEDVPDSVKDLLKLSRSNMELFVAIQKKLLKTLREDSLISKRVELLRSISGVGEIMALTWVLEIGDPGRFSNSRQAISYCGLCSAQHESAGKEHRGPISKKRNKYLQSMLIEAANIAPRWNPQLAMLHEKELTRGNRNRATLAVARKLVIYMLAVDRRGEPFITEKESLVA

SEQ ID NO: 91730 - protein, 376 aa, unidentified
MYGLKHQKEKHSMDHFAGLDVSVKETSICIVDGTSKIVREAKVASEPEALLAVLKNPAYHFKRIGLEAGPLSQWLFSALAEAELLAICVETRHMQAVLKAQINKTDRNDARGMAQMMRVGLYRPVHVKTLRSQKLRMLLTHRKLLQSKAIAIENDLRGTLRNFGIKVGIAGKVKFEPRIKELVESFPDLAVLVEPLLVVRRVLREQLSILHRRLLVIVRDDDVCRRLMTVPGVGPVVALTYRATVDLPVRFRKSKAVGAVFGLTPSKYQSGEIDRTGAISRCGDDMMRMMLYEAAQSMFHSPKWSWLKAWAMKVARRRGMKKAIVALARRLAVISIYGPAVRCKGIRTGWSFWSALIYPASRGSSCSGPSWLSAHT

SEQ ID NO: 91731 - protein, 307 aa, unidentified
MWEKIYFGVDVCKESLAFCGPGVAGQVANNAPGQRRLLARLPKGAHLIIEASGGYERELVRMAQQSAVPVSVVNPRQVRDFARGVGRLAKTDPIDAEMLARFGATVNPPPDAVPTAAELALQELLSARQQLVEQRTVLLQQQAQHLNSIVRRLDRARLKLLQRQIAQLELAIGSILEEQSALKQKVERLQQVKGVGLITALTCVALCPELGSLSRGQTAALVGVAPYDDDSGARKGWRHIAGGRPRLRRALYMAAISAIRSNPILRRFYQQLRQRNKSSKVPLVAVIRKLAILLNQLLRNPSFLPAS

SEQ ID NO: 91732 - protein, 353 aa, unidentified
MNNVDNIRLEQYRQIRKEIRGSSEYLIVGIDVAKDKHYAFFGTATGKTIVKRLIFENSMRGFETLLTHEEILKVQHSFNKVIFGLEATGNYHKPLGEHLIKCCRNVVLVSGVAVKNNRTMMDCRWDKNDTKDAAVIADLISQGKFLFYEYTAMPIRDLRNLLSLKRRLKKQEHVYKVRIRNSLLAQYFPELDKYYRVCGKEGLAIVRWCLDPSVISGLEYDEFVRRVAPNGRGGIPQQERLRAVWKKSIESIGCAVGESLDVETKLMVEGLKYTRETIRYVEKKIEEICLDIPEYQYILSIPGFGPDISSKVVGAIGYPFRFDNGRQILKMAGMDLSANRSGKKSDTVIPKLS

SEQ ID NO: 91733 - protein, 358 aa, unidentified
MRSISGWTFTRIRSQSGFLNPGFERPDVEKIFHDEESVRRLIGRFENPVDLRACYEAGPTGYDLARLLKGLGVHCEVIAPSMIPKGPGDKIKTDTRDARRLARLHRAGELVAIRIPTPKEEAVRDLARTRGDMVEDLTRARNRLTKFLLRHSRVWRGGSNWTVKHEVWLRAQHFDEPALQTTFDHYRGVILARDAQLAAVEADLQMWFGKEPFCDPVRRLAAYRGVSTMGALVLQSEVCDWRRFGRSGSFMGFVGLVPREYSSGSSTRRGHITKAGNAHLRAQLVESAWSYQHRPYVGPEMAKRHEGLAPEVVARAWRAQMRLCGRFRHLAERKNTKSVVAAAIARELAGFLWAEMVS

SEQ ID NO: 91734 - protein, 412 aa, unidentified
MEVLHARCCGIDIHKRSITVCVLIREAGRKEQKHLREFATTTSEILNCADWLRSLGVTHVAMESTGVYWRPVWNLLEGQFDLLLANATHMRNVPGRKTDIKDSEWIAQLLQHGLLKPSFVPHTVLRDLRELSRDRTSLVAERSRLKNRIQKILEEANIKLGSVASDVLGKSGRAMLTAMVEGQENPQQLADLALGQLRLKIPQLVEALRGRVRGVHRFRLKQQLERVDFIDAQIAQLEAEIERQNAPFDEAVSLLAEIPGFDRTTAWSVIAEIGIDMNQFPSADHLASWAGVCPGNNESGGKRLSGKTRKGSRWLRQKLCQSAWCASRCKNSYFRAYFQRIAAHRGRKRAIVAVSHSLLVVCYYLLKRRCHFQDLGVNYFDQLNQEKLTRYFVKRLTRLGHRVTLEPCSAAA

SEQ ID NO: 91735 - protein, 342 aa, unidentified
MDEYDGKQFVGIDLHRQRSVIVRQSESGEQLSAVRIVNDPVALGLQLEDAGADPEVVLEATYGWYWAVDVLQAHGAQVHLAHPLGVKGFRYRRVKNDVRDAGDLADLLRMGRLPEAWIAPPATRELRELVRYRAKLVAIRSGLKAQVHAVLAKAGVLIAVSDLFGVAGRQRLAKVPLAAAYAERVRSLLELIDILDGHEARFAALIAKQLDADRGYQAIQQVPGIGPVLAAVFVAEIGDVGRFTGPAQLCSWAGLTPRHRESDTVVHRGHITKQGSKLVRWAAIEAVQRHPTTAKIGADKDRIEARRGKNIAKVAAARKLLTLVYYGLRDGHIRALDPDRAA

SEQ ID NO: 91736 - protein, 406 aa, unidentified
MIFVGIDWSERRHDVCVLDADGVVLGKAKVSDDVSGVGRLHAMLAEHVDDPSDVVVGIETDRGLLVGWLVQAGYHVFAINPMAASRYRDRHAVSRAKSDPGDAKVLANLVRTDRQNHREVAGDSELAEAVRVLARAHQNLIWSRQRQVNALRNTLREFYPGALRAFSPSQLASVEACSVLAMAPTPTWAREKLTMPRLRRSLAASGRKRNLERRAGQILEALQAEELSAAPLVEQAYGDVVGSLVMVIDGLTHQIAKLETELAERFEGHPDAEIITSLPGLSSVLGARVLAEFGDDPTRYADGRARRRYAGTAPITRASGTRLVVLARVARNRRLFDACYLWTFSLLTRSSGARRYYDAHRARGKTHHQALRALANRWVGIFHGCLIHHELYREDVAWVVHADAAA

SEQ ID NO: 91737 - protein, 336 aa, unidentified
MQSPFLSSLSLLSFWKNQERGWKYMVIIGIDVAKDSLVGVRIDRSSCVKETYLVTNTKASIETFLTKVAKKWKKLVIGSEATAEYHRELALQCIARDIPFRLLNPITTKQFTRATVRKRKTDLTDAQVIAKLLLQGEGSMVTKESFTLTKPAIRTAAKLSQMRQMLLLMKQRLHSIGMDDELIKQLDTCMTVLKETEQSYEHYAAVSQSSKLSKLLQTIPGIGPTTATRLLAEIGDINKFSTGKRLVAFCGLDPKVKQSGTGLHRNTHLTKRGSPYFRKAIFFAASIAQMHDAELKEYYEKKRQEGKQYKEATVAVARKLLYRVYAVWKRQTPYTV

SEQ ID NO: 91738 - protein, 347 aa, unidentified
MRFYTQQHKHYCGIDLHAKAMYVCILDQSGTKLVHKNLPTTPEAFLRVIAPYREDVVVGVECMFTWYWLADLCQKEGIAFVLGHALYMKAIHGGKAKNDKIEAHKIAVLLRGGMFPVAYVYPAEMRATRDLLRRRCPLVPQRAELLAHIQNPNSQYNLPEIDKKLAYKANRDGVADHFPDPSVRKTIEVDVSRIDHYDKLLGEVELSMTRTAKTQDVQTFARLQSIPGVGQILALVLLYEIQDIPRFPRVQDFISYCRLVKCAKESNNKRLGTSGKKIGNVHLRWAFAEAAALFLRHNQPGKAYFTQLEHNHGKATALTVLAQKLARAVYYLLTRHQAVARQRFVAT

SEQ ID NO: 91739 - protein, 339 aa, unidentified
MSIVMGLDQHRGQVTGEWIDTETGEVERTRVSPADRAHIRKWLSRFRGQELEVALEATTGWRFLVEELRRVGAVVHLAEPAETAARRGNKKRPKNDRADARHLRELLMIERLPESWIPPDHILDLRARVRLRHRLKEQRSEWQQRIQATLYHHGCPQRRQLMTGDGREWLDAQPLPATARETVAVALAMIEALETQIAPLDKALRSYARRQAGCKALMAHYGIGELCAVTILAELGDCTRFSSSRQAVRYAGMDITVYESDRRRAPGHLSRQGPPALRWALFEAAQQTRRRTASPDRDYFEQAAERIGGNRACLSVARKLLKRSYHTLRELGEQALAPA

SEQ ID NO: 91740 - protein, 370 aa, unidentified
MLDTTTFIGLDVHARSIKAVSLDVMTGEVRCATFGYDAGAVAEWVRSVDPRARCVYESGVTGFDLQKRLSGLGVDCVVGAVSKMIKPSADRRRKNDRNDAEFLARMLSVGNVVEVWVPDDECEAARDLTRALEDARDDLSRSKQRLSKFLLRHGLAFDERTPTGRRKGNWTRAHWSWIESIGFAEGADNDVLAYYVDAVRRAAEEKARLEGLVEAEARKPRWRKRVDSLRCLKGVDTASAADLVFEAGEFSRFRNARSFAAWVGLTPSEHSSGESDRRGSITKAGNKHLRKTLVEAAWHYLTCSGRPKDLAKGQAPDRVARRHAAKGVRRLVERREALLARGVHGNKANVATARELACWVWAVGLMAEEA

SEQ ID NO: 91741 - protein, 352 aa, unidentified
MMIIGCDFHPRFQQISFLLQETGECGQRRLMHTAEAVEYYRSLSRTTVRIGIEATGSYGWFRRLLSELGHELLVGDATQIRASNPRRQKTDKRDAEHILGLLMEDRFPAIWQPPAENEQLRQLLLHRSRLVRLRTRVTNQLDGMAKNEGLILPGGWSGKRRKEIEALLLPGWYGERRKDLLGLLDRLEERIAPLDKAVSQAAANNAEACLLMTHPGVGPIVSLAYVLTIGNWQRFPRGKQVGSYLGLIPAEESSGDKRRLGHISKQGNTLLRWLLVEAASTAQRYDPSWHRQYLRLSMNKHHGVAKVAIAHKLAVRLYWMLRSGEDYQHVRERGSHARQSECPGGRSTRPIE

SEQ ID NO: 91742 - protein, 403 aa, unidentified
MNAVGIDVSKGKSMIAVMRPFGEVVASPFEISHTERELGELTRFLRSLSGETKVIMEYTGKYYQPIARYLREAGIFVSVVNAILVHDYGGSSLRRVKTDKKDAIKIANYGIDRWVDLTEYTPEEDIRQMLKTLNRQYNQYVKVKVMLKNNLIALLDQTFPDVNRLFSSPARKDGHERWVDFAATFWHCKCVSDASENAFKERYAKWCKKHRYNYSPVKAAEIYTKSCNLVSTLPKNDTAKLLVTQAIAQLNTIFETLANIMNEMHRLTTLLPEYDVVMDMYGVGPTLGPQLMAEIGDVRRFYAKKALIAFAGLDSPPNQSGAFESKSRSMSKRGSASLRKTLFQVMSVILQNSPPDEPVFQFLDKKRAEGKHYGIYMMAAANKFLRIYYARTKEYLTGLDEVA

SEQ ID NO: 91743 - protein, 355 aa, unidentified
MESVKYIGLDVHQSTISVAVLNAEGKRMMQSVIATKASAVLDLLQGLRGVLHLTFEEGTYSAWLYDVVVRQVARVVVCNPRKNALLKSGNKSDPIDARKLAELLRAGLLSPVYHGEQSTRTLQQLVASYTALTEDTGRAMRRIKALYRSQAIACAGKKPLGKRHRGQWLEKLTDRGQRQRAQWLYQELDAIQVLRRQARLAVMAECHRYQAAKWLRTMPFFGPLRSAVLIARVQTPHRFRTKRQFWTYCGLGLETRSSADYVEKDGQILRRRKPVYIRGLNWNYSHELKNVFKSAATTASAMDGPFRAFYESRVANGMLPAMARLTLARKMAAIALILWKKGETFEAEHLKLQAA

SEQ ID NO: 91744 - protein, 360 aa, unidentified
MAKARTLVGLDVHAAKIVAVVLDGETGEVAHFRMSGEAAAAAGFCAGLLGPVRAAYEAGPTGYGLARELARRGVECVVAAPSKIPRAAGDRVKTDRRDAEHLVRLLLAGKLHPVRVPGDEEEALRDLVRAREAVRVDLMRCRHRLSKLLLRRGIRFDDGRAWTDRHRRWLATIALGWPAAQITFQDAIGAVDALEHRRGQLESEIIALLPDSPWAVQTGRLRCLRGVDTLTAVGLCAEIGDFARFAKPAQLMHYLGLTPSEDTTGESRRLGSITKTGSGHARRLLVEAAWHYRNRPQVGKTLTNRQAGQPPEAIAIAWTAQRRLYRVWTRLEQRAKRRTIIAVAAARELAGFCWAITQIE

SEQ ID NO: 91745 - protein, 311 aa, unidentified
MNEHDPVIVVGGVDAHAETHHAAALDERGALLATESFPTTTPGYAALLDWLCGFGELTAVAIESTGSYASGLVRYLREHNVWVLEVNQPHEHTRRRRGKSDSIDAELAARLLLAGKATAIPKQTDGIVESIRLLRDARESAVKSRTAAILQLGGLIVTAPQELRDQLKSRKTLRGKAALCRRFRPALNELATPTQAARFALRSIARRISALDDEISNLDRQLETLVLAAAPRTTALLGISTGHAGRLLITAGQNIERLRSEAAFAALCGASPVPASSGKTIRHRLNYGGDRQANRTLHLIVVCRLLLEKKI

SEQ ID NO: 91746 - protein, 412 aa, unidentified
MNIRVEKACGIDIHQAFLMATMLDLAGTKDTRRFSTCIEDLLSLREWLVDNKCQRVAIESTGVYWIPTYTLLEGKVETIVANPLQIKNIPGRKNDILDSEWIAEICLNGQIKPSYIPPKEIREIRELTRSHVKLTQARTAFKNRAHKVLSRAGIHISGVLTDIFGKSGQIILNGILNGKTIDQTFVEIKNKRIKIKKTEIKESLKGELSQNDIFVIKECLESIKFFDKKIKEFDSKINQNLKGMSKEMKILMSIPGVGFTTAAAIMAEIGNIGVFSKPKKLVGWSGLAPSINESAGKSSNGHITKKGNKFLRTILVLAANSIAIGRPNKLRFFYQRIKGKKGHKKAIVALARKLVSIIHHLLTFKEVYSEEEGKQKQFKLPKFIPVKDFSIDDMIGILCEAGYSVNKTAANS

SEQ ID NO: 91747 - protein, 395 aa, unidentified
MTVFIGIDISKDKFDVNFKTDNNKQKVICRKYDQTKQGIETFIADIKSIVGKEEYVIGLEATSRYHLNLSDLLIKQGHPLVIFNPLETSSVRKWNIRKSKDDGIDADVVSNALILEMMGSKKRHISSDDKLELKELVTLYHRLVTKTSDLRKELRMCLNNLCPGYEQEFDNILSASSYSILKKAVKKTKLFDMSNEDILNELRKNKNRKKSRADIALSVYDSFQNSTCPGYMVDARVFEVKSILGQYDVLSKQTKQVFVKIQKKYDEIGQYIDSINGVGTIIGATSLAILGDVRRFHGYNSLDAYVGLDPVHMSSGKSLKRVGHISKQGNRLLRTALMRGALSCIRLNPVIRKKYYELRSRGKCHRTALVACARKLLHIIYSVEKNQKMFYVPDS

SEQ ID NO: 91748 - protein, 334 aa, unidentified
MSNVTTCGIDLAKNVFSLHAVDGRGVVVLRKTVSRARLAAVVAQLPPCLIGLEACSGAHEWARRFAQHGHTVKLMAPKFVAPYRKSGKNDNNDAEAICEAVSRPSMRFVPVKSVEQQAMLTLHRVRLGFVEERTATINRIRGLLAEFGVVLPQRVVEVRRGVAASLDQLPALAQRALSDLLAHVRVLDERIGEYERELEQHARGDERAKRIQKLSGVGPISASAIVASVADAHEFKNGRQFAAWLGLTPKQYSTGGKTRLGRITAHGDAYLRTLLIMGARSMLQTALRRTDRLARWALGVRARRGYHRACVAIAAKHARIIWAMLAKNESLQLA

SEQ ID NO: 91749 - protein, 341 aa, unidentified
MKQEMHVLGIDIAKHVFHAVGMDERGKIVFRKRLSRHDLIPFLAKLPPVLIGLEACGGAHDWARRCRASGHEVKLMAPQCVKPYVKSNKNDSRDAEAIAEAVTRPTMRFVPIKDVDQQDIQALHRVRERLIGERTALVNEVHGLLHEYGIVIPKGVAKFRQAVIGKLESEKDKLTSLSQEMFWKLIEEFAGLEKQLAYYQEKLEALATTHPECQRLMTIPGVGPLTATALVAAVSDASAFKNGRQFAAWLGLVPRQHSTGGKDRLLGISKRGDSYLRKLLVHGARTTIRWVGRKTDRRSQWIRQLVERRGKNRTAVAVANKNARIVWALLTSHQDYQLATG

SEQ ID NO: 91750 - protein, 354 aa, unidentified
MRDRFPLGDKAAKERGPHSFQCQIPNSRLGIKARISKEGSDIMTELFIGIDIAKDTFDISVLPTKEQWSNENNPSGIADTVERLKKLKPAHIVLEATGGLETHLAAALYTAGLLVAIVNPRQVRDFAKAMNILAKTDKIDAGVLALFAEKVRPECRPLPTEEERELKELIVRRNQLIDMRTAESNRKRWVNSEQASHSITVLLETIKQEIESIECEIKNRIKESPVWREKEKLVKSVPGIGEKTAFILIGSLEELGTLNRKKIAKLGGLAPMNDDSGKIKGHRKIIGGRADVRNALYMATLSAIRFNPKIKTFYTRLIKAGKPFKVAMTACMRKLLTILNAIMRDNVPWNCISA

SEQ ID NO: 91751 - protein, 460 aa, unidentified
MEVPREVPDEEHERVWERVAAVDVAKGSGVVCTRVPDEDRPGRRRSHVWTVPARTGAITELGDHLRGLQAQVVTLESTSDYWRIWYVILEAAGLKVQLVNARTVKNVPGRAKTDKNDAVWLAKLTERGMLRPSFVPPPEIRRLREFTRLRADLVHDRTRHWARLEKLLERALIKISDVTSTLDLKSVRAMIEALIAGQRGPRILADLARGPLRKKRAALAEALDGRFEDHHGEIARILLDQIDSLTAQIEALTGRIGELAAEIPAAWGVDADGTAGPGAGHAPDAAVLPAVARLDEITGCGPYAAQAVIAEIGLDMTVFGAPGRLVSWAKLCPQTRQSGKKTSHGKAGKGNPWLGGILGEIAATAARTDTFLGQRYRRIARRRGKRKAQVAIARSILIIIYHLLADPAARYRDLGPDHYDLRVNRDRKIRSLIHQLQAINADPAEITALLTTHPPAARPA

SEQ ID NO: 91752 - protein, 351 aa, unidentified
MLRAATVHTVTAIGIDMGKNTLHMIGLDPRGAIVLREKVSRGRITSRLANLPPCLIGIEAGMATHYVARELAVLGHDVKQVPPAYAKPFRQGHKNDFRDAHAVAEAAQRPTTRFVPAKTDEQLDLQALHRVRSRLVSERTAVINQIRGFLLERGIIVRQGLRFLRQALPDILAKRTDVLSPRMVRIVADLASDWRQLDERIEVVTDEIETLAKSDSSCRRVMTVPGIGPIISSAMIAAIGSGAAFARGRDFSAWIGLVPKQMSTGDRTILGRISKRGNGYLRMLFMQAARVILLRPASWPKHGFGVWLARAAQRLHPNVLAAALANKLARIAWTVLAQERSYETRLTKAAA

SEQ ID NO: 91753 - protein, 433 aa, unidentified
MLTLPQTKEANMSEVTFPRLVSRGCGIDVHQKVVVATIDGEGLTKETREFETFTSSLTEMRHWLEVNGITHVAMESTGVFWVPVFTILEKSIPNVWIVNARHIKYVPGHKTDRKDSGWICKLLLAGLLKPSFIPPLEQRNLRELTRRRRQLVQEISSEKNRMMRLLEQCNIKLKSVMSHMDGKVATQLLDKLCSGEEVTMEYINSVYHGRLNATPEELYKACQGKIDNDNLFLMYVIKAHIYEMEKLVAQLSERISAKLSPQRAILDMLKAVPGLDLRTSENLVAEIGFDMSKFPSAKHLGSWAGLCPGNNESAGKRKSGRITHGNKQVKAVMTEAAWASTRTKNTFYSERYHRIAARRGKKRALIAVAYSMLTTVYNILANNVTYKELGAEFVTLLIEKKRKKYLTTELTKLGYEVQIVKKQPPLKTEGCST

SEQ ID NO: 91754 - protein, 367 aa, unidentified
MSHIIYCGVDFHARQQTICCLKTETGEFTSHELKHDHKEELRKFYSELGGPVVVGLEASGYTPWFEQLLEELGHEVWLGDATEIRRRARRRQKNDRRDAELILELMYHAEFPRIHRPLPQSREILRRLRYRHKLVKLRTIVKNSLQALSIQAGLSLQARLFTRQGTQQLEALTLSPVMRHQRQQWLELLQELNQRITETEGWLKQQALSDPRIQLLRTHPGLGLLSSLGIVHTLIPVSRFPNTRKVAAYGGFDPMERSSADKKRYLGISKAGSRLLRFLLIEATQTAVKTDPELKRFYHRLVQRRGKPKAKVAVARKLLIRSFIMLRDEINYAEFQQRAIAARLAREFARPNVPVPLIGQPASPAKG

SEQ ID NO: 91755 - protein, 420 aa, unidentified
MKPIKTTKRSFVNGKKLIVTADIGKDKHFGYWRCPDGTDVKPFAVPNNRAGFGEFWERVSRAQKLHNLDGIIFGFESTGPYGEPLAHFMRARGAELVQVNPLHTKRFKEVTDNSPNKTDQKDPKVIADIIAMGRFLTVVIPEGPAAELRRLSQARERSTRRHTALANQIQCLMASIFPEFLQAMKGVKSASAQYLLKHYPTPQEIAAYGLTELTKTLRKVSRGKLGADRAQALYEAAKSTVGVAEGQASMVLEIQELLALMEASQRFTENLELEMIKYLAQIPYSNTLLSLKGIGDVTAAGLIGEVGDFQKFRTMGEVMKLAGLDLFEVSSGRHKGQRHISKRGRPLLRKLLYFAALNTVKKGGAMHQWYRSACDRGMPKPKALVAVSRKLLGILFALVRDHSAYVPNYPETRYQLKEAA

SEQ ID NO: 91756 - protein, 427 aa, unidentified
MNYTQNEKIMSITERTLVVGVDIAKTIHYARAFDYRGIELAKVFKFENSREGLESFKEWIDSIAKEAGKTSSIVGMEPTGHYWLNLGHFLRDEGVRLVLVNPFHVKRSKELDDNSPTKNDRKDPKTIAKLVNDGRYSVPYIPVGIYSDLRIVMNVRDTINNSLIRIKNRVIRWLDMYFPEFFDVFGDWEGKAALITLREFPTPEKIIATGIEKIVATWRKGVERAVGVKRATRLMEAAKGSIGIKEGLRMAQKELRIIIQQYDMYMEQLSEIEAEMEELALRVPGVKEMLTIKGVGITTAAGFMAEVGDVSRFSHPSQIQKLAGLNLVENSSGDHKGQTTISKRGRSRLRSILFKVIMPLVAKNDEFKMLHKHYITRRENPLKKKQSLILLCCKLIRIVYALINKRVAYSPERLLKNISYLQLQDAA

SEQ ID NO: 91757 - protein, 364 aa, unidentified
MTSMTVTPPPLQPMYGGVDTHKDTHHAAVVDTDGHRIADREFATGQHGDDQMCAWLTQWPIEAIAVEQTGTYGAGLTRSLHAEGYRVKELNHPDPTVRACAGKSDPIDAYSAAQAARTGRASITPKDRTGIIESIRMIKAARASAIKARTAAVNQIRDFTIIAPQIRDKLTGMTTTGMMAVIITWRPHRDHLDDPVQAAKLVLRQVAIRVRELDAEITAYTRHLDTLTAQIAPRLRALPQVGTLSAAQLLITVGQCPTRIKTDAQFARLCGIAPIPASSGKTHRTRLHRGGDRQANCAIHLVTIGRLNRHEKTIAYRDRRTAENLSTKDIIRAVKRYVARELFYALKADLTAWDTNQNNHAHTT

SEQ ID NO: 91758 - protein, 375 aa, unidentified
MHDHSEVFVAFDTSKLRHAVAIAEAGRAGEVRFLGEIENSAAATAKLVRKLASKYQRLTFCYEAGPTGYGLYRQIRSLGHECLVVAPSLIPRKPGDRVKTNRRDAFSLVKLLRAGELTAVWVPDPRHEAMRDLTRARETAAMDLRRKRQQISAFLLRQGRAYPEGKNTWTKAHLNWLASQKLDYPEQRIAFEEMMLAMRQAQERTERLEQAIRAAVPDWSLAEMVTALMAMRGMDLISATTFLAEIGDLSRFETARQLMGYLGLVPSEDSTGDKIKRGPITKAGNRRARRMLVECSWSYQHPPRVGKDKQDKVAAAPRAVRDIAWKAQCRLNRRYRALIRRGKLKTVAVTAVAREFAGFIWAINRELTTAHAAAR

SEQ ID NO: 91759 - protein, 401 aa, unidentified
MPTVRENGTRIKRFRELKATLRTDRTRLLVGLDVAQAEHVVHLRHAHTRIVVPTLTIPNTTRGFTALWARIQQAQRTTGCREVVCGLEPTGTYHQAVATFLEAQGADVVFLSSSVAYWNRRTQDGTWDKNDPKDAANGADLLEQGKVLFYRQPTGPLAELRHLVRCLRRVRTELASCKARWRTTLRPALAPMGESLPQRLWAELPTVLQPWERAAPGRPAVPKGRLPLGLATACADLGTQVTAVQARIAAIEQALTPVAERLPAYALLRSIPGVGATVAAVLLAEIGDIGWFTKFSQLRKLAGLDIVRVQSGQFAGQQRISKCGRGLLRWALYHAAVGVTRTVAGRARLAALKAKRRGDRFAGFKALVELAAKQLRVIWGVWRSGTPYDPTRAGGLRRPVR

SEQ ID NO: 91760 - protein, 316 aa, unidentified
MYLGIDVSKLTIDCCLIADGQNHQKKFQNNKGGFEQLTKWLQSHKVSDKLHCVCEATGTYYEALAEYLYSRYTITVENPRKIKGYAIAELQRSKTDTQDAKLIAQYCQDRKHKLKAWQPPAKEQKQLQEIARYLDYLKQQRATEKAKQHEAPDYIKSHIQTTISNLTAQIQTVKKQLLQFYKDNPSYNNLRKRLKTITGIGEQATAVLLSTYKRHEFKNAKQFTAYLGLDPRKYQSGTSVNGKSRISKIGSSEIRKSLYMPAVVAYRCNAFPEFVGRLKNKGKHIKLILIAIMRKLAVIAFTLLKNGQDFKVERYK

SEQ ID NO: 91761 - protein, 315 aa, unidentified
MTITLEKYVGIDVAKEKLDVAVLGQKATTEAFNTPKGITSLVKKMCQLKPRLIVVEATGGYEEEVVLRLFEAGLPVALVSPQRVRQYAKARGLLAKTDKLDAQNLAEYGKNIQPRLFVAKSEAGRRLSAIIGRRRQLADMQKAEKNRLRTAFLEMRGSIQTVIDCLEAELKYLDAEMRKFMKEHVDFGEQEKLLRSAKSIGPVTAATLLADLPELGELDRKQIAALVGVAPMNHDSGRKRGYRKTKGGRPEVRSVLYMSALSAIRYNPVIKVQYEQLVKRGKQKKVAITACMRKMLTILNAMMRDQQPFREINMA

SEQ ID NO: 91762 - protein, 363 aa, unidentified
MGHHSGQLKKHSKEGKPDMLYIGLDVHSKCTTVAGFDPKTGEMLRIDKMSNDRESVKEALGALKGPLYGVMESGTNSWAMYRELLPYFEGLVVAEPAKLWNRQTDRGAKTDRRDAMRMAEKLYRGEIDPLYIPDEHTQDLKVLVRGKIRASRWVTRLTNEIGSLLRSWGYVGERSLLSKSGKARLDEAELPAHSARVLELWKEMLEKAQEIEDELQKAIEEEAARDGDCAILRSIPNVGAFTALLIRAEVGDIRRFAKPSSLVSYAGLSPKTFQSGDSCYHGALGHWGNRWLKYGLCLLANRVAHSKRDNALHRLYWRVCLRDHRNSAKVAVARRAAEIIHHLLKKRECWEPYKKEERAEVAA

SEQ ID NO: 91763 - protein, 390 aa, unidentified
MFYLGIDIGKFHHAAALMDQRGKVVSTLPSFPNTRSGFQNLLALITKHLPSVEGLRIGMEATGPYWIPLAEWLKTHGWTPVILNPIKTASLRNYGVRESKTDNIDSVLIANTLRIEGEQPQPVSPKLSEELRHFTRLRADMTKDRTRLALRMTSLLDRLFPELLSSFSKTLSPSCLALLSEAPTPSKVLALGEERLAALLRKVSGGNLKATRAQEIMDKAIESVGVPSQAMEEVLALLLEQINLLGSQLRTLDRRITDLYEEAGLCFTSIGGVGIFSAATILGEFGSVTKFTQPKQMVAFAGIDPKLRNSGKHQGQVHISKRGPRYLRRALYLACQGAVRNDDDFHSIYQRYRDKGKSHKEAIIAVMNRFIHVLYAIWRDNRPYYPLTQA

SEQ ID NO: 91764 - protein, 322 aa, unidentified
MSTSVLGIDIAKQRFEAALLVNSKIKNKSFKNSTEGFESLSLWLEKQGSRKVHACLEATGNYGEDLAIYLHEAGHIVSIVNPARIKGFAQSELIRTKTDKVDAGIIARFCLAMKPDTWILPSMEIRILRALVRRADSLIDMRSQEKNRIGTAHESVIPLIKEHISYLDQEVEKIRKQIANLIEQDPKLKQKKDLLDSIPGLGKVTIPTILAELDNLEKFTHVREVVAFIGLAPKETLSGTSIKGKPRLCKIGHARLRKALYMPALVSIQCNPVMTAFYNRLKEKGKNGKVIVCAIMRKLVHIIFGILKSGKKYDPNYKPAFA

SEQ ID NO: 91765 - protein, 344 aa, unidentified
MLYVGLDLSRKRLDWQALDPEGAVAAVGAVPPDRDGLVRLADRLDERPVLAVIESMTGARFVHDQLELAGWDVRIADAVKARGIAPLACKTDRIDCWVLAELARRELVPEVWLPDPAVRAERERARFRLHLVKHRSSLKNRVHAILFQHGVPNGHSDLFGVSGRRLLERLALPEPWASTVQASLALIDTLDEQISGCERELRALGADHPYIPLLMTCPGIGWVLAYTIASEIGEITRFATPRKLVGYTGLCPRVDQSGERDRRGPLRKNGPSYLRWALVEAAHTACRHPAYAPVRERMRERHGQKRGSKIAAIEIGRRLSEAIWHMLTNSQPFAPAGAAASLAT

SEQ ID NO: 91766 - protein, 360 aa, unidentified
MSHERTFVGLDVHAWSVVGHALDGLTGEVWQRKLSPDPEGILGWVSGLPQPVKVAYEAGPTGFGLARFLRGHGVACSVAAPSKLQRPSGDRVKTDARDAEHLARLVKLDEIVEVTVPSVQQEAARDLVRAREDVRGDLMRARHRLSKLLLRQGILWTGGQAWTGRHDVWLRSQRFDLVGRQLAFDSAYETMALTLDRRNRLDTAIIEMAEHSEYTDLVHRLGCLRGISTLTGFGLAVEVGDWTRFSGSTIGAFLGLVPTEYSSGQTRSQGSITKTGNSHARRLLVEAAWHHRKTYRNPGQVMRTRWDLAPAVARVRGHQGNQRLHQRWEGFIVRRKKPVIANVAVARELAGWAWSLAVME

SEQ ID NO: 91767 - protein, 343 aa, unidentified
MTEVTTIGLDLAKNVFQVHGIDASGRVVVRRQLRRSQVLPFFEKQAACIVGLEACATSHHWAREIARLGHDVRLMPARYVKPYVKRNKNDAADAEAICEAVTRPTMRFVAVKTEEQQSVLMLHRTRQLFVRQRTALINAIRAHMAEFGIVAGVGRNGVERLLRLIGEGSDERVPPVARECLQALRTQLVLVKRQILEADRRILAWHRSNELSRRLETIPGVGPLIATALVASIPDPHAFGSARDVPAWIGLVPKQNSTGGKERLGSISKAGNRYLRSLLVVGALSVIRRAKQVGYTRRAWLAELMARRPVKVAAIALANKIARIAWALMVNGTRYREPIPQAV

SEQ ID NO: 91768 - protein, 353 aa, unidentified
MKHVTTYVGIDAHKKDLFIAMLIGHEATPVTWTVPNEPNAVRRFVRRLERDAPGPVRACYEAGPCGYVLQRQITTPRVSCHVIAPALVPRKPGERIKTNRRDARKLAELLRANVLTEVRPPTPEEEAVRDLCRARDDAREDLQRCRHRLGKFLLRRGLHYNGRNWTRAHRQWIDSLAWTHAAERVLLEDYQLAIDHVEARLIELDRRLVEIAEAAPYREPVGWLRCFRGIDTLTAMLVLAELHDFRRFKSPRALMAYLGLVPGEDSTGEKHRRGRITRTGNALVRRLLIETAFMRRRKGQPGRVIAIADKAQQRLCRRFRRLAEQHKPAPKIAVAVARELAGFLWAALQAPAA

SEQ ID NO: 91769 - protein, 454 aa, unidentified
MAKKAKKVKTGKGLKLEIVNPHAAGIDVSSTEMQVCVPEDRDSDNNRCFGTFTEDLHTISSWLKACGITTVAMESTGVYWVQLYMILEEDGFDVLLVNAKAIKNIGEKKTDEVDAEWIMLLHSYGLLKASFQPDNRARRIRNLSRHRDNLLRASSREVQHMQKSMELMNIKLTHVISDILGKSGQDIIQAILAGERDAKQLAALANPRCKASKETIEKSLVANWDEDLLFMLRQSYHLYQYYQTQMQDCDKKIESIAKEYLAQISATDPEKEWLRSHKTKTPKNTVTIDIEKYAFGMWGVNLMRIPGISDAALLRLSGELGHDFTDKFETYKEFCCWCNLTPNNKISGGKLLSSKIPKRKNPVGQILRASANALRANKTPLGFYFRRIQSKSGYIPAIVATANKLARIIYVMVKTKAEFDESHAKLTEEEMLKRKLANAKKALEKIQKQLNKAA

SEQ ID NO: 91770 - protein, 353 aa, unidentified
MIELSKVEAQEVLGLDLGDRSSQICRMDRKTGAVLEERRLSTTTTSVQRYFSSLAPQLVALESGTHSLWMTRLVKSLGHEVIVANPSQVRAISASLKKTDERDARFLAHLVRVDPQLLSPVQPRSEESQQAIAVVRAREGLVKARTMLINQVRGVVKSFGYRLPSCSSPAFALKAQQDKTLPSSLKETMEPLLRVITEVSQEIARFDKEIEALARRWPVTLRLRQIKGVGVLTALVFVLTLGDPFRFANSRAVGAYLGLVPGSRSSGQSTPQMPITKQGDRQARRLLVQASHYVLGPFGQDSDLRRFGLRLAERGGKSGKKRAVVAVARKLAVVLHRLWVSEADYEPLRKAAA

SEQ ID NO: 91771 - protein, 352 aa, unidentified
MRYLGMDVHGKSTVWCLVDQRGEVVREGRIPTTAPALTALMRELAAEGEVLAGQEVGTLTYLVHDAVTAAGTTILSFNAHQLRMIAASRKKTDRRDAYWIAKALQSGMYPHPVYVPTGEIRELRAVLSRRRVLKAEHNRWRYRGRAYLRAAGCPAAPGAAALRTALRPGHEPQTGSVPWLAESVALCQRQEAALRLELQRVDAALAARVRAIEAIGRFLTVPGIGPLTATTIYAWVGDVRRFPNAKALAAYAGLVPTVRQSGGVSTYGGITKQGAPALRVTLVQAAHVLLSRCRSAEAAPLQAIGLRIRGTRGRRKIAVVALARHLLRIAYYLLRDGTTYEAARLGTMTPAA

SEQ ID NO: 91772 - protein, 385 aa, unidentified
MSESIRGGVKCEVALTSAVRVGVDLAKRVIQVHAVDDAGKVLVARSVQRERFEAWCSQLRAGCVVAMESCSGAHHWARRLRLRGLEVRLVAGHLVSPYRMQGKRGKNDANDAAAICEAASRPHMRFVPVKSAQQQAMLSVHRLREGWKEERTGCINRIRGLLAEFGLVFAQSPEALRAALPGVLEDVDNELPDIARLALQRALLHWIELDIHLAWCDERVSAHARSDARARAVMQLPGIGPVTASALAASVDDLEQFDDARQFGAWLGLTPSQNSSGGKASLGRMTKRGDSYLTGLLIQAARSAVLTAHRRSDRMSRWLLALRERRGWQKAAVALANKNARIVWAILTRGECFDPEHVPEPPAAKRAKVPAAAPAMAGTPAMAGG

SEQ ID NO: 91773 - protein, 350 aa, unidentified
MIIIGADYHPGFQQIAYVDTETGELQERRLEHPEEAEKLYRELAAQGKKVRVGMEASGHARWFERLLAELNFELWIGDAAEIRTKRVRKQKTDRQDAQLILKLMLEDRFPQIWVPSWENRDLRQLLWHRHRMVQARTRIMNQLQAVALNEGLRAKKRLWREAGREQLAALRLAPWARRRRQDLLELLDRLNPIIGELTKAVEEEAEKCPEAQRLMTHPGVGPLTALAFVLVIGTAERFGCGKQIASYLGLVPEEDSSGERRRLGHISKQGNSLLRFLLVEAAQVTVRSNQEWRSKFFHLAMRRGRKIAKVAMARRLAIRLYWMWRKQWNYEQLTKFGAHAGQPGNPHGVR

SEQ ID NO: 91774 - protein, 420 aa, unidentified
MEVAHDDEQIIERVAALDIGKAEVVCCVRVPGLGPRARRMQEVRTYTTMTRSLLAMSDWLSGLGVTRVVMEATGDYWKPPFYLLENTFETWLVNAKDVKHLPGRPKTDRLDAVWLCKVAERQMLQPSFVPPPAFRQLRDLTRYRADLITTRTAEKQRVEKLLEDAQIKVSVVVSDVFGVSGRDMMRALIAGERDPKVLADLARGPMRGKTARLEEAFTGRFTDHHAFLLRTMLARVDGIDADISLVQGRIDEQIAPFAKAVTRLDEIPGVGVTIAQVIIAEVGLDMSRFETPAHLASWAKFAPGVSESAGRKKGTSSTGHGNRYLARVLGEAAVGAGRTKSFLGERYRRIARRRGKKRAIVAVGRSILMTVWVLLNDEEQRFVDLGPGYYESRINRSRSTRNHVRELQAMGYNVILEPAA

SEQ ID NO: 91775 - protein, 352 aa, unidentified
MQHFIGCDVHTRNQVVAWIEEETGEIKKRRLKHEGKEVKEFYAQFPPGTVVGIEATFPAHWFERLMGELGHELWVGDAARIRASDVRYQKTDSRDAELLLDLLRTGRFPRIWVPSLAERDLRQLLVHRMKQVRARTQVKNQLHALAISQGVCRKSKLWSVKGRKELESLALLPWAARRRKELLESLDRLDEQVRELDRAVEEAGRARPEVALLRTHPGVGMVVALAFVLTVGPVERFSNSRKLVSYWGLNPRENSSGGRQRLGSISKQGNTMMRWLLVEAAQTAARLDPQLRRTYQRLKKQKTSAVAKVAVARRLAVRLFWMLRTRHNYTQLVHMSGSPSSAVVPPTAEPTV

SEQ ID NO: 91776 - protein, 410 aa, unidentified
MRIIALDVHRSFAQTAILENGKLRDAGKIDLEYSRLLRFARKLKPDDEIVIEATGNTSAIVRVLLPFVGRVVIANPILVRAIAWAKVKTDKIDAAVLAKLHASGFLPEVWMPDEETEARRRVVAERTQLVSQMTRLKNRIQSVLHANLIPPYKGVLFSQRGRAWLQAQPLAEDQRRVIVRHAGELDRLGAELAEVDKSLAQAALEEPRVKRLMTITGVNSTVAMSVLAAIGDIHRFSSPEKLVSYFGLNPRVRQSGDKPAYHGRITKQGRAHARSMLVEAAWVISGAPGPLRAFFIRIRDKRGKHVAAVATARKLAVIIWHILSKDEDYTWNRPALLQWKLRKLELKAGHPSRRGGRQKGSAAAYSNKSVRDSERETIANAEDEYRRFVATWKQQSPKGRSGATKEVRRS

SEQ ID NO: 91777 - protein, 470 aa, unidentified
MVARFSRDGSVRPPRRKALAAKPGRVRLKDLQRIQPDAAGIDVGSQVHYVAVPEDRAEESVRHFGCYTRDLEALADWLLECRVKTVAMEATGVYWVPLFQVLERRGLEVKLVDARHVANVPGKETDVDDCRWLQQLHSYGLLRGCFRPPDEIAVLRSYWRQRGALVEEGAQSIHWMHKALEQMNVQLHKAVSDVTGVTGMAILRAIVVGERDPQLLARHREPGVKVSAEELAAALRGDWREEHLFALEQALARYDFTQQQMAECDARIQQHLQSFPSQADPTQYDLPTRRARRKNQVHFDLRAELVRITGVDLCRIDGIDALTAYTVITESGVDLASSFGVEKRYASWLGLSPHNKITGGKVRSRHTRKVRNRAATALRVAAQSLERSKTALGAFYRRMKARHGAPKAVTAAAHKLACLIFRMLAFGMEYVDQGQQAYEEKQRQRHLRSLHRQAASLGYALVNTATGVVS

SEQ ID NO: 91778 - protein, 334 aa, unidentified
MQNVTLIGIDLGKHSFHVHCQDRQGNALLRKKFSRTQLINFLGSCKAATVVMESCGGAHFMARRIADLGHEAKLISPQFVRPFVKSNKNDFVDAEAICEAASRPSMRFVPPRTEDQQAMAALHRVRDSLIRQRVKTTNQMHAFLLEFGVSLPRGIAVIRRLAAVLEENDFPPYLARVLSRLHSHYVYLSGEIEEVDKELKTHLAEDETAQRLLTIPGVGPVTASLLAMRLGDGKNYASSRDFAASTGLVPRQYSTGGKTTLMGISKRGDKNLRRLLVQCARVFMQRLEHNPGRLAEWVNRQLARHHSNVVACALANKLARIAWAVTAHQTVFIK

SEQ ID NO: 91779 - protein, 387 aa, unidentified
MSKKIVAPVYVAAMARAEADPASARFWVGLDIGFKSTAVCVVDVDGAVVHQVSMKSHATEIGRYLRRNFKSHVTLIGMETGGLSPHLAGKLREQGFQVAVLDALQVHRVLSVKRNKTDTNDARGIAEITRSGRDYLTEVYVKSNLCFEVRASLIMRDRLVKQRRETEAMIRGLVRVYGGRIEPGSDSPATFRERAIDQLCLIADTEGVDLRPRIIPLLDLCERFYTEAGRIERELDLLAASHPVCKRFMEIPGIGTITALSFYSAIEDPTRFRHVDDVAAYLGLTPRVYQSGESLTHGGISKMGNQLTRTHLVGAATVMLANTRSFSTLKDWGMKLSKRVGFNKAKVALARKLAIVMFSLWRDGTHFMAKAADVGPHRDLMRARATA

SEQ ID NO: 91780 - protein, 344 aa, unidentified
MDHFAGLDVSVKDTSVCIVDDTGRIVREVKVASEPDALLTVLRNPAYHFKRIGLEAGPLSQWLFSALAEAELPVICVETRHMRAVLKAQINKTDRNDARGIAQMIRVGLYRPVHVKTLRSQKLRMLLTHRQLLQSKAIAVDNDLRGTLRNFGLKVGMVGAVRFEARIRELVQGLPDLAVLVEPLLVVRRVLREQIAVLHRGLLAVVRDDEVCRRLMTAPGVGPVVALTYRATVDVPARFRKSKSVGAVFGLTCARDQSGERERPGAISRCGDKMMRAMLYEAAQSMLVRSTRWSWLKAWAMQVARRRGKKKAIVALARRLAVILHRIWVDGTEFKWTRDAVPAA

SEQ ID NO: 91781 - protein, 345 aa, unidentified
MPIVGGLDIHRKQITFDYLDTVTGQVCRGQVAPADREHLRAWLARFAGREDAAFAMEGCTGWRYVAEELAAAGVTAHLAEPADTAFARGRKRHAKTDKTDARHLRMLLAEGRLPECWIPPGHVLECRALLELYNDLRRERTAWAQRIHAVLFHHGAPQLGDGALRTEKGVAALRDAAAAHLSPAGQLQVATALEVIDALEGRLHVVRHQLTDAARHLAGAEALAARLYGVGPVTALAITCWLGGAGRFSSSRQAVRFAGLDITVSSSDRKGPPGKLSRQGPPVLRWAVYEAGKTHARTSAPDHRYYAAVKDRKNSKRACLSEARKILRQAHHILAELGDDALAAA

SEQ ID NO: 91782 - protein, 408 aa, unidentified
MESQIIFGIDVSSKSSTVCVVNDRIKQGESFRISNDSFGYQKLYEQLNQYLITPLVVFEATGVYSLSLQAFLEDYHIKYLKLNPLKAKKLMDNNLRHNKTDKVDAYRLALIQFNAPQKLRDPQPREYHELQNASRYYEELTRSIVTTKNQLHRNLQSTFPQIEEILSHPSGRIYWALVSLFPHAGYVLEKNETQVTQMLNSISGIGQQRARYLTTRLYAFAREAYPYDSKDSIIVRAIQRNISNLFSLQQERDYVINYMEKLAKAVNARALSIYLSIPGVARITAVRLVAELGDLRRFSTSAQIDVFVGIDPGRYQSGEKDSSLGITKHGNHIARKILYRVITQMETVKATQPCHITDYYDKKKRSSNSQGYKKIAIASVHKLIRTMFALIKHDQLYDYNIATENKRL

SEQ ID NO: 91783 - protein, 340 aa, unidentified
MKHSVVGMDIAKRVFQLHCVAADTGEIERIKLRRDEVLPFFAQRTSSLVAMEACGSSHWWARQLRALGHEVRLLAPKSVRPFVRSNKTDAADARAIWTAVQQPEARLVGVKSEQQQAILALHRVRAQLMKFRIMQTNALRGLLYEFGEVLPEGSVALAKSLPLALAALSERVPRMLIDTLHEQWARVQSINAEIATIERRLASALRESEACRQIAAIPGVGLLTATAAVAAIGEANSFASGREFAAWLGLVPRQTGTGGRVRQLGLSKRGDRYLRTLLMHGARAVIARGKHSPWVAGLLKRRPYSVVVAALANKLARTIWALLAKGRAFDPAVFNVSPQA

SEQ ID NO: 91784 - protein, 457 aa, unidentified
MQTAKLNDPEIPQFDVLAQINFHAAGIDIGADEIYVAIPAGRDTQNVRSFGAFTVDLQAIAQWLQTCGVETVAMEATGVYWVPLYEVLERQGFRVNLINARHIKNVSGRKSDVLDCQWIQQLHTYGLLQASFRPPEDICVLRSLVRHRDMLLKYRGSHIQHMQKALGLMNLKLTNVISDITGVTGMEIIRAIIAGEHRPSILAQFRDGRCKKNEEEIAKSLEGNYRSEQLFVLQQAVELYDFYDQQIQACDCQLEARYSQFELPDQPGTPAPESYKTKRSKNSPSFDLSQALYRMTGVDLTQVDGLEALSVQTILTEIGTDMSKWPTVKHFTSWLGVAPNNKITGGEVKSRSTKKTKNRANTAFRRAAQSLARSQSASGAFFRRIRSKHGAPVAVTATAHRLARIVYFMLLRRETYRDLGADYYDKQHQARSIRNLKRRAAQLGLRLEPIPSGERVS

SEQ ID NO: 91785 - protein, 338 aa, unidentified
MDHYAGIDLHSSNSYVAIIDNANRRVFKKKVTNDLQNVLYVVEPYRKQIKGIVVESTFNWYWLVDGLMDNGYKVHLANPSAIKQYEGLKYSDDVTDAFHLANLLRLGILPEGYIYPKEERPVRDLLRKRLQLVQKCTALILSFENLITRNLGTRISVNEINKLREEDVEDIFQQEHLILSGKVSIATINFLGTKIQQIEKVVHKVAKLKNEYKLLMTVPGIGKILALTIMYEVGPIERFAKVGNYASYCRCVGSKRITNGKQKGKGNRKNGNKHLSRAHVEAAHNALRHYEYVKRYYQRKMAKTNNVVARKAIAHKLARACYYIIRDQKEFDAGKLFV

SEQ ID NO: 91786 - protein, 324 aa, unidentified
MIDGILGIDVSKNTLDVCIVICAKVRSKSFANSSDGWRHLLDWLIAQNIQRVHACLESTGRYSLGIAYALYEAGHVVSITNPAQIRDFVRTKLGRNKTDGVDASHIREYCELFKPSPWTPPSEAHRRLGELQTIRAGIIAGLTEWKNRKNSGIIDEEAQALADATVSHFTSQLGAVDKAIALTIDNDPDLRSKRNLLLSIRGVGETLAGVVLAELPGPDVIRSSAGVVAYAGLNPRQHQSGTSVERATRISKIGNAVLRAALYMPALSAMRYNPAIVALVTRLKSQGRLKPKQIVVAAMRKLLVLCFGVLKTRRPFDAAIAMGC

SEQ ID NO: 91787 - protein, 334 aa, unidentified
MNFVGIDVSGKSFLMQVNTEHKRGTARCFDNTPSGHKAALKALRGVKGPARVCLEATGTYHFDLAVALSEAPRVELMVVNPRAARRFGEALMKRAKTDPVDTDMLTEFAQRMPFERWRRPDDSRLKLRAFARRVAALNKHQVQAKNQLHALTTTAYTPQALLSDVRLSIRQLERQIATLRRHAMALIDGDESLARAFTLITSVKGIGEASAIQLLGELLVLPADMTPRQWVAFAGLDPRHFRSGDTIEKATRISKAGNRYLRVALYMPALVASRHEPQVCAYYHHLIDDRGLKKMQAVCAVMRKLLHAIHGMWASDSTFDGARFYAGATTTPAV

SEQ ID NO: 91788 - protein, 333 aa, unidentified
MLRQIEAMKERLGLAASCRVVSCYEAGRDGFWLHRFLEAHEIENLVVDSSSIEVSRRSRRAKTDRLDGESLLDLLLRHRAGSQKKVFSVVRVPTVEQEDRRHLHRELRSAKQDRTRVTNRMKGLLANQGLTLDLKRDVPTQLASLRQWDGSPLPEGLRARLGREWERVVFCTALIERLEAERREILQRGKDPVLEKIRQLNLLRGIGTNSAWLYGMELFGWREFRNRKQVGAIVGLTPTPHASGAQERERGMSKAGNRHVRAMAIEIAWGWLRFQPRSALSLWYQRRFGGGSTRLRKIGIVALARKLLIELWRYLETGVVPEGAELKTDIRVR

SEQ ID NO: 91789 - protein, 386 aa, unidentified
MQKAITYVGLDVHKGSIVVSVAEAGLRGRLQEVREYGKVPNTPAALKAMATKLAAGGNELRFCYEAGPCGYGVQRQLSAMGHHCAVVAPSLVPRKPGERIKTDRRDAAKLAKLHRASELTPVWVPDPAHEAMRDLVRARLAAVRNVREARQQLSGFLLRNGYHYHRHPWTLSHRRWMADLKFDQPLHYIVLQDCIAAVEASEQRRDRLEAGIIAALPEWSLAPLVETLQALRGIALVSATTLVAELGDIARFSNPRQLMAYLGLVPSEHSSGRSRRQGGITKAGNAAARRMLIEAAWSYRFPARISRYQLSQQKRLPKLIRDIAWKAQERLCRRHRKLMRAGKPKTVVCAAIARELTGFVWAIATETSPANGKKGTGKPATMGAVS

SEQ ID NO: 91790 - protein, 295 aa, unidentified
MACCNEVICESLGIDVGKRELHAVLLQDDRTASKSVANSPPGIGQLQTWLKNRKVSRVHACLEATGGYSEDLALTLHAADHIVSLVNPARIKAFAQSEMLRTKTDRVYAASIARFCRMYVPKAWIPPAPEIRTLQRLVRRYHSLVEMRTEEQNRLCAPIVTAPVQASIMATLEHLEHELKRVDQEIAQLFDQHPPLRRQRDLLISIPGIGATTAARILGEMPNIVEFRGVKAVSAFAGFLPSTKSRGQFVGPVVFQKPGTPICVKRCTGRRFRQCVTTLSFGRLRTDCASAGKPT

SEQ ID NO: 91791 - protein, 339 aa, unidentified
MSLYAGLDLHSSNTYMGVLDPQFNRIFKKRVSNDLDLILQTLEPFRCRLRGIVVESTYNWYWLVDGLMDAGYSCVHLANPSAIKQYEGLKHSDDQHDAFFLAQLLILDILPQGYIYPKEARPVRDLARKRLFLVQQKTAHILSLQSLISRCCGQKVSSSQLRKVTGQDLKRWLKEEYRVLSAQANLDNIVFLKQQISRLEAAIQKQVKLSGAFNCLLTVPGIGKILAMTIMLETGDIHRFANVGNFASYCRCVSTQRLSDGKSKGSGNRKNGNRYLSWAFTEAAQAARRFNSRFRSYYDRKAAQTNSILATRALSNKLARVCYYIMRDQVEFREELVSH

SEQ ID NO: 91792 - protein, 317 aa, unidentified
MMSTQNYGGIDIAKKNFVIGITGMAKTKTETNNPKGFEHAIEYLKKHQVDLVVMESTGGLEVPLAKALHHAGLRVVIANPRRTHYYSLSFSLGKTDNKDAKMLADYAQAIEIKGKTVQMLYCPRSAEEETLEALVKRRSQLVEMRTAEKNRLTQIHETQKQSVEDLIAHFDALIDALDEQIFQYTDSGFDGKGKIISSIKGVGNTTCAMLIAMLPELGQLSHKKIALLVGVVPPPDQSGDSDGKTGCIGGRKEVRDMLYMAALSASRFEPAIKVFYERLIAKGKPFKVAINACMHKLLRILNARVRDYLQSERLAHA

SEQ ID NO: 91793 - protein, 382 aa, unidentified
MLDQACSEQTPVATQNEMYAAIELSGVSWLVAIHVPHADKISRHQVESGNGTALIDLLDAIRERSERVLGREIAIYSCYEAGFDGFWLHRQLVTAGINNAVIDPASIQVNRRARRAKTDSLDVEALLRALMAWRRGEKRVCAMVRVPTVKEEDNRRISREREALIKERIRHVNRIKGLLATQGVRRYEPLRSRRQERLDALRTGDGRPLPPRLYAEISRSLRRLELVLEILREIEIVRDEEAAVSARTNGVVGRLMMLRSIGPEVATILHGEALHRTFDNRRQVAAYAGLTPSPWSSGTLQKEQGISKAGNPRLRRTMVELAWLWLRYQPGSRLSAWFRERVGDGKGRIKRIAIVALARKLLVALWRYIETGLVPEGCLMKV

SEQ ID NO: 91794 - protein, 340 aa, unidentified
MEKRYIGIDLHRNQFTCCIRLENERTYVTEWALESLERFVKKLRPSDEVAVEITSNTRLFYEAVAPHVKRVAVVDTNQFRVISHSVKKTDANDARLLSLYLSKGLLPEVRMKDRERAQLASLTQTRDTLVKQRTALKNKVNNILSARGLNLAKEALSSEKKLREVLELPFDEVVRIELRVIVEQIRSLNKSITELEKTIGEEGSKLEGHKGLSSIKGIGKITGAILLSVIGDVNDFADEGRLASYFGIVPRVSNSNQTERSGRIHKRGTKLGRTALVQSALIAANYSPYLKRFYEQVKARRGAGKAIIALARKFLGIIYRTLKNKWVFEDFPNFVLAEES

SEQ ID NO: 91795 - protein, 358 aa, unidentified
MKEYITLDAHKHYTFAAREEVETRRVRRARIAHAPGCIRHYLRDAERGTTVAVEATGNWYWIVDEIEAAGCRPALVHPRKAKVMLGCINKTDKLDADGMNRLQRVGTLPTVWIAPASVRDLRELPRTRMFLCRQRAALKNRIQANASKHGLGPCGYSDPLGKVARRQLREWLPRLPGQTAQVTGELLDELDGLDGRIAEQERRLGRLVAQTPEMVLLQSLPGIGPILSTVIALEIGEVRRFPSAEHLASYSGTTPRVHSSGDRIRFGRLRPDVNRYLKWAFIEAANCTCIHRRRHPQRHVSILYGRIAARKGHAKAIGAVARHLAEAAYHVLSKNQNYKDPANRPQACDQGGVSATTA

SEQ ID NO: 91796 - protein, 313 aa, unidentified
MVEMKHVGIDVSKLFFDLHILEDNKDMHFEYSPQQVKKCVGYLTKLSVGLVVLESTGGYEIPLASELQAAGLPVTIVNPRRIRDFAKAQGQMDKPDKLDARNIAYFGAMLQPPPRKVIDDSQRILKALAARRAQLIKMQIAEINRREHVFGKEVARSLKAILKALEKEVERVDQQIKDHIDQQPELKQKVALLKSVPGIGDITARMLVVELPELGLINKKEIAALVGVAPMNRDSGMFKGKRMTGGGRRQVRTKMYMPTLVAIQHNPVIRQFYLKLLEKGKSKMTAVVAAMRKLIVILNTIMKKNQMWKANLA

SEQ ID NO: 91797 - protein, 430 aa, unidentified
MKQYELLHSLFVGIDVSMKENVVHAMPFSPEDHSGHAHLRFSAPNTPAGSVGIVEKVSDFLKFYPDVIQVVIALEATSVYSFHLATFLSVAHFNGHIPAIVYSVNPKEIHAYKKTFTDVGKDDYVDAMVIADYARSNKIRSRPWKGPELLGLRVLTRLRFRIAKLMGIVKNSTGNSIYLECSGLMTGENPFCNVWTTTCQELLTTFQGPDEILSLSDEELLNFITEKGHGRFSHPLDVVEKVKKAARNSYRLDKRVYEPLTSGLSVSFFIIHSLEAAIKKLDKSIETMAKSFSSDSYQILLSIDGVGPVIAGGLLAEIGDIKRFKTDDALAKYIGLTWRGKQSGQSESPVKHLSKAGDVYLRYYVLLATGQIINYSAKYREAYERIRSRKTLFPYRAALNLVARKIVRLIFTLLDKHQLYSDNKVMVTLE

SEQ ID NO: 91798 - protein, 351 aa, unidentified
MHYIGIDYHKKYSYVVVKDREGLVEQRGMVSNRKEEVQKFVEPYRPGKAVLESTRNWGVIYDWLEEVLDDVALAHPLKVRAIAEAKIKTDKISADILCDLLRSNLLPEAYAPSRETREIKNVLRQRIFFVRMQTMVKNRIHTIIDRHPEIASQTPDVTDMFGATGTRWLSQVVLPGQDNRLLASAVELLQAVRQRIAESNEIVKELARDDKRVRLLRSIPGLGPFFSVVAANEIDDISRFRDEKKLCAYAGLVPSTYASGGKVFHGRITKTGNKWLRWAFVEAVPPAIKIDADLFAYYQRLKMKKGNNAAKVATARRLLTIAYRVLRHKRLYERRNRMPTKRSAPAALNFI

SEQ ID NO: 91799 - protein, 325 aa, unidentified
MQAGEGIIGIDISKDSFDVVLRSTRGEQHRVFSNDQKGYTSLVGWAEKQPERVVHICMEATGSYWEGLAEYLYQGEYTLSVVNPYQIKRYGDHLLNRNKTDKADASLIAEFCEKDRERLRAWKPFSPEIKALRSMGRRLDELQEMKQQEQNRLKSGVTDLVVIARLQEHIKQLKDQIKALWKQIQEHVKQHPDLREQQRLLTSIPGIGKLTAIKLIAEIGDIKDFASASQLAAYAGLAPKQFRSGSSVHKQTRISKQGRTELRRCLYMPAVVASEHNPIIRNLKRRMLASGHVMMEVIVASMKKLLHLVYGVLMSGKPFDPDYGK

SEQ ID NO: 91800 - protein, 350 aa, unidentified
MIIIGCDYHPGFQQIAFADTETGDYGEQRLEHSEGAEKFYRDLAAQGKKVRVGMEASGHARWFERLLAELTFELWIGDASEIRAKRVRKQKTDRQDAQHILQLLMENRFPKIWVPSGENRDLRQLLWHRHRMVQARTRIMNQLQAVALNEGLRCKKRLWRDAGRQQLESFRLAPWASRRRRDLLELLDRLTPKIAELTLAIEQEADKCPEAQRLQTHPGVGALTALAFVLIIGRADRFQCGKQIASYLGLVPLEDSSGQRRRLGHITKQGNSLLRFLLVEAAQVTVRSDQGWRNKYFHLAMRRGRKIAKVAMARRLAVRLYWMWRKGWNYEQMTKFGSHAGEPGNRDGVR

SEQ ID NO: 91801 - protein, 425 aa, unidentified
MNVDSTDEPRFAAYVAIDWGDSKHVWSMQPADSDRRERGEIEHSPEAVAAWAAMLSTRFGGQPVAVAVEQSRGSLVFMLGKYEQLHIYPIHPRSAAQFRAALFPSGAKDDPSDAELLLDLVVHHRARLRPLKPDTEQTRLVQHLVEGRRKLVNERTRQTNRLTAQLKLYFPQMLDWFDAVDSPLVGAMLKRWPTLETLQKARPDTVRAFFTAHNCRSQELIERRLDQIRQAVPAVRDKALIEAAQAMTKVLMELIATLREGIASFDCQIAQAVAVHPDFAIFDSFPGAGPALAPRLLAAFGSQRERYQSASDLQTFSGIAPVTVRSGKSQWVHVRWACPRFLRQTFHEWASHSIGFCDWARAYYQQQRGRGKDHHAAVRALAFKWIRIAFRCWKDAVPYDNARYLQSLRRRGSPLSAALAKLELP

SEQ ID NO: 91802 - protein, 319 aa, unidentified
MSETKPTAVSVGIDVSKESLDLDFAPTRAPLHVANAPAGHAAIVKRLSKIHIRLIVIEATGGYERAIVAELAAAGLPVVVINPRQVRDFARAQGRLAKTDQLDAAVLADFAEAIRPPQRPLPDTEILQMQEKLTRRRQVVEMITAETNRLEHVSSPTVRRSIEAVLKLLRKQLKQIEDDLDQTIQRSAVWQEKAELLQSVPGIGAQTTRTLLVQLPELGQCSRQQIAALVGVAPLNRDSGTFRGRRTIWGGRADVRACLYMATLTATRCNAKIQTHYQRLLAAGKSKKLALTACMRKLLTILNAMLRDQQSWHSTPYAP

SEQ ID NO: 91803 - protein, 415 aa, unidentified
MLLFIGDDWAEDHHDLELEDETGRRLAKARLPEGLEGITRFHALVAQHAPADWADLPSEEVAGRVVVGIETDRGPWVTALRAAGYRVFAINPLSSARYRERYSTSGAKSDAGDAHVLAEIVRLDRDHHRQIAGDTDLVDAVKLVARAHQTAIWERTRQVLRLRSALREYFPAAIEAFGDLSATDTLILLARAPSPVRAGKLTRSQVVSALRAARRHHVQTKADALLAVLRAPGLRQPSTTEAAYAAVVVGQVGIITALNVQITQLEVVVAEHFGRHPAADIYLSQPGLGVVLAARVLGEFGDDKKRFADARCRKNYSGQSPITRASGKKTIVLARYATNRRLGDALHQQAFSALGASPGARAYYDALRARKIGHHAALRQLANRLVGILHGCLKTGTKYDENTAWQHQNVAAAWT

SEQ ID NO: 91804 - protein, 356 aa, unidentified
MHSMKQQVRRVVGGVDSHADTHQAAALDERGRLLGSKSFAVSATGYRELLAWLASFGLIERVGVESTGSYAAGLTRHLLAEGVRVLEVNQPHAHTRRRRGKTDAIDAELAARHALSRASAVTPKQTSGIVESIRQLRVARNSAVKSRSAAIVQLGELARTAPSELREQLAIRSTVKGKAALCRRLRPDTDRLGEPANGAKLALRSLAGRIARLDDEIAQLDGQLAPLVATAAPRTTALLGISTGHAGQLLITAGQNIDRLHSEAAFAALCGASPIPIASGKRGRYRLNPGGDRQANRALHMIAVCRLRHCAKTRAYAHRRSSEGKTKKEIIRCLKRYIARQTYATLRDDLRSLTIG

SEQ ID NO: 91805 - protein, 371 aa, unidentified
MPELAIVGIDLAKSVFQIHGVDENGRVLVRRQLRRSQLLAFFQKRPRCLIGMEACAGSHDWGRRLQEMGHDVRLMPPSYVKPYVKRGKTDAADAAAICEAVTRPSMRFVAIKGEACSSVLVLHRTRDFLVRQRTQIGNAIRAHMMEFGIIAAKGAQNVDRLKDQLDRLPDAARMPVSLLFDQLAETNKRVERLTDEIEETYEQSETSQRLATIPGVGMVSATIIAATTPDVGNFDCARDYAAWLGLTPKPHSTGGKQRVGRISKMGNRYIRRLLYLGAMAQIMLRRRLKREPGSDWLSSMLIRKKTKVVAIALRIAWQEQSSPSSEMDHVTSRRQPDWLSEWSGRSEVMANSRRRRIRTPRSIRSASSALD

SEQ ID NO: 91806 - protein, 345 aa, unidentified
MTNFNVLAIDLAKNVFQVCKTTSRGKIIYNKSFTRSKLKELLLKEPMSLVAMEACGGTHYWARYAIEHGHKVKTMSARRVKAFRQGQKTDANDAAAIAIAALQPQVKSTRLLSIESQCQQGLVRIRELLVTQKVATAKQIRDLLFDFGFPIPKGDSALFEALSGILEDAENSLETDFRMAIESQKEHLQQLLERLADINTRLATQIKVDETCQRLQKLEGIGPVNAIALKLTLSTVEHFRNGREAAACVGVTPIQHSSGGKNKIGSISKTSGCKGLRSTLFEGALAVIRQLDKREARTTKELWVKDIVSRRGKKVAAIALANKNVRTAYAMLKNGTDYQPAMLAA

SEQ ID NO: 91807 - protein, 309 aa, unidentified
MKEQVVYLGVDVAKAYLDAAMGNEKRRLANDGTGHRQLINWIKQMEAQVQVICEPSGGYERMLIQGLVGAQVKVSLVQANRVRQFARAAGILAKTDSIDAEVLCAFGQAMRPQTLTASKLQQEQLRELESQRRHLSRLLVMEQNRGARVGDSSVRRLNRRLIKQIQKQIERIDLLINEHIAGSQELSAKAHKLTAISGVGPRTAALLLAQMPELGQLNRREVAALVGVAPFNRDSGKWRGKRAIYGGRRYVRHGLYMAALVAARHNPILRAFYQRLRAAGKPAKLALTATMRKLLIVLNSALKTDPIYA

SEQ ID NO: 91808 - protein, 405 aa, unidentified
MQIIYSHCCGMDVHKQIVVVCLMTPKGKEIRSFGTMTESLLEMVDWLIANNCTAVAMESTGVYWKPIYNILEATGMEILVVNAQHIKNVPGRKTDVKDAEWIADLLQHGLLRGSYIPDRDQRELRELVRYRTKLTQERSREVNRIQKVLEGANIKLGDVASDVMGKSGQDILRAIISGNSDPKTMAQMARGKLKNKTELLEKSLTGLIGPHQKMLLETQLQHIDFLNEQIQKISKEIESRMRPFEQAIEALDGIPGISRTNAEQILCETGIDMSRFPTDKHFASWAALCPGNNESGGKRKTGKTRKGNMALKAALTQAATSASRTKGTYFSAMYRRLAARRGKNKAIVAVAHAILITIYHMLKDSSNYRDLGVNHYDEINRQAIIKRSVKRLESMGYKVTVEPAA

SEQ ID NO: 91809 - protein, 474 aa, unidentified
MDYVGLDVHKDAVEAAVIDEAGKLRRRVRFPCTREELVRFAKRYLGPNARVALEATSHTWSIVEVLRPLAAEIVVSNPLRTRAIADAKVKTDKVDALVLAQLLRADYLPRVWQPDQATQGRRRLTNRRASLVADRTRVKNRIHAVLHQRLIHPMVNELFGTKGRAWLATLELDGAGRAALDSELRLLGQLESELSRLDEELAVDGYDEPRVRLLMTLPGVDVAVAQTLLAALGDIQRFRSPDHAASYLGLVPSTYQSGDPEHVYHGRITKQGKGQARWMLVQAAQHVGNHPGPLGNFFRRLAKRKNRNVAVVATARKLVTIAYHMLKNNEPYRYAVPRSTDTKLARMRVKATGERRRTGLPKGQPRPKAYGSGVRTRTVPALDTIYEREGLPPIAPLADGELRMLRQQKVLKHVAQTSRPQRLPRRAAAPARPEAAGAPASSLRSARPASARQAPATTRRAKSTQAPSPGRRST

SEQ ID NO: 91810 - protein, 412 aa, unidentified
MSRKVTDKIAAAERQGFWKGGLFMTFYVGVDIAKYEHVASVLDSESGELRLNSFRFNNDLKGFESLLSHLSELNKEDVVIGFESTAHYHQAFFSYLNGKGYKCILINPLIISRFRKISLRDAKNDNIDSRIIAQFLSFEHSHLESEEFVMNDLKELCIHRDFLIKSSATLKIKLVSYLDRVFPELERTIPEGSLHTKGLRAILKEYPTAKMIAKTRIDHLVNIAKKASSKRYKEATVKKIREAAKISAGLHSDALALKIRQTIESLESIEKQINEVECVLCSLPTVQNSPLHKIKGINSIEVAYILSAIISIDRFSSPKKLIAYAGIDPKVRQSGTWEAKTTRMSKRGNVLLRYALIWAANNVRKHSPSMKEYYEKKRSQGKGHYNALGHCAAKLCRYIFYILNHPDEDFIN

SEQ ID NO: 91811 - protein, 338 aa, unidentified
MTIVMGLDQHRGQITADWIDTATGEVSRARVAPAHREPVRRFLHRFRGADLDVALEATTGWRFVVEEIRAVGGRAHLAEPAETAARRANKKRAKSDRADARHLRELLMLERLPESWIPPGHLLDVRARVRLRHTLVDQRGEWQQRVQAVLYHHGLPQRRELLIGANRAWLAELQLPDSAREQITVALQMIDALDAQAAPITAALRAYAKRQNGCRALMKHYGVGPLTAVTILAELGDARRFSSSRHAVRYAGLDITVYQSDQHRAPGHLSRQGPPALRWALYEAVQTARRSGSPDHAYYQQTCERIGGNRACLALARKLLKRSYHTLRELGEEALQPA

SEQ ID NO: 91812 - protein, 408 aa, unidentified
MEVIYRRCAGLDVHKDTVVACARLVEERGVRQEVRTFATTTPGLYALSEWLAGCGVTHAGMEATGVYWKPVWHVLEEGLELVLANAAHVKNVPGRKTDVNDAMWLADLLAHGLIRGSFVPERPIQELRDLTRARKQFMRERTGHVQRIQKVLEDANVKLASVISDVTGRTGRAILDAMVDGETDARELAKHRHPKMKATLAEMEQALAGRVTPHHRFMLGLYLGQVDATDAAVAQIELEADGLLESFRAKVNLLITMPGVGETVAEAILAEIGSDMSRFPTAAHLISWAGLCPRNDESAGKRRCTRIRQGAPWLKVMMVQAAWSAIKVKNGPLREQFLRLKSRRGPGKAIVAVAATMLRAAYVMLRDDVAFRDTRPAHPAAPEPDRVKNRLVHRLQSLGYEVQLKRAA

SEQ ID NO: 91813 - protein, 343 aa, unidentified
MTYYVGLDVGLRSSSVCIIDDQGAIRLERDVPSEIEPIAACVRSVGGEVAGLALETGNLTPWLAAGLRADGFRVVVMEARQVKTTLSSMRNKTDRNDAQGIAQILRTGWYREVHVKSLESQRLKTLLAARKALLRRRIDLENGVRGLLKVYGIKLPPQIYHARFDEIARRAMAADPSLAEALDPLLEARGHLYRAFLDIDRRVKALAHADPVAQLLMSAPGVGYITALTFKAAIDDPARFRRSKTVAAHFGLTPRRYQSGERDNPGRISKAGDAEVRSALFLAANTIMNGRGKSSPLRSFGARLSRSKGRKRAIVAVARKLAVVLHTMWTDGTMYCNEKEVGA

SEQ ID NO: 91814 - protein, 411 aa, unidentified
MQVIHERCAALDVHKKTVVTTIMLTQADGSVQEYIRTFLTMTADLLALDDWLSSYGIEVIAMESTGVFWRPVFNLLEEGRQVILVNAQHMKAVPGRKTDVKDSQWLADLLRHGLLKASFIPPKPVRELRDLMRYRKTIVQERADEVNRLQKVLSTANIQLASVATDVLGKSGRSMLDALLGGLNDPQALAELARGRLRAKLADLRKALDGRVQPHHRVLLERILAHIDFLEESLVELQAEMEQYLVPFEEAMTLVQSIVGIGETAAASIIAEIGPDMTRFASDKHLASWAGVCPGNKQSGGKRLSGKTTKGNPYLRAILFEVAWAISHTKDNYLSAFYHRMARRRGKHKAITALAHKVLVIIYHLLRTKKPYTDRGADYFEQRDRGRLERHHIHRLEQLGYTVTLAPKEAA

SEQ ID NO: 91815 - protein, 375 aa, unidentified
MTRPILYVGLDVHADSISIATADARRDGEVRHYGTIPATLRALDSVLNKLGHPGTELRVCYEAGPTGFVIARHLTNKGIACLVAAPSLIPSPKGNKIKTDCRDSIKLTRLHRAGELTAVHVPDATDESIRDICRARTDAVDDKRRAMCQLKAFLLRHGHGIADKTPWSEARMRTLRSIALQLPAMNIVLEEYIQAIDTAHQRIARLEHQMENVLATWEQAPVVRALMGLRGIRLVSAMILVSELGDIHRFAHPRLLMAYLGLVPSEASSGGKRRVGGLTKTGNAHVRWLINESAQHYRLPPRVSPDLSKRQEGIAREHRAEVQKISWKCQQRLYDKGRQMAGRLKIRQKVQIALARELCGFVWAIMKAVQPVTAR

SEQ ID NO: 91816 - protein, 368 aa, unidentified
MKEGLPRSHAPRVLEDEGRPHAMLYAGLDLSRKRLDFCLLDELGERVEVGAAPPDADGLRSLTTRVGRFGEPVFAAIESMNGARFVHDRLELAGWRVEIADAVKVKGLAPLACKTDRIDAWVLAELARRDLVPAIWLPDPAVRAERERARFRLHLVRHRTSLKQRVHAVLLAHGKPCPVSDLFGVAGRDLLERLALPEPWLATVAASLQLIDELDQQIGDCERDLHRLGVEHRYVPLLVTVPGIGWVLAYTIAAEIGDISRFATPTKLTGYTGLCPRVYQSGGSDRRGALAKNGPRYLRWALIEATMHASRHPLYRDRYQHTKQRLGKQRGAKVAQVDLARRLAEAIWHMLTRDQPFAPAGAASPLAA

SEQ ID NO: 91817 - protein, 343 aa, unidentified
MQTITTIGLDIAKSVFQVHGVDAGGQAVVRRQLKRRYVLVFFQKLSPCLVGIEACASAHHWSRELQTLGHTVRLMPPAYVKPYVKRQKNDATDAEAICEAVTRANMRFVPTKTPEQQSGLVLHRARHLFIRQQTSVINAIRAHLAEFGIVAPVGRHGVEELLNVVANPSDRRVPELARVCILAFGAQLRRIKEQILEFDRLIRAWHRSNEMSMRLDEAPGVGPVLATALVAAVADPKSFRSGRNFSAWIGLVPKQHSSGGKNRRGNISKQGDRYLRGLFVAGALAVIRYAKIHGTEHRPWLTALLARRPTKVAAIALANKIARMVWAMMARGERYKEPVALAR

SEQ ID NO: 91818 - protein, 338 aa, unidentified
MQWTVAIGVDTHKDMHVAVALDRFGAQLDSREFATTETGYRALLVWALELGVPAFAVEGCGSYGAGLARFLKLAGVTVWECERPRRQDRRRGKNDLIDAALAARRLLSGEGLSRPRGGGRREELRLLLLERRSATQARTGALNQLNALVVTAPDQLRQRLSKLNGERLAHAAARLRPGNNISNTVLHRLGRRVERLSNEIAEVDRNLLNILTDVAPELLAECGVGPVCAAQLLVSSGDPQRMASEASFAALAGTNPLDASSGQQRRHRLNRGGDRQLNWALHVIALARIHHHAETAAYYQRLLATGKTVREARRCIKRALARYFYRQLREIQAHTLTT

SEQ ID NO: 91819 - protein, 352 aa, unidentified
MIIIGVDYHPEFQQIAWLDTDTGEFQEKRLAHPGEAEKFYRALAGQKVRVGMEASGHARWFERLLGELQFELWVGDAAAIRTKRVRKQKTDRQDAQLILGLLLEDRFPRIWVPSWENRDVRQLLWHRHRMVQARTRIMNQLQAVALNQGLRCKKRLWRERGRQQLEAFPLAPQASRRRRDLLELLDRLNPTIAELSQAIEQEVEKCPAAQRLMTHPGVGGLTALAFVLIIGEANRFHCGKQVASYLGLVPLEDSSGNRRRLGHITKQGSSILRFLLVEAAQVTARRLPEWRSKYFHLALRRGRKIAKVAMARKLAVCLYWMWRKGWNYEQLTKLGSHAGQPGNRDGVQSNTE

SEQ ID NO: 91820 - protein, 324 aa, unidentified
MNTQISLGIDVSKRKLDAALALGSKFRNKVFANTPAGLAEMARWLEKHAPGPVHVCMEATGVYWEAAAVFLADAGRRVSVINPALAKAHAASLGLRSKTDAIDARALADFCREKCPPEWVCPRPEERRLRALVLRHQALMEMQTQEKNRAQVVRTDVRDSVEQHLEWLAQELKRIEQAIAQTLDDDPDLRAKRDLLDSIPGLGERTIAVLLGYGVGEARFASAREFVAFAGLCPRRFESGSSVRAKPRMSKVGHAFLRQALYMPAMVTVYRTQWGKHFRARLHAAGKAPKLIIGAMMRKLAQVAFGVLRSGKPFDPNLQGACGG

SEQ ID NO: 91821 - protein, 403 aa, unidentified
MNAVGIDVSKGKSMVTILRPFGEIVSSPFEIKHTSSDIHSLIKLIHSIEGESRVVMEHTGRYYEALAHQLSAADLFVSAVNPKLVKDFNNDSLRKIKSDKADSVKIARYALDKWQSLEPYSITDELRAQLKVMNRQFHFYVKQKTAMKNNLIGLIDQTYPNANTYFNSPTRSDGSQKWVDFVSTYWHVDCIRKMSLNAFVEHYQNWCKRKKYAFNKSKAEEIYTKTKELVTVFPKNEITKHIIRQAIDQLNSTSVTVETIRTLMNETASKLPEYSIVMQFKGIGPSLGPQLMAEIGDVTRFTHKGALTAFAGVDPGVNESGSYAQKSVPTSKRGSSNLRKTLFQVMDVLIKTMPQDDPVYQFMDRKRTQGKPYYVYMTAGANKFLRIYYGRVKEYLSVLPDPS

SEQ ID NO: 91822 - protein, 344 aa, unidentified
MENYAGIDVSLELSSVCVVDAQGKILKEAKVASEPDALVEFFGTLGFAVKRIGLEAGPLSQWLHAGLKGAGLETVLLETRHVKAALSAMTVKTDRKDARGIAQLIRMGWFQQVHAKSIGAQEIRALLIARKQLLGRLIDVELSIRGILRGFGLKVGPVTRKTFEARIRELVAGQATLERIASAMLSARSALKAEYGRLHKAVLAVVRDDAVCRRLMTVPGVGPLVAITYKSAIDDPHRIVKSKAAGALFGLTPKKYQSGEKDVTGGITLAGDETVRTALYEAANVLLSRITRFSKLKRWGMDVAKRRGLKRAKVALARKLAVMLHRIWIDGTTYRWTDAGPIAA

SEQ ID NO: 91823 - protein, 376 aa, unidentified
MKKNTKTMRPPQVAAQETATITSTRRTVGIDLGDQTSHYCILDEQGEVIAEGMVRTSEAGLQEQFRRMARARIALETGTHSPWVSRLLEKLGHEVLVANARQVRAIYDNDRKADQIDARTLARLARVDKSLLHPIRHRSAEAQADLAVLRARDLLVAVRSTMINCVRGMVKSVGGRLPSASSECFATKVREQVPARIRAALLPLLKQIDSATVRIRAYDKAIEKLAQKKYPKTELMRQIPGVGVVTSLAFALTIDDPYRFRKSRDVGSYLGFRPKQSDSGCSRPQLSISKAGDHMVRRLLVNCAQFILGHWGPDCDLRRWGLSLMAHGGKNAKKRAVVAVARKLAVLMHKLWVSGEVYKPLRQASEGTTSQAAPAA

SEQ ID NO: 91824 - protein, 416 aa, unidentified
MNAAGIDVSSRKSTVAVLRPFGEVVRLPFDVAHNTEGLASLAEQLKALDGETRVVLEHTGRYYEPVAKALHEAGLYVSAVNPLLIKEYGANSLRRVKTDKADAVKIARYALDNWADLRDYTPMDTIRYDLKTLNRQFQLASKQRTASANNLIALLEQSFPGIRKCFDSPVRSDGTQKWVDFVHTFWHVECVRKQSLNAFSERYRKWCKRHGYIFKQGNAVEVYSLAKNAVVLVPKSEVTKVLVQEAANQLTSISRSVETYRAEMERLASTLPEYPVVMAMYGVGKSFGPQLMAEIGDVRRFERKQSLVAFAGIDPMPNQSGDKNVRSNKSSKRGSPYLRKTLFNIMGVYLKCSPQDEPVYQFLDHKRSEGKPFYVYMTAASNKFLRRYYAQVRDYLSTLDDLPPVDMDSTGLKPSD

SEQ ID NO: 91825 - protein, 446 aa, unidentified
MKKVAVFDEVRRYVAGIDLAGDADHYVCGPRNDDGSRDVERFGTTTPELVRMLAWLRDRKVESVAMESTGVYWIPVWDVLEAGGIEVRLVDTREVRMVPGRKSDVKDCQWLQRLHSCGLLHGCFRPPEKFNAVRSVLRERENMVAARTQAIQMIQKSCDQMNIRIHHAVSDICGATGMRILDAIANGERDPRRLAKLRDAQCKKSESQIASELTGNWRDEHLFTLRQAYRHLLFLNGVVDEFDQKVKAMLAALAAESGKPEPPSPPKSKQKSDRKALCDIARIAGFCVTDIDGISFGTAAGILSELGNDLSMFPTEAHFISYVGLAPPLAKSAGKNVRTKNKYRNTHPVGQMLKSGASTLWRSKSALGALYRCVCSRSCKKVAVMAVARQMAKYLYRGMKYGDAYLDIGEKLFEARRRERTLKSMKSKIRKLSIRAEELGFLSDAG

SEQ ID NO: 91826 - protein, 391 aa, unidentified
MSMYFIGIDISKYKHDCCIISAADQKVVSKVTIKNNKAGFNELLTIIHSLANPADIRIGFESTAHYALNLELFLENSLLTFMEVNPVLISEYKKSKTLRRTKTDSVDCESIARWLMTVEYKPHSKGFYHAYSLKSLTRLRDKLIRQRSFYLVKITNVLDHTFPEFKPFFNERLSKTALYLLENYGSAEKMARMNSASYEKLRSVSRGKFSPQQFLRLKELAVNTVSVNNSIFDVELNSLLSLYKSLVKEIDTIKKEINQLIEEVHPHYMSVPGIGPLSAAVIYSEYGDISNFTNPGQMLAFAGIEPGINESGTESHGGKMVKRGSSQLRYTLINCCLPLIRFDMTFATYYAKKRGEGKPHRVAITHVAKKLIRVIYALESQDIDFNAQELR

SEQ ID NO: 91827 - protein, 353 aa, unidentified
MIETVYCGVDFHARVQTLAYCSSNDGEIHLCELHHQKDDLRAFYARLSGEVIVGLEASGYSGWFERMLEELGHTVLLGHAADIRRVANRRQKNDRRDAELILDLLIRGEFPQIHRPTAHSLEILRMLRYRHRLVKMRTMIKNHLQALAIGSGVAIKARLLTRTGRARLLAAQMSPVMGRQREEWLSLLDNLDARIAAVVKWLEQQAKDDAKAQLLRTHPGLGLLTSLGLVHTLEPISRFSNQRKVVAYVGMEPMERSSAEKKRYIGISKAGSRLVRFLLGEAAQTAARDDQQLRRFYLRLAAKRGKPKALVAVGRKLLIRSYIMLRDNIDYAEFLRRGVEARLARETRKHVDA

SEQ ID NO: 91828 - protein, 404 aa, unidentified
MNERTAGIDLASEEHRLVVIEGDGRSVAEQRVAHTEEGVAELLRRLLELEVARVAIERPNGLVVDRLLDADIAVVAVHPNQLAAARERYRSGGGKSDGFDAYVLAELARTDMHRLRLLEPDSDETRALRTLTRAREDLVEQKVALCNQLRAQLEAFWPGAACVFADLDSPICLAFLERYPSPEDARGLGEKRLAAFLARNGYCGRRSAGELLARLRSAPGGRAGLLESEARRQVVLALVAALRPLVEQIRLLTSEIRGLLGAHPDGEIFRSLFRDPKSVITAAELLAEIGDRRDRHPTSSSLEAIAGQAPVAVESGKKKVACFRWACNKTLRSAVSVLADSSRKHNPWANDIYRRARARGHDHPHALRILGRAWLRVIWRLWQDGVPYDPTRHGGLNRLLAAEG

SEQ ID NO: 91829 - protein, 318 aa, unidentified
MGGLLGVGEFPATAAGYARLLGWLGGFGTVCLVGIEGTGSYGAGLARHVTAAGIRVVEVDRSDRQDRRRQGKSDPLDAVSAARAAQSGRARGEPKGRDGAVEAIRALMVAKRSARSERTQTINQARALIVTGPDDLRARFARHTAAGLVSELAALRPRPGATVGYATRIALRELGRRAEFLDGQLGRLDELIVPLVTARAPALLALHGVGPDTAALLLIAAGDHPHRLRSEAAWAHLCAVAPIPASSGKRTRHRLNPGGNREANHALWRIVITRMSSHAPTRAYVERRTKEGLSKKEIIRCLKRYAARQVYRHLRPAG

SEQ ID NO: 91830 - protein, 355 aa, unidentified
MSGEKYIGLDVHQATISVAVMDSQGKLIMESILETKASTILEFLAGLRGTLFVTFEEGTWAAWLYDLLKPHVAKVLVCNPRKNALLKHGNKSDKIDARKLAERLRLNDLKPVYHGETGVRMLRELARSYLTIVKDLTRVMSRVKALYRSWAIPCAGRDVYYTRHRSQWLGKIPEAGTRRRAEQLYQQLDMLQHLRQQARRELLAESRQHTITAKLRQIPALGPIRSALAVALIQTPHRFRTKRQLWTYSGLGLETRDSGEYHYVRGQVRRRKKQVFIRGLNKDYNHDLKGLFKAAATRASVLPGPFQDFYQRSLAKGIKPTMVRLTLARKIAAITLTLWKKGENFDVEKLKSQAA

SEQ ID NO: 91831 - protein, 401 aa, unidentified
MSKKNTRNALDTSLSYAVIGLDLAKADCAVVAVPRSDDELGLIDRMDYESLFEQAEKLGPTLFAMEPCCGYSQISLRLQNMGHEVKVISGHAVKNWIATHKSNQKTDLNDATALAKLALYDHDLQPIRVKNVEECRIASVQAIRIQLRTQATKSLVCFKSLCQCWGIVIRRGSLNTKKMAEAVAAVEKLLGAEVASSLMILRDAYKFTMKQINALDKLLDALVEANEQARTMKTVLGIGTQTAARLAVTTGDIKRFPMPRSYVAYFGLAPRNIITGHSGTPSPSKRGALKPVSSRGQGKVSRRGDRVARSFIIQGAATIYMLYCKDMLPECQLRRWLHEQIKRGKPYGKIIVSLAAKLLRIVWALLTYGEKFDSHKAGVPRSVLAAMEKPLKHDAAAESAA

SEQ ID NO: 91832 - protein, 419 aa, unidentified
MPLSTTLYVGTDISERVNRTRFYDEGGKEIGGRMESQNDLPGSRDLAGESVARAHRIGAKQILWGLEATNLFWWHLATFLTTHPELLAHGLRCYTFNPRQVKKFKESYPDIGKDDWTDAMVIADRLRFGRLPAECYLDERYQPLQRLTRYRRHLVTQLVREKNVALGYVYLKLSAYNTIERPLSDTFGVTSQQLLEGYLTPDEICAAPIEELASVLKEHSRGRVADPEKVAEVVKQAARRSYALPKPLVEPVNLILSSSLTTIRTLKAQLGPIEKAIATELRATPPQTLSTIPGLGPVFTAGIVSEIGDVGRFEREESLAKFCGLTWRRHQSGEFEGEERPLTKTGNAYLRYYMVEAANSVRLSCPEEFGSYYHKKYREATRHKHRRALVLTARKLVRLVHSMLRSGRIYQPGGPRKAR

SEQ ID NO: 91833 - protein, 331 aa, unidentified
MFPVGIDVSKKNLDLCMLYDGIKGRIKTRNIQNNRHSVENILRWLRLQHCGPEDVHVVMEATGVYHERLATELHDAGFRVSLANPHRSREFARGMGIMTKTDKVDAYMLACYAFLKKPHYWEPPAPEIRYLGALLRRRDVLLGDALREENRLEKYLSTDTPADIISSCRRMAQLLREEVSNIERQIKAHIKASPALRRDYTLLNSIKSVGPQLGMHMLVVLRSHNFASAEQAAAFLGVVPIEKRSGTSVRSRPRMSKIGPPQLRAKLYMSALCGKIYNKRMRNIYDEMCLRGKPKMVAIGALMRKLVHWCYGVLKTGTVFNDEGLKQVLST

SEQ ID NO: 91834 - protein, 412 aa, unidentified
MEVIYPSCCGIDVHAKTVVVCLIKRGKKQTRTYSTMTDDILKLSDWLLSEDCTHAAIESTGVYWKPVFNILEGMLEVILVNARNVKAVPGRKTDVRDCEWLADLLRHGLLRASFIPPIEIREIRELVRHRHTLVAVQTAVSNRILKVIESGNIKLAQVASDALGVSGRAMLRALSEGENDADKMAQMARGALREKEAQLRRALTGKLTRSQRFVLKELLRQLDETEAAIARVSQQIQLQTQENHCPFVPEAVELLQTIPGVGERVAEAIISEIGVDMTRFPSDAHLSSWAGMCPGNNESAGKRKSGKTTKGSPYLRAALTQAAWAASHTKLTYLSAQYRRLASRRGKRKALVAVGHTILVISYHILKHKSGYRELGVDYFDRQNVESQRTRYIRKLAALGLKVTVSPDPSVP

SEQ ID NO: 91835 - protein, 313 aa, unidentified
MRWAKRVFQLHWVDTETGEIVSKQIKRAGFLEHFANRTPCLIGMEACGGAQHWARRLIEMGHQVKLMPGKAVKAFVSGNKNDVADARAIWLAAQQPGVKAVAVKTEAQQAVLALHRMRQQLVKFRTMQSNGLRGLLSEYGEVMAVGRAALDRAMSDVLASLSDRLPAVLIDTLREQWDMLGKLDKQIAEIPGVGLVTATAAVATMGDPKAFKSGREFAAWLGVVPGQMGTGGRVRLLGISKRGDTYLRTLLIHGARAVLMHAKEPSAWVQELSKRRPPNVVTVALANKMARTIWALLAHDRPYEKGYVSIKPA

SEQ ID NO: 91836 - protein, 346 aa, unidentified
MMIIGCDFHPSWQQVSWLDTETGEADERKLVHATGDGKAFYQQLAAPALIGMEATGNSQWFIELVQDLGHEIWIGDAAQIRASYVRKQKTDKRDAAHILKLVVEGRFPRLWTPDREQRDLRQLVLHRHKLVEIRSRIKNELQHLSLNKGMQRKRTLWSQAGQKLLRELPLKPWASCRREDLLGLLAMLDQQIGKLDGAVQQSAQENPAAKLLMTQPGVGPNTALAFVLTIGDASRFARGKQVASYLGLIPREESSGGRQKLGAITKQGNRLVRALLVEAAQIAVRYDPGFRKQYLHRCHQKPKGVAKVAAARKLAVRLYWMLRTQVAYPEIVRIESSPRVPLVGAS

SEQ ID NO: 91837 - protein, 370 aa, unidentified
MQEISKFHVGMDVHKDSISVAVAEPGRTAGRLVGKVVHDVSKLLKLLCKIGTAEQLHLVYEAGPTGFGLQRALSAKGYSCEIIAPSQIPRRAGDRIKTDGRDSIELAECSRAGQLSAIWVPDPEDEAIRDLSRAREDAVNARVQARHQLKGFLLRHDVRYTGKTSWCGAYYRWLATLNFGAGPAQTAFTEYWLAVTSADERVQRLTQSLQACITNWRFAPVVAALQALRGVAEITAIGLVAEIGDFTRFEHPRKLMGYLGLVPSEHSSGARVSRGSITKTGNSHARRLLTEAAWNYRFKARIGKEALQRQQALPEQIRTMAWKAQLRLTQRFAALSARGLQVNKACIAVARELAGFVWAIGQQALQVNKT

SEQ ID NO: 91838 - protein, 365 aa, unidentified
MLHRLNSAATLIQRTTMEAPRGHMYYIGLDVHKKTISYCVKDASGRVQQEGKVGSTRRELDCWMKTLPRPWTAAMEATIFSGWIYDHLLPHATQIKVAHPLMLRAIAAAKKKNDRIDAGKIADCLRCDFLPECHMMPAEIRDRRRTLRYRHLLVRQMVQMKNRVSGLLMETGVEYNKQRLHKVSYFRELLSTNAEVHPSLRPLLKLSRETIERCQKTEYALVSSLQRDPVLADRIKRLRTVPGVGPITALTWALEIGDVSRFRTIKQAISYCGLCGDERSSADKAMRMPLSKQRNKHIQRTLVEAAKLAPRQSHELAVIYDREKQKGNGNRATLAVARKMVAYLLAVDRQQRDFGPAKQRSTAAA

SEQ ID NO: 91839 - protein, 336 aa, unidentified
MSDIVRCGLDIAKHVMAVHGVDSNGNVVVRKNLSRKKVLEYFAQIPPCCVGIESCGGSHYWARELIKLGHTPRLISVKFVIPYRRKGKNDANDAEAICEAISRPGMRFLSVKTEDQQSILMAHRIRTQSIATRTALINQIHGHLQEFGIVVSKGRHKLKRDLVEIFSDESLPTLLHEMLHDLLAALLREEERIETLDKRIGSWVEGNETASRLTKLDGIGPITASAVVATTGHASSFKNGRQFAAWLGLVPRQYSSGGKNKLGRITKQGDRYLRTLLIHGARTVLLMSSRGRGDHREWIESLRSRKPDNVVAVAYAAKQARMLWAIMAEKPSPLAV

SEQ ID NO: 91840 - protein, 429 aa, unidentified
MTRISAGVDVSKNRSTVCIIDQDGKVIMRPFLVWHSTEELDFLADTLKRLNGEVRVIMESTSIYQYPIALHLKEKGIFISIVNAYEMKQFANIDFRGGKTDKKDSRTIASYGISYWDKLVEWQIPKDTYFNLDLLNRTYMNAKKHRQIILQELQHYIDCAMPGMDKELHPLNLSTKKDFMLDFVEKFWHRDEIVNMTEAEFTEVFTAWAKKKGYRPVEGKAAKIYAIAKSCIPYYPANPTVKTILQCIVDKLSGVNRTLVTIVTQMIEEAKKLPEYQIVREMPGVGDPLAARFFGSAGDIRRFKNSKALVAYAGIDSPPDESGDFSSTHRHITKKGSKVFRDTGYEIMMALRAQKRTWEKVRKNPEVYDYMLRKEAEGKPPKVAKIAALNKFLRIIYARIKELYDNMALAERAKAKTKSKTKAKTKATA

SEQ ID NO: 91841 - protein, 314 aa, unidentified
MADPATVPLAFIGCDVGKAEIVVFDSRDKRIRSIPNRAENLAAFAQTLDVDCFVVCEATGGHEQALLAAMVAAGIPCHRADARKVKAFIRSYGTLGKTDAIDATALHRYGEERHSSLIRWRTRDTWRDTHQTLILARQDLVATRVAYANRLGAPSDAAVRPFFEALLASLEGQIAAIEAAIRTLVDDNAPLKQAVTLLTGVVGIGFKTASSLFALMPELGGLTGAQAGALGGLAPHPNQSGASEGYRRTKGGRPEVRKVLFMAAMSAARHHKTLRPFYERLIAKGKKKLVALVAVMRKLLVICNAVLRDGAVAA

SEQ ID NO: 91842 - protein, 413 aa, unidentified
MMKLFVGIDVSSKKLEVSMLTSDISAKPLFQGTFENDLNGATEVKKLILKLNLSQQFEKIVIGMEATSIYSFHPAYFFENDDDLAQFNTQTVIINPRDTKKYKDIFEIQKNDSIDAYYIADFLRLERYSTSLVRQEKYVALQRLTRSRFELVKSLSRSKQHFLEDLYYKLNKLVVNDDLNTSVFGATMLDLLTEDFTTDDISVMPIEELADYLNSKGKGRFANPSALAKTIQKAIRGSYRLDKTIQTSIDVVLSVYLNEIRLFQKQIKLLEKSIDDLLKTFDEAQILQSIPGIGPVYSAGILAEIGQIKRFENQSQLAKYAGLAWKKYQSGSFNGDNTPMIHSGDTYLRYYLIEAANSVRRYDPVFARYYHQKTNEAKLSPHKRAVSLTARKLVRVIDVLLRNHQIYQKEKVV

SEQ ID NO: 91843 - protein, 370 aa, unidentified
MKQYSEAFVGFDTAKKKHAVAIADVGREGEIRYLGEIDSSSAAVERMIRKLAGRYEELHFCYEAGPTGYGLYRQVRGLGHPCTVVAPSLIPKKSGERIKTNRRDAVTLARLFRAGELTSVWVPDTVHEAVRDLVRAREAASQDLRRKRQQLLSFVLRHGRIFSGRQHWSRAHLRWLAQQKFDHPAQQIVFQDAVDAIDDAAARLRRLDEQVAAIVPSWSMAPVVEAYQAMRGVSFVVAVTFVAEIGDLRRFDNPRQLMAFLGLVPSERSTGERVRRAGLTLAGNKRARRVLIEGAWSYRYPARVSQTLQARLEGLPKAVREIAWKAQIRLCARYRRLTAAGKKLPVVIAAIAREMAAFLWAIARHVAPAA

SEQ ID NO: 91844 - protein, 402 aa, unidentified
MTYDYVIGMDACKYFHHACVLDIDGTQVLSKRINQNEQSLRALFSAFSAYDHKVLVVVDQPNNIGRLTVAVAQDIGIDVRYLPGLAMRQLSRIHAGNAKTDIRDAYIIAHAAKNLPESLRSVDRVEEAFLQLKVLNGIDEDLARSYTRLINQIRSALVGCYPQFEQALRGQIIHRKWVLHLLARYGGPTKIKRLGKAKAAAFARRYKARNPEPVLDAIFAAISEQTVTIAGAHYAEMGVAMSAKDALFKLEHRQQIEKEVIELINDIPHTQFLLSMPGIGPKTAAQILMTAGDMSDFPSAGHLASYAGLSPRTNQSGTSIMSNSLNRAGNKKLKNALWQSSFASIRFHERSRQFYERKRREGKRHNAAVVALARRRLNVLYAMMRNHEHYHDPAPSQEDLAA

SEQ ID NO: 91845 - protein, 444 aa, unidentified
MGKPQVFDDQEQERVFERVAAVDVAKASGVVCMRLPHPAQPAGRRSQVWEVPATMHAVTELAGRLTAEGVQKVTLESTSDYWRIWFYVLEQAGLAVQLVNASQARNLPGRPKTDKLDAMWLARLTEMGLLRPSFVPPAEIRVLRGYARARTRLTHDRTRCFQRLEKLLEDALIKISAVASKLTTRSVQDMIRAMIAGQRDPQVLAGLARTRMKAKHDALAEALAGLFTDHHAELAQLLLDQIAFLDTQIARLAMLIGEQLASLRAAGGTGADGATGPGPGAIALPVIARLDEVPGVGAELAASIISETGLDMTRFPSPGHLASWAGLCGRTIQSGARTRTGKGQGNAWLRGYLGRAAIAAARTSTFLGERYRRLARRRGAARAQVAVARSILIIIWHLLNDPAARYHDLGPGHYQARTDKNRKARNHIRQLQALGYTVTITQAA

SEQ ID NO: 91846 - protein, 369 aa, unidentified
MNDTTIFVGLDVHKKTIAVATVEGRASADVRFYGTIANTPVAIRSLLRKLGKGGQRLHLAYEAGPMGYNLYRLSTGLGHRCDVVAPSLIPRKAGDKVKTDRRDAMTLAQTLRAGQLTEVWVPDEANEAMRDLVRMRALAMKDQRKARQQLHSFLLRHGRSYPGKHWTKAHRRWLGELTFAQPAQHLVLEELLARIERAEELCERLKKAIVDLMPQWTLAPVVAAVQALRGVSILVAATVVAEVGNFSRFDNPRQLMAYLGLNPSEHSSGATIKRGPITKTGNSLARTCLVEAAWTYRHPARVTQIIRERLKGLPEPIRAIAWKAQVRLSGRYRKLTATGKSAPKAIVAVARELVGFIWAIARLVEPKVA

SEQ ID NO: 91847 - protein, 375 aa, unidentified
MKEKVRFLGLDVHAETITVAIAEPNGEVRNLGTIPNRGESVRKLIRKLGPADPLRACYEAGPTGYVLYWQLTGLGVECAVVAPTLVPVKAGDRVKTDRRDALKLARCHRAGDLTAVWVPDEGTEALRDLVRAREAAKQDQLRARHRLSKFLLRTGQRPASGIKAWTQRYMAWVRQLVYAQPAQAAALLDYVHEVEHMAARVLRLEQSISEAVKLASPRMQEVVRALQALRGIAEISAVTIVSELGRISRFQSARQLMGYSGAVPGENSSGQSVRRGPITKTGNAHLRRIAVEAAWSYRLRPGVGPKLRQRQQGVPDEIKEIAWKAQIRLSKRYARLAAAGKDQRKIVTAVARELLGFIWAIGVRTEAAAQQPMAA

SEQ ID NO: 91848 - protein, 337 aa, unidentified
MDYFAGLDVSMAETHICIVARSGAVIHKAKVASTPADIAAELAKLPSCRRILFETGRMAPMLFHGLSQLGLPVVCVESRQAYQALKSLATHKTDRNDARGLAHLARTGFFKPVYVKSLPAHAVRSLIIARKKLVGQRVTLENQIRGLAVVFGVRLPRALNPAFIKQALQASDGIPGLSVAMRGLIAARAAVLAAIVAIDADIRRMVRASDACRRLMSIPGVGQLTALAFTAAVDDPRRFRRSRDIGAYLGLVPRRYQSGEIDYTGSISKCGDRRIRTLLYEAANVLLTRYKGPLKLKEWAFTIAKRSTMRKAKIALARRLAIIMHSMLRHGTEFIPA

SEQ ID NO: 91849 - protein, 377 aa, unidentified
MNEFINTFVGLDVHKETIAVAVARGGRGRPEYLGEIRNDPGAIDRLVKRLTPDGEVAAFCYEAGPCGYGLYRDLRRLGHECDVVAPSLIPRKAGERLKTDRRDAEALARLHRAGELTPVWVPDNEQESIRDLTRAREDMKAIELKARQRLGAFLLRHGQVYREGRTRWTQAHFRWIERIAMPTSVQQIVLQEYLDAVKDARRRVAALEDEMRRALEEWTFRPVVEGLMAMRGVGLITAMTTLAELGDITRFDSPRQLMAYLGLVPSEHSSGGSRRQGAITRTGNGHVRRILVEAAWNYRFPARRTKEIERRGEKTTPAVQAIAWSAQKRLGHRYQKLLQAGKEKNRVVAAVARELAGFIWAIACEVMGKPHGSRVAT

SEQ ID NO: 91850 - protein, 351 aa, unidentified
MNNAVARNKKQITIGLDLGDRRHTYYVLDEAGKMAREGSLGNTREQLASMARSYPGATVVMEAGTHSPWVSRFLQELGLRVIVANPRKTRAIYENERKSDRRDAMMLARLARMDPTLLHPIEHGSQEAQEDMLQLKLRDSLVRARVALINAVRFTLRSLGYPVSNPSSACFHKLVLKEVPESIGEMIAHNVAVIAELTERIKALDTSISRLAAERYPETIYLQQVSGVGPITSLYFVLKVGNPGRFQRTRDIGAFLGLCPKRDQSGETDKELRISKCGDRYLRRLLVSAAQYILGPFGAHSALREHGLRLAQEGTAKAKKRAVVAVARKLAVLLLTLWKSREPYESFHTTA

SEQ ID NO: 91851 - protein, 357 aa, unidentified
MKRYRLAVDKGKPQGVSKIFIGVDLHKIQWHITIRTQEVELFNGSIPGKWDALKKLLERYPGCQKQGVYEAGYFGFWLYDRLTAQGVDCVVTPPSLVPQEYGNYVKTDRRDSRKLAHLLAKGLLKRVWVPTPQQRYERQVIRRRKQLIADRVRTQNRIKAELRFYGIDLPAPTGQWSRAYFENLQRLQFGNQWMQESFTRLLEEYQFLTDQIQKQTKLLRSLSETPVYEERMKILRTMPGMGLVSSMEYLLELQDLERFRRGTQLPAYVGLTPSQYSSGEKLRMGRITGIGKNDLRGTLVEVAWRLIAKDPAMHEKYERIKARAGSKRAIIAIARTALLRTRRMLLDRQPYVVGLAA

SEQ ID NO: 91852 - protein, 331 aa, unidentified
MGTPVSVGIDVAKATLSVSICDHDGHEQALAIRNTDTDITTKVLPYLRHYSGKVVMESTGHYHWTPALVLREAGIDIRIVNPLLAKQYTSGTIRKVKTDPADARGLARMATVCDNLPETFTVSRARLIIRKKLATISTMGRHLQALKANLASLREGQVLLDEVDTPVVAELAESIRQLGISLKHLEVECVQLTESDEDSLEIMKRLETIPGVSLFCAALATNWFDINTATSAKSFIGYAGLDISSRESGTWKGHCRLTKRGNPFLRKRLYCAAWGAVMNYPEYRAYYDKLKAGGRGHKEAVVIIARKLVRTMYCLLRDGVSYDSAKVSFPN

SEQ ID NO: 91853 - protein, 309 aa, unidentified
MPAINYVGVDLSKPEMVVDLSAEAKPRAFSNDANGHAALLAALPADAHVVCESTGGYQSALVRALQKAGVPVSVVLPGRVRAFARARGLRAKTDPIDARLLTAFGQAMAPAAAAPLSDAHDELQQLARARRDLVAQLNDEASRTEHFTLPCLQQQAQERRALLQRQIRDIEKRLRALIAADPAWRWKAERAQEVCGIGEVSAWTVLTELPELGQLERGEPAGLLGVAPDPQDSGPRRGHRHISGGRSHARKVLYMAALTASHHNPVLAPFYQRLVARGKPKLVALTAVMRKLIELLNRLLAEPHFKLAQ

SEQ ID NO: 91854 - protein, 325 aa, unidentified
MKEILLAGVDVSKLTLDIFVKPCGLSLVIDNNRKGFVQWWKEMKKILQPDTRVMVVMEHTGLYSRKFEIFLRTLGVDYCKISALEIKRSLGMTRGKNDKIDAQRIAGYGWLRRELLTADPKVEESIEQLKYLLGARLKMVRDRAGYINRIKEMKAAGYVKELKLEEEIVAYLAKKIKEVERSITKLIVSNPVLKTTCELLRSIKGIGPIIAAYMIGNTNNFTRFSSARKFNCYAGIAPFKYQSGTSIKGRARVSHLANKDTKTLLNLAATCAIRCDEELKTYYLRKVSEGKNKMSCINAIRAKLVARMFAVVKRQSPYQPLAVAA

SEQ ID NO: 91855 - protein, 447 aa, unidentified
MKQKKPFKKRSTKLPKHLQHLNQHAAGIDVGSRSHFVAVPEGTDEQAVREFSTFTDDLEHLAKWLCSCGVTAVAMESTGVYWIPVFELLERHGFEVRLVNARHVKNVPGRKSDVLDCQWLQQLHTYGLLRGAFRPTDQICTLRAYVRQRATLVRSSASHIQRMQKALAQMNLQLHNVVTDITGVTGMGIIKAIIAGERNPKTLASLRDKRCKNTEETIARSLHGNYRAEHLFSLQQAVELYEFYLQKIADCDQQILAQLKSFDSSDGSDSDSEPPRSIEEALQQMSGVDLSSINGINTNTALKIIAEIGTDMTRWKTVKQFTSWLGLCPGSKISGGKVLSSATKPVANRAAAALRMAALTLFNSKSALGAYLRRQRSRLGAPKAITATAHKLARLVYSMLKNGTDFVDAGQEQYEERYRSRVVQNLKRRAQEMGYKLVSIQEEPQTV

SEQ ID NO: 91856 - protein, 340 aa, unidentified
MRELYAGCDLHSNSNLVGVIDGQGKRVFKKKLSNDMGWIREALVPFKGELVGIVVESTYNWYWLVDGLMEEGYRVHLANPSAIQQYSGMKHSDDRHDAFWLAEMLRLGILPEGYIYPKQERPIRDLLRKRGHLMRLRTSLVVSLQNILSRNLGRKVNVNDVKVLREDRVTPLLEESEDLAMAGRISKETIDFMTHQIDQIERRIDKKVRLKGAYRFLQTLPGVGKILALTIMLETGPISRFETVGDYVSYCRKVPSQWMSNGKWKGSGNTKNGNRYLSWAYAEASDYARRLHPEPRAYYQRKMQKTNAVVAHSALAHKLARAAYYVMRDQVPFDPERLFR

SEQ ID NO: 91857 - protein, 337 aa, unidentified
MEYFAGLDASMKETHICVVERDGGVVLEAMATTLPEAIAAALARAPSCQRVVLETGRMAPTLFHGLVALGLPVVCIESRQAYQALKSLATHKTDRNDARGLAHLARTGFFKPVHVKSLPAHAVRALIIARKKLVGQRVTLENQIRGLAVVFGVRLPRGLSPAFAEQVISGSQGVAGLAGAMAGLLAARNAVLEAIAAIDRDMKRLVRSSEACRRLMTIPGVGRLTALAFVAAIDEPERFRRSRDVGAYLGLVPRRYQSGEVDYTGSISKCGDRRVRTLLYEAANVMLTRYRGELALKDWALDISRRSTMRKARIALARKLAIIMHAMLRHGTEFRAA

SEQ ID NO: 91858 - protein, 309 aa, unidentified
MDNYIGIDVAKATLQIYIPKNDLDVEVKNSESGLKTLYTKLKKQYKKEIGDIVFVYESTGSYSTYLEQFSESNSIKCFKVGAYQSASFSKVVKNRSKTDIVDARMLSNMHVIATDEDIKIPSRDVKAHQIRSYIKYYQSLVKEEIRSKNYLEAATFNLEDKFVLKQVEKKIKNIQKEQVDIISKTMEIINSNEKYKKAYENITSIKGIGEKSGIILLYLFLRYPKASRQHITALCGLDPIQRTSGTSVQHKERISKQGLSLVRAILFMPTMTAIQHNEEMKLIYDRLVDRGKPKPLAQIAVMRKIVSTK

SEQ ID NO: 91859 - protein, 436 aa, unidentified
MDADYANRLRWFRQFKEHVNASKRTLIVGVDIGKDKHHGFFGTPAGRTIHRRLIFENSSEGFGNLLYYIKRYLSDEQLADVVLGVEPTSVYHKPLAEYLITRGYCVVYVTNSAIKKNRAILDGRWDKNDTKDAANVADLVSRGRCHFYDLPDINLRDIRNLLSLRKRLKKQEHRLITRIRNNLVAQYFPELDRAWYRCQQENLAIVRFCLSPQRIAQLSFDDFCRMVTRRRRGLRQYKRLRHIHEVAQDSIGCQLGASVVFEAQLLVESLEQTRQQVGEVEEQLYGICESYKEYELLQTIPGFGPFVSAAVLGAIGFAQRFKNAKQLLRLAGLDLNAIRSGKSSQSAVPVISKAGKADLRYALYQAARVATSLTAEFKAYFKRILKGREKERGIKTKMRVKVSAKMLVIAWTLMKTQQPYKAGLLVIDEPVQPRGR

SEQ ID NO: 91860 - protein, 491 aa, unidentified
MSERRLVGIDLGIASAHTVRVLREDGSEVCRRRCWPRLDSLLEVEAAALAGAPPELRLEVVIEPTGPAWLPIAVFFSGRGHTVYRVSSAQAADLRRFLSRHAKSNGIDAQTLARLPLVDPGGLRPLRLPERDAASLDRRVRATDRLTRQAAEHKRRIKDLVRQLLPMTPLQGELGKADLAVLERTGAHPRRLLDLGRTRLTRLIARASNDHLGEERAQAWLDAAHLALELYGDHHAVAFNDRAAEVVTEVRLLHATQAELPAHESAREQAYRQVDPDQLARGLPGVAAVGGPALAALIGDARRFPDGASFRSFTGLAPRASETGETDRKGQPMSKAGPRLLRSTLIRAAETARHLDPQLARLYYVQVVERGACHLKALCVVAAHLGERAWAVLARGTPYQFRDVDGTLVTPAEAKALAARWKVPDEVRQRRRSRKSRKQGGKAPHQVHLGPATRARGALTRRPSPQPILTSGLTPIKQILNDLQERINVRP

SEQ ID NO: 91861 - protein, 392 aa, unidentified
MVISVGIDVSKDKHDCFIVSSEGEVLADVFTIPNTMDGFHCLLQRIRDCITPQDKIKVGLEATGHYSYNLLGFLLDNGLATYVLNPLRTNLYRKSLSLRKTKTDRVDARTIATMLLSDAGLKPYTDTAYHNEELKSLTRYRFDKVKERAKLKSSVSRLVCILFPELEKLVPTLHMASVYALLEVFPGAKQIAAAHLTRLKALLESSSKGRYKRDMALEIRDAARNSIGSRMPAKSLELQHTIRLIRELNAEITEIEEQIQSIMDELHSPITTIPGLGFRMAAMILAEVGDFTRFDSPDKLLAYAGMSPSTYQSGQLKNCYPHMEKRGSRYLRYALYNATKYVCHWNPTFADYLAKKRAEGKHYNVALSHAAKKLVRLIFAMEISGMPYRLAA

SEQ ID NO: 91862 - protein, 414 aa, unidentified
MDVLHERCAALDIGKKDLKACVRTPNPSGRRSRRQEIRTFATVTNSLLELRDWLLAEKVTLVVLEATGDYWRGAFYLLEDCLNVILVNAAHAKGLPGRKTDVADAAWLCQLGECGLLKASFVPPEPVRHLRDLTRYRTSLTAERSREVQRLEKELEDAGIKLSSVATDIMGVSGRAMLAALIDGERDVHTLAQMAKARMRPKIPALVEALTGNFGEHHAFLCRLHLERIDHLTAAIGELSVRIEAEMLPFAQQIELLQTIPGVGRTTAEALIAETGGDMTRFRTAGHLASWAGVCPGHHESAGKHKSGRRRHGNRRLSAALGTAAMAASRTKDTTYLGARYHRLVPRLGKKKALVALEHSILTAVWHILTDNVAFHDLGGDYYAKHNPERAMRRLTRQANALGFTARFDPIEAA

SEQ ID NO: 91863 - protein, 346 aa, unidentified
MEHYAGIDVSLELSSVCVVDTQGKIVKEAKVASEPEALVAFFKALSFAVKQVGLEAGPLSQWLHAGLRQAGFETVLLETRHVKAALSAMMVKTDRKDARGLAQLIRLGWFRSVHAKSIGSQEVRALLVARKQLLGRLIDVELSIRGILRGFGLKVGQVTRKTFEARIRELVTGQPTLERIAGAMLSARASLKVEYEKLHKAVLAIVREDAVCRRLMTVPGVGPLVAVTFKSAVDDPTRIAKSKSVGALFGLTPRKYQSGEKDITGGITRVGDEMVRTALYEAANVLLSRITRFSKLKRWGMDVAKRRGSKRAKVALARKIGVILHRMWVDGTTYRWAAAEPIAAQA

SEQ ID NO: 91864 - protein, 458 aa, unidentified
MKRKNKRTKGMEEARPFEGMSKVNQNAAGVDIGATEIIACVSGGEDVQLVKAFGNYTVDLLAICEWFRKHEVKTVAMESTGVYWIPLYEELERQGFACLLISSHSLRKVAGQKTDVEDAQWIQTLHSYGLLKGSFRPQGDLVALRTLLRHRSQLVEHRSPHIQHMQKALLQMNVQLSQAVTDVTGMTGQKIIRSIVNGERNARVLAGFRDPGCKHSEEEIEKALTGTWREEHLYVLKQSLELYDFYTEKVEACDEEISRRYGMTRPDWVSRELPVIPDKKRNSHSKNAPKDAKGIREHLYRINGVDLSLVDGMGVSLAQTVTMEVGSNVGEKFPSEKHFCAWLGLAPKHDITGGKVLSNRTLKTKNRAGQAFRLAANSVKKADCPFGVMYRRLRSRLGPAQATVATAHAIARVVYKMLKYKVEYDPLSVNEYQKQYEEQQVKYMRKRAAKFGYQLIPA

SEQ ID NO: 91865 - protein, 417 aa, unidentified
MTEDVHWLVGIDWASQKHQVFLLDLDGRVVGEREFDHEGTGLSQLCNWLIEQTKALPGQIAVAIETSHGPIVEMLLERGFQVYSINPKQLDRFRDRFTVAGAKDDSRDAHVLADALRTDRRAFRRLSVENPLLIELREWSRMLEDLKQERNRLSNRMRAQLWRYYPQALEIADDLAANWFLDLWQQVPTPAKAARVKQATIETVLKANRIRRFDAAEVLRVLRQKPLWVAPGTTEAACAHIRTMAARIRLVNQQIAEANRQLDELCDKLEAEADNAPGQKCEQRDVTILRSCPGLGRINIATLLAEAPEPLRRRDYHALRALCGAAPVTRRSGKQHIVVRRFACNKRLQNAVYHWARVATQHDPISQRRYAALRGRGHSHGRALRGVADRLLSVMCTLLQQQMQFDPHYASSQMATA

SEQ ID NO: 91866 - protein, 391 aa, unidentified
MRFAGIDVASEKHVIAIVDDTGAVVVKATTFEEDADGYKSLLELLGEPAECLVAMEATGHYWQNVFAVLAANGFELSLINPLRTNRFAQEDLARTKTDAIDAVGIARFAQQKRPVVTKLPDAATRELKELVRLRDRVVQDLGDATRRLHRSVDLGFPEFTRFVKKLDSELATKILHTYPTAAAFPTATRPLSKLCYDGRHKVGPELAKQLVDAARTSVGQHHGDAYRMQVQYSCEDIDLQRQRLRDLERRIETTLDTHEVGKLLTTIQGIGPQTAARIVGEVGNFERFRSPEALASYVGVIPALKHSGKNKPSRGSMTKMGHAKLRHSLWMPVLVAVRHNPWLRAYYQRLREGGKLPKVALIAAMRKLLHAIYSVATNKRAFVPRLAEVKS

SEQ ID NO: 91867 - protein, 410 aa, unidentified
METIVERAAGLDVHKAQVTACVRVPGRGRERAQEIAEFPTTVRGLLSLRDWLKAHRVTQVAMEATGVYWKPVWAILEDEFDCLLVNARHVKQVPGRKTDVSDAAWLCQLLEAGLLRRSFVPPKPIRALRNLTRYRKAQIGERQREANRLHKILEDTGIKLDCVASDILGASGRAMLDALVAGTTDPEILAELAKGKLRAKIPALKEALVGYFDRQHALIVSAMLAHLDFLDEQIQLLSDEIEEQLAPFAKAVELLCTIPGVQRRTAESVLAEIGTDMSRFPSDRHLASWAGQCPGNDRSAGKRRSGKTRHGSKWLDTALTEAAMAATRTNDVYLAAQYQRLRPRRGHGRALGAVKHSILCACWHMLQTGELYREAGGDYFSRRDPERTTRRLVAQLERLGHRVTLEAAAA

SEQ ID NO: 91868 - protein, 343 aa, unidentified
MKVTVIGMDLAKSVLQVHGVDEHGKVVIRKQLRRRQVMTFFAQRTPCLVGMEACGGAHEWARRLTTLGYTVKLMAPQFVKPYVKANKNDAADAEAICEAVSRPNMRFVPIKTPDQQAILALHRARQGFVRQRTAQGNQIRGLLAEYGVTIPVGIRNIRKCLPDILEDGENTLPGMFRHLLRQLGEHLTTLDRLVSEMDQQIQAWHRTNEASQRLTKIAGVGPITATAVVASVGDARNFSSGRQLAAWLGLVPRQHSTGGKSLLLGISKRGDCYLRTLLIHGARAVIRCAGSKRKAETVQSTAGASTQCRNWVQSIVSRRGTNVAAVALANKNARVIWALLAHG

SEQ ID NO: 91869 - protein, 387 aa, unidentified
MPQPNDLSRSLVALDQNSTIIAVVELSHSSWLVAGMLPGIERQPRKKLEPSPERLLALLHRWRYEAVRAGRTITRIALAFEAGRDGFWLARWLAARGVEAHVIHASSLAVSREHRRAKTDRLDTELLKRGFLGWLRGERGHCSMARVPTIAEEDAKRPNRERDGLVGERTRIVNRIKSTLARLGIRNFKPTLRKAAERLASVHTPEGMPLPPNTLAELQRDMARLGFVVSQIREIEEARQKRLEQQHETGPHAMVRLLTRIVGVGVETADMLVHEVLSRPMRDRRAVARYAGLTGSPDESGAQRREQGLARAGNARVRRGMIQLAWRFLMFQKESALALWYRARTADSRSGTRKTMIVALARKLVIALWRFVTTGEPLEGVALRPAS

SEQ ID NO: 91870 - protein, 415 aa, unidentified
MVEVIVERCAGLDVHRDTVVATVRVPGSGKSRRRRSQETRTFGTTIGQLERLSDWLGECGVTRVGMESTGCYWKTVFYALEDRFDCWLVNAKHLRNVPGRKSDVIDSRWCCELVELGLVRPSFVPPPEIRRLRDLTRLRSTQVQERTRAIERLEKVLQDAGIKLTSVASGVYSVSARAMLEALLAGVTDPAVLAQLAKGRMRKKIPQLEEALASRFDIGHHGVLVAGLLAHIDALDQAIGNIEARIGIATAPYAGLIELLCTIPGVGARVAEILIAECGVDMSVFPTVAHLASWAAICPGTNQSGRKRGSGKTRNGDTWLCTALTQAAHAAVHTKDTYLASHYWQLRGRRGDAKAIGAIRHDILTAYYHIVRDRVAYRELGPDWLTRRHSPEHRTRRLVKQLEALGHHVTLQPAP

SEQ ID NO: 91871 - protein, 327 aa, unidentified
MDTIVLGIDVGKEKLDVCLRWPERQIFNQFDNTAAGHQKLLSWMNKQKVTQAHVCMEATGQYGNGVAEYLFQHGQSISVVNPARIKHYGNSQLRRNKTDKADAGLIADFCASQKTTLWTPPPAEFKELQALVRRLEDLTGLRQQEANRLQAGGTTTSVIADLKEHLAFIDQQLLKIKRLIQDHIDKYPELRKQRDLLITITGIGKLTAAKILGEVRDIREFESARQLAAYGGLTPENKRSGTSVNKKPRLSKQGNSNLRKALYMPAISAKNHNPIVAAFCKRLSAAGLCSMAVIGAAMRKLLHIIFGVLKHGRPFDPKYIDASNIAS

SEQ ID NO: 91872 - protein, 423 aa, unidentified
MMKLKYSICCGLDVHKNVIVATIVTTNKDGISEYLQKSFSTINSDIQRFHNWLIENNCYHVCMESTGKYWIPIFNYLENDIDVCLTHPKYVKAIKGKKTDKKDSKWIADLYKFDLVRCSFIPPKDFRQLRELSRYRFKLVCMKSSEKNRIQNCMTISNVGIASVLSDPFGKTATEIISYLLEHTADSMDEKAVRKLIKKGAKSKSDEIIEAIKGYTIETDQAKKLELARGHLEYLDDMITQTEVELYVRIKPYYEFVEFVSTMPGMTELSSTIVLAETGVDMDIFDDAKHLCSWCGLSPANNESAGKKKSVRIAKAGDYLKPMMVQCALAAIKSKKQPYFAIKYGRIKKRRGHKKAIIAIARMMMVCIYHMVSEKKPFTPTDYEELINPQNHVERVVLNENNVFAYLESLGYDSSKLVKRNDN

SEQ ID NO: 91873 - protein, 382 aa, unidentified
MQRITRKETRFVGLDVHAETIAVAIATKDGDVHTLGSIPNRPESIKRLVTKLDAGGTWTACYEAGPTGYALYWQLAKLGRACEVIAPTLVPMKAGDRVKTDRRDAERLARCYRAGELTAVWVPDAAHEALRDLVRAREAAKQDQLRARHRLGKFLLRHGKRPPQNMRAWTQQYLEWIKREVKFEQCAQQATLEDYVNEVEHCALRIVRLEKTIDVVVEQAPESMREVIEALQALRGVAKVTAVTIVAEVGTLSRFEHARQLMGYSGAVSSEYSSGERTRRGGITKTGNAHLRRVIVEAAWSQRYKPLISRAARKRQEGLSAEVQEIATKARQRLHSRYVKLLGRGKSKQQVVTAVAREMLGFIWAIGVTVERSHVEKAKGAA

SEQ ID NO: 91874 - protein, 430 aa, unidentified
METHNALHHDTEDSLEFAAYIGIDWSDRKHDICLFDTQQQTQEFCVIEHRPESIDTWVDSLRQRYGGRQIAICTEQKRGPLIYALCKYDFLVLYPVNPRTVAKYRQAFKPSRAKDDPTDAALLMELLRKHRDHLQVWQPHSQQIRTLAQLVESRRTLVEDKVRLTNRITATLKHYFPQVLDWFEDKDTQVFCDFILQYPTLKAAQVAQTDELTTFFHQHHVVRQTAISRRLAQIKQGVPLTEDASVIEPLTLLVKTWVQQLKILLFSILTFDLEIEKLFSAHPDASLFAALPGAGPHLAPRLLVAFGDDRDRYQSAQDLLRYAGIAPVQEKSGKKEWIHWRWSCPTFLRQTFVEWANHSRNYSFWASEFYDDQRRKGKSHQVAIRSLAFKWIRILFRCWQDRQPYDEVKYLLVLKRKGSPLVANLVAEGT

SEQ ID NO: 91875 - protein, 317 aa, unidentified
MSVTSEVFVGVDVSKAELEVSWLPQLGRLQVAREEAGLVQLVERLKALGPALVVLEASGGYEMPVVMALAGAGLPCVVVNARQVRDFAKASGKLAKTDRIDAQVIAEFAQAIRPKVRALPDAAAAQLIALVTRRRQLVEMLTAEQNRLALSHTVVREDLKQNIAWLKSRLQDLDGELARAVRESPLWREHDKLLQQVPGVGRVVSAVLLALLPELGRLSPKSIAALVGVCPFNRDSGRWHGKRSIFGGRAGVRTVLYMAIVSAIRWNPLIKAFYQRLLAAGKPKKLAMTACMRKLLVILNAMMRDRTNWNPNGALAS

SEQ ID NO: 91876 - protein, 340 aa, unidentified
MSLYAGMDLHGNSNYVAIMDSKGKRIAQKKLPNDRRLILETLQPHRAKISGIAVESTYNWYWVVDTLREAGYRVHLANPSAIQRYSGLKYTDDQHDAFWLAEMLRLGILPEGYIYPKEERPIRDLLRKRGHLVKLRTSLIISLQNIISRNCGLRLNVNKVKELKKNQVSPLLEANDDLALAGEVSKEAIDFLTRKIRKIEGVIVEKVEVKDSYRYLLTLPGVGKILALTIMLETGPISRFAKVGNYVSYCRKVSSQWISNEKAKGKGNKKNGNKYLAWAFSEAAELGRRYHSGARAYYTRKMQRTNFMVAHSALAHKLARAAYYIMRDQVPFSSEKLFAC

SEQ ID NO: 91877 - protein, 387 aa, unidentified
MIYVGIDIAKLNHYASAISSDGEVLIEPFKFTNDNDGFCTLVSKLNSFDMDQIIIGLESTAHYGNNLLSFLVPKGYKVCLINPIQTSTMRKNNIRKTKTDKVDTFIICKTLMMHPHRFVTLYDIGLMQLKNLGRFRQKIVKQRTRLKIQLTSYVDQVFPELQYFFKSGIHQKGCYALLKEAPSPDAVASMHLTHLTHLLRLASHGHFQKETAVELRVLAQKSVGSSDKSLSIQITQSIEQIELLDRQLEMIESEMKDIVSSLDSVIMTIPGIGYVNGGMILGEIGDIHRFSSPCKLLAFAGLDPSVYQSGNFEAKHTRMSKRGSRSLRYALINAAHNVVKNNATFRDYYNQKMSEGRSHYNALGHCAGKLVRIIYKMLSDDVPFNLA

SEQ ID NO: 91878 - protein, 349 aa, unidentified
MVVVGADVHKRTHTFVAVDEVGRELGHKTFPATTPGHQDAVRWARERFGRELVWAVEDCRHLSARLERDLLSGGESVVRVPPKMMAEQRRVARTRGKSDPIDALAVARAAQREPDLPVASHDEASRELKLLVDRRDDLVKHRTATINRLLWHVHEIDPAWAPPKASLDRAKHQQLLADRLAEVPGIVAELARDELDDIIELTVRINDLERRITGLVTDAAPTLLAMPGVGALTAAKLVGETAGVARFKSEAAFARHAGIAPIPVWSGNTAGRVRLTRSGNRQLNAAIHRIAVTQIRLDGLGKTYYEKKKAEGMSTPEALRCLKRRLARIVFHHLTTDQAAARTTLAAAA

SEQ ID NO: 91879 - protein, 344 aa, unidentified
MHIASIGIDLGKNTFHLVALGEHTKVLIRKKFSRAQLLAYTANLPSSLIGLEACAGAHFMGTALREQGHKVRLIPAQFIKPYRKSNKNDFIDGEAIAEAVTKENMRFVQLKTEEQLDVQAMHRVRDRLVQRRTALINEIRGFLLERGITFAPQPKHLSKNLPAVIEDAEQKLTPRLRWLLDRLWQEWKQMELDINAVTDEIERISKENSLCRRLQQIPGFGPLVSTATVAAIGNGSAFRRGRDFAAWVGIVPRQYSTGGKQKLFGISKRGNHYLRRMLIHGARAVLLRVKYDTGGFGQWVHRLAQRAPRNKVVVAIANKLARIAWAVLSSGKDYQHQPLQVTAA

SEQ ID NO: 91880 - protein, 351 aa, unidentified
MRTSQNTAESINTIGIDVGKNTFHLVGLDKRGAIVLQQKVTRHQLGRRLSNVSRCLIGMETCSGTHFIARQLAALGHDVRLIPAQYVKPFLKGHKNDYRDAEAIAEAVQRPTMHFVSIKTPEQMDLLALHRVRSRLVRQRTGVANQIRGFLHERGITVRQGFMPLRKALPEILSSKSDALSPRMINLIGELIQDWRRLDDRIASVSTEIEAIAKRDESCQRLMSVPGVGPIVSSAVVAAIGNGTGFKQGRDFAAWLGLIPKQESTGDRTILGKISKRGNKYVRTLFVQAAHVVLERRPRTARQGLWPWIEQASKRLHRNMLAIALANKLARIAWAVLARGHAYQPRIIANA

SEQ ID NO: 91881 - protein, 355 aa, unidentified
MERYIGMDVHAASCTLAVISEKGRKLKDFPVETNGQALVEAIRMIPGRKHLVLEEGLQSAWLYETLSPHVDELVVAGITQSRGHKSDRRDAYGLAEKLRVGNLDKPVFKSPRQFTRLRELSRIHMTLVGDVVRGQSRIKSLYRSRGIFVSGVNVYGVRHREQWQTKLSSSTQTRATRLYDHLDFLLEQKKQAETDLLREAKKHPIVGVLETAPGFGPIRAARLVPIVVTPHRFRTKRQFWSYCGLGIVTRSSSDWIQAADGGWIQARVPQTRGLSRQHNHVLKSIFKGAATTVITQLSKDPIHARYERLLDGGTKPTLAKLSLARMIAATVLRMWKNEEEYDPGRGDPSTVTREG

SEQ ID NO: 91882 - protein, 346 aa, unidentified
MKKIFIGIDFSKEKFDATVIKAEGVEERAERQHEVFDNKVSGFRRLLRWVKSVADEPDAGLWLFCGENTGGYSRALCNYLYGSGYDMWLENALSIRRSSVLQRAKSDKADAGAIAEYAMRNYDQMRLYKPLEKNLERLREVFLYRHNLVKLKASMTTRRGEKRLTQEKSDISRFMAQSSRHLISEFNKKIAECDRRIQEIIAGDEDLCRNFEIITSVPGVGTQNAVCLMVYTDNFGRFDYDSRKIACYYGVAPFGRQSGTSVNTPPHVSPFANKLIKALLTQAALASVNFCPQMAVYYRRLVEAGKKKPVAVNNVKNKLLHIITAMVRKGERYNPDHDYYAALKAA

SEQ ID NO: 91883 - protein, 424 aa, unidentified
MNTNDWTKHTHFAALDWASDHHDVVIVDRTGAIAAEFRFAHTAAGWAEFAQKMQPYAGAPLALETSSGPAVDQLLQRGWTLYPVNPKAAERYRERKVPSGTKTDRHDGWSLADALRTDGHGWRPLLPQDEATATLRALCRDEIALIEQRTALVNQLLAALREYYPVALELFDDWTQPYAWALIQQFPTPLALQTAGKRKWEKFLHTHRLWRTDTAPARLELFARANALPASAAVCNAKSLLATSLVKVLQALETQLQEYRRRIAVTFAQHPDHDVFGTLPGAGEKIAPRLLGELGAVRAVYPDADALCCQAGVSPVSFQSGKADHARIRWACDVVLRHTVHLWADCSRKKSAWAQAYYQGKRQQGHDHASALRCLGKRWLKVLWRLWQDGCPYDATRHAQSLQAHGSWVQAHLDAALQASPAAM

SEQ ID NO: 91884 - protein, 320 aa, unidentified
MDQHSAAGSVFVGIDVAKDRLDVHLLPSGEAFAVPRDHAGLERLVARLGEVAPRLVVLEATGGFEITVAAALSSAKLPLAVVNPRQVRDFARALGRLAKTDALDAQVIALFAERIRPEPRPLADAQTQRLAELVARRRQIVEMIGAESNRRRQARDPQLQRDLDSHLAWLQQALARIERDLDDTIRGSPVWRATEDLLASVPGVGAVTARTLIAELPELGHLDRRRIAALVGVAPLNRDSGSFRGRRMVAGGRSSVRKVLFMATLTAIRFNPPVRALYQRLTQAGRPAKLALTACMRKLLVTLNAMVRDGRRWADSGPSM

SEQ ID NO: 91885 - protein, 356 aa, unidentified
MYGLKRQKEKRSMDHFAGLDVSVKETSVCIVDDTGKIVREVKVASEPEALLAALKNPAYHFKRIGLEAGPLSQWLFSALAEAELPVVCVETRHMQAVLKAQINKTDRNDARGIAQMMRVGLYRPVHVKTLRSQKLRMLLTHRKLLQSKAIAIENDLRGTLRNFGLKVGMVGKVKFETRIKELLENLPDLAELVEPLLIVRRTLSEQIVILHRRLLAIVRDDEVCRRLMTIPGVGPVVALTYRATVDVPARFRKSKSVGAVFGLTCSKYQSGEIDRSGRISRCGDEMMRVMLYEAAQSMLRSKKWCWLKAWAMQIARRRGMKKAIVALARRLAVIMHRIWVDGTEFRWTREQAAAAA

SEQ ID NO: 91886 - protein, 340 aa, unidentified
MNATTYGLDVAKRVFQMYWVDAQTGEIVNRRFGRDELIGFLAQRPAGRVALEACGSGHWWARKIKALGHEVVLLHAKFIRPFVQTNKTDAADARAIWTAVQQPEMRTVAAKTEDQQAMLSLHRMRALLVKFRTMQVNQLRGLLYEFGATFRAGRVAGLAEIRARMAELEDALPGMMIDSLRHQLKRIDALEQDIDRLEQQIGAWQKQEAECRAIAEVPGIGKLTATALVATMGDAKTFKSGREFASFLGLVPRQSGTGGKIRLGSISKRGDPYLRTLLIHGARSVMYHAKVPTTWQTEIQARRPANVAAVAMAHKMARTAWAILAHGQAYRKDYVSVKPA

SEQ ID NO: 91887 - protein, 313 aa, unidentified
MSNSLPQTIGIDISKATLDCYVHPIGIERQFPNTTKGHKTLIAWAGQWEVERIAYEATGIYHRALEVALGHMPCVKLNPERARRFAQATGTLAKTDRIDARLLARMAVTLKPPVRPARSPQQNQLAELVNARDGLVRDRTALKNREKNLTVTLLKRQCSQRLEQIARHIAALDAEIAAVIAADEKLVRRHHILTSIAGLGTLTANQIIATMPELGSLDNKQAASLAGLAPVARQSGQWKGKSFIRGGRANVRQALYMPALVAARFNPNLKAKYQQLIAAGKPAKIAITAIMRKLIVTANALLRADHLWTTACA

SEQ ID NO: 91888 - protein, 354 aa, unidentified
MDTTTTVSVDLAKNYFELAISTQAGVIERRERLSRARFLRFFSNYPASTVVMEGCGSAHYWARCLRTQGHQVRLLPAHHVQRYVRGNKTDRADAAALLEAARCAEIRCIPIKSVDQQVVQQLHRLRQQYQRTRTARVNQLRGCLREFGIFIPQGIARGLSAVRAALQCADNELPDLLRPHIGELLQEVDVLKMQIARIERTLRELTQHDPVVHRLLQIPGIGLLGATALRAAVGDITRFATGRELACWLGLTAREHSSGERRRLGSISKRGDPYLRTLLVHGARSALVAAHRTVLAGHSPDRLRAWALRTEQRRGINKATVAFANKLARIVWATWAHERTFNGDWQRSTLLPES

SEQ ID NO: 91889 - protein, 354 aa, unidentified
MNSPSAVEPLKLYVGIDVHKKQWSVSIFTEAAHHRTFSQPPSPEALKAYIDKNFPGAAVTCAYEATKLGYWIYRRLTAFGYVCLVVNAADVPTSDRDSTSKTDPVDSRKIAKALRGNLLTSVHVPNLVTEGDRQLFRYRKRLQADQTRVKNRIKDKFLFTGIPIPEEFDNPNWSKRFLQWLRKVQLPDASTRLTLDRLLEQYDFLHKHFLKVSVEVRRLQREARYRKQARLLRTIPGIGPLTTVELLCEIEDINRFCSFKKFNGFIGFRPYSHSSGEHDWRGSLTYRRHNALRSSLIECAWSAIQKDPLLAQRYNELKQRLTGKRSIIIIARKLTSKIYAVLKNQTPYRIGLTT

SEQ ID NO: 91890 - protein, 389 aa, unidentified
MLLTEHRTLQTETSKEGRVAVGIDPSRSALQIALLSPEREVPRNYRLPLAPASVNTLETFLEGRKAIFAIEGSASLGHLFLLDLLSRGYDLRELQPQVSKNVRQLFTEDHTDEKDAAALAYAARLVFSLPRVRLSLEQAAAKRLSRMRVRLVRDRTRYINRLHACLTEGYGATYRSLFKEIASEKGLRFFREYPTINDAVNDPKEVCWELGDKLWQTLETAGRWPEGVYLQTLRGEIRVLVSLISELNHCLNQVEKEMEAANLGREVEVLTTMRGMGKVTACAISGNTGHVSRFRNEDAYAAYCGLAPSTWQSGASSARSKPRRRYNRHLKRAYMFLAFCQLRFNPLARAYYVRKRKEGKGHWAALRALARHLCRIVFRMLVKANQVTT

SEQ ID NO: 91891 - protein, 431 aa, unidentified
MNYNQNHKIAQITPKTLVIGIDIAKHHHVARAQDYRGIELGSTCFFDNTQEGFRTFINWITQIKESYEMESVITGMEPTGHYWLNLAHILKEEQIKFVTVNPLHVKHSKELDDNSPTKNDVKDAKVIAQLVKDGRYAEPTIPQGVFAELRVAKKLRDLLSVDLQIVQGQVHNWIDRYFPEFFTVFKSWEGKAALHLLKLEALPEELVRYTEKELLEYLRQAVKRSIGIKKIQALKEAANRSIGIRQGAMMAKMELRTLIQKYELIQAKFEELDQTLDTLLQDIPGVNQMLEITGIGRDTVAGFFAEVGDLSEYNHPRQITKLAGLSLKENTSGKHKGRTRITKRGRKKLRALLFRASMILVAKNKAFKALHLYYTTRPDNPLKKMQSLIALCNKLIRILFSIGKKQYVFKEEKMLKDIPHMHAFIQEPIAA

SEQ ID NO: 91892 - protein, 374 aa, unidentified
MADHSVAYVALDASKLRNAVAIAEAGRDGEIRYLGEIDNAPAATAKLARRLAKQHATLTFAYEAGPTGYGLYRQLKSLGHDCIVVAPSLIPQKPGDRVKTNRRDALSLARQLRAGDLTAVWVPDPHHEAVRDLTRARGAAVREQRAKRQQVAALLLRLGLHYPGKTTWGRAHMAWLAGQKLAHLEQRIALEEMLHAVRQAGDRIARLEQAIRTAVPDWSLAPSVTALMALRGVEFIAATTLLAEIGDLTRFRSPRELMAWLGMVPSEHSTGERIRRGPITKSGNRRARSILVECAWSYRHPPRVGRDKLARLEAAPPAVRDIAWKAQSRLTARYRALRRAGKLDVVAITAVARELAAFIWAVGVAVGSGRTPEV

SEQ ID NO: 91893 - protein, 407 aa, unidentified
MNQLFVGIDVASRNNAAYFMLPDGSKHSSFELPHNRTATELLSKRIVAALEKLQFKSVVIGIEATSVYGDHLVYFLYEDGALGRFNRKIHVLNPKTVKKFKDVHPDLPKTDPVDAFVIADNLRFGRITAAVYLDDYRYQALKGLTRARFFASQNLTAEKQRFLNYLFLKCSGLAQEKIFSDTFGAAALSLFESFESPDDLANMDLNDLTAFISEKGKNRFPEPEKIAAAVQAAARGSYRLPKTVNDSVNQVLSISVSSIRAIESQIKALDKEIERQFLNIPNTLTSIRGIGPVFSAGIIAEVADVNRFKGHPSLAKYAGLAWSRHQSGSFEAQHTRLIKSGNRFLKYYLCEAAFSLVRCDTEFKRFYDLKYSEVNKFQHKRALALTARKLVRLVFRLLKDNRLYLPK

SEQ ID NO: 91894 - protein, 357 aa, unidentified
MTTQQKTRCMFVGIDVHKDTHTAVGISPYGEKLFEITVGNYQKDFETLKEKVDEASGILSPYIGLEDVRGYGERLAGYLYEKYPVYHVPSILVDRARQNATHPEKSDSLDALGVAKVMIQSIDTLLPYTISKESEKAKQVKEISIDREDLVLERTRLKNQVHTLLYRIYNTEYQTKYKDPFSIKALTFWRNAKPTCDPFLLKTMKRKVRRILDIHVEVTDLEKDMTTLLDTGGYTIQTASGCGLVLSSTIIGEIGDINRFTSPGALSKYAGCSPRERSSGKKTRHVKSRSGNRRLNCAFHRMALSQISRSGNEKARAYFKRKISEGKSKSQALVCLRRQMVNIVWMMLKHKTIYRNA

SEQ ID NO: 91895 - protein, 466 aa, unidentified
MSQPRSSRSRRRRYAALPPELKHVHLNAAGIDVGAEAHFIAVPPSRDPDGQDVREFGAFTADLYALADWLARCGIETVAMESTGVYWIPLFEILEVRGFEVKLVNPRHVKNVPGRKTDVLDCQWLQQLHTYGLLQGAFRPDDQICVLRSYMRQRAMLVRYASHHIQHMQKALELMNIKLGHVVSDITGVTSMRIIRTILEGERDPYKLANLRDRRCKNDENTIALALHGHWRQDHLFALQQAVELFDFYHSQMAECDARIERYLDTFQDRCDGQTLPKMPRKRKLHRNEPTFDVRSHLFRITGVDLTRIEGIDSHSALKIISEIGLDMTRWPTEKHFTSWLGLCPGSKISGGKVLSSRTKPSANRAAAALRLAANGLHNSHSAVGAFLRRKKAHLGSPKAITATAHKLARLIYAMLKNGTEYVELGEDEYERRYRKRVMRNLHRKARAFGYRLVEIEGSAPNLKPI

SEQ ID NO: 91896 - protein, 367 aa, unidentified
MKKISTVAARQSKNFREQKLTIGLDLGDRSSWYCVLDEAGGVVLEQKLGTTPKAMKEVFGKMPRSRIALETGMHSPWVSRALSELGHEVIVAHARNVRLIGESRRKDDRFDARTLARLARIDPQLLAPVKHRSAQAQSHLMVIRARAGLVRARTSLINTARGLTKSYGERLRGCSPRNMNAEKARQLSPELRAALEPLLGAIASLSERIYEYNQQIEKIATNSYPRVTRLKQVKGVGTLIALTYMLTLEDAQRFRKSRDVGCYVGLQPGRRNSGQSEPQLHISKEGDRYLRTLLVQGAHHILGPFGADSDLRRWGLKLAERGGKNGKKRAVIATARKLAVLLHRLWVSGEAYEPLRNRRAMRLPAAA

SEQ ID NO: 91897 - protein, 412 aa, unidentified
MTVTNQFAAHVGLDWADKKHDVCVQFKNGERVFDVIEHTAEALDAWLTELHQKVKGRIAIALELKKGPVVYALQKNPFITVFPVHALSLARYRQAFSPSGAKDDPQDAELALELMLRYPQKIKAIEPDNADIRLLQQLVEQRRQLVEDKRRFVNRIINTLKQYYPQPLEWFSHRGSLLLCELIIRWPSLQQLKRARRDTIRNFLNAKGGRAMALTEQRVASIDNAIPLTTDPSVIEANALMAAALATQIKVVSEIIKTYDERIETLFDTLPDAGLFKSLPGMGPCMGPRMLAALGDNRDRFNSAEEIQNYAGIAPVTERSGQKSWVHWRWQCAKFVRQTFVEWAAKTVNSSYWAKLYYQGLREKGKSHQSAIRALAFKWIRIIYRCWKARTCYDEAKYLLALEARHSPLLKP

SEQ ID NO: 91898 - protein, 326 aa, unidentified
MQHDSSHRDLSVPIVVGIDVSKAMLDCYLDPSGQRLALTNDDAGIAQLLARLRDLKVQLVILEATGRLHRQVAAELLQADLPVTLVNPQRSREYARSIGRLEKTDRVDAQVLALFARAAEHHRLAKPSEKQVELDDLISRRRALVQMRIAEKNRLAEKQPKLAKTQSQQLLRLLDQQIQDIDRAVAKLIDDDDDWKRKSQIITSVPGVSTGTANQLLADLPELGEMNRQRIAKLSGVAPLANDSGPRRGQRTIQGGRQWVRNALYMAAFNAMRYCERFKRFAKRLTDAGKPFKVVVTAAMRKLLVTLNRMIQTNTLYDPSFIDSLP

SEQ ID NO: 91899 - protein, 388 aa, unidentified
MQVAADRTDASTAIQTDLPAIFASLELSRSTWLITSLSPGAGEKMSKHSIRAGDVAGLLVRLAQLKEKARGRTGRDFPIIAIQEAGLDGFWIHRVLQSEGIESHVVDAASILTSRRRRRAKTDGIDGETLVRTLLAYKRGEPRVCAMVKAPTPEEEDRRRICRERKTLVGERVEHVNRIKGLLFAQGVSDYEPLKRNRRARLEGLKTGDGRPLPAHLKAQISRELDRLELVLPQLKAVEAERDALLKPVSEGCPTPAAMLAQLKGMGPEFTAILWSEGLFRSFSNRRQLAAYAGLAPTPWQSGSVAHEQGVSKAGNPRLRTTMIQFAWLWLRHQPTSALSVWFQERVQSNGGKMRKTTIVALARKLLVALWKYSTSGVVIEGAVMKTI

SEQ ID NO: 91900 - protein, 338 aa, unidentified
MDHFVGIDLHSNNSYIAVIDTDNNRTFKKKARNNLSEIIKHLVPFNKQIKGIVVESTYNWYWLVDGLIDNGYKLHLANPSAIKQYEGLKHSDDVTDAFHLANLLRLGILPEGYIYPKHERPIRDLLRKRIHLVHQRTAQILSFQNLVARNLGSKMHVSIISKLNEEDLEELFEDEYLILSAKASISTIHFLRSRIVQLEKVIAKAAKLRSEYKLLKTVPGIWNILAQMIMLETGPIERFKKVGNYASYCRCVQSNRFSNSKSKGKGNRKNGNKYLSWAYVEAANHALWNYEYVKRYHQRKTAKTNNVVAIKAIAHKLARACYYIIRDQKEFDPAKVFT

SEQ ID NO: 91901 - protein, 405 aa, unidentified
MKHVVAFDVSMGKSYWVVYNADRHCEFEGEIRHTRSDFEGLHACMEKLIEQDGEQPSIVFEATGVYSRQLERFMQDHQYTYCLLNPLEAKLQSASMRMHKTDRSDAHRLALTHFTVSRREKEVPNDFFQQLKSLSRFYQELDGELSTLRNRMHKVIQLTFSELETIFTSRSELCLHVIQLFPHPDLVNGLSKTVIRNRILKSTDKKLSAGTAEKKAIQLLEAAQNSYPAVSATDVLCDQLRIYVKRYLEILRQREALIRQMEEMSMHREDYQVLLSFPGIGVNTAVRLLAEIGDIRRFDNPKQLNAFAGIDIRRFQSGKTFFQDKINKRGNKHLRKLLYLVIQNMIKQRRFGNNHLVEYYDKVKTQPYNKCHKVASIACVNKLLKCLFYLITHNQHYEYQCATRS

SEQ ID NO: 91902 - protein, 402 aa, unidentified
MSNTKKGVIIGVDPHKMSVTIEVVDTHERLLGSGKFATDEAGYAAMQRYVKQWPDRLWAVEGANGAGRPLAQRLVAAGQQVVDVPAKLAARVRLFDTGHNRKTDALDAHSIAVVAVRTEGLRRVVEDGELEALRMLADRRDELARQRVQTVNRLQRLLSELLPGQRKRDLSAAQAKAMLATVRPRDIAGRTRRRIAAEEIADLVAVDAKLKKIKAELKATVLERGSGLMDIYGVGPAGAARVLADVGDVARFADRNRFASWTGTAPLDASSGEQNRHRLSRAGNRRMNHVLHVAAIVQIRHDTEGRDYYRRKLAAGKTPLEALRCLKRRLSDVVYRQLVADAQLAQQPDGTGPGGHCGATLQSSAADSHLLIDTSDQPLPGPAQPTLRRPSASWKTLTPSAP

SEQ ID NO: 91903 - protein, 436 aa, unidentified
MASHCQFYNYKFQEVILLSFKILKFKCCGLDVHKTWIYACIGITDSNNRTEYKQARFSSFTKGLNELCDWLAKYNCTDVCMESTGKYWIPVFNILEQHNLWVTLSHPKYTKPMKGNKTDRKDAKWICDLYMCGMVKPSFIPPADIRELRDLVRYRYKLTCMITGEKNRAQNCLTVSNLKLDDVFSDVFGKSSRSITEQILQHPGEKFDVAPFVHGRCKTPIEEIQAAVDGAISKEQAVKLRQCLDHIDELNKHISELEQEILRLSDKYEAALNLIRTVPGFDKNPMTAVQILSEIGGDMSVFPTAKHLVSWAGCCPRNDQSNQKIKSTRISCAGSYFKPVLVQVANALIKSKKHLEFTNRYKRIKARRGHKKAIIAICRMILTAIWHILSDLKPYTPEGFLESHPVKEGKVLSSSQALNFFKQRGYIIKDEPLSVS

SEQ ID NO: 91904 - protein, 342 aa, unidentified
MDHYAGIDVSMECSSVCVVDASGKIVREGKVASEPEALIAWFGSLEFKLVRIGLEAGPLSQWLFAAMRDAGLAVELLETRHVRDAFKAMPVKTDRNDARGIAQLMRLGWFRPVHCKSLAAQETRALLTARKLLESKLRDVEQSLRGILRGFGLKVGAPTPSQFEGRIRELVAGQPNLEAIAAALLAVRAVLRREFNGFEKRVRTAARGDTRTRLLMSTPGVGPIVALTYASAIDDPGRFKSSKRAGCHFGMTPRRYQSGETDITGRISKIGDKGVRTALYQAARVILTKPVKGAPGLKSWGMRLARRAGMQKAKVALARRLAVIMHRMLADGKPFDFAAVAA

SEQ ID NO: 91905 - protein, 364 aa, unidentified
MFQDTSVGLDVHARSVTAHGINTRTGEVFNRHFGNGHSVEEIVGWVVGLPGPVQACYEAGPTGFGLARAFADAGVACLVAAPSKLLPAPGDRVKTDARDAAHLATLLAAGAVTPVRVPDVGQEALRDLLRAREGVREDLMRVRHRVSKLLLRHGRVYDGKTTWNQTHLDWLAHQTFDQAGTQIGFDDCLAAVTQAMARQKHLDQRLEVILPDSGYQNVVAALSCLRGVSTLSGFGLAVEIGDWTRFTGATIGAYLGLVPSEHSSGQSRSLGGITKTGNQHARRLLIEAAWHHRAEYRPGASLRLRKQWEQVDPLVQTRADQANRRLYRQWVKFDVRKKRPVIANAAIARELAGFCWSLAMMTTN

SEQ ID NO: 91906 - protein, 412 aa, unidentified
MLFVGDDWAEDHHDIEVQDDQGHRLARARLPEGIAGLARLHELMAEHLTEDDVDPATGFVAHSVAIGIETDRGTWVSALVAAGYQVFPLNPLQVARYRERHGASGAKSDRGDAHVLAEIVRLDRAHHRPIAGDSPEVEGLKLVARSHQAFIWDRTRHLLRLRSALREFFPAAIEAFPELTAPDALELLERAPDPARAARLSRSKITAALRRAHRRDPDAKAEIIQAVLRAPALRQPPPIEAAYAVIVASAARLIAQLNTQIAELQAVVAEGFGRHPDADIVTSQPGLGPILGARVLAEFGDDHTRYVDAKARKNYAGTSPITRASGTRRVVLARYARNRHLADATHQWAFCALTASPGARAYYDTIRARGASHHAALRQLGNRLVGILHGCLKTRTPYDEGTAWPQLTAQAA

SEQ ID NO: 91907 - protein, 343 aa, unidentified
MQAVTTIGLDIAKSVFQVHGVDAEGKVIIRRKLKRRYIVAFFQKLPPCLVGIEACASSHHWSRELHALGHTVRLMPPAYVKPYVKRHKNDAADAEAICEAVTRANMRFVETKTPEQQSCLMLHRTRHLFIRQQTAVINAIRAHLAEFGIVAPVGRNGVEALLDVVADTSDKRVPEIARACLVALGAHLRVLKTQILEFDRLIMAWHRSNETSKRLDEIPGVGPALATALVASVGDPRAFRSGRDFSAWIGLVPRQNSSGGKEKLGSISKRGDRYLRSLFTAGALAVIRYAKLHGTKHRPWLTALLARRPTKVAAIALANKIARMAWAMMAKGERYKEPVALAA

SEQ ID NO: 91908 - protein, 426 aa, unidentified
MKNREVLSTLFVGIDVSSKENVVCAIDFGEEQYLQAAFSNNQPGAIALADRLANIMKQHPEFTRLVIAMESTSCYSTHIATFLSSSDILMPYKPYVYCLNPNTVAQYRKSYVPVGKTDPICSFMIADFARVGRIKTEPWRGSQFLALQRLTRHRFHLAESIAREKTYMLTNIFLKFSELAVSTKESKPFSSNYGATATAVLTEFLSPGEIVSMSSSELIEFICKKSKNSFADPGKVADLLKKAAADSYKLDECLYEPLTISIASSFNCINAFESEAKKLNKAIEKTVRGFNTNEYQSLISIPGIGPVYAAAILAEIGSVKAFRSQDALAKYAGLVWNPNQSGDFKAEDTFMSKAGNRYLRYYLIEAANSVKNHSATYRDFYLKKYHEVKKHQHKRALALTSRKLIRLIFGLLDKNQLYSKSVEQKT

SEQ ID NO: 91909 - protein, 375 aa, unidentified
MTKNLRYLGLDVHAETIAAAIAEPDGEVRVLGVIPNRADAVAKLIRKLGPRERLRACYEAGSCGYVLYWQLVRLGISCDVVAPTLVPTKPGDRVKTDRRDAAKLARCHRAGDLTAVWVPDAAHEALRDLVRAREAAKQDQLRARHRLGKFLLRRGIRPPAGAKPWTQAHRRWLDTLQLELPAVNATLSDYLQEVDHGAARVRRLEEALDVAIAAAPQALRVIIAALQCLRGIRQISAATIVSEVGPLSRFTHPRQFMGYSGTVPSEHSSGASVQRGRITKTGNAHVRRILIEAAWAYRFPPKCTSALRTRQRGQPEAVIEIAWKAQHRLSGRYRRLLARGKPTPHVITAVGRELAGFIWAIGMAVEPSSTVVAAA

SEQ ID NO: 91910 - protein, 342 aa, unidentified
MKIIGCDFHPSFQQIAMVDMPTGEYTERKLTPEEARQFYAKLKGPVLVGMEACGNTLWFERLLAALGIELWLGDAGKIRAMEVRKQKTDRRDAQLLLQLLLENRFPRVWVPSVEQRDVRQLLLHRHKLVAMRRQVKNELQHLALNQGVQQKRKLWSAAGRQRLEELPLEGWTKQRRQDSLELLDELNRRVAKLDVAAQQEADRDAVAKLLQTHPGVGPITALAFSLRLGEIKRFARSRQVVSYLGLNPAEHSSGGRQHLGGISKPGNPMLRSLLVEAGQSAARSVPELKRAYQRLKHRKHSGVGKVMVARKLAVRLFWIGKTQQPYTAARTQGSPSHHVVAV

SEQ ID NO: 91911 - protein, 405 aa, unidentified
MEIIIEKGCGLDVHKETVVGCIMGTGIKKEVRTYTAMTNDLLRLKGWLQEAGVTHVAMESTGVYWKPVFNILEDHFEVILVNARHVKNVPGRKTDVQDSEWLCRLLRSGLLRGSFIPPRGIRELRDLTRYKRKLIQTIVAEKQRVEKVLEDANIKLSSIASDTFGASGKKIIEELMRGKLEAEEMAELSKGRLRQKRENLKEALVGEVREHHKFMIKVSLKHIRAMEKILLGVERKIREKMERDYKEEDQLLQTLPGVKENASTVIAEIGVNMDIFPDEMHLTSWAGMSPGNNESAGKKKPGSTTYGNKCLKAILTEFAWVASRMKDTYLRSKYHSLVGRRGKKRTLVALGHKILIMCYHILKYKRPYKELGVDYLDQRRKDKITRSYIKRLNHLGYEVTLREAA

SEQ ID NO: 91912 - protein, 338 aa, unidentified
MKLYCGIDLHSNNSVIVILDEDDKVIYQKKLNNDLYSILQQLSVYKNEITAIAIESTFNWYWLVDGLMDAGYTVKLVNTAAVKTYDGLKHTDDKDDARWLAHLLRLGILPTGFIYPKEERAVRDLLRKRSQLVRQSTTNILSLQNILARNTAQSLSSYRIKKLDDDQAEKLINDPNITLSLKSNLNVIRCLQSTISDIEAAVFKQSRLRAEFKKILSVTGIGEILGLTIMLESGDMNRFAKVGNFSSYCRCVKSERMSNGKKKGENNRKNGNKYLAWAFIEAANFAIRYNDQVKSFYQKKKSKTNGIIATKAVANKLARACYHVLKDQVTFDVNKSFS

SEQ ID NO: 91913 - protein, 339 aa, unidentified
MKVYAGIDLHANNNYLGVVDEDGKRLFGKRIPNDPGMILEALDPIKKELAGAVVESTFNWYWLVDLLMAEGYRVHLANPTKIQQYKGLKYADDKHDAFWLAEMLRLGILPTGHIYPKEERTVRDLLRKRGHLVRIRTSLILSLQNIIARNCGKQIKNNDVKRLREDRISPLLAHNEDLALAGEVSKEMIDYLTRKIRSIERFIEGKLPDKETYQYLHTLPGVGRVLALTISLETGDISRFSQVGNYSSYCRKVPSRWVSNDKRKGKGNTKNGNRHLAWAFSEASELARRDNAAARRYYDRKLQKTNRMAAHTALAHKLARAAYYIMRDQVPFDPEKLFA

SEQ ID NO: 91914 - protein, 343 aa, unidentified
MEVAIGIDTHKGSLAAAAVDALGRVLGVREFTNDPTGHRSLLRWVTELGQPRTIGIEGSLSYGSAAARALLAHGEDVREVAPSLTHLERRRRSKGKSDPVDAVAIARVVAADETLPSARRTTLLTDLKLLVDYRDQLVHARTQVSNRIHADLVIIRPGYEQVVPNLRAKRHVAKARSLLSRDRSVQAELVRRRLGEILRLEAEIAQADRQLADKLAEADTTLTQIPGVGPFIAAKILGEVGEISRIRSKASFAMLSGTAPIIASSGQTHRHRLNRRGNRQLNWALHYVALVQSRTSPEAKAYLVRQREAGKSHKEAMRCLKRHLSNVVYRHLVLDARRLEQAA

SEQ ID NO: 91915 - protein, 443 aa, unidentified
MARNQSRQRFELVHPHCAGIDIGSREHWVAVDRDHEQPVRSFSTFTDDLIKLADWLETLKIKVVAMEATGVYWIPLFELLDARGFKVYLVNSRATRQISGRKSDVLDCQWIWQLMSHGLLRGAFRPDDAICSMRALIRQRASKVRNQAQTLNRMQKALSQMNIQLANVISDISGVTGMKILRAIIAGERDPAVLAELTDRRIKASKETIARSLHGNWRLEHLHALGQEVECYDFFEQQIGACDKAITDALSQLPEREEAPQPSRKILRSPHRCAADQAALHQSLWRVMGVDLTAIPTIGVDTALIIAGEIGPDLSRFPTMEHFCSWLGVAPPTRISGGRQLSGKSQKTLNNAAQALKQAASNARNDKSFIGASHRARLARMDTSCAIKATAHQLARLIYAMLTKGQPYVEQGIEAFEERSKEKQYRALLRKARKLGLDLVKAS

SEQ ID NO: 91916 - protein, 457 aa, unidentified
MMETKRRREQRSMLPVHPDAAAIDIGATVHVAAVGPARDPEPVRSFGTFTGDLHRLADWFAQCGIKTVVMESTGVYWIPIYEILEQRGFEVRVVNARDAKHVPGRKTDVSDAAWLQRLHEFGLLRGSFRPQGAIAALRAYLRQRERLLDYAAAHIQHMQKALTQMNLQIHHVISDITGATGMRIIRAIVAGERDPDTLASYRDIRCHSSAETVRQALIGNYREEHLFALAQAVELYEVYQAKVATCDEKIEGVLERLKRPGRAPAKPLRAARHKTRQPNAPAFDARGALYAVLGVDLTQIHGLGPYLALKLISECGTDLSAWPSAKHFTSWLSLAPGNKISGGKILSSRTRPSGNRAAALLRLAATTVGRTETALGAFYRRLSARIGKAKAVTATARKIAVLFYNAVRHGMDYADPGASYYEERYRRRVLTNLQRRAKAFGYVLQPTEIKVVSMAVS

SEQ ID NO: 91917 - protein, 363 aa, unidentified
MEKNNTRQSPRRASKASHQPTTIGLDLGDKSSRYCVLNKEGEVAGEGSVATTRKAMTEKFGRLGRVRIAMEVGTHSPWVSRLLTALGHEAIVANARQVRLITHSTRKDDKLDARLLARLARIDPQLLRPIRHRSEKAQEHLLAIRVRASLVDARTSLVNAARGFAKASGERLPACDADSLDVEIMEALPAGLQQRLKPLLEQIESLTVKIKEADQQLEQIARTEYPETKLLRQISGVGVLIALTFVLTVEDSARFAKSRDVGCYVGLRPKRSESGQSQPELRITKEGDLYLRKMLVQGAHLILNRRGPDTDLKRWGLKLAARGGKNQKKRAVVAVARKLAILLHRLWVTAEVYHPLRRQPLAA

SEQ ID NO: 91918 - protein, 406 aa, unidentified
MEVVYERCCGLDIHKASITACVIVNGKKEIQTFGTMTDELLRLTALLKERCVQMTAMESTGSFWKPIFNILEVEGIDAILVNAAHIKAVPGRKTDVKDAEWIADLLRHGLLKASFVKPRDQRELCELIRYRGSLIEERAREYNRLGKVLEGANIKLTSVASSISTVSGMNMVRALSEGVIDPELLASMAKGTMRSKKDDLKRALNGLIQPHQQMILKSMLNHIDQLGELIKTLDAEIEARMSQDVELVEALDEITGVGKISAQVIISEIGTDMSRFPSADHLASWACMSPGSNESAGKKKSGHTQKSNSTLKKTLVQCGRAAANSKGTYLNSQYHRIAARRGGKRAVVAVGHSILVICYHMIKNRTRYNDLGADYFQNRNKEAIVRQSVKRLQALGFTVTLEEEAA

SEQ ID NO: 91919 - protein, 528 aa, unidentified
MVTKTKTRKKSTGSKKKRFIGKPTGQIQARVQTVGPEHFGIVAVDCAKRRSKWMLCNFYGKVIIEPTGVDHTSGGLRAMTQLVAVACKAEGLTDSIVAVEMTGIYHKPVQRAFRKAGFDTRIVHPFASSHFRTPLHSDQKTDDNDLEAIFHAAVKGYGLTSFPVGEVYQSLQALSRHRQKLVKQRSRLKVQIRQLLHQTMPGFADLFDKHKLFEKSIALPVALTFSSAGAIHRAGVEGIAKHLKETKVRFQARTIERIVAWAPTAAEPSELAEMRTRQWQELNDVRQLLDEKIVAAEREMAHFLVKTPYILLLSVIGINVVSAARLAGEAGPIEHYASPGALNGRAGLYPSRYQSDEVDYADGPLVRQCNRKLRGAAMLVAENLIKCHAYYRGLSELLKKQKVDPRDCRCRIANRAMRMVYQIVGGRQVWRGKGVDREYLLAKLQAFHRDHKTPLEHAIQDLNEAFAWLPKSTYATEAKPLAELARKKRRGVQRIGDLLMPLLIRLGVAIEEEEQNVKSNTSEARSSD

SEQ ID NO: 91920 - protein, 345 aa, unidentified
MTIIGCDLHSRYQVVAWVNQETGEILTRRLEHENGEAKRFYSGLPRGAWVGIEATFPALWFERLLQECGHELWVGDAAKIRASETRKQKYDGRDAEHILDLLLANRFPRIWTPSLEERDLRQLLVHRMKLVRARTAVKNQLHALAMSQGVCRKHKLWSAKGRAEMESLALLPWASQRRQELLSMLDQLDAAIEPLDRAVEKEAQSREGAVRLMTHPGVGPVVSLAFVLTLGPVGRFPNSRKVVSYLGLNPRENSSGGRQRLGAISKQGSSMMRWLLVEGANRAVVYDPELRRAYQRLKFRRVSGVAKVAMARRLAVRLYWMLRAQANYAQLVRMSGSPSSAVVSK

SEQ ID NO: 91921 - protein, 340 aa, unidentified
MDMTTLGIDIAKSVFQLHGIDADGAVVVQKKLRRGAVLNFLGKVGPCLIGMEACATSHYWAREIAALGHEVRLIPPTYVKPYVKRQKNDAADAEAICEAVTRPNMRFVPIKTEEQQSVLVLHRARDLLMRQRTMILNAIRGHLAEFGIIAAQGPRQVMGMIAQLRDDGDASLPEIARSALLALGAHLEALAGEIRALERQLIVRHRADPTSQRLETIPGVGLITATALAASVSDPSVFKSGREFAAFLGLVPRQNSSGGKDRLGRISKMGDRYLRKLLVVGATSVIRRAGSNPTKTGTWVRSLMERKPARVVTVAMSNKTARIAWAVMTRGEAYRASPIA

SEQ ID NO: 91922 - protein, 344 aa, unidentified
MEHFAGLDVSVKETSVCIVDEAGRITREVKVASTPEALMQVLRAPAYHLKRVGLEAGPLSQWLFGALAEANVPVICVETRHMRAVLKAQINKTDRNDARGIAQMMRAGLYRPVHVKTLRSQKLRMLLTHRKLLQSKAIAIENDLRATLRNFGLKVGVVGTAKFEARIKELVGDDSDLVLMVEPMLIVRRVLREQLAILHRHLLALARDDGVCRRLMTVPGVGPVVALTFRATVDVPARFQNSRAVGAVFGLTPCKHQSGESDYTGGISKCGDEMMRMMLYEAAQIVLIRATKWSWLKSWAMQIAKRRGVKKAIVALARRLAVIMHRIWIDGTEFCWIRQEAVAA

SEQ ID NO: 91923 - protein, 340 aa, unidentified
MVLIGIDPHKATHTAVVIDDAEHELARIKVKADRSQVAALLEFADGFRPRRWAIESAGGLGFLLAQQLVRAGEDVVDVPATLAARVRLLGSGRGSKNDPNDALSTAIAALRDPHLRTLMVEDHAMVLRLLADRHQDLTSLRTQAVCRLHALIAAMVPGGVQRRISADSATSRLRTIHPDNAAEAARKEMALELVADVRRLDRNIAEVKKRITAAVAASGTSVTEVYGVGPIVAALLIGHSGDITRFPTKGHYASYNGTAPIEASSGKVVRHRLNQRGNRQLNHALHMAAVTQISRDNPGRTYYLGKIEDGKSTKEARRALKRKISDAVFRQLRDDARPQT

SEQ ID NO: 91924 - protein, 348 aa, unidentified
MAKVSMIGVDLAKNVFQVHGVDAAGKVVVRRQLQRRQMEKFFAELPPGVVVGMEACGGAHHWGRVVQKLGHEARLMPAAYVKPYVKRNKNDGRDAEGVCEAMGRPTMRFVPVKSLESQAVLVLHRTRRLLVRQRTMSSNAFRSALSEFGIVAAQGLKGLRSLMEALEDPVSAIPDTARMALRVLAQHWERLNADICKLETQIVGAAKTDAVARRLMAIPGLGPIGATAILAAVPDARVFKSGRDFAAWLGLTPRQFGSGGKQRSGGISKQGDRTLRTLLVVGATAYLRYERARARDPWLRDLLARRPFKVAAVAYAAKMARIIWAMLVTGEHYRAADKRRRVPIEAAA

SEQ ID NO: 91925 - protein, 370 aa, unidentified
MDVHSTNYTLCAMEPVIGAEDRVFANVQVTPDYKNIILFIENLKQKLGMNDTYDIECGYEAGCLGYSLYNQLTSAGVKCVILAPTTMLTEQGQRIKTDSRDAHLIAQCLSYGGYHPVHIPTEQDDSVKEYLRMRDDHKKALKKIKQQIGMFCMRHGYYYEGTKWTIAHMKWLKKLELAPMYQETLDEYLASYEEQTAKIERFDARIEEIASQAEYAEKVKKLGCFLGIKTHTALSLIVETGDFTRFAKGNVYAAYLGLAPGEHSSAVKVNRLGITKAGNSHLRLLLVEAAGGICKGAIGHKSKALRQRQQGNSAEVIAYADKANARLRSKYYRLIRHGKKRNVAVTAVARELACFVWGMMTDNINVIEAA

SEQ ID NO: 91926 - protein, 367 aa, unidentified
MKKVSTAVAKQSRNISQQKLTVGLDLGDRNSWYCVMDEAGQIQVEQRVRTNGKGLREVFGGMPRSRVALETGTHSPWISRLLSELGHEVIVAHARKVRLIGESRKKDDRLDAQTLARVARIDPELLCPVKHRSAQAQADLMMIRARAGLVRARTGLVNTARGLAKSYGERLRGCNVRNMNPEKAESLSPELRRALQPVLAAIESVSERIVEYNQQIEKLAQESYPQVALLKQIKGVGTLIALTFLLTVEDPHRFRKSRDVGCYLGLQPGRRNSGQSEPQMHISKEGDPYLRTLLVQGAQHILGPFGVDCDLRRWGLKLAERGGRNGKKRAIVATARKLAVLLHHLWVSGEVYEPLHNSSRMTVAVAA

SEQ ID NO: 91927 - protein, 346 aa, unidentified
MLHAGLDLSRKRLDFCLLDESGDRVEVGAAPPDGDGLRSLARRLALHGQPLRAAIESMNGARFVHDQLELAGWQVEIADALKVKGLAPLACKTDRIDAWVLAELSRRDLVPAIWLPDPEVRAERERARFRLHLVRHRTSLKQRVHAVLLAHGKPCPVSDLFGVAGRALLQRLALPEPWAGTVTASLQLIDELDQQITGCESELRQLGADHRYIPLLLTVPGIGWVLAYTIAAEIGDIDRFAAPRQLAGYTGLCPRVYQSGNSDRRGPLAKNGPRYLRWALIEATAHACKHPLYRDHYQRTKARLGKQRGAKVAQVDLARKLAEAIWHMLTRNQPFAPASATNPLAA

SEQ ID NO: 91928 - protein, 358 aa, unidentified
MSENYAVYVGLDVGKSAHHACALAEDGSCLYDKPLVQDEAALKDVFVGLQQYGPVLMIVDQPNTIGALAIAVARDCGCQVAYLPGLAMRKAADLYPGRSKTDARDAFIIADTARRMPHTLRAVDRDSEVLSALKMLAGFDDDIARDCTRAKNRLRSVLTQIHPALERVFVGEILARAIVLDLLIHYGGPTKLAVAGRARVLKWARNRSRKDPVELIDRIFTALAEQTVTVPGTDAAELVIPQLAANIKALRQQRETIAGQVEGMLDEFPLAEVLISMPGIGIKTASNILLAVGDCSDFASASHLAAYAGIAPVTRRSGTSIKGEFPARLKNAMFRSAWIASNCHGPSRANYQRKRAEG

SEQ ID NO: 91929 - protein, 356 aa, unidentified
MRRDYQKGKVLARGKDVYIGIDVHKEKWDVTARVEGEEVFHVSMLSEYQCLRKFLERFKGSKVRIAYEAGPCGFGLYDKLSADGVETIVVPPSLIPVESGNKVKTDKRDSRKLAKLLESNMLKKVYVLTEEDRANRELVRTRRQLIEHRSDVMRQIKSKLLFHGIKSPFPSKQGWTKRYVKWLRALHLEHEVVKVSFNTLIDLYEYLGSQLMKISKKVIALSRSDKYSHKVKLLRSVPGIGILIAMELLVELPDIERFKTADEIASYMGLTPSEYSTGQYVRQGRITRCGNTRARVCLVESSWHLIVKDLFWRGKYMKLKYRRGAKRAIIAIARNLIIRIRRILLNNEPYVITVAA

SEQ ID NO: 91930 - protein, 372 aa, unidentified
MQQKSKVFVGLDTSKLKISVAVAEDGRQGEIRFLGEIDNTPEAVRRLVHKLASRHGELLFCYEAGPTGYGLQRQIAALGHECAVIAPSLIPKRPGERVKTNRRDALTLARLHRAGELTAIWVPDPGHEAVRELVRAREAAMADLRGKRQHLQSFLLRHGRIFPGRRPWTQAHARWLAELVFEHSAQDLVLREYRQAIEEAEARLDRLTQQVAEVGATWSMAPVVAAYQALRGVALLTAVTFVAEIGDVRRFDSPRQLMAYLGLVPCESSTGERVRRGRITKAGNARVRRVLIEGAWTYRFPARMSRLLQERQEGLPAAVRAIAWKAQVRLCARYRRLMAAGKRQTVVTTAIAREMAAFLWAIGREVQPRSAA

SEQ ID NO: 91931 - protein, 356 aa, unidentified
MILGAFDVHRRQITYDWVDRATGEARRGQIAPATRQVLGEWLGELPGGDGHFAVEGCTGWRFVAEELQAAGLTAHLAEPADTATLRGRKRRAKTDRADARHLRELLEQDRLPESWIAPAHLLDLRELVRLRKTLIDQRTQWKQRIHAVLFHHGLPTPPGALGTQAGRAWLAGVWLPPPSRLLVEVGLSEIDTADARLAPISGWLRAYAARQPGCRALMRQLFGVGPLCAPTILAELGDARRFAGGDAVVRYAGLDITVWSSDTKRSPGHLARQGPEVLRWALFEAAKSSARRTAPDHAYYRKVKDRLSANRATLSTARKLARHARHVLVELGEEALAPVCGDQLPPLLAVAPPEAA

SEQ ID NO: 91932 - protein, 343 aa, unidentified
MQKVTTIGLDIAKSVFQVHGVDAGGNVIIRRQLKRRYVLAFFQKLPPCVVGIEACATSHHWSRELKGLGHIVRLMPPAYVRPYVKRQKNDAADAEAICEAVSRANMRFVETKTPEQQSCLMLHRTRHLFIRQQTAVINSIRAHLAEFGIVARVGRHGVEDLLDVVADPSDIRLPDLARACLAALGAQLRMLKAQILAFDQRIMAWHRYNEMSKQLDEIPGVGPALATALVASVADPKAFRSARHFSAWVGLVPKQHSSGGKDKLGSISKQGDRYLRSLFTAGALAVIRYAKIRGTRHRPWLAAMLARRPTKVAAIALANKIARMAWAMMAKGERYKEPAAMAA

SEQ ID NO: 91933 - protein, 365 aa, unidentified
MSRMTVTTSPVTGGVDTHGQTHHAAVIDQLGRPLSDREFPATPAGYRGLLGWLREHGELERVGVEGTGAYGAALARHLRAEGVTVMEVDRPNRQTRAAVGKSDPLDAHAAARAALAGTACGVPKTRDGAVEAIRALRVARRGAVKARTQATNQLKALLLTGPAELREKLRPLSTAALIDTCARLHPTGPLSDPEQATKLALRRLARRHQHLTEEITAADAELKGLVTATAPGLLTLLGVGVEVAGQLLTSAGDNPERLHSEAAFAHLCGVAPIPASSGKTHRHRLNRGGDRAANNALYTVALSRLRCDPRTRRYVERRTKEGLSKPEIIRCLKRYLAREIYHALLTRPPSSSSRPPHRPQRAGQP

SEQ ID NO: 91934 - protein, 344 aa, unidentified
MDDFSDFAYTVGIDIAKNVFQVYSLDRTTGEIANVQVKRADLLEYFRLKGKCLIGMEACGSSQYWAREMTDLGHVVRLMAPHRVKPYVSGQKSDKADAEGIHRSLINHVPAIAVRGGIERDLHSLMAMRSMLVKRETSLINHLRGLLLEYGKDIPKSKVKFYDMAPGAINELEGRVAQALIDEFRSAVDDIRHIKDRVTAITAEAVALAKQTKNAAYFTSIPGVGVITMCCLCFLLSDPAVYKSARQFAAFLGLAPKHTGTGGNTVITHIPARCNKELRALFVECAQSVARRKVKSAWVLSILKDKPKKVALIAIANRIARQCWAVASKSQFYREMPVAKLQAS

SEQ ID NO: 91935 - protein, 549 aa, unidentified
MDPHKRSVTIEVMASDETVVGGGRFETTVDGYAAMKDSVAGWPERVWAIEGCNGIGKHIAARLISDGEQVIDVPPKLSARTGVFATGQGRKTDATDAHSVALVGTRMAGLHPVVDDQQLAVLQTLVDRRRSLGEDHTRMISQLHALLLLLIPGGAKTFLSAAQAKKLLADVRPTDPAGKARHRVAAELITDLERIYQRSKNADKELRDLVRATGTNLLDLHGIGPSGAARLLVEVSNIQRFPTRAHFGSWTGTAPIDASSYDHVHHRLSCGGNRQINRVLHTMATVQLRNPTAGRVYYDRRRSEGKTSNEAMRALKRRLSDVVYRTMLRDARNTAGTAREDNRGRHLTAARPTPTPTSTLRKSHFPDPSPTTLRPRLDLEGCHESEFSAGVSPNSAQRVRSLPSATMAIAVEVAQAVTPELVRAFDLLLPQLDPSAAPLNAAAVDALVRWPGNRLLVARVDGEIAGVLMLVMFPIATGTQARIEDVVVDKASRKRGIGAALTMEAVRLAREAGAHAVDLTSHPSRQHANRLYQRLGFQRSDTNVYWLTL

SEQ ID NO: 91936 - protein, 392 aa, unidentified
MQISVGIDIAKEIHWVTAIDAGGVVQVDRKLLNTPAGIATLVDELTALRGTVRIGLDVIGGIAGLAEAMLADAGFALVHVPGIAVNRARQGTVGGENKSDPRDARTIAEQVRTRSDLRPIEPATELDLEIRLLVGRRSDIVQAQTQRLSRMRDLLVGIFPGLEACLDLKTKGPLHLLTKFVTPAELRDAGKKRLVRHMQAAGGVPKVEDLADRVLTVATEQRIAVPAERTTARLIRELAVEALASRTRLTELDRELEALLARHPDAALIRSLPGMGAVLTAELIAEAGNLARFRSADALASAAGMAPVLRQSGRSRFLRRPSGGNKGLKRVFYQSAFCSLAHDDSRAFYERKRREGKRHHQAVIALARRRVNVLWAVVHSRTPFQTAFKTAA

SEQ ID NO: 91937 - protein, 337 aa, unidentified
MKFSGIDLHSNNSVVVISEETDRIVYQKRLPNNLEQILAALEPHRDELVGVVIESTYNWYWLVDGLMDAGYRVPLAHPSAIKKYEGLKYSGDFADAGYLAKLLRLGLLAEGYIYPREARGARDLSRKRMQLVRYRTAQILAIENILARQTGARLSGEAVRRLTAEQVEELGFVPDVALAVEANRAVSQALGQQIEALEKRLKERVRLRGEFKLLKTAPGIGETLATTIMLETGTVARFAKVGNFSSYCRCVDSLRESNDKKKGEGNTKNGNKYLAWAFVEAANFARRYCPQAKAFYERKKRKTNGIVATKALAHKLARACYHMLSEQKPFDVSRCFG

SEQ ID NO: 91938 - protein, 341 aa, unidentified
MSEYAGKQFVGIDLHRQRSVIVRHTDTGEQLSAVRIVNDPVALALEIERAGPDPEVVLEATYGWYWAVDVLQAAGARVHLAHPLGVKGYRYRRVKNDVRDAADLADLLRMNRLPEAWIAPLATRELRELVRYRAKLVALRSGLKAQVHAVLAKAGVLIVATDLFGATARKRLERTPLSGVYAQRVASLLRLIDILDAEQSALSDRIATELHHHAGYRAVQELPGVGPVLAAVFVAEIGDVHRFARPQQLCSWAGLTPRHYESDTVVHRGHITKQGSRLVRWAAIEAVQRHQPTAKIAADKDRIATRRGTNIAKVAAGRKLLTLVYYGLRDEHIRALAKDAA

SEQ ID NO: 91939 - protein, 416 aa, unidentified
MNAAGIDVSSRKSTVAVLRPFGEVVRLPFDVAHTTEGLASLAEQLKALEGETRVVLEHTGRYYESVAKALHEAGLYVSAVNPLLIKQYGANSLRRVKTDKADAMKIARYALDNWAALRDYTPMDTIRYDLKTLNRQFQLASKQRTACSNNLIALLEQSFPGIRKCFDSPVRSDGTQKWVDFAHTFWHVDCVRKQSLNAFSERYRKWCKRHGYFFKQSNVEEVYSLAKNAVVLVPKSDIAKVLVQEAANQLTAISRSVETYRAEMERLASMLPEYPVVMEMYGVGKSFGPQLMAEIGDVRRFERKQALVAFAGIDPMPNQSGDKNVKSNKSSKRGSPYLRKTLFNIMGIYLKCAPQDEPVFQFLDRKRSEGKPFYVYMTAASNKFLRRYYAKVRDYLATLENLPPVDMDSIGLQENN

SEQ ID NO: 91940 - protein, 385 aa, unidentified
MPAFDDLSRSLTALNQDSTLMTVIEMSKSSWLVAGMVPGIERHPMKKLDPDPVALLNLVGRWRCEAEGKERRIERVALAFEAGRDGFWLARWLRERGIEAYVIHSTSVAVTREHRRAKTDRLDTAMLMRVFLGWLRGERGHCRMVAIPTLEEEDAKRPSRERESLVGERTRIINRMKGALARMGIRGFKPELRRAPKELIALLTPEGQPLPSNLLEEMRREMTRLSLIREQIATIEQARLARLQQASPSRPNAMVVLLARVIGVGIETADMLVQEVLSRNLRDRRAVARYAGLTGSPDESGSRRREKGLAKAGNARVRRGLIQLAWRFLMFQKDSGLAQWYRARTAQGARKTTMIVALARKLLIAFWRMVTVGEVPAGVVLRPGM

SEQ ID NO: 91941 - protein, 347 aa, unidentified
MKFYNQQHQFYCGIDLHARKMYVCILDQKGKTMVHENIKTDPEEFLKLISPYLNDIVVGVECVFCWYWVSDLCAKHNIPFVLGHALYMKAIHGGKTKNDKIDSYKIALLLKGGNFPTAYPYPAEWRATRDLLRRRMYLVRRCGELVAHVQNTKTQYNLPAFNKKLSRKYNHAGVAEQFENPEVRKSVEVDLAVIASLNQILNQLEWHIEKTAEQHDYHTLYLLRSIPGVGLILALVMLYEIQDINRFPSVQDFSSYARLIKPVKESDGKWAGKSNGKIGNHHLKWACNEAAILMLRESEKAKQYVAKLERRYNKGKALGIFTHKIGRAVYFILKNKEAFNMDKFFSQ

SEQ ID NO: 91942 - protein, 375 aa, unidentified
MTQSNILFIGMDVHKDSIVISLADDDRSEIRRYGTIGGTLADFKKTLRKLTATGKSLFFCYEAGPTGYELYRYITAQGHQCIVVAPSLIPKKPGDKVKTDQRDADNLTRLLRSGDLTSVYVPNEEDEAIRDLSRAREDAVIVFKQAKQRLKSFLLRHNIRFDGSANWSEKHLRWLAESVNMPFSAQKVVYQEYLNSVTETNARVKRFDKEILFHTTQWRLFPVVNALMALRGVRMVVAVTMIAELGDLTRFKNPKQLMCFLGLTPSEHSTGERKKQGAITKTGNQHARRVLVEAGWAYRFHAKVSKEMQKRQEDIPLNIRDIAWKAQLRLTRRFRIMANNGKPRNVIVVAMAREIAAFMWSIAQEVPIESRSKFN

SEQ ID NO: 91943 - protein, 352 aa, unidentified
MNDSTSIAWLGLDAHSKHCVLAQLDDQGREIKWWRFPTRPEQLVHHVQAIPAADKRLMLEESNLARWISQLLKPHVQQIVVCDARRNHLISQDHHKHDKRDAFALARLLRLNEFKPVWQPAEDQRVLFKRIAKSYENAVQRQTRLKLQLKSLFQHWGLFPAGSAVFSKPGRVVWLKQLPHDPLRAQALLIYELLDQALAGQAQFRRLMCQTGRQFPEVQRLSTTPGVGLVGSHLFVAYIQDPKRFVKFSRLSRYCRLGIRDRTSDGKPLGYQPLDRQGVGTLKAISYRAYLQAAKRRSGPVWDFYQASLRHTSSTHARLNTQRKILLTLWTLWLTGREFDPKQFFRSQPIDV

SEQ ID NO: 91944 - protein, 354 aa, unidentified
MGGIEIPKQEWEETMSNRIVIGLDLAKQSTATAALDGQGREQWRRTFRRQKLLPFLARQAPCIVAMEACAGAHYLARQVDRYGHQVRLYPPKHVKAYQRGQKNDYNDALAIAEAAQHGRLRSVPVKTVEQQDEVLLIQQRRQLKQEQVRLGNHIRALLAERGLVLPKGVAALRRRLPEVLEDGDNGLTPLVRRVLNGAYQRLLAILEELTWYDRELERQTQQDDVRQRLCEMPGVGTVVASVLKAWMGDGRQFRRGRDASAALGLVPCQHSTGGRQVLGGISKRGDRYTRSQVINGAQAVLLYAHRKDDALHRWVVRLQATRGHNKAVTALANKLVRIAWVILARGERYSPRPA

SEQ ID NO: 91945 - protein, 331 aa, unidentified
MVKKQIMTDKLSCCGIDVSHLTLDVTYQNNLGELFYLQVGNNNAGFKKLLEHTGQNCHFVMEATGVYYIRLAFFLDSLGCKLSVVNAMSIKRYIQMHLERNKTDKKDSRWICQYAIEQRPPFWEMPDSAYFECKQIYNTIREYAEQVKRFNNQLHSLKLLPFPSKETIKSIEKMKSYLEKEMDHLEVKLQVLLKKWQPEQYKSINSIKGLGKRATALLIIFTQGFKHTTNHRQLISFAGLSPTEYSSGTSIKGSNRIYKKGGKPIRDVLYMCAMNAKQTNEACKQLFDRLKANGKTGKQALIAVMNKLLKQVFAVVKNNSLYQPNYCSTLH

SEQ ID NO: 91946 - protein, 430 aa, unidentified
MGLIVPTTIHPEREDQPLPYEWFVGIDWGSQQHQVYVLDRDRRRVGERVVDHDGASLARLADWLWTLSDGHPQRVAVAIEVPRGAIVEGLLERGFHLFALNPKQLDRFRDRHSVAGAKDDRRDAFVLADSVRTDQPSFRRLHLEEPQLLVLRELSRAEETLLEDLGRSANRLRDQLHRFYPQMLQLCSAADEPWLWDLIDLVPTPAHAALLSEEQVQRVLKAHRIRRVTGKEVLTCLQMQALPVAPGAAEAAQAHCQLLLPCLRVLAEQLQACSQQVSALLSTLAEEPGEGESPSDVAIVLSLPGVGRKITAWLFAEAAQPLAERDYQMLRTHSGVAPVTKQSGKRRLVVMRRGCNPRLRHALYHMARVAMQRDAHFNSVYTTLRAKGQRHGQALRNIGDRLLRILVAMLRHRTCYDASRIRREPVVQMG

SEQ ID NO: 91947 - protein, 399 aa, unidentified
MNAVGIDVSKGKSMVAIMRPFGEIVSAPFEIKHTASGINSLVELINSVEGESRIVMEHTGRYYEVLAHQLSEANLFVSAINPKLIKDFDNDSLRKVKSDKADAVKIARYALDKWQNLKQYNVMDELRNQLKTMNRQFGFYMKHKTAMKNNLIGILDQTYPGVNTYFDSPARSDGSQKWVDFASTYWHVDCIRKMSLNAFIDHYQNWCKRKKYNFSQSKAEEIYGKAKELVPVLPKDDITKLIIKQAVDQLNSASATVESLRTLMNETASKLPEYPIVMAMKGVGASLGPQLMAEIGDVSRFTHKGAITAFAGVDPGVNESKKYEQKSVPTSKRGSSDLRKTLFQIMDVLIKTHPKDDPVYQFLDKKRAQGKPYYVYMTAGANKFLRIYYGRVKEYLSSL

SEQ ID NO: 91948 - protein, 414 aa, unidentified
MELLHERCAGLDIGKKDLTACVRSPSPSGKRSRRQEIRTFATTTNALVELREWLVAEKVTLVVLEATGDYWRGAFYLLEDCLNVILVNAAHAKGLPGRKTDVCDAAWLCQMGECGVLRASFVPPEPIRGLRDLTRYRATLAAERTREASRWEKELEDAGITLCSVATDILGVSGRAMLSALIEGERDVHVLAEMAKARMRSQIPQLVEALTGHLGEHHAFLCRLHLQRIDQLSAAILQLSRRIEEAMAPCARQLEQLQTIPGVGQTTAEVLIAETGADMTRFRTAGHLASWAGVCPGHHESAGKRKSGKTRHGNRWLGGALGTAAMAAARTKDKTYLGARYQRLVPRLGKKKAIVALEHSILTAVWHRLTHDVDYHDLAGNYFTQLDPDRALRRIIRQANALGFTVRFEAIPAA

SEQ ID NO: 91949 - protein, 397 aa, unidentified
MIAVGIDISKAKSTVAVIDSDGTVLASPFTMAHTQPEMEAFVSYLKGLGEPTTILMEYTGHYHYPVLKKLQDEGFPVCIVNPYQMKKYGDVEIHKAKTDKKDALRIAAYALEKSYKLVPYSSMEQKYEDLKFLSRQYNQRISYVAKLKVQLIALLDQTMPGITRILPLNSRNPEKCALLLFIKRFKSFDEIQRIGKARFLASYDVLAKKASERSASSKGLSIYELAVDSITTRGEDPYIWLSQNQCVDLLSVTQNAADEIISQMRNIAETIPEYKVLRAMHGVGDRLGPIILAEIGDVHRFHSGKALNSYAGNDAPPYQSGQFESRNRHISKRGSSTLRKACYEVMQALKLIKPQDDPVYLFMLKKEQEGKPFNVAKMAGVNKFLRIYYARAMELYK

SEQ ID NO: 91950 - protein, 355 aa, unidentified
MNKINSNFEGQTIFVGMDVHKASWNLGIHLNDMFVKNVHQKPNPYIMASYLKQHYPGAHYKAAYEAGKFGFWIQRQLTALDIECLVVNPADIPKSQKDSLQKTDPRDARNLSMRLQSGVLHGIHIPDEQQEADRIFFRHRKRIWKDLTRCKNRIKGMLAFSGIDIPEQYDNASWSHNFLNWLKAVDCKQHSRRRALDYMISQMEYLRKELLSLSNELRKMMREKRYNKNYYLLRTIPGIGPLTAASILVEIGDVKRFETFYHLNSFVGLLPMEHSSGQTENKLRLTVRKHRQLRSDLVESAWTARRTDPAMALYFQQQIKRKDSKIVIVKIARKLLNRIRYVLLNQQPYEIGIVK

SEQ ID NO: 91951 - protein, 387 aa, unidentified
MRAVCGLDVHKDSVFLCILHDSGEIFEKVYGVLTHELRDMRRLMQSHGVTEVTMESTSVYWIPIWRVLEPYFHLKLVNPYFIKQLPGRKSDVKDAQWIAECTQKDLVRGSFVPPERIQQLRQYDRRIFDLDAEIVRKLSKLDAVMQRCNIRLSNYVSNTDTKSYKNVVRKLCEGVTDPEELIREIYGRIINRHGRETILAALTGVVSDAEKDTMRQLRDELDLAEKHKQECMDKMLHICQTYYPNELRRLMTIPGVKERAATSLIAEIGVDMTKFPTAAHLASWSGLKPRNDESNKKIKSRRITHGNIFLRKTIVECAWGASRTRDCFFSRFSYHQTQVRKKNKMKVLVAVARKLLIAVWHVLHDETGYKDFGANNDCETSVANNNG

SEQ ID NO: 91952 - protein, 340 aa, unidentified
MAPTGRKPRVFAGIDVSAKELVVALVRNKAEVRRMTFENSPAGHKHLVRALTFKGGTSRVVLEATGNFHLDPALVLSAEPTVELMVVNPLAARRFAQAQMRRAKTDKVDALVLLEFAQCMPWERWMPPPEAALELRAVTRHLANLTVQQTALKNQLAAARATSITPAYVIQDIQAQLEVMAQRIEACQGEALRVVRASPDLTKDLESLTSMPGIADRAGVQILGELSVLARDMSPDEVVARSGLDPRPKQSGSSNPQRKISKMGNSRLRGALYMSAVTAARCNPAVSAWYSILTGKGKLPHVAHVAVMRRLLRVAWVLMIRRTTWVDDLFRPREPVPKIA

SEQ ID NO: 91953 - protein, 383 aa, unidentified
MRTVCGLDVHKDTIYLCILCDDGLIFEKVYGVLTKELKKMCSDMKQHGVTEVTMESTAMYWIPIWRVLEPHFCLKLVNPYFIKQLPGRKSDVKDAQWIAECTLKDLVRGSFVPPELIQQLRQYDRRIFDLDAEIVRKLAKLDGIMQRCNIRLSNYVSNTDTKSYKDVVDKLCEGVTDPEELIKEIHGRIINKHGRETILASLTGVVSEAEKDTMRQLRAELKLAEEHKQECQDKMMHICKTYYPEELRRLMTIPGIKERAVTSLIAEIGVDMTKFQTAAQLASWSGLKPRNDVSNGKYKSRRITHGNVYLRKTIIECAWGASRTKDCFFSRFSYHQIVVRKKNKMKVLVAVARKLLIAVWHVLHDGTDYVDFNPDCKAPATNG

SEQ ID NO: 91954 - protein, 409 aa, unidentified
MSLDVLYERCCGLDVHKRSVTACRVIPDADGRPEQEIRIFGTMTAELLTLGDWLEAGGVTHVAMESTGVYWKPIWNLFEERFSLLLVNAAHVKAVPGRKTDVKDAAWLAELLRHGLLAPSFVPDRPARELRELTRYRSSLVRERTAEVNRLQKTLEGANIKLASVVSDVTGVSARKMLGELVAGTEDAAALAELAVGQLRRKREALEQALTGRMSVHQRFMVGQHLAHIDALDEQIATVGAQIAERLRPFEPQLAILDSIPGIGPWSAEVIIAEIGTDMSRFPDEGHLASWAGMCPGHNESAGKRRSGKTRKGSPWLRVTLTEAAYAAGRSKDPYLSGRYGRLIGRIGKKKTAVAVGRTILELCHQLLSTGQLYDPQQPRPVTVPLSEEQRLIRRLEKLGHRVTLEPAA

SEQ ID NO: 91955 - protein, 407 aa, unidentified
MDVVYRCCCGIDVHKKTIVACLIINNKQEVREFGTNTGEIRGLASWLRENHCEMIAMESTGVYWKPLYNLFEMLELNAMVVNAAHMKALPGRKTDVKDAVWIADLLRHGLLKASYIPDREQRELREISRYRKSLIEERSREVNRLQKVLEGANIKLSSVVGDIRGKSARKLLDIVTMDKHPSTEEVALLINVRLRPKLDVIMRSIEGITTSLQRKLMAQIIDHIDDMTVRVNDMDNIIKSYMDQYEAAISAIDEIPGIARRSAEVIIAEIGKDMSRFPSAAHLCSWAGICPGNHQSAGKRQHGKTTQGNKALKSMLVQCAKAAKQVKESYFSAQYQRIAARRGNNRATIAVAHSMLIAIYHVLKNGVAFCDLGSEYYDSFNREHKINGYLKRLNALGWTPEMKIISA

SEQ ID NO: 91956 - protein, 338 aa, unidentified
MVYGAIDLHMRHSQVRIVAEDGTVLREARIVTARERFVKEFADFGTMRILLETGTEREWVAQALEAAGHDVIVADPNYAPMYGETKRRIKTDRRDVAALAEANRRGWYRVAHRTSAAQRETKQILRARRWLVQQRSGVVSLVRSLLRQSGYRLGPGIGATVPTRVRRLGVTGELAATLQPLCDQVLTLTTAIDALDERLQQRTAPDAIVTRLRSVPGIGIIVATTFRAFVDRHERFTHAGQVSAAIGLVPREDRSAERRHRGHITKAGPRELRSLLIQAAWVCWRHPGSATLRAWVDRLAARRGRRVAVVALARRLSRILFALWRDEAVFDAQKLATA

SEQ ID NO: 91957 - protein, 457 aa, unidentified
MLPVSGLPSEFEQINLNAAGIDIGAQKHYVAVAKGRDPEGRDIRYFDTFTIDLHALADWLKQCGIDTVAMESTGIYWIPLFEILEQNGFDVRLVNPRSIKHAPGRKSDVVDCQWIQQLHAYGLLTSAFHPDDQISVLRAYHRQRTMLVNHAGTHIQHMQKALEQMNLKLTNVISDITGTTGMKIIRSLLAGERDPKKLSKHRDPHCKKSEKEIAKSLNGNWRDEHLFALQQAVALYDFYQTQIMDCDKQIQAQLCRFEDRSDTGELPPAASKSSGSGKKLTFDAREHLYRMAGVDLTQIVGLNTPTVLTVLSEVGLDMSRWPTAKHFASWLGLCPGSKISGGKNFSSKSKPSANRAAHAFRMAAYSLHRSQSAIGAFLRRKKAQLGAPKAITATAHKIARIFYEMLKTRTEYKDLGVDYHQNRYKERMLRNLKHKAKEFGLELVNPNQDQLVMANSE

SEQ ID NO: 91958 - protein, 355 aa, unidentified
MTKVRTNFEGQIIHVGMDIHKSSWNLGIYLNDLFIKNVHQKPDPFIMVSYLKQHYPGAQYKAAYEAGKFGFWIQRQLTKLGIECLIINPADIPRSQKDTLQKTDPRDARNLGLQLQSGVLKSIHIPDEQQEADRVFFRHRKRIWKDLTRCKNRIKGLLAFSGIDIPEQYDNANWSHNFINWLKQVDCKQQSRRNALNYMITQTEFLRKELLSISNSIRKMMREQRYKTNYYLLRTIPGIGPLTAASILVEIGDVKRFNTFYHLNSFVGLLPMEHSSGERENKSILTVRKHRQLRSDLVESAWTAKRTDPAMALYFNEQIKRKDSKIVIIKIARKLLNRIRYVLINQKPYEYGIVK

SEQ ID NO: 91959 - protein, 405 aa, unidentified
MKKVSTATRKQSKNFSAQQKLTIGLDLGDRSSWYCVLDEAGSVLLEQRVSTTPKALREVFGGMPGSRIALETGTHSPWISRLLSELGHEVIVAHARNVRLIGESRKKDDRLDAQTLARLARIDPQLLCPVKHRSAKAQADLTLIRARAGLVRARTALVNTARGLAKSYGERLRGCNVRNMNPEKAEGLSPELQAALKPLLAAIESVSQQIREYNQRIEALAQQSYPQVALLKQVKGVGTLIALTFLLTLEDARRFRKSRDVGCYLGLQPGRRNSGQSEPQMHSSKQGDPYLRTLLVQGAQHILGPFGPDCDLRRWGLKLAERGGKSGKSGPSLPRQESWRCCCITYGGAEKSTNRCTTALVWQCRRPLEKTFFETKWLIEPCNRKQPSPKPSSGDCVNRLAQVAL

SEQ ID NO: 91960 - protein, 306 aa, unidentified
MTLGVDVAKDYLVASDSEGKVRTVANSQTAVADLLSSLPSGSTIAMEATSHYHKPLADMAYAQGFKVIVFNPKDVLHYARSISPRAKTDRVDAKVIALYALAKKDPKYYQATPQVAQKLIGLVRTRRSLVDNRTSLENRLRECPEAETYLKPALDGLSASIANLDKDLASVAGTLPEHSQMVQTPGIGNLVGAYALGLLESGVFARSDSFVAFIGLDIRVRESGKKIGKACISKRGDPEARRLFFLAARAAARQPGPFQELYLRYQSHGLSKTAATVAVARKLARTAWAIYTRNEAYRPERVLTPA

SEQ ID NO: 91961 - protein, 420 aa, unidentified
MRRKSKRTKGIEQAHPFDGMSKVNPQAAGVDIGAEEIVVCVAPNETTQLVRGFGNYTVDLHAIADWLTEHKIKTVAMESTGVYWIPLFEVLEKRGFECLLTLAPHASAGVSSRSLRRVAGRKSDVTDGQWIQTLHNYGLLESSFRPQADLIALRSLLRHRRSLVDHRSPHIQHMQKALLQMNVQLSQAVSDVSGVTGQAIIRAILSGVRDPKMLASLREPGCKKSEAEIGKALTGTWREEHLFVLKQAVVLYDFYTQQIFECDEEIERMYAETRPDWDGGELQPLSTRKRNSHSKNARYDTEKIRQHLKRVSGVDISLVDGFGVSLAQTVIMECGTDMSKFPTEKHYSSWLGVAPKHEISGGKVLKNTTLRTKNRAGQAFRMAAQSVKKADCAFGVLYRRLRAGWGQPRQRWRQPMPLRE

SEQ ID NO: 91962 - protein, 406 aa, unidentified
MKQFNPNQPMTTCGSAALLIQSSIAPMHYELYIGLDVHKDTIAVSIAHRDGSKPRYYGQIANTPSAVKKLINKLSPTGEAISVCYEAGPCGYGLYRQITAIGHHCIVIAPSLIPSKPGDRVKTDRRDSEALARLHRAHELTPVWVPDTEQEAIRDLTRAREDMKHLERQSRQRLSMFLLRHGKNYDSGKSKWTQAYFRWLEHIKFSQPVQQIVFQEYIDCVKQQQARVKGLEKEMENALHGWALAPVVEALMALRGCKLITAMTIMAELGDITRFDSPRQLMAYLGLVPSEHSSGKSTRRGGITKTGNGHVRRVLTESAWCYRFPARKTAHLQRRAERTSESVQAIAWKAQKRLCGRYQHLLNRGLLKVKVCTAIARELAGFIWAIACHVMPKPSALMGQQAFIAE

SEQ ID NO: 91963 - protein, 317 aa, unidentified
MVSAPVFVGIDVAQAHLDLAVRPTTETWQVPNTDAAFPDLIARLRALAPTLIVLEATGGYEHAVLSAVAAAGLPIVAVNPRQVRDFAKAFGILAKTDQIDAAILALFAERVRPAVRALPDADTAELAALLARRRQLLDMLTAERHRLAQARPAVRRSLQQHIHWLEQRVHDFDDDLSRRIRRSPVWRAKEDLLRSAPGIGPVVARTLLAALPELGRLPRRPLAALVGLAPFNRDSGRHRGRRCIWGGRRTVRAALYMATLVATRHNPAIRACYQRLLTAGKPTKVALTVCMHKLLTILNAMVRTNQPWRDALAESHP

SEQ ID NO: 91964 - protein, 396 aa, unidentified
MASMTLPAPRSQVEPDRRCVIGGIDTHRDLHMAAVIDINGVELGVEAFPTTRAGYGRLLRWMRGFGVVARVGVEGTGSYGAGVARHLTAADVEVCEVDRPDRTDRRRRGKSDTFDAIAAARAALAGQRTSIPKSRDGMVESVRVLRLTRSTAVRARTKALQVLRHHIVSAPEQLRDQVRNLSRTQLVRTCAAWRPDTDGSRDPAVATRIAMKSLARRILELNNEIADLDTVIEPLVADLAPQLLAEPGIGIESAGQLLVTFGDNPERIQSEPAFAMLCGVAPLPASSGRTQRHRLNRGGDRHANSALHMIAICRMRVDDRTRAYVTRKTTEGHSKLETIRCLKRLIAREVYYLLRPATPSPQHRDLTPAGSSIASRPAGAQARSTPPRNPTLPAQA

SEQ ID NO: 91965 - protein, 418 aa, unidentified
MAIVGGIDVHRRQLTFDYCDRATGELCRGRIAPADRQGFRSWLSQLPPGGDFALEGCTGWRYIVEELAAAGFVAHLAEPADTAALRGNKQRAKTDRADARHLRELLMSGTLPESWIPPAHVLEARTTVRLYKDLSDERGAWTQRVHAALFHQGVETFSGTLTSDVGRVFLDKADLSPAARRAVETGLAHIETLNETLTPIKRDLSKFSLAQPGCSALREYFGIGGLLSVAIWAEMGDTRRFSSPSDAVRHTGLDITVYSSDTKRAKGHLARQARRCCAGRSTRRPSPPLRTTSTTSASASALVLSGRRSLLHERSHAGCTTACASSVTRPSRRCDERRLGELVLRLAQANPMICGLLQQPDCCRDLVSVSLQRTMRPQLLRVGITPSTIMLPELVSAHRGKSGRSHTGSLSAEEGLMT

SEQ ID NO: 91966 - protein, 343 aa, unidentified
MSEVTTIGLDIAKNVFHAHGADASGKPLFSRKISRTKLLEFFAKQPRCLVALEACGGAHHWARELTQQGHQVKLIPPAYVKPFVKRNKNDAVDAEAICEAAQRPNMRFVAIKSEEQQASALVFRTRDLLVRQRTQLINAIRGHLTEYGWVAPKGPSHIAVLGDLLDGEMGSSLPDAATPMFRTMLDLLEVLNGKIAELDKEIARRARDDVIARRLMTIPGVGPITATAIAALAPPAETFAKGRDFAAWLGLAPRQLSSGGKQKLGSITKMGERTLRRLLIIGCSAVVLQASKRGAPAGSWLEQMMARKPRMLVTVALANKTARIIWALLIKQEEYKAPVAAAA

SEQ ID NO: 91967 - protein, 408 aa, unidentified
MQVLYPRCAGLDVHKDMVMARVRCVSEPPHDEVRSFATTTTALLEMADWLMEHAVTHVAMEATGVYWKPIWHLLEEHFELVLANAQHIKNVPGRKTDVNDAAWIADLLAHGLIRSSFVPPTPIQELRDLTRTRKQLVREISQHSLRIQKTLEDANLKLGSVLSNILGRSGRAILAALVQGETDPEKLADFAQGAARKKRAELVEALRGRIRTHHRELLRIHLNLIDALDQALAEVDARVGKTLTPIQESARLLTSLPGVSELTAQVMVAEIGVDMARFPSSGHLISWAGLCPRSDESAGKRRSTRVRKSGTWLKTALVTAAWAAVRVKDSYLQAQFLRLKARRGAKKAILAVAASMLTAAYHMLKNGLEYRDLGADHFSRRDRSKAIQRLVRRLNDLGCDVQLTAQAA

SEQ ID NO: 91968 - protein, 339 aa, unidentified
MQIHSVGIDLGKTTFHLVALGAAGKVLVRKKFTQKQLLAYTANMQTSLIGLEACSGAHFLGRALRKQGHDARLIPAQFVKPFVKSNKNDFIDAEAIAEAVERKNMRFVPIKTDDQLDLQAIHRVRDRLISRRTAVINQLRAFLLERGLVFAQTPAKLKAAMADILENAEADLTPRMRNLIDGLWSEWKLVEQQIEELNDELERISAADAGCTRIRKIPGIGPVVATAIVAAIGNGAAFRKGREFSAWLGIVPRQYSTGGKAKLFGISKRGNAYLRRILIHGARAAVLHIKRDRAPIGAWLDALDARAPKNVVVVAMANKLARIAWAVLSSGNEYRPVAT

SEQ ID NO: 91969 - protein, 337 aa, unidentified
MGRYLGVDLHKTVFTVCFLEDETGEYVYKDYHLSRIERFKSELDQKDVVGVESTGNTRYFVERIRDCVNEVKVINPSRFKVISQSVQKTDRRDALTIAEFLSKGMIPEIRMRDKETAQIKSLVHTRDKLVKLRTALKNKVHNILNFYGISIKRESLTSNKGLSAVVEQPVEEIAKVELTVIISQIKSLNQGIKKLDKEIEDKGKNLKGFKNITSIKGIGPKSGTILLSVIGNVEDFESEKKLASYFGIVPRIHISHETVHTGRITKQGSKLGRTTLVQCTLIAKKYSPYLEKFYQRIKAKKGSGKAIIATAKKLLGIIYITLYNDWEFEDFPNFVVR

SEQ ID NO: 91970 - protein, 387 aa, unidentified
MQKPHDNSKASPAAFMQDNTLIAVIELSLSNWLVAGLIPGVSREPLKKLEPNPEDLLKLLHGWRDEAIKAGRPITRIAVAYETGRDSFWLARWLRKHGIDAHVIHATSVAVSREHRRAKTDRLDTAMLKRGFLGWLRGERGHCTMAIVPTMEEEDAKRPHREREGLVHEQTRAVNRMKSALIQFGVRNFNPKLRKASVKLETVRTPEGKSLPPNTIAALRRDMERLRIIKEQIKAIEQARLQQFEQKPEALANRMVDLLVRIYGLGLETADLLVHELLSRTLRDRKAVARYAGLTGSPDESGSKRREKGLSRSGNARVRKIMIQLAWRMVKFQPDSALVQWFNQRTENAKGSRKPMIVALARKLIIALWRYANDGVIPEGFRLHSAA

SEQ ID NO: 91971 - protein, 356 aa, unidentified
MTKAVMAGIDLHSNNVMIGIVDQDGQRLKHQKLDCDLTQVDGFLRPFKRRLKSIAVESTYNWYWLVDGLRALSYPVVLANPAGMEQYSGIKHADDKSDAFFLAELQRSNILPTGYIYDPQLRPVRDLLRRRLRLVHQRTALMVSFKSLYTRTTGQAMSLSQLKAMAPARAGELYEHPANQLIARVQKEHIEQLDQSIGRIERAVLREVRKRPYYERLNTLPGVGRILGMTITLEVGDIERFRTAGNFASYCRAVDARRTSNEKDKGRNNRKCGNKYLGWAFVEAANFAKRYDERSRKWFDRKAAKTSTVVATKALACKLAKAAWHVMAQNVNYDGDRVFGKAAGSQVNGLVQALRN

SEQ ID NO: 91972 - protein, 399 aa, unidentified
MEAAVITAVGIDVSKSKSTVAVRRPGGEIVLRPFDVRHTNSDLKKLTSTLKKLGGDIRIVMEHTSTYWRPIALTLKEAGFFVSVVNAMLIHDFSDNTIRKLKTDRADALKIANYALTFWDILPPFNNEEETRLLLKMQSRANERITATATALRNGLIALAEPTFSGVNIAFAPNTKNANGHEKWVDFFLRYWHKDCVCQYSMEAFTESYRGWCKRKNYKFRTDTAHKIYLLAQESVATLPKCESTKMLITQACKSLNAVCEAKQSTQLEMQRLAAMLPEYEVVMQMEGAGPVTGPALMAEIGDVRRFKNKKALVAFAGIDAPPFQSGAFESKSRHVSKRGSPHLRRTIFIISNIILTRSNPENAVYCFMDKKAFRRKTLLRLYRRRKCEVPAGLLRSCY

SEQ ID NO: 91973 - protein, 353 aa, unidentified
MSVYVGIDVHRKRSQVAVVTGDGTVELNKNVVNGSEPMLRLIGDLPPGTPVAFEAAFGWGWLAQLLEDYGFEAHLVHPLRCKAIASARLKNDKVDAATLAQLLRADLLPEAWIAPPAVRQLRALLRHRTGLVRLGTQQRNRIHAVVADFGYDRSGSYLSGPGRGWLAGLDLPAASREIVTDCLAVIDGLALLTGRIDGELRQHAKADPRVKVLTTLPGVGQFTALVMLAEIGDITRFGSARKLASWAGLTPTVRGSDLTVRHGHISKQGSAWLRWVLNQAAQTAKRSPEFAATYAAISKRRGKKIATIAISRKLLTRAWHLLVAMQDTARPRRRSGHEDGRGHQAPGTLALAA

SEQ ID NO: 91974 - protein, 349 aa, unidentified
MTTQRLSYVGQSVYVGVDVHKDTYAVTCVCNKQIVKTATVKADPAGLTASLSQWFPGARLYTAYEAGFSAFVLHRALTKAGIMNIVVNPASIAVAANDKVKTDRRDSKKLALALSDGRLQGIYVPTEDEELARLLPRTRAQIVEHRATIARQIKAKLHQFGLIAPASRRLISNRYLREIDAWPLPPDLRVSLTFLAEQWRFATRQLIEMRRLLREQAKAHPAIEQVYRSVPGIGEVVARTLATELGDMTRFANERALFSDTGLTPSEYSSGPSVRRGHMSRQGSSRVRHLLIETAWRALPRDAVLKEIFDRIAATRGKKRAIVAIARRLTGRIRACFRQGTTYAVGTYA

SEQ ID NO: 91975 - protein, 425 aa, unidentified
MNYKQNEKINQVKESTLVVGIDIGNTKQYARAFDWRGIELGKVFTFSNSREGFEAFKAWMQYLQDKYRKSDVIVGIEPTGHYWFDLGAYLEDEGILLVMVNPYAVKQTKELDDNSQSKNDRKDPKVIAKLVTEGRYSAPYTPDGVYADLRIMVTNRKRLIREMTQIKNRFARWFAIYFPEYTDVFGDYEAQSSMLLLKKVCTPEAIVELGAEKINQIWRDAKLRAVGMKRATTLCETAKRSIGLKKGSSAARYEMKLLLEDYEYKKAQLDAVMEEIEKLCRKIPESEQMLAIKGIGVITVAGFLAEVGDVRRFESPRQIQKLAGLSLRENSSGKHKGQTTISKRGRSKLRAVLFNAAIPLIAKNPEFKSLHEYYTTRANNPLKKKQSVIAISCKLIRVFYAVLANGVTYDAQKMISDIHRQPQAA

SEQ ID NO: 91976 - protein, 420 aa, unidentified
MKAPVVKDFSALIGIDWADSKHDICEMPVGSSDYQLSVISSKPQALHDWALALKQRYPNKSVAVACELKKGPLIYALSRYDHITIFPINPSTVAKYRKAFTNSGAKNDPSDALIQTEILALHMDKLVPILPESPAIRALAQLLEYRRKLVQNRVDLSNTITAILKNYYPQVLDWFNEKDSILFCDFVTRWPSLTAIKKVRKASLMHFFNQHNSRYPEVNAKRFNDMKVSCALTEDPGVIEPNQIMIEVLIPQLKLLIESIDRLNLEIKQRYRKLDDRVIFDSLPGAGPQMAPRILVAFGENRERYSDANDIHKYSGIAPVVEQSGKKKWTHWRYSCPTFLRQTFVEWAGLSIRYSFWAKAYYDQQAAKGKPHNTIIRALAFKWIRIAFRCWKTNTPYDESTYLNALKKRGSPLLKYIAEG

SEQ ID NO: 91977 - protein, 322 aa, unidentified
MSGSILGVDIAKRKFDGALLINGKLKHKVFTNNEEGFELLMAWLQKQNVDHVHVCLEASSTYGDELATSMHDAGHTVSIVNPARIKGFARSELLRTKNDKVDAGLIARFCHAMHPEPWAPLPPEIRTLQALVRRVDALLVMRTQELNRIETTHETVTCSIREHIAYLDQEIAKLKKQIAGHIKNDPHLRTKRDLLRSIPGIGEVTIAAILGELALFENCDRVQKVVAYIGLAPKEFMSGSSIKGKPRICKMGNARMRKALYMPSLVAMQHNPVIISFSQRLKERGKNGKVIVCAIMRKLIHLIFGILKSGKPFDPNFKPHYA

SEQ ID NO: 91978 - protein, 391 aa, unidentified
MSMYFVGIDISKYKHDCCIISAADQQIISKFTITNDKDGFEQLLTALNSLSNPEDIKIGFESTAHYALNLELFLENAHHSFMEVNPVLIKEYKKSTTLRRTKTDSVDCESIARWLITVEYKPHSKGFYHAYSLKSLTRLRDRLIRQRSFYLVKITNVLDHTFPEFKPFFNERLSKTALYLLENYGSAEKMARMNSASYDKLRCISRGKFSIQQFLRLKELAANTVGVNNSIFDLELNTLLTLYKSLSDEINTLETEIIKLIEEVHPHYMSIPGIGPISAAVIYAEYGDISNFSNPGQMLAFAGIEPGINDSGTESHGGRMVKHGSSQLRYVLLNSCLPLIRFDLTFATYYAKKRAEGKKHRVAITHVAKKLIRVIYALERQDVDFNVQKLR

SEQ ID NO: 91979 - protein, 418 aa, unidentified
MDVVRACCCGLDVHKQSVVASLTRAVTGGVRATTTRAFATTTEALTELATWLAAQGCTHAVMESTGVYWKPVDNILREQAPHLDVAVVNAAQVKALRGRKTDVQDAAWLAMLLQHDPLRPGFIPSREQRALRDLTRTRTTPTDERSAVVNRVQKVREDADIKLAGVATDVMGVSGRAILAALLAGTADPAALAALAVGELRTKRAELERALDGRMRAHHRVLVAMHLGHIDVLDEQIAELDRRIAEATRPVAEVIARLDTIPGVDVRTAQVLVAEVGVAVAQFPTATHLSAWAGMAPGNNLSAGKRRDGKTRKGSTWLRRALVQSARAAARTKKEGQTAFAEQDRRLVVRLGPKKAAVAVGRAILTTAYYLLAHETTYTESARVRLADDRRRRLERRALAQLAALGYHVTLAPKEPAA

SEQ ID NO: 91980 - protein, 404 aa, unidentified
MIFVGIDWAEAHHEVCILDQEGGVLAKGRIPDGIEGIGRLHEMVATHAEEPSEAAIGIEIDRGLLVGALVETGYRVYAVNPFAVSRYRDRHSISRAKSDPGDAKVLADLVRTDRHNHRELAGDSELAEAIKVLARAHQSLVWARQRQVSQLRSTLREFYPGALEALKGDLSSHEACSILGMAPTPQWGRRLSRSRIHRSLAASGRTRNLDRRTSEIYDALHAPQLQAPPMVAEAYGQVVGSLVVLIDGLTHQIGQMEHQLAERFEGHPDAEILRSLPGLGLILGARVLAEFGDDPTRYADARARRSYSGSAPITRASGTRLVVLARLARNRRLADACYLWAFSALNTSPGARRYYDARRSRGATHHQALRALSNRLVGVLHGCLRHRQLYREDIAWPGSVEAVA

SEQ ID NO: 91981 - protein, 404 aa, unidentified
MYNAVGIDVSKGKSTIAVLQPGGVIVRKPFDVFHTSQSLKELSNYLASLEGDTRIVMECTGRYHESMANSLSNAGFFVTVVNPHLIKNFGNNTLRKVKSDPADAKKIARYTLDNWAELRQYSCMDNTRNQLKTLNSQFSFFMKQKVAAKANLIALLDNTYPGVNKLFNSPAREDGSEKWVDYAYSFWHVDCVRKTGLKAFTVRYEAFCRKHHYIYQPSKPEELFNASKELVAVFPKETSYKLLIQQSIQQLNLASAHIEQLRREMNALASTLPEYEVVMGMYGVGKTYGPQLIAEIGDVSRFTHREAITAFAGVDPGVEQSGQHNSKSNKASKCGTARLRKTLFQVMTTLLQNAPENEPVYQFLNRKRSEGKPYYVYMTAGANKFLRIYYGKVKAHLRSLEQNE

SEQ ID NO: 91982 - protein, 314 aa, unidentified
MIIPLRCVGIDVSKRMLDIFDETIGAPERIANAAQAITELVARWRCGNVLVVFEATGVYDHELAEALRQAGIRFARINPARARDFARAGGRLAKTDAIDACMLAAFARTMAPAVDQPPKPARNALAALAKRRDQLVQMRAQEKNRRSEAHDRDLIEDIALHLDFLNAAIKVIEAKIKALIKAEPEISEQARLIRSAPGIGPVACMQLIAQMPELGQIGPKQIAALAGLAPLNVDSGSYRGKRAIGGGRKRVRDALYMAALNAVRREGSFKTFYQRLRAAGKPAKLALIAVARKLLATLNAMLRDRKIYLQPQPT

SEQ ID NO: 91983 - protein, 433 aa, unidentified
MKKKRAYRARSVKQVNWAVASQGRGGQGVHVGFDVGKEAVLAVVRWGEDQFERPWLVENPGEIRALVNLLVRIDGERPLTLAMEPTGTYGDGLRQALADEGLSLRRVSTKAAHDYAEIFDGVPSQHDGKDAAVVAELAAQGKSQEWPWRAPSVADEEMAYWVDWMDAQQRQLTMWLGRLEALVVRHWPEAAQWLKVSSGTMLRVLERYGGPAGLASDAEGAAQLARWGGYYLKRETIAGLMQSARQSVGVRQGEVDAERMRQYAQQALRARAEIGRSRRGLERLAQGNAVIQRQAKAVGVATACVLWVCLGDPHDYHCGEAYRKAMGLNLAERSSGKYQGKLKISKRGLPQVRRWLYFAALRLVKQGPVARWYQRKKAKDAEEAKRAVVGVMRKLALALYQVGACGETFQARWLFPGHRVCERRRGCLVQRGD

SEQ ID NO: 91984 - protein, 399 aa, unidentified
MFIVGIDIAKKSHQAVIIDEEGNQRSKNFRFANSLEGFNLLLNNMEEIDSDHSNFEIGMEATGHYWINLYTRLIDKGFKIHVINPLQSDALRNLYLRKTKTDSVDSKLIANVIRFGQYTETRLTDDKLLTVRELSRQRFYLVDMNSDLKRKVVVIMDKIFPEFQGIFSDMFGKTSCAILKKCPSSKEVLEIDFDEFAAIIKKSSRSKFNIAKAKEIKLAARDSFSALIDPAPLSFLVKQMVEQIELLENQIQNLEHEISEIFMQLDSKITQIPGIGPVLGAVILSEIGDVNRFSSSKKLVAFAGIDPSIKQSGEFVSSENHMSKRGSPYLRRALWIASFVNLNHNKEIIKLYGKKTSNGKGHYKTMGFLCHKLLNVVYAVLKNNADYIPYAWTESKACS

SEQ ID NO: 91985 - protein, 347 aa, unidentified
MKIMRVGVDLAKNVFQVHGVDQYDKPVWRRSLKRSQWLAELERHVSPDAEIGMEACAGSHHWARALRARGYRVKLMAPQFVKPYVKSNKTDRNDAEAICEAMSRPGMRFVALKSVEQQDIQAVHRVRSELIRQRTAKANQIRGLVGEYGLVAPLRIGQLRAIVPDWLEAGDNGLSMRFRRLLAGLWEDLRGLDGRIGQLDQEIQTIASESAVAKRLQQLRGVGPITATALVATLGDGKAFRKGRDFAVSLGLTPKQHSSGGKAHLQGISKRGDAYVRQLMVHGARAAVRTARHHDDALSQWIQRLSHRKHTNVVVVALANKTARMAWALLHHERNYEPQLAARLVHD

SEQ ID NO: 91986 - protein, 438 aa, unidentified
MPSLAYVGLDVSQDSARVCFLLADGEEPRPRWTIPNTQSGAAELSADLAHLCSLYQVERLRIGLEATGLLWWHLACYLKDAAILAPFTPQVYALNPQLVETFRKNFGALPKSDHADAFLIAERIRYGRKLPSPFQLDTRYAPLQRLTRFRCHLVQNLVREKNYFLSFLFLTFSSYGQLAPFGDPFGATSCAILEEFTTEDLAQQSLDDLATYLQDKGHGRFADPQDVAASLQRAARDSYRLDKVLQEPLRLVLGTTMASIRTLQQQLKALDKTIAQELAVIPQTLSSVPGLGPVWTAGLIAELGDIARFDDQGAIAQYAGLTWPSDQSGDFVAEDTAISKRGNSYLRYYLVEAANSVRTHCPEYTRYYAAKYAETPRHAHKRALVLTARKLVRLIDVLLREGRIYREPEQRAGAQSATQPHSKRPSPQRRNKRLGAVS

SEQ ID NO: 91987 - protein, 393 aa, unidentified
MVQHTQPDFTGQDVFIGLDVHKQSWHVAIMVGDTFHKSFHQPPTPGVLVNYLRRTFPGGRYHCVYEAGYCGFWIHEELKRRGIECMVTNPADVPTTDKEKRYKTNRVDARKLVRSLRNGELHPIYIPSRQAQEDRSLVRTRIRLVSKQTRCKNQIKSLLCFYGISVPDDIGERYWSQRYLRWLESLTFSSQSGQEALHSLLSELKYYRQSILSLTRSIRQVAKQERYALHVQRLVGISGISTLTAMIFLTELIDLARFRSLDTLAAYVGLIPGENSSGDERTITDITPRKNPYLRWVLIEAAWVAVREDPVLMLAFHHLSQRMPKNRAIIRIARKLLNRIRFVLKNQTPYVRMTEHCDAAVVAEQAHRPLLVVPARANTARAIPTRLHKQRMN

SEQ ID NO: 91988 - protein, 362 aa, unidentified
MPKMIWLGMDVHAASITVARYEDQAATAMVQTIANDPAQVRRLVRRLPAGCDVRACYEAGSCGYGLHRQLTALGVHCDVIAPALIPRRPGERIKTDRRDAEKLGRFYRCGELTTITVPTPSQEAVRDLVRAREDVRRDRTAARQRLAKFLLRHGHRYPGSHWTKRHWEWVCGRPVDGAARTVFVHYCDHVLALNERLAHLEREIRTLAESQAYQPVVTRLSCLRGLATLSALMLIAELYDLRRFRTPRELMAYLGLVPSEHSSGARERRGRITKTGNALARRLLIEAAWAYRHPARQTRRVHQALTTQPPAVHAISDRALHRLTARYRRLLSRGKTPHHAVTAIARELCGFVWAIALVPDLT

SEQ ID NO: 91989 - protein, 347 aa, unidentified
MRFYTKPHKFYCGIDLHARTMYVCILNRDGEILVHRDLKAAPEPFLKAIAPYRENLVVCVECIFTGYWLADLCAREGIPFVLGHALYMKAIHGGKAKNDRIDARKIAVLLRGGMIPQAYVYPAEMRATRDLLRRRMHLMRHRAGLLAHIQNTNSQYNLPQIGKKLAYKANREGVAERFPDPAVQKSIEVDLTLIGSYDRLLTALELDIVNTAKAHDAQTFYRLRSIPGVGKILALVLLYEIHDIHRFPRVQEFVSYCRLVKCAKESAGKRYGTSGAKIGNAYLKWAFSEAAVLCLRNNPAGQKYLARLAKKHGKGKALTVLAHKLARAVYYMCKRDTAFDLDKFLNA

SEQ ID NO: 91990 - protein, 411 aa, unidentified
MEVAVITAVGIDVSKSKSTVAVRRPGGEIVLRPFEVHHTNSDLKKLASALKKLGGDIRIVMEHTSTYWRPIALTLKEAGFFVSVVNAMLNHDFSDNTIRKLTTDRADALKIANYALTFWDTLPPFNNEEETRLLLKMQSRTNERITATATALRNGLIALTDQTFPGVNIAFDPNTKNANGHEKWVDFFLRYWHKDCVCQYSMEAFTASYRGWCKRKNYKFRTDTAHKIYLLAQEGVATLPKCESTKMLITQACKNLNAVCEAKQSTQLEMQRLAAMLPEYEVVMQMEGAGPITRPALMAEIGDVRRFKNKKALVAFAGIDAPPFQSGAFESKSRHVSKRGSPHLRRTIFIVSNIILTRSNPESAVYCFMDKKRSEGKHYYVYTVAGSAKFLRVYYARVTEFLRSQPSPDAC

SEQ ID NO: 91991 - protein, 343 aa, unidentified
MSTITIGLDLGDRYSRFCELRPEGVVLTEGRLPTTRTALARQFEAHPACRIVCEVGTHSPWVSRLLASWGHEVLVANARQVRLIYAAHRKSDRIDAATLARLGRLDPELLRPIRHRGAGAQAALAQLRARDALVRVRTVLINHVRGAVKAMGERLPASSAVAFARTAGPAVPLALQPALTPLLPMIETLTNQIRAVDRELETLALTRYPETARLRQVSGVGLLIALAFVLTVEDPGRFAKSREIGPYLGLCPRQADSGRSQPQLRISKRGDALLRRLLVNGAQYILGPFGPECTLRRKGLALAAHGGKNAKKRAVVATARRLAVLLHRLWVSGAAYEPDRQAA

SEQ ID NO: 91992 - protein, 412 aa, unidentified
MTAINLFAAHIGLDWADKKHDVCVQFNNGERVFHVIEHTPEALDTWLKTLHKKVKGKIAVAIELKKGPVVFALQKYPFITVFPVHALSLARYRQTFWPSGAKDDPQDAELALELMLRYPKKIKAIEPDNADIRLLQQLVEQRRQLIEDKRRFVNRLINTLKQYYPQLLEWFSHRGSLLLCELIIRWPSLQQLKRARRDTIRNFLNAKGGRATALTEQRVASIDNAIPLTTDPSVIEANALMATALATQIKVVSEIIKTYDERIETLFDTLPDAGLFKSLPGMGPCMGPRMLAALGDNRDRFNSAEEIQNYAGIAPVTERSGQKSWVHWRWQCAKFVRQTFVEWAAKTVNSSYWAKLYYQSLREKGKSHQSALRALAFKWIRIIYSCWKNRTCYDEAKYLLALKERSSPLLKP

SEQ ID NO: 91993 - protein, 377 aa, unidentified
MKRILRIGMDVHSTNYTLCAMEPILCGDDIIYANIQVTPDYKNILLFINDLKVKLGLNDDYDIQCGYEAGCLGYSLYNQLTRAGVKCVILAPTTMLTPQGKRIKTDARDAKMIAQCLCYGGYHAVYIPTEKDDSVKEYLRMRDDHKTALKKIKQQINAFCLRHGYHYPKTKWTQSHWKWLRDLELCELYRETLNEYMCSYEEQEAKIERFDKRIEEIAEQECYNEKVKRLGCFLGIKTHTALSLIVETGDFERFAKGNTYAAFLGLAPGESSSGEHVNRTGISKAGNSHLRLLLVEAAGGICKGAVGHKSKELRSRQSGNTAEVIAYADKANTRLRSRYYKFIRHGKKRNVAVAAVARELACFVWGMMTDNIEKKAV

SEQ ID NO: 91994 - protein, 315 aa, unidentified
MKPALAQNVGVDIAKDTLDVAILPAGESFRLANDPGGHRALIKRLGRFEISRIVFEATGAYHRLFERALAEAGLPFVKVNPRRARRFAEATGKLAKTDRCDALMLARMGAALELEPCLPASKIAQSMKELVSARDALVKDRVAALNRKAVALDPLIKRQLAQRLRQIDRQIQAIDNRLRTLRGSDPDLTLRVDILTSIPGFAEPTANTLVVEAPELGRLDNSQAGSLVGLAPIASDSGQTNRRRSIRGGRPRARRALYMPALSAIRFNPEFKAKYQAMITAGKPPKVAIVAIMRKLFILANALIRDQRKWTPAAP

SEQ ID NO: 91995 - protein, 368 aa, unidentified
MNEYKLKAAPTAVSKEQNSQKNPKANRILIGVDAHLKSYEAARKIDNGAVGVAQSFRSKEAFLLYVEKQREQAEEVAVVYEAGPLGYTLYRELKASDIECLVCAPRSGEQKRKRRKNNSIDARTLSSDLFNYLNGNEQALQAVRVPSEAQEQARVESRQHDALVEERKRIGAMGNSLLLSQGYGSWSNWWRPKAFERLSKGVAPWIVKHLGRWVGILRELDQQIQQAKAELTQHYQGPRPKGMGAPSLAQLNAEVLDWTLYSSRRKIGCLAGMVPSEWSTGEGQRLGAITKVGVPAIRRIITEMVWRMILFQPEYKPVQKWREVLEGPNRGLKKKAVVAIGRQLIVDIWRLQTGRITAQELGLIMIEA

SEQ ID NO: 91996 - protein, 485 aa, unidentified
MAKRKMSTFERLQHGKLNRNQRRELGRRLNSEDSGLQVVHPDAAGIDIGNESHFVAIPPDRDPTPIREFGSWTADLHQMANWLKEHGITTVALQSTGVYWIPVLEVLEQAGLEVYLVNARGTKNLPGRKTDVQECDWIRKLHTYGLLRNSFRPPEEIRSVRTIWRQRDRLVQEAARAVQHMQKALTTMNVQLANAISDISGTTGQAIIRAIVAGKRDPWELAELRDRRIFATKEEIAHSLQGHWREDVIFELRQAVESYDFFQKQMSACDQELIKYMAAIESREITPKQDPPKDASTLSSVKPARRSKTRRKNQPGFDLATELERTMGADLTRIDGIDVITAQVIFSEIGSDFSAFPDENHFASWLTLAPKRDISGGKVIRNIPAAGRNRVANALRMAAESLSRSNSYLGARYRRLRARLDGPVAVKAMARYLACLVYRIVTKGQAYVDRGAAHYEKKRQEREHVALQLRAANLGFKLVPAAQTK

SEQ ID NO: 91997 - protein, 336 aa, unidentified
MSRFVGIDLHRRRSVVVILEEDGTKVSSRRIDNSPMALAAAVAEAGPCPEVVLEATWGWYWAADVLSEAGAGVHLAHPLGVKGFENRRVKNDDKDATLLADLLRMGSLPESWIAPRPLREQRELVRYRHKLSQLRTGLKSQVHSVLGKEGVVPSLTTLWGPRGARFLDETPLGEAYGYRIDSLRALIGRYEREITELDGRIHLELRADAGYRAIQQLSGVGRVFAGVFVAEIGDVSRFPNPKRLCSWVGLTPRHRESDDKVFRGSITKQGSPLVRWAAVEAVSRWRGGAPIRDSYQRIAERRGANIARVAAARKLITLVYYGMRDGEIRCLAQEAA

SEQ ID NO: 91998 - protein, 400 aa, unidentified
MTYDYVIGMDVGKYFHHACVLDIDGTQVLSKRINQNEKSLRALFSTFSAHDHKVLVVVDQPNNIGRLTVAVAQDLGIDVRYLPGLAMRQLSRIHAGNAKTDIRDAYIIAHAAKNLPESLRSVDRVEEAFLQLKVLNGIDEDLARSYTRLINQIRSALVGCYPQFEQALRGQIIHRKWVLHLLARYGGPTKIKRLGKAKAAAFARRYKARNPEPVLDAIFAAISEQTVAIAGAHYAEMGVAMSAKDALLKLEHRKQIEQEVIELINDIPHTQILLSMPGIGPKTAAQILMTAGDMSDFPSVGHLASYAGLSPRTNQSGTSIMSNSLNRAGNKKLKNALWQSSFASIRFHERSRQFYERKRREGKRHNAAVVALARRRLNVLLSDASFWYRCSGDSVLSCSG

SEQ ID NO: 91999 - protein, 341 aa, unidentified
MKLIRVGVDLAKNVFQVHGVDRSEKAVWRRKLVRADWIKALLAQIDPGCEIGMEACGGAHHWARLLQAQGYSAKLIAPQFVKPYVKSNKNDANDAEAICEAMSRPSMRFVTVKTVEQQDIQAVHRVRASLVDQRKAKANQIRGLTSEYGLIAPKELLYLRASIPRWLEDQDNGLSERFRRLLRGLWQDLLAIDERVEDLDREIEQIARQDPVAVRLQQLRGIGPVTATALLATVGDASQFANGRQMAASFGLTPKQNSSGGKERLLGISKRGDAYLRSLLVHGARAVIRTAQTKTDRLSLWVMRIATTRHPNIAAVALANKTARIAWAMMSRGTNYHPESA

SEQ ID NO: 92000 - protein, 350 aa, unidentified
MLIIGCDYHPGLQQIASVDTDTGELSEARLGHRQQAEQFYRELKQRGIVVRVGMESSGHSRWFERLLHELGFELWIGDPAEVQSRRVRKQKTDRQDAQLLLRLMIEDRFPRIWIPDAANRDMRQLLWHRHRLVQMRTRVMNQLHVVALNEGLRRKKALWRPAGRAELEAIVLAPWAAHRRQDLLDLLDQLTPKIQELTHALEEQVEKRAVTRRLMTHPGVGPLTALAYELVIGTPERFHCGKQIASYVGLVPAEKSSGDRRRLGHISKQGNALLRFLLVEAAQVTVRTQPQWRSKFFHLAMRRGRKIAKVAMARKLAVRLYWMMRQGWDYQQWSKFGSHAGQPGHRHGVQ

SEQ ID NO: 92001 - protein, 351 aa, unidentified
MIIIGCDFHTRFQKIAMVDTETGEITKRRLEHGNGDARAFYAALPGPARVGMEATMNAQWFERLLQEYHHELWVGDAAQIRAAAVRKQKTDDRDALHILDLLMRDKFPRIWIPSPENRDLRQMLRHRHKLVRIRTSVQNQLHALAMSQGLCRKAKLWTKAGREELERLQLDPWASRRRQELLQLFDQLNPQIDKLDKVVIQEAERRPAAVQLMTQQGVGPVTALAFVLTIGPVERFPTSKKLVSYLGLNPSENSSGGRQRLGAISKQGNSLMRHLLSEAAQTAVKFDPELRRDYLRLKFRRGISGVAIVAIARKLAVRLYWKLREAAQPNTAARMQGSPTSPMVEESPSRI

SEQ ID NO: 92002 - protein, 404 aa, unidentified
MWYVGLDWADTHHDVEVQDEAGKRIGARRFAHSHEGLHELQAFLLGIAASPEELACIVETNHGLLIAFLLEAGIPVYPVNPKTTHRLRKAAGAKTDRIDAHLLAKTGRFDLAELRRMAPDSPSVAELKTLTRDQDALIQTQTRLVNQLTACLKEYYPAALQLFAKLQQRSTLLFLQAYPTPQAALAASVEEITATLRAGKHTNPRRVAPKIVEELHRPQLVASEVIVRAKSRLMLSLVKQLLVVIQEIESYDKAIRPLFLSHPDQELWRSLPRAGKRLAPRMLAEWGDDRSRYVDANSVQQLSGTAPVPYESGNYAKAHKRFACSKPLRNALHQFAWQSTRQEAWARDYYQRKRAQGKTHSMALRALANVWVRIIYAMWVNKTSYQTTTFEAAQRAHAPRQRVA

SEQ ID NO: 92003 - protein, 360 aa, unidentified
MAKARSLVGLDVHATKIVAAVLDAETGQLQTFQMTGETAPAAGFCAALPRPVRVAYEAGPTGYGLARELARRGVDCVIAAPSKIPRASGDRVKTDRRDAEHLVRLLLAGKLYPVRVPGPEEEALRDLVRARESVRMDLMRCRHRLSKLLLRHGIRFDDGHAWTDRHRHWLASVVLDWPAAQTTLLDVRGAIDALALRRDQLEREIVAILPSSPWTVQAGRLRCLRGIDTLSAVGLCAEIGDFERFARAEQLMSYIGLVPSEATTGQQRRLGSITKTGSAHARRLLIEAAWHYRPRPNLAKTLLERQDGQPQAAVAVSWKAQLRLHRTWTRLEARAKRRTLIAVAAARELAGFCWAITQIE

SEQ ID NO: 92004 - protein, 402 aa, unidentified
MNAVGIDVSKGKSMIAVMRPFGEVVASPFEVQHTDSELSELAKLLKSLNGETRVVMEYTGNYHTPIARALSGADLYVSAVNAMLVHDYGNNSLRRAKTDKKDALKLANYALDHWLSLPRYVPEKDTRLMLKNSYRQYEQYSKLRTMLKNNLISLLDQVFPAVNRLFNSPRRVDGSEKWVDFVGAFWHCECISTLSEKVFVGRYLKWCRKHGYNFSESKAQEIHAVASGCIGVMPKSEATKLLIEQAVTQLRTISFALTTIQNQMNALAMSLPEHDVVMQMFGVGPALGPQLMAEIGDVRRFHSKKALVAFAGIDAPPFQSGQLNVKSRSISKRGSSSLRRTLFLVMSVILQNSPLDEPVYQFMDKKRAEGKPYRVYMMASSNKFLRTYYAKVKEHLELLETV

SEQ ID NO: 92005 - protein, 352 aa, unidentified
MKYALEQESILGVDTHLDVHVAAVINQFGQLLGTQSVSTNTAGYLQLFQWASAFGALKRAGVEGTGTYGAGLCRFLCDKGIMVLEVNRPNRASRRLNGKSDSLDAENAARSVLSGVSKAIPKQQSGACEAMRIVSVARRSAVKAKTQSINQLRAMLVSAPQSVREELWKAKASDCAKACAMIASLGDTVVLKALSKTLKSLAKRWLALSEEPKDYDQQLETLTQEHAQQLRSRFGVGPQTAATLLTVAGDNPNRLKNEAALASLCGVNPLPASSGKTTRHRLNRGGSRTANNALWTIAMVRMRSDPRTKIYVERRTHEGLSTKEIHRCLKRYIVRELFPLIMGDLGALAGVP

SEQ ID NO: 92006 - protein, 418 aa, unidentified
MGRLIERCAGIDIGKRFLLCCVLTGAAHEEPHSETRRFDTTVASLERLRAWLNDEHVTDVVMESTGSYWIPVFNLLEGRVTVVLANPQEVKNRRGHKTDRKDAEHLADLLRHNHVRSSYIPVEPVRQLRDLTRRRVQLTQDATRERNRVQKLLEQANVKIASVLTDVFGVSGLQMLLALLEGQTSPAEIAQLARGTAKRKIPQLIEAIEGNRMSDHMRFVIRSCVRHLACLEEEVEELDREILNRMQLPIFQNAFTLLQTIPGVGQLSAATILAETGPELDSFPTAEQMASWSGLCPGNRESAGIQKGSQTTHGNCYLRTTLVQCAWAATRKQDSVFRGRFQRLAPRRGEKRAIIAVAHLMLIILYCMLKQGVPFRGAESAPKQRRRERRAHHHLQCLRRLGLTVEIALASEFTEQAT

SEQ ID NO: 92007 - protein, 465 aa, unidentified
MKRHRRRPSPKPRTSPDALERLHPHAAGIDCGSAEHFVAVPPDRDATPIRSFATFTGDLHRLADWLTACRVTHVAMEATGVYWIPIYEILEIRGFQVILVNARHTKNLPGRKSDVSDCEWLRDLHILGLLRGSFRPVDGMVALRGYLRHRGTLIECAGALVQRMQKALVQMNVQLPLVVSDITGVTGLRILRDIVAGRRDPQQLAQHRDYRCRASEAEIVAALTGNYRAEHVFVLQQNLELFDTYQQQIAACDRAVEAHLQTLATQAARATLPLPPERPRQKPRGNEPRFDVRTPLHQLTGVDLSQLDGIGPYNALRLLSEVGTDMTRWPTDKHFTSWMTLAPQNKVSGGRLLSSRTQPSANRAAAILRLAAMNLGRTQTALGAFYRRLAFRVGKAKAITATARKLAILVYHTLKGDLVYQDPGAEAYEARDRARTIRRLRQRADHLGFALVDLKTGELAEGAVS

SEQ ID NO: 92008 - protein, 462 aa, unidentified
MTIPRNKGHRTPEIPSATPLPAIRPRVAGLDVGSSAHWVCGPGRADRTPNVRVFGTTTDQLQALADWLAEHGVESLAMESTSVYWIPIYELLESRGIEVVLVNARQLHNVPGRKTDVSDCQWLQLLHSCGLLRGSFRPGEVITRLRALQRQLANLVAERTRCVQWMQKALDHMNVQVHRAVTDLTGVTGLAIVRAIVGGERDPARLALHRDRRCGKSAAEIARYLTGTWRDEHLFNLASALRLFDALETEIAAYEAQLLTEVAALHPPERQADPVPPHPNPAKEKAIKARGEQAARTTLWRFAGVDLTRVDGISAGAAQVVLTEVGPNLTAFPSEDHFVSWLRLCPRTPISGGKPLKKRRNGLGANRIAGVLRMAATSLQRSKTALGASFRRIARHKGGAVAVFATARQLARLIYRMLRYGHDYVDIGEQAYDHRFQTRRLAALTETARTLGYTLVPKLAAG

SEQ ID NO: 92009 - protein, 413 aa, unidentified
MLRVIHERCAGLDVHKKTVVACVLVDKPDGQVHREVRTFGTTTGEILCLAQWLKDQGVTSVAMESTGVYWIPIYNLLEGRFELRVVNAAHLKAVPGRKTDVNDAEWIAQLHRHGLLKGSFIPPKPQRQLRELVRHRTNVVERRSQSVNELQKVLETANIKLASVVSEITGVSALEMVRGLIQGEAGPAGLAELARGRLRDKKPQLVAALEGRMEKHHRFILSQLLADISFCEEQILELDLEIQIQMKDYEEVLQRLDEIPGVNRRIAQVIVAELGTDLSRFGDAAHAVSWAGMCPGNHQSGGKRRCARARDGNKSLKRVLVEAAHAAGRKKDSYFSAQYRRLAARRGKKRAKVAVGRSILETAFHLIERKTHYQDLGGDYFDRRDPEKLAQRLAERMRKLGYKVSYELVPAEA

SEQ ID NO: 92010 - protein, 347 aa, unidentified
MGKSITDLSSVTTVGLDLAKHVFQVHGVDASGRVIVVKALRRKDVLAFFAQLPECLVGMEACGSAHHWARELIKLGHDARMMPPAYVKPYVRRQKNDAADAAGICEAVTRPSMRFVGVRTLENQAALMHHKLREMLVAQRTQLINALRGHLAEIGVIAAQGLKNARELAWVILAEGDETIPACVRAALAPLVRQLHALDQELARSDQTIAAMARDDEMARRLMTIPGLGPVTASAMATSVQDVSVFSGPREFAAFLGLTPRQNSSGGKERLGRVSKMGNRYLRKLLVVGAHAVLYHRKPHDDALRSWAKKLMQTKPFKLVAVALANKMARIAFAIMLGKTSYSAAPA

SEQ ID NO: 92011 - protein, 339 aa, unidentified
MLIIGCDYHPSMQQIAWVDKETGECGERRLLHRAEAESFYRDLKGKQVRVGIEATGHSRWFERMLAELNFELWIGDPAEIRAKRVRKQRNDGFDAQHILKLMVEGTFPRIWVPTAENRDLGQLVWHRHRLVGMRTRVMNQLQAVAMNEGIRRKKRLWSEKGRQELESLSLMPWTTRRRQELLDLLDRLDPNVDQLSQAIEQEAERMPEVKLLMTHPGVGPITALAFVLVLGTAERFGCGKQVASYLGLIPCEESSSERWRLGHITKQGNKLLRFLLGQSAQSAARCEEQWPRQYAHLSMRRNKLIAQVALARKLAVRLYWMWRNGWDYQQLKKFGSYVG

SEQ ID NO: 92012 - protein, 375 aa, unidentified
MSKANTLFIGLDVHKETTDVAWVSDKSAEIVHYHGTIPTNLRSFDKLIKNQTAKTSKICVIYEAGPCGFWLYRHLLRRGIECWVVAPALIPKAPGDRVKTDKRDAMTLARLARSGDLHSIYVPDERDEAIRDLIRCREDAMLDLRQARQRLKSFLLRHGHPCTGRQNWTEAYRRHLADISFPQSATKITFQHYIHIVTERYERLQRLELELQSLAESWRWYPLVQRLTVLRGVRFLSAMTLLAELGDLRRFASPRSLMNFVGLTPSEHSSGQRERRGGITKCGNSHARRILIESAWAYRFPARVSRELESRQQEHSIKLQTRSWEIQQRLCRRFHALKARGKEYNKVVTAVARELTGYIWDLAQGFDADMPQQAY

SEQ ID NO: 92013 - protein, 346 aa, unidentified
MEHYVGLDVSLKLTAICIVDRTGKIEREGVVTSDPETIAAFVKSHAPHVARIGLEAGATSTWLWTELDKMGLPVICIDARHAKAALKMQINKSDRNDAVGIARIMQCGWYKEVRVKDLDSHAIKALLVSRALLVKIKRDIENQIRGLLKNLGLVIGRAKMNVFAVRAAELADARPAVAAAVEPLLKAREAVGRQIADLDRKVLRLARNNAQVRRFITVPGVGPITALCFFATIDDPTRFKRSRSVGAYAGLTTRRYASGEIDWTGRISKCGDKMLRTYLYEAANVLLTRIEKWSALKAWGIRLAKRSGLRKAKIAVARKLAVILHRMWIEGTEFKWSSKEAANRPA

SEQ ID NO: 92014 - protein, 460 aa, unidentified
MSQKRKKQKRAGQGGGAVPSLSCIEPNAAGIDVGATEIFVAVPQDRDPSPVRSFETFTEDLHRLKSWLQQCGITTVAMESTGVYWIPLFQILEKAGMEVCLVNAQHVKHVPGRKSDVIDCQWLQYLHSVGLLRASFRPEERICAIRSLLRHRDSLVQMAAAHVQHMQKALTQMNLQLHHVLSDITGQSGLAILDAILAGERNPAVLAQLRHARVQASEEVITKSLVGDYQREHLFTLRQSLQAYRYYQSLLTACDQEIEEQLQNLDSRMPPDASPLPPERYPHRPRKNEFRFDMRSELYRIYGTDLTAIPSINALTGYTVLAEVGTDWSKFRNGDAFASWTCLCPQNKKSGGKILSAHTRRSANRVNRALRLAAQTLERSTSYLGAYYRKMRARHGAPAAITAAAHKLARIIFHLVTTGEAYDESLFAAEEQRQRKRMENKLKRSAQQLGYQLIPLGQTA

SEQ ID NO: 92015 - protein, 420 aa, unidentified
MEIVVERCAGLDVHKDSVVACVRVPGPSGERETKVATFATFTEDLLALRDWLVSLGITRVGMEATGVYWKPVLYLLEGEFDCWLLNARHMRNVPGRKTDVGDAQWICQLTEHGLVRASFIPPPQIREIRELTRYRRSVVEDRSREAQRLDKVLQDAGIKLSSVASDILGASGRSMLVALVSGTEDPAVLADLAKGQLRKKLPQLRSALEGRFGPTHAILVAEIMSQLDYSDEAISRLSDAIDERIAPFADARDRMCTIPGVDRRIDEAIIGEIGVDMTKFATPGHLASWAGMCPGQHESAGKSKKGTARKGDSWLQRHLAVAAMAAARTKGTYLASQYHRLAARRGKMRARKAVGHTILVAVWYILSDSETTFVDLGPDWFDRRNSPELRARRKLSELRALGCLVTPNGDGSTTIILPAA

SEQ ID NO: 92016 - protein, 415 aa, unidentified
MNSFCGIDWAEGHHDIAIVDGEGKLVAKKRISDDSAGFTVLTEMLAAAGDSFDDAIPIAIETPRGLLVAALRATGRPVFAINPLAVARYRERHSVAGAKSDHADAMTLANILRVDSHLHRRMPADSELVQAIAVLARAQQDAVWRRSKASNELRSMLREYYPAFLDTFAGKSATNLAKPEARAVLAIAPTPAHAAKLIKTRVAAALRRAGRKRGIDGLAVNILEHLQAPQLRQPELVEKAMGRQALALLAMLDAACTGADELAQTAAEEFRKHPDYAVITSFPGLADLTGARVLAEIGDDRDRFADDRALKAYAGSAPITRASGKVTSITHRRIKNDRLAAVGWVWATYAYINPGPAQDHYRRRRDHGDRHAAALRHLFNKMLGQLHHCLQTRQTFDPIKAFGQPRTAPREPAAA

SEQ ID NO: 92017 - protein, 349 aa, unidentified
MKNKEIIKQVVGVDIGMESFYVCYKIQYADESLVIKGTKSFTNDASGMIDFFTWTERRNKSPEISIIFVMEATGVYYEELAYFLHSKKLKVSVQLAQKIKYFAKSCNLKTKNDKVDSKMIAEFGMEKNLTGTDFWTPPSKNFKMIRDLSREHTSLKQSIVGIKSQLHALNFAHETNKEVVKMKKQQIAFYEKQIISVEKAMRKLVKADSKLSDKIDKIETIKGLAFVSIIKVISEANGFLLFNNIRQLVSYAGLDIIEKESGKFTGRTKISKKGNAQIRAALYMPAMSAMQYNKTLKTFYDRVNQGRTIKKQGVIAVMRKLLILIYTLWKKDEEYIEDYQQKITEKKAA

SEQ ID NO: 92018 - protein, 338 aa, unidentified
MKITTIGLDIAKQVFQIHAADADGRIVMRKRLRRNQLAAFFANLPPCVVGLEACCGSHYWVRVLSRSGHRVQLIAPQFVKPYVKSNKNDANDAEAICEAVSRPQMRFVAAKSVEQQDIQSLHRVRSRLISSRTQLGNQIRGLLMEYGIVFPEHLSQVRRGLPLVLEDAGNELTALSRRLFASLHEELLSLEEKIAVLDEQIRIVHRASEPCQRIAAVEGIGPLTATALVAAISDGKAFKNGRQFAAWLGLVPKQHSSGGKSRLLGISKRGDAYLRTLLIHGARSVVYRASRKTDQRSLWIADKQRKLGTSKACVAVANKNARIVWSLIAHEVPYRRAA

SEQ ID NO: 92019 - protein, 368 aa, unidentified
MDKSSKLYVGMDVHKDSIDVATGDDAAGEVRHYGAIGGDMAAVSRLCRKLESTGKVLVFVYEAGPCGFGIYRMLRGRGHECWVVSPGMTPRSNADRVKTDRRDCLKLARLARAGELTPIHVPDETDEAMRDLVRSREDAVVMQRQARQRLGALLLRNDVRYNGKTAWSPAHRRWIAELKLPHVAQHIAFEEYAQGVDEAGKRIERLEAAIHDELGRWRWRPVVAALEAFRGIRTIHAVRLVAELGDLTRFAAARHLMGYLGLVPSENSTGNRRRQGAITKTGNSSARRALVEAAWAYRYGARVSVGIARRQSGLPKPVTDLAWKAQLRLCSRYRRLSARGLNRNKIIVAVARELSGFVWALGRQVKPL

SEQ ID NO: 92020 - protein, 410 aa, unidentified
MSHTIAGIDVHKKLLVAVIADSAQPDVVLQSRRFGAGSAELNHLAAWLEQHGVVEVVMESTAQYWKPVWMALEPHLRLHLAQAQSNKAPQGRKSDTADAKRLVRRFAAGELMLSFIPEPEQRGWRSVTRGRLQLIRERVQLQNQIESLLEEGRIQLSSVISDLLGASGRRILRAMAKGETNPESLAVLGDKTLRCTLPVLVDALTGSRGDVHRRLLDQQLDRIELIDKQIQELDQLAAELMGKYQNTITRLVAIPGIGAEAAQEILSEIGPEAAAFPSSEQLASWIGVCPGSQESAGENHSGRCAKGNRFLRRLLCQAAQAAARTKDSHLQSIFQRLVVRLGYVKAIWAVAHRICKIVWNILRKGASFIEFSETRSPKAIRRAITHHLKALRRLGYQIPPLPAIAVEAQR

SEQ ID NO: 92021 - protein, 412 aa, unidentified
MMTDRIAGIDVHKRVLMVAVGSSGEVESDPIRFQQRRFGATSSEMLHLTAWLQQQGVQAVVMESTAQYWKPVWLALEAHFRLSLAQAWSNRAPRGKKADFKDAQRLVRRFVAGELTLSFVPEPAQRLVRSLTRRRSQLTRDRVRIQNQVESLLEETRLKLSSVVSDLFGASGLRILEALARGESDPAKLAALADPRVQRSPEELADALTGAVGQIHQQLLQQHLAMLALVEAQREQLLALTAEALREHGEAVTRLARIPGIRVLSAQQIVAEAGPRAATFASAAQFSSWTGVCPGREESAGENHSSRCAKGNIYLRTALCQAAQAAVRTKNSFFQQKFRRLLPRLGYAKAVWAIARHLSVVIWHVLHEGAEYTERGLATTPQAIRRRLQRLKKELRQLGYSDQLIPLPLVAP

SEQ ID NO: 92022 - protein, 354 aa, unidentified
MGLKHQKEKRSMDYFGGLDVSVKDTSICIVDDTGGIVREVKVASEPEALLAVLVSPLYRFKRIGLEAGPLSQWLFSALVEAGLPAICVETRHMRAVLKAQINKTDRNDARGMAQMMRVGLYRPVHVKTLRSQKLRMLLTHRKLLQSKAIAIENDLRATLRNFGLKVGVVGTVRFEARIRELVENHPDLTLLVEPLLVVRGVLREQLDILHRRLLAVVRDDNVCRRLMTVPGVGPVVALTYRATVDVPARFRKSKSVGAVFGLTCSRDQSGERDRRGAISRCGDEMMRAMLYEAAQSMLRSKKWSWLKAWAMKIARHRGMKRAIVALARRLAVIMHRIWVDGTEFRWTREVAAAA

SEQ ID NO: 92023 - protein, 369 aa, unidentified
MPQCNDLSRSLVPFRQDGTLVAVVELSRSSWLVAGLVPGLERHPLKKLDPSEEALLALLRRWRDEAAGAGRVVTRVAVAFEAGRDGFWLARWLQAHGVEAHVIHPTSVAVSREHRRAKTDRLDTGLLKRAFLGWLRGEPGHCSMAAVPTLEEEDAKRPSREREGLVGERTRIVNRMRGALARLGVRGFKPGLRGAPERLEALRTPEGAPLPPNTLAELRRDMARLRLVREQIAEVEAARLERLRQAPAEDRPHAMVRLLARVVGVGVETADMLVREVLSRELRDRKALARYAGLTGSPDESGARRREKGLARVGNARVRGGMLQLAWRFLFFQKESALARWYRARTADARGGTRKAMIAALARKLLIAL

SEQ ID NO: 92024 - protein, 407 aa, unidentified
MTACVRTPGEGGRREQVVREFKATVRGLLGLRDWLAELGVTTVAMEATGVYWRPVWAVLEDEFELLLCNAAHVKNVPGRKTDVGDAVWLCQLLEFGLLRASFVPPKAVRELRELTRRRRTLVRERAQEANRLHKTLQDTGIKLDCVASDILGVSGRLMLDALIAGQRDPAVLADLAKGRLRVKIADLQEAMEGCRFSAQHALLIGGILRHIDFLDAEITALGDAIEAHMSADREREDSERPFELAVQVACSLDGIQARTAQMLIGEFGTDMSRFPTDAHFASWAAQCPGNHQSAGKRRSGRSRKGPKWLDGALHDAAMGAIRVKDGHFARKYRRIKARSGHKVAIGAVKHAIVIALYHMLKNGEMYRPPTPHPDAERKQRERTTKRLIAQLERLGHSVTLQEGAAAI

SEQ ID NO: 92025 - protein, 346 aa, unidentified
MAKTNTIGVDLAKNVIQVSVLSGYGKELQNKEMTRIKFAEFLAKQKPSLVAYESCATAHYWSRYARQYGHQTKIIPAKAVTPFRQGHKTDKNDALAIAEAANRPNIKEAPMKSVEQQGFQSIQRSRELLIHDKTALSNHIWGILMEFGVFIPKGWAYLTRHVPLALEDAENDIPDLYRPTLHRMFERFRTLSEDIEFLDQQIKHLVKQGEACTELMNLEGVGPIGAILLFASFGTGQAFRNGREFSAYIGLTPKQFSSGGKTNIIGISRHVANRRLRAVLIQGARAHIYKAKYKDTAKQRWLSSLIERSGHNRAAIALANKNVRTAWAMLTNGTAYESQRAQSVAA

SEQ ID NO: 92026 - protein, 367 aa, unidentified
MKKHTAMAVGLTDDRKCERLTIGLDLGDKSSCYCVLDEAGDVLLEQKVSTAPKAMRDVFGSMPRCRIALETGAHLPWVSRLLSELGHEAIVAHARNVRLIGESKRKDDRLDAFTLARLVRIDPQLLCPVKHRSAEAQADLIVIRARAALVRNRTTLVNAARGLTKSYGENLGRGNARSMKPKAAHDLSPELKNALGPLMREIESVSERIRDYDELLESMAQNKYPEAERLKQIKGVGTLIALTYMLTLEDPRRFRKSRDAACYVGLQPGRRNSGQSEPQMRISKEGDPYLRALLVQAAHHILGPWGVDSDLRRWGMKLAEHGGKRGKKRATIAVARKLAVLLHRLWVSGDVYVPLRRIGQAAVPAVA

SEQ ID NO: 92027 - protein, 409 aa, unidentified
MLFVGVDWAEAQHAACLMDPGGTVVRRLMIPHSTVGLARLRQAIAAAEAEPTAVLVAVERPDGLLVETLLDVGYVGYALNPKAVDRYRERTRGAGGKTDPADAELLARILVTDRNRQPPLRPSSPVVEEVRALARQDERASRDQTRLLNRLRHDLLEVFPAALDAFPELKAVSALAFLERWPTAAAARDPSQSEIEAFLRHQSHGQARAAAGRIHAALQSDALTASPHLAAARAGAIQLAVRQLLLLHRQRAAWQQRLRELLDGDGAHPDGEILLSLPGLDARLAARVLGEIGDRRERFPTPAALQSYAGTAPVTRASGRSRVVVARSACNRFLRQALLRWAFCSLTRSAWARTHYDEHRRGGKTHFSALRSLANRWLGVLHHLLAAGQHYDEAVHQRNRTHASADTAA

SEQ ID NO: 92028 - protein, 427 aa, unidentified
MKYTQNEKIMQITENTLIIGVDIASDVHYARAFDYRGIELDKVIKFNNDIQGFKVFSDWITKIATNNHKQHVMVGMEPTGHYWFTFAQYLEENNIKIVLVNPYHVKTTKELDDNSPTKNERKDPKTIAMLMKDGRYMEPYIPKGIYSELRNATNTRWQLVKKLNSIKNQVKRWIKIYFPEFNNVFADWEGKAALIILKHFPTPEKITKLDAPEIIATWRKEISRAVGIKRATKLIKAAKASVGIKEGLIAAENELHILLEEYELLMKQHQNTMNLIEKLTMQIPGVKEILKIKGVGLKTLSGFIAEVGDIERFDHPKKVQKLAGLNLKENSSGKHKGQTTITKRGRKRLRSILFSTIMPIVAKNKEFQQLHKYYTTRKENPLKKKQSLIVLCCKLIRVFFVILKTGVKYDPVKMMNDIKRPTLQEVA

SEQ ID NO: 92029 - protein, 296 aa, unidentified
MRIIGCDLHARQQTLAMFDTASGEVVNRTLLHEGSEVREFYSQLAHPVLVGIEAIGPMQWFLDLLQELGIECLVVRAAEPRKQKHDRRDAELILKLLVEKRFPAIWLPSKELLDLRALLLHRHQWVRLRTRIQNALQAIALANGLRRGPRLWSYDRQAKITFLPLPPHAWYRRSALQTMYRRMQEEIENLTEQIAEQARQRCGAQLLLTHPGVGPVTALATDVFLGDAQRFADGKALASYVGLIPREYSSGARQRLGAVTKQGNPLLRFLWNEAGAHAARRDPELQRIAANWCRRV

SEQ ID NO: 92030 - protein, 360 aa, unidentified
MLADELDYVVGVDTHRDEHVLAVLAAAAGAVVAGQAVRANARGYRETLRFAERHAAGRRAWAIEGTGSYGAGLARFLAGRGETVLEVSRTPRAERRLRGKDDALDAARTARAALGSDTLALPRIGERREALRLLLVARRSAVDVRREALAQLRGVIVTAPDRLREELRGLPTGKLLQRCSRLRRTSAATVDELATRLVLRSLAHRIEAATLEADELERELLGHVRALAPALLEEPGVGPIVAAQLIVAWSHRGRLRSEACFARLAGVAPIPASSGQTTRHRLSRGGDRQLNRALHTIALHRRQHDQATQDYIAKRVAEEEPPRRHTAPQALPRPPPLPATTTGAADDLTSHRSIIPEAGP

SEQ ID NO: 92031 - protein, 330 aa, unidentified
MAHIGVDVSKNKLDCMWVRDLEAGKVKPKVFPNRQDQYRELLHWLERNTGETPEGLHVYLEATGIYHEPLAYWLHDQGVQVHVLNPAQVRSHAKGMGVRNKTDRKDSMMLARYGIERAPRRWQPEPPEVRELKRLLSRLEALEQDMRREENRLEKARFSEDTLAQASIDNVLQALREEHRRLQQQIDDHFDAHHHLKRDRTLLESIPGIGRVLSASMTAALRSRAFTSARQAAAFHGLAPVLEESGTTVRRPSRLAKIGSSRLRKALYMAAVVATRYNPDVRHQHQRLLTRGKAKMSAIGAAMRKLLHIAFGVLKSQTPYQARHETPCTP

SEQ ID NO: 92032 - protein, 440 aa, unidentified
MLSIGIDVSKGKSTVCGMKPGGEIVYTPFEIQHTREGMSELVSLLRSSGEEVRAVLESTGSYHCPVVAALLENGIFVSVVNSLRMKRFCSQSIRKVKTDRIDAMQIALYGLAYWQELQPTKLPEDTYRELQLLARQYYQMTSLLIKAKVDFNAICDQVLPGMQELMSDHAGRHKLSDFVLRYRHTTHILEMGETRFRKDYCKWAEKKGYRNCERMAALIFATAQNGIPVLPNAPSTQIVITEAIRVLHTVEASRDAILTQMQALAKTLPEYSLVREMPCIGDTLAPGLIAEIGDVRRFHSKRALIAYAGIDAPPYQSGKFCANNRHISKRGNRYLRKTGYEVMQSYVMHKPANDPIFTFIEKKRGEGKSGKLAMVAGLNKFLRIYYGKVTELYRSSSAIESYADSDFPAWRYELRSPMLYLRRPSVPFCRLCFAILFFCR

SEQ ID NO: 92033 - protein, 339 aa, unidentified
MDITTIGFDLAKTVFQVHGADGEGRPVLRRKLRRGKVLAFFAGLPSCLVGMEACASAHYWARELQAVGHKVRLIPPQYVRPFVKTNKNDAADAEAICEAVTRPTMRFASAKSAEQQSVLMLHRARELLVRQRTMLINALRGHCAELGLIVAQGASKVEELVAIIEDPTDVRLPPLAREALGRLVEQLRSAQARIKQLEATLLAWHRSNQASRRLATIPGVGVITATALVATIGDGAQFRSGRQLSAWLGLVPRQHSSGGKDRLGRISKRGDGYIRRLLVHGARTVLRWRRAKPGTRPGWTDQLLARRPTNVVLVAMANKTARVAWALLRYERIYQPTPA

SEQ ID NO: 92034 - protein, 341 aa, unidentified
MSVRRILAKTIDTDLEYEAIGIDLAKNCVSAALLTTDGEVVCIDRLDYSELEKSAQALSPTTFAMEPCTEMNYLVQKLEAWGHRCLVIGGKNVQNYVENHYSGQKTDLNDAQALAFLAQDTQLRTIKAKDIEQQKYASLTTLREQYIKQYRQTIVSLKGICQAWGLNISKGISGKAQLKDLIENHAAFPEELRESLVDMVTHAQTTQKVLNKITKTLEVLAKNDKVCQLIQTIPGLGTICSCRLRATIGDIKRFKNPKDFPAYYGLVPRSIATGHNEKKGKITHRGDRTMRSLMVQGAGCVIRLATCGKLKSKQLTKWILKKQKEKMPWGKLVPCNNNIFA

SEQ ID NO: 92035 - protein, 411 aa, unidentified
MGYIVAGIDIHKKVLMVVVTDASTEDVRFERFRCGTTAGERELLLAWLQKHEVQELVMESTAQYWKPIWMELEPHFGPGKLHLAQAHSNRAPQGRKHDFADAQRLTRRLLAGELILSFVPDAEQRSWRTMTRARVQLIGDRVRLQNQLEALLEEMRIKLSSVVSELLGLSARRILRALADGESDPVRLAELGDFRLKCSQEELADALRGHVAPMHRQLLVLFLERLDLLDHQIHSLERMAAAAMKQYEDAVIRLAGVAGFGAESAQQILAEVGPEARSFDSPDQFASWVGCCPGRSESAEKNRNSRSPKGNRFVRRILTQAAQAAVKKKGSFWQRTFRRWLPKLGYPRAVWAIAHKLCRLVWKVLHEGLHYVEQGDESSPKAKQQKAQKLIRALRRMGFAVQVSPITIMPA

SEQ ID NO: 92036 - protein, 342 aa, unidentified
MSIVTVGIDLAKNVFAVHGVDAAGKPVLVRPSVARDKLLELIASLPPCLIGMEACSGAHHWAREFDKLGHTARLMAPKFVAPYRLSGKRGKNDAADAAAICEAVTRPQMRFVPLKSADQQGQLMVHRARQGFIEQRTATLNRIRGLLSELGIVLPLKAATVRRQALQHLEDLPGWANTVIGDLLSEVSHLDERIAQYDRHIALMARHSTQAQHLMQLAGIGETTATAIVSTVGNGHDFVCGRSFSAWLGLVPGQYSSGGKQRLGRITKAGDAYLRSLLVMGARVVLAAAMNSKAPKQDPLSRWARALAERRGYWRAVVAIAAKNARLCWAVLQRGDNFKIPA

SEQ ID NO: 92037 - protein, 403 aa, unidentified
MNNVAGIDVSKGKSMVSVLRPFGEVVAKPFSIGHTGSELKELADYLKSLDGETRVVMEHTGRYYEPVARFLHDEGVFVSAVNPKLIKDYGNNTLRKVKTDKADSRKIARYGIDNWAELRQHTPMDTIRMQLKTLNRQQSLYAKTKTMMKNNLIALLDQTYPDVNALFDSPVREDGSQKWVDFATTFWHVDCVRAMSLTAFMERYRKWCKRHGYNFSQSRAIEIHMEAQDLIAMLPKDALTKTMIRQAIDALNAVSKSLEQLKAEMRTLAAQLPEYPVVMAMRGVGNSLGPQLMAEIGDVTRFAHRGSITAFAGVDPGADQSGTHEAKSNRTSKSGPPELRRALFLVMDCLLKTMPQNDPVYRFMDKKRAEGKPYLVYMTAGTNKFLRIYYGRIKEYLASLEGN

SEQ ID NO: 92038 - protein, 424 aa, unidentified
MLNLLFQYVKEANLMLKIVHPICCGIDVHKSFVIAIIAITDDKNVTTYHRRRFSTFTSDLKKLKEWLEYYSCTDVCMESTGKYWIPVFNILEEDMNICLAHPKYVKAIKGKKTDKRDAKWIADLFKHDLVASSFIPPLKIRQLRDLFRYRMKITYLKSSEKNRYQNSLTWSNIQIASVVSDVFGKSSQKIIESFLANKNNDFDIVSPMGKNMKSSVEDIKASIEGNITDEQANKLKVIKAHYEALIFCQNELDSLISKLGLEFDQEVKLIQTIPGCSNKLTALRIISEIGVDMSKFPSAGNLCSWAGLVPRNDESAGKKHSTKITKAGRYLKPLLVQIANAVVTSKKYPEHRNKYLQLKKRRGHKKAIIAIARRLLVAAYHILRDSVCYNADLYNIPELKQSKKIMSIKEAIRFAQSQGFTVNI

SEQ ID NO: 92039 - protein, 437 aa, unidentified
MSKLISFDQINPHAAAIDIGAEKVFVSTDGLAVQCYGTFTSDYHILIRDLKQKKIERVCMEATGVYWIALYELLEQAAIEVCLVNPKEVKQVKGRKSDPKDCRWIQKIFSAGLVRQSYVPAGKLKELRMLVREREDIISMGSTYVNKMQKFLELMNIKLTSVLAQIHGASGIRMIEAIIEGQRDPGYLLLLCDERIIKHKSDKVLKALEGNYNQSWIFLLAQNLQMWKTHENQLQVIDKKIEELLAALEEGKKQISSSLPTKLVRHHAPKINGLHQKMVNIYGVQATSLPGINDYTLLRLLGEVGSDMSRFATAKHFVSWCQLAPLLNQSGKMNRRIKVRNGSKAGQIFRTTAQALLNSKQIALGAFIRRIKNKKDSKIAIKAGARKLAEAFYNLLTKGKEYVEKGIKKYESQLKEKEKIFLERLAKKHKLILIPAT

SEQ ID NO: 92040 - protein, 370 aa, unidentified
MAQPTPIFVGLDVHKASIAVAHAQGACADPPVFVGAIGPRQADLTKLIRRLQAKTSNLVFAYEAGPCGYKLHRYLTGQGFSCQVVAPSLIPKKPGDKVKTDRRDAVDLARLLRSGDLTRVYVPTVEDEALRDLCRARDAARLTLKNAKLRLKAFLLRLGLHYVGRADWTDAHRRYLAKVVCPTATQQIVFQESVRAVDEQVDRMHRLEAELLDRAPAWRLYPVVHALQALRGVQFLVAITVVAELGDLTRFDSPRQLAAFVGLVPSEYSTGPSRRLGAITKTGNGRARRALIEGAWAYRHPAKVSEHLQRRIDTLPKSIQDIGWKAQVRLCKRFRRLTARGKHPNVAVTAIARELIAFMWAIAKEVPITT

SEQ ID NO: 92041 - protein, 370 aa, unidentified
MKKHSTTPKSPKQASACKGGPNTIGIDLGDKTSRYCVLGNNGEVLSEGAVATTRKAMAEKFAKMRRCRVAIEVGTHSPWLSRWLSSLGFEVIVANARQVQLISASSRKNDRLDARLLARLARVDPQLLRPIRHRSEPAQADLMGIRVRAALVEARTGLVNAARGFAKAMGERLPACDTDSMGVERMESLPEALRETLKPLLEQVESLTEKIKESDVKIEQIARTQYPETELLRQVSGVGTLIALTFVLTLEDRERFRKSRDVGCYVGLRPKQSESGQSQPQLGISKEGDVYLRKLLVQAAHCILSRRGPDTDLKRWGLKLASRGGKNAKKRAVVAVARKLAVLLHRLWVCGEVYEPLRNSQAAGSSKKAA

SEQ ID NO: 92042 - protein, 413 aa, unidentified
MDVLHPRCCGLDVHKSSISACILLREGRRVQKHQGRFGAMTQELQELAEWLRQFHVTQVAMESSGVYWKPVWNILERQFTVVLANAQHIKNVPGRKTDQKDAEWIAQLLQYGLLRASYVPCEIIRDLRDLTRMRASLFQEASRISSRIQKVLEDANVKLASVATNVLGKSGRAMLEDIITGEDDPERLASLALGHLRVKIPQLRLALAGKIRSHHRFLLRRLLDQIQFVEHEVALLDERLEDIGRQPPDLAQAVARWDTIPEIDRVAAWALLAEIGDNMAQFPTAEHLASWAALCPGNHESAGKRLRGATRQGSPWLCRMACQCAWAAARTKNTYLSSQFRRLAARRGKKRAIIAVAHTPIVIAYHLQKNQSNYDDLGGNYFDRIHSDGLKRYLVKRLEQLGHKVTLQPIEAA

SEQ ID NO: 92043 - protein, 350 aa, unidentified
MNYVGIDVHKRYSVCAAQDEQGRELGVVRIEGNIGSGFAQFLDRLGGPARVAIEACWNWGKIYEVLEELPQVSELVVGNPLKTRLIGEAQIKTDKIDARALATLLRGHFIAQVHVPAKVTRRRKDQLRQRLYWSRLRTRIRNRIHALLDRQHDLALPQCSDLFGVKGLAYLRRLELPEPDGTMLGEDLALFDLLSMQIKAQEKRIAQANAADAMTRRVQSIPGFGPILAALIATEIDKITRFADAEHLCAYAGLVPMTRASGGHTRHGPLLRAANRWLRWAFIEGAWVAIGCSAYFGALYRRNRERGKAANTAITIVARRMCRILFHLLNEQRDYVPDLKSLSPAAPLTD

SEQ ID NO: 92044 - protein, 359 aa, unidentified
MGKPSKGQRKTVGLDLGDRFSQVLVIDAKGRVVEEGRVATREEALRERFSGCSPMLIALETGTHSPWVSRVLEECGHEVLVANSRKLRLIYENPSKDDRVDALYLARLARVEPALLSPVQHRGASVQKDLALLRSRDALVAARTQLINHVRGLVKSVGSRLPACSTRAFPKKVCEQMPEPLKPALLPVLEEIASLNDRIKALERQIQVLAQEGYPQTKLLRQVGGVGPITSLGFVLTLEAPERFRKSRTVGPYLGLVPGRKQSGDSDPERRITRHGDRGLRRLLVNAAHYILGPFGPDCDLRRFGTKLASRGGKNAKKRAIIAVARKLAILLHHLWRSGEVYEPLYQQTHQAGRRGKVA

SEQ ID NO: 92045 - protein, 412 aa, unidentified
MTVTNQFAAHVGLDWADKKHDVCVQFKNGERVFGVIEHTAEALDAWLTELHQKVKGRIAIALELKKGPVVYALQKYPFITVFPVHALSLARYRQAFSPSGAKDDPQDAELALELMLRYPQKIKAIEPDNADIRLLQQLVEQRRQLVEDKRRFVNRIINTLKQYYPQPLEWFSHRGSLLLCELIIRWPSLQQLKRARRDTIRNFLNAKGGRAMALTEQRVASIDNAIPLTTDPSVIEANALMAAALATQIKVVSEIIKTYDERIETLFDTLPDAGLFKSLPGMGPCMGPRMLAALGDNRDRFNSAEEIQNYAGIAPVTERSGQKSWVHWRWQCAKFVRQTFVEWAAKTVNSSYWAKLYYQGLREKGKSHQSAIRALAFKWIRIIYRCWKARTCYDEAKYLLALEARHSPLLKP

SEQ ID NO: 92046 - protein, 402 aa, unidentified
MGWYAGIDWATTAHAACVVDERGRVVGQWRVAHSAAGLQELCERLATVVAPTALAVAVEQAAGVLVDCLRAAGHPVVVIPPAAMHGLRARYRATRRKSDPEDAYILADVLRTDGHRFAVTPPTSEPTRVLRTLTRARRELLRERLRLTNRLRAVLATFWPGVATLFSDLHSPIAVAFLRRYTPHGAARLTAAQLTAFLRRQGYSGKRTGVVLWAQLRAAAPPTGTPGEQAAQARVVASYVTLLAGVQAELDGLHRAIASALGDHPDHALVASFPGAGPVTSAQLLAELGDDRARFPTPERLAAEAGVVPVTARSGKHRDVGFRWACNKRLREAVSWLAAHSRARSPWAAALYQQARARGCRHAHALRIVGRAWLRILWHCWQSGTPYDPARHRAALAIATGG

SEQ ID NO: 92047 - protein, 367 aa, unidentified
MKKVSTAAAKQSRNFSQPRLTIGLDLGDRSSWYCLLDEVGEVLVEQKLSTTPKALKEGFGGMPRSRIALETGMHSPWVSRLLSELGHEVIVAHARNVRLIGESRKKDDRLDAQTLARLARIDPELLYPVKHRSAQAQADLSVIRARAGLVRARTSLVNTARGLTKSYGQRLRSCNVRNLDPEKAEGLSLELRTALEPLLIAMQSLSEQISEYNQRIEKLAQQSYPQVALLKQIKGVGTLIALTFLLTLEDPHRFRKSRDVGGYLGLQPGRRNSGQSQPQMHISKEGDPYLRTLLVQGAQHILGPFGVDCDLRRWGLKLAERGGKSGKKRAIVATARKLAVLLHHLWVSGEVYEPLHNRSRITVAAAA

SEQ ID NO: 92048 - protein, 339 aa, unidentified
MKLYSGIDLHANSNLLAIVDENRKRMMKKKLANDPELILSTLQPYKADLVGIAVESTYNWYWLVDLLMEEGYQVHLANPSAIQKYSGQKHADDTHDAFWLAELLSLGILPEGYIYPKEIRPLRDLLRKRQHLVRLRTSLILSLQNIVTRNCGIKLSANHIKQLTEDRVHPYLQDQEELALVGTVSKESIDFLTRQIRRIESLVTQRIQLQDSYGLLLTLPGVGRILALVIMLETGPVQRFAKVGNYVSYCRKVRSQWFTNEKVKGKGNRKNGNQYLAWAFSEAAEHARRYHPASRTFYNRKLNQKNSPVAHNALAHKLGRAAYYIMRDNVPFEEAKLFA

SEQ ID NO: 92049 - protein, 410 aa, unidentified
MNAINSVGIDVSKGKSMVAILRPMGEVVMLPREYPHTAAGLCQLSADIRSLGEDTRVIMEATGGYHEPVAAALHSDGIFVAVLNPLYIKQSGGGSIRKVKTDKADAMKIAKYGLDNWVDLRDYTPMEEVRQQLKLCSRQYDLYMKTIIGLQENLISLTDKTFPGVNELFTSPERADGHQKWVDFVLTFWHCECISRVSEKAFVERYQKWCKRKGYNFSSEKARSLYANSCGLFTTLPKNANTKLLITTAAQQLLTARTTLTVMKQEMLRLSRQLPEYETVRSMYGVGDITAAQLMAEIGDVRRFPRRSALVGFAGVDPAVNQSGKHEAKSNPTTKRGSPHLRKTLYLIVCAYLKKAPADEPVYQFLDKKRSEGKPFYVYMTAAQNKFLRIYYARVKECMEASNPTAPDQI

SEQ ID NO: 92050 - protein, 350 aa, unidentified
MNVIHYIGFDVHKKSISYCVKLADGKVVEEGKLRAAREVLRQWAAKRQEAWHGAMEATLFSGWIYDTLKPFAAELQMGHPAMMKAIGASKKKSDKLDARKIADLLRCNLLPACYVAPPEIRELRRMLRYRNLVVAQSVRMQNKMSGMLMEVGAEYNKKQLHGKQYFTELLERLDEVPESVKDLLRLSRGAMETFELAQRRLLARLRKEPLIAQRVALLNSIRSVGPVTALTWILEVGDPRRFSSAAKAMSYCGLTSALVSSADKQQRGPISKQRNGHLQTVLIEAAKLAPRWNRELAAVHARELERGNCNRATLAVARKLVTYLLAVDKSGQPFQSHTPEAKEVEVPVEV

SEQ ID NO: 92051 - protein, 312 aa, unidentified
MYYIGIDVSKKDLSVFDGKKDLKFINQEGLTSFKKYLKKKYPLLEIVIIFEPTGIYSLYLKEFCAENSIKAYIVNPKKSHNFTRALGKRSKTDKIDAQILYQFHKHIDLEDIKVPKVDQQAKTLASYLVSYEFALKQRISLSNHLESLRDKGLIALMKKDLKRAKILEDKLFHDIKEYVSKNQNLREAYQRLLTISGVGEKTAIALLTLFKTYQGTNRAQITALAGLDPVKRESGTSVKGKVKISKNGKGIYRKIFYLPTVCATVHNQKIRVFYQRLLAHHKTKKLAIIASMRKLLLIAHAMYRDKTEYVAV

SEQ ID NO: 92052 - protein, 404 aa, unidentified
MERIYVGIDWADDHHDVYVTGDSAVALDDFRIQHSYEGVEKLKNRLIKFTTNSEGVLVAIESHHGLLIYALLEAGYLVYPINPKAMSRYRDRYRMSSSKSDPQDAMVLANILRTDLHLYKPLPKEMVADTRLRELTRAHKSLGQQKVKLTNQLTTQLKAYYPVALHLFSKLDQEITLAFLEHYPTPKKAATASLEELQKFFHKQRYSCPSKVPFIHQSLNQPTLRAPSEMDDIHQAIVLSIIPILRSLVIEVEKLADKVIKEFKQSPSCEIFSSLPTGEITAARLNAELGSNSSRYPTREYLQTAAGTAPVTRRSGKTLLVFFRWQCNKHMRDAFQNLARESVIRYQWAREYFIRQIGLGHKPSRAYRALANRWAAIVWKMLQESQRFDQARLEKSVVRTLSNV

SEQ ID NO: 92053 - protein, 338 aa, unidentified
MVVIGIDPHKGSHTAVAIDEDEQKLDEVLVRADKRQLERLLAWAEAFEKRSWAVESANGLGALLSQQLVGAGEEVFDVPPTLSSRVRVLGTGKSQKNDPNDALSVAVAALRSSRLRLVVAEDHVAVLRLLWNRHKNLTSLHTQAVCRLHALLAVIVPGGMRRRLSADQASAVLAGIRPRTMAEGARKGQARDLVGDVRRLDAQMKASKRTIAEAVAAVPTTLGELSGVGPIATAIILAHSGDIRRFPDADAYASYNATAPIEASSGPRKRHRLNPRGNRQLNHAMHIIAFSQLSHAGPGRDYFERKIAEGKTQKEAVRALKRQISNAVYRQMVRDAQR

SEQ ID NO: 92054 - protein, 406 aa, unidentified
MLFVGDDWAEDHHDVEVQDETGRRLAKARLPEGISGIARLHGLVGRFLPEDSDPAEVKIGIETDRGPWVAALVASGYQVYAINPLQSARARQGSGVSGAKSDAGDAHVLADLVRTHCHQLRTVAGDSKQAGAVKVLTRMHQSLIWDRTRQVLRLRSSLREFFPAALEAYEDLDSPDVLELLAKAPEPSSAARLTRAQISAALKRARRRDRDTKTTAIMAALRTEHLTQPPVIAAAYGATVRALAALITTCNEQITALEGPVEACFGQHPDAEIYLSQPGLGSVLGARVLAEFGDDPNRYEGARARKNYAGTSPITRASGKKKVVLARYVRNKRLADALHQQAFCALSGSPGARAYYDALRDRDIGYNAALRQLGNRLVGILHGCLKTRTRYDEAVAWDQHTQLVAA

SEQ ID NO: 92055 - protein, 356 aa, unidentified
MAVAVAGDDPQVIGAVRNTHGDIRRVLGRLQAKGRLEVVYEAGPCGYGIYRLCEQLGIECMVAAPRLIPHAAGERRRKTDKRDALKLCRLLRSGDLTPVWVPDPSSEALRDLVRAREDALEDRQRIRHRIKKLLLRQGHRLPVKMGSWSRQYRRWLSEVSFEDVNQKAVWEEYLGSLDEVEARLKRYAATMHEAAQTHPQMALIAALQMLKGVAELSAVTLVAEVGDLTRFAKPSQLFSYAGLVPSEYSSGETIRRGSITKAGNAHLRRVLVEAAWAYRYPPAFKGRLAALKKGHPQWLVDISFRAQERLHLRYRSLTRRGKLPQVALTAIARELSGFVWEIAAELNQRHSKEVAA

SEQ ID NO: 92056 - protein, 344 aa, unidentified
MGEVSTIGLDIAKSVFQVHGVDGAGAVVMRKRISRAKMLEFFADLPRCLVGMEACPSAHHWSRKLQALGHRVRLMPPSYVKAYLKRSKNDANDAAAVCEAVVRPSMRFVPIKTKEQQAGLMLHRTRQLLVRQRTMLSNALRGHLAELGIVSAKGRNGISQLLGIITDVTDNRVAPAVRGLLDVLARPYSAIGAEIRSIDKSILTWHRSCEASRRLEEIPGIGPIVATALVAEVGDWREFRSGRNLAAWIGLVPKQHTTGGKERLGSITKQGNRYLRWLLVTGAMAVIRYAKKHGTERRPWLARLLERRHTKVAAVALANKMARMAWAIMVRSERYEEPKLLLAA

SEQ ID NO: 92057 - protein, 407 aa, unidentified
MKNVSPHLQVAVDVGCHDHYVVIGLSTGGILDEFPITHTPSGFQDFFNRIERQTHVHGDLPVDVAMEGYNGWARPLDRLVQRHGYQLYNVNNLKLARFKEIFPAPAKTDSIDARKMLELFQLQDTLPLAKGVLQAVLPVPEANRRLKCLTRRRPQLVNEKIIVQNRIQPDLQAICPTLLNITGSVDNLWFLNFLTCREELSKLLRLHSKSLLTIPGIGLKYVRLILDWQKQAEFSDDVEDVGPMIQEDAHRLLALIASIKTLDVKISLQLKNSVTAQHIDSIPGFGLVCSAELAGEIGTLDRFPKQSSFSIYMGMSPLDNQSGTYQGTKSPKHVNTRARRAMMTAVCRHMAVVPESRAYYDKKRSEGKSHNKAVRALGRHLSRVIWSMLRHDRDYELTEQVPLKEAA

SEQ ID NO: 92058 - protein, 357 aa, unidentified
MGKSIIDTSGITRIGLDLAKRVFRVHAVDATGSVVIARSVNRRTLLKFFDALPRCVVAMEACSSAHHWGRQLQALGFTVKLIPPAHVKPYVRRNKSDAVDAAAICEAAGRPGQRFVPVRSVENQAALMRHRARELMVGQRTAALNALRGHLSEIGVVSAQGVQNAYALKEMADEGFDENGEIVVPDCVRLALAPLVRQIDALDEAIEAIDRELEASARTDETARRLMTIPGIGPVTAMALLATIQDFAAFSSGREFAAFLGLTPREHSTGGKPRLGRITKMGDRYLRKLLVVGACSALAARKGHNDALRRWASGMLERKTVKYKFKLTAVALANKLARIVYALATKGGHYDDRPVAA

SEQ ID NO: 92059 - protein, 373 aa, unidentified
MPRYSTAFGMDVHLRSTTVCALDAETGEAVTRRFRGNPWGEVAEWMSGFPGPSLAAYESGYLGFAPQRELSGLGVDCVVAAVSKVPRSAADLSSKNDRNDAARMAKAILSHDVTPVWVPSPEIEGLRDLAAAHDAATARLAAAKQRLLAFLARRGYVYGGTTPAGNPRRYWTYDFLRWLDKVRPADDGGIRALAALRNEVEAAAETRDDLLAEYRAAVAAGPLSAEVEALQSIKGCGFALVAAFASEVGDFSRFRSGRQVTSYFGLAPKQRSSADSVRLGGISGAGDALVRRLAVEGSWSYVQASHQPKLMPKGSGVPLEVRMHGRKGSERLLRRRGEMLARGMPQAKANAATAAELVRWLWALGAMCREGAE

SEQ ID NO: 92060 - protein, 343 aa, unidentified
MNKISTIGLDLAKNVFQVHAVDRLGGVVLRRQLRRGAVEKFFAQLPPCTVGMEACGSAHHWARVIGRYGHQVRLMPPAYVKPYVKRNKNDGRDAEAICEAVSRPTMRFVPVKSVEQQATLAVHGTRALLVRQRTMAANALRAALSELGIVAAQGLEGLRALMARLEAPGVEIPEMMRGALLVLARHWQALDADERALERQIAKAARADRDARRLMEVPGVGPIIASTVLAKVPDAKVFRSGRDFAAWIGLTGRDHGTGGKHRPGRISKQGDRMLRALFISGASAHLRQQKARGVSDLWLRELLARRPYKVAMVAFAAKTARIIWAMLVKGEQYRVRASASAAA

SEQ ID NO: 92061 - protein, 347 aa, unidentified
MRFYTNQHKYYCGIDLHTRKMYVCILDEKGEIREHRNLNTDRDAFLKAIAPFREDIVVAVECIFTWYWIADLCHNEGIPFVLGHALYMKAIHGGKAKNDKIDSQKIAVLLRGGMMPMAYVYPEKMRATRDLMRRRNHLMRKRSELFAHIQNTNSQYNLPDSFGCMSRPKNRDGIIEQFEQPSVQQNIAVDMEMINTYDSVLSQLEKSIIKLANHHDPVSYALLQTIHGVGKIIALIILYEIENIRRFESVQDFASYSRLVKCAKESNGEKSGSGGSKIGNAHLKWAFSEAALFFINGNDPAKKYLDRLTKKHGKSKALSILAHKLGRAVYFMLKNKEAFDQKKFLAV

SEQ ID NO: 92062 - protein, 365 aa, unidentified
MQKISTMRTSGKKIFKGQLTIGLDLGDRSSSYCVLSEAGEVILEQKLPTAPEAIKQTFTKVPLSRIAMETGTHSPWVSRLLKALGHEVIVAHAQNVRLIVKSRRKDDRMDARTLARLARIDPELLSPVQHRSAQAQLHLTEIRARAGLVSARTALVNAARGLVKAHGERLRKCGTSQVGREITSALSTELREALEPLLREVESLNERIHEYDRRIESMTKERYPETALLKQVKGVGDLIATTYVLTIEDPHRFRKSRDAGCFVGLQPGRRNSGESEPQMHISKQGDEYLRKLLVQGAHYILGPFGENSDLRRWGQRLAARGGKNGKKRAVVAVARKLTVLLHRLWVSGEVYEPLRNSQKAISAAA

SEQ ID NO: 92063 - protein, 354 aa, unidentified
MKQTTKYVALDVHQATTVASVRDDTGRVMARSVLETHGPSIIEFLRGMRGAIHVAFEVGTQSQWVYELVAPFVDRVVVCDPRQVARQGNKGDRVDADRLSELLRLGGLRPVYQGSAHRADLKELTRTYRTLVEDSTRVMLRIKALFRARGIKTPGSAVYHPTRRARWLEQLTERGVRFRAEALYAELDVLRALRPKAKAAMIAEVQRDPAWPVLRTIPFFGPVRVALLLATMGTPWRFRTKRNLWAYAGLAVVTRSSADYTWVAGQPVRRRRAPLTRGLNRNHNRVLKDVFKGAATAAAARPGPLQDFYQDLVARGMREELARVTLTRKLAAIALRLWKTGECYDPTQLTRQSS

SEQ ID NO: 92064 - protein, 429 aa, unidentified
MNFIPIAGIDVGKFFSEMAILSPSNEVIARMKIRHDSSTDVERAVELLKKTEKDFDSRPFVVMESTGHYHKILFHSLYKTGFEVSVINPIQTDSIKNIGIRKVKNDKVDARKIALLYRFQELKTTNIPDEDIECLRSLCRQYYKLSDELTAYKNRLMGIVDQLMLNFKDVFPNIFSKAALAVLEKYPAPAHILKANRNKLIALIQKNSRRSLKWATAKYELLNSKAKEFAPLSISNSSNVAMLGVYISMIKTLEENLEKVLKAIRSLIIEDMAKDMPMLALTLELLQSIPGIGLISAVTILAEIGDFSAFSKPGKLVAYFGIDPSVMQSGEFTGTQNKMSKRGSRLLRRVLFTIALANIRTKRDKTACNPVLMEYYKNKCQSKPKKVALGAVMRKLVNYIFAVLRDRKPYELRSPQEHAQMLAAKHTAA

SEQ ID NO: 92065 - protein, 355 aa, unidentified
MNSEKYIGLDVHQATISVAVLDSTGKLVMESILETKAATILEFFAGLRGTLSVTFEEGTWAAWLYDLLKPHVAKLVVCNPRKNALLKDGNKSDRIDAHKLAELLYLNKLSSVYHGETGVRMLRELARSYLTIVKDLSRVMNRLKAVYRSWAIPCAGRDVYYTRHRAEWLGKIKEAGVRRRAERLYQQLDMLQYLRQQARRELLAESRKHAITVKLRQIPSLGPIRSALAVALIQTPHRFRTKRQLWAYSGLALETRTSAEYCYVKGGLRRSKKQISIRGLNKDHNHDLKGLFKGAATRASVLPGPFQDFYQRSLAKGIKPTMARLTLARKIAAITLTLWKKGENFDADKLKSQAA

SEQ ID NO: 92066 - protein, 342 aa, unidentified
MKAITTIGIDLAKNSFSVYGVNAKGKCVLQRTLSRSGVITFFANLPECLVGMEACASSEYWAREIESLGHTVRRIHPRYVKAYLLGSKNDANDAAAICEAVQRPNMRFVPHKSPEQMDIQCVHRIRQGHVRSRTALINQIRGLLGEYGIIMRQGAAQVRKNLPTIIEDEGNGLSDCMRRSLISLYNTVCFLDQQIEEQEQILKSIAKENEACKRLMQIPGIGIMTATILLSIAGVASNFKNGREFAAFLGLVPLQNSTGGKTKLLGISKRGDKYIRTLLVHGARAVLRSLVMGKLAEGKQQKWLTELVARRGAKRACVGLANKTARIAWSLLAHGTEYTLAA

SEQ ID NO: 92067 - protein, 384 aa, unidentified
MSPEHSIDIFLGLDVGKSEHHACALDRDGNKVFDKPLPQLESELAGVFHQLQKLGTVLVIVDQPNTIGALPIAVARDCGCEVGYLPGLAMRKAADLYPGRAKTDKRDAFIIADTARTMPHTLRAVDRNDEVLSALKMLSGFDDDIARDCTRTVNRLRSILTQIYPSLERVFAGSTLTRTPILELLIHYKGPQGLKRAGYQRVLNWMIKRTRKDPTPLVDDIFAALKAQTVIVPGSDAAELVIPQLAANIKALKEQRNTIAEQVEEMLADFPLCEVLMSMPGVGIKTAAQILLAIGDGSDFDSAGHIAAYAGIAPVTRQSGSSIRGEFPARSGNKRLKNALFYSAFAVIRSHEPSRRYYQRKRAEGKRHNAAVICLARRLSLIHI

SEQ ID NO: 92068 - protein, 280 aa, unidentified
MLHAGLDLSRKRLDVELVAEDGTRLGYAAVMPDADGLRSLTRQVQAWHGQPVRAAIESMNGARYVHDQLELAGWEVEIADAQKVKGLAPLACKTDRIDAWVLAELSRRDLVPAIWLPDPEIRAERERARWRLHLVRHRTALKNRVHQTLIGFGHQRPVSDLFGVQGRRLLERMALPDPWSGTVEAAVRLIDDLDRQVDGCEAELRTLGADHRYVPLLLTVPGIGWVLAYTIAAEIGDIARFPSPVKLSGYTGLCPRVHQSGARDHRGPLTKQGPSSCAGP

SEQ ID NO: 92069 - protein, 408 aa, unidentified
MKNFSTFIGMDVHKETIAVATAGKHGSPRYYGEIANTAEALTKLVKKVVPSRSKAVFCYEAGPCGYGVHRQITDMGHRCDVVAPSLIPKKPGDRVKTDRRDAVTLVRLLRAEELTAVWIPDQQQEAMRDLSRIREDLKSMERCARQRLSGFLLRNKKVYAGQSNWTQAHFRWLERIIFESPIQQIVFQEYVDVVKYLQGRVVSLEEEMRKALAGWSLGVVVEALMALRGVNLVTAMTIVAEIGDMSRFESPRQLMAYLGLVPSEDSSGKQQKRGGITKTGNGHVRRVLVESSWSYRMPARKTAHLRRKAAKASEAVQAIAWKAQKRLCSRYWHLTQKGKLKVQACTAVARELAGFIWAISREVMGKNNTPVVKVAEVVPFCVEVERTRLHYIMQRPPFCQWISAAMQQ

SEQ ID NO: 92070 - protein, 402 aa, unidentified
MNPVVGLDISKEESHGQAFLARGKPFRGTFHFEHTRDGLANLHQVLKDVETASKLRPLLILEATGHYQSPVVQFLEEHHYIYIIINPLISNRLRKSQLRKVKTDAADAYLLGELYYKEEFEPFKKRGVQLLNLRYLTRQYESLSKMCVQTKLQFQAVLDQVFPAYKGVFGAMYSRISLRFLSKFPTSYSVLQTDEITLKAKMKELLSSKRGRSEGWINQRVQRLLDAAKQNPFQQTMYASHLINLKVLITLILQYQGHLAELEQNIDALAEEIEEYELIQSIPGIGHKIAATILSEIGEVDRFDHPKKLVAFAGIDPSVFASGKFTATRNRITKRGSRQLHYALVMAVQCGLICSRNMRLKAFYDRKRAEGKPHKVALIACANKLIHWLYAILKNKKEFRPI

SEQ ID NO: 92071 - protein, 336 aa, unidentified
MPSVVGVDIAKRVFQVHTVDELTGEIRRWTLSRSKLLEFFGNMRPSIVAMEACGSSHHWARRFTAMGHEARLIATKFVRPFVKTNKTDAADAAAIWEAAQRPGMRFVPVKSEQQQGIMALHNMRDLLVKSRTAQIHQIRAVFYEFGFELPRGRHWALKALPGAFAAIEERVSALVLDSLRGQLELIHDLSRRIEAIERQLEIYERSDDRCRRLRAIPGVGPLTATAIVASVGDAREFRTAREFAAWIGVVPRQSGTGGRVRLLGISKRGSPYLRAMIIHCARAVAARQKQPGPWLTNLMQTKHWNVAVVAQANKIARVIWALLAHECEYRPAPSMA

SEQ ID NO: 92072 - protein, 340 aa, unidentified
MKKNKQFYLGIDISKPFFDVSVLAVTQTAKQEMQTAQFGNDASGLRLFAKWLTGLGVSYDENSLVVIENTGIYHRPVWNFCSSKNLPIHIGNAAHIKWSLGITRGKSDKIDSIRLCEYGYRHREELKCTAALNPVFLQLKDLMTNRTRLMHHLTSLKSYLKELKGVSDKSFISVQQRCNKAVIAGLKKSIGLIDAEIKKLISQDKQILTNYQLLKTVPGIGHWIAIYLICCTRNFSNGITGKQLACYAGVVPFEHSSGISIRGRNRVHKMANKDLKKLLHLGALATLKYYDEFKQYYSRKKEEGKHSMSILNAIRNKIILRAAAVVQNQQPYVNYSANNV

SEQ ID NO: 92073 - protein, 400 aa, unidentified
MRAVFGIDVSKVNSEVAILVNGEKVHGYTMTNDAIGFTWLLGDLKTVHNPEIVFEATGVYSRRLQAFLEDNGYAYTRLNPLEAKKQLDSLRVRKTDQIDAEKLAQSQCVLNRKPTYVQEEVYQNLRDLSRFYQNLTEDIVRAKNRLHKALQIAFPELENILSTPSGEQYWNLVIAFPCKDFVLDLSKDKLSESIRQSTSKRISDKRVAYLAEKLIALANQSYCAVKKTSPILEEVRYYAKELLRLSEQRQAVLDQMVELAQPLPEYDILLSIPGIAETTATSIIGELGDIRRFQSANQINAFIGIDLRHYESGNFIAKEHITKRGNPYARKILFKCIHNIASASHTNPCHIADFYKKRKKQSQTTSTKPHTIASIHRLIRTMYYLIMHNKLYDYASTQNR

SEQ ID NO: 92074 - protein, 409 aa, unidentified
MKYYASTTEFNCGIDLHARQMYVCLMDRDGKIRVHTNIRNNDFEYFLKLVAPYRHDLTVVCECLFGWYWLADACQAAGLKFVLAHALYLRAIHGGKNKNDRVDSEKLTHLLRTNLIPPAYVYPAAQRPLRALLRQRTYFVWQRADLLTRLQSHQLAHNRPTLTGASRTNREPWAQQIANTEANPIYQFTLQNQLTLVGHFDAQIAALDTELQRLTKQLHGRDYTLLQTVPGIGVQLAATLLYEIGDIARFPTVKDFLSYCRLVKGTVASAGKIKGLRGAKLGNPYLRWAFGEAAVIAKRDPHLIGPLSQRLEAHYHGNKFKANTVLAIKLARAVYYLLRTGTVFDPERLVATLTPKRKHSDPNASQPTRLTGRTTPRHPTVSQPAPTGTPAPAAANPAGCAGCEGRPAL

SEQ ID NO: 92075 - protein, 407 aa, unidentified
MEVLYPRCAGLDVHKESVVACVRCVSPPVHQEVRQFATTTSGLLALADWLASHGCTHVALEATGVYWKPVWHLLEDRFTLVLANAQHVRNVPGRKTDVNDAAWLADLLAHGLIRSSFVPPTPIQELRDLTRTRKQLVREISQHSLRIQKVLEDANIKVASVLSDVLGASGRAMLAAIIAGEEDPARLADLAQGTARKKRAELVEALRGRPTAHHRAMLKLHLDVVAALEAALREVDAGLGKALAPIQARAHLLTTMPGVSDTVAQVVVAEIGVDMSRFPTAAHLVSWAGLCPRSDESAGKRRSTRVRKSGQWLKTTLVTAAWAAVRVKASYLRAQFLRLKARRGPKKAILAVAASMLTAAYYMLRDGVEYRDLGPHYLDRRDRTKTINRLLRRLSELGCDVAVVMPA

SEQ ID NO: 92076 - protein, 341 aa, unidentified
MESISTVGLDIAKSVFQVHAISEAGEVVVRRQLKRRQVLQFFATLKPCLVGMEACATSHHWARELAKLGHDVRLMPPRYVKPYVKRNKNDAADAEAICEAVTRPTMRFVPIKTVDQQSVLMLHRTRQLFIRQRTTLINSIRAHLAEFGIVAGIGRNGVEVLLELIVKEDEGIVPAEARVCLMALAAQLELVKRQILEMDRRVLAWHRSSSLSRNLEAIPGVGPLISTALVASIPDPKVFRSGRDLSAWIGLVPKQNSTGGKEKLGSISKAGNHYLRQLLVVGALAVIRRAKQLGYTRHPWLVKLMERRSVKIAAVALANKMARIAWAMMARNEPYRAPITA

SEQ ID NO: 92077 - protein, 343 aa, unidentified
MAIVAGFDVHRAQITFDAVDTETGELSRGRIDSNRPAVRAWTEHFPGQEIEVALEACTGWLFVCEELAAAGAVPHLAEPAETSARRGSKRRAKTDRADARHLRELLSQGRLPESWLPPAHVCEWRTRTRLRRTLVEQRTEWLQRIRATLFQHGVPAGEVPQRLLGRQGRAFLAGVGLPEGAQERITVALRLIEAIEAEIQPLERELRRLARGQAGCQALMRQYGIGELTAPTILCELGDVQRLSSSRKAVRAVGLDVGVHRSDHRSRVGKLTKQGSPHARWALYEAAQSAARPGSPDHDAYLALKARGLSHTRTSLTIARKLARRCFHSLRELGPAALEPLVD

SEQ ID NO: 92078 - protein, 342 aa, unidentified
MEYYVGLDVSLKQTSICVVDQAGLVVREGVVDSDPEAISVFVRSKAPGAVRIGLETGPTSTWLWTELKRLGLPVICIDARHAKAVLKMQINKNDRNDAIGIARIMQTGWFKEVHVKDIDSHSVRALLASRALLVKIKRDLENHVRGLLKNLGLVIGRATFNVFAVRAEELIEDRPDLVAAVRPLLEARNAVEQQVSELDRKVMKLARRDAQVQRFMTVPGVGPITALAFKATIDDPARFARSRSVGAYVGLTSRRHASGEIDWSGRISKCGDAMLRSYLFEAAGVLLTRVPKWSTVKAWGTRLAKRNGLRKAKVAVARKLAVILHRMWIDGTEFNWSKEVAA

SEQ ID NO: 92079 - protein, 453 aa, unidentified
MAQGSGLTRGDRNRNRRVEALRAVVRRDRAVLAVDLGEDKQVAVVMDHEGRVLARKVVKAKAHQLGSLLEWAAGKAAGAGFAGLTVACEPTGHRWKALMGLADAGGHGFCCVQSLAVARAREGDDYTRDKTDHRDAYLIGKLVIRLDCYLPERADAGWARLRHLGARRFALVADVTSCMQQAGDLLGCAWPAPLGAAARPLESVTWLAGMAVITDRCCGQPGRLRKMGYDRFLAAIRRELPRWGGKFVRHSIVRGLWEALADTGGVAVQRRGALERLHLLLGDWRALRARLADTEARMTAMLDELGLTALVTSIDGVSALSGAVMLAETGDLARFASGRAVVKHAGLNPSEHTSATITGQTRISRRGRPGLRTAAWRAVWGALRHNTVLLAKHARWTSRDHNRLADGQARTACAATVLRWLWAVITTGTMWDARIAAGQVTPRRGAVAVPAAA

SEQ ID NO: 92080 - protein, 389 aa, unidentified
MQTARKTATHPIAPVECGAIFVSLELSRSFWLVTALATPVGSKMSRHQVRGGDMSGLLERFSDLQRNVQRRTGQVVPVIVIQEAGLDGFWIHRALVTEGIESHVVDPASIAVSRRQRRAKTDRIDGEALVRTLMAWRRGEPRVCSMVCVPTPGEEDRRRVCRELKTLIGERIRHVNRLKGLFFAQGIDGYEPRNKDRRERLEDLRTGDGRELPKHLKALALRELEIIELLNQQIEAVKAERNALLEKAPVSGSAPEPVRMLLELKGIGAGFAGALWSEGLFRQFANRRQVAAYAGLAPTPWKSGTINHEQGVSKAGNPRLRAIAVEMAWLWLRHQPDSALARWYHERVRRLGPRTRKVTIVALARKLLVALWKYATSGVVIEGARTKTA

SEQ ID NO: 92081 - protein, 376 aa, unidentified
MANVEKDFAKGKPVYVGLDVHKREWTVTVLCQGEELYHATVVADCAGLVRLLRRLEASEVHTVYEAGPTGYWLHDALTEARFDSIVTPPSLVPRIGGRVKTDRRDSRKLASLLASGFLKRVHILSSEERAYRQLLRTRNQIERHRKQTQAQIKSMLLFHGKKAPRTLVERWSQTHVDWIAHLEWDNPALKTSMGALIELYRYLNDQLKAMTAAIEELAQTDKYRERAALLTQIPGMGIYTAMSILIELQDVERFRRAEQLASFLGLTPSQHSSGERVRLGEITHCGNPRLRTRFVESSWTLIRYDMAMRSVYERIKHQTGSGKKAIVAVARRLALRVRRILLDRSAYRYGDGRRPQFARDKTREIKKLVVRRVRLV

SEQ ID NO: 92082 - protein, 340 aa, unidentified
MLYIGLDVHKEFCQACVIDESGRALSNERFSSTSEELDRCLDRFQDAKFVLESTGIWEFIYEGIEKRGFEAVLAHPLKVRAIAEARVKTDKVDAETLAQLLRADLIPRSWIPPKDIRDLRQLVRQRAYLVRDAARFKNRIHAEILRRGVRRPEDLKTPFAQRSIRWMRSLGIPTVTSCLNCLENVQAQIEEINIQLRLEFDRRPDAKLLATTPGIGFYGALLILAEVDDVHRFHHPEKLCAYAGLVPTVSQSASSVKYGSISKDGSAYLRWILTESVHVHTRYDPSSQLSRFHERIAKRRGKRVATVATSRKLLRIIYWMLVRHEPFHSHGFNPVKRLHS

SEQ ID NO: 92083 - protein, 375 aa, unidentified
MENFTTETIGCDLGDKMSDVCVMDAAGRTRRARVASTRKGMTTFFTRAPLHVVIEVGGHSRWVSELLEGLGHRVTIANPRRVKLISASDNKTDEHDAELLARLGRADASLLCPMVHRSSEMQADLAIAKARDTLVATRTKLVNHVRGTVKSFGERFPKCSSSSFARHTRALIPAALETALGPVYETIAKLDEQIRAQDKMIEKTAERHGDVAVLEQVDGVGALTALVYVLTLEDKGRFTSSRMAGAYLGLRPRKQKSGNDDPQLRITKAGDPFVRRLLVLSANYILGPFGKDSDLRRWGLKLAERGGKNAKKRAKVAVARKLAVLLHRLWVTGEVYEPLGYQSRRLEDAMPQAATPAPAPAEATAPATTAANAAA

SEQ ID NO: 92084 - protein, 337 aa, unidentified
MKYSGIDLHSNNSVVTVTDEEDRVVAEKRLPNDLTKIVGLLMPWREEMAGVVVESTFNWYWLVDGLQAAGFKVHLANTTAIKKYEGLKHSGDETDARYLAHLLRLGILPTGTILPPEQRAVRDLARKRMQLVRSRTTHILAVENIIARQHGARISSNQVKQLTADTVDQMPLPEDVALAIKTNVAVIATLSAQINLLEKRLQERIAERPEYGLLTSVPGIGRVLATTILLETGPIERFAAAGNFASYARCVDSVRTSNGKKKGEGNTKNGNKYLSWAFVEAANFALRYCAEAKRFYERKKAKTNNVVAIKALAHKLARACFHILKERKPFDVTRCFA

SEQ ID NO: 92085 - protein, 427 aa, unidentified
MKSNTQNKKIEAITEKTLVIGIDVGSETHYARAFDYRGIEFSKKPFKFSNNEAGFEMFKAWILDIKEKHEKDKVVPGMEPTGHYWFNLGKFLQDNEMKPVLVNPHHVKKSKELDDNNPTKNDRKDPKVIAGLVKEGRYMIPYLPDGIYADLRTASNMRFQIQSELTRVQNRISRWFNIYFPEYKTVYGKPDAISGIMILKKAPLPEDILTLGVEGVNQIWRDAKIRAVGKKRAQTLVEAAGHSVGTKEGTTAARIEIRMLLEDYESRNNRLQEVMLLIEELVKQIPMAEKLMEIKGVGIKTVSGFLAEVGDITRFSSPKELQKLAGLALIENSSGKHKGQTTISRRGRKRLRYLLFEVAMSLVGKNSEFGALRHYYTTRKVNPLKKMQSLMAVAAKLIRVFYAMMTKGVEYDPSKMLGDIKRPAAYM

SEQ ID NO: 92086 - protein, 403 aa, unidentified
MNSVGIDISKGRSTIAVMRPFGEVVISPFEVRHTGSELSKLAKQLKSLDGETRVVMEATGNYHASVAKLLHNAGLYVSVINAKLVHGYGNNELRRVKTDRKDAVKLANYGLDRWLTLPRYIPEEDTRLLLKNCYRQYRQYSKVQTVLKNNLISLLDTVFPNANRLFSSPIRGDGSEKWVDFVAEFWHCRCASEKSERAFTSKYLRWCRKHGYNFREAKAHTIYAEASGHIGVMPKSETTKLLVEQAVAQLRATSTALAALKQEMQSLASVLPEYPVVMDMFDVGPTLGPQLIAEIGDVRRFYSKKALVAYAGLDAPPNDSGDVTGRHKSMSKIGASSLRRTLFLVMSVYLQTAPLDEPVCQFMDRKRAEGKPYRVYMMASANKFLRIYYATVKAYLESLEHTV

SEQ ID NO: 92087 - protein, 309 aa, unidentified
MLSSVGIDTAKATLEICIKPQKIRFEVANNSAGFEVLLERLKDFNISRVLIEATGGYEKDVLIALASAGLETICINPARARKFADAMGKKAKTDKIDAEVLADFAAHLSAPQGQPVSPEREELRELVKQRAQFVQSRDDDKRRRQQCRSATVMAHFDEHIEQLKVLIKRLDEEIDQAMVQLDDTRARQLLAVTGIGRVTAANLLASLPELGQLDRRQIAALVGVAPYNNDSGSHRGHRQIWGGRAHVRRVLYMSSWIIIRHNTEFKARYEALRARGKCAKVALVACMRVLIVRLNAMLRDNTPWRVQTA

SEQ ID NO: 92088 - protein, 311 aa, unidentified
MSRIAGIDVSKSHLDVHLLPQEQAFRCTTDAQGLADLVARLAAAAPDLVVLEATGGYQTSIVAALAADGFKVAVVNPRQVRDFAKALGLLAKTDTLDAYAIARFGLAVQPQCRPLPDQEEQAVKELMARRQQLVKMKTAEGNRLEQARAYRIRQGITLMMNTIQRQIDKIDQDIDKTIRNSPIWHEKDQLLQSVPGVGPTTVRMLLSCLPELGQLNRRQIASLVGVAPMNHDSGTLRGKRMIRGGRSDVRTALYMPALVATRYNPAIRTFYLRLRASGKSAKLAITACIRKLLVLLNAILKSKQPYHGVTA

SEQ ID NO: 92089 - protein, 358 aa, unidentified
MDIVGAFDLHRKQITFDYIEMDSGEVHRGKIQPADRENLRLWLERFTERFPGQDAAIAVEATTGWRFVVEELRRAGIEPHLAEPAETKSLRGRKKRAKTDRLDAGHLRDLLVIERLPESWIPPQHIQEIRTLMPMRHSMIEERSAHQQRIHAQLFHNGYPQQRNVLAAHRRERLQKMELPRAARKVVDLSLAMIEHINEELEPIEAELRAYALSQAGCRALMEHYGIGELTSVAMLAELGDTRRFSSSKKAVRFAGLDITVHSSDDKRAAGRLSRQGSPVLRWAAFEAAMVARRRGSPDHDYYVETKERIGANRAALSIARKLIRRAHHTLRELGEEAMSQPPSIIAASEMDVFGRRS

SEQ ID NO: 92090 - protein, 438 aa, unidentified
MSNKVIFNLDELFISVGIDVGADFSWMSIALPNQQFVGKPYKILHNSIDSLTTAVSKIKEAEELYSLESRIFLESTGIYHYPLFCYLRDKGFNCSVINPIITKNSTNINIRKVHNDRFDSKKAALVGLKPDLKVSLMPSDLALNCRNLCREYYDLMDNRSAYVNKLQGELRMAFPQYLGIFSKVTINTSLTLLETYTSPSAFLKADKQEIIDIIKSTARFGLTYAQNKYNAIIQAATDANQFGYIIDSNIKRIRLYISFIRKYDEEINSILESLHELVDANEDADFVKQIHLIEIFKGAGFLSAVSIMGEIGDFSAFSKPKQLFAYFGLDPSVKQSGKFEGTKVQMSKRGSAIARRVIHTLTLQSISISRNREAKNPVLREYYLKKCDSKPKLVAMGAVSHKVCNMIFAILRDNKPFKIIAPQEHIKQYNSAKCDIAA

SEQ ID NO: 92091 - protein, 482 aa, unidentified
MVVPNEEPKKPTKPNKPTKPNKLTKPNKSRERSLPVPVPVSAAALHVINPDAAGIDVHSDMHMVCVPADRDANPVRQFGANTADLQEIVAWLKKCRVRTVALESTGVYWIPLFELLESEGFEVNLVEPGQLSRCGARPKTDVLDAQWIQRLHSYGLLRASFRPPDSVLALRAYWRQRQMQVRYAASHVEHMQKAMEQMNVKLTEVVSDITGLTGMLIIGAILEGERDPIKLAQLRDRRCQHSEEQIALALEGTWRPEHLFELRQAHELYQFHHRQITECDQQVQAELANFPNRAGEKTRTVKRRKRGRKSNDVRFEATGPLFQALGVDLTSIEGIDVGTALVILAEIGVDVSRFPTEKHFASWLRLCPPQDESNKTKKRRGHRKGTNRVTIALRMCARSLGKTMTPLGLFYRRIRSRIGGLGAVKATAHKLACLVYRMLKYGQQYVTQSMEEYEAKVKANMLKALKRKAAALGFQLSPLPTQ

SEQ ID NO: 92092 - protein, 355 aa, unidentified
MERYIGMDVHAASCTLAVISEKGRKLKDFPVETNGQALVEAVRMIPGHKHLVMEEGLQSAWLYETLSPHVDELVVAGITTSRGPKSDKHDAYGLAEKLRVGNLDKYVFKAPRQFTQLREFSRTHMTLVTDVVRTQARIKSVYRSRGVLVTGVDVYRTRRREEWLKQLPSSTKIRATRLYDQLDFLLAQKKQAEADLLREGKKHSIVKILETAPGFGPIRAARLVPIVITPHRFRTKRQFWSYCGLGIVTRSSSDWVQTADGAWIKSRVPQTRGLSRQHNHFLKSIFKGAATTVVTQRNKDSIHARYERLLDGGTKPTLAKLSLARMIAATVLRMWKNEEEYDPGRAGLPTQTRKG

SEQ ID NO: 92093 - protein, 514 aa, unidentified
MSAGKKNAKNNNGGDGARGAVPVHGGEGAEVAEESTQVVEYAAAIDVAKGFGMVCTRVPGSRPDRRRQKVWRVEAAFKEVTALMDHLRCEGIQRLVLESTSDYWRIFYYLAEAAGLEVWLASARDVKHLPGRGKSDRLDCVWHCKLNERGMLMRSFVPPEPVRDLRALTRTRARLAQDQTRHQSRVEKILEDALVKVSAVISDLFGTSGRRFPGALVAGQRSPKALAALGDYRLKASTAGLEAALTGRFRDIHATEIAVHLRLIDAINAEIALLDEQIEQHLPSVPHTAPVCTACGEIGGCHAPGCGSHGTAPLSLAGRLDEVTGIGPVNAPAIIAELGTDPSQFPTPGHAAAWARLTSRSRQSGESAKPGRTGKGNRYLRGALGQAAMTAANTDTRLGAMYRRIARKRGKQKAIVAVSRVICEIARILICDPGARYEELGADYYHPRSPARQTRDKIREIERLNPGKKVILAARQVAHRPRTPHCGGPLVAARHLGLFPVRASTSERRILSGG

SEQ ID NO: 92094 - protein, 416 aa, unidentified
MKRERKTREVRYLGLDVHKQYITVGGMNAQQEIVLRPRNVEMERFKTWAESNLRKTDEVVLEATANTWDVYDTVVRLVKRAVVAHPAEVKQIANSRVKTDNQDVIRLLRLLIADLVPEVWVPPVEVRELRAIISYRWRLVKMSTAIQNRMHSLLHRHNLQAPEGKIDTGENRAWWEKLKLSELETLRLKQEIKTLRLVRENIVEVEKELGRLSNSARWENQAVYLMQIPGVGIIVTMTILSAIGDIRRFESPKKLVGYAGLGAGVHDSGQKHRGKGITKFGRKELRWALVEASWQAIRSNPRWRAQYDALCKRKHPNQAIVAIARKLLVTLWYLLNRQEAYNGSTDEDLAYKMLTWAWHIDKIALNGMTNQQFAKYGLMRLRKGEDLTRIVRGGLPRRIAPKEEVLALKPDLQPSP

SEQ ID NO: 92095 - protein, 473 aa, unidentified
MGKGSGISRSDRRRNARRERLRDLVPRDGVVLGIDLGDQKQALALVDHDMRVLWRRSPRCAAHQLGAVIADAAAAAASAGFSRVTVACEPTGSRWMQVQRLCRELGVGLVCIQPLVSHIAREQEDYTGHKRDEPDAVLIARLASELHCYVPEELEEEWACLRQLGRRRGQLIVMATAAVQRIRDWLSVAWPSAVTAAADPFESMTWLAALEVVTSRCGADPARLAAGLGEDDFLALVRGASPGWGTTRPSRRIARSVLALAGDRDAVPVMRRALFRRVRDELGDLQRFRRQLRQAEADMCALLTGLGLARLGDIPGLTLTGAAAILAEAGDPRRYETSSSLVKHAGLSPSDNASGASEGASRISRRGRPSLRLAAWRAVFPLISHNPVMKAKYDGLVAAAEESARAAAGSARPGSAQAARAARTARAARSRARVACAASLLRWIYYMTVHDAGWDSVAASGGHLAPQEAQQAA

SEQ ID NO: 92096 - protein, 412 aa, unidentified
MEVLYPKCCGIDVHKQFLVACLLIADEAGHQHQEIRRFSTMTGELLSCVDWLQKAHCTAVAMESTGVYWKPVWNVMEGLFETVMIVNAEHMRRVPGRKTDKKDAEWLAELLQVGLLKPSFIPSRPQRELRDLTRTRTTLTQERTRLINRVHKVLEDANLKLSSVLTDIMGQTGHHILGAIVRGEEDPTVLADMALRRAANKREALVLALRGRISDHHRALLRALLEMIRHHDQAIWHLDREIEERLRPYEEQIQRLDAVPGLSRRSIEILFAEVGWDMSPFPDAAHLASLVGICPGNYESGGKRLSGRIRKGNHWAKATLVQAAQAAARTKNTYLSAQYHQIAARRGGKRAAVAVGHSILVIYYHMLKTGEPYQEKGGDYFSELDRQHAERRLTKQLERLGYQVTLTPAKIA

SEQ ID NO: 92097 - protein, 414 aa, unidentified
MDVIVERCAGLDVHRDSVVATLRVPGKGKSRRRRAQETRTFATTIAQLEQLGDWLEGFGVTLVGMEATGVYWKPIFYVLERRFECWLINAQHLRNVPGRKSDVIDSRWCCELVELGLVRPSFVPPPEIRRLRDLTRLRTTQVQERSRAVQRLEKVLQDAGIKLTSVASAVYSVSARAMLEALLGGVSDPVVLAELAKGRLRKKIPQLEEALASRFDISHHGVLVAGLLAHIDALDQAVGTLEARIGIATRPYADLIELLYTIPGVGVRIAEILIAECGVDMTVFPTAGHFVSWAAICPGTNQSGRRRRSGKTRHGDTWLRTALTEAAHAAVRTKNTYLASHYWQLRGRRGEFKAIGATRHDILIAYYHIVSDRVPYHDLGPDWLARRHSPEHRTRRLVKQLEALGHRVTLETAA

SEQ ID NO: 92098 - protein, 411 aa, unidentified
MDAIYQCVAGLDVHKMVIVACRRRLIGEGQAESEVEKFGTSTRELKRLGRWLQEWGVKQVAMESTGVLWQPVWNVLCDEFELMLINAQHLKKVPGRKTDVTDAEWIAQCLQVGLLRGSFVPSEQIRQWRDLTRQRTKLLDQRSSIVNRIHKTLEGCNIKLSAVASDVMGVSGRAMIKAMSEGEQDAGKLADLARGRLKSKYEDLVESLEGKVSEHNQWLLKHMLKQVDFLDEEIAAYDSRIDELMRPFEQALERLDTIDGVGRRTAEVMLAEMGPEMSQFPDDEAVSSWAGMCPGNNESAGKRKSGRTSKGNKWLRRALVEAAYAAARKKDSYLAARFARLARGGKKRAAVGVGHTILVAAYHILKEEVAYKDLGGDYFQKRSEEKTTRRLVRQLEQFGYQVELKRLKAAA

SEQ ID NO: 92099 - protein, 434 aa, unidentified
MDIEYAIRLKWFRQFKQEIKAGAPILIVGIDIAKSKHHGFFGTPDGRTIRRRLIFDNTKDGFETLLFEANRMIGENELEDVVFGIEPTSVYHKPLAEYLIREGYSVVYTTNNAIKKNRALLDGRWDKNDTKDAANVADLVSRGKCHFYDYPHRHYRDIRGLLSLRQRLKKQAQRYHLRIRNNLVAQYFPELDRQWFSCYQENLAIVRWFLSPAEICQTPFEEFFRRVCGKHKGLRQRQRLRQVWEVSSASIGCEYTAAPAFEATVLIESLLQCQRQIQQVESLLYEICESFEEYALLQSIPGFGPYISAAVLGGIGDADRFENRKQVLRLAGLDLGAHRSGKTSRTAVPVISKIGKSELRYALYQAAKIATTRTQEMRVYFERLVKGREREKGIITKMRVKVSAKLLVIAWTMMKRKERYRPGLLFLGEPVQQR

SEQ ID NO: 92100 - protein, 354 aa, unidentified
MKYYVGLDVGLEETSVCIVDSEGLTVREVKVSTEPEAIRSAAEGYADRLDRVGVEASSLGIWLYRELQSAGLPIIVVEARHMRVSLSTMRNKTDRNDARGIAQMMRLGWYRAVHVKNIDMQKMRTLLTNRKLLKRKLVDLENHVRGALRAYGLLVGAVARGAYEARIRELIEHCDPVFAMSIEVMLDVRRALLEGYERLHRVLLQVVQHDPVCRRLMTVPGVGPVVALSFKVGVDDPHRFARSRTVGAHFGLTPKRHQSGTSIDFEGHISKQGDISVREALCEAAASLLLRVRKWSALRAWGLRIARRSSMLCAIAAVARKLACILHRMWVSETDFHVGFGAKITQRLRLKPAQ

SEQ ID NO: 92101 - protein, 347 aa, unidentified
MSFVGVDLHTNSFTACRRAADGTESFETFTLSPAELERFCLTLDADDEVAFEATGNSAWFRDQVLPCVGRVVVVNPSQFKVIRQSVKKTDRNDARALALFLAKDMLPETRAKTQAESELGSLTQTRDLLVKQRTRLLNKVHALHNRHGIKLKRESLASKKRLLAITPDPFTPLEWVELEIVRDQALSLTDAIGKIDARIEEAASALDGYASLTSIKGIGPRAAAVFLSTIGNIQDFASADKLAAYFGIVPRVSQSNETDSRGRITKRGSRLARTALVQCTLIATRYSPYLKAHYDRIRLRRGSGKAIIATARKLLAIIYDTLKSGRVFTDFAAFQFQLGHTPAGQSS

SEQ ID NO: 92102 - protein, 263 aa, unidentified
MGLDVHKHYLIAIAVDADLSKVYGPRRVELSDLEGWVRKTITPQDAVVLEMSTNTWQLHDELKRHAHSVTVVHPPHVALIVRAQVMTDKIAALQLARLHAKGLLTGIWVPPPEIRDLRTLVAQRQKMTRLKTQAKCRLQATLHRYHLPPPEDGKVYTKNTELWWMSLPLSTLEKVRVESDWATLTFAEAQIQRLEKRMAEWAAQQETVTRLMQITGIGVVIAVRLVAAIGDIGRFPSAEQLVGYSGIHYRTVSGSSANELGIG

SEQ ID NO: 92103 - protein, 326 aa, unidentified
MKNFKFIGIDVSSATLDVCIKVEDKSSSTVIENKTTQIAKFFNSYEDQNIVVAMENTGRFNWPLYEVLAGRNFPVYVIPPLHLKKSLGLIRGKNDKIDAIRIADFIEKNHKQMTQWKYSSDTIQKLKVLLTERNFRIKVKRQLLKQQHDYKLMSKLGIDEELLLMNKELIYNAENQVKLIENRIDELIKSDSVLNEKSNLIKSVPGIGKVLSWYLLAKTNAFENIESPRKLACYSGVAPFSQQSGTSLKTKPRVSHFADKTMKSLLHLAAMTSIQRNNDLREYYLRKVSEGKNKMSVLNAVRNKIIHRVYAVIKNQKKYQINLDLS

SEQ ID NO: 92104 - protein, 431 aa, unidentified
MTERVSVVTTLLQVGIDPGPKECVGQAVDQYGVVCGKPIRFRPNREGVERLVARTIALAPEAERRFYVEASGSHWYGLVGWLRAQKEPVSLISPSYTKAQRRVSSRYAKSDARDAEALARAAFQMGERAQHPADLPEGPRLNLRLLCRHRYRLQRDATAIKLRLLGWLGFTTPGLAEWLGGDFSPADRALIARYPVVAKVVRRGKARVREFLECHAKGAVDEATLDALFELARQAYSPRDLDDALVAEQFRMELQRLALNEKLIRELDVRIAQVLPRCDPHGWARSLPGFGAVIAPILVAEAGTDLSRFANPHRFAAWAGVVGRAHGSAGRQTEGLPITKAGRGIVKAALFLAANVARQHDPHLRTVYENLRAKGKHHNQAVIAVARRLAELYWYIMTEQRPYEIQPPPPPSDPTGQPLPPSGTLPPPDGG

SEQ ID NO: 92105 - protein, 440 aa, unidentified
MGSYAGVDWASEKHDVRVADAAGEKLLAVTFAHDEQGLRSLCRQLVRLEVELVAIERPDGLLVERLLDAGLRVLALHPNQVAAARDRFRVSGGKSDGFDAFVLCELARTDNHRFRVLEPDSDQTKALRALTRGREDLVGMRTALTNQLRAELERFWPGPLGLFTDLHGRISLAFLERYPSPADARGLGEARLAGFLARERYSGRQKPAELLAKLRRAAAARVGELELSTRRQLVLGLVAMIKSLNAQIKELERQLARTLGEHPDGEIFRSLFRDPRSVICAAELLAEIGDCRGRYPSRDSLAADAGQAAVAIESGKRKAACFRWGCNKRLRAAFATLADSTRHWHPWAQDVYAAALARGHDHPRALRTLGRAWCRVVWQCWQKRTPYDPARHRALQQHITVTIPTASGPVVDQLATESMAAGLFATNAPTSRQQQVTAAQ

SEQ ID NO: 92106 - protein, 412 aa, unidentified
MEVMYPRCAGLDVHKETVVACVRIVEGGNVSRSVRTFATTTASLIELGEWLEVNGCTHVAMEATGVYWKPVWQVLADSSLELVLANAAQVKNVPGRKSDVNDATWVSELLAHGLVRASFVPEPAIQQLRGLLRTRKQLVREKASHVQRLQKTLEEANIKLESVLSDVMGRSGRAMIQALIDGETDPAKLAALAHWKVRASAVTLREALHGRVKRHHRFLLRLHLQQVDALDAAIAEIDREADAGLACFRDAVKQLSTIPGVSELSAQVILSEIGTDMGRFASAAHLRSWAGLCPRNDESAGKRRSTRLRRGAPWLKAMLVQCAWAAARTKATYLHAQFVRLRGRRGPKKAICAVAASILTAAYHMLKDGTFYEDLGAVHFDRRRPETQARRLLKRLAELGFSVELKPAAAVS

SEQ ID NO: 92107 - protein, 321 aa, unidentified
MTYVGIDVSKATFVVAYSPVKTNKTRTFKNTVKGVHEFIQTISPAAHHCVLEATGNYSALLVYLLSEAGITVSLENPLKIKNFARVMLAVTKTDEIDARLIALYGERMHPTPYKLRSDAILILKQKRTVLRQLKKQLVATRNLKGSLEVLPSFDIECKKIIERTITFLEKQIKAVEEKIASLAQDEYKKQMDLLTSIKGIGVTLAAALIVATGGFTYFDNAKQLTRYLGLSPTYQQSGTSVNVKGHINRNGDSSLRSQLYIAAMASLRCNAECKECFNRLRSNGKPGKVAVVAVANKLVRQAFAVVTQEKPFVDGFKSAKP

SEQ ID NO: 92108 - protein, 341 aa, unidentified
MNHYAGIDVSLEYSSVCVVDASGKIVREDVGASEPEALIAWFGSLGFEIARIGLEAGPTSQWLYAAMRDAGLPVELLETRHVRDAFKAMPVKTDRKDAQGIAQLMRLGWFRPVHCKSIAAQETRAILTARKLVQSKLHDLEMSLRGTLRGFGLKVGRTTPNRFAARINELVEGHPTLQFIATSLLAAHAVLLREFKGFEKRVRMMARNNERTRLLMSTPGVGAIVAVTYASAIDDPGRFTSSKQVGAHFGMTPKRYQSGQTDITGRISKIGDRSVRTALYEAAHVILTKPVKGSALKSWAARLAKRVGMNKAKVALARKLAVIMHRMLVDRTPFNPAAAAA

SEQ ID NO: 92109 - protein, 315 aa, unidentified
MSAGVFVGIDVSKAHLDIAVRPHGEPWRERRDERGIAALTARLRALQPELVVLEATGGLEIELVASLLAAEVPTCVVNPRNVRQFAQAGGHLAKTDRLDAAVLAHFAEAMKPTPRPLPDAQTRALQALLTRRRQLVEMVTAEKNRLAAAHENVRPSLQTHLDWLQHDLAQLDNTLHDEIRRSPAWREKDDLLQSVPGVGSVTAYTLIAALPELGQLTHKQISALVGVAPLNQDSGQQRGPRVIWGGRAEVRATLYMAALCGTRYNPVIKAFYQRLLAAGKRKKVALTACMHKLLIILNALLRSGQPWRNMATEPG

SEQ ID NO: 92110 - protein, 426 aa, unidentified
MKRTQNEKISQIKIETLVVGIDIGKEAHYARAFDYRGIELAKLLKFSNTAQGFELLDRWMQDICKQQGKTEVIAGFEPTGHYWFALGDQLKRQGHKLAIVNPFHVKRTKELDDNSPTKNDRKDPKTIAMLVKDGRYREVYIPDDIYQELREVVAERERLQERLNAIHNRVVRWLDIRFPEFAGVFKKWTGKAALLTLRTFPTPAMVIEAGEDKILATWRTVVKRSVGIKRAQALVKAAASSIGRTNGHVASKASLQNLLTEYELYHAQHERLEQLMWELLLQVPNAVKLLGIKGVGLVTATTFVGETGYIHRFEDPRQIQKLAGFNLVENSSGKHKGKTTISHRGRKRLRHGLFMAMIAILGKNQEFRELHYRNLTREKNPLNKMQSIVALCGKLIRIFYTILSKGVDYNPEKMMGDIEQSVKVAA

SEQ ID NO: 92111 - protein, 448 aa, unidentified
MFTMHYKRLLTLIDSVSSYLSVGLDVGADFTWMSIALPNGSFIGKPFKIVHSDPRSRDLAVAKIKEAQETYSLKSRCFLESTGIYHIPLLCFLRDKGFDCSVINPIITKNSTNINIRKLHNDKFDSKKAALVGLNVSLKTSILPDDSVVDLRNLVRDYYYFKDLQSAVSLKLTAELKVSFPAYAKVFSKVTTQSSLKLLTAYPLAADMLAASKDDIVKIIHSTARFGESYALRKYDAIIAAAQDAAVFGRALPSNAVRIRLYIDTYQEYQKHLDALLKALHETVERLQDTLIYDQICLLQSLRGIGFLSAVVLIAEMGDFKLFSSPKKLYAYFGLDPAVKQSGKLNGDKVHMSKRGSSLARRVLHMVALNNVKVDKGSGTPVNPVVYDYYTRKCSGKKKTVAMGAVMHKICNIIFAMLRDNKPFEVITPEEHCRRFAAEHPDKIRKAA

SEQ ID NO: 92112 - protein, 383 aa, unidentified
MHASNSCTPIADHNGTIFVAIELSQRNWLIVVRSPDRDRIAHHKLAAGAFDGVVALIEMAKARAARKLGSAPAVVSCYEAGYDGFWLHRRLTAAGIGNFVFDPASIAVEQRGRRAKTDRIDGELLLRTLMAHCRGEPRVVRIVRVPSPEQEDARRGSRERQRLIQEQTGHINRIKALLRLLGLSAGNPRRRDWPTWLADQRDWQGEPVPPHLLAELKREHARLLLVGEQLAALATAPAGGSVPQAEAQMTECKKLLGRLKSLGPAFSGTLTDELFYKDFRNRREVAGYCGLAPTPWRSGGTQREQGISKAGNRRARHKAIELAWLWLRHQPNSALSQWFRQRTRDASKGAKRIAIVALARKLIVALWRYLTTGLVPEGALVKA

SEQ ID NO: 92113 - protein, 418 aa, unidentified
MDVVVERCAGLDVHRDDVVATVRVPGAGRRRWEQQTQTFRATLAGLAALAEWLGEARVTLVGMEATGVYWKTVFQALEQRFECWLLNAHHLRNVPGRKTDVKDSEWICQLVAHGLVRPSFVPPAEIRRLRDLTRLRKAQINERGRSIQRLEKVLQDAGIKLTSVASHTYSKSARAMLEALLAGVTDPEQLAELAKSRMRAKIPQLREALASRFEIEHHGVMVAQLLAHIDTLDAAIENLHERIKLVLAPHARIVELVCTIPGVQIHAAQVLIAECGLDMARFPTVAHFVSWAGACPGHHESAGRRRSGQTRPGPRWLTDALTECARAAVRTKDTYLAAHFAQLRGRRGEPIAIGAIRHDILVAYYHIVRDRVPFRELGPDWQRKRYSPEHRARRLQRQLEALGYTVSLQATEDIQPAA

SEQ ID NO: 92114 - protein, 367 aa, unidentified
MKKVSTVAAKPSKKISQQKLTVGLDLGDRNSWYCVLDEAGQIQLEQRVRTTARALQEVFGALPRSRIALEIGTHSPWISRLLSELGHEVMVANARKVRLIGESRKKDDRLDAQTLARLARIDPQLLYPVKHRGAQAQADLMMIRARAGLVRARTGLVNTARGLAKSYGERLRGCNVRNMNPEKAEGLSPELQRALEPLLNAIESLSERIVEYNERIEKLAQQSYPQVALLKQIKGVGTLIALTYMLTLEDPHRFGKSRDVGCYLGLQPGRRNSGQSEPQMHISKEGDPYLRTLLVQGAQHILGPFGLDCDLRRWGLKLAERGGRNGKKRAIVATARKLAVLLHHLWVSGEAYEPLHNSQGRPLATAA

SEQ ID NO: 92115 - protein, 342 aa, unidentified
MQQSIFVGLDLGSSQCHQTVINADGMIIRSRCVPTSEQHLRNSFADLHGNVHVHAEASELSDWARSIINPLVTRFVISHPRSLAWIAKDSVKDDAVDARKLAELLRFNLVHEVYYEDRADRRSFKQLVVHHEQLSREQARLKSKIKARLRTLGIIRKDARLFSEAGQIELFASITDPLIEQMFRQSFAVLNQMLVSLSEAKRAMLKFSKQLPEVRLLQSAPGVGTITACRFVAYVQTPQRFSNKRKLWRYARLGITRRESNGKRLSHPHLDAAGVGSLKDCSRKIFEAARRTKKDNSFKRFYEQSLDNTKNAVHARLSTQRKILATLRAMWQANQPYRNDSG

SEQ ID NO: 92116 - protein, 435 aa, unidentified
MGMLTALSTRARIRAGVEETKKMEVVYPACAGLDLGKRFLVACALFPDERGQRQKEIKTFDTDTEDLRRLGEWLQERGVTAVAMESTGPYWKPVFNLLEERFECILVNPQHIKALPGRKTDVKDSEWIADLLRHGLLPRSFVPDREQRELRELVRLRQKKMQLLAAEANRLQKVLEGANIKLGSVASNVLGVSGREMLRALAEGEKTPDEMAALARGRLREKIPQLRRALDGVMADHQRQMILWALDDIEHIERRVQELDKEIAERTRPHEAVTERLMTVPGIGRRVAEVILAEVGPDAKAFDTPEQLASWAGLCPGNKSSAGKRLSGRIRPGNQSLKSSLVQASHAVSHSKNTYLGAQFRRFVRTKGVKRAAVAVAHTILVIVWHLLTTGDVYNDLGVNYLERADSSWAERQAVRRLERLGYTVSLTPKAGPAA

SEQ ID NO: 92117 - protein, 343 aa, unidentified
MDHFAGLDVSVKDTSVCIVDDTGRIVREVKVASEPDALLAVLTNRSYRFKRIGLEAGPLSQWLFSALAEADLPVICVETRHMRAVLKAQINKTDRNDARGIAQMIRVGLYRAVHVKTLRSQKLRMLLTHRQLLQSKAIAVDNDLRGTLRNFGLKVGMMGAARFEARIRELVQGLPDLAVLVEPLLVVRRVLREQVAILHRRLLAIVRDDEVCRRLMTTPGVGPVVALTYRATVDVPARFRKSKSVGAVFGLTCSRDQSGERDRAGAISRRGDKMMRAMLYEAAQSMLVRSTRWSWLKAWAMQIARRRGMKRAIVALARRLAVIMHRIWVDDTEFRWTRNAAAA

SEQ ID NO: 92118 - protein, 336 aa, unidentified
MEYGAIDLHKRYTWIRLLSAAGDVTCERRVPTTRDALRSAFGERPRARVLIESATESEWVAQTIEGCGHEVVVASPSYALMYGHRDPRIKTDRRDVVALSEACRLGIYRRAHRVSAVQRQQRRALKVREVLVRQRTMLINLLRAELRQDGVRLPTCAAERAVDRYRALTLPTDLTAGLSPVVAQLDELNDAIAASTDALTAAAAADPIVRRLQSAPGVGPITALTFRAVLDDIGRFADARSVAAYVGLVPREDSSGDRHRKGPITKAGPTGLRTLLVQASWVVWRQKTSGGALYAWVERLASRRGKRIAVVALARRLARILYAMWRDGTEYRVQPA

SEQ ID NO: 92119 - protein, 349 aa, unidentified
MDRTTYGLDLAKNVMQLHWVDAETGEIGRKKLARAKLANFFAQLRPVRIVMEACGSAHHWARVLGGLGHQVELLPARQVKAFVRSNKDDAADARAIWVAAQQSDIRRVPLKSCEQQAVLALHRTRSHWVSVRTATVNALRGHLYEFGVVLRGGRKAGLKALGEQRADIDAQLPAVLRGLVDGQLQTLAQVQQRIDALEHELAALQKQLDNAPELREVPGIGVLGATALAATLGDGLAWRSGREFSASLGLVPAHSGTGGKTRMGQLSKRGDPYLRTLLIHGARSVIEHTKHKPKWLEQMLQRRPPNVVAVALANKMARTAWALVAHGREYQKEWKSTPPKGCAAQAAAA

SEQ ID NO: 92120 - protein, 364 aa, unidentified
MTNCITWVGMDDAANKINVAVFLGQASSPHEEFVVVNDQSGHGRLVKKLKSLPGEVRCVYEAGVNGYHLQRVLSKNKISCDIAAPSLTPRRAGKRVKTDPRDAKDLGKLYRAGELTSILIPGIKQESLRDLVRAREDAMEDQQRARHRLNRFLLRRGLKYQAGKAWSAGHLKWIKTISFDEAEAQTVLMEYRETLAEATERMKRFDQKVEEASKAPEYKKLVSYLMGLRGIKALTAMTIISETIDLKRFTDARALMAAIGLVPSENSSGERESRGGITKTGNSHLRRVAIESSWHYRHAPVAGKALKNRRAGLPLEVLEIVRKADRRLNQRYWHLVNKGKNTRTAVVAVARELAGFVWAIGQVA

SEQ ID NO: 92121 - protein, 424 aa, unidentified
MDVIHERVAGLDVHKEMVVATVRVMVGAKAERECRTFETTTAGLLVLLAWLTEARCSHVAMEATGVYWKPVWNILSDGAFDLIVANAAHIKNVPGRKTDVNDATWIADLLACGLIRGSFVPNEKFQELRALQRTRKQLTREQTRHVQRLQKTLEEANIKLDSVISDIMGLSGRRMIEAIIAGVRSPRKLADLADRRIKATPKELYDALHGRLTDHHGFRLRLHLGQYDALAEAIASLDKEIDAAIGRIDEEREFAGKAPFRAMSREVCKIPGINALSAQTILAEIGLDMQRFPTAGHLVAWAGLCPGQNESAGKRKSSKLRKGAPWLKTTLVQCAVSAKNKKDSYFRAQFQRLKSRRGAPKAVCAVAASLLTTIYHMLKDGAEFRDLGTEHFDKRPTQAKINRLLAQLAKLGYQADVRLLANPA

SEQ ID NO: 92122 - protein, 318 aa, unidentified
MVREVFVGIDVAKAQLEVALRPGGVRFTAENSAAGIAALVERLSAHEPSLIVLEATGGLEQPLSIALAEQGLPVVVVNARQVRGFAKALGKLAKTDRLDAQVLAEFAERIRPQVRDVSDARARALEALVTRRRQVVEMMVTERNRLHATYAAAVRGDIEAHLLYLQGRKDSLEQELMVLVQANPDWLSKAQLLRSVPGVGPVLTVTLLAELPELGCLSHKQVAALVGVAPLNRDSGLLRGQRGTWGGRATVRTTLYMAALVARRSNPVIAAFYERLLAQGKAKKVALVACMRKLLVILNAMLRSHTPWQHPLVPTPAT

SEQ ID NO: 92123 - protein, 360 aa, unidentified
MPIQSNKNSYKGQNIFVGIDAHARQWHVFASPYPGIGAKAVCMPPSASGLLSYLNRNFPGGKYLSAYESGFCGFKPHRDLLAKGIENIVFNAADLRKSQKEQLRKTDAVDCKAIWENLAKGDLHAIYVPTQTDEQNRELIRGRETVVKDIRRCKQRIKMFLHKSGIESPEELKGKEAYWGSKYVEWLTTLSDSLDGGSGMKLSSLLEQLSLLNGQIRKYNKEIHSVMTKRHAEIYELLPSVPGIGKLLAAKLCLELVDFSRFADARHLAGYIGLVPDCKISDKSVGILGTTIRRNSLLRTALIEASWIAVSKDPTLGAFFSKCRKEGKHPNVAIIAVARKLVNRIFYVWRTKSKYELSKD

SEQ ID NO: 92124 - protein, 369 aa, unidentified
MEQHTEVFVGIDVAKARNAIAIADGERGGEVRFLGEVDASKENMRRVIQRIAAKHGRAHFCYEAGPTGYGLHRLITSMGHDCVVVAPSMIPRKSGDRVKTNRRDAVALAKLHRAGELTPVWVPDDGHEAMRDLVRARAAAVESVRVHKQQVSAFMLKHSRVFPRKTTWGARYMRWLQEQHFDYPAHQIVLQEAVEAVRLARERVERLEQIIEELVPRWSLAPVVEALQVLRGVNLVVAVTFVAEIGDLRRFENPRQLMGYLGLVPSERSTGDTIRRGSITKAGNGRVRHLLVESAWTYRHAPRIGKAKLYKMERVPPKIREIAWKAQTRLTARYRAMIARGKKTTIVCTAIARELVGFMWSVAKEAQTT

SEQ ID NO: 92125 - protein, 391 aa, unidentified
MIYVGIDVAKDKHDCFITNSDGEVLFKPFTIFNNLDGFNDLYQKIESVMDDVTKVKVGLEATGHYSYNLLGYLIDKSLPTYVINPLHTNLYRKSLSLRQTKTDKVDARTIASMLMSDVNLKSYSDISYHNEELKSLTRYRFDKVKERAKLKTSVSRLVCILFPELEKLVPTLHMASVYSMLSEFPGAKQVADAHLTRLTNLLSESSKGRYGKETAIAFRNAARTSIGSNMPAKSLELKHTIKLIRELTSDIDEIEHEIKLIMDEINSPILSIPGINYRMGAMIIAEIGDFNRFDSPDKILAYAGFSPSTYQSGQLDGAYAHMEKRGSRYLRYALYNAAKYVCHWDPAFADYLAKKRAEGKHYNIAISHAAKKLVRLIFAMEKSRQPYCSAA

SEQ ID NO: 92126 - protein, 380 aa, unidentified
MDVHSINYTLCAMEPTIGSEDRIFGEVQVAPDYKAIICFIETLKMKLGFYDDYSIECGYEAGCLGYTLYHQLTGAGIKCVILAPTTMLTPQGQRVKTDKRDARLIAQCLCYGGYHPVYIPTGEDDAVKEYLRMRDDHKLALKKLKQQINAFVLRHGHQYIGTKWTIKHITWLNKLELDPMYRETLNEYMASYEEQEAKIERYDKRIEEIAAEERYQENAKKLGCLLGIRTHTALSLIVETGDFKRFAKGNIYAAFLGLTPGEHSSSKNVNRLGISKAGNTHLRCLLIEAAKGICKGVIGYKSKELRSRQNGQAADVIAYADKANTRLRSKYYKMIRHGKKKNVAVTAVARELACFIWGMMTGNTSVVSRAATSAPAVSQG

SEQ ID NO: 92127 - protein, 353 aa, unidentified
MIIIGVDFHPEFQQIASVDTETGEFQEKRLAHREDAETFYRALAGQKVRVGMEASGHARWFERLLAELQFELWIGDAAEIQSKRVRKQKTDRQDAQLILRLMLKDDFPQIWVPSWENRDLRQLLWHRHRMVQVRTRIMNQLQALALNEGLRCKKRLWREHGRRQLESFRLAPWASRRRRDLLELLDRLNPTIAELSQAIEQEAEKCPEAQRLMTHPGVGPLTALAFVLIIGKAERSQCGKQIASYLGLVPLEKSSGNRRRLGHITKQGSSMVRFLLVEAAQVTVRSLPEWRRKYVQLMMRRGRKIAKVAMARRLAVALYWMWRKGWNYEQSKSSVRTRASSEQAMVCSRTPSN

SEQ ID NO: 92128 - protein, 423 aa, unidentified
MTEDTEAIEWFVGFDWASGTHVACLLDRNGRAIEERKIAHGGAELGEFGDWLIAKTAAPPARIGVAIETPHGPIVEMLLERGFAVFAINPKQLDRFRDRFTVAGAKDDRRDAHVLGDSLRTDRRAFRRLSVDDPTVIELREWSRIADDLSQERTRLANRIRQLLWRYYPQMLQLADDLTAENFLALWECAPTPARAAQIDEAGLAKVLKAHRVRRIGPAEALRILRQTPLRVAAGATEAAVAHIEFAAERVRLVNRQLKDAHQKLEALCARLERPTAGERENEPGQQSEQRDVTILRSLPGVGRTGLATLLVEASEPLRRRDYQVLRVLSGVAPVTRRSGKARLVTRRMACNERLREAVYHWARVAMQIDPESKRRYAALRQRGHSHGRALRTLGDRLLAMACAMLRSQTLYDPDRKAVSPAA

SEQ ID NO: 92129 - protein, 460 aa, unidentified
MPRAKPRVASFPTLQPPAAGIDAHAAPQGGAVPRGSAPPPGRPPRRDLLPPHVRAFGACTADLHALADWLGECGVTAVAMEATGVYWIPLFELLERRGFAVILVDPRQTRQVTGRPKSDRLDCQWIQRLHSCGLLAASFRPADDIVVLRGFLRQRQRLVQDAGRQVQHVQKALEEMNVKLTEVVSDIVGVTGLAILQAIRRGERDPAALARLRHPRCRASEADIARALGGTWRAEHLFALDQALAVYETYQRLLGACDERIAACLRGFTDRSGGRPLPAKRAHSRKATALHVDARSLCHRLAGVDLTAIEGIDEATALVVLSEVGPEMAKFPTAKHFASWLGLCPSHRGSAGKIASRHVRRGCNRAAKALRLAAQGCHHAKNAMGGFYRRIQARCGGPKAVVATARKIAERVWRLLTYGADYVRLGEAEYAARYRRKQEKNLAKRAAELGYTLVPTAAPA

SEQ ID NO: 92130 - protein, 446 aa, unidentified
MARKRKQGSKTNGAVLPVMRPDAAGIDIGATEIFVAVPADRAAENVRSFPTFTQDLYALADWLKQCGVKTVAMESTGVYWIPLFQILESRDFEVCLVNARHVKNVPGRRTDVCDCQWLQFLHSVGLLKASYRPDQEVCAVRSLLRHRESLVQMAATHVHHMQKALDQMNLQLHHVISDIVGQTGLAIVDAIVDGERDPRILAKLRGERIKATEEVIAKSLVGDYRHEHLFTLKQSLAAYRSYQKLIEDCDREIRAHLEEFQPPSPPSAPTPRRFSADGILKFELRRVFGIDLTQIPGIRTGIAQILFGEIGPDFTKFRSASAFASWMGLCPDNDISGGKVLWVGTRKVNSRAATALRLAAQSLHHSKSALGDFYRRMRAKLGAPKAITAAAHKLARIIFHLISTRQEFDDSKFAADQLRFQKRQEIKLRAKAKSMGFELIPLQQAG

SEQ ID NO: 92131 - protein, 337 aa, unidentified
MEQEQLNLTTALFVGIDSHPTEHTALAINRFEEEKGKLRFENTHQGIQECLAWLATLTPEKTQVVIGIEGGETRHTFASYLLDHYSHVYEVNPLFTKQRRMLGTRQAKSDPADAKLIAEVLTRKVSFLPKFHREEVSPQRFCLRKTVKFYEELTVQGARIKNRLHQLDREYDLARTKEEQKILRLIRRERRNELQRVKQLQKKLTRDLSLLLQTQGENLTTIKGVGTIIAARIVAHANGIGRFPNAAKFIRYAGIAPVEKSSGKKKRFFRDMRNNRQLNTAIYLLALNQLRWNPKAKEYFNKKVAEGKSKKHALRCLMRINANIVYGMLKSGEAYRG

SEQ ID NO: 92132 - protein, 458 aa, unidentified
MKDKGGKRKKVEFELQVMRKNVAGADIGSREHWICAPAVQGEGCEVERFGSTTAELYRMAQWMKARGVKSVAMESTSVYWISVFEVLDRQGFEVILVNARCLMSVPGRKTDVLDCQWIQKLHSCGLLKGSFRPADGVCALRALVRERATLISQQSDWIRRMQKAFDQMNIRLHHAVADISGTTGMAIVRAIVKGERDPKRLAEFRDARCKKSSEEIIAYLQGNWRDEHLFNLEQALKMYDFLGERMDAYDAAIMQALQRLEQPELQHSAPPALPTTSKMRTLMRRGQEPMREALYRLNGVDLLTIDAIGAETAETVLSEFGWNLSTFPTERHFVSYLRLSPKLAISGGKPLRGKRRQSTATRVGTALRTAASTLRHSKTALGAEYRRLARIKGPGVAVFAMARRLAVLIYRLLKHGQAYVDQGMKVYEERFQQRKLAACQNMAKSLGFGLVMLPQTAT

SEQ ID NO: 92133 - protein, 344 aa, unidentified
MDHFAGLDISVKETSVCIVDDTGKIIREVKVASEPEALLAVLKNPAYHFKRIGLEAGPLSQWLFSALAEAELPVVCVETRHMQAVLKAQINKTDRNDARGIAQMMRVGLYRPVHVKTLRSQKLRMLLTHRELLQSKAIAIENDLRGTLRNFGLKVGMVGTVKFEARIKELVENLPDLAGLVEPLLLVRRVLREQFVVLHRRLLAIVRDDEVCRRLITTPGVGPVVALTYRATVDVPARFRKSKSVGAVFGLTCSKYQSGEIDRSGRISRCGDEMMRVMLYEAAQSMLYSKRWSWLKAWAMQIAKRRGMKKAIVALARRLAVILHRIWVDGTEFRWTREQATAAA

SEQ ID NO: 92134 - protein, 342 aa, unidentified
MTFVGCDLHTRMQQVAVLDTGTGEVSEHRLPHEGTAVEEFYAALPRPVTVGIESTGYAVWFHTLMQRLGHPLLVGDAAKIRAMVVRKTKTDRRDALHILDLLHHDRLPAIWVPDPATRDMRALLTHRMRLVRIRTMVKNGLQAIALNSRLACGSKLLRQAGVAQLQALALPPHTARRRDQSLELLAGLTTQIRELDDAITTAALGHPDAPRLITHPGVGALTALTTIVVLGPVSRFHDSKHVVSYVGLAPALHASADKYHLGRITKQGSPLLRFVLGQAAAHAARMDPDLKRTYGALVHRRGRPKAKVAVARKLLVRLFIMLRDRIDYDEFRRRGRTALAAA

SEQ ID NO: 92135 - protein, 317 aa, unidentified
MEATVVGIDVSKDRLDVAVYPSDEPGFAVTRDAAGLDALAARLKPLGPAAVAVEATGGFESVVVASLAAAGLPMLVVNPARIRAFANALGKRAKTDPIDAQVIARFVAATKPELRPLPDEATQRLADLVARRRQIIAMMVAERQRQKRLLAPRLQHSITRLLEALQKELSEVDREIDAEVQGSDIWREKEKLLASVPGVGPVIARTLLAEMPELGRLDRREIAALAGLAPWTRQSGQWRGKSFIGGGRASVRAVLFMGAITAARHNTILKAFHQRLIDAGKPKLVALVAVARKLLTILNAIIRSSQAWKSDVHAASI

SEQ ID NO: 92136 - protein, 477 aa, unidentified
MTPYKDAFPEPCPPPPTVPEPTVLTLPLQLYNPHAAGIDIGEAEHWVAVPPDRSPQPVRRFGTFTADLDALADWLLDCDITTVAMESTGVYWIPLFELLEARGVQVFLIDPRQAKRAPGRPKTDRLDCQWLQRLHAYGLLAAAFRPADQICVLRSYLRHRQMLLTYGAHHIQHMHKALQQMHLKLSQVVSELTGATGMAILKAIIAGERDPLTLAKLRNPHGHHSEDEIAKARQGTWRAEPLFALQQAVELYQFSHQQLTLCDQHIQTHLATFADKSAGQPLPPKARRHKKAHEPRFDARTPLYRLAGVDLTTIEGIEEGTALVILSEIGTDMSRWPSVKHFCRWLGLSPPHKISGGKVLSRRVRPGAQRVAVALRLAARTVHHARTALGAFFRRLRSRLGAPKAITATAHKLARLVYSLFKHGSAYVQQGLEAYESQYHERKVKGMARQARALGYTLVALGTPEGQSLDAVAAPTS

SEQ ID NO: 92137 - protein, 350 aa, unidentified
MPRNFDTAVVTIGIDPGKNTLHLVGLDARGEIVLREKVARTKIVSRLANMRPCLIGIEAGMGTHYVTRDLLALDHDVRQVPPVYAKPFRQTHKNDFRDAYAVAEAVQRPTTRCVPPKTDEQLDLQALHRVRYRLVGQRTAIINQIRCFLLEHGITVRQRLHWLRHALPDILAQRTDVLSPRMVRILEDLAQDWRCLDDRIEAVSGEIDALSKNTELCRHLMTIPGIGPIISSAFVAAIGDGAAFTRGRDFAAWLGLVPKQISTGDRTILGRITKRGNRYLRMLFLQAARVVLLRPRNWMQHSFGPWLAAAAQRLHHNVLATALANKLARIAWSVLVQHRDYEARLSVAAT

SEQ ID NO: 92138 - protein, 323 aa, unidentified
MSATTTTATKVYAGVDVSKGHLEVFVLPTGERFSVPNDDSGVEELLARLDEPSSPALVVLEATGGFERPVAAALAVSGLAVAVVNPRQARDFARATGKLAKTDRIDAESLARFAEAVCPAPRPILDEEARALGEILARRRQLVGMLTAEKNRLLTATTRRVKKRIEAHIRWLEKELTRANGDLQEAIEESPVWRENEALLRGVPGVGPVLARTLLAELPELGELKNKQLAALVGVAPLNRDSGILRGRRTIWGGRGGVRAALYMGALVATRCNPAVKVFYERLLAAGKPKKVALVACMRKLLVILNAILRNRTPWSPSHALAP

SEQ ID NO: 92139 - protein, 427 aa, unidentified
MPYQIAGIDVHKKMLAVAVTDVEVEGEWRFERRQFATSPSQLRVLAAWFVERDVEEVVMESTAQYWRPVWDTLERQWQPTRRARGTAGPTSGAMHLAQAQSNNGRRGRKQDFPDAERLVKRLVAHELTLSFVPNVTQRLWRTVTRRKYQLTCNRVQLQNRLECLLEEAHIKVSSLVSDLLGLSARRMLRAVASGETDPATVAALGSARLHATPDQLRDALGACADLDPVYRRLVAMTLDELEVLEAHIHQLDEELARLLRVHQDAVERLAAVPGLGVDSAQQIIAEVGPTATTFATAKRLASWVGACPGHDESAGVNHSHRSPNGNRQMRRLLNQAANAAVKTKGSIFELVYRRLVVRLGHAQAIGAVAHRLCRLVWKILHDHVAYEERGPAVTKDRARRRAAKMIRELRSLGYRVDLADAPSGSPA

SEQ ID NO: 92140 - protein, 444 aa, unidentified
MRSEPEEIPDEEHEQVLDRVCAVDVAKESGMVCTRLPAAGQRRISRVWQVPATANAVSDLAGQLVDLGIEKVTVESTSDYWRIWYYLLEAAGLDVQLVNARDVKNVPGRPKTDKLDAVWLAKLTEKGMLRPSFVPPRPIRVLRDYTRMRVDLTRDRTRNWQRLEKLLEDALIKVTSVASKLQTLSTRDMVEALIAGQRDPQALAGLARGRLRGKHAALVEALTGQFDAHHGELARILLDQIDRLDAQITQLTQRIAELVSEIDHAGPPPPDPGSGEQHPPALDALHRLSEIPGLSTETAQLIIAEIGLDMTRFPTAGHLVSWARLCPRTIQSGTKNNAGKAGKGNPYLKGVLGLAATTAARSSGSFLAERYRRVVKRRGKGKALVAVARSILVIIWHLLADPTARYHDLGPDYYDQRVNINRKVNSLVRQLEALGHTVTLQPTA

SEQ ID NO: 92141 - protein, 453 aa, unidentified
MCLEERPILEPNAAGIDVGAREMFVAVPPGRDENPVRVFATFTEDLERLTDWLEQCGVTTVALESTGVYWIPLFEILEQRGIRPCLVNARHMKNVPGRRTDWHECQWLQFLHSVGLLRAAFRPGQDICAVRTLVRHRNELVSAASQHVQHMHKALTQMNLQIHHVISDITGLTGLAIVDAILAGERDGAELAKLKDPHIKADTETIRKSLEGNWRPEHLFTLGQSRALYRIYQQQIVSCDLEIERMLGEFEPRVDPTQKLLPPDGKRNRAGRKRRRKNGHPHPEFDLRTEVYKLFGVDVTQIPGLEENALPLFSEVGRDMSRWPSAAHFVSWLALCPDNDISGGKLLWRGARRVKNRAGHLFRLAAFSLHHSPTPLGNYLRRMKTKLGPKGATMATAHKIAVIFYVMVKKQVEYDQSIWATRDAQREKRLETKLKRQAKQLGYELVPIQPKAA

SEQ ID NO: 92142 - protein, 417 aa, unidentified
MKRLLERCAALDVHKKQVAACVRILGAAGEIEELNVEFSTMTSQLLALRDWLKAFGVTHVAMEATGVYWKPVYYALEDEFELLLVNAQHVKNVPGRKTDTRDAQWLCQLLECGLLRASFVPPKPIRELRDLTRYRKSLIQERTREANRLHKVLEDAGVKLSSVATDVLGVSGRLMLQALVSGTTDPEVLADLARGLLRKKLPSLKEALTGNFRAHHALIVSHILTHLDYLDETIGEISREVERRLAPFAHKAELLTSIDGVAARNAQVIVAELGPDMSRFPSDRHAASWTAICPGNNESAGKRKTGRTRKGNQHLRAALIESANAAIRKRDTYLRAQYEQIKRRRGHKKAITAVAHSILIACYHVLNDEVPYRDLGGDFFARRADPARITKRLVAQLERLGHAVTLQTSTAPAAATP

SEQ ID NO: 92143 - protein, 414 aa, unidentified
MVVLHPRCAGLDVHKDSVVAAVRLAEPGGVEAEVRRFDTTTPGLLALGEWLAGCGCTHAVMAATGVCWKPVWHVLSDGELGLVPANAAHVKNVPGRRTDVADAAWLAELLVHGLIRPSVVPDAPAGAMRALLRTRKPLVRERASHVQRLQKVLEDANLKLASVLSSVVGVTGRAMLEALIAGESDPDRLLALVTYRVKAEPARLRAALTGRLTDRHRFLLRLHLGQYDALAQALAEIDAEVERDLDPFREAIGLLRSIPGVSDLSAEVILSETGPDMSRFPTAGHLISWAGLCPRNDESAGKRRSNRLREGAPWLKATLVQRAWAASRKKDGYLRAQFQRLRQRRGPKKPICAVAASILTAVWHMLRDGTFWRDLGPNHFHRRSPEQQANHLAQQIAKLGFTCSISPHGEPASV

SEQ ID NO: 92144 - protein, 337 aa, unidentified
MRYLGVDLHTNSFTVAYRTEKGSDRVREYQLRKIGEFKRTLRKTDKVAVEATGNTRYFVGQVCNRVKEVIAVDPNKFEVIKKSVNKTDENDAKTLALFLSKDMLPKARLKTKEDAQISSLVGTRDKLVKLRTTLINKIHNILNSYGIKRKKESFSSNKGLDSILCLDFDDIVLFELKILVTQIKSLNDNIKRLDIEISQRGKKLEGHKNLSSIKGIGDKSATILLSVIGNVNDFADEDKLAAYFGIVPRVSKSNQTEHHGRITKRGSKIGRTTLVQCTLIAKRYSPYLAKYYERIKARRGSGKAIIATARKLLGIIYNTLKNDWVFEDFPNFVLVNS

SEQ ID NO: 92145 - protein, 412 aa, unidentified
MKGCVVMNQNTCITIDVSQNKSHIQGFIGPNKPLSKARTMRNTKQGFQFILILKNLIESKTNETPLIVFEFTGIYHKPLEKFLISQNLKYHIVAPLKAAKARNSEIREQKTDARDCLSLSKLFYSNNLGIFYSENETYSNLRKLNRYYDTCMKHLIKIKVNFRETLAVVYPNYKKLFSSIYSDDSLTFLKEFPHPSLYTSKLEDRIIEILKNKWDHLESWTSSKVKILTPLINEVVSGCNVTEPDIIMLLSYISQIEYYLNQIEITLSQMNELAKKVPLYNLVHSLPGIQDILTCKFIAEVGDISRFSNYKQIVAYAGIDPMIRQSGDKDGLHLKMSKKGNKRLRTILHLMVSSLIKANREPNAIKDKYQKKTHQLNPLKPKVASMACANQLVRIIFYMHKTSSTYTYHECK

SEQ ID NO: 92146 - protein, 370 aa, unidentified
MLDTTTFIGLDVHARSIKAVSLDVMTGEVRAATFGYDAGAVAEWVRSVDPRARCVYESGVTGFDLQKRLSGLGVDCVVGAVSKMIKPSADRRRKNDRNDAEFLARMLSVGNVVEVWVPDDECEAARDLTRALEDARDDLSRSKQRLSKFLLRHGLAFDERTPTGRRKGNWTRAHWSWIESIRFAEGADNDVLAYYVDAVRRAAEEKARLEGLVEAEARKPRWRRRVDSLRCLKGVDIATAADLVFEAGEFSRFRNARSFAAWVGLTPSEHSSGESDRRGAITKAGNKHLRKALVEAAWHYLTCSRRPKEPARGQAPDRVARRHAAKGVRRLVERREALLARGVHGNKANVATARELACWVWAVGLMAEEA

SEQ ID NO: 92147 - protein, 336 aa, unidentified
MDYKRIAIDISKHVFTVHGVDPLDQAVLRRNLKRSDVEKFFRQVGATEVVMEACGSAHYWARVLEQLGHRVRLLPAQYVKPFVKRSKNDRTDAEAICEAASRPGMTGVPVKTAQQQADTMILRHRDLLIKQRTATINALRGHAAEFGVITGKGTSKVQPLLNKLAEDEMVPTVARGMFERMREHIDQLDQQIDDLEKELLALHQANKLSRSLAAMPGIGPIIAINYTLTVAPEHFKSGRHFAAWLGLTPKEHSTGGKQRLGRISKAGNERLRQLLIVGATSVIRHAKPGAKSASAWLLKLLERKPRKLVAVALANKMARILWAMMAHGEAYRHSPA

SEQ ID NO: 92148 - protein, 347 aa, unidentified
MLHVGLDLSRARVDVHAMDEMGTPVVVTTASPDAGGLACLVERLGRWGQPVCAAIESMNGARFVHDQLELAGWRVEIADAQKVKGLAPLACKTDRIDAWVLAELSRRDLIPAVWLPPPAVRADRERARWRLHLVKHRTALKNRVHSTLLTFGHPCPVSDLFGVTGRDRLSRLAMPDPWAGDVAATLRLIDTLEEEIDAVEKALRQAGADHAYLQLLMTAPGIGWVLGYTIAAEIGDIGRSASPRKLTGYTGLCLRVYQSGGQDHRGSLATNGPKYLRWALIEAAIHAAKHPIYRDRYQRTTTRLGTQRGKKIARVDIARKLSEAIWYMLTTDKPFAPAGAAKRTLAS

SEQ ID NO: 92149 - protein, 372 aa, unidentified
MTSIIYVGMDVHTTNYTLCCYSMEDDRFFAEVQVEPDAKNILKYLARIEKQQSRDCRIVCGYEAGCLGYSLYHQLHAHGIDCVILAPTTMMTKPGKRIKTDRRDARLISKCLAFHTYSPVYIPTEVDDAVKEYIRMRDDANSALARVKQQIIAFCIRHGKIHDGKSYWTNKHLEWLSSLDLGNKILSEVLQEYLIRYYHLQEQVDMYDMRINELAQAEPYRQKVEKLGCFRGIAAHTALPFCVEVGDFRRFATAQQFASYLGLVPGECSSGDKQQYTGITKAGNSHLRKLLVETAQVFGRSATKSGKSVALKERQAKCDSLTVAYADKANARLKKKYFKIVMRSKVNIAKTAVAREMACFIWGMMTDNISCA

SEQ ID NO: 92150 - protein, 356 aa, unidentified
MIKIKTLSFEGVTIYCGIDVHKKNWRVNIRTFERELEDFSQNADVDCFIAHVKKQYPGAKVKVAYEAGFCGFCACRKMVLAGIDCIVTNAADVPSSDKDKKQKNDTVDARKIARELSKSNLQAIYVPTVKEQNDRSLVRVREQMVENQTRCKNRIRHLMHFNGLKVQDGIDKEKYWTIAFIKALQELDCGDESLRMTLNMMLKELAEIRKRVLESTRLVRKLAQTDAYSKKVELIRSIPGIGQVNAMVILTELGDIQRFANFDHLCSYAGLTPDTAGSGDKKKDRGITHRCNNRLRTALIESSWMIISKDPAMLMMYSQYCRKMNKNQAIIRIGKHLLSRIKYVLIKQEKYETCLV

SEQ ID NO: 92151 - protein, 356 aa, unidentified
MIRIAKAKSTAIATLGVDIGKNTFHLVGLDKRGAIVLRERLSRSQIEIRLANMAPCLVGMEACVGAHHLGRRVEALGHDVRLMAAKYVRPFCRKQKNDFNDAQAIAEAVTRPTVRCVALKTPAQLDLQALHRVRQRLISQRTGVINQIRALLLERGIAIRQGWHALRAELPRALTMTDRLTPRMLHIVEDLAGDWRRLDERLEAVSTEIAQLAHADEGAMRLMSVPGIGPIISSATVAGIGKGDVFDKGRDFAAWLGLVPKQTSTGGRPILGRISKRGNRYLRQLFVQASRVVLLRPQTWERYGLKHWIDAAAQRLHYNKLAVALANKLARIAWGVLHSGRSFETHRENGHAPQPT

SEQ ID NO: 92152 - protein, 350 aa, unidentified
MKRATEKLYAGLDLHGNNVVIGVINQDGQRMAQRKVDCDLEQVVSFLQPFKSHLQAMAVESTFNWYWLVDGLRARGYVIDLANPAQIEQYSGIKHADDQHDAFHLAELQRLNILPKAHIYDATLRPVRDLLRRRTNLVHQRTALMLSFKSLYARTTGQSLPLKELKELTPKEAVTLYQHPANQLIARVQVEHMEALAASISRVEKAVLACAREIPLYDRLLTIPGIGKILGMTITLEVGDIHRFQTDGDFASYCRTVDARRLSNGKAKGENNAKCGNKYLSWAFVEAANFAKRYDEPCRRWYDRKAAKTSTVLATKALACKLAKAAWHLMARQSHYDEKRMFPELAMKKA

SEQ ID NO: 92153 - protein, 346 aa, unidentified
MPPTDCLVTIGVDSHKDLHVAVALDQLGRVLATTRVPTTPRGFGQLERWAHRLGTIQRLGVEGTGSYAAGLARWLQGRGYQVVEVNRPNRQTRRRRGKSDPIDAEAAARAALAGDAVVRPKGADGVVEMLRVLRMARRSAMKARIQTIQQLDSLVVTAPDQLRARLRRLSLEQLVPVAAGLRPGELVGPLAATKLALRELARRHQALSAEVARLDTEIVRLTATAAPRLLARGGVGPQVATALLIAAGDNPARLRSDAAFSMLCGAAPIPASSGKVVRHRLNRGGDRQANNALWTIAVCRMSYDPRTIAYVRRRTQEGKSKLEIIRCLKRYIAREVHRDLKAALVT

SEQ ID NO: 92154 - protein, 408 aa, unidentified
MKTLHRRCAGLDVHSDSVVACARLTVRTKASHEVRRFSTATRDLLELADWLAAQGVTHVAMEATGIYWKPIWHILEGRFELVLANAAHIRNVPDRKSDVNDAVWISDLLAHGLIRASFVPPAQIQDVRDLTRTRTQLAREVAQHIQRIQKTLENANIKLTSVISNIIGTSGRRILKAMIAGETNPAKLAELGSTRLKCPRAELTAALDGRVTAHHRFLIAHHLSLIGELERHIAAFDARIEKLLRPLRDAVAQLITIPGVSKVSAQVILAEIGADMTPFPTSGHLLSWAGLVPRLDESAGKRRSTRVRKGAPWLKPVLVQCGWGAARTKGTYYQAQFFRLKARRGPKKAAIAVAASLLTAAYHMLKNGTFHQDLGADFLVKRDKARIVTKLASRIKDLGYDVSFTPAA

SEQ ID NO: 92155 - protein, 394 aa, unidentified
MKLIGIDIGKNKHFFCVMDQQTGEIISQPVSFSNDKEGFDFLVQKIKSYPKDSILIGMEDTGHYHFALLKYLLDLQYTVALINPKTTDFNRKMQGGITKNDKLDTINICDVLDTPERKKQYRITKVNSFDLYEQKQLTRHHHNLKEEENVYKNRLQKCIDIVFPEFNKLFNSKYGIVYMNILKMFGSAENIANTDIRTIRKCFEIEGRGNRISLTPERLKECAISSIGISSSAEVIQIKHLTAQIELIEEQLTEIDKKIEEFSIQNNSPILSIPGISHFSGTSILAELGDISNYSKPSQIIKFAGVAPLHYESSQFNAQHTAITKKGSKYLRKTLYQIILPVIRHNPVFNKYYQLKISQGKSHRCAQGHCVRKLLRIIYHLLKTNQQFDPQLLR

SEQ ID NO: 92156 - protein, 393 aa, unidentified
MGRVVIGMDPHKRSATIEVIDGREQVLATGRYATDTEGYRLMVAAGREFPDRVWAVEGSAGIGRHIAQRLVADGEIVIDVPAKLSARVRVFDTGQGRKTDPVDAHSVAVAGLRRPGLRRVVADDASVALRLVVDRRDELGRIRTQTLNRIHRLLLELIPAGAKKGLTRGHAGQLLRAMPPPADIVTQTRYHLACELVEDLTTIDEKIKAANRHLSQLLAATGTSLCDLNGIGPSGAARLVGDIGGIHRFASAGHFASWNGTAPIDVSSGDQQRHRLSRAGNRRINRVLHIMAIAQLRHDSPGQTYYRRRLAEGKTSMEAMRALKRRLSDVVYRQMINDARRAAAAQPRTSPGGHSGATLQSSAASLIPTADTSDKSQPGPATRKPKRTLAPTT

SEQ ID NO: 92157 - protein, 411 aa, unidentified
MEVVHARCAGLDVSKKDAKVCVRVAGSGRRKTVETVTTWGSMTNQVLALREHLIAQGVTCAVMEATGDYWKPFYYLLEDAGFEVMLVNARHVKNVPGRKTDVADATWLAQLGAHGLVRASFVPPEPIRELRDLTRARTAITRERGREVQRLEKLLEDAGIKLSLVASDIMGVSGRLMLQALILGQTDPPVLADLAKRRLRSKIPALTEALTGRFTAHHAFLAGVHLDLIDQHTTAINDITARIEVVIEPFQGFRDLICTIPGIGPLTADVIVAETGADMTRFPTAGHLASWAGTTPGHNESAGRVKSTKTRPGNPYLQGALGAAAMTCSQNPGTYLGARYRRIASRRGPMKANVAIQHSMLIAIWHIARTGALYDDPGADYFTRLHPERAKNRALHQLEAMGYHVTLGHAG

SEQ ID NO: 92158 - protein, 457 aa, unidentified
MKTVYIGLDASKGYVDVAAINESGSVLSQKGRFDDTYEGHIAFSAIVKAITGDDASKRLVIGIESTGGLERNWLKFIKEAFPQAKRYLLNPLAVKKFGERGLHRNVTDRISALNIAQYLRLGLRPDEACREPEMEGALSYYRHIRNEIVRVAAMQNELHSLMMRVHPELGQYCRSGFPDWVLSLMRKYPTAESLARAGAEKVSKISHVTFERAQSLVAAAGVSVASQQDSFSAITVKDLSEKIIRSLNEVEKMKKTLTGHLKDDPTVKVWMTFPGVGAWTAAALRLEFGAIERFYSSEAAVAYSGLDPRVCQSGDGLKSRGISRRGRRQIRGILYPAILSSIRCNKVIREFYAGLRAKGKSHLEAAVACMRKAVSILYAMALTGKPFDENYQANLNVKMEENAIAPNEKRLETAVEQSRKPSSEKSLPSLNAPISRREAKRRIERIAKIECMQSALA

SEQ ID NO: 92159 - protein, 384 aa, unidentified
MSAHPTQIQAAAQLQANTLFASLELSKARWLVTVSAPGSDKLSRHQVPGGDGQALLELLWRLQAAAARRSAPVMIIVIQEAGLDGFWIHRLLVQNGITSHVVDPASIAVNRRHRRAKTDKIDGVKLLRTLMAWMRGERQVCTMVQPPSPEDEDRRRLARERARLLKERVQHTNRIKGLLSGQGIPDYDPLHRDRRGRLAALTTGDGRPLPKRLETEIGRELDRLELVASQLAAVERERDALMAQTAEADARAAPAALIRLRGIGPELAALLWLEALFRRFENRRQIAAYAGLTPSPWKSGGIDREQGIAKSGNPRLRRAMIELAWFWVRHQPGSALSRWFVERVGAARGRVRRIAIVALARKLLVALWRYVTQGVVPEGAVLKG

SEQ ID NO: 92160 - protein, 346 aa, unidentified
MKYYAGLDVSQQTTSICIVDDEGKIVAERKVASCPDAIGEALEPFSVTRAGLETGPLSVWLWNGLKDRGVPIVCMDARHANAALKMMPAKTDRNDAIGLAQIVRTGWCKSVHVKSAASHEARALLAARSQFVRTRCDLENQIRGVLRTFGILFGKRVGGFARRAEEIIDGELDASPTIRAVVEALMRARANILEQIRHLEATVRSLARQNKVVRRLMSVPGVGVITALGFAATIDDPTRFKRSSSAGAYLGLTPRIYASGETMRSGRVSKRGDDFLRRSLYEAANALLTRIPQFSPLKSWGLRIARRGGYRKAKVAVARKLAVILHAMWISGEPFRWSSLEPSELA

SEQ ID NO: 92161 - protein, 346 aa, unidentified
MEVLYRRCAGLAVHKQSVVACVRITNNGAPTQEVRSFATTTSGLLGLADWLDRCGVEQVAMEATGVYWKPVWHVLEGHFQLILANAAHVKNVPGRKTDVNDATWLADLLAHGLIRASFVPPAAVQELRTLRRTRKQFVRERGSHVQRIEKILEDANLKLSVELSDILGQSGRAVLQAIIDGHTDPEFLLARISSRVKASRAELLEALRGHITAHHRFMLKLHLDHIEALDRAIATIEQEVGAGLEPFRQAAQLVSTIPGISSVASHVVVGEIGIDMSRLPTAGHLLSWACICPRNDESAGQRRSTRVRRGGRWLNTTLVQCAWAAVRGQGQLLASTIPSPARQTRR

SEQ ID NO: 92162 - protein, 355 aa, unidentified
MNQEKYIGMDVHQATISVAVMDSSGKLIMECILETKAATILEFIAGLRGTLSVTFEEGTSAAWLHDLLKPHVARVVVCDPRKNALLKDGSKSDRIDARKLAELLRGNQLHPVYHGEHGVRTLKELGRSYLTLTQDVSRVMTRIKALYRGWAIPCSGVTVYAPRYREEWLAKIPHPGVRLRAERLYQQLDLLQPVRQEARRDLLSESRKHPAVKLLRQIPAIGPIRSALLVALLQTPHRFRTKRQLWAYCGFAVQTHDSGEYHYVRGKLQRNRERITVRGLNHNHNHDLKNLFKGAALSASTRPGPLCDFYVVLVEKGMRPTMARLTLARKMAAITLTIWKKGVEFDAKQLNRQAA

SEQ ID NO: 92163 - protein, 430 aa, unidentified
MKSNTQNTKIEAITETTLVLGIDVGSETHYARAFDYRGIEYSKKPFKFSNDEAGFVTFKAWILDIKEKHGKDKVVPGMEPTGHYWFNLGKFLQDNEMKPVLVNPHHVKKSKELDDNNPTKNDRKDPKVIAGLVREGRYMIPYLPEGVYADLRTASNMRFQLQAELTRIQNRISRWFNIYFPEYKTVYGQPDAKSGMLILKVAPLPEDIMMLGIDGVNQIWRDAKVRAVGKARAKTLIEAAEHSVGSKEGEISARMEIRMLLEDYESRNTRLQEVVALIEELVKKIPMAEKLLEIKGVGIKTVSGFLAEVGDISRFNNPKELQKLAGLALVENSSGKHKGEITISRRGRKRLRYLLFEVAMSLVSKNPEFRELHSYYTTRKLNPLKKMQSLMAVAAKLLRVFFAMLTKGVDYDPKKLVGDIKRPAVYLQVA

SEQ ID NO: 92164 - protein, 402 aa, unidentified
MRFLVGIDWASLAHAVCILDETGHIHWQGSVPHTAEGLAQLLGHLRRFRRRGLVRVALERPSGVLVDTLLEAGFEVVPIHPNALKASRPRYSAAGGKSDPGDAFILADLLRTDGHRFRSLRPPSDDTRALRALVRGRDDLVAQRVALANQLRALLERFWPGAAEIFADIDSPIALAFLSRYPTPHSAARLGEKRLGQFLGQHAYCGRRPAADLLARLRSAPASVAGEAEAEASGELVRALVAVLTPLVAHLQQLSAAIAAALPQHPDGPLVQSLPRSGAVNAAQILAELGDDRARFPTGDQLAAEAGLAPVTQASGKHHAVVFRWACNKHLRRALTTFADNSRHASRWAALVYQRARARGCRHQHAIRILARAWVRILWRCWQDRAVYDVTRHHAAQALTAA

SEQ ID NO: 92165 - protein, 417 aa, unidentified
MEAATPAFHFLLLGGDVMSGLKGNFDCIVGIDVSKDKFDACGITGEEAKIFQFSTSMDRKGFEKLKKHLSSFSVSSVLIGMESTASYHVNLFSYLVAAGYKVILINPLQISNYVKMELRKTKTDKKDAVVIARFLLANGDTLIQRATPSLISDLRDLSRQRESLVDEMTSLKIEIKQLLNITFPELEHMVGIFTKSILKLLQQYPSAIALRDADIDQLSQSLITDSYGHKREEFAKALIKAARSSIGTNSPAKEIIIKQKIRFLLHQEEALQEITDMLMEMARKLMEEDINIITSIKGIGDKTATNFLVEMGGDIHKFECSGKIIAMAGLDPAVYQSGKHEGKGRITKRGNRHLRRIIWMMTTSVIQYTDTFKTYYLKRRKDGLPYKKAVLATAHKLIRVIYAMLTQRNTFCPQGNS

SEQ ID NO: 92166 - protein, 353 aa, unidentified
MRKMQKHIVKSNRIFIGLEDSKRTWKICVRCDKMIVHETSMPAEYKVLHRYLLNKFPDCQIQVMYEAGFSGFWLHDKLQTDGIECIVTPAHKVTQPKVSKVKTDKVDARRLALNLESGDYSRCFVHDKELREDRQISRTLNQIQSKITSTKNQIRKFLDFHGLNGDLPSGAWNSSQYESLKFFKLNKPLQICLHTYLDLLDYLLEVKDELLEQLKELSKKERYSKSVALKESHPGIGWLTAIRFTLEWGDLSRFRDGKRFASFTGLTASEYSTGESVHRGRITSQGSGKIRAWLIQSAWRAIKLDPVLLHKYQSVWKNSGSKKKAIVAVARKLAVRIRAVELSGQPYTISVIE

SEQ ID NO: 92167 - protein, 349 aa, unidentified
MTIVGCDLHTRKQQVAVLHTDTGEVVEQELLHAGDAVEQFYRTLPRPVTVGIESTGYALWFHELMQHLGHTLLVGEAAKIRAMVVRKTKTDRRDAQHLLDLLKHDRFPAVWIPDPATRDLRALVTHRMRLVRMRTMVKNGLHAIAMNRRLTLGPSLWSQRGLAQLQGLALAPHTTQRRDESLQLLTWLTARIAALDDRVAAAAQADPGARLLLTHPGVGPLTALTTVLVLGPVSRFPDSKHVGSYTGLAPAVHASADTCRLGQITKQGSPLLRFVLGQAGLIAAHAEVDLTRHYRTLLRRRGRPKAIVAIARKLLVRLYIMLRDQIDYEEFRRRGRTPRRQEVPPPALA

SEQ ID NO: 92168 - protein, 312 aa, unidentified
MAQMVKTAGIDVSKSWLDVAIWPTREEIRVSRDAAGLALLIAWLGEREVARIGLEASGAYEREALDTLQAGGFEVALLNALRVRCFAKAKGRLAKNDRVDARTVAQFTAVMVEQVPPQRRRDLDELVELLTYRRQLKGWCTDCTNQLEHLRDRALRKTVAQRQAAFERDLAKIDTKLAALIAEHDDWGALARRLRTVPGVGPVVSASLVALLPELGTLSRRAIASLVGLAPFDDDSGNRQGERHIKGGRKAVRDALYMAALSARYHNPPIAAFANRLAGKKPKVILTACMRRLLVTLNAMVRDGTDWGVRAA

SEQ ID NO: 92169 - protein, 328 aa, unidentified
MAKHTTICAGIDTGKRKLDVALDGSSEPLQIDNTPEGYKVLLDWLRCHRVKRIGIEASGGYEQAVVAELRRKRFVVVTFQPAQVRAYAKFHLQRAKNDKIDAALIAACTAAVKKIHPPPDARLLPFAEHLTMIDQIGEDIALLKNRLETCRNPRIQQIWKEELARLAKRERIEFKALVVAIREHGDLAERLDLIYSVSGAGMPTAVAILVRMPEIGQLTREQATALAGLAPYDDDSGNHIGTRHIDGGRKRLRRALYTAALPASFRWNPQLIVLYKRLVAAGKGHKRALIACARKLLIFINAVVARGIPWDHERPPPSVAAIALPQTR

SEQ ID NO: 92170 - protein, 477 aa, unidentified
MSKGSGTTRGDRRRNERRARLRRVLPRDGAVIGIDLAEEKQAIAVIDHDLRVLARKTVRVKVFRLGEALDWAVAQARAKGFGPVSVACEPTGPRWLQVQQLCAERGLPLVCIQPLVSHIAREQQDFTSRKTDEADCVMIARLAVELHCYLPEQLDETWAHLRHLGRRRNQLITAATASVQRIRDFLSVAWPVAAETCVRPFESVTWLAAMQVVMSRCGADPAKLAPCGVEAFAVLVRRAVPCWGGVRPSGRVCQAVFAALTDTQGVVASHRRGLLRRCTDELDDLQRTRARLRAVEADMVTVLAELGLVRLADIPGLTAVGAAAILAEAGDPRRYDSSSSLVKHAGLSPADNASGAFSGQAHISRRGRPGLRLTVWRAVWAVLIHNPVMAAKYQAMTQAADTAAAQAASASADAGSRQVSAAAAAARARRAKARVACAASLLRWIYSMVVHGTGWDPAVASGAAACQHASSSRQQAA

SEQ ID NO: 92171 - protein, 387 aa, unidentified
MIFIGIDISKYKHDCFAMNEYGECKISNFTFQNNLNGFNSFISVLDDIQEDFRIGFEATGHYGLNLMLFLEKHDIPFMELNPVLVQKFILSHSLRRTKTDKTDAASIASYLASAEFNPYPKKVYKMFSLKSLTRFRSGLIHQRSQSLVRITNVLDCIFPEFKPFFKKKFSTTALYILNNYLSPEKIANMNSCSYDKLRSISRGKFSMAQFVQLKQLAKNTVGETNDIMLYELQSLLALYRHLDENIKDTEKKIENIILELNPPTLSIRGIGVQSAAIIIAEYGDFSRFHTPAKMISFAGIEPGISQSGTYEHSGKMVKHGSAHLRYAILNCAGSVILHNEVFANYYYKKISEGKCHRVALSHVAKKLIRVIFKLESTHTIFDPLLLC

SEQ ID NO: 92172 - protein, 349 aa, unidentified
MVIVGIDAHKRTHTAVAIDEAGRRLGEKTTRATTTEANLELIRWADGFGPERRFAVEDCRHLSRRLEADMLAAGEELVRVPPKLMAHARDAARTYGKSDPIDALAVARAAWREPDLPVARLDGPSRELRLLVDHREDLVRERTAQVNRLRWHLHELDPAWDPAPRSLVRFKHLDALAVRLQGLEGTVAWVARDLVARIRELTVAANDLERRIVRAVSGLAPALLELAGVGALTAAKILAETADVRRFRSKDAFARHNGTAPLPVWSGNRVRHRLSRTGNRQLNAAIHRIAVTQMRIHDGAKAYLERRIAMGNTKTEAIRALKRKLSDVVYRRLLADTEATQVARFGEAA

SEQ ID NO: 92173 - protein, 315 aa, unidentified
MVYERRLPNDLSVVLTELAPYRESVQAIAVESTYNWYWLVDGLMEAGYMLKLVNTAAVKTYDGLKYAGDEHDARHLAHLVRLGILPTGYIYPKEDRAVRDLLRKRAQLVRCRTAQILSIQNLVSRNCGKGISVEAIRALDDTAITRLCGGNGARSLAIQSNLTVMRCLDAQIEGLERVVLAQAKLKPAFKKILTIDGIWNILGMTIMYEMGTPERFAKVGQFASYARCVSSSRWSNGKKKGEGNRKNGNKYLAWAFVEAAHFAVRYNERIRRFFQRKKAKTNGIVAIKAVAHKLARACYHVLKEQTPFQVERAFA

SEQ ID NO: 92174 - protein, 343 aa, unidentified
MKLSRVGIDLAKNVYQLHGVDRSGKTAWKRRLKRHQWLKVLLDRTEPGCVIGMEACASAHHWGRELQSRGYTVRLIPPQFVKPYVKSNKNDARDAEAICEAMSRPNMRFVTVKTVAQQDIQATHRIREELKVRRTAKANQIRGLVAEYGLVAPKSLSSLRAAIPCWLEDAENGLTHYFRCLLHGLWDDLLTLDDRMREMDKTIKRLAKDNEDCVRLEQLRGIGPMTSTAMIATVGDARQYHKSRQMAAGIGITPRQHSSGDKHRLLGISKRGDVYLRMLMIHGARSVVASAKHKDDPLSRWVTEIATRRHPNVAAVALANKNARMAWAILRNKTDYDPDFAIG

SEQ ID NO: 92175 - protein, 402 aa, unidentified
MRFFVGIDWASQTHAVCVIDEAARVRWQGSVAHSADGLAELIRQLRRFRSASTLAIAIERPSGLLVDTLVDAGFQVVPIHPNVLKASRSRYSAAGGKSDPGDAFILADLLRTDGHRFRPLRPLTDDTRALRALVRGRDDLVAQRVALANQLRAGLEHDWPGAAVIFADLDSPSALAFLARYPTAQSAARLGEKRLAQFLTQHSYPGRRSAAELLARLRGAPPSQAGEAEADASGAVVRSLVTVLTPLVAQIQQLSAAITAALRHHPDGPLVQSLPRSGAVNAAQILAELGDDRARFPTDEQLAAEAGVAPVTHASGKHHAVVFRWACNKRLRHALTTFADNSRHASAWAAAVYARALGRGCDHSHAIRILARAWVRVLWRCWQDHTPYDVTRHRAAQLVPAA

SEQ ID NO: 92176 - protein, 364 aa, unidentified
MKRKVYVGMDVHKETIQIAYLTSNSKEILKEQQIKHNEVQIKKFIKKLKLEWNEIHCCYEAGVTGYPLYRYLKSLGVNCILVAPGKIPRQNTDKIKTDKRDAIKLARLMRSGELESIHVPSEEDEAVRDYLRSRDSLRLDLGRNRQRLMKFLLRKDIKYSTTKYWTVSHYKWLNNLHFNNEILQETFNDYYSRVRVQEENLKAMDKKIQEIAESEPYREKVGILRCFRGVDYLTAMFLLCEVNDFKRFKTAGSFMSFLGLVPGEYSSGSKRKQTGITKTGSPRLRRILTEAAWQHRFPGTGSKIITARRSGQPALVVALAEKASLRLHKKFRNLQLRGKTPQVMITAVSRELSGFLWAAMNLVA

SEQ ID NO: 92177 - protein, 411 aa, unidentified
METLIARCCGLDVHKAQVTACVRLLINGAVTEIVETFGTTTPDLLALRDWLTSHGVTHVAMESTGVYWKPVYYTLEDEFEVLLVNAQHVKHVPGRKTDTIDAGWIAKLLAHGLLRGSFVPPKPIRRLRDLTRFRKALIEERTRAVNRLHKLLEDAGVKLACVATDVMGVSGRAMMRALIEGQAEPEALAELAKGKLRKKLPELRKALTHRFSGHHAFLLERMLAHVEELEDDIGALSVRIEEEIGPFEPAVELLRSIPGVERRAAEVLVAELGTDMTVFPTAGHLASWAGVCPGQNESAGKRKSAKTRKGSKWLRKTLTESARAAARTRETYLSERYRRLAARRGDKKAVIAICHEILCAAWHMLQTGELYREQGADQFRQRDQDRIRKRAINQLEKLGHKVILEELPQAA

SEQ ID NO: 92178 - protein, 415 aa, unidentified
MEATVERCAGLDIHQASVVACVLVGPPGCKPREEVRSFGTSTRELEALRAWLEELGVTHVGMESTGVYWKPVHAVLEGGFELIVGNAHHIKAVPGRKTDVKDAEWLADLVRHGLIRPSFVPPPPIRELRDLVRLRRSLTEARSTERDRTLKLLETANIKLASVASEVLGVSGMAMLRALVEGEAAPAEMAELARGKLRGKRERLTLALEGRLTEHHRYVLAFHLRRLAAIEEDLRALDARIEAKAEPFRAQRLLLQQIPGVDALVAVTIIAEVGVDMSVFGNAKRLAAWAGVCPGNHQSAGRRRSGATRRGNVHLKTALVTAAVSGSRRKGSYYRDKYHRLRARRGRLRAAVAIAHKILVAAYHMLAGGVPFRELGEAFLDQQARQRNVRHLLRRLNHLGYDVMLQPRAVEAAGP

SEQ ID NO: 92179 - protein, 357 aa, unidentified
MPTMPDDGREIILGVDTHEDEHVAALVDELGRLVATRSFPATADGFQQLLAWARAHGSVCRAGVEGTGSFGAGLARFLAAEGVAVIEVTRPNRRGRRHLGKTDTVDAEAAARMVLSGEATATPKRRDGAVESIRVLQIARRSGIKARTQAGQQIRSLVVTAPAELNSALAGLTVKRQVERCARLRPAARDDGAAASTRRALRSLARRWQQLDAEVRELDRELHARVRAAAPSLLAEPGVGPDTAGKLLVIASDNVERLRSDAAFAAPCGASPIEASSGKTKRHRLNKGGDRQGNNALWTIANNRLIHHPETRAYAARRSAEGLSRREILRCLKRHLARRLYRLILADLSPTTTHHLT

SEQ ID NO: 92180 - protein, 401 aa, unidentified
MSFNGASVVAATVVAVDVGKNKAALSVTSADRHRLFGPAEFAMTAPALAAVLQRMCAVLPAAPVKVGVEAAGHYHRPLLGVWPAGWEVLELSPARVAEQRRVQGRRRVKTDAIDLEAITELVLAGHGVLVTARSAAVTELTGWVMHRGRRVQTRTATKNQLLAQLDRCFPGLTMVLPDVLGTKVGSLVAAEFADPHRLAALGVARFIRFAANRGLRVRRSTAERLVAAARAALPCLGAQLARRVLADDLVLLGCLDAQIAAAEAKLAQLLPDTRFAPLTTVPGWGTVRAANYGAAVGDLDRWPGARQLYRASGLSPAQYESAGKRRDGHISREGSVALRRALIDLGIGLWHADPAARRYGQRLRARGKKGGVIGCAMAHRANKIAYAMVRDQTGYQPDRWA

SEQ ID NO: 92181 - protein, 380 aa, unidentified
MENVAARGSRFRTPRAADGARTPSGNHRGGALGPLPQSRTTEQSPDFHRTYKAGYRGQDYLWSRCFLFFVTVAKIICGVDVSSFSLEACIGPQGPFHSFPNTPEGSAELTAFCRQHGVELVAMEATGGYEKQSFALLWAHGLPVALLNPRAVRRFAEGMGLLEKTDRIDAGVIAWFAAVKSSLPCAPVSAEQQRLKALVTRLRQLTELQTAQRNQRLLVSETMVLTSFREVLALVASQIRTLEAAIAALIAADPLWQKLDQVFRSIKGVADRTVARLMAEMPEIGTASNKAVSKLAGLAPLARDSGKHQGKRPVRGGRRDVRAILFVVAGVVRRYDADFAAFHQRLTAAGKPKKVIRIALAHKLLVRLNAKARPYVFCKC

SEQ ID NO: 92182 - protein, 487 aa, unidentified
MHPRTTNKSTQTSDVRRFSFESAGALALDNEYSGFAVLPAHYIAFAERKRARPWTSIYHFGRYDVKPLATQLFSAYVGIDWADTKHDVCLQAPGAEAREFDRIRHQMTDIDRWAQSLHQRFGGPIAVALELAKGPIVYALQKYDFFVLFPINPLTLAKYREAFAPSRAKDDPTDAELALDLLMRHPQRFTALRPQSVEMRTLLSLTEHRRELVGDKTRFTNRLTNTLKQYYPHALDWFEQHDTLLFCDFLTRWPTFSQVKRARRASLQAFFYAHNGRRPNVISARLDAIKAAIPLTEDMGVIAPCRLQVLVLIEQLSTTLQAIDRFDREIAELAPRLPDYSLFQDLPGAGPHLAPRLLVAFGEDRQRYQHVDELEQYAGIAPVTERSGKKSWVHWRWQCPTFVRQTFVEWAGQTINKSFWAGAYYRQQRAKGSSYQAAVRSLAFKWIRILYRCWQTRTPYDESTYLNALRKRGSPLLKNLELIAKNP

SEQ ID NO: 92183 - protein, 425 aa, unidentified
MNNVEKKQLAYGDVLVVGIDIAKKVHWARVLEPMGVDVIMPFKFHNTREGFIRLESKINEARNKAGIQRVIVGMEPTGHYWKPLAYYLKEREYSVVIVNPHHVKKSKELVDNSQTKSDRKDAGIIADLVKSGRFLSCLLPTGIYAELRNLSTARIQARKLFNGALTQLQAILDEFFPEYTQVFKNVLGKASTWVLRHYPFPKNILSLTEKELTIKLKQASNNRVGLKRAKQLQNVAKESIGIKEGLEGAHLKLMTIMDRLEYAASEISKIEAALERTLEKTGLAEYLLSIPGIGVITAAWLLAEVGDLSKFDDWRQIRKLAGLNLVENSSGMRIGSKKISKRGRPGLRSVLYLASLVLVAKNAEFKALYNYFKTRAENPLKKKQALIAISMKLIRVIFALVKNRTLYDPAKVFGEYRAAQLQQAA

SEQ ID NO: 92184 - protein, 391 aa, unidentified
MIFIGIDAAKDKHDCFIANSDGEVLCDVFTISNTLTGFNDLLSKIKSFSKDLSKTKVGLEATGHYSYNLLGFLLDNGLPTYVLNPLHTNLYRKSLSLRKTKTDKVDARTIASMLMSCQSLKPYTRALYHNEELKSLTRYRFDKVSERAKLKTSVSRLITILFPELEKLVSQVHCVSVYALLSEFPSAKHIANANLTRLTNLLYSASKGHYNRGTAIRIREAARNSIGSVMPAKSLELKHTIKLIGELDDEISEIEAAIKQIVDSLGTTILTIPGIGYATAASILAEVGDFSNFETPDKILAFAGMSPSTYQSGQLSNCYAHMEKRGSKYLRFALYNATKYVCKWDINFAAYLAKKRSEGKHYNVAISHAAKKLVRLIFALEKSRLPYMPVA

SEQ ID NO: 92185 - protein, 432 aa, unidentified
MNKYRMNQKQNQRITRITEKTLVVGADIAKKIHVARAVDFRGIELGRDCVFHNNHEGLMKLASWMKDLSRVHAKTDIMFGIEPTGHYWFPLAAFLKEQGIRVVVVNPHHVNRSKDIEDNSQTKSDYKDAKVIADLIRNGKYSEPNLPTKEYAELRILMNLREKVMVNLTQVKARVVGWFDRYFPEYLSVFKSWEGKASLMTMRQFPTPEEIIAIGARGVLAHWKTAIKQGIGIKRAESLHAAAMTSIGLTEGLAAARIELAMLLEQYELYSKQEEAIMAEVMQILENIPGTKEMLSVPGIGILTIAGFLAEVGDLNQYDHGQQIIRLAGLNLTENSSGKRKGKTGISKRGRPRLRSLLFRAILPVVAKNAEFKVLHEHFTTRRENPLKKKQSLIALCGKLIRVLYTLGTRQKEYNANDVLGPMRVAQLQRAA

SEQ ID NO: 92186 - protein, 350 aa, unidentified
MSTHITIGMDLGDRDHFVIVLDAAGNEINCTRLINTKVALKRFFQPYSGATVAIEAGTHSPWISRLLEELSCQVYVGNPYKLRVIWDSTDKSDERDARMLAMIARLEPRLLWPIRHRDENAHNDLEVIKAREMLVQSRTKLTNHVRSAIKGIGERLPSCSTASFATRAADLIPLALQPALMPLLKTIAQMTDTIRALDKQIKTLSLERYPQTRCLQQVQGVGPLTALAFVLTIETPERFVKSRMVGPYLGLTPRRDQSGAIDKQLRITKAGNVYLRKLLVNCAHYIIGPFGADSDLRRHGLAIAARGGKNARKRAAVAVARKLAVLLHRLWISEQEYIPLHTRRKVKMVA

SEQ ID NO: 92187 - protein, 356 aa, unidentified
MGIEKIIAIDLGKFKSVLCLMDTATRRHTFETVPTTPSDLHDLLARHLTPDAAATHVVFETCDTAGWVHDLCAALGTAVTCVHANGEPWQWRRVKRKTDRDDALKLAKLALMDQLPAVHVPAPDQRQKRRLILHRRSVVARRTQSRNAIRSIFSQQGLPLAPGGKQWTRAGLEQLRQHARPLAECGPEDLWRGRLQIELDLMAAVDQQLKVIDATLDALADDRTTLLQTVKGVGPRVAEAVVLYLDEPTRFKNANAVAGYAGLVPKQIESGTMSRHGHITRRGPSLLRSMLTEAAWMVWRHNAWAKLWVDKISHGSRARRKIAIVALARRLLTILWAMLRTNQPFREPMPSLIAPS

SEQ ID NO: 92188 - protein, 353 aa, unidentified
MDRYIGLDVHAISCTMAIVGPSGRKLGSHVLETHGKVLIDAIKRIPRPRHLCMEEGTQSAWLYEVLSPHVDELVVHQPAISRGQKNDLEDAFGLANDLRLGTLDTQVFKAPTRYTRLRQLVRTHSMLVRDSTRTQLRLKAMFRERGLRTPGGAVYTKKHRDRFRALLPPPSRDTSDLLFQQFDAVSRIKLDAEAMIIKELDRHPISPVLQTCPAIGPVRTARLMATVVTPHRFRTARQFWSYSGLGIVMRTSSDWSRTDGEWARAKVSKTRGLNPCHNRVLKDVFKGAAQMVASQMTDEPWYADYHRMLESGIKPNLAKLTLARKISATLLAMWKHEEAYSPDKYRSAPAAAD

SEQ ID NO: 92189 - protein, 320 aa, unidentified
MRFSTQQHPFYCGIDLHARTMHLCILDQAGETLLHRHMTATPEALLTAIAPYRDQIVLAAECMLTWYWLADLCAEHGIPFVLGHALYMKAIHGGKAKNDTIDAQKIAVLRRGGMLPQAYIYPAEMRATRDLLRRRMHLARKRGELLAHVQHTNSQYNLPAIGKKMAYKTNRDGVAERFADPAVHKSIEVDLARSTYYDERLRDIELTIVKTAKHHDANTLYLRQTVPGLGKILSLVLLYEIPQIDRFTRVQDCASYCRLVKCAKESAGKRSGTSGTNIGHAHLTWAFSEAAVLFLRENPAGQKFLARLEKKHSKGKALTI

SEQ ID NO: 92190 - protein, 348 aa, unidentified
MPNYNQAHQFYGGVDLHARSMFVHVLNAKGKTVFERDLPAEPDAFLGAIKPFRKNLVVGCECMFAWYWLADLCEDKRIPFVLGHALAMKHIHGGKAKSDKIDAGKLAAMLRGGMFPLAYVYPRGKRQTRDLLRRRSFFVRQRAQLITHIVNTNSQFNLPPFPKKLSYAANRSEEIAERFTDPSTRLSINADLRLIDAYDAQIAELERHLLHSAKVDDPVTFGFLRTIPGIGPILGLILLYEIDRIERFPEAGNFLSYSRLVRCAHESAGKVKGFGGKKIGNAHLKWAFSEAACLMLRTCVPVKSWLQRQESKRGKRKALSVLEAKIGRTVYHLWRKQQAFDVKKFLHS

SEQ ID NO: 92191 - protein, 365 aa, unidentified
MNKCHSNTELSSHEETRCQFNGGPGAIKLGIDVHQDFYVVVKQVGGSNLKPPQRFQKEAFLHWAARLKRKSGAEVYAVYEACGFGFSLQRKLSALSINCHVVCPQKLDEQNRRVKTDGLDAKALCLKLDRFVQGNRDALALVRVPSEKEEQLRAVHRQREQLVKARKQLEAQGRSLLVNHGIEPVRSWWKPRTFGALDVPQWMRELLCNSQAILLALQQKIGALTVQLQSAAAPKQPRGLGRMTSVVIDREIGDWKRFNNRRQIASYTGLCPGEYSSGNTRLQSCVTKHGNPRLRAALVELAWRLVRFQPNYKPVRKWRQILAKGALATGAARKKAIVAVARQLAVDLWRIKTGRLRAEELGLIK

SEQ ID NO: 92192 - protein, 325 aa, unidentified
MQELYCGVDIHKENFVGNIMKKDGTIVREASFAPTKEAAQSFFCGMPIKAIAIGACGIWGGAHSLFTALGHKVKLANPVKTNQVACKKKTDKVDAKTLADLLRTNYLPEVFVPDENTLKLRDTVRHKSNLTRLKVRIQNKIKGYLLREGIAYPKQLWNEKALSKLKMLEKEELNDLIDSYWFFRNKERGHLRKIGNISRNTKLSALLKTHPGIGEFGALMMVAEIADINRFEDAKHLLGYAGLVPGIYQSADKSYSVQNHAVNKWLKWILTECSSRAAMFDKNFMALFAMVKKRKGFKIARREIARKMLRNVYYMLKNEEPYHAS

SEQ ID NO: 92193 - protein, 391 aa, unidentified
MSMYFIGIDISKYKHDCCIISAADQKVVSKVTVKNNKAGFDELLTIINSLSNPEDIRIGFESTAHYALNLELFLENANHSFMEINPVLIKDFKKSQTLRRTKTDSIDCELIARWLMTVEYKPHSKGFYHAYSLKSLTRLRDKLIRQRSFYLIKITNVLDHTFPEFKPFFNERLSKTALYLLENYGSAEKMARMNSASYEKLRSLSRGRFSPQQFLRLKELAANTVGVNNSIFDVELNSLLSLYKSLVKEINTIEKEINKLIEEVHPHYMSVPGIGPLSAAVIYSEYGDISNFTNPGQMLAFAGIEPGINESGTESHGGKMVKRGSSQLRYTLINCCLPLIRFDMTFATYYAKKRGEGKPHRVAITHVAKKLIRVIYALERQDIDFNAQKLR

SEQ ID NO: 92194 - protein, 337 aa, unidentified
MTVVRIGLDIAKTVFQIHGVDRHGKTVLKKTLSRGEVLGFFANTPVSRIGIEACAGSHYWARELIKLGHDARLMAAQFVSPYRKSDKNDANDAEAICEAVGRPNMRFVPVKSEEAQAVLAVHRARSLTVSERTALVNQVRGLLGEFGIVVGQGIAQARRLLADIGAGGRQLPVLARETIGELHDRLRSLDERILAYDRKISALAKASEPARRLMAIEGVGPVTAMALVASVGNASTFKTGRQFAAWLGLTPKQHSSGGKTKLGSISKRGDVTLRTLLIHGTRSVLRLATGKTDRKSVWAEALKARRCANVAAVALAAKNARIIWAMLSRGTEYQVAS

SEQ ID NO: 92195 - protein, 372 aa, unidentified
MRIAIGMDLHKKSAVCFAVFAGNGQVTLEEQDFLDRFNRKHRTQPSEPEDMARIAEALKGHEVHVLIENSTKTFDTYWVLTNLGCHVTVAQARDLYRITKSVKKNDNNDSMELAFYMRRRLHGENEFAECVMPTHDWMMRREICRTVTKEKLHLADLKRRTRSHLLLHGIKLSREYNDIFSKKAIQEMERSDDICLRIFCSEAKTIKKRTDEEVRVIEHLFDGIRMYELILTIPGFGRVTAAYLSSMIMDISRFSTSSQFTASFGVVPKQRESSDTSHRCSTTHRGDAEMRRLLKQATWVHVNNADGSVVTEMFKRLKANGKSHNEALIACARKLLTVVRSVLISDRPYTTDIRLLERTRELADPEDCPEED

SEQ ID NO: 92196 - protein, 357 aa, unidentified
MQPKVKTLDFTGQNIYAGIDTHKKSWAVSIYTDELYHKTFTQPPKAENLYRYLEKHFPNGTFYSVYEAGYCGFWIHEQLQNLGINNIVVNPADVPTTDKEKKHKIDPVDSNKLARHLRNGDLEAIYIHDRDIQEDRSLTRIRRTLVKEITRYKNRIKSKLLYFGIEIPEHFRDKSYWSKRFINWLSELKFNRESGTRSMRLLIEHVKILRKDLLEITREIRKLSMQEYYAERVKLLLSIHGIGLITAMTILTEIDDINRFDNLDKLVSYVGLTPTSKSSGDNDIHGEMINRGNKFLRSAIIESAWVAARVDSVLHMDFIGYCRRMKRNNAIIRIARKLLSRVSFVLKTEFPYEDGIE

SEQ ID NO: 92197 - protein, 450 aa, unidentified
MSKRGRSKEKAELRRINPRAAGIDIGSASHWVAIDPSLTQQPVREFAAYTGDVQALADWLVEHGIQTVAMESTGVYWIALFEILRERGLEVCLVDARATKQVAGRKSDISDCQWIQELHAYGLLKQAFVPEAQIATLRSYVRQRDRWVADAGRAIQHMQQALELMNLKLTEVVSDITGTTGMAIIDSILAGERDAERLSELRNHRCSRSREEIARALLGTWREEHLFALAQARDYYRYLGERIAACDTRIAAAMAVCANPEEQSSEPPKGGKRDTSAHPFDFDAHSHCYRMTGVDLTAIDGVGANTILTVLSETGTDMSAWRSERAFGSWLGLAPNPRKSGGRVVRSGTKPNAQRAATAFRLAARSLSNSKSALGAFYRRLRARIGAPKALTATAYKIAKLFWRMLKTKLPYQDVGQAAYDERFRARRLRSLQRMATELGFNLVPTASGA

SEQ ID NO: 92198 - protein, 402 aa, unidentified
MNAVGIDVSKGKSMVAIMRPFGEIVSAPFEIKHTASDIHSLIELINSVEGESRIVMEHTGRYYEVLAHQLSKANLFVSAINPKLIKDFDNDSLRKVKSDKADAVKIARYALDKWQNLKQYNVMDELRNQLKTMNRQFGFYIKHKTAMKNNLIGILDQTYPGVNTYFDSPARSDGSQKWVDFASTYWHVDCVRKMSLNAFIDHYQNWCKRKKYNFSKSKAEEIYGKAKELVPVLPKDAITKLIIKQAVDQLNSASTTVESLRTLMNETASKLPEYPVVMAMKGVGTSLGPQLMAEIGDVSRFTHKSAITAFAGVDPGVNESGTYEQKSVPTSKRGSADLRKTLFQVMDVLIKTHPQDDPVYQFLDKKRAQGKPYYVYMTAGANKFLRIYYGRVKEYLSSLPES

SEQ ID NO: 92199 - protein, 388 aa, unidentified
MQNLACLSKTPNAIRNDLGAIFISLELSRSTWLITSLSPGGGEKMSKHAVRAGDVAGLLDRFAQLREKTRARTGEVFPFVAIQEAGLDGFWIDRVLRKEGIESHVVDPASIATSRRRRRAKTDRVDGEALVRALLSYKRGEPRVCAIVKAPTPEEEDRRRVCRERKVLIGERVRHVNRVKGLLFSQGISDYGPLCRARRGRLDTLQTGDGRPLPSHLKAQILRELDRLELLLDQIKVVEAERDSLCGAQQVAAPAPAAMLLAIKGIGPEFAAILWSEGLFRHFDNRRQVASYAGLAPTPWQSGSVDREQGVSKAGNPRLRTTLIQLAWLWLRHQPESTLALWFKERVNRNGGRLKKTAIVALARKLLVALWKYVTAGVVIEGAIVKSA

SEQ ID NO: 92200 - protein, 451 aa, unidentified
MSKKQMSLEVVNPNAAGIDVGSRSHWVAVGQDAQDVKEFGVYSEDHLNLCKWLTEHSISTIAMESTGTYWQNLFSSLVAFGFDVILVNGKQTKNIKGKKTDIKDCQWIQKLHSLGLLSSSFLPDSTTDIIRTYSRHRQNLIKQSSRTVLKVQKYLRLMNLRLDVVVKDVVGLTGSKIITEFIAGEWSGKKLAQHRHYNCRKSEEEIAKALQYNGRNDYLFALKQEWDTYLHLQKQIQDVDAEIKKLLEDIIDKDDNKKQHVATKKTHKRKNKNTIEGTDMNQIAYQYFEGIDLMAIEGVNDSTIMTIISEIGLQGIKKFDSAKQFTAWLRLAPNNKISGGKVLSHHLPKGSSRLKIAFRNAANSIGNLKEGHLADFFRRINYKKGRATAVSATARKLAVIIWNMLAKGDPYNPPTQYVFLDEKRKLGLVKRIKKQMAKFEIQPEQLGFITS

SEQ ID NO: 92201 - protein, 315 aa, unidentified
MSDVPCFLGIDVAKAQLDMALRPSGERWAVPNDASGVATLVDQVQTLHPTLIVLEATGGLERAVTSALATAGLPVVVVNPRQVRDFARATGQLAKTDALDARALAHFADVIRPTPRPLPDAQTQELRALLGRRQQLIVMRTAEQNRLAGTSARLTKDIAAHITWLNAGIATLDDDIETMLRASPLWRENDDLLQSAKGIGPVCARTLLLELPELGTLTRQQIAALVGVAPLNCDSGTLRGRRTIWGGRAHVRTVLYMGTLVATRYNPQIKAFYERLLAAGKVKKVALTACMHKFLTILNAMLKHRTPWQPREVQS

SEQ ID NO: 92202 - protein, 345 aa, unidentified
MPIVGGLDIHRKQITFDYLDTVTGEVKRGQIAPADRAHLRGWLARFAGCGDVAFAVEGCAGWRYVAEELAAAGIAAHLGEPADTAALRGRKRHAKTDKTDARHLRSLLAEGRLPECWIPPAQILEYRALLETYHDLRREHTAWVQRIHAVFFHQGAPPLGEGALRTEPGLEGLRAAAAAHLSAAGQLQVATALDMLAATEAQLGPLRHQLREAARHLTGAKVLAARLYGVGPVTALALTCWLAGKGRFSSSRKAVRFTGLDITVHSSDRKGPPGRLSRQGPPVLRWAVYEAGKTHARAAAPDHAYYAAVTDRKNTKRAALSEARKIVRQACHILTELGDDALTAA

SEQ ID NO: 92203 - protein, 374 aa, unidentified
MTGTEWLWLSPRRDRKPAGASDPSPRVSLELRSFLPYPNSCEGASPHQQGRDTKMLSFCGIDVSKDRLDVIVLPEEQCCSVSNDRTGWADLVERLRGRSIAGIGIEASGGYERGVTRALLAAGMPVRQVNPFKLRQFARASGVLAKSDPLDARMIASFVAIMPTRPAQRTPARAAQVAEMLAVRRQLSAEKVAAENASRLLEDAMLRRLSRRRIGRLAGDIDLLDKRMVEIVANDPALAHRYRLLTSMPGVGSLLACTLIALLPELGCISRKQVAALVGVAPYAFESGTLKGRRCIWGGRANVRQVLYMAAMSASNWNPALKPFHDRLNAAGKKPKVTIVAVMRKMITTLNAIVRDDVLWADRHSGRHSVTTTR

SEQ ID NO: 92204 - protein, 391 aa, unidentified
MFYIGVDIAKNNHEASIIDSNGKLVSESFSFSNSIRGLEKFQKFISSFSIDFNNCIIGMEATGHYWLSLYSFLIDLGFSCIVINPIQSDAFRKMYIRQTKNDSVDSFVIAQILRFGEFSVSHFSDEDTFALRNLSRFRFALVDEASDWKRKLVCILDQVFPEYSSLFSNIYGVASKELLSKYPLPEDMISIPADELAKMLSKCSKGRFGIDKAKEIQEKASNSFGVKFALKSFSFQIKQIIAQISFLEDQIFEIEDEISSMINSLCPVITSITGIGDVLGAAIFSEIGDISRFERANQLVAYAGLDVAVKQSGNFNATDTKISKRGSPYLRRAIWLAACVAAFKDPALSVYYQKLRQRGKAHGTAIGAVARKLTNIIFAVLRDNKAYIPNI

SEQ ID NO: 92205 - protein, 369 aa, unidentified
MKKHTSKKQMATKSKTEMKQDFAFYIGIDLGDKNSDVCVLDPRGEVGKEFRLRMKEEAFQEYFASIPRSRVAVEAGGQSRWVAEVIEKCGHEVYVSNTRKVPYIHQSDAKDDPGDAYKLAELVHFKPRLLHPIQHRRREAQADLSWIRAREVLVESRTQLINAVRGLSKAFGGRLAKCSTESFTAKLAGQVPEAIRGAVAPLLETIDHLNEQIRYYDQMEEQIARERYPKYRLLEQVNGVGVHTALSFMLTIGDPERFAKSREVGSFLGMRPRKQDSGETKPQLGITKAGDVYLRKTLVNCAHHILGPHGKDSDLRRFGLRLCERGGKNAKKRAVIAVARKLSVLLHCLWISGEVYEPLRNSKQAKAAA

SEQ ID NO: 92206 - protein, 345 aa, unidentified
MSRHQVPGGDLAGLLSRFAELQRKAHARTGQLAPIVVIQEAGLDGFWIHRVLESEGIESHVVDPASIAVSRRHRRAKTDRIDGEALVRTLLAYKRGEPRVCAMVRVPTPDEEDQRRLCRELKTLVSERVRHVNRLRGLFFSQGIADYDPRRPDRRERLDELRTGDGRALPPHLKAVARRELEVIELLDRQIAAVKAERDALLAAAQMAEVPSKAVQMLLGLKGIGSGFAGALWSEGLFRHFDNRRQVAAYAGLAPTPRKSGKIDHEQGVSKAGNPRLRAILVEMAWLWLRHQPGSALARWYHDRVRLGGRLKKVTIVALARKLLVALWKYVTHGVVIEGAVLKVA

SEQ ID NO: 92207 - protein, 405 aa, unidentified
MQDDTTAPTAGVDWATDTNEQCIVDVAGAVLQRCNTAGDAAGIRRLVGEFVRHGVHQVAIERPDGPVVDALLAAGLEVVVIAPRQVKHLRARYGSAGNKDDRFDAYVLADVLRTDGHRLTPLHPDNAQTLALRSAVRARTDLVETRVALCNQLRAHLRIVFPAAVGVFADLDSPISLAFLSRFGCADSAAWLSHRRLGAWLAANGYCGRTPTTVLLERLQTAPDGLTGDPGAAAAHTTLAYVATLHAVRDQITTLETQIREQLALHPDAAIFQSLPRSGTIRAAKLLVEIGDARGRFPTEAALAALAGAAPSTRQSGRHHVVTFRWACDNKLRDAVIDFAADSRRASPWAAAIYDRHRATGKTHQHTTRILARAWLRVIWRCWQDHTTYNPTLHRGAQHITEQTA

SEQ ID NO: 92208 - protein, 406 aa, unidentified
MFVGWDWANETHDVSILDQEGNLLDRWSLRHDEEGIEAALARLASHGAPGELPVAIETTSGVIVDRLLEAGHPVVPIHPNAFNAARPRWGASRAKSDPGDSFKLADYLRTDGHRLRRLEPLDPATAELQALSRLRSDQVEAKTAATNQLRATLRRHWPGAAVIFRRLDSEIALAFLEDYPTPQSAARLGEGRLAMFCRRHSYSGRRSATELLERLRAAPAPTQAIGPETLVELVRVQVRQLRALLVNVADLDRALGAGLLEHTKAPLLAPMPRIGEVNLAQVIAEVGPLLARARDVEEACALVGATPVTKESGKGRAVNFRWAVNTGARQALSIFADNSRHASPWAAQLYADARARGKRHPHAIRILMRAWLRVMWVCWHSESAYDPTIHGAERRHAQQEVQEMAA

SEQ ID NO: 92209 - protein, 345 aa, unidentified
MKIVGCDLHTRYQQIAMLDEETGELVERRLDHESGEARAFYAALAGPVRVGIEATGHTRWFERMLRELGHELWMGDAAQIRAAMVRKQKTDARDAAHVLEMMLTGRFPHIWRPTMEERDLRQLVWHRQKLVWMRTAVSNQLHALAMGEGVCRKKKLFTKKGRVELEGLALDPWASRRRHELLKMLDQFDTTLDELDSAVAEQAEQNPAAVLLMTHPGVGPVTSLAFVLTLGPVGRFERSKQVVSYLGLNPREHSSGGRQRMGSISKQGNPMMRSLLVEAGHSAARLDTELKQDYQRLKLRRGNGVAKVAIARKLGVRMYWMLRSQASYAQLVRMQGSPWATLVKE

SEQ ID NO: 92210 - protein, 416 aa, unidentified
MSTTDPLASPVDPCGFTYVVGIDVGSEHLLYTICQPDKRAVVKPSQINNDRVGFGQLDQALHALGSEPSRILIGLEATSRYNENLYQFLAEQGSTLCLLHPRQTHQFAQQRGLRAKTDRLDASTIARLLLSGEARVGYVPDELIASYRELERLHSQLTAESARYQNEIHALLTVLFPEFTQVFADPCGATALGVLKRYPGAAAIATAGVEALTATLRELARRRSGRPTAVELVRLAERSAASGVATSARALSLKVLCDQLEHTLVNLAHREQELDRVLGGDEGASRLSSVPEFGRQTIAVLRAELGDVTRFSRIDQAVAYVGLDLEVRQSGKWKGQVKLSKRGSGRVRRVLSMAALRSLTLPDSPFAAYYHRLVARGLKGRKALMAVMRKMLLVACHLLRSNESYDPAKVCAVTGP

SEQ ID NO: 92211 - protein, 351 aa, unidentified
MLIIGVDYHPSFQQISFMDEETGECGERRLNHSDGEAERFYRELKQRGVSVRVGMEATGHSRWFERLLAELGFELWIGDPAKIKAKRVRKQKTDREDAGLLLQLLLENRFPKIWVPSPENRDLRQLLWHRHRLVQMRTRIMNQLQAVAMNEGYRWKKKLFSEKGRALLEKLALAPWASRRRKELLELLDQLDPKIAELTDAVEQEAHKRPEVLQLMTHPGVGPITGLAYALVIGTPGRFPCGKQIGSYTGLIPSEDSSAGKQRLGHISKQGNALLRFLLGEAAQAAARCDPDWRRRYMHLMMRREKRIAKVAMARKLAVRLYWMWRNNWQYAQLVAFGSNAGKLGTVHGVK

SEQ ID NO: 92212 - protein, 334 aa, unidentified
MKSGIVHIGVDVSKERLDVFVPAQRDGMRPTAKELGNCVAGFREIRDLARRAKATVCVEPTGGYELELIAFLHRFEVPVAYADALRVRQFARAEGCLSKNDSIDAALISRFADKIGVRVLDAQEVEAVELKRKAKFRQTMMDSRTAMINRLETEIDPEMKALLKEQVKLMGRVIDKAERLCLETVERDERMNALRDRFTRVGGVGNLTAISILAGLPEIGKLPDAKLNRLVGIAPEEKQSGAKEWQRRIWGGRKDVRNALFMAAIASITWNSVLGAYYRKKRAEGHPHKWAIVPTMRKLLSLLNRIARDPDFVPAPEPESTRRNAKVGRKRKSA

SEQ ID NO: 92213 - protein, 311 aa, unidentified
MTILTSQTVVGIDIAKAEIVVYRADLETIETVKNDRAALKRWLKTLPAQSAIAVEATNIYHLETVDLAHAMGHQVYVVDAYRVSHYRRGVGQRAKNDPCDARVLARYLTNEQSKLRLWNPPPKAYTVLKSLLHRRATLIQNHTGLMLSWADEPLLKKERTAQQKAFERSDKVIQNLLRKVSKEAGIDDNIGRCKAIEGVGELTATGLATTYMRGDFANSDAFIAFLGMDLTVDDSGKKNGPRFLSKKGDPEIRRLAYNAAMAACRSTKWKPFYESYLARGFSKTQALVALARKLCRVAFTLMKNQGEYRSV

SEQ ID NO: 92214 - protein, 294 aa, unidentified
MFVAGIDAHATYSVTCVVSKQGQLVSGPTRIKNRDADQLSELLEAYRPLEVVVETSPAWPWLFDRLAGNGVHFVLAHAKRLRVIAGSNYKSDDIDAELLARMRLAGLIPEVHPKSVEQRGHAVLLRHRARLVRQRTQMVNRIHAQLHNAGLYLERGRMLTEGGREWVRSQAWPVLGEEQRLFIQMQWALIDHLSPMIRTLDHRVEHVGREIPAVALLETIPGIGPYRALLIATEVLPIERFRRPAHLVSYAGLAPRYSQSGLRPIRHGSIPAGGQPLAEGHVRSGRCQPRHACA

SEQ ID NO: 92215 - protein, 387 aa, unidentified
MSQTIAAPIPAAVDYERTLVLAIEVSNKSWVLATQVPGLPHTKAKRTINPEAEALLAAITGYRTRAAATGRSIERVIAVYEAGWSGFWLARWLMRRGVEVYVVQPSSVPVDRRMRRAKSDGIDSELLLRTLLAWLRGEPRVCSMVPVPDEADEDARRCVRERTELISERIGLTNRIGAVLATLGVSDYNPLLRNRCRRLAELRTGLGEPLPANAHAKIKRLLARLELVLTQIAELERERDAVVETESPDKASKMIQQLTGLRGIGVQSATVLVREAFVRRFANGKALGSYAGLASSPYSSGGIDREQGIGKAGNRRVRTVMVELAWLWTRYQPDAAQVCWFRERVGSTGPRVRKIMVVALARKLLIALWRFVIDGVVPEGAVLKPAA

SEQ ID NO: 92216 - protein, 349 aa, unidentified
MTDHDSIVRVGVDLAQSVVQVHAVDAVGNVVVARQLQRSGLIPWCERLPEGCLVAFEACSAAHHLARQLSAVGLVPRLIAPCFVAPYRMTGATGKNDATDAEAICEAACRPRMRFVSVKTREQQGWLAIHRLRDGYIKDRTAWMNRARGVLFEFGITLPLAGARFRDALQQAVSARDSGLPGNARPALRRCCVHLDQIQRQVAWCDEQIAKHARSDVNARLAMEVRGVGPLSASALAASLGDLTQFGNGRQFGAWLGLVPRQHSSGGKQRLGRITKRGDAYLRKLLVLGARSALTVAPRHDDADARWAVQVRERIGWPKACVALANRNARTLWRTLARHNSAGAEGKDS

SEQ ID NO: 92217 - protein, 451 aa, unidentified
MLRLRKQKSTAPETPILQPNAAGVDVGANEIYIAVPADRDSQAVRRFRTFTGDLKAAADWLKRCGIQSVAMESTSVYWIPFFQILEESGFTVFLVNARHVKNVPGRKSDVADCQWLQYLHSVGLLRASFRPEQAVCAVRSVLRHRESLVQIASSHVQHMQKALDQMNLQLHHVISDITGVTGIAIIEAILKGERDPAVLSEMRDKRIKASAETIAKALVGDYRREHLFTLRQSLQAYRQCQDLIATCDREIEQYLKEFDSKLDPTQTPLAKPKDRHKPRRNEMKFDLRAHLYRIFGVDLTEIPGINALTAHVLFAEIGPDLSRFANASAFVSWLGLCPDNRVSGGKILSVRTRPVKNRAAMALRMSAQALHGSQSHLGNYFRRMRAKLGGPKAITAAAHKLARVVYHLLTTRQSYQESVFTQYETLNQSRKEAQLRRQARSLGFDLIKAST

SEQ ID NO: 92218 - protein, 362 aa, unidentified
MRIIGCDLHARQQTLAMLDTTTGEVVEVTLKHEGDNVREFYSSLPRPVRVGIEATGSMQWFLNLMEELGIECQIGHPAQIRASAPRKQKNDRRDAELILKMLVEGRFPAIWLPSKELQDLRSLLRHRHQWVRMRTRIQNALQSIALANGLRRGTALWSHEGQSRIASLPLAPHTAYRRSELQAMYEKFEAEIEKLNRRVEEQACQRPGARLLMTHPGVGPITALATEVFLGDPARFADSKAVASYVGMIPREYSSGGRQRLGGLSKQGNPLLRFLWGEAGAHAARKDPELQRFYRRKLVQKGLGKASVAVARKLGIRLWIMLRDQIEYNEFCRRGQKQPKSSDACAGMPETRYGAKSHRPID

SEQ ID NO: 92219 - protein, 406 aa, unidentified
MRSIALDVHRDFCEVAIKEGGEVRSAGRIKTSAEELELFAQSLAPDDQVALEASGPALQIKRLIEPHVGRVVIANTRKLRAIAEAKVKTDKVDARTLCELLAAGFLPEVFGPDEATRALRRRLARRAALVRQRTRAKNELHAVLARNLKGRPPMTDVFGVRGRALLEALPLPADERQTLAGCLRQVDFLDREVGLVERELAKTALASAEIRRLMTVPGVNLVSAATFWATVGDVGRFATPRKLVSYVGLDPRVRQSGESPARHGRISKQGSPAARHMLCEAAWIVVRTPGPLRAFYQRVRARRGAQIALVATARKLCVLFWQLLTKEEDYAFGRPSLTRHKLRRLELIAGDPPRRGRRSGSAASKREQRHERELSERFELAYRRLTDDWQPKPKRSGAGATRGRAS

SEQ ID NO: 92220 - protein, 340 aa, unidentified
MGEITTIGLDLAKQGFQVHGIDADGTTVLRKQLRRSQVLSFFSRLAPCLVGMEACATAHYWGRELAALGHEVRLMPAQYVKAYIKRNKNDAADAEAICEAVVRPTMRFVPAKTAEQQAALLLHRGRERLVRQRTGLVNALRGHLAEFGVIAPQGLRNVGKLIAVVRDPSDARLPDLARQVLEVLAAQIEQLEGAVAAVEKQLMAWHKSNPVSQRLATIPGIGPIIASAIAASVAEPGGFRSGREFAAWLGLVPRQNSTGGKHRLGGISKRGNQYLRRLLINGASANLLRSKATKADPWVIGLRRRRPSLVVAVALANKTARIAWAVMQRNENYQRMAAAA

SEQ ID NO: 92221 - protein, 379 aa, unidentified
MMPSENRVLIAIELSVSSWFVAVRLPGSEKSRLHRVEGGDTTALLALISDLRSRTETKLRQAVDVVCCFEAGRDGFWLHRLLTAHGAIAYVLEPTSILVNRRARRAKTDRLDAEGMLRVLAAWLGGDRHVCSIVSVPTPEDEDAKRPHREREHLVQERQRLENRMEALLFTQGIRGRPSLRSWERDIVKLRTGDGRELPCLMQAELNRLRRRLVLILELIREMEAERAKALAAMADDAMTRKIADLQRIRGIGANFSAVLVREVLYRSFANRRQLASYVGIAPMPYQSGGMDRDRSISRAGNPRARTTLIQLAWLWLRYQPGSALSGWFRGRVGTLRGRTRRIAIVAMARKLLIALWRYVETGVLPDGVELRVMEEATA

SEQ ID NO: 92222 - protein, 326 aa, unidentified
MVGRVVATTSVPTTALGYEQLIEWARGFGRLIRAGIEGTGTYGAALARRVQEHGVPVLEINRADRSRRRLRGKNDSTDAENAARAVLAGEAKAIPKAQSGVVEAMRAVSMARRSAVKAKTQAINQLRALLVTAPASIRATLWKVKPEQCVARCARLQSLGDTPLLKALTSTLRLLARRWLSLAKELHELDAALEELTKRAGRRLLARFGVGPQTAATLLVTAGDNPDRLRSEAALAALCGASPLEASSGKTTRHRLNRGGDRAANNALWTISMVRMRSDPRTRAYVTRRTAEGLSTKEIQRCLKRYIVRELYPLILADLADSIRES

SEQ ID NO: 92223 - protein, 349 aa, unidentified
MTMVCGLDLHRGQITFDALEVESGEVWRGRVWQPDRARFRRWLRDDLAPRANGAAVAIAVEGCTGWRYVVEEIISAGFEAHLAEPAETQAARGRKRRAKTDRSDARLQRELLAAGELPESWIPPTPVLEWRERVRLYKTLLDQRRMWIQRVHAELFQHGVSLPEGQIDSAETRARLTGDSVGLSPAGAQRVAVGYQMIDATQAALVPLRADIERFGRRQAACKALVAAHYGVGPLTAVVVWAELGDCRRFSNSDDVVRHTGLDVTVDQSDAHRARGHLSRQGPGTLRWALFEAGMSASRATSPDRAYYQKVKAAHDGKLAAISMARKLARRCYHTLRQLDPDVVYAMPA

SEQ ID NO: 92224 - protein, 396 aa, unidentified
MPQIWAGVDIGKKHHHAVVINAEGERLLSRRVQNDETELLQLLTDVLEISDDVLWAIDINTGIAALFIGILLNHSQPIAYLTGRAVHVASATYRGEGKTDARDAFIIADQARVRRDVSMLRPGDEIAVDLRLLTSRRLDVVFDRTRQINRLRAQLLEIFPGLERALDLTKKGPITLLTGFQTPASLRRLGVKRLETWLKNRKVVGAAALARKAVEAAQAQTTALPGEDLAAELVARLANAIKAHNEEVAELDARVDARFRQHRDAEVILSLPGMGPTLGAEFIAATGGDLSTFGSADRLAGFAGLAPVPWDSGNISGNLRRPRRYHRGLQRSMYMSAQVSVFFCPVSKAYYDRKRKEGKGHKQAVLALARRRTNVLWAMIRDKTPFQVAPPLAAVA

SEQ ID NO: 92225 - protein, 388 aa, unidentified
MTYPDRTRETSHDSPYFDIPCTLHPDDRPATPRRWGSTCRIASRIVHVQRGDGHTLETGKVAMTRASLVVLFERWKGCRLVIEAGGHSPWISRLGTACGMEVVVANPRRVELISKSDRKTNRTDAQFLTELGRTNPQLLAPIQHRSAEAQADLGVLRARDELVRARTSMINHVRGVLKSNGYRAATCSADSFGKKASTAIPLELQVALQPIVATVASLTNTIHELDGQIERLCAERYPITRALRQIGGVGPVVALTFVLTLDDPKRFRRARDVGAYLGLVPRKKSSGASDPQMHITQAGDRSLRRLLVIAANYILGVLRTRLRSAPLRSEARRRGQRPRSPRNERASRSLASWRCGCTTCGGAVRSTTRCTPPNAAANSPRPDPNHSR

SEQ ID NO: 92226 - protein, 338 aa, unidentified
MSKFIKKKHFIGVDISSATLDLALKKEDGFAEFKVDNSIEGFSLILEWIENQKLELDDCAFCMEHTGTYGLLFYAWLAKRDVLFCVESGLHIKRSLGMTRGKNDTVDAERIADYAFTHRAKLKPFKMPSPLLIKIKQLLTYREQIVRIRTSLKNSLKSHKKYLAISGLDSVIVQIEEQIAKQDEIIAGIKKQITDIIDGDRELSQNFKLISSVKGIGVVIGAFMLVSTNNFTSFDSGRKYACYAGIAPFEFTSGTSIRGKARTSKFGNKTIKTLLNNGANSAIRYDTQIKKYYERKREQGKDHKVVVNAVCCKLVNRMFAVVKRQSPYVEVYGQNFVQ

SEQ ID NO: 92227 - protein, 351 aa, unidentified
MKVTTIGIDLAKSVFQIHGIDERGNVVLRRQLRRAQMVLFFSKLETCLIGLEACGSSHYWARKLAALGHTVRLMAPQFVKPYRKNDKNDGNDAAAVCEAVGRPSMRFVPVKSPEQQAELSVHRVRHRLMRQRTALINQLRGLLAEYGLVLAQGATHVRSQLPALLENSSDSLPPLALELFQDLYEELCQLEQRLADYDRRVERLYRGNPLCQKLGELDGIGALTATAFVATVAHAAQFKNGRQCAAWLGLTPKQDSSGGKTRLLGISKRGDVYLRTLLVHGARSIMRHTPKRDDPKSRWVEQLRKRRGENIAAVALAAKHARILWALMVRSEPSAQLIAAHRIEPPAQPNL

SEQ ID NO: 92228 - protein, 317 aa, unidentified
MDAKTEADRFIGIDVSKARVDVHVRPEGSVFYCTTDTDGLAELVRRLTPLRPRLVVLEASGGYEGVVAAALAEAGLPVAIVNPRQVRKFAGAIGRLAKTDAIDAAVIAHFAQAVRPAARPPPDDLAVRLGELMARRRQLVVMINAEKQRLARAHDRIAQSSFRAVLKRLEAERVRIDKAIDKLIEASPLWCAKQDLLKSVPGVGDVVARTLIAELPELGQVDRHQIAALAGIAPMNRDSGRYRGKRKIQGGRVEVRAPLYMACLVAIRHNPALKSFYRRLREAGKPARLALVAAMRKLLTILNAILRDQRPWAPAQN

SEQ ID NO: 92229 - protein, 340 aa, unidentified
MNNYVGIDVSLEASSLCVVDANGKIVREGKVASEPDALIAWLRGLKLELTRIGLEAGPLSQWLYAAMRQAGLAVELLETRHVHTALETMPVKSDRNDARGIAQLMRLGWFRPVHCKSMAAQETRALLTARKLLQTKLHDLELSLRGILRGFGLKVGPTTPARLEERIRELVAGHPSLEVIADGLLAARVALRCGFDRFEKQVRDAARCDTRARLLTSIPGVGTIVSLSFAAAMDDPARFKSSKQVGAYFGLTPTKYQSGETDIDGRISKIGDASVRASLYESANIILTKPLKGCTALKSWAMKVARRSGMKKAKVALARKLAVIMHRMLADGTSFRHAAV

SEQ ID NO: 92230 - protein, 347 aa, unidentified
MDHYTHYVGIDVSKHTLDVMLWHRHQGAIIKAACQTSNDAPGHQQLVQWLTEQDAPIETTVLCLEHTGRYDDALLEHLTLGGWICALEKTTVLQKVKPEHHRKDDAFDADLLAEYAYRYRDKLSLYQACDPVIEQIRLLYGERRRLVTHRATVKQLQREQGYNRAGRPSQAEAFAQKLWSEQRAFYDGQIKALDQKIDDLVASDEGIRHRYEQVKGIDGFGPKTALKWLCLFYGQQHLNARRISSRFGFAPHGEGSGTSRHRPERSTGHGSGEVRKLLTLCARSAGTHHEKYRRYKERKLAEGKDSQLVTNNMINKLIRVACAVWNEDAVFDPNHVSRFVQNAIATP

SEQ ID NO: 92231 - protein, 341 aa, unidentified
MMVVGVDSHKDSLVCVVVDQAGRAAGSEVFANTAVGHEAMWAWVRQLGCVVRVGIEGSGSYGRGLAQMLVTAGHVVVDVPPQMTARARRRQRTRTKTDPGDALGIARVALREDGLPQVQAVGLTDDLRALCAYRRELSDQLVKASGRLHAELAKIRCGYRHELRTRITLKSSLDKVLTLLGEDHSIRADLARSRVSAMRTLINQTRALDTQIRHTLHQTGTTLTQIRGIAELGAAEILAQVGHPNKYPTKAKFAMANGTAPVQASSGRVVRHRLNRGGNRQLNRTIHTAAITQIRQPGTEGRLYYNRLLDRGKTKKEAIRCLKRRISDRIWTHLQHTTTQN

SEQ ID NO: 92232 - protein, 355 aa, unidentified
MNATTVAVDLAKNVFELAVADASGKVIERARLTRSQFERWFDNRKVDRVVMEACGSAHHWGRWLEARGIGVKLLPAQYVRAYVKRNKTDSADAAALLEAARAADIRPVAVKSIEQQALQALHRMRSGWMATRTRRINTLRGFCREFGLEVRVGAVQGLAAIARLIADDRSPIPALLRTPMRLALEEIRLMEARIEQLERELAQLARQSPACEALSSVPGIGLLTSTAMVAAVRDPRSFDSGRRYASFFGLTPREYSSGQHRYLGRISKRGDRYIRMLLTHGARSVLRAATVARRQGRKLDRLRTWALQVQDRTNHNKATCALANKLARIAWAVWVKHERFQSAEAHPAMAAETTA

SEQ ID NO: 92233 - protein, 340 aa, unidentified
MTVIIGIDPHKASHTAVAIGCDEQQLSEIRVRATCQQTAKLLAWAEPLGERTWAVESAGGLGYLLSQQLVNAGEEVLDVPATLASRVRVLSTGHSNKNDPNDALSVAIAALRSPGLRSVEPANHTEVLRLLAKRNHEIGRLRNIVVSRLHAALANLSPGGIAKELNASDAVRLLGDFNPKTAVERTRYDLALELLDDVRRLDVQLKESHKRIKTAVQASGTTLTELYGVGPILACELIGYTGDVRRFTTRDKFASYAGVAPIELSSGGRIVHRLSRRGNRQLNHAIHMVAICQIRQTNSEGRAYFERKVAEGKTKREAIRSLKRHVANAVYRQLLVDTNK

SEQ ID NO: 92234 - protein, 409 aa, unidentified
MRYYLGVDWADQTHAVWVVDERGTKVAMRTVPHTAEGLSEWGRELDEWRAQGTELWAAIERPEGRVVDFLLDHGVVVYPVNPKALDRARDRFRQSAAKSDPFDARVLADFLRTDHARLRALRPSSEAAQELKLLTDDYQRQIRQQTRLVNQLTMTLKAYYPRALEVAELPTALARDFLQAYPTPAALTALTERQWQRWARAHRMHEARTQELWAVLQRPQLPVPAHVVRAKARLMQSLVAQLTLVVEVVGTYREAIEDFFAQIPAAQWIRTLPIGDHGITAPTLWARLGDAPGRWESFRHLQAQAGTVPVTIRSGKQQVVRFRFACDKSLRYVIDHVAFLSLRWSEWARAYYAGQRARGHSYHQALRALSAKWLKIIFVMWKRQVPYDEQYHLATMTRQQLRLRQKQIA

SEQ ID NO: 92235 - protein, 312 aa, unidentified
MTSAQVFVGIDVSKAQLDIALRPEGRFSASNDEAGFAQILERLNAAPPTLVVLEATGGLEIPITGILAAAGVPVAVVNPRQVRDFAKAAGKLAKTDALDAQILAHFAEVMRPEPRPLPDEQTQTLAAILARRRQLVEMLTAEKNRLGSARPPVRKRLRTHIAWLERELAHTDRDLAHAIRESPVWREKDELLQSTPGVGPVVTTTLLADLPELGALTGKQISALVGVAPFNRDSGTLRGTRTVWGGRAQVRAVLYMGALVATRFNPVIRAFYQRLCAAGKAKKVALTACMRKLLTILNAMMKHRTRWAHTTG

SEQ ID NO: 92236 - protein, 370 aa, unidentified
MLSGGPVTACAGLQAAVAAIWRVCSFSTVQLGSGEVWKAQLPGSSAAVIEWLQSLPGDVRAVYEAGPTGFELARAARRAGVEVMVCAPGAIPRQPGDRIKTDTRDALKLARLHAAGQLRAVLVPAPELEALRDLVRACEDLRSDLMRARQRIGKLLLRKGLIWTGPGETWAGSHLRWLSKTRFDQPLLEVVFGEYLAHHEVLLARRDRLDALIVEQSVSGPWAPAVARLRCLRGIDTLTAVGLIAEIGDLSAFSHPKLLASYLGLVPSEHSSGTRRSQGSITKAGSSHARRLLVEAAWHYRRSPSLSLTLKRRQKGQPPAAIDAAWRAQLRLHRRWAHLDGARAKKRTTVAVAVARELACFVWEIAGQPD

SEQ ID NO: 92237 - protein, 401 aa, unidentified
MDPQIRVGIDVGCKTHRVGIADPNGSILEEFDISHTDAGFRDFFRRIDHHKQGTDLSVAVAMEGFNGHARPLDRLIQEHGYILYNVNNLKLARFKEVFPGAAKTDAIDTRKILELFHLKDQLPLAKDALQKVVVAPLVNDKLKRLSRRRRQLVNDKVRVVNRLHSDMHAVCPELLAITNNVSHLKFLRFLTYRDDLTQLTRLRYTTLLKIPSIGQKYAHIIQQWQRRASFSTEVEYVGPMIIQDAKRILELRQQIHVLDEAMAELADRSEIARRIASLQGFGKTCVAELAGEIGSTERFAGEGSLALYIGMSPLSRDSGQHHGSKRPRSVNHRAKAAMMTAVAHHIRCVPQSKAYYDKKRAQGKTHNQAVRALGRHLVRVIWSMLKNERDYELRKVIPNVT

SEQ ID NO: 92238 - protein, 424 aa, unidentified
MMDTLHERCAGLDVHKAMVVACVRLMIGGKVNRECRTFDTTTTGLLALLKWLTESGCTHVAMEATGVYWKPVWNILGDGPFELRVANAAHIKNVPGRKTDVNDATWIADLTACGLIKASFVPEEAIQQLRSLLRARTQLTREQTSHTQRIQKTLEEANIKLDSVISDILGASGRRMIEAMIAGVRNPSKLAELAGRRIKASPKQLYDALHGRLTDHHRFLLRLYLKQYDALQAAIAEIDQQVDAAITRMDEEAKEGQPPFRSLIDLLCTIPGISILGATIILSEIGSDMSRFPTAGHLLSWAGLCPSQNESAGKRRSSRLRKGAPWLKTLLVQCAWAASRKKDSYYKAQFLRLRAKRGPKKAICAVAASMLTAIYHMLKDGTEHRDLGAGHFDRRSTEVKTNRLVAQLTKLGFKVELQLLADAA

SEQ ID NO: 92239 - protein, 443 aa, unidentified
MKALPVLDPKAAAIDVGSEKLHVSIAGDTPKVFGTFTGELESLCTWFQAQSVRTVALEATGVYWLYLYEVLEDAELEVVVVNGRHVQNVPGRKTDMADCQWLATLHAHGLLRGGFVPTADIRQLQDYQRLRADHLVGAASQVQKMQQALERMNIKFHDVISDLVGVSGLKVVRAILQGERRPGELLALCDVQIQKKKSDRVKESLRGCWKKEQLFALRQALELWEAYQQKIADCDRELAALLQEMAGPLPPPEAGGGGDVKLAPAKAPGKNAPVIERFQELLARLCGGRDATQIPGMSSYLVLQLISEVGTDMARWASEKHFVSWLGLAGGRKQSGKRRGSVKAHRNRAGRLLCAAARALAQSVDKALGGFYRRLRGRLGGLAANVALARKLALLFYRLLRYGVEYVEKGLKSYEAKVLEGETRLLRKLARKQGFTLIPAQAN

SEQ ID NO: 92240 - protein, 354 aa, unidentified
MKILAVDLGKVKSVACDFATETGEHVFETCRTAPETLEELFVRRRPDRVVIEVGPSAGWISDLTARLQIELQVANPSHEGWRWRSVKKKTDRVDALKLAQLSAVNQLPRVEVPSKEVREWRSLIHYRQGLVARRTAIKNTIRSILHRQAMGMPTGRSGWTNAFRKTLDRLAGVGDDAAALWATLQPTEWWRGQLAEELRQFDEVSCAIGSVERQLDGYAEKKRAVQRLRSAPGVGPRLSEAVAAILGDPRRFKNGRQVAAYAGLVPRVFQSGSVDRKGRITGAGNRYLRGMLVEVSWLGLRTNPWMKQVFDRVCRGCPSRRKIAIVAVARRLLIWCWAMMRDDRDWRPKALAAA

SEQ ID NO: 92241 - protein, 360 aa, unidentified
MTGTMTWAAMDVHARSTYATSLDVMTGELSRQRFETGQVEPVVDWLAGLPGPVRCCYEAGPTGFGLYRATVAAGIECQVIAPSKTPRAAGDRHKSDRRDSELLLRQLMAGALTPVVVPSATGEAARDLARAREQVRVDLMRCRHRLSKLLLRYGRVWDRTAWTKTHREWLGSQTFAHQNTELAFIDNLAACDGLTARRTVLDERLSWVATDPEFWPIVRRLRAFRGIDTLSALILALEVADFARFARAVQLGSWLGLVPSREQSGETDRNGSITKTGSKYARRILVEASWHYARPPRIGKTLSERQEGLPDHVLQIARRAQTRLYRVHKRMRERNKPGNVITVACARELACFLWAAATAP

SEQ ID NO: 92242 - protein, 357 aa, unidentified
MRRFSHSFLHEIGQYLWPDSVGSPHRQGRLREKFMKAVLGIDVAKAKLDVALRRPDGKFRHKVVDNTAAGFGVLSAWLHKEGVTELHVCMEATGVYWEAVAEYLADAGHTVSVANPAQIKAFGAAALVRTKTDKADAKLIAEFCQSQSPAPWQAPSPALRELRALVLRRNALDAMRTQEHNRLLVARDSVRSGITAHLAYLEKAIAEVEAAIRQKIDDDPDLKQQRDLLDSIPGLGDKTIPVLLSYYGGPQRFDKAKQAVAFAGLDPRQHESGTSVRGKPRLSKVGHAHLRKALYMPAMVTITRTAWGRVFRDRLSAAGKAPMVIIGAMMRKLIHIAFGVLKSGTPFNPALHGLVSA

SEQ ID NO: 92243 - protein, 334 aa, unidentified
MQNITLIGIDLGKHSFHIHCQDKSGNVLLRKKFTRAKLIEFLAGCASSTVVMEACAGAHFMARRIADLGHEAKLISPQFVRPFVKSNKNDFVDAEAICEAASRPSMRFLQPRTEAQQAMRALHRVRESLVSDKVKTTNQMHAFLLEFGISMPTGVAVVKRLSTVLAENELPPYLAQLLMRLHAHYIYLVGQITELEIALEQELSRDEVGQRLQTIPGIGPITASVLSLQLGDGKQYSCSRDFAASTGLVPRQYSTGGKNTLLGISKHGDKNLRRLLVQCARSFIQRIANQSGRLADWVRALLARKHSSVVCCVLANKLARIAWAITTQQTVFER

SEQ ID NO: 92244 - protein, 358 aa, unidentified
MKIIGCDLHARQQTIAMLDSDTGELEEKTLEHQGETVRKFYSALSGSILVGIEATGSMQWFLELMEELGIECRVGHPAKIRKAETRKQKHDRRDARLLLTLLAENRFPTIWMPSSEERDLRTLLRHRHQWVRLRSRVQHTLQSMALNHGLRRGRSLWSQAGQGELRALPLAPHASERRKALMTLYPRLQESIAELDRQVSEQTQQRTDARRLMTHPGVGPVTALATEVFLGDPKRFSDGKALASYIGMIPSEHSSGRRQRLGAMSKQGNALLRYLWCEAAMHAVERDPELKRFYRRKLVQKGLGKARVAAARKLGIRLWIMMRDEIDYQEFCRRGKARQESGSVRAGMPDRNSGPAEQ

SEQ ID NO: 92245 - protein, 411 aa, unidentified
MHNRQNYLYAGVDLHKEHHTAVMINCWQEKLGEIQFDNKPSAFSKFLLEVETYVCDGITVVFGLEDVGGYGRALAKYLVDHERIVKEVNPALSFLERKSQVMIQKNDSWDAECVARIMVNKFNQLPDAKLNDLFWSIQQLVSRRNALVKAQSALKNQLHIQLNHHYPSYKKFFSELDGKTALAFWQQYPSSSCLEEANIKQLTAFLLDVSNNTCSVKKASDILKLVKEDGQTMKEYQETRDFLVRSIVRDIEFKKREMKYIERELKRLLNLLDYQLETMPGIELVTASALIAEIGDVRRFPNANKLARFAGIAPVYFGSGGKGKTHKSKQGNRALHALFYNLAVQQVQVAKGSKLPRNPVFHAYYQKKLKEGKTKGQALVCIMRRLVNIVYGMMKYKTAYELPVVEEKEVV

SEQ ID NO: 92246 - protein, 375 aa, unidentified
MNNNNTLYVGLDVHKESITVAYAINSEPVELMGKIGTSPTDIQNLCKRLRSKSSQVSIVYEAGPCGYGLYRRLVKSGFDCMVCAPSLIPKKPGERVKTDRRDAIRLVRSLRAGDLSAVYVPGIEDEAFRDLARAWASARDDLRHARQRLKSFLLVHGVHYVGRADWGPAHRRWLSKYSFESPWRQLAFDEHRRTIEDRQAQCERLESALKEAVTEWRLYPVVEALQAMRGIQFITAVGLISELGDLTRFEHPRQLMSWFGITPSEYSSGGSRHQGSITKAGNSYARKLLVEAAWSYRHPARISPAIQKRQENLPRPVIDRAWDAQLRLCKRYRKLQAKGKNVNITIVAVARELAGFIWDMGRIAMSVAQQPQYHK

SEQ ID NO: 92247 - protein, 357 aa, unidentified
MIDKHTELDYSGQDVFIGLDVHKKSWNVTILTGDAIHKTFSQPPEVETLVKYLHRHFPHAHYHCVYEAGYCGYWIHDQLCGHGIECFVINAADVPTSDKEKRHKTNKVDSRKLARNLRNGELSPLYVPSRTVLEDRTLVRSRHAFVSKQTRCKNQIKALLSFYGVRVPEDCSERYWSRRYIAWLESLQMQSAGGTQALKALLSELAHLRQSILAITRAIRSLAHTERYADNVRYLVTITGISTLTAMILLTEIITLERFASLDELACFVGIVPGEHSSGDDRTLTGMTKRKNPYLRWILIESAWVAVREDPALALAFTKLCQRMPKTQAIVRIARKLLNRIRFVLKHQQPCVCLHAA

SEQ ID NO: 92248 - protein, 340 aa, unidentified
MQIATIGLDLAKHWFQIHGVDVEGRTVVRKRLKRADVPRFFSEVPPCLIGMEACATAHYWARQIAKYGHQVKLMPPAYVKPYVRRGKNDERDAEAICEAVTRPNMRFVAVKSDDQQAFLMVHRARELLVRQRTMSACAVRAHLAEFGVIAPQGRQRVDQLVEWLDTEEGKRLPVLAHEALRVLVIHLEELSTRIASLEAELAKLHRSNPIAQLLSTIPGVGPITSTALVATVPDPSVFRSGREFAAWIGLTPRQNSSGGKEKLGRITKKGDVYLRHLLVIGARNVVRFPKARALVGAAWIDSLLARRRPMVVAVAVANKMARIIWAMMTTGECYRRVAAS

SEQ ID NO: 92249 - protein, 428 aa, unidentified
MESMDINRIKEFRQLKNEIRGSDRFLIVGFDIGKSIHYAFLGTANGKTVKRGMRVENSASGFEHLLTMVQFYMDRDGFKDIVFGLEPTGVYHKPLAEFLITHEHLVVYVTNEAIKKNRSLLDGRWDKNDTKDSANAADLVAQGKCQFYDLPDIQLRDLRALLAFRQRLRKQLHSCRVRIRNNLVAQYFPELDKCWNQAQEENLAIVRWCLSPQIINHLSFEDFFQMVTTRNRGPRQFNRLSKIWEMAPYSIGCQAGDAMQLEAQILVDNIKAIEAHIATVDKTIEDICVNFQEYEYLLSIPGFGPYISAVVLASIGTAQRFENTHQVIKFAGFDLNANRSGKKSQSAVPVISKKGKAALRYAVYQAALIASSSNVQFRDYYHHLLQGREREKGIRTKMRVKLAAKLLVIAWTLMKKKQAFDPSYLKAK

SEQ ID NO: 92250 - protein, 356 aa, unidentified
MNKISRLSFKGQQIYVGMDVHKKSWSVSILTDKFEHKTFTQPPEVGTLVNYLKRNFPGASYNSVYEAGYCGFWIHDRLQEHGIQCLVVNPADVPTKDKERTKKTDRVDCRKLARSLRSGEIEGIYVPSRPKVEDRSLIRTRQSMVKKQTRCKNQIKSILHFYGIQIPEALANSTWSKRFINWIEDIRMERTSGNFALKVHLEDLNNMRKLIADITRGIRTLSNSEEYQQNVRLLKTVPGISTLTAMTLLTELYDISRFTNFDKLCSYVGLIPDTDSSGETERKTGITSRRNGQLRNILIESSWVAVRKDPAMLMSFNTLCKKMSKTNAIVRIARKLLNRIRYVLKNQKEYVSAVVQ

SEQ ID NO: 92251 - protein, 339 aa, unidentified
MHFIGIDPHKDTLAACAVDPHGRPVSHASFPNDPAGYADLVPWALAYRPDRIGVEGAGGLGRQATLALQRSGLTVVEVPPQLTAQARRRGRSQAKTDPIDALLIARITLRDANLPTVRGDGPLEALRSLVDYRRELLGERTRLANRLHADLEQLRPGYQRRLPKLAHPATVDRARRLLADDARTRAQIARQRLTRLRQLHTQIAELTTQITQLVGRFDTALTQICGIAAVAEAELLAEVGDISRYGTKAQFAMSNGTAPLPVSSGRTNRHRLNRGGNRQLNRILHYIALTQIARDPQGRAYYHRKLTEGRTKPDALRCLKRRISDRVYQTLRRQPPAGC

SEQ ID NO: 92252 - protein, 333 aa, unidentified
MNYVGIDVGSKELVMAACVKGMFRNAKTFENTAQGHKLIIKQFAKLKGNTQVCIEATGIYHLDLAVALSRAKNSDVMVVNPKVSHSFAKVLMKRSKTDAIDAEILATYCERMPFESWQCPADELISLRAISRRIAALSKLKSQTKNQRHALTATEGTPHVVIEHTNDLILVLESQISSLRGSALSLILQFDELAEAYRLITSIKGIAEASAIQILSELMLLPKDMNHKQWVAHAGLDPRHFESGTSVSKKPRISKAGNKYIRQALYMPALVATRHEPHIKAYYNHLIDDNGLRKVQAVCAVMRKLLHAIHGMFKAKQTFDGRRFYAFPSQAQV

SEQ ID NO: 92253 - protein, 343 aa, unidentified
MQTITTIGLDIAKSVFQVHGVDAQGNAVIRRQLKRRAVLAFFEKLPPCLIGIEACASSHHWSRELKALGHTVRLMPPAYVKPYVKRQKNDAADAEAICEAVTRSNMRFVPTKTVEQQSCLMLHRTRHLFIRQQTAVINSIRAHLAEFGIVAPVGRKGVEELLDVVADSNDDRLPEVARVCLAALGAQLRRLKEQILEFDRMIMAWHRSDETSRRLRYIPGVGPMLATALVASVADPKAFRSGRNFSAWIGLVPKQHSSGGKDRLGSISKQGDRYLRGLFVAGALSVIRYAKIRGTKHRPWLTALLARKPTKVAAIALANKLARMAWAMMARGERYRNPVALAA

SEQ ID NO: 92254 - protein, 466 aa, unidentified
MTRPQKSTSPRRSRKQHGPAKLKPQDGTLGLTVVHPRAAGIDVGNAEHYVAIPPHLDAEPVRRFECFTADLEKLADWLKQHGIETVAMQSTGVYWIPLCDILSRRGIQVTLVNARDTKNMPGRKTDVQECQWLLKLHVYGLLKNSFRPEEQTLVMRTLWRQRQQHIADASRTIQHMQKALTQMNVQLANVISDLSGWTGQAIIGAILKGERNPRKLAELRDARVKATEPEIARSLEGNWRAELLFVLQQEFEMYQTLQRKIQECDQEIERQFQSIPPKADPEELEEVPRNKRPHGNVPENFDLRDEMYRITGVDLTAIDGLNVLTAQTILAECGSDMSRWETEGHFVSWLNLAPRNKISGGKVIGRDRRKVVNRAGQALRTGARTLLHSQSYLGAQYRRLRTHLGAPKAIKAMAAKLARILYRLLKFGQSYVDRGTEFYENKHRQLQIQILTKKAAGLGLQLVQSA

SEQ ID NO: 92255 - protein, 390 aa, unidentified
MNAYEKRRLAHSAAAVIGIDAGKRRHAMVVRPASGEDSEPYLFDATRTGFGLALLEIRRVVPDAQPRDMLVAIEFAGYYGFTLAHWLRDQGFRVVSVLPKHTKHWKEVYHNQRLKSDPADAQTITDLAAQGSFVGFPFLKQVYADLRYLVSHRERLQTLRTGSIARLKDVLQVVWPEFESLCGNFNKKTPIALLRTYPSPQAFLAAPRASVVKLIRRTSRGQLGEALYDDLRTTALQTTALPGAHGFLAGEVPLQLEMIALVERQIAKVEGRMIECLKGAPEAQALLSIPKLGAPTAAVFLGSIGDPRMYESSRQALRLAGLSLITSTASGMKPGQPRISKRGRSELRKLMYMFAVRSVTNERHLPRGTGSRVESEPENAEEEGHHCSCS

SEQ ID NO: 92256 - protein, 352 aa, unidentified
MIVLGADMHKGSHSLAAVAGDTGERLDDKIVKVGNRGFAAALAWARGLGAERVWALEDCRHVSGAFERFLLVRGERVVRVATRLMAGERRGGRERGKSDLIDAIAVARAALREGIDRLPSAELAGVELDIRLLVDHRERLVRMRTALNNDLLWHLHDLWPEQTFPGSALLSQKWTARIARRLARAEQTARVRIARDELRQLRELSRTIDALKTEITELVAQVAPQPLTEPGFGPLTAGKLIGEIAGAQHFSSDAKLARAGGIAPIPVSSGKTNRHRLDRGGNRQINTAIHRVAVTRARCHHETKTYIARKRAEGKTNRDAIRCLKRHLARRVWHLLQPPTPDKTTLSPHRTS

SEQ ID NO: 92257 - protein, 416 aa, unidentified
MTDQKQFYAGVDWASESHHVFLTDGDGRKIGERVFRHGGEGLAELAAWLTATSGATEAGQIQVAIEVPHGPVVETLIERGCQVHAINPKQMDRFRDRFTLAGAKDDSRDAEVMASALRTDRRCFRLLAAADPVVIELREWSRMAEDLGAERNRLTNRMREQLWRYFPALLELENDLGAEWLLDLWEAVPTPAKAARIRAATIAKLLKRNRIRRVDATHVLAVLRTPPVKVAAGTTEAASAHIATLIARIRLVNRQLKQAHQRLDTLTARLVPTEATEPGQRKQHDVEILASLPGVGRIVLATLLAEAFDALQRRDHAALRSLTGVAPVTKRSGKSCIVIRRQACHDRLANAMYHWARVAIQHDSRSRLKYAALRSRGHSHGRALRSVADRLLNVACAMLKTGTTFNPSLAEQKLSC

SEQ ID NO: 92258 - protein, 374 aa, unidentified
MAHTEDGLDDLVARLGSFGDRADVAVGIERPDGLVVDRLLEAGHPVVAVKPAAIRAYASAEIPSGAKSDPADAETIAEYLRLKAERLEPLQPYSPQTRALRETSRTRVRLVRRRVRATNQLETTLQVWWPGALTAFPDLDTDIAMAFLTRYPTPEAAAHLGPKRMERFLDVAGYSGYGWRRSGQEMIDLIRKAPRGAGTGQLADACQAVIGAQVNTLIALRNAIKDLGRAIKTQLDEHPDAEIFLSLPHSGMINAAQMLAEWGDVRQAYPDPDSVAAQAGVSPVTRQSGKYRNIVFRRACNKWFRQAMTTYADNSRHGNQWANDVYRQARTRGFDHPHAIRVLARAWIRVIWRCWTDHTPYNPDRHGNLQALTG

SEQ ID NO: 92259 - protein, 395 aa, unidentified
MEFLKYGLGIDMAMEKFDACISIIDQQQHVMIRSQCSFNNNKKGFETFILWVSKNTKLAIPAVYLMEATGIYYEQLAWFLHNKNCSVSVVLPNKAKKYKEALGLKSKNDRIDAKGLAQMACEQSNTSWKPLTSNIYLLRLITRQIQSISEQSTVFKNQLHALQYGMYRDKAIEKMHVRQLDLLQKNKKSLQLRVEQIVEKDEILKRKFKHIGKIKGLGLQNLAVIVAETNGFTAFENVAQLVSYAGYDVVENQSGKRSGKTKISKKGNSHIRRCLHFPAFNMIKYEVAPFKNLYERVYEKSKIKMKAYTAVQKKLLEFIYILWKRDEAFDSNYQDKTSRDVEPEPSFASVPKEPSIARGDQEEKTKPVKQKITPAITRVTQDKHPSKYRRMPSFA

SEQ ID NO: 92260 - protein, 418 aa, unidentified
MENRPPFSYQATVGIDWADRKHDVFVRFANGSSYRRKIGSRPEAIQEWLFELRSACAEGKIAIALEQRRGALFYQLCTHLSWIDLYPINPHSLSSFRLTFFSSRAKDDPKDGQLLEELLRTHCDRLRPYQPALTTERQLDLYCRQRRSLLGLATKTELKLISTLKQYFPVAVDLFEAVGMKSDIALNFLSRWQTMHELRRAKTHTVRSFFYAHNSRSQSLIEKRLQQIGAALEVTDDPALIEPMVLMTKCLVGQLRQFNQTINEFDRKIKGVFKSHPDHFLFEALPGAGEKLAPRLLSLFGSDRSRWPDAADIQKYSGIAPVIERSGKSLWGHRRLSRPIFVCQSFHEFAQQSTRFSSWANEFYKRQREKGKSHHSAIRSLAFKWIRIIFACWKANKAYDESFYLNALAKRNASSSPT

SEQ ID NO: 92261 - protein, 412 aa, unidentified
MDSIVERCAGLDVGKRQVQACVRVPDPGGGRRVEIRTFPTFTSGLELLADWLAREGVTEVVMEATGQYWKPVWYVLEDRAFELMLVNARHVKILPGRKTDVADAAWLAELLEHGLLRGSFVPPPRIRELRDLTRYRKKLVQARTAETQRVTKVLEDAGIKLDSVASDVLGVSGRAMIAALIDGERDPDVLAELARGRLRVKLPTLREALRGRFRDHHAVMLRLGLEHVSQLEHAIGELDDRIDKVITPFARARDHLDSIPGVARRAAECLIAEIGVDMTQFPTAGHLASWACMCPGNNITGGKRRSGRTRIGNPALRDILTECAWAAARTRGTYLSAQYWRLARRIGNKKAAIAVGHSILVIAWHLLTNDTDYDELGGDYFLRRHDNPTHQRDRHVKALRELGYQVTLAEAG

SEQ ID NO: 92262 - protein, 314 aa, unidentified
MENKELFVGIDISSETLDVAFSPTDQPQRFPYTEEGLQTLITRLQGCQPTLVVFEATGGLEAALMQALQEARLSFSRVNPRQVRDFARATNCLAKTDALDARLLAQFGQVLRPQPTPLPDEQTRHLRALVTRRRQLITLQMMEENHWRTAPSALRPAIRRHLDWLAEELANLDQEIAEFIQKTPLAETVTLLQSVPGVGQVTAVVLVAEVPELGRLNRKEIAALVGVAPFNRDSGKQQRQRHIRGGRAAVRTVLYMATVAGIRCNPVLRALYQRLISAGKAKKVALVACMRKLLTILNAMVRHRQTWCPRGAAA

SEQ ID NO: 92263 - protein, 409 aa, unidentified
MHEKQKHLYVGVDLHKQHHVAVIINCWQEKLDEIKVENKPSAFSTFLLDIDKLIDDGLTPVFGLEDVGGYGRSLAQFLTDHGQVVKEVNPALSYAERKSHVTVQKSDSWDAECVALILLNKLNDLPDAKPHDLYWSIQQLVTRRNALVKVQGALKNQLHIQLSHHYPSYKKFFSQVDGKTALAFWERYPSPSCIEGVSIKQLTTFLLEVSHNTCSVKKANEVWKLLKEDGHTTKEHQETRDFLVRSIVRDISFKKQEMSYVEGELKQLMSLLDFQLDSMPGIDLVTASALIADIGDVRRFPNANKLARFAGIAPVYFGSGGKGKEQKSKQGNRALHALFYNLAVQQVQVAKGSKLPRNPVFHAYYQRKLKEGKTKGQALVCIMRRLVNIVYGMMKHKTAYELPIEQEKK

SEQ ID NO: 92264 - protein, 407 aa, unidentified
MRLFVGLDVSSFDMKVCFLNGEGERLDSFSVSNDLPGATVLKERLLQCIANKEVEIFKIGLESTSVYSFHPSMFLHHDEDLKRFGVQVFLLNPKQVANFKKSYSDMNKTDEIDAFIIVDYLRFGRNQMSIVKENQYVALQQLTRSRYQLVRMLTKEKQHFLQHLSYKCNTFSQEVNSSIFGNAMMELFLEKFSLEELADMPLEELAEFLQEKSRNRFGDPKCVAITIQKAVRTSYRLDKVVEDSIDVLLGTSIEVIRTYQKQIKELEKSIKRIMAGLTQTLESIPGIGPIFAAGIIAEIGQIERFEDETKIAKYAGLYWRTHQFGRFTAENTSLSRNGNRYLRYYLVEAANSVRKHVSDYQEYYVKKYNEVPKHKRALVLTARKFVRLVDALLRNHQLFTPERCVKV

SEQ ID NO: 92265 - protein, 406 aa, unidentified
MLVYLGIDWSEQKHDLSFQNELGAEILHLRIPHSENGFLTLNQSVANLGASPAECMVGLETAHNLLIDFLWAHGYTQIYVLPPNLVKSNQGRHRQSGAKDDRCDAALIAELVRTDRSHLYPWRPGSLLLQQMRAKVSYLYFLTRDIVQHTNRLRSILLRYYPAATQVFSALDTKICLDFIQAFPTPQQAAQLDFETFSAFARSHHYPQPKRLLLNYARLQQPQPIPAAETVQAFQDEAVQLCQLVKMLVQRKEEMLQELDRLYQQHPDHVIFASLPGLGARLAPAMLVKFGEDRQRFPQPELVQALAGTCPITVQSGKSKYVRFRQSCDHEFRHYVQQWAWHSLQHSSWAEAYYLRVRPNCRSDSHVLRCLGNRWLAIAWKLWVSETPYDETYHLRQHALRLRPRA

SEQ ID NO: 92266 - protein, 338 aa, unidentified
MVVIGIDPHKGSHTAVAIDDDERKLDEMRVRADRRQLERLTTWAAAFPERSWAIESANGLGALLSQQLVGAGEEVFDVPPTLSARVRVLASGKSQKNDPNDAFSVAVAALRSPRLRLVVTEDHAAGLRLLWNRHKNLTSLHTQAVCRLHALLAGIIPGGTRRRLSADKAAAVLSGYRPKTEVEKARKDQAHILVGDVRRLDAQLKASNRTIVEAVAHVPTGLQELSGVGPVSTCIILAHTGDIRRFGSEDNYASYNGTAPIEASSGPKKRHRLNPRGNRQLNHAIHIIAFSQLSHAGLGRDYYERKMAEGKTKKEAVRALKRRISDVVYRQLVLDAQR

SEQ ID NO: 92267 - protein, 340 aa, unidentified
MRALYAGCDLHGNNNLIGIIDGEGKRIFKKKLSNDLALVRDTLKPFREELIGIAVESTYNWYWMVDGLMEKGYQVHLANPSAIQQYSGLKHSDDTHDAFWLAEMLRLGILPEGYIYPKEERPVRDLLRKRGHLVRLRTSLIISLQNILSRNLGRRVNVNDVKALKEDRISPLLEMNEDLALAGRVSKEAIDHLTGQIRKIEGVVEKKVKLREEYRYLLTLHGVGKILSLTIMLETGPISRFETVGDYVSYCRKVPSQWTSNGKRKGSGNSKNGNKYLAWAYSEASEYARQLYPEPRAYYNRKMQKTNAAVAHSALANKLSRAGYYVMRDQVPFQPEKLFG

SEQ ID NO: 92268 - protein, 482 aa, unidentified
MAKRKKSTYERLQSSNPNRQQRKKLQRQFDADSAELVVVHPNAAGVDVGNASHFVSVPPDRDQAPVREFGSWTADLRRTAEWLKSCGITTVVMQSTGVYWIAIYDLLEQEGFEVYLVNARGTKNLPGRKSDVQECQWLRKLHTYGLLRKSFRPPEQIREVRTLWRLRSRVLEDSSRAVQHIQKALTTMNVQLANAISDVSGVTGMAIVRAILQGQRDPHELAKLRDPHIQASEEEIAQSLEGNWQRDVLFELQQVVEAYDFHRQQLATIDTELQKYLTALPTREPVGEVSADVSKLSAKLRKKLKANRKSKDNRPAFDLGAELARLMGVDLRLIDGIDVMTIQTIYSEVGADLSSWPNEDHFASWLELVPRNNITGGKVIKKEKRPSNNRVTTALRNAAESLVRSDSYLGARYRHFTGRLVGLKGVKAMARYLACLVYRLLTKGPAWVDRGAAYYENKRRDRELVSLHRKAAAAGMRLVPAV

SEQ ID NO: 92269 - protein, 353 aa, unidentified
MSIYIGIDWSQEKHDVAFMNAAGAIIARLTIPHQPDGFRKLETTRQQLSVTAADCLIGLETAHNLLLDFLWDHSYQHIYVIPPWVVKSSRGRYGHSGARDDTLDAQLLADLLRTDRARLQPWRPDSQLTRQIRARVGFISFLTHSANRTHNRLRAALLRYYPQALELFSGLMVPTTLAFIVTYNTPQALTALSYETFASFAQQQGYWNRQGLFACYARLQHTPLQASPATVAAYQDEARLLAQQLRELILAKRQVQRDLNTLFAQHPDQAIFSSLPGVGAFLAPALLAKLGDDRERFPSAASLQALAGTCPVTVASGKHKRVIFRHACDHEFRQIAQQWARCSLRNSVWAVAY

SEQ ID NO: 92270 - protein, 405 aa, unidentified
MNAVGIDVSKGKSTVTIRKPGDVVLMSPCDIPHTQSAINDLIKQIKSLEGETKVCMEHTGRYYEPVATWLSDAGIFVSAVNPILIRDFGDDSLRTPKTDKADSKKIARYTLDRWAKLKQYGIMDKTRNQLKTMNRQLGFYMAQKTAMKNNLIALIDQTYPGANDFFDSPARNDGSQKWVDFIHTYWHVDCVRSKSLNAFTEHYQNWCKRKNYNFSAEKAAKIYQISSDLIAVFPKNDITKMLIWQAVALLNTASKTVESLRSKMNELASTLPEYPVVMDMNGVGATLGPQLIAEIGDVSRFTHREALTAFAGVDPGKNDSGKHIQNSVRTSKKGSPYLRKTLFQIMDSLIKRSPVDDPVYAFMDKKRSEGKPYYVYMTAGANKFLRIYYGRVREYLSNLSNNETI

SEQ ID NO: 92271 - protein, 433 aa, unidentified
MSPKKDHTSTVRMLHPICCGLDVHKKTISAYMLLSTKRGREKVKAADFGTFTDELVNLRQWLLAHDCPVVAMESTGPYWTPVHNVLEGFLNVMLVNPRHMKNVPGRKTDVSDSRWIAGLLRHGLLRPAFIPPKAQRQWRDLTRMRKNYVKSQGDFKRRVHKVLQSANLKIDSVLSDLFGVSGRNLMKLLINSNSHPTLKQVERCLVSSVKEKARELHRSIQGFFEEHHRDLLRLLLESIDHLEDQIRRLDEKIQRTMSQEQEIIDRLKAIPGISEVSAHAILAEIGPHLDAFESPAALASWCGLCPGNNQSAGKRRSGRSHVTKNHLKEIMIEVAWPAIKKRGSYFKAKYYALKARLGPKKAIVAIAHRILKGVYHVIKDGKSFKDLGEDFLVKLNKESKLKYLRKQAALLGFQLTPLAEPDHNTAKPIFVEG

SEQ ID NO: 92272 - protein, 347 aa, unidentified
MLHAGLDLSRKKLDVCLLSDSGEHLDQLAVPPDGDSLRRLARRIEEVHCEPVCAVIDSMTGARIVHDTLEQEGWSVEIADAQKVKGLAPLACKTDKIDSQVLAVLSHRDLVPAIWLPDPSVREERELARFRLHLVKHKSALKNRIHSTLINFGKPCPVTDLFGLEGRRLLKRLRVPEPWRGNITASIELIDDLERQIAEINRRLKEGHAEHPYVPLLLTVPGIGWVLAFTIAAEIGEIERFPSPEKLTGYTGLCPRVNQSGEKDRRGPLTKHGPTYLRWALLEATMHALKHPAYSERYQRNKERLGKQRGAKVAQVDIARRLSHAIWHMLSRKEKFAPRGAAFRLAA

SEQ ID NO: 92273 - protein, 316 aa, unidentified
MSKKEVFVGIDVAKEELEVAVFPRADTETWPNTEEGILRLVGHLKPLCPTLVVLEATGGLEMPCVGALAAEGLPVVVMNPRQIRDFAKATGRLAKTDRIDARAIARFAEAVRPEIRELKTEEMQELTALGLRRRQIIQMITSEKNRLATASKWTREDIKEHISWLEKRLDDVNKELEKSIRNSPVWREKDDLLRSVPGVGPVLSATLLSQLPELGSLNRKQIAALVGVAPLNRDSGQFRGKRSVWGGRASVRSVLYMAALVATRFNPAIAVFYHRLRAAGKDPKVALTACMRKLLTILNAMARDHARWSPVCSGVS

SEQ ID NO: 92274 - protein, 321 aa, unidentified
MVSPPSQRPFVGIDVSKEFLDTARSDQPAPWRTANDTTGIDTLVRQLQTLAPACIVVESTGGLERPLLAALLEAQLPVALVNPGNVRHMAKGLGILAKTDALDARVLAIFAEKATPRLLEKRAPFQAELDALVTCRRQLVKTKTEQSNRLGTTTSKHAKKALQAVLATLEKQIAKLDQQIRDHIDSHEQWKHVDELIKSAPGAGAVLASTLVANLPELGTVDHRQITALVGVAPFNHDSGRFKGKRFIQGGRADVRNVLFMATVSAMRFNPVIKDFGDRLLAAGKLWKVAVVACMRKFLILLNTMIREDLPWHQLNCVKTA

SEQ ID NO: 92275 - protein, 367 aa, unidentified
MKKISTIGVTQTRSFRDQRLTIGLDLGDRSSWYCVLDESGAVLLEQRLSTTPKAMKEVFGGMPRSRIALETGMHSPWVSRLLSELGHEVIVAHARNVRLIGESRRKDDRMDAQNLARLARIDPQLLAPVKHRSAQAQADLTLIRARAGLVRARTALVNTARGLAKSYGERLRGCNPRNLNEEKAQELSPELRSALEPLLAGIKSLSAQIREYNQRIEHLAQTRYPQVTLLKQVKGVGTLIALTYLLTLEDAHRFRKSRDVGCYLGLQPGRRNSGQSQPQMHISKEGDPYLRTLLVQGAQHILGPFGADSDLRRWGLKLAAQGGKNGKKRAIVATARKLAVLLHRLWVSGEVYEPFRNSIPLVATVAA

SEQ ID NO: 92276 - protein, 343 aa, unidentified
MDGLYYIGLDIHKKVVAYCIKALDGSLIDQGKIGADRQSLGVWVKGLPGPWIGAMEATLFTGWVYDFLKPYAVALKVAHPAMLQAITVAKKKNDRADAERIADLLRVNLLPECHMLSEEMRELRRILRYRNHLVRTAVKMQNKMSSLLMEVGISYSKKRLHGKKYFHELLERVDEIPPSVKELLKLSRSGYEIFRSFQKRLVETLRANQLICDRVHRLMTIPGVGEITALTWVLEIGDSSRFTSIRQAVSYCGLCSAQRESAGKEQRGPISKKRNKHLQTILIEAAKLAPHWNEHLAIVHERELKKGNKNRATLAVARKLVAYMLAVDRKQAEFKLPSEIRAA

SEQ ID NO: 92277 - protein, 342 aa, unidentified
MSVYVGIDVHRKRSQVAVIDQAGQVLANRNVPNGVEPILKVIGGLPPGTAAAFEACYGTSWLVELLEDYGFDPHLVHPSRCKAIASARLKNDKVDAAILGQLLRADLLPEAWIAPPPVRQLRALLRHRVALVRLRTRLRNRIHAIVADYGYDRPVGGYWTGPGRAWLASLELSAVSRELAGDYLGLIDALQERIDRLDWEIRQRGRSDPRVKVLTQLPGVGPFTALVILAEIGEVSRFASARKLASWAGLTPTVRGSDRVAHYGHISKEGSAWLRWVLCEAAQTAKRSPEFAPAFQRIAKRRGKKIATTAIARKLAARAWHLLTDAGPAAAPPPAPPRTAAQ

SEQ ID NO: 92278 - protein, 344 aa, unidentified
MKITTIGLDLAKSIFQVHGVDATGQVVVRKSLRRSQMLPFFAKLPSCLVGIEACGTSHHWARELIKLGHQVRLMPPAYVKPYVKRGKTDAADAEAVCEAVTRPTMRFVPVKSPEQQAALSMHRTRDLLVKQRTQLINMIRGLLAEFGVDIPKGLERALLMARQIVDGKAPDVPIEAAKIVGTLSQQALDTHVRLREIDRDLLVWLRGNDVARRLTTIPGIGPVGATALAASVTDPHQFRSGRQFAAWLGLTPLQKSSGGKERLGRITKIGDKYLRKLLIVGMTSLVRRAKYNPKTIDPRLADLLARKPTRVATVTMANKTARIIWAIMARGEIYRTGHRPALAA

SEQ ID NO: 92279 - protein, 375 aa, unidentified
MKVMMIGCDLHDKSMLVKTAIDAKEQIGTRSFSNDPPGRHELVVWLRERAEREGVERIVLAYEASGQGFGLCDLLTDHGIECYVLAPTKMAVTPASRHRKTDERDALKILEVLKGYVLAGNSLPSVCVPDRTLRDDRDLLRTRGDLVQKLTTVRTQVRTLLKRHDVRSPEGLGCGWTKAFELWLSWLAGAGPHPLQPQRRDECSPLGPGARAALVSLLRQLEFLEEELSRVMAAIRKLAASARYAPLVRELTALEGVGLVTAMVFLTELGDPRRFRNRRQVAAYFGLAPSSYESGTQDDRKGHITRQGSPRVRQVLCQAAWVRVQKHPGDRHWYERIKLKNPKKKKVAVVALMRRLSVLMWHRSLEAAQRTSTAA

SEQ ID NO: 92280 - protein, 335 aa, unidentified
MQFTHILGIDVSKTTIDLALSQNKANASMVNTKFGNNLKGYKALLTWIKEQKVAIGQVLVCLENTGLYHRALVAFLQDKQAFVWLENAVVIKWSMGLTRGKSDLIDCQRICLYAFRHQDKAQAHTRMNKSLQGLADLLATRERLIQAKNSLLLPIKEMQAAGFSQEARRIKNICKASLTSLEQAIKAVEKELEYIIDKEEKLKNNYRIICSVKGVGVVTALYLLVYTSNFERFTNAKKLACYSGIAPFTYSSGSSIRGRTQVHPMANKTLKTALHMCALSSIRNKNKDEMSLYYERKIKEGKHKMSILNAIRNKLLHRIYACVREQRMYVCKQAA

SEQ ID NO: 92281 - protein, 313 aa, unidentified
MTIPQITLGIDISSTRLDAYAYPAGRAHGVANTAAGIARLVGWARELGAFVVLEATAPFDQGLIRALERAGLAFHRANPKRARDFARSAGFLAKTDAVDARMLALYGTTPALRPTAPVAPERLELQALSTRRDQLVEMRKSERIRLKGVSGPISIQSLQTVIALLDAQIAALDTHIATALAQAPDLARDAAILRSGAGVGPVCASVLLAFMPELGTLDRRAVALLAGLAPIARDSGAMRGKRYVGGGRKRVRDALYMASLAAIRIGRWKQAYDHLRALGKAPKQAIIAIARKLLVALNAAIRDQNLINNAQHA

SEQ ID NO: 92282 - protein, 340 aa, unidentified
MRMFAGLDVGFKRTAVCVVDEAGRIVWRGVVDTHPEVLCRALQRWGGKLANIGLESGSMTPWLARELAKAGFPVVCMDARAAADAVKSRRVKSDKADAYALAEMLRTGWYRAVYVKSEDSHRLKAMLGARDQLVRAKRALGNQVRGLLRPFGIRLPSRQGTKKFAEAAHQAVRRDNMLHASVTALLETLAAIEGQIARLDEQLKELARRSPVCWRLMSVPGVGPIVALAFMAAIEDINRFRRMRSVGAYLGLTTRRYQSGETDVVLGISRQGDAMARHYLYEAANVLLTTVRSPSALKSWGLKLMKRRGPKRARVAVARRLAILLGRIWKDKTHFDAVPA

SEQ ID NO: 92283 - protein, 337 aa, unidentified
MNITLIGLDLAKNVIQICGVNQAGKAVFNRSVTRHKVLELLSQYPQVPIAMEACSGSNYWGRALQQRGHPVMLLPPQHVKPFVKGNKNDRNDAFAICEAARRPNMTFVPPRTLEQTDISLVHRLRERRIGERTRLINQLRGLLNEYGIVLAGGKETLKQAMPLLLEDASNELTPRARTYCCDILEEWQQLDEAIRCLDKDIEQQCRDNEACARLTDIRGVGAVTATAMVAFVGNGSQYRNARHFSANLGLVPKEHSSGGKQKLGSITKRGNGYLRKLLIQGAWSIIRHLNKATDRLSLWVKQLAERRGKQRAAVATANKLARIIWVMLFRQERYRAA

SEQ ID NO: 92284 - protein, 396 aa, unidentified
MVGKTGGVRNLIREPAAMSSKTTIYVAIELSASSWLVAARLPGIQKVRVYRLESGDTMGLLKLIADLRSQVATKLGVTADLACCFEARRDGFWLHRLLTANGITAYVLEPTSILVNRRARRAKTDRLDAEGMLRVLANWLDGDRQVCSMVAVPTPEEEDAKRPHREREHLVQDKQRIENRIEALLFTQGIRGRPSLRSWTRDVAELQTGDGRALQPGLLAELDRLRRRLVFVLELIRELETDRVRALEEAKADDAIAGKIVALQCIRGIGDNFAAVLTHEVFYRSFDNRRQLASYVGITPMPYQSGGMDRDRSISRAGNPRARTTMIQLAWLWLRYQPDSALAIWFRERVGTLQGRTRRISIVAMARKLLIALWRYVETGVVPEGVALRANKASVA

SEQ ID NO: 92285 - protein, 395 aa, unidentified
MYSLFVGVDVSKDSFSVAGLNDKAKLLFSLTPLMNAQGFSELLKTLRFHQKDLSSVIIALESTGPYHLNLFSFLVSQGITTIVVNPLIIANFTKLSLRKTKTDKKDAVTIARFLFLNRDSISQLPSSQQTTDLRDLARERESILKMIASIKNDVRRILQSTFPELEHLVDILGDTMLYFLKAFPSARLIAQATPEAMAQGFNQGDWRRRISVHYTNIIALAKTSVGATSPSKEMILPGKIETLLFLKKRVDEITKMLVRLCKSMKKEDFALLTSIRGVNVKTAAPFLAELGDYQNFQSYKKILAFAGLDPTTHQSGKYEGMSMISRRGNRHLRKVIYNMTFCVVRYAGPLRDYFFRRKAEGLPFRKALLATSHKLVRTIFAMLNGRTFYKFAEVT

SEQ ID NO: 92286 - protein, 355 aa, unidentified
MNDAKYIGMDVHQATISAAVRDSAGNVVMEATLETKAETILEFVHGLRGSLHVSFEEGTCAAWLHDLLKPHVTEVLVCDSRKNALLRVGNKNDREDARKLSELLFLNKLHPVYHGETGIRTLKELARSYLTITRDLTRVMNRLKAIYRGWGIACAGQQVYAPGFRAEWLAKITEAGVRRRAEIYYQQFDTLAALRQEVRRELLAESRKHPAMSLLRQIPSIGPIRAALLIALMQTPHRFRTKRQLWAYCGLALRTYDSGEYRFVGGQLKRSKKAVTIRGLNKNHNHDLKNIFKGAATRAAATAGPLQNFYEARIANGMKPPMARLTLARKIAAITLLVWKKGVRFDGEQLKQQAA

SEQ ID NO: 92287 - protein, 442 aa, unidentified
MKKKPNRQTRQGNQSRLKIVYPVCCGIDVHRDFIVVCIATTDKQGVTTYERRRFSTYTGQLNQCRDWLITRNCFNVCMESTGKYWYPIFNVLEKPISGQPAGMPTKFNIVVTHPKYVKAIKGKKTDKRDAQWIADVFKLDMIRGSFIPPEDIRMLRDLCRFWVKLTSFNTSEKNRAHNCLTWSNYKLDAVFSNVFGKSASAIIDYMLEHPGEKFDVAPFVDRRCKSPIALIQEAVDGEFHPIQAEKLRLIKEHMANIAKIKTSLEEIIYELAKPYEHQIELLLTVPGISSRLTAIRIIAEIGVDMSVFESAKHLSSWAGLCPQNNESAGKKKTTRVGKAGVYIKPLLVEIALVVGRSSKKHPEMYAKYQKIRKRRGGKKAHIAIARKLLVATYSVLSKNEPFDPLLYKEAEKPPKHRTFTPEQAIAFLKGRGYFIIEPDNVA

SEQ ID NO: 92288 - protein, 369 aa, unidentified
MEKDTTYVALDDSKRKIVAGILRPGDGQPELREIANDPRQIRRLFERLKREGPVAACYEAGGSGYDLYRQIRALGVACDVIAPALTPRRPGQRIKTDRRDAAKLVRLFRADELTAIHVPDETEEAVRDLVRCRDDIRRDVLRWRHRVLKLLARHGRAYLAGKNWSHAHWRWIREQRFALLPLQRAFEATVFALEQALTRQAELDKELETLAVTAPYREPVGWLRCFRGIDTLSAIILLAEVVDFQRFRRPRELMAYLGLVPSEYSSGEIQHRGALTKAGNSHARRVLVEAAWHYRHRPTIGRALASRSQGQPDEIISQAWRAQQRLHRRYRHLVGHGKRTPVAVAAIARELVGFIWAAMTRHESRRQAA

SEQ ID NO: 92289 - protein, 342 aa, unidentified
MEITTIGIDLAKNVFQVHGVNKHGKVLLRKQLRREQVATFFANLQPCLIGMEACGSAHHWARKLQMFGHTVKLMAPQFVKPYVKSNKNDAADAEAICEAVGRPSMRFVPIKNIEQQSVLSLHRVRQGFVKARTAQANQIRGLLGEFGIVVPQGIAYVTQRVPELIEDASNALPGSFRLLINRLLEHLQLLHRQVGEIEAAIKAWHRDNAVSQRLEKVPGIGPLTATALVATVGDAKNFDNGRQLAAWLGLVPRQHSSGGKQNLLGMSKRGDAYLRTMLIHGARSVIYRATQKADPNSWVFNITARRNKNVAAVALANKTARTVWALIVHERSFQPGYTPRTA

SEQ ID NO: 92290 - protein, 351 aa, unidentified
MIIVGVDYHPSVQQVAFLDTETGETGERRLNHSDGEAESFYRDLQRRQVKVRVGIEATGHARWFERLLAELKFELWIGDPARIKAARVRKQKTDRQDAQLLLRLLIEGRFPQIWVPSPENRDLRQLIWHRHRLVQMRTRAMNQIQAAAMNEGVRRKKTLWSKTGRRQLEALPLAPWATRRRQDLLELVDRLNTTIDELTAAAEQEARKRPEVLRLMTHPGVGPITALAFVLVLGSPDRFGCGHQIGSYLGLIPCEDSSADRQRLGHITKQGSSLLRFLLVEAAQAAVRWDPDWRRRFVHLAMRRDRRIAKVAMARKLAVSLYWMWRKGFDYPQTLQFGSHAGEPGYVHGVK

SEQ ID NO: 92291 - protein, 310 aa, unidentified
MTLKTYVGIDIAKEKFDVFINTDSRIAQFDNTPSGHQALITLLDGYEVELIAMEATGKYHGPLCAALTLKTLPVAVVNPRQVKNFARALGKLAKTDTIDAAVLCRFAQAIEPPVREQNDVQTQRLAGMVTRRRQLIDIRTAELNRLDGALYEASQSIRAHVEWLNQQIRDIDDDIHRQLKVMPVWQEKAKLLEGVKGLGKVTISTLVAMLPELGKLTRREISALVGVCPYAHESGKMKGQRTIWGGRSAVRAALYMATLSATRSNKTIKEFYDRLLARGKAKKVALTACMRKLITILNAMLRDNSQWVTN

SEQ ID NO: 92292 - protein, 406 aa, unidentified
MYYLGIDVSKTSSRCIVLRDDGSKLKSFSVHNDHESYHELTDRLTALGCEQNNLLIGMEATGPFWENLYTFLTNKKFQVILLNPYHTSKFREALAKKAKTDDIDALVVAQLLRTGEYVQSQVADEDIQTLRELVSTRYEFVKQRKNYQRKVYSLLAVVFPEFANTAIKNPFSLASSAILKRFPTALHLAQAKPKQIEKLVRSIQGNNFNINEIEQLITTATKSIYQGRVREARATTMRMLLEHIELFTNSIEELEVNIHQILSPPSYTTGSDTFTGSNLLTIPGVGEKTVAAVLSYLGNSGQSFETSTKAVGYIGFFPRIFESGQTKRENRICKRGPKLLRAALYMAAVASLKHNKELQTLYHRKLSQGKTEKQALICVAKKLLQIMLAMLKSGEPYNPALVFVPN

SEQ ID NO: 92293 - protein, 411 aa, unidentified
MEVVHERCCGLDIHKKLIVACAVTPGNGGLPRRQVRTFGTMTDELQQLSGWLAEQAVTHIAMESTGSYWKPIFNVLEGSFELLLVNAQHLKAVPGRKTDVKDAEWIADLLRHGLLKASFIPDRDQRELRELVRYRTSLVQERTAAANRLQKVLEGANVKLASVATNILGRSGREMLQALIAGETNTAVMAEFARGQLRDKRPALERALAGRFGPHQRFLVAEILAHIDFLDDTIERLSAEIGERERPFEAVLDRLDTIPGVGRRIAEIIVAEVGPDVRRFPSAGHLASWVGLCPGQDESAGKRRSGKTRKGNRWLRTALVEAAHSATRTKTYLAAQFRRLATRRGPKKAMVAVAHSILRIAYHLLIDEHPFEDLGEAYFDQRQRQHISRRLKQRLERLGYRVQLEPITCAA

SEQ ID NO: 92294 - protein, 331 aa, unidentified
MKKIFIGIDFSKKTLDATVMRENYLHEKGEHMSFSNNKTGAMKLIKWVKGFGSIEECLFCGEDTGIYSKIVSETLVEQGCFMWLDSALRIKRSLGISREKNDKKDSRDIALYAARFKDQSECYIILAQATEALKKLFTMRKKLVEAYNRLLVNYNESKKYFDNELLSDAFAIHEELIAQIKEKIKALEKEMKKIIKSNSELNNTYNILSSMPGIGLINATAFIVYTNNFKKFDYDARRIASFWGVAPFGHTSGTSIKGTPHVSHYADSYLKSILSEATLCATRFCPIISAYVARLKQAGKHKNVVLNNAKNKMIHILVAMVRNNEKFRKAA

SEQ ID NO: 92295 - protein, 334 aa, unidentified
MENIALIGIDLGKNSFHIHCQDHRGKAVYRKKFTRPKLIEFLATCPATTIAMEACGGSHFMARKLEELGHFPKLISPQFVRPFVKSNKNDFVDAEAICEAASRPSMRFVQPRTESQQAMRALHRVRESLVQDKVKTTNQMHAFLLEFGISVPRGAAVISRLSTLLEDSSLPLYLSQLLLKLQQHYHYLVEQIKDLESQLKRKLDEDEVGQRLLSIPCVGTLTASTISTEIGDGKQYASSRDFAAATGLVPRQYSTGGRTTLLGISKRGNKKIRTLLVQCARVFIQKLEHQSGKLADWVRDLLCRKSNFVVTCALANKLARIAWALTARQQTYEA

SEQ ID NO: 92296 - protein, 314 aa, unidentified
MAQFITAAGIDVSKGWLDVALWPADAAVPHIERSEAGCFDRLAAWLREQGVSRVGLEASGGYETEVMDALQARGFEVIRYNAYRIRMFAKANGRLAKNDRADAVVLAHAAAVLPVRHATARQPQLDPLVELLNYRRRLHDWIGDCTNQLEHLRDKVLRRHTTARRARLHREVTAIDKKLAAALASSGASGELVRRLRNVPGVGPVLSAALVALLPELGTLSRRKVASLVGVAPFDNDSGNRRGERHIQGGRARLRRVLYMATLSATQHNPVIAAFAKRLAGKEPKVIITACMRKLLVILNAMVRDAKDLSPKAA

SEQ ID NO: 92297 - protein, 398 aa, unidentified
MTESSDYESVQVFIGVDVGKDTHHAVAINRSGKRLFDKALPNDENKLRSLISDLKQHGQILLVVDQPATIGALPVAVARSEGVLVGYLPGLAMRRIADLHAGEAKTDARDAAIIAEAARTLPHALRTLKLADEQIAELSMLCGFDDDLAAQTTQASNRIRGLLTQIHPALERVLGPRLDHPAVLDLLQRYPSSEKLASLGEKKLAAQLCKLAPRLGKRLAADIAQALAEQTVVVPGTNAAAVVLPRLALQLITLRKQRDEVALEVEQRVLAHPLYPVLTSMPGVGVRPAARLLTEVACRAFASAAHLAAYAGLAPVTRRSGSSIRGEHPSRRGNKALKRALLLSAFAALRDPISRAYYTRKMSQGKRHNQALIALARRRCDVLFAMMRDGTFYTPQAS

SEQ ID NO: 92298 - protein, 343 aa, unidentified
MQVVTTIGLDIAKSVFQVHGVDAVGQVLIRRQLKRRAVLAFFQKLPVCLVGIEACASSHYWSRELQALGHSVRLMPPAYVKPYVKRQKNDMADAEAICEAVARANMRFVPTKTPEQQSCLMLHRTRHLFIRQQTAVINSIRAHLAEFGIVAPVGRKGVTELLHIVADPSDKRVPEVARACLAALGNQLLSLKEQIVEFDRMIMVWHRSNETSKRLHYIPGVGPMLATALVASVADPRTFRSGRNFSAWIGLVPKQHSSGGKDRLGSISKQGDRYLRSLFVAGALAVIRYAKVHGTKHRPWLTALLARRPTKVAAIALANKLARMAWAMMAKGERYRQPVALAA

SEQ ID NO: 92299 - protein, 373 aa, unidentified
MELINKILVIKTITPMTQSNGINFEGQNIYIGIDVHLKTWNITIITQSGYKRKHSQKSSAKELFESLKKHYPNGNYQAVYESGFSGFSTYYALQEYGINCMVIHAADVPTTQYENLMKSDSIDSEKLAKALKAGILKGIYIRRKDNLDDCSVVRLRKTLQKQLGGYKSRVKHLLYTNGITLPECFEKPGTHWSKRFMRWLRDDVVLLSSTRNSLNLLLKQVELFRQNLLESTRQVRMLSMTERYAEVYNNLLSIPGIGMNTGMCLLTEIDNINRFHNEKQFASYLGLIPVSHSSGEKINNGEKTFRGNKLLGPMLIESAWITIQYDSVMAASYGEYCKRMKPQEAIIRIAHKLSNRILSILKNGKKYEYDKCR

SEQ ID NO: 92300 - protein, 319 aa, unidentified
MDEPRSASICVGIDVSKDRLDVHLRPSDEAFAVARDGKGLERLVERLKPLDVSLIVLEATGGFEIAVAAALAGAGLPLAVVNPRQIRDFARALGKLAKTDAIDAKVIALFAEKIGPQARPVASPEAQRLGELVARRRQIVEMIGMEQNRRRRAGDKRVVKRIDRHVAFLEKELADVDADLDAGVRASPAWREAEELLVSVPGVGPVTARTLIAELPELGQIDRRKLAALVGVAPFNRDSGTWRGHRMIAGGRASVRTVLYMAALAASRHNPLLKATYQRLVARGRPKKVALIACARQLLTILNAIVRDGRPWTPEPAHA

SEQ ID NO: 92301 - protein, 351 aa, unidentified
MSQQVSTTIAVMGIDIGKNSFHVVGLDQRGAIVLRQRWSRSQVERRLANMPPCLVGMEACVGAHHLSRKLKALGHDARLMPAKYVRPYSKGQKNDFRDAEAIAEAVQRPTMKFVATKTADQLDLQALHRVRERLVSQRTGIINQIRAFLLERGVAVRQGQRFLRIELPRLLTAPPDVLSPRMVRVIEDLAGDWRRLDQRIEALSAEIEAIARRDAGCQRLMSVPGIGPIISSAMVAAIGKGDGFGKGRDFAAWLGLVPKQISTGDRTILGKISKRGNRYLRVLFVQAAWVVLIKPKSWERHGLKRWLEAARKRLHRNVLAIALANKLARIAWSVLANHRNFETTRILVAAQ

SEQ ID NO: 92302 - protein, 376 aa, unidentified
MKTTQNEKLERITTNTVIVGIDIAKEEHWARITDYRGKELSKPIKIINNIDGFEKLFALVEKVKQKNESDRVILGFEPSGHYWRAFGWYVKLHKSAPIITGVNPYHVKQSRELDDNSQSKSDKKDALTISHLIKDGRYFDMYLPEGDYAELRVLNEERQRIMKQQNRATNTIIAVLDEYFPELSKIWKDVTCKEALAILKKASFPQEILSLSKSDLTAIVKEASKGTESDKMTEKLMKSAKVSIGVREGARAARSRLLRLIGELEFYQLRLLDVESELEAVMDKSEHSEILRSMKGIGVVISAAFLGEVGDVTRFDDWKQVRRLAGLNLVENSSGKQKSGTKISKRGRPYLRHMLYMAGNSCLLHNPVLPVSAKTH

SEQ ID NO: 92303 - protein, 372 aa, unidentified
MKQNIVYIGIDVDDVGYHGCALNQYTGEILNFHCRPTLKGLIGQLEKLLEYFGAVQLKLCYEASYVGFSLQRDLRDRGYDCEVVAPSSIPRRAGKSVKTDRIDAADLAEFYANGLLTVVAAPDAQIEQDRDLLRSRQHLVQQQGVLRRHIQSLLRRNGLHYKAETQRKTFWQTHHYGWLDRTIEGCSGSLKVNLSLLVRQLRGLDEILAAYGESVEALAQAPRYREPVKALTCYKGIKHLFALTMITEIGDVKRFAHPRQLVSWVGMDIREYASGGKSHRFGITRQGNRYLRTAFIEANQRGYRSARLGKDVKVRRANSAPEYVAIADRCLRRLNKKGNRLLLAGKHPNKVKVACAREMVGFIWESLNRVAA

SEQ ID NO: 92304 - protein, 297 aa, unidentified
MKKFIRIGVDLAKNYFQIHALVSEGGPAVTRKVRRSKMHEFFSQIEPCLIGMEACGSAHYWARELKAMGHEVLLMPPAYTKPYVKRGKNDAVDADACCEAMSRPGMRFVPIKSAEQQATLMLHKTRELLVKQRTMSVNALRSHLSEFGIIAAKGIGRVDELLELAESDATLPNAARAGVKVLSQALEGLDKAIDDLEDEITSAHAQNEMTRLLYKVPGIGKIISSVIAASVPDPSVFKSGRDFAAWLGLTPRQNSSGGKRTLGAITKQGNRYIRKLLVLGATSLLNVMGKRKGALRD

SEQ ID NO: 92305 - protein, 377 aa, unidentified
MSKVRFLGLDVHAMTIAVAVAEPAGEVRSLGTIQNRFEAVRKLIQKLGPAKQLRACYEAGPTGYVLYWQLVALGVDCQVVAPTLVPTKAGDRVKTDRRDAEKLARCFRAGDLTAVWVPDAAHEALRDLVRAREDAREDQHRARQRLGKFLLRHGWYPPDDIKTKWTTKHMTWIKEKIKFQQPALEAAFLDYVHEVEHAADRIGSLEKAIDDAVEKAPAEIQEVVRALQSLRGVAKIAAVSIVAELGSLSRFSNPRQLMSYAGVVSSEYSSGGRIQRGPITKTGNSHLRRVITESAWAYQHRQWIGGRLAKRQQGLDQDIKDIAWKAQIRLHSRYRKLTEKGKNKPQVVTAVGRELLGFIWAIATKTEAKLRAQAMAA

SEQ ID NO: 92306 - protein, 337 aa, unidentified
MIHIGVDAHMSFCAVYGLDHATGEVVIEAGHVPTSAAGFAALFNQPWPDAQAVVEASGVSMFVVELLSPFVDEVLLADPKVVRQRVRHSRPKTDMADAQELAFQLAHGLIHPVFQHTVAGLSLRVLTRALSWVTGDSTRLRNRIRSLLRQFGQRCPRRDLCGLAAQEFLAAITLPEPADMTLRALIEQLLSVQAHRVRLQRQLREQARGHELADLLRTMPGVGIQTAMTLISEVGDITRFDQVGSFVNYCGLAPRIEQSGTMRRTGHLIPGNRHLRLALVQAANALGRQKRGETPLHTHHRALVARRGAKTAKLDTARRIAQVAFTIWRSGEPYRYA

SEQ ID NO: 92307 - protein, 391 aa, unidentified
MIYVGIDVAKDKHDCFITNSDGEVLFKSFTIPNNREGFETLFQKVQSVSDDLTKVKVGLEATGHYSYNLLGFLLDKGLPTYVINPLHTNLYRKSLSLRKTKTDKVDAHTIASMIMSDVNLKSYSDTSYHNEELKSLTRYRFDKVKERAKLKSSVSRLVCILFPELEKLVPTLHMASVYALLSEFPSAHTVASAHLTRLTNLLSESSHGRYGKDTAVMFREAARSSIGSNMPAKSLELKHTIKLIQELTSEIDEIETEIKSIMDEINSPILTVPGISYNMGAMIIAEIGDFSRFDSADKILAYAGMSPSTYQSGQLDNCYSHMEKRGSRYLRYALYNATKYACIWDKSFGAYLAKKRAEGKHYNVALSHATKKLVRLIFAMEKSRQAYRIAS

SEQ ID NO: 92308 - protein, 505 aa, unidentified
MMIEDIQWFVGIDWATQSHRVCLLDVEGRHVNERDFAHGGAGLTELRDWLLEKTKAVPGQIAVAIETPHGPVVEMLLDHGFCVFAINPKQLDRFRDRFTVAGAKDDSRDARVLGSSLRTDRQAFRRLVVDDPLVIELREWSRLADELQQERTRLANRLRQQLWRYYPQAAELTDDVADDWFLALWQQVPTPATAAKVSEKTITRILKDHRIRRLDATTVLQTLRKTPLFVAPGTTEAACVHIRSIAARLCLVNQQIKEAHQALDRLCAELEASMESPSGQNCEQHDVTILRSWPGIGRIVLATLLTEATEPLQRRDYHALRALAGTAPVTRRSGKQCFVIRRLACNKRLRNAVHHWSRVAIQHDATARRRYDALRRRGHGHARALRTVGDRLLYALCTTLERQTPYNPNYQTAQVTAARKPHSFVRPQAAIPSSRPADRQSAAHRCCPGCRSAPAQPARSVLDSSEHGASLASNGLRSLLTKGRRSYFHRAPVRIVVLTSDGVAP

SEQ ID NO: 92309 - protein, 336 aa, unidentified
MYSGIDLHSNNSVVAIIDDADRVVAQKRLPNDISKITGFLARWQDELTGVVVESTYNWYWLVDGLQDAGFQVHLANTSAIKQYEGLKHSGDETDAQHLAHLLRLGILPTGTILPREQRAVRDLARKRMQLVQSCTAHVLAVENIMARQLGGRMTSNQIKRLTNDAVDNLSLAADVGLAIKANVAVIATLQSQIEVLEKRLQERVKPRPQYGLLSSVPGIGQTLATVILLEIGPIDRFAEVGNFASYARCVDSVHTSNRKKKGEGNVKNGNKYLAWAFVEAANFARRFCPEAKRFHERKKARTNNIVATKALAHKLARACYHILKEGKPFDATRCFA

SEQ ID NO: 92310 - protein, 426 aa, unidentified
MNTQNTDSIPAAEFAAYVGLDWGDQKHAWACTAGPVKTAPQTGTLVNSPEVLHTWLQELGQRFAGRPVALAVETSRGPLIHLFGAYPWLTVYPIHPATSARYRAAFKPSGAKDDGPDALLLLELVRDLRHKLRPLQLPEAATRQLAALVELRRDLVDRRTQVLLQLLALLKSYFPQAIELVGQDLTTGLARAFLRHWPDPLALQAARPSTLKRFYYQHSVRSEALVTERLARVQQLRPLTTDEAVLLPARLHLAALLEQLRTLAKHIDLVEHQSHTLFREHSEAYLFRELPGAGKALQPRLLVAFGEDRALYPDPASLQKYGGLAPVVARSGGQTWIHWRWHAPRFLRQTFVEWAGQTVVYSAWAKQYYQHMKAKGKSHHVILRALAFKWIRILWKCWQTRTPYDETRYLKQLLARSSPHAVKLNP

SEQ ID NO: 92311 - protein, 373 aa, unidentified
MKYTTVYVGMDVHKESFTLACYTNEKEEAEYVQRTEAHYSKVISYLEAMRFHYGDDVTFICGYEAGCLGFTLYHQLTNHHVRCVILAPTSMPVQQGKKKVKTDKRDARKIAKCLAHHDYSAVHVPTAKDEETKEFIRMRDDHKLALKKIKQQILAFCLRHNYRYPGGTKYWTQAHLKWLRDLKPGGVYQEILEEYLLTYSNLVDKLERLDKRIEELAADKEYAESVHKLICFLGIKTQSALSVITETGDFKRFGNAQQYASYLGLVPGEDSSGEDQNRLKITKAGNRHLRMLLVEAAQSYGRGQIGHKSKELKKRQEGNLPEVIAYADKANERLRRRYYRMVLSQNKRSNVAKVAVARELACFIWGMMTGNVA

SEQ ID NO: 92312 - protein, 358 aa, unidentified
MRIIGCDLHARQQTIAMLDTETGEVVEKILRHEAERVREFYSALPGPVRVGIEATGSMHWFLQLMEELGIDCQVGHPARIRAAEPRKQKHDRRDAVLQLKLLVENRFPSIWIPPAEQRDLRSLLLHRHQWVRMRTRVQNTLQAIALSNGLRRGSSLWSQAGQQAVASLSLAPNAAHRRTQLQMLYRRLDRQIGQLDERVRDQALRRPGAKLLMTHPGVGPVTALATEVFLGDPARFADAKALASYVGLIPSEHSSGGLQRLGKLSKQGNPLLRFLWNEAAMHAVREDPDLKRFYRRKLAQKGVGKAIVAAARKLGIRLWILLRDQIDYQEFCRRGLERQKSDSARAGMSDRNHGPAVQ

SEQ ID NO: 92313 - protein, 452 aa, unidentified
MSKVLRSAGSMEDRSFSRPRPLVSRGLRRAQEKRQRKRQRVPADALILGLDLARENQAASYGHGSDIFGRRRFRAGAETIDQLFPEARALAEAHGFARVIVAFEPAGHYWCLAAEACERAGLDYVLVHTLAVKKEREITRFNPEHTDPRDADLICSLPHQGKFTECRLPRTRERDALWQLARDYMRVRKLAAAERTRLHNFWHRTLPEFFTVFRDPAGATALATACALAPFSQLATLSTRSWVARVRRAAHGQRILTARAARLLPLLQAAHADPVRRSGEGMPARIRHTAQRRRLLEQQKADLRDDLLHRYQSCDEAPFLDSISGSDPFYNALTLALVGDFLDYDDPRALVKLAGSEVNHYASGDWQGSSRMSHRGRSPLRAAAYQQARHLVAHNDDFRARFFYLLHDTERARLTKQQAYVALMNRYLRTAHVLVTRQQFYRSPAHRGEGGA

SEQ ID NO: 92314 - protein, 415 aa, unidentified
MEVVHDRCAGLDISKRDAKVCIRVAGKGGRGAQQTVTTWGSMTNQVLALREHLIAERVTLAVMEATSDYWKPFYYLLEDAGFELMLVNARHVKNLPGRKTDVSDAAWLAQLGAHGLVRGSFVPPEPIRQLRDLTRTRTAITRERGREIQRLEKLLEDAGIKLSSVASDITGVSGRAMLEALIDGQRDPAVLADLAKRRLRAKIPALTEALTGLFSDHHGFLARVHLDLIDGHTQAIGEVTDRIEEVIGPFRAFRELIVTIPGISSGVADVICAETGADMSRFPTAGHLASWAGTCPGSNESAGRIKSTKTRPGNPYLKGALGVAAMSAAQSKGTYLGVKYRRIAARRGPMKALVAVEHAMLVAIWNMAHTGALYDDPGPDFYTRLHPDRAKHRALDQLRTMGYNVTLSPLEAAAG

SEQ ID NO: 92315 - protein, 347 aa, unidentified
MSHKTTASVAHTIGIDTGKNTLHLIGLDDKGAIVLREKIARGRIAARLANVPRCLIGIEAGMATHYVARELIALGHDVKQVPPAYAKPFRQGHKNDFRDAHAIAEAVQRPSTRCVPVKTDDQLDLQALHRVRSRLVGQRTAVINQIRGFLLEHGIAVRQGLRFLRQQLPDIMAKRSDVLSPRMVRIIEDLSADWRHHDGRIEHVTEEIEVLAQGSEGCRQLMTVPGIGPLIASAMVAAIGNGAAFAKGRDFAAWLGLVPKQMSTGDRTILGRISKRGNRYLRTLIMQGARVILLRPANWTKHSFGSWLTAAANRLHHNVLATALANKLARIAWTVLMQARSYEARVN

SEQ ID NO: 92316 - protein, 339 aa, unidentified
MGLYTGFDLHSSNTFVGIIDEDGKRIWKKKLRNNPSLISSTLKPFKEDIVGIVVESTYNWYWLVDLMMEEGYRVHLANPARIKQYSGLKHGDDEDDAFWLAEMLRLKILPEGYIYPKEQRPLRDLLRKRSHLVRLRTSLIVSLQTILARNIGKKMNASHVKALQTDHVTPLFSGNDDLSLAGKVSKDAIDSLTMQIKAIEVVVEKRMDIRRPYDLLLSMPGVGRVLALTIMMETGPIERFPKVGNYVSYCRKVPAARFSNEKKKGTGNRKNGNKYLSWAYAEVAELARRFDPEVRAYYDRKQRRTNAPIAHNALANKLSRAAYYIMRDGVSFMPEKMFA

SEQ ID NO: 92317 - protein, 381 aa, unidentified
MSTQVPQETNNNAMVPTLYMALELSKQLWKLAFSDGEKKRQVTIKAKNLLELHEAIAQAKVKFGLPEEARVVSCYEAGRDGFWLHRFLVSTGIENQVVDSSSIEVNRRWRRVKTDGIDAGKLLGLLRRYWSGERAVYSVVRVPSESQEDARRLHRELACLKKERGRHITRLRSLLTLHGIEVRYVGGSDWAEQVLGFRQWDGSPLAGELKGKLLREGERLALVRQQIRALEAEQRRRERESDDPVIRKIVQLQQLGAIGPVSAWVFIMELFGWRTFTNRRELASLVGLTPMPYNSGDSTLEQGISKAGNRRVRALLIEISWLWLRYQPDSALSQWFNRRSAGGGKRMRRIGIVALARKLLIGLWRYVEMGEIPAGAHLKAV

SEQ ID NO: 92318 - protein, 351 aa, unidentified
MRTSQKITGIVTTIGIDIGKNTFHLVGFDQRGAIILQQKVSRGQLERRVANIPRCLIGMEACSGSHHIGRQLAEIGHDVRLIPAQYVKPFLKGHKNDYRDAEAIAEAVQRPTMHFVTIKTPEQMDLLALHRVRSRLVGRRTGVINQIRGFLIERGITVRQGPMPLRKALPEILSSDTGALSPRMVGLIADLAQDWRRLDERIAAVSAEIEALAEQDHSCQRLMTVPGVGPIISSAVVAAIGNGTGFKQGRDFGAWLGLVPKQESTGDRTILGKISKRGNKYLRTLFVQAAHVVLERRPSAAMRGLWPWAEQASKRLHRNMLAIALANKLARIAWAVLARGGTYQPRITHAA

SEQ ID NO: 92319 - protein, 392 aa, unidentified
MFYLGIDIGKNTHVASLLDDSSKPLFKAFSFSNTTEGANSLFEKLFAYLNDPSEVLIGMEATGHYWLSLYSFLVENKFTVLVINPIQTDGWRRGTEIRKRKTDTIDSVLIADLIRHGDFIETSLSDEDTMSLRNLSRFRSYLVSSTADLKRKVLCVLDQVFPEYQSVFSNIFGKTSTELLVHFQTAEDFENITSEQLEEVLSNLYCKNFARKKVAQISHLASNSFGLKFCRDSFSLQIKLLIEQIRFIEAQVDDVEAEIKVILKKLNSPITTIPGIGDVTAAAILGEIGDISRFSNASKLAAYAGIDASVRQSGEYRSSHNKMSKRGSPYLRKALFLAAKNVAAYDPVFSAFYQKKRAEGKHHLTAIGAVARKLCNTIFAILKYNKPYTCQN

SEQ ID NO: 92320 - protein, 330 aa, unidentified
MAQEYIGVDLHKAFFQACAVTPAGERVWEGRFARTADGFAQFLLRLGPQTQLAVEACGPTWAFVDTIAPTGAAVCVVDTRKTKLKAGCAAKTDRLDARRLADALRRGSVVSVYVPPPAIRALREVCRGRHQLVRVRTRLVQMLRALLLRSGAADAPQRQLYSARGLAWLGQVALPPEAAASCQRLTQLLRLVHAEVTAADGPVRAQAAADPIAGVLDGLVGIGPVIALTLRAEIGDIARFPRGPQLASYAGIVPRVSRSAGRGYSGRITRDGAPWVRWALVEAARHAVKRQDAVGGWARRLARRIGWQKARVALARRLCDEIVRVWPRGH

SEQ ID NO: 92321 - protein, 410 aa, unidentified
MAERFVGIDVALRAHRIAVLDRDGEAVGPSFTIAASTDGVATLLRTLAARAATAAQTLIGLEASGHLWENLEAALVGAGYRVIVLNPLQTRRYRDVVRRKAKTDDIDAHVIAGLLRSGAAQASYVPDEQIQSLRELARLRARLMADRQDYLRQLVAQLDVVLPEHRTVLGDLLTARARGILAQFPTAPHLANANPRAIRRAAENAGARGFSLDDATGVRDRARRSLYSGKAAAARAHVVRTLVSQLERLTSAIDEVDRAATTLLPPSEPGTGLSDAELLQTIPGIGPQTAATLLGELGAFTRFIDARALVAYVGFYPVINQSGDRVATPRLSRVGSRIARHSLYLAAVNAVRRSGEWRTIYLRKKAQGKTAKQALVVVAVKLLHAVYAMLKHRQPYNPSRLLVAPATIGS

SEQ ID NO: 92322 - protein, 312 aa, unidentified
MAHIICGVDVSAATLDARIGRDGVWRQFARTTDGITQLAEFCKTNQVSLVVMEATGGYERLPFAQLWAAAMPVALVNPRSVRRFAESMGALEKTDKIDTGMIAWYAETKRIAPTPLASDKQQRFMALVLRMRQLTDLRTAQNNQRRLVDDPDALASFSAIVATINQQIRTLEAKVIALIDADPLWLALDTAFRQIKGVADRTVARLLANLPEIGTLSGKAVAKLTGLAPIANDSGKKSGKRPVRGGREAVRSILYTVAELVRRHEPDFKVFYDTLRAAGKPPKAVRVALARKLLVRLNAKARDVRKQLAQTA

SEQ ID NO: 92323 - protein, 413 aa, unidentified
MPQKTDYIYVGMDIHKETHTAVLMTYMEERLGKIKITNNIAGYRRLKAYVEKIQGNRIPIYGLEDVSHYGRDLAVYLLDQEYIVKEVNSALSCMERNSYATVKKNDEWDARCICSVLSRRSDSLPDANPQDYYWTMKHLVGRRDALVKNTSALVRQFHEQIQKQYPSYKKFFTVIECQTSLAFFERYPSAGHLTGVTVQELGTFLREQSHNTCSDKRAERILNLVEQDKMKEREYQSGRDLILQSITRQMIFNQQEMKRLEWMQGELLKELGYHLETIPGISTVTASALVAHIGDIKRFKNADRLANYAGVVPICHSSAGKGKNTQNKHLGNRDLYNVLYLLAMQQIQVNKEGTARNPLLRAYLEYKVSQGKTKIQAMICIMRRLVSIIYRMMKNQTPYQMPEVESPKEQMVS

SEQ ID NO: 92324 - protein, 403 aa, unidentified
MNSVGIDISKGRSTIAVMRSFGEVVISPFEVRHTDSELSELARQLKSLDGETRVVMEATGNYHASVAKLLHDAGLYVSVVNAKLVHGYGNNELRRVKTDRKDAVKLANYGLDRWLTLPRYIPEEDTRLLLKNCYRQYRQYSKVQTVLKNNLISLLDTVFPNANRLFSSPIRGDGSEKWVDFVAEFWHCRCASEKSERAFTSKYLRWCRKHGYNFREAKAHTIYAEASGHIGVMPKSETTKLLVKQAVSQLRATSTALAALKQEMQSLASVLPEYPVVMDLFGVGPTLGPQLIAEIGDVRRFYSKKALVAYAGLDAPPNDSGDVTGRHKSMSKIGASSLRRTLFLVMSVYLQTAPLDEPVCQFMDRKRAEGKPYRVYMMAFANKFLRIYYATVKAYLESLEHTA

SEQ ID NO: 92325 - protein, 369 aa, unidentified
MGDRITYIGLDVHKDGIVVAVAEGGRRGEVREYGRIANTPAALQRLARKLSRAGVKLRFCYEAGPCGYGIQRQLSALGHECVVVAPSLIPKRAGDRVKTDRRDAASLAKLHRAGELTAVWVPDPGHEVMRDLVRARLDAVRALRRARQQLSGFLLRHGCHYGRPAWTKLHRRWLAGLKFEQAVHHIVLEDYIAAVEAAEARRDRLTAQIEAMLPDWTLAPVVAALQTMRGMALVNAATLVAELGDLSRFANPRQLMAYLGLVPSEHSSGGSTRRGGLTKAGNSAARRLLIEAAWTYRFPARVSRELRLRQEEQPRPIREIAWKAQLRLCARYRKLARSGKPANVVTAAIARELAGFIWAIARHVSPAAG

SEQ ID NO: 92326 - protein, 335 aa, unidentified
MESELFMGCDISQDTFNFCLRNKSGIILQGQVTNTVKSIRSWLSELKKKHQINLTQILFCMEHTGVYGLILLRALHDHSLTICLESAVNIKLSLGLQRGKSDKVDAQRIAEYALRYSDRMKQWSPKRRVIDHLQLLIRLRERLIKARLEISRFNQDAKRFMSKEEYQLVIKGTQVTLKAIEKDIDKADENIEELIMNDENLKKLSRFIRSVDGIGMVTCSAILVRTNEFIDFKKAKKFACTAGIAPFEHSSGSSIKGKARVSHCAHKELKTLIHMCAVGAISRKGELQDYYKRKVAQGKSKMCVINAIRNKLVHRVFAVVRDEVMYQKNYRYKLA

SEQ ID NO: 92327 - protein, 408 aa, unidentified
MEVIYRRCAGLDVHKDTVVACARLVEERGVRQEVRTFATTTPGLYALSEWLAGCGVTHAGMEATGVYWKPVWHVLEEGLELVLANAAHVKNVPGRKTDVNDAMWLADLLAHGLIRGSFVPERPIQELRDLTRARKQFMRERTGHVQRIQKVLEDANVKLASVISDVTGKTGRAILDAMVDGETDARELAKHRHPKMKATLAEMEQALAGRVTPHHRFMLGLYLGQVDATDAAVAQIELEADGLLESFRAKVNLLITMPGVGETVAEAILAEIGSDMSRFPTAGHLISWAGLCPRNDESAGKRRCTRIRQGAPWLKVMMVQAAWSAIKVKNGPLREQFLRLKSRRGPGKAIVAVAATMLRAAYVMLRDDVAFRDTRPAHPAASEPDRVKNRLVHRLQSLGYEVQLKRAA

SEQ ID NO: 92328 - protein, 313 aa, unidentified
MNFVGIDVSQSTWDVYLRPQGRSFSVPADHDEATLLGQQLVTLGPCLVVLEATGGLERGLAAELIDAGLFVAVVNPRQVRDFARALGRLAKTDRIDAETLALFAEKVQPRPTQKCPEKQAEIDALVTRRRQLVELRSMERTRQHQATIKAARRSIDKLLKVLDRQIAALDKAIGQLLESDDDWRTRCELLQSVPGVGATTSATLVAELPELGRLNRQEIAALAGLAPFNHDSGRFRGQRRIRGGRSAVRSILYMAALAARRCNPILQRFAQRLEQAGKPFKVVITACMRKLLTMLNTIVRNGTPWAPPSTAQR

SEQ ID NO: 92329 - protein, 377 aa, unidentified
MVFTIGILEGKSPMRTITIGIDLAKSVFSACTLDDAGRVVQRQELRRDAFIAWLAHVPAGTAVAMEACSGAHHWARRCIEHGLQPRLMAAQFVKPFRKSQAAKNDRNDAEAIATAARQGNMRFVPIKSLEQQARLSEHRIREGYKADALAASNRMRGLLAEFGIVVAKSDAALRRLLAGLGELPIPASTRIALDELQHHWSALRDHEAACSRRILAQARDDARCRRLQQIIGVGPLTADALVASVGNARDFRNGRQLAAWLGLTPSQHSSGGKARLGTISCRGDRYLRTLLIQGARSSLQRSQAVVIAKATPEQVWIRDLATRLPFGKVLVAIANKHARQAWAMLARDEDYDPDAWLRHPMVQRPASKRRKTTRMPS

SEQ ID NO: 92330 - protein, 385 aa, unidentified
MEQNESDKILIKGDSMSVRRILAKTIDTDLEYEAIGIDLAKNCVSAALLTTDGEVVCIDRLDYSELEKSAQALSSTTFAMEPCTEMNYLVQKLEAWGHRCLVIGGKNVQNYVENHFSGQKTDLNDAQALAFLAQDTQLRTIKAKDVEQQKYASLTTLREQYIKQYRQTIVSLKGICQAWGLNISKGISGKARLKDLIENHAAFPEELKESLVDMVTHAQTAQKALNKITKTLEELAKSDKVCQLIQTIPGLGSICSCRLRATVGDIKRFKSPKDFPAYYGLVPRSIATGHNERKGKITHRGDRTMRSLMVQAAGSLVNMATKGKLKSKQLTKWILKKQKEKMPWGKLVCAVAAKLLRIVRAVLISNKPYNSKIAGVAKCSLPKGS

SEQ ID NO: 92331 - protein, 355 aa, unidentified
MKRSTKYVALDVHQATTVSSVREESGRVIARSVIPTEAAALVEFFRGMRGSIQVAFEEGTQAQWLHDLLTPIVHRVVVCNRRGQSTEGNKADHLDADALSARLRQGTLKAVYHGGRNRATLKELARTYTNLVEDSTRVMQRLKALFRARAIKTPGRSVYQPTQRTQWLRQLPDEGVRFRARALYAELAVLQELRPQAKAAMLAEARRDPAWKVLRGIPFLGPVRVALLLATLQTPWRFRTKRNLWAYAGFAVVTRTSAEYEVDGERRIRRRGRRPTTRGLNRNHNRIVKDVFKSAATAAATRSGALQDWYKGLLARGMREELARVTLARKLAALTLHVWKTGERYNPDKLTMQAQ

SEQ ID NO: 92332 - protein, 478 aa, unidentified
MRADRRWRTRKEKKEWARRLQSNDPGLDVIHPQAAGIDIGNASHYVAVRPDRDPEPVGRFECFTADLHRLADWLNSCGVTTVAMQSTGVYWIPLYDILEERGFEVYLVNARHTKNLPGRKSDVQECQWLLKLHTYGLLNNSFQPTSQIRVLRTYWRQRAEHVRAAASCIQRMQKALTQMNVQLANVISDLSGLTGQLIVRAIVGGERDPQKLAELRDPRIQASPKEVAKSLEGDWRPELLFLLKQEVDTYDTYQKRIAECDQQLQQQLASFASVAPEVAAAPVTQVQGGDQPKQAQAKRKKPAKNAPHFNLEQELQRVAGVDLTRIDGIDVMVAQTILAEVGLDMGRWKTESHFASWLGLCPDNRITGDKVVGRGTRHVVNRAATALRMAANALLRSHTYLGAQYRRLRTKLGAPKAITAMAHRLARLVYRMLKYGQRYVDKGAEYYEQNYRNQQLQFLRKKAAQLGFQLTEAETQTA

SEQ ID NO: 92333 - protein, 412 aa, unidentified
MKDLLEISCGLDVHKEKIVACILTGPLGKTTRSEIREFSTLIPDMIALRNWIVSKNCHHVAMESTGIYWMPIYEILEDAFYGDITLLVVNARHMKNVPGKKTDMRDSEWISTLLRAGLLNGSFIPEKRIREFRDLNRYRKSVIRDITSQKNRIEKFLQSSGFRLSSFISDIFGASGRNIILHLIEHGQIDKTALDSCLKTKTRNRIDEILMSVNGTLSEHQKAFLRILMTHYDSLKKHLAEIETSLEEDMAPFALQVEQLNSIYGISTTASCAIIAEIGIDMKPFKTAEHICSWAGLCPGNNESAGKRKSTSVTKGNPYIKSMLCEIAWVIAGKRNTYLSAWYWRIKQKKGAKKAIVALARKLLVIIYTMLKQGTLFDESCFETRRKHCEQKQLSRYIRELEKHGYHVEAQS

SEQ ID NO: 92334 - protein, 387 aa, unidentified
MAQVNDLSRSLTAFDPISTLVVVVEMSKASWLVSGVVPGVERQPLKKLAPDATALLRLIERWRSEAIRAGRPINRIALAYEAGRDGFWLARWLIARGIEAHVIHSASVAVSRERKRAKTDRLDAAMLMRVFLGWLRGERGHCGMVVIPTMEEEAARRPSRERENLVNERSRITNRMKSALARLGIRGFKPHLRKAPERLAGLRTAEGTGLPANVIEEFRRDMARLALVRDQISSIEKTRAERLERAPDTGPHAMVRLLARVIGIGIETADMLVREILSRKLRDRRAVARYAGLTGSPDESGLKRREKGLAKAGNARVRRGLIQLAWRFLMFQKDSALAQWYRSRTEGPSGARKTTMIVALARKLLIALWRLVTTGEIPDGVELRPAA

SEQ ID NO: 92335 - protein, 369 aa, unidentified
MTTRERSTSSSTDPPNRGEVVLGVDTHGEMHVAAVTSPLGKVLGNESFPATAAGYRQLLVWARKRGTVRRAGVEGTGTFGAGLSRYLVTQRIQVFEVNRSDRSARRLLGKSDPLDAQAAARAVLSGRAQARAKSGDGPVHSARIYKLAKDSAVRARTQAINQLKAVLVIAGPALRERLSNLGNTELFRTCARLGPPDGGGDEDAVTQATHMTLRMLAERIEQLTRQINELNQRLTRLVEHHAPQLLEPVGIGPDSAVTLLITMGDNPERLNTEASFAALCGVSPIEYLSGRRRTRRLNHGGDRQANAALHRIVFTRLRHDPRTQAYDERRTQEGKTRREIIRCLKRYAAREVFNLVRPVSRTPALQGRR

SEQ ID NO: 92336 - protein, 350 aa, unidentified
MNDTILAIDLGKFNSVFCWFEPDSRAQSFRTATTTPENLRRELLRQPVARVVFEACSQAGWAHDLCEELKLPALVASTTGAAWQWKHLKRKTDRDDALKLARLAAVGEVEGVPVPPRALRQWKSLIGLRKRLVSERVRAQNRIRGLLVSQGLSAPMGAKAWTELGLAGIGQFARPLADCPPAELWRGELHLLLERLRFLDTQTREVEARLDTLAASDSRVSLLTTVPGVGPRTAEVIAVHLFDARRFRGADEVSAYAGLVPRQYQSGETDRRGRITRRGPKLLRAALVECAWCSLRYNAWARDTWLRLQANGLSKKKAVVALARKLLVRCWAILRTGQPWRAPTPATAAV

SEQ ID NO: 92337 - protein, 348 aa, unidentified
MKKLVKQVVGIDVAQKELVVSLGRMYDDLVPEVYGCKTFANTPKGFEVLILWVKKLSEQTVGIRYIMEATGVYHERLAYFLEEKGYGVSIVLPNKISNYFRTLEVKTITDKTASQAIAQFGLERKLDDWKRPAPIFKSLKQLSREREQLVQERTLVKNQLHAEQAEAEPGQSTIMRMKKRIAILNKQEQEIREEIREAVKKDEQVKNTVKTISSVSGVGLITTVSVLAETNGFELIGNKRQLASYAGLDVKQKQSGTSVKGKACISKRGNKYLRKAMHMPALAAIRHDERFKAIFVRLVSKHGIKMKAVVAVQRKLLEMIYIVYKTNTPYDKNYLKRNEKETKNIEQN

SEQ ID NO: 92338 - protein, 324 aa, unidentified
MAKCTTICAGIDTGKRKLDVALDGTSLQLQVENTAEGHKVLLEWLRHHKVKRIGIEASGGYEQAVVIELRRKRFVVVVFQPAQVRAYAKFHLQRAKNDKIDAALIAACTAAVKKIHPAPDPRLQPFAEHLTMIEQIGEDIKLYKNRLETCRDPRIQKIWKEEIARLAKRERSELKALVAAIREHRDLAQRLDLIYSVGGAGMPTAVAILVRMPEIGQLSREQAAALAGLAPYDDDSGEQVGARHIDGGRKRLRRALYTAALPASFRWNPQLIALYQRLKAAGKEHKRCLIACARKLLIFVNTVVARGTPWQDQPPPTAAIAPAG

SEQ ID NO: 92339 - protein, 408 aa, unidentified
MTVVGIDVSKGKSMVAAMKPGGELVTTPYEVKHSDIELSRFALDVLCMEPDTRVVMEATGRYHEPVAALLHSEGIFVSVLNPLLIKQSGAGSLRKVKSDPKDALKIAKYGLDNWSTLREYTPMEAIRQQLKLCARQCDLYSKNIVMLTNNLISLSDKTFPGVNELFSSPEKENGHLKWVDLYRTFWHCDCINRMSPDAFEERYKKWCKRKGYHFSADAADALYAASCGLYTTLPRDNNAKLLVTVATDKLIALRENQSKLETEMLNLCKQLPEYETVMAMYGVGKSTGPHLMAELGDIRRFPHRSSIVAFAGVDPGVVGSGKMQLSSVATSKRGSPQLRKALFQVVSAYVKRKPENEAVYQFYAKKRDEGKPYYVCTTAAANKFLRIYYARVKECLNAAESATQAEEG

SEQ ID NO: 92340 - protein, 358 aa, unidentified
MEMSVKESSLAVKGKVVNIGVDVHRRSWRVTARVEGVIVLSGSSPPSYQAFKTLLRRFDGATVRVAYEAGPAGFALYDRLTQDGVECIVTPPGLIPTESGNRVKTDKIDSYKLARLLEGNLLKRVWVLSAEQRAQRQLVRTRRQISDHRADVMRQLKSLLLFHGIQTPVEGSPQWTPAYLNGLRTIDLGEIYLNLSLRALLDLFDSLSQQKKQLTREVEQLAQSQTYANRVRLLTSIPGVGPLSAMEILVELQDVDRFVRADQLAAYLGLTPSQYSSGERIRMGHITHTGNSRVRTTLIECCWFLIARDPWMLHKYQSIKIRRGAKRAIVAVARLLSLRIRRMLLDGVPYRVAPAAAS

SEQ ID NO: 92341 - protein, 504 aa, unidentified
MAAPPTRHQPASSPPSGQPAQAQAHRRAYSRRKARAQLKGDALRQREAAHVEALPVQHPHAAGIDIGSRSHWVCAGFTAEAASCLIREFPAHTAGLKAIAAFLREHQVTTIALESTGIYWVPLYELLQAEGFEVLLVDPSYSHQLRGRPKTDRRDCQWIYRLHSAGLLAAAFRPDEKTCQLRAYLRQRGNLVRQASKHVQHLQKALEQMNLKLTEVLSDITGKTGRAILRAILRGTRAPEKLARYREKRCKASEAEIAQALTGTYREEHLFELKLAYEAWQFTLGQVDKVDGQIALQLGRMKCDRALPPLRPKARPKRRANSPRFDVRAALYYVVGLDLTEIEGVSELTALTVISEIGPGVSRFATAKKFCSWLGLCPQWQKSGGRVKSSRTRRGVNRAAQALRLAAQSLHHSQGALDGFLRRMKGRLGTQAALTATAHKLARIVYLALKHGMAYVRRSQEEYEAQMKDKQLKALRRKARQLGLEVVEKPSVSGAPGVAEPVQG

SEQ ID NO: 92342 - protein, 342 aa, unidentified
MEHHAGIDVSLERSSVCVVDATGQILREAKVASEPEALVGFFRQLGVAVTRIGLEAGPLSQWLHAGLTAAGFEAVLLETRHVKAALSAMIVKTDRKDARGIAQLLRMGWFRPVHCKSPAAQEVRALLVGRKLLQAKLRDVELSIRGILRGFGLKVGEVSKGRFAARINELVAGHEMLETVIGAMLQARDGLQTEFMRLHRRMLAIVRGDAVCRRLMTAPGVGALVAITFKTAVDDPERFRTAKAVGAHFGLTPKRYQSGETDVSGGISKVGDAMVRTALYEAANAMLTRTVRVSTLKRWALEVARRRGTKRAKVALARKLAGVLHRMWANGTDFRWGKEAAA

SEQ ID NO: 92343 - protein, 466 aa, unidentified
MELILGIDVACRAAHQASLARPDGTFVWTGRRFFTRPDELEKLWIACGLKKRDTVRIIMEPTRNAWAPLASWFRHRGARVSMVPTTQSADLRAYYSKHAKNDHLDSKMLARLPLLHPEGLRDHTGGGPAEPLRRIVKIRSSIVKRRTAVFQRLDAQLELLGPAWYDALSARFGKTALELLARYADPNTVIRLGHARLTRFLIRHSRGAWRETYATAILAAARESLQLWGSGDDARIDFAELAADIAVEAEQALALTEQIDDLDERAANLYAEADPNGIIASAPGVGPIIGAVIAGRLGDPHRFHSLAAIRAYSGLIPKLNQSGQTHQQTGLTKAGDPLLREALFAAADHARKTDPQLAAKYKRLMQTERHHDSALCHIATILLTRIATCLRTGQPYEMRDIDGRPIHADEGRKLVTAHHRVDQKIRVKAADTRRTQRLKGRTGRGQQESPSAPIHRPVNHSLEAAS

SEQ ID NO: 92344 - protein, 403 aa, unidentified
MNAVGIDVSKGKSMVTILRPFGEIVSSPFEIKHTSSDIHSLIKLIHSIEGESRVVMEHTGRYYEALAHQLSAADLFVSAVNPKLVKDFNNDSLRKIKSDKADSVKIARYALDKWQSLEPYSITDELRAQLKVMNRQFHFYVKQKTAMKNNLIGLIDQTYPNANTYFNSPTRSDGSQKWVDFVSTYWHVDCIRKMSLNTFVEHYQNWCKRKKYAFNKSKAEEIYTKTKELVPVFPKNEITKHIIRQAIDQLNSTSVTVETIRTLMNETASKLPEYSIVMQFKGIGPSLGPQLMAEIGDVTRFTHKGALTAFAGVDPGVNESGSYAQKSVPTSKRGSSNLRKTLFQVMDVLIKTMPQDDPVYQFMDRKRTQGKPYYVYMTAGANKFLRIYYGRVKEYLSVLPDPS

SEQ ID NO: 92345 - protein, 384 aa, unidentified
MPEGDSSCCDNSSSVTGLLHGTCVPAPQRRKGVAVAIVDSARLVVGGVDTHRDSNVAAVVDMNGGLLGVESFPTTADGHRALASWMTAFGAIERVGIEGTGAYGAGIARHFIAAEVAVIEVDRPNRQKRRQHGKSDQLDAIEAARGTLSGRCAGRAKSGNSYAEALRALRALLVAKRSARSTRIRTLVQLRHLMFTAPDELRARLGGLSATQLVNDSAKLRPHAGGDIVVQATKTTALILARRIHALDAELATIDEQLGPIVKAAAPDLLNIFGVGIDTAAVLLVTAGDNPERITSEAAWAMLCGVAPVPATSGKIDNRFRLNSGGDRHANNAIWRIVITRLGQHDPRTVAYMTRRLAEGKSKRSITRSFKRYVARETFQALPR

SEQ ID NO: 92346 - protein, 414 aa, unidentified
MKVIYPICCGIDVHKTFLVGTIISTTDGVQPHYQKKRFSTYNSDLHRFADWLHSNNCLDVCMESTGKYWVPVFNILEERKIRVTIANPKWVKAVKGNKDDTKDSKWIGDLFRLGLVPGSFIPTKDIRILREFTRYRYKLTSMKSSEKNRFQNAFTVCNVALDSVVSDMFGKSATAITDYLISEDTFNPEHCVSLLQRSLKKKADSVLESIEGYFITQEQKFRMRIVRSHLNYIENLISQIDSAIDGMVAKHESLISLLCTIPGVDRNSAITIISEIGNDMSEFGSSKRLCCWAGLTPGNNESAGKKKSVRITRAGVYLKPALVQVAHAAVKATDNSYYRLKYEQISKRRGKKRAIIAIARMILTAVFQMMTTGEVWNPTDLFKVDMPESLKEKQLSKAVKQATKFLEKQGLTVA

SEQ ID NO: 92347 - protein, 462 aa, unidentified
MSRPRPTPATHRIEGLPTIFSNAAGIDIGADEIVVAVPPDRDAQPVRVFRTFTPDLEALLAWLVACGIDTVAMESTGVYWVPIYEMLEQHGIVPYLVNGRHVKTVPGRKSDWNDAQWLQKLHALGLLQASFRPDAEIAALRTLTRYRAELIAHRAPHILHMQHALQQMNVQLERVLSDIMGTSGQAIIRAIVAGERDPVILAQFRNPACKSSEEMIARALRGTWKDELIFVLRQALLIYDAYTAQLGECDTQIEQYLQTMDARSGDPHAPLPDLPPAKRDSRSKNAPNFNARAQYARLLGVDLVAVMGLSSSSVQTIISEFGTDMSRFPTVKHFGAWLGLAPRNDISGGKVLRSRTQKVANRASQAFRQAAQAVARSDSAIGAYYRAMRARKGPEQATVATAHKIARIVYHLLKYGEAYEEESADAYEQKRQERELRQLTRRANKLGYTLAPVGEPPMSPNP

SEQ ID NO: 92348 - protein, 391 aa, unidentified
MQRLMPQPNDLSRSLVALDQDSTLVAVIEMGQASWLVAAIVPGINRHPLKKIATDQEQLVQVLQRWAKEAETAGRVIKRIAVAYEAGRDGFWLARWLRADGVEAYVIHPSSVPVPREHRRAKTDRLDTELLKRAFLGWLRGEPDHCSMAAIPTLAAEDAKRPGRERENLVGERTRIVNRIKGALARLGLRNFKPMLCNAPQRLETLRTPEGAALPPNTLAELRRDMARLSFVKQQIKEVETARLERLQRAPGEPGNAMVHLLTRVVGVGVETADMLVQEVFSRNLRDRKAVARYAGLTGAPDESGKKRRERGLAKSGNARARRGMLQIAWGFLVHQKDSALAEWYRARTADARGATRKTMIVALARKLLIALWRLAATGEVPEGLALRAAA

SEQ ID NO: 92349 - protein, 387 aa, unidentified
MNYVGVDIAKEKHYAAILSADGAVVKKPFGFTNTAEGFSVLKDAITVLDKEDILIGMESTAHYGDNLLSWLFEQGYQVCVINPVQTAALRKTGIRKTKTDKTDALLVAKSLMVNKHRVYTERDNETSELKTLCRFYRNVMQSKSRLKTQLVAYVDVSFPEFATFFEGGIHLKTSYALLKQYSSPADIAALHLTTLTNLLKKSSRGRFSKPEAVALKALAKSSVGVHHSSMAVQIAQTIEHIELLEKQLADLKSHIEIIMLHLDSPILTVPGIGYLLGGSILGEIGDINRFSKPAKLLAYAGLDPIVSQSGKFKATNTRMSKRGSSLLRYALMEAAFGLTRHSSTFADYYSKKRNQGLSHFSAIGHTAHKLVRVLFKILTTNSPFDLA

SEQ ID NO: 92350 - protein, 335 aa, unidentified
MDRQYVGIDFHRRRSVIVRKSGAGDKLGSVRVANDPLAIASAVAEAGPNPEVVIEATYGWYWIVDWLQVQGATVHLANPSGLNWGARRVKNDERDASDLVDMLRLGRLPEAWIAPPATRELRELVRYRSKLVALRSGLKAQVHAVLAKEGVLPSVRDMFCGSGNAQLDALELGDAYTTRVESLRDLIERYDREVGMLERTIYQRVRDDRGYRAIQRIHGIGPTMAAILVAEIGDVSRFRSAEALCSWAGLTPKHRESDTKVHRGAVTKQGSRLVRWAVIEGTVRYHGGGKLAADWHRIAERRGKHKATVAVARKVLTLVYYGLRDGEIRCLAKAS

SEQ ID NO: 92351 - protein, 400 aa, unidentified
MRKPKQRQTKPRQSKQRKPNDLSRSLAALDLDCTLIAVIEMGASSWLVAGLVPGVERQPLKKLKTDEYALLALLERWRGEAVRSGYAITRIVVAYEAGRDGFWLARWLRAQGIEAHVIHAASVAVSREHRRAKTDRLDTELLKRAFLGWLRGERDHCKMVAIPTVAEEDARRPGRERESLVGDATRIINRIKSALARLGIRTFNPTLKKAPVLLNDLRTPEGDPIPPNTLDEIKRDMERRHLICEQIRRIEQERVKRLEQAPDTGPNAMVHLLARVTGIGIETADTLVREVLTRNLRDRRAVARYGGLTGAPNQSGSFNREKGLARSGNSRVRRCMIGLAWRFVRLQKDSPLVKWFELRTANARGSRKTMIVALARKLLIALWGLVHEGVVPEGIVMRPA

SEQ ID NO: 92352 - protein, 418 aa, unidentified
MKVVYPICCGVDVHKTFLVATIITAQGITPHYSKKRFSTFNNSILQFKQWLIDNDCFDVCMESTGKYWIPIFNLLEDTIHVTIANPKWVKAVKGNKDDTKDSKWIGDLFRLGLVPGSYIPKKPIRILREYTRYRSKLVACKSSEKNRFQNAFTVCNVALDAVVSDMFGKSASSITDYLISTDSFDPKYCSSLLQRSLKKKADTVVESIEGYQMTKEQKERIVMVRSHLEFIHQSIATLDEKLEKMVAPYESAITLLCTIPGIGRTSAITIISEIGTDMSQFANSKRLCCWAGLTPGNNESAGKKKSVRITRAGVYLKPALVQVAHAAVKSNISPYYRVKYERISKRRGKKRAIIAIARMILTAIYHMFVTGELFNPSDLYKVDMPKEMVEKQKEKAIKQATKLLVSLGLIKATDISAA

SEQ ID NO: 92353 - protein, 351 aa, unidentified
MVTIGVDSHKATHTVVAVDEVGRVLGEKKVRATSEGHLALAQWSARFGEVVFALEDCRHLTRRLEADLLRAGHVVVRVPTRLMAQARRSAREPGKSDPIDAEAVARAALRYPDLPRAELDGPAREVKLLSDHRRDLVNQRTRIAAQVRWHLHELDPALEIPSRGLRRKTVVAQLQQRLSGVPGVVTRITRDLLNRCEQLNAQIAGLDAELRDLVRALAPSLLAIPGCGVLSAAVIIGETAGVHRFRSRAAFARFTGTAPVPVWSGASAGKVRLNRGGNRGMNCALHNIAITQARRGVGTGAAYITKQTERGKDTTAALRLLHRRLSDTVFTALRTDQATPDNTAITLPQAA

SEQ ID NO: 92354 - protein, 408 aa, unidentified
MKHHRYFPEAMLRICPGLYDYSVRKNRPVLSDGGPDAVSGLRLSRLFRRSFAPDRRSFSCDKPDSIMDRLSPVTRICKVGFTMENELHFIGIDVAKAKLDVDILRPDGRHRCKKFDNTLSGHEALVHWLRGHDVNRAHVCMESTSTYMEDAAAHLSDAGYTVSIINPALSKAFAQSEGLRSKTDKVDARMLAHFCREKRPSAWEAPHPTERALKALVLRHQALTEMQTQEKNRRETAPEVQLASIDILLGCLSAELARIEKQIKDLTDNDPDMKRRRKLLNSIPGIGEKTAAVLLAYTGLRLKFGTARQFAAYAGLTPVQHESGSSVMRASRMSKAGPVQLRKALYMPALSALYHTAWGKAFRKRLEESGKRAKVIIGAMMRKLAQVAYGVLKSGKAFDASQHELLIA

SEQ ID NO: 92355 - protein, 338 aa, unidentified
MFYGGIDLHSNNNRIGIIDELGKELYQRTLPNDLIAVRKVLDPFRADLQGIVVESTYNWYWLVDGLKESGYCVHLANTTASQQYSGLKHTDDGSDAYWLADLLRLGLLKEGYIYPAKARAVRDLLRKRGQLVQQRTRNILSIENLTSRNCGVRLNGDRVKQLTAAEVKEAYQDENLALALTSTLCIVEALNRQIKAIEKQVKQQVKLSEPYQLLKTVNGIGEILAMTIMLEAGDMSRFPTVGDFSSYCRCVDSVRLSNGKKKGSGNRKNGNKYLSWAFIEAANFAIRHDPTVRRFYQRKKARTKSVVARKAVAHKLARSCFYVLRDQVPFEVAKCFGP

SEQ ID NO: 92356 - protein, 312 aa, unidentified
MAILSFCGIDVSKDRLDVVVLPEGRFCSVSNDAAGWAELVARLHPLAVSAIGLEPSGGYERGIIRALLAAGLSVRRINPNKLRQFARARGVLAKNDRLDARLIAEYVAIMPTRVVQRDAAVERLAEIVTMRRQLCDEHVAAENQAAHLEDAMLRRLSKRRQTRLEADIRLLDKRLAEMVAANVALAQRYELLTSMPGVGPVLAFTLIALLPELGKMTRKQIAALVGLAPYDFDSGKLKGHRSIYGGRMPVRNVLYMAALSASRYSPALKAFHNRLADADKKSKVIIVAVMRKMITTLNAMLRDSAAWQPRSA

SEQ ID NO: 92357 - protein, 317 aa, unidentified
MLADELDYVIGVDTHRDEHVLAVLTTAAGAVVAGEALPANARGYRETLRFAGRYAAGRRAWAIEGTGSYGAGLARFLAGRGERVLEVSRTPRAERRLRGKDDTLDAARTARAALASDTLALPRTGEQREALRLLLVARRSAVDVRREALTQLRGVIVTAPERLREELRGLPTGKLLHRCSRLRRSNQASVDELATKLVLRSLARRIEAATLEAAELERDLLGHIRALAPALLDEPGVGPIVAAQLIVAWSHRGRLRSEACFARLAGVAPVPASSGQTVRHRLSRGRRQTTQPRNTHDRPPPPPTRRSDKGLHRTPRR

SEQ ID NO: 92358 - protein, 373 aa, unidentified
MKKVRFLGLDVHAETIAVAVAEPDGEVRSLGIIPNREESVRKLIKKLGPAEQLQVCYEAGPTGYVLYWQLTALGVKCEVVAPTLVPVKAGDRVKTDRRDATKLARSYRSGDLTAVWVPNEEHEALRDLVRAREAAKQDQLRARHRLSKFLLRRGRRAPEGIKMWTQRYLQWVKEQVHFEQPAQEYTLLDYVHEVEHVADRIQRLEQAITEAIKLAPAPMQEVVQALQALRGIAQISAVTIVAELGKISRFEGARQLMGYSGAVSSEHTSGTRVRRGSITKTGNAHLRRIAVEAAWAYRHRPAIGSALRKRQEGLSQEVKEIAWKAQHRLHKRYRTLTAAGKEKQKVITAVGRELLGFIWAIGVQVERNDPRNA

SEQ ID NO: 92359 - protein, 356 aa, unidentified
MISSTKYIGMDVHTQSISSAVMNSVGKVVMESVIETKASTILEFIDGLRGDLRVTFEEGTWAAWLYDLLKPHVTEVVVCNPRKAALLKDGSKGDRIDARKLAELLYMNSIKSVYHGENGLRTMKELARSYLTITKDLTRIMNRLKALYRSWGVPCAGKDVYAPRHRAEWLGKISEAGVRRRAEHYYQQLDVLRLLRQEVRRDLLAEAKKHKPWKLLRQIPGIGPIRAAVLIAVIQTPHRFRTKRQLWKYSGLGLETHDSGQYHTEEGQLQRSKKPATVRGLNKDHNHDLKDIFKGAATTVSSSRGPLRDFYENLLAKGRKPTMARLTLARKIAAITLIVWKKEVRFDANYLKQQAA

SEQ ID NO: 92360 - protein, 387 aa, unidentified
MSQANDLSRSLVSFEQDATLVAVIELSQSSWLIAGTVPGIERQPLKKITPDEAALLRLLHRWRDEAVGKGRTIARIAVAFEAGRDGFWLARWLAKRGIEVHVIHSSSVAVSREHRRAKTDRLDTAMLTRVFLGWLRGERDHCGMVAVPTIEEEDAKRPGRERENLVGERTRIINRMKSALARLGIRGFKPQLRKAPQLVETLRTPEDVSIPPNTLEEIRRDLARLTILREQIKAIEQARLKPLEDAPQTGPNAMVRLLASVIGLGIETAFMLAQEVFSRNLRDRRAVARYAGLTGAPDESGSKRREKGLAKAGNARVRRGMIQLAWRFLLFQKDSTLAQWFRARTEGANGARKTKMIVALARKLLIALWRMVTSGEVPNGVVLRPAD

SEQ ID NO: 92361 - protein, 349 aa, unidentified
MAEAYDGRQVVGIDLHRRRSVIVRMTEDGRKLETVRITNSPAALRREIAKAGKNPRVVIEATYGWYWAVDVLEAAGAEVHLAHPLGVKAFSYRRVKNDERDAADLADLLRMGRLPEAWIAPAEIRELREITRYRHQLVKARTSLKDQVHGVLAKLGIPVTHTDIFGVHGQAWLDELPMPQPYAGKVASLRQLAGGLTAEIELLEQVTADLLAGHEGYAAIQQLPGIGPVLAAVIVAEIGDVRRFPGPGQLGSWAGLTPRHYESDTKVIRGHVTKQGSRMLRWAVTEAIQRQPAGSRPRQVKDAIIARRGKEAKNIAKIAAARELLTLVFYGMRDGRVRRLDPPRARPAA

SEQ ID NO: 92362 - protein, 410 aa, unidentified
MEVILGCCAGLDVHKDSVEACVRRTSAGGKVGHEVRHWGTTTRELEEMSDWLSSLGVSHVAMESTGVYWKPIFNILEERFEILLANAHHLKNVPGRKTDIRDCQWIAQLLQHGLLRGSFIPPRPQRELRDLTRQRTQLVDEVSRVSNRIQKVLEDANVKLGSVASNVVGASGRLMLEAIVAGQDDPVQLADLALRRLREKIPQLEQALYGKLTEHHRWMLRLLLDQLKATEQFIARLDERIAELARPLQPVLEKLDAIPGVDRRVAEVLMAEIGPDMTPFPSDAHLASWAGISPGNNESAGKKRSGKTTKGSRWLRQALVQAAWAASHKKNSYFQAHARNLMHRRGRKRGLVAVAHSLLIVIYHMLKEGTVYRDLGSQFLDQIRAKHLIQFHVRRLQSLGLQVDLKPNAV

SEQ ID NO: 92363 - protein, 427 aa, unidentified
MREKKVSQEPQFAAFVGIDWADRKHVWCLQEAGSAKRESGEREHQVESVETWVSELCQRFGHRPIATAVEQVKGALVFMLNKYECLHIFPVPSTMSASLRNALYPSGAKDDPRDADLLLELLLQHRDKLRRLSPDDEATRRVQNLVEERRKLVDEKTAQSNCLTGYLKIYFPQMLEWFEKLDMPLVCDLLERWPTLEELQKVPPEELRTFFRQHHCHREPMERRILAIGRAAPAIKDRPVIEAKSTEVKVIVQLMRSLLEGIAELDGKIEEATVVHPDFFIFESLPGAGAVLAPRLLAAFGSQRDRYDSADEVQTYSGIAPVTERSGKRKWVHFRWACPKFLRQSFHEWAGHSISQSGWARAYYQQQRDRGNDHHAAVRALAFKWLRILFRCWKDRVAYDETKYLAALVKRGSPLSHVVVAAAGTSF

SEQ ID NO: 92364 - protein, 398 aa, unidentified
MGNKPWRRATYEREPVVKKTIRFLGLDVHAETIAAAVAEANGDVRFVGTVPNRPEAIRRLVRKLGPVEELHACYEAGPCGYVLYWQLTELGVKCDVIAPTLIPTKAGDRVKTDRRDAEKLARGLRSGDLTAVWVPDAAHEALRDLVRARLAAKRDQHRHRQRLGKFLLRQGRHRPEKMKAWTQKHREWIRKEVCFDRPAQAAVLLDYLNEVDRAGERIKRLEQAIDEATAAAPEALRDVMAALQALRGIAKVSAVTIIAELGQLSRFEHPSQLMGYSGLVSREHSSVGKVPLAGITKPGNAHLRRIVIEAAWAYRHGPSRGATLRKRQEGLSEEVKAIAWKAQHRLHDRYRALLGKGKEKQKVVTAVGRELLGFLWSIGVTAERESRGAAAAHRRRAA

SEQ ID NO: 92365 - protein, 343 aa, unidentified
MEHYAGIDVSLERSSVCVVDATGRIVREAKVASEPEALVDFFRRLGLPLARVGLEAGPLSQWLHAGLAGAGFEAVLLETRQVKAALSAMIVKTDRKDARGIARLLRMGWYRPVHRKSPPAQEVRALLVGRKLLQGKLLDVELSIRGLLRGFGLKLGEVSKGRFAVRVRELVAGQPTLERVIGPMLRAREALRSEYLALHRAVLAIVREDAVCRRLMSVPGVGALVAPTFASAVDDPARFRRSRDVGAHFGLTPKRYQSGETDVTGGISKVGDAMVRAALYEAANVMLTRAGRFSTLKRWALEVAKRRGARRAKVALARKLATVLHRLWADGSEFRFGKEAAAA

SEQ ID NO: 92366 - protein, 372 aa, unidentified
MSANKDSIFVGMDVHKASINVAVCEQGNRGPDAEWQLANEPRSVRKLIKKLKGMTSGTVKVAYEAGPCGYTLQRQLREQDIDCVVIAPSLIPVRPGEHIKTDRRDARKIAKMLQAEMLTEVHPPTLEDESVRDLTRSREDTKQDQMRARHRLGKMLLRHGFVYREGSNWTDRHRRWLKQIHFDDGISQRVFEGYVLILEQIEERLKRVDAHLVEVSQSDRYAEQVGWLCCLRGVGTVTAMTILAELHDFRRFTSPRELMSFLGLTPSEYSSSNRVRRGSITKAGNSHARRIIVEAAWHYRHRPSVNVTMRRHRSGQPAKVLAIADRAQQRLHQRYFKLREGYNKPANVAAVAVARELVGFIWAILHHEGEGQ

SEQ ID NO: 92367 - protein, 415 aa, unidentified
MQAILECCCGVDVHKDMIEACIIQGIENPNFIRQQFLTIPSELQEFVQWLYENDCYHIAMESTGVYWKPVYETIEEFSPYYESIIVANAHHMRNLPGRKTDVKDAEWIATLLQHGLLEPSFVPERTIRNLREYSRTYKNYISEKSRCINRMEKFLQTHGFKLSSVLSDINNVSGIRILTILSEKGSLSVDDVKNAISSNTKCSAEEIQSAICGRLNVNERFLLSDSLDQLSSLQKRIDKILAMMATISEPYKKLLDQLDSIPGIDITAAMLILAEIGPVPQEVFPSSAHLCSWAGLTPGNNESAGKKKSVRITRAGVYLKPALVEVAHAAVKSTKSPYYKTKYEKIAKRRGKKRAIIAIARMILTAIYSMLSTGECWNPVDLFKVDMPAELREKQDEKAVKQAIKFLQSKGLAIS

SEQ ID NO: 92368 - protein, 345 aa, unidentified
MVILGADLHKRSHTVVAVDGTGRKLAERTVSATHEGHLELRRWARPWPRRRWALEDGRHLSRRLETDLIRAGEDVLRVPPKLMAGARRSSREPGKSDPIDALAVARAALREPDLPVARLDGVEREIRLLVDRREDLVGERTREEQRLRWFIVELGVVEPAPASLDRTVVQIRLARELASRTELVARFARELLARVVELTAAIRTLGREIEQRIRPLAPALLELVGCGPLTAAKIVGETAGVVRFRSKEAFARHNGTAPVPVWSGNTVRHRLSRGGNRQLNAALHRIAITQMRIDERGRAYLDHRRQAGDTRTEAIRALRRRISDEVFRRLQTDEAARPALLAAAA

SEQ ID NO: 92369 - protein, 351 aa, unidentified
MSHQTTTEAIATIGIDLGKNTFHLIGMDARGKIVLRRKIARGQLQSCLANVPACLIGMEACAGAHHVGRQLAALGHDVRLLPALYVKPFLKGHKNDYRDAEAIAEAVQRPTMRPVPLKSAEQLDLQALHRVRRRRIGQRTAVINQIRAFLLECGLPVRQGLAGLREALPTLLSQRTDVLSPRMIHLIEDLSDDWRQLDERIETLTRDITALARDDTGCRRLMDIPGVGVITASAMVAAIGTGAAFSKGRDFAAWLGLVPKQISTGNRTILGGLSKRGNRYLRTLFVGGAQAVLQHPHNWPRYRFGHWLMAAAPRLHRNVLAAALANKLARIAWSVLYRERGYDAGIAAQIP

SEQ ID NO: 92370 - protein, 343 aa, unidentified
MEYYVGLDVSLKQTSICVVDQSGSVVREGVVDSDPEAISVYVRSKAPGAVRIGLETGPTSTWLWTELKRFGLPVICIDARHAKAVLKMQINKSDRNDAIGIARIMQTGWFKEVHVKDIDSHSVRALLASRALLVKIKRDLENHVRGLLKNLGLVIGRAKFNVFAVRAEELIEGRPELIATIRPLLEARTAVEQQVSELDRKVMKLARHDAQVRQFMTVPGVGPITALAFKATIDDPARFARSRSVGAYVGLTCRRHASGEVDWSGRISKCGDAMLRSYLFEAAGVLLTRVPKWSAVKAWGVKLVKRNGLRKAKVAVARKLAVILHRMWIDGTEFNWSKKEIAA

SEQ ID NO: 92371 - protein, 429 aa, unidentified
MGTKIDRLEQFKQIRNSVRGSEKVLLIGIDVAKNNHHAFFGTPNGKTLRKNLVFDNSIKGFETLRSLAGDIQSKHGLTEMVYGLEPTASYHKPLAEYLIRQNEHVVYVSNVAVAKNRGLLDGRWDKNDKKDAANVADLVGQGRCLYYDVPEESLRELRSLIGFRIRLKKEEHALRMRLRNNVFAQFFPELDQLYIKAGQPDDLILSIAEHCLSPKEIAGMEFDVFLKLITKRKIRIEQERRLRELWNIAKESAGCLVHDAARWEAKSLVSQLKAVRETVKGNEQLMEAAALNFPEYKCLLSIPGFGPIISAMVLAAIGNASRFGSQKQVLRLAGLDLSAARSGKSSDSAKPVISKQGKAALRYALVQAAMVSSVSNPDIRSYFCKLIKGRELERGINLKMKVKLAAKLLVVAWTLMKRREQFKPSCFSG

SEQ ID NO: 92372 - protein, 459 aa, unidentified
MSRTHRNKAVNEPRDWSLNLEVVHPNAAGIDIGNESHYVAVSSDRDPTPVRQFACFTEDLHRLADWLKSCGIVTVAMQSTGVYWLPVYEILTEEGLEVFLVNARHTKNLPGRKTDVQECQWLLQLHTFGLLNNSFRPPEEICVLRAYWRQRAEHVSSASACIQRMQKVLTEMNVQLANVISDISGLTGMAIIQAILDGERDRYRLADLAHARIHATREEIARSLEGNWRKELLFILQQERNLYLIYQQQIAECDAALAAHLKNLDNKSKPGSQPPATRASKRAGSNAPTGFDLRGELYRISGADLTQIEGINIMNAQTIISEVGVDMSRFPSEAHFASFLGLCPDNQITGGKVLRRGTRRVENRAATALRMAATSLSRSKTYLGAKFRRLRARLGAPKAITAMAHMLARLVYRMLKYGEQYVDKGMTYYEEKYRAHEIRSIQKKAKELGLQVTLNPAAA

SEQ ID NO: 92373 - protein, 316 aa, unidentified
METIRPFVGIDVSSQRLDVDTVPLSQPFSEPNNEDGIASLKVHLKALNPQIVLLEATGGYEIPVAYALYEAGLPVVITNPKAVRYFAKAIGRLAKTDKLDAQVLALYAQRVHPPVQPLRDQEQLELANLMTRRRQLQGMIVMEENRRRTCTPKVRSNIDLSLAHLRRLLNDLDREIHDSIRRTPLWHEKAEILQSFTGVGPKVSASLIADLPELGLLPGNKASALAGLAPMNQDSGKHRGKRMIKGGRPQVRQALYMAALVASRHNPVIKEFYQRLRLAGKPAKVALTACMRKLLVILNAMLKNRTYWNPQLPLAA

SEQ ID NO: 92374 - protein, 396 aa, unidentified
MVVVIDATTPGEKPERRRFATMPSDLHRLLIWLREQGVEEAVMESTAQYWRSVWLELEPHMRLHLAQAFSNRAPRGRKHDFKDAERLVRRLIADELILNFVPGGEQRSWRNMTRMKLQLTRDRVRLQNQIECLLEEMRIKLSIVVSDLLGASGLRILRALAAGETDAKQLAQLGDKRLQCTEEQLVDALTGSAQPLHREMLALQLERLQLIDTQIAKLNGMIAQAMKPHQEAVMRLAEVPGLGVDSAQQIIAEVGEQASTFPSAAELTSWVGTCPGKEESAEQNHSSRSAKGNKYLRRVLNQAAHAAVKRKGSYFQVVFRRLLPRLGYQSAIWAVAHRLCRVVWKILHEGVRFIEHGIEPDPKAKMRHARRLAQALRKLGYQITITPTNLASGMQM

SEQ ID NO: 92375 - protein, 341 aa, unidentified
MNNTTTITIDLAKDIFQVAVFSKHGKSLINKPISPKKVRQFVTNHPEAVIYMEACASAHYWGRQFRQLGHKVKLIPPHIVARYRNGNKNDKNDAFAIYEAAKNPNIYFVTIRTLEQQDLATQHKLRAGYIKQRTQLGNRIRGFALEYGVKFPKGIQHLRKQVPSALEDAENELTVVARACLRQLLDQLILLDEIIKEATAALVNQAKRIDACVRLEKIPGVGWLVASMLYARLGDGSAFRRGRDASASLGLVPAHAGSGGVNRLGKITKRGDRYLRCLVVHGARSTLHRLGDKTDGLSAWIRHQQLTKHTNNTAVALANKIVRMAWSILRTGEAYRAPVAQ

SEQ ID NO: 92376 - protein, 433 aa, unidentified
MPRALISATNSITWRYRRAATANRWRFGCTTAELKAMADWLKQCGIRTVAMQSTGVYWIAVFDILEQAGLEVYLVNARDTKNLPGRKSDVQESQWLMKLHTYGLLRNSFRPPQEIRTMRTYWRQRNDLVQSAGRHIQRMQKALTQMNIQLANVLSDVSGTTGQAIITAILRGERDPHKLAELRDPHVKASEEQIAQSLEGNWQPDLLFVLNQEQDGYEFCQKQMAECDRQLAQYLQQREDRSQGAPLPEEKRKERLKKKKGNKPQFDLREGLFHLTGTDLTRIDSIDVMTATTIVSEAGYDMSKWETEHHFVSWLRLCPDNRISGAKVIGKGRLPTNNPISIALKMAASSLRLSDTYLGAQFHRLRTKLGAPVAIKAMAAKLARLVYRMLRYGMKYVDKGADFYQLQHRQLKVKQLKWKAASLGYQVIPIPAA

SEQ ID NO: 92377 - protein, 328 aa, unidentified
MKSNDSVSVAAELPVLGLDVAKASVQAELRTNGKRVRFGFANNGKGFAQLARILKEHNVPKVWAGLEATGPYSHALALWLHGQGHRVSLLNPRRVKQYARSAGNRNKTDLLDAGIIADFVCAHEPAPWQPPLLEVAQLQALVRRREELSLMLQAEKNRLEGVAPNVRSSLERILATLSAEKARLEKLITQQIRSHPQLSRDHQLLCTIKGIGSLTAAILLAEMARPGQVERARQAAAHAGLVPRREQSGTSVRRNRGLGKEGNRYLRKALYMPALVAIKYNAPLSHFASRLRSAGKPKMSVVCAVMRKLIHIAFGVLKHQKPFNPSLA

SEQ ID NO: 92378 - protein, 430 aa, unidentified
MRLRLQDPEGGPGPDGTRSKEAGMVYVGIDVAKRSHVLSAVGADGETVIGSFKFANADAGFKKLADRLAKAGIEPGSSLFCMEATGHYWVALFDFLSSRGFDAAVVNPIQTDAFRDVWTIRKVKTDALDAAMIADLARYKRYEPSALGDEATDELRALARYRMSLVERSTMLKNRATAILDRVFPELDGLFAGSFSQTQRALLKHAATPRQVLSTDVRTLARILGEASNGHCGRAKAEQLKAAAKSSVGVGFGSDTLAFELRMLMEELDFVRGRIDEVEAELARLLDATAGRWLLTVPGIGPALAATIAGEIGDANRFAGPGQLMAYAGMDPTRSESGETVASDGSMSKRGSAVLRWALMQAADCARRYDPYFGECYAKKKSEGKHHYVALSCVARKLMGVCLALMKEGRPYEPAPPARHRPGHLKEADS

SEQ ID NO: 92379 - protein, 348 aa, unidentified
MRFYTKQHKYYCGIDLHARSMYVCILDKEGKTVLHKNRKTTPEAFLRAIAPYREDIVVAVECMFVWYWLADVCAKEKIPFVLGHALYMKAIHGGKSKNDRIDSHKIAALLRGGTFPVAYVYPRKMRSTRDLLRRRNYLVRKRSELLAHIQNTNSQYNLPELEKKIAVKANREGVAEHFPDPSVRKSIEVDLQLLDFYDRLLGDLERYIEKSAKGHNVHSWYLLRSIPGVGKILSLVLLYEIHDIRRFPRVQDFVSYCRLVKCPRESAGKKFGAKNSKIGNVHLKWAFSEAACLFLRGNEQAQHYHSRLVSKHGKGKALSILAHKIGRAVYFMLKRKEPFSMETFFAHA

SEQ ID NO: 92380 - protein, 359 aa, unidentified
MNEVITERTVVAAAVGLDLSDRRVQMAIVEMRSGQCVEEGRLALSQTALARRFASARRMRVVLEVGTHSPWVSRLLEAWGHEVLVANPRQVQLIAKSRRKTDRVDALVLARLARLDPELLHPIRHRSEGAQTDLARVRVRAALVRTRTALIQHVRGALKSLGYRLPSCSVEVFARRAGSALAPALAPALEPLVETIELLTRQIRLFDRTLEELARTKYPETDCLRQVDGVGWLTALTYVLTLEDAGRFSRSRTVGAYLGLTPRLEQSGSRNPQRGITKHGDPYLRTLLVQCAQYILGPFGKPSDLRSHGQRIAERGGANAKKRAVIAVARKLAVLLHHLWRSGATYQPLRTQLDSELAA

SEQ ID NO: 92381 - protein, 406 aa, unidentified
MELATLHKRVIGLDVHQAQITACAIIEDADGTTRIEQRQFGAFKRDRRALADWAAALSPDQVVMESTGIYWKSPYAALEAVGIRAQVVNARHVKNVPGRKTDVGDAQWLATLARAGLLRGSFVPPAKLRELRLISRQRQKLVGQLASEKNRLHKVLTDGGIRLGVVVSDVHGQSARAMVKAIIDGQPPNEVLKLASRRLKASREELFDALQGELTDSHRFVLDELMCHIEEIEARIARFDARLLDGLTDERNALALLQTLPGVDLIGAAMLLVEIGTDMDAFGHADRLASWVGICPGNNESAGKRKSGRVRKGNLYVRRLLCEFAHAASRTTSVFKSKFQSLVVRRGHKRAIVAIGHKILRTIFFMLNRGEHYRDSATDYEALSVQRNAPRWIKALTKFGFIPQHA

SEQ ID NO: 92382 - protein, 343 aa, unidentified
MLSNNIIAIDLAKNVLQVCHISVHGEMLSNKPLSRQKTKEFLAKAKSSIVAMEGCCGCHYWGQLAEQFGHEVKIINPKKVKGYLEGHKTDHNDALAIANAAIQIGIKYSRPKSLEQQSMHSLETSRRFLSRSVVSLALHIRGTILGYGIANSRGEKGLKASVQTVLDGETSIPTNVVSVLSMLWEQYKELKAKLIAFEKEKNALTRQIEPCQRLMEIEGVGETTAAMLYTTLGDGKQFKNGRQASAFVGLTPKQHSSGGKVFMIGIDKCGGVKELRSLLYLGAMSYVGRLPEKPKTQKDAWLRSIIDRIGFKKACIALANKVVRTAWAMLRYETEYKPVLLTD

SEQ ID NO: 92383 - protein, 354 aa, unidentified
MNDAKYIGLDVHQATISVAVRDSAGKLVMEAILETKAETILQFLRGVRGSLHVTLEEGTWAAWLHDLLLPHVTRVVVCDPRRNSLLKSGNHNDRVDARKLAELLYLNELNPVYHGEHGLRTLRELGRSYIAITRDLTRVMTRLKAIYRSWAIPCAGEQVYAPRYRAEWLAKISEGGVRCRAEHYYQQLDALAALRQEVRRELLAESRKHHATGLLRQVPSIGPIRAALLIAIMQTPNRFRTKRQLWGYCGLALRTYTSGEYRFVKGQLKRSKKVLAIRGLNLNHNHDLKNIFKGAATRAAAVGPFKNFYEACVARGMKPHLARLTLARKIAAITLLVWKKGVRFDAKHLKQQAA

SEQ ID NO: 92384 - protein, 411 aa, unidentified
MDKVYDICCGIDVHKKLIVACLQKGNKHEIREFGATTRELLALADWLNENCCQMIAMESTASYWKPLYNIFESSELNAIVVNARHMKAVPGRKTDVKDAEWIADLLQHGLLQPSYIPNKDQRELRELVIYRKSLVGEKTRELNRLQKMLEGANIKLSGTVRDINGKSARNILEYVLTGESFDETKFDEMYDRKIIAHNLKASKEQIIDDLNGVMSPIQRRMMKELLSHLDELNIHIKNLDDEIDNFMKPEEKDASQMIQSVTGIGNTSAQAIISVIGTDMGRFKTDAHISSWAGLCPGNNQSAAKRKSGKTRKGNSLLRSTLVNCAHSAVKNKKSYFYAQFMRISAHRGKKRAYVAVAHSMLIAIYHILKDGVVFKDLGAEYYNQFNKERKINAYLKKLKALGWNAHAVAS

SEQ ID NO: 92385 - protein, 343 aa, unidentified
MQTVTTIGFDIAKSVFQVHGVDAAGRVIIRRQLKRRHVLAFFQKLPPCLVGIEACASSHHWSRELQALGHTVRLMPPAYVKPYVKRQKNDMADAEAICEAVTRANMRFVPTKTPEQQSCLMLHRTRHLFIRQQIAVINSIRAHLAEFGIVAPVGRKGVTELLQIVADTNDKRVSEVARACLAALGTQLLSIKKQILEFDRMIMAWHRSNQTSKRLHYIPGVGPMLATALVASVADPRTFRSGRNFSAWVGLVPKQHSSGGKERLGSISKQGDRYLRGLFVAGALAVIRYAKIHGTGHRPWLTALLGRRPTKVAAIALANKIARMAWAMMAKGERYKQPVALAA

SEQ ID NO: 92386 - protein, 316 aa, unidentified
MNSTIQNEINVGIDTSQACLDVYILPQGAYQSFANDPAGIKAAIRFIRAFKPARILIEATGRLEMPFFCAAHKAGLPVCVCNPARVRSFAKSIGRMAKTDKLDAQDLAYFGERIKPALSKLKPEKIRLISDLLAVRSQCLEMSTMQKNRLKRMPKPVHAPIRKILRTITEEIGLIDQQLDRLIAEVPEWQERVDQLTSAKAVGKVLAYTLLSELPELGQLNRKQIAALVGVAPMNRDSGRYSGKRFIRGGRSKVRTVLFVSMMSAIQCHPKIKPMYERLVAAGKPKKVAMVACMRKQLTILNAMVKNGTYWNEKMI

SEQ ID NO: 92387 - protein, 343 aa, unidentified
MYFVGLDVHYRSSAICILDRNGKVVKQTQVGGPVGKAVGVLDRLKRPFAICYEASCGYGALYDVLRGLAKRVVVAHPGQLRLIFKSKRKNDRVDAKKLATLLFLDQVPQVYVPSVGVRSWRSLIEFRHRLVAKRTRAKNGLRSLLRGHGITQPAKRRLWTKKGLAWLAGLELPTEEADLQRDVLLDELSMLETQIKRVERKLNAVGKQHPGVILLRTIPGVGPRTSEAVTAYIDNPGRFGRNKNIGAYFGLVPCQDQSAGSDRLGHITREGPSTVRKVLVEATWQGIRRSEHIRAYFERVWRGDPKRKKIALVATAHYLVRVMHAMLATGEAWREDSQEAKAA

SEQ ID NO: 92388 - protein, 390 aa, unidentified
MIYVGIDVAKTTHYAAVADSDGIVLVEPFAFDNDAPGFAKFISKIASFPKEQLVIGLESTGIYSENLICFLFDSGYKLAVINPIQTATLRKTNIRKTKTDKVDTLLIIKSLMVNSYRLYTEQDAHSLKLKSLCRFRQNLKKSKARLKIQLSGYVNLLFPELLSFFKSGIHISTCYTLLKRCSSPAEIAALRLDSLSRLLSNASRGRFSRSTAEALKSLAKSSVGVKNPYISIQIAQTIQQIELLEQQIDEIEKVIKDTMCELDSVIMSIPGIGAIDGAMILGEIGNIDRFASPAKLLAYAGLDPTVCQSGKFKARSTKMSKRGSKILRFALINSAWQLTLNNDTFFNYYQLKLSQGLSHYGALGHVAHKLVRVIFTILKHNLLFDATRLV

SEQ ID NO: 92389 - protein, 422 aa, unidentified
MKNTAARKLKQVPEGYLIIGIDPHKKKHAAVAITQDLTIHDRFKIDNTREGLEFLLQRVKTEMVKSGCRGIMFAIETGGHYWRNIAYYLDERGIPFRFINQYTLKRRREGKDLNKRKNDYRDSEVAAQLLCTGEFVESGIPQGVYAELRTAHNAYRRLVKERTRITNLVKGLLDSLFPEFVHVFKDPCGLTALSVLSTCSTPGIITGMTEDQFIAVIEAQHHGRRLMRKKLGELHSLAKISIGIEAGSRSVAAEISFLVEKFELIREHIQTIERTLIKLVDASEEGKYLLSIRGLHYIAVAGLIAELGCFKSYRSAKQMIKMAGSNPTESESGGKRKSRTPMSKQGRPVLRYCAWTSVIPMLRLNPDFRAWAKERRERPAHANPLNGREVVGAALNRLLRLAFALVKNQTYYRSPQLVKVTE

SEQ ID NO: 92390 - protein, 388 aa, unidentified
MKARTVNNLPPAATHDDAVRCLLAIELSKKSWIVAVNTPLSDKISRYTLEACDWKGLLDLCERIRTRIAREMKKPVEIISCYEAGYDGFWLHRLLEAHGIRNYVIDPASLQVDRRARRAKTDRVDVERMIRSLLAYLRGEPKVWSIVRVPSVAEEDDRRLHRERDRLINERVQHVNRIKGLLAIHGIYDYQPLRGDRVQRLGQLHAADGQTLPPRLKAEILRELQRLELAIAMIKTIEAERDAIASAKTGHRSAKKVQDLAKIKSIGPEVATALVGEVFYRSFDNRKQLASYVGLTPAHFQSGAMSRDQGISKAGNAKARTVMIELAWLWLRHQPDSPLSVWFRERVGKLKGRIRRITIVAVARKLLIALWRYLENGMVPEGAILKVK

SEQ ID NO: 92391 - protein, 320 aa, unidentified
MLIGVDYHPSFQQIAFLVEETGEYSERRLNHSDGEAEKFYRDLQLRGVHVRVGMEATGYSRWFERLLAELGFEVWIGDPAEIKAKRVKKQKTDRQDAQLLLKLMMEDRFPRIWVPSPENRDVRQLLWHRHRLVQMRTRIMNQLQALAMNEGRRWKSKLWSEQGRAELEKLALAPWASRRRRELLELLDRMNPTIEELTAAAEQEVRKRPEALRLMTHPGVGPLTALAYVLIIGTPNRFHRGKQIGNYVGMIPREDASGGKQRLGHISKQGNSLLRFLLVEAGQAAARNNPDWRRRYIHLAMRRHKSIAKVAMGRRLGVRL

SEQ ID NO: 92392 - protein, 349 aa, unidentified
MQSKAQVKSIGIDLGKTTFHLVALGTRSQVVIRKKFCRDQLLQYTANLPASLIGMEAGVGSHFLGRALREQGHEVRLIPAQFVRPFVKSNKNDYRDAEAIAEAVERENMRFVPIKTEDQLDLQALHRVRDRLVARRTSVINQIRAFLLERGISFRKGPASLRRQMPEILENADARLSTAMRRLLDFLWQEWKGLQLQIETLNTQLEQIASSDPSCVRLQQIPGVGPLVSTAVVSAIGNGAAFKKGREFAAWLGLVPRQWSTGGKAKLLGISKRGNPYLRKMFIHGARAAVLRVKREGSSLGKWMSGLETRTARNVVIVATANKLARISWAVLAKGNDYQPLHKAAVFSN

SEQ ID NO: 92393 - protein, 345 aa, unidentified
MSTIKILGIDLGKSSFHVVGYDNTDSIIFRKKFTRSKLLEQLAVLKPCTVAFEACGGSHWLARRCEALGHQTKLIPPQYVKPYIKGNKNDFIDAAAIAEASGRPNMRFVAVKSETAQVLAVCHRLREAFVAERTACMSRIGAFLLEFGLSLPKGHATMRRLFSWLGSQQEVELPEGLLQELHEAYEHYLYLNDRIAVQDRKIRHQVEQDERCQLLKTVPGIGDMVASQTVMEVGNAQQFRHGREMAAWLGLVPRQYSTGGRPKLLGISKRGNKRLRCLFVHGARAILSRLDRSDGPFNVWLKKLRATKPFNVACIALANKLARIAWAVLTKQERFNGSKLQVCSQ

SEQ ID NO: 92394 - protein, 348 aa, unidentified
MDHIIVGVDTHKVNHIAVAINGHGARLDTITIPATRKGYANLQAWASRLGHIRAFGIEGTGSYGAGLSRGLLAHGHTVLDVMRPNRQLRYLHGKSDSLDAESAARSVLNGQATTLAKAQTGSSEMIRHIKVARDSAIKAKSQAMITLRTLIINAPSDLRDALDQIKGPIALIRHIAAFRPGEILSPSSSAKAAMRAIARRWLMLHEEIAEHERELDRMVTDRAPALMTSFGISTMTVAEMLILIGDNPDRIKSEAALAKMCGVCPIPASSGKTNRMRLNRGGNRQANAAIYRVAVVRMRDDDRTKTYAARRTAEGKTKREIVRCIKRYIIREIYRYLCTPSASQLSGP

SEQ ID NO: 92395 - protein, 341 aa, unidentified
MSKRLVPNCAVLHCGIDVSAAMLAVAVQPEGSDGFELREFANSTAGRRQLVAWLDRWQAPVRVSLEATGIYSLDVALALDRAAGIEVAVLNPRTVHRFAESLRRSKTDAADAVALAEYSRRMPFVAWVRPPEAALELRAISRHSATLTEEHARLKNRLHAACGSTSTPRCVREDLRRSMAGLEKRLLRLRREALAAIAKDAGLEQKFQHLTGITGIGEASAVQLLGELAGLDPEMTVRQWVAHSGLDPVHEISGTSVHKPSRISRRGSRHLRRALYMPALSATRFDPYMKAFYTQLQARHKTKLQALTAIARKLLHAIFGIFKTGTPYHPEKLFPQLLLTS

SEQ ID NO: 92396 - protein, 322 aa, unidentified
MAMLSFGGIDVSKDRLDIIVLPDEQCSWVSNDAAGWAELVEQLRGSSITAIGVEASGGYERGVVRALLAAGMSVRQINPFKLRQFAKASGTLAKNDRLDARMIASFVAIMPTRPAQRQAPMIEQLAAMLTVRRQLSDHKVATENASRLLEGAMLQRLSRRRIAGLTADIDLLDQRLVEIVTADPALAHRFRLLTSMPGVGAVLACTLIALLPELGQMSRKQVAALVGLAPYDFDSGKLKGRRCIWGGRARVRHVLYMAALSASNWNPGLKAFHDRLEATGKKPKVVIVAVMRKMITTLNAMLRDGTTWVDRYSGRRSASTAR

SEQ ID NO: 92397 - protein, 353 aa, unidentified
MMVFGVDPHKQSHTAVAADELGRKKAQRTVRARRDGHRELIAWARELAPAGRLWAVEDVRHVAGGLVRDLLAAGESVVFVPPKLMAGERRGGRERGKSDPVDALAIARLALREDAGLPAVRLDEQVLEVRRLSDYRDDLVAERTRVINRLRWMVHDLDPALAPPPRSLGTGRARAKLQAGLRALPGSAGRAVALAQLARVAALSTEITGLEQDLAALVTPLVPELLATPGVAALTAAKILGEAGDIRRFTSGAAFARHNGTAPIPASSGTGHDGPHRLNRGGNRQLNAALHRIALAQARCHPGAAALLARRGQDKHETRRASFRVLKRHLSDAVYRALNTDAWRLDQPAPHAA

SEQ ID NO: 92398 - protein, 417 aa, unidentified
MTQYAAYLGIDWADKKHDLCLVDATTGKKTKLVLAHTPQALAEYFNKLSAQYPGQLIAVGLEQSRGPLLFALLQYDFLVLYPLNPTTLAKYREAFTPSRAKDDPTDADYATELIMKHNDRLKAWHPDDDQTRTLRYLVEQRRRLIGDRTRTSNRMTSLLKCYFPHVLSWFPDLATVLVCDFLLRWPALELLPGVKRSTLLNFFRAHHSMRADTLEIRLAAIKASVPLTTDRAIIDSSVLMITALAAQMKTTIGAIKQFDEAITKLCVVHPDFPLFQSLPGAGQVYAARLLAMMGTQRDRWTTANELACLSGIAPVLERSGQSVWIRWRYFCPKFMRQSFHEYAGESVKHSFWARAYYEQQIAKGKSRQAAVRALAYKWIRIIWKCWQTRTPYSEVKYLEALRRKGSTLLSYVATHAA

SEQ ID NO: 92399 - protein, 409 aa, unidentified
MDVIVERAAGLDVHQASIVACVLIGRPGQKPRKEIRHFGTMTADLEALRDWLRELGVTHVGMESTGVYWKPVHTILEGHFTLIVANAHHIKAVPGRKTDVKDAQWLAELVRHGLARASFVPDRAQREQRELTRYRTALIEERTAHVNRLQKTLESANIKLGAVASDVTGVSARAILARLVGGDDDPAALAALAVGRLRDKIPQLERALVGRFGDHHRYLVPRILAAIDFLDGEIVDLDARIAELERPFAEAVERLDGIPGVGTRVAETIIAEVGATVDRFPSAQHLASWAGLCPGNHESAGKRLGGKTRKGNAPLRRALVQAAHAAGRARQTYLGAQYRRLAARRGKKRAAVAVAHTILVIAYYLLARQTAYTDLGPDYFDRRNTDAIERQLVNRLERLGNKVTIEKIA

SEQ ID NO: 92400 - protein, 315 aa, unidentified
MEKTTPTTEVTYVGLDIAKDRLDYTVDGSRCDHVPNTPGGHEKLLRVLAKRRGVRVICEATGGYERAVVTALLQAKHEVCVTNPGRVRAFAHAEGLLAKTDRLDAQLLRRFGEKVQPRLHAPMDQAAITLRELLDYRRQVSDQLVAVRNRLELAGPVLRARLDGQVTFLEKELTAADQLIQDHLDHDDTLRRKAARLRELKGAGPVLAATLLAYLPELGEIESPQLSALVGVAPFAHDSGRSHKARHVRGGRGLVRRVLYMAAVAATRHNRVLRAHYKRLVTAGKPKMVALVAVMRKMLHVLNRLLADPNFVLVR

SEQ ID NO: 92401 - protein, 346 aa, unidentified
MEHYAGIDVSLELSSVCVVDAQGKIVKEAKVASEPEAVVAFFEALGFAVKRIGLEAGPLSHWLHAGLKEAGFETVLLETRHVKAALSAMTVKTDRKDARGLAQLLRMGWFQPVHAKSMASQEVRALLVGRKQLLGRLIDVELSIRGILRGFGLKVGSVTRKGFEARIRELVTGQATLERIAEAMLSARAALKAEYEKLHKAVLAIVREDPVCRRLMTVPSVGPLVAITYKSAMDDPSRIAKSKAAGALFGLTPKKYQSGEKDVTGGITRTGDEMVRTALYEAANVLLSRITRFSKLKRWGMDVAKRRGSKRAKVALARKIAVILHRIWIDGTTYRWAEAKPIAAQG

SEQ ID NO: 92402 - protein, 362 aa, unidentified
MAKTSRTVIGGVDTHADTHTAAALDSAGQLLGHRQFATTAGGCQALLAWLRRHGQLKAVGVEGTGSYGAGLARLLTASGVHVVEVDRPNRKARRSTGKSDPVDAEAAARAVLAGVATGTPKSRSGVVEAIRVLRVVRTGAVKARTAGLNTLVNLARTAPEPLGAHVHGHSARQLVRLANTWRPAGTLHDPVTATKSAMRRLARRIIELDQEIRAADGELRTLLQLVAPKLLDCRGVGPEVAGQLLITAGDNPTRLADDRAFALLTGVAPLLASSGRTDRHRLNRGGDRAGNNALHTVVLSRMSTDPATRAYVDRRTKQGLNKREIIRCLKRYIVRELFPLIVDALTPEPDDDQADEPASHAA

SEQ ID NO: 92403 - protein, 340 aa, unidentified
MNVTTYGLDVAKRVFQMYWVDATTGEIVNRRFGREELITFLAQRPAGRVALEACGSGHWWARKIKALGHKVDLLHAKFIRPFVQTNKTDAADARAIWTAVQQPGMRTVAAKTEDQQAMLSLHRMRAQLVKIRTMQVNQLRGLLYEFGITFRAGRLAGLTEIRRRMAEMEEILPGRVLKGLQDQLQRIDVLEQEIDELEKQIGTWQKQEAACRAITEIPGIGRLTATALVAMIGDARTFKSGREFASYLGLVPRQSGTGGKVKLGSISKRGDPYMRTLLIHGARSVLAHAKIPTDWQKQIQARRPANVAAVALANKMARTAWAILAHDRTYQKDYVSVRPA

SEQ ID NO: 92404 - protein, 340 aa, unidentified
MKKFLFIGIDFSKSKFDVTILKSIDQQDFVQATFENESKCFNSFLKWVSKQSDIAKQDWLFCGEHTGLYSRALAEFLVKKNLFIWLENPLQIKCSWGIKRAKTDRIDSLEIARYALRFQDKANACKPANKEIESLRLLLAYRGRLVKNKVSLEVSAKETRRVINRDTTSRFIFESSQRDVERIKKEIEVIETKMHETIMSSHLKQNYLLVNSIKGVGMITSITLIIHTDNFAAFETARQLACYCGVVPFEKSSGTSINGGNHISQLANKDIKVLLTQCARCAVQHDKELAAYYDRKIAQGKKERLVINNVRNKLIHRIFAVVTNKIPYRENYLNPWADCA

SEQ ID NO: 92405 - protein, 291 aa, unidentified
MSPNSCPRTARIVCKVGPRGKLGSLRRRNGRGGIVDVDVAKEQLQVAVAPGGGSWSMAYTDEVVAELARKLQADRPKLVLMEATGGLELPLAAALQSAGLAVAIVNPRQVRDFARATRRLSKNDRIDAEVLAVFAATLRPTARPVPDEQQQALDALLLRRRQLIEMRTMERNRLSICRDARSQTDLQQHIAWLDERLSELDDELGNQIRRSPLWRVQDELVQSVPGVGPVTSAALVAELPELGKLSRKQIAALAGVAPLCHDSGTLKGKRSCWGGHGALRAVHGDAECDAL

SEQ ID NO: 92406 - protein, 418 aa, unidentified
MHVETDEPEIIERVAALDVGKAEVVCCARVPGPGGRRMQEVRTVSTMTAALLGLGDWLAELGVTRVVMEATSEYWRPPFYLLEDRFETWLVNAKDVKHLPGRPKTDRLDAVWLAKVAERQMLRPSFVPPPAIRELRDLTRYRVDLLAARTAEKQRVEKLLEGALIKLSVVASDAFGVSGRAIMAALIAGERDPATLAGLARGRLRAKTDRLTEALTGRFTDHHAFLLSQMLHRIDGLSADLATVQDRIETQIAPFAQAVARLDEIPGIGPVAAQTILAEIGTDMSRFPTPAHLASWARFAPGVRESAGRKKGHAGTGHGNPYLARILGEAAISAAGTDTFLGERYRRIARRRGKNRAIVAVGRSILVIIWALLSDDETQFIDLGPDYYATRTNHERRVRHHLRELQELGYTVTLSPAA

SEQ ID NO: 92407 - protein, 323 aa, unidentified
MASTVLGIDISKKDFYVSLLTEENATKPKKFTNNIQGFESLLHWLKQKNVVELHACMEATSIYGEALAEFLYEQGFQVSIVNPARIKGFAKSELLRTKTDSVDAALIARFCAAIKPSLWTPTAPEVKELQALLRRLESVTEMVTSERNRLETATPTVAALTLEHLEYLQQQQELIKQLISDHFQQHPHLKQQRELLTSIPGIGDLTASILLAEIGEVSDYDNARQLAAYAGLTPSERSSGTSVKGKTRLSCTGNVRLRKALYMPAVVAMRHNPLLKAMTERLLGRGKVKMQVIGALMRKLVHLAFGILKSMKPFDPNYAIATS

SEQ ID NO: 92408 - protein, 359 aa, unidentified
MEDRSTVRVQLTIGLDVGDRHSRLCAMNADGEIEEESRVVTNAEALRHRFAGYAPARVAIEVGTHSPWISRLLEGCGHEVLVANPRKVRLIYENDSKSDRVDAEWLARIARMDPKLLAPIHHRGPEAQADLAVVRARDGLVRSRTLLVNHVRGAVKAFGGRVGSCSTEGFPKKAAPSVPEPLQPALGPLLETIASLTTRIREHDRQIQAMRDRYPETALLKQVPGVGPLTAVAYILVVEDPQRFKKSRSLGAYLGLRPRRDQSGQKDPQRRITKAGSPVLRRLLVGSAHYILGPFGPDSDLRRYGLAIAARGGKNAKKRAVVAVARKLAVLLHRLWITGEAYEPLRNAARRERGHVVTP

SEQ ID NO: 92409 - protein, 343 aa, unidentified
MDYFAGLDVSVKETNVCIVDDTGKIVREVKVLSEPEALLPVLKNPAYHFKRIGLEAGPLSQWLYGALAEAELPVVCVETRHMRAALKAQINKTDRNDGRGIAQMMRVGLYRPVHVKTLRSQKLRMLLTHRKLLQSKAIAIDNDLRGTLRNFGLKVGIVGTVKFEARIEELVDNLPDLAVLVEPLLVVRRVLREQLAILHRRLLAIVRDDEVCRRLMTVPGVGPVVALTYRATVDVPARFKTSKAVGAVFGLTPAKHQSGESERTGGISRCGDEMMRMMLYEAAQVMLVRSTKWSWLKAWAMKIARHRGMKKAIVALARRLAVIMHRIWVDGTEFRWTRDLAAA

SEQ ID NO: 92410 - protein, 340 aa, unidentified
MSLALQSFLPFPNSCQGTSPHQQGRGTKMTEHCYCGIDVAKDRLDAQVLPHRQRFSVDNNATGWAELVERLHALPIAAVGIEPSGGYERGIIRILLAAGLSVRRINPSKLRQFARARGILAKNDRLDAQLIAEYVSIMPTRVVQRVATAERLAEVVTMRRQLCDQHVTIENQAAHVEDAILRRLNKRRLARLKADIHLLDKRLAEIVAADVILAQRYELLTSMRGVGPTLAFTLIALLPELGQMSRKQIAALVGLAPYDFDSGKLKGHRCIYGGRMPVRNILYMAALSAARYNPALKVFHNRLAAINKKPKVIIVAVMRKMITTLNAMVRDNAAWQPRAA

SEQ ID NO: 92411 - protein, 361 aa, unidentified
MKKSSRSKRSAEWKERPAITVGLDLGDRFSHYCGLNKDGEVVEEGRIAMNEAALRRQFEGEPRQRIAMECGTHSPWISRLLNKLGHQVIVANARKLRAISQNESKNDRADAEMLARLAYSDPHLLSPIQHRSVERQRDLNLIRARDTLVRARTMLINAVRGLVKSAGGRLPKCSTEYFAMHVVASLPAELKHATDPLLEQIAALTLRIRRLDQEIEKLAERYPEIRILRTAPGVGPVIAAAYVLTLDQPDAVTSSRGVGAFLGLRPRQSQSGDSDPEHRITKTGNIYLRRLLVQAAHYILGRFGADSALRRWGLKLAASGGKRGKKRALVAVARKLAVILHCMWRTGQGYQAFPVPVAATA

SEQ ID NO: 92412 - protein, 376 aa, unidentified
MSDYTRFVGLDVHKDTVAVYVVASDGVEGATSVIANDPDVIAKVMRRIAKEAGGGSAMHCWYEAGPCGYTMYRQLQQMGISCDVVAPSLTPVRPGERVKTDRRDARKLGRMGRAGELTAVWVPDAGHEALRDLVRAREDAQQDLLRARHRLSKLLLRHGKRPAPGIQAWSRGYEQWLDALSFEQEAQTIVMEEYRQQIREARDAVARLEGQMEVVVLGSPLRGMLESLQALKGVSFITAATLAAEIGDITRFEHPRQMMSYAGLTPSEDSSGETVRHGRITKMGNAHVRRVLVEAAWHYRHTPGVGKVLERRQKGQSAQVKSISWKAQVRLHSRYRWLMAHGKPKTRAVVAVARELVGFVWEIAWAAKRQDAAQAS

SEQ ID NO: 92413 - protein, 456 aa, unidentified
MPKQTSKKNDGDLRPLNPNAAGIDIGSQTHYVAVPADRDREPVRSFGCLTPDLHQMAKWLKSCNIETIAMESTGVYWVPVVAVLESYGFDVKLVDAYKVKNVPGRKTDVKDCQWLQELHRFGLLSGAFRPEEQIQVLRSYWRHRGEMVESCSRQIHLMQKALEQMNIQLHKVITDITGVTGMKIIRAIVAGERDAVRLAEMRHPLIKNSTDTIAKALTGEYRQEHLFTLKQALEIYDIYRDKIVECDRQIESYMQTFERKSDAKDLDSKSGKKNINKRRKNQPNFDLKTRLFEMTGVDLTLIDGIETMTAQTIVSECGFDMSTFPTEKHFTSWLGLCPNNQITGGKVRKRRTRKVQNRASLALRLAAQSLHNNKSALGAFYRRMRARLGAPKAITATAHKLARLVYRMLKYGMDYVDIGQQYYEKQYQKRVIENLTKRARQMGYKIICENTGELVS

SEQ ID NO: 92414 - protein, 369 aa, unidentified
MDENTNVATLVDLRKRQTVGRMTIGIDLGDRKSHFCVLNDQAQVIARGFLPTTIKAFRKEFEGLPASLVAIEAGAHSLWAHQVLKVCGHEVLVGNPRKIRLITESDRKSDRVDAESLARLARADRMLLAPIQHRTQEKQVELSVIRARHMLVRSRTALINCARGLVKPMGLRLPTCSAEAFAKRAASTSLPELLRVALAPLLKQIEALTQGIRDYDRQIEQIATTQYPETCLLKQIKGVGTLIALTYVLTLEDPHRFSKSRDVGAFLGFLPREKQSGERAPRLGISRAGNEYLRTLLVQGAHYILGPLGPDTDLRRWGLQLASRGGGGAKKRAVTAVARKLSVLLHHFWKTGEVYEPLRKTQLVVSPAA

SEQ ID NO: 92415 - protein, 426 aa, unidentified
MSKSDYNRQAARRQKIRNTTLIVGVDIGNAFNALGFMNKEGNVLFKCAKLHNNREGFEKFLDMIEGLKKKHRLRDVLIGMEPTGHYWRKLAYFAKEHGYEVRFVRTTALKHHRELDESSSAKSDQRDALTIANITREGKYIDTVIEDGVLRQLRTLSKARERLLRYSVSAKNSLHAALDDYFPELHEIFWSMGSRSLWAILDQCPFPQDVMLMEVATLQDLIARSSRKKKESLQKAKALRKTAQESIGLKQIGSADRYRIQMCLEEVKRTVLSLKNVDKQLKSLLKETPAATYLMSIPGIGPLSAAVFLGELGDSAHFHNARQIVKYAGYDPQESDSGSRIGRRFISKKGRWLLRKYLFFMSMRVVVLSNYFQEYYQRKLETKNRFGQQPRRKEMLCAVAIKLIKVIFALLRDKREFEDLAPAAAA

SEQ ID NO: 92416 - protein, 421 aa, unidentified
MAPQLMQQFAAYVGIDWADRKHDFCLQAGGEDTVEFGCLPHRVECIDEWAGALHQRFGGPIAVALELAKGPIVSALQKYDFFTLFPINPSTLAKYRLAFKPSRAKDDPSDAELALDLLLRHPERFAPLKPQSAGMRSLTVLIEQRRQLVDDRNRFTNRLRSALKEYFPQTLDWFEDIDTMLFCDFLSRWPTLSAVKRASSKTLDGFFRAHNCRRATLIDQRLKSIRSAVALTEDPGIVTPYRLHAVTLLAQLRTTLAVIDVFDQEIAALVRTLPDFALFDSLPGAGPHLAPRLLAAFGEQRGRFRNAVEVQQYTGIAPVTERSGKKSWVHWRWQCPTFLRQTFVEWAAQTINKSFWAGAYYRQQRAKGSSHQAAVRALAFKWIRILYRCWQTGKRYDESVYLNALRRRGSPLLGKLSLSDG

SEQ ID NO: 92417 - protein, 340 aa, unidentified
MENIHILGIDLAKRTFAICGTDNYGYVKFQQKLTRPQLRKLLSELTPCIVAMEACGSAHHWGRIAQTAGHDVRLIPALYVKPFVKRHKNDALDAAAIAEAASRPSMRTVAVKDVEQQARAMLFRTREMFVRQRTQLINAVRAHLAEYGIVLPQQRRNGRLFAERCRSELGGAPEIIIPMVEAYLRQIETVDLEVAELDIKIKKGALRNAEARRLQTMPGIGPMSAMAIQAFCPPAESFQKGRDFAAWLGLVPRQHSTGGKDRLGRITKMGQRDVRKLLIIGAMSVISASERKGRCDDPWLKNMLERRPRMVVAVALANRMARRLWAMMATRRDYQIQAAV

SEQ ID NO: 92418 - protein, 345 aa, unidentified
METMYYIGLDVDKKLISYCVKDVSGRMHAQGKIPATRYDLDLWMKTLPQPWTVAMEATIFTAWIYDHLRPHAAAVKVAHPLMLRAIAVAKKKNDRIDAKKIADCLRCDFLPECYMASTEIRERRRTLRYRNLLVRQAVQMKNKIAVLLMEAGVSYNKQRLHKAGYFRELLATNQDIDEGLKPLLRLCRETVVRLGKTESALVRSLERDSLLVERVERLMTIPAVGPITALTWALEVGDVQRFSSIKKAISYCGLCGAERSSANITQRTPLSKQRNKHLQTVLIEAAKMAPRNSPELAMVYEQEKQKGNANRATLAVARKMVAYLVAVDRRQKGFLVVENENRTAA

SEQ ID NO: 92419 - protein, 370 aa, unidentified
MLDTTTFVGLDVHARSIKAVSLDVMTGEVRAATFGYDAGAVAEWVRSVDPKARCVYESGVTGFDLQKRLSGLGVDCVVGAVSKMIKPSADRRRKNDRNDAEFLARMLSVGNVVEVWVPDDECEAARDLARALEDARDDLSRSKQRLSKFLLRHGLVFDERTPTGRRKGNWTRAHWSWIESIRFAEGADNEVLAHYVDAVRRAAEEKARLEGLVEGEARKPRWKRRVDSLRCLKGVETATAADLVFEAGEFSRFRNARSFAAWVGLTPSEHSSGESDRRGGITKAGNKHLRKTLVEAAWHYLACSGRPKDLAKGQAPDPAARRHAAKGVRRLADRREALLARGVHKNKANVATARELACWVWAVGLMAEGA

SEQ ID NO: 92420 - protein, 343 aa, unidentified
MEAYAGKQFVGIDLHRRRTVIVRTTETGEVLEAVRIVNDVQRLASVMARAGHCPEVVLEATYGWYWAVDALQAGGANVHLAHPLGVKAFEYRRVKNDFRDAQDLADLLRMGRLPEAWIAPPPTRELRELVRHRAKLVGLRSRCKAEVHAVLAKCGVQVLMSDLFGVWGTELLDGLDLPAPYAARIASLRRLMDDVDFEITVFAGIIRGRLAHEPGYTAVQKIPGIGPTLGAVLVAEIGDITRFASAQKLTCWAGLTPKHHESDTHVRRGRITKQGSRLVRWAAIESVKTISKTSEVGMLRERVADRRGRNIASVAAGRRQLELVFYALRDGHVRALEHLPRVA

SEQ ID NO: 92421 - protein, 391 aa, unidentified
MSGTSDRLVIGMDPHKRSATIEVMARDETVVGGGRFDTDRDGYTAMRKYASQWPHRVWAIEGCQGIGRHIANRLIADGEQVVDVPPKLSARARVFATGQGRKTDATDAHSIALVGTRMAGLRPVVNDEQLALLRILVDRRRSLGEDHTRMVSQLHQLLLELIPGGAKKSLSAAQAKALLATVRPRDAVGKARRRVAAELISDLERVYRRSKEADKELTELVTSTSTTLMDLHGIGPSGAARLLVEVGDITRFPNRAHFASWNGTAPIDASSGEHVRHRLSRAGNRQINRVLHIMATVQLRNPTEGRAYFDRKKASGKTSMEAMRALKRRLSDIVYRRMISDAAAVAAGPGGHRGTTTDSSVTDSHPPAGSSEKSLPGPAETQDRTLLPAVS

SEQ ID NO: 92422 - protein, 351 aa, unidentified
MQIVGALDVHRRQITFKTLEPASGECSRGRISPAAREPLRQWLERFDGLEGEFVLEGTTGWRFVVEEIERAGHVARLADPAETAARRGRKRRAKTDDADCDLQLRLLLAGELPEAWIPPAGILELRTRVRLRKTLIDQRTAWLQRLQAQLFHQGVPPGLKPGTVAGRDALARVELSPAGREAVELYLRMLDQLDRELVPIDRALRAFARRQPGCRALTEQLYGVGAVTATAILAELGDARRFRSSDDAVRHSGLDVTVWQSDRKRAAGHLSHQGPSVLRWALFEAAQSAARRSSPDHAYYLDVAKRIDHNRACLSVARKLCRRAHHILRELGDDALAASDPPRAELVDAAA

SEQ ID NO: 92423 - protein, 406 aa, unidentified
MSAVMIGIDPHKGSHTAVALDGVEAKLGEIRVSSSVTQVERLLEWAKGWPERTWAIEGAKGLGRLLAEQLVTAGERVVDVQPKLAARVRLLNTGAVNKNDPNDARSVAVAALRSPSLKEIGPESHAAVMKIWAGRHRDLSRTRNRIACRLHAVLCELVPGGFAKEISAVQAARVLENIEVHGASAAARMELAGELLEDLRRIDGQLRGVKRRLAKIVKESKTTLTEIYGVGPIVAATVIGDVAEISRFSSKDRFAAYNGTAPIEASSGNNKVHRLSRRGNRRMNHAIHMAAVTQISHRGTVGRAYYDRKISEGMAHKSALRALKRRISDALYGRMIADARSAAAAIEEGPGGQLGNDSISSVAGSHPQTPTLRSSHSRARSNPRSLRSAANIGNPPRRAKATRRAS

SEQ ID NO: 92424 - protein, 350 aa, unidentified
MIIIGVEYHPEFQQLASVDTETGEFRKARLQNREQAEQFYRELAGCGAQVRIGMEASGHARWLERLFGELQFELWIGDAAQICSQRVRKQKTDRQDAQLILQLLVEDRFPRIWVPGPENRDLRQLLWHRHRMVQARTRVMNQLQAVALNEGLRSKKRLWRERDRQQLESFQLGQWASRRRQDLLQLLDQLNPTILELTQAVEWEAEKCPEARRLRTHPGVGALTALGFVLIVGEAERFHCGKQVASYLGLVPLEKSSGSRRRLGHITKPASSILRFLLVEAAQATVRSLPEWRSKYFHLMQRHGGNIAKVAMARRLAVRLYWMWRQGWNYQQLQKFGSHAGQLGNPYGVQ

SEQ ID NO: 92425 - protein, 344 aa, unidentified
MSEVTTIGLDIAKHVFHAHGADATGRAVFSRRLTRGKLLDFFAAHPRCRVALEACGGAHHWARELRAMGHDVRLIPPAYVKPYVKRHKNDAIDAEAICEAAQRPGMRFVAVKSEDQQAAALVFRTRDLAVKQRTQIANAIRGHLAEYGWVAPKGAAHLGMLADLLEDGEIGDTLPEAARPMFAMMVEMLADLDQRIAVLDKEIIRRAREDEVARRLMTIPGIGPITATALAAIAPPAETFAKGRDFAAWLGLVPRQTSTGGKQKLGTISRMGERTLRRLLIIGASAVVLHASKRGAPAGSWLEGMLARKPRMLVTVALANKMARTVWALLVKQEDYRAPVPAAA

SEQ ID NO: 92426 - protein, 371 aa, unidentified
MKKPLQYLIAEVPRRQAKAEMTIGIDLGDVWSHYCTLNQDGEVVDRGRFRTTPKAIEKWFADVPHSRVAMEAGTHSIWISEQLQELGHEVIVANVRELRTISHSDRKSDQIDAEKLARYARIDPEILRPIAHRTVEQHEALTLIRARDLMVRLRTAAVNAVRGLTKSCGHRMPASTTSCFAKRSLAVMPPGLAQALAPVLEQIAEMTLKIKQYDRQIQLLTQTEYAETQALLKVQGVGYITALTFVLTLGNKERFGRSRDVGCYLGLRPRRSQSGERDPQLGITKAGNGYLRHLLIECANHILRPRGKDSALRQWGLHLAARGGKQARNKAVVAVARKLAVLLHRIWVTQEPYVPLLPRGSLRLDDVYPLR

SEQ ID NO: 92427 - protein, 346 aa, unidentified
MKVLLKQTVGIDVAQNELVVSLGKMDEQINIEVYDYKVFPNTKKGFSSLVSWVNKQTSNTTEVRYVMEATGVYHESLAYYLCSIQKQVSIILPNKISNYAKTLDIKTITDKSASQAIARFGLERKLEVWLPPLKIFNDLRQLCREREQLVQERTMLKNQLHAERTSATSSKNSVQRTKKRIALIDLQEKEIREEIAILIKEDQTLVEKMKMVSSIPGIGNLTAVTIIAETNGFELIKNKRQLVSYAGLDVREKISGTSVKSKPRISKRGNRNLRKVMHFPALAAIRTDERFRDIFLRLVSKHGIKMKAIVAIQRKLLELTFILWKNNSYYKSEHQYQIIPFQEVTE

SEQ ID NO: 92428 - protein, 362 aa, unidentified
MAKVRSWAGLDVHARSVLAVTIDGESGELCSRRLSGTTSDVVEFCSSLPGPTRVAYEAGPTGYGLARALDAVGVGCVVAAPGKIERPAADKVKTDQRDAERVLRLLMIDGLHPVRVPSGQEEALRDVVRAREAVRGDLMRARQRLGKLLLRHDVRYEDTASAWTIRHRSWLTALDLGERGAQITLLEYLGAIDAIVIRRDALEKAIGELIGGSPWEQTVARLRCLRGIDTLSAVGLCAEVGEFERFQKAGQLMSYLGLTPSEDTSGEKRRQGAITKTGSRHARRLLVEAAWHYRRAPAKGQALRRRQEGQAANIIEISWQAQRRLHRVWQRLDSQRGKRRTIVAVAVARELTGFCWALANAD

SEQ ID NO: 92429 - protein, 360 aa, unidentified
MRIIGCDLHARQQTLAMLDTISGEVVNRTLMHEGNEVREFYSQLPHPVLVGIEAIGPMQWFLDLLQELGIECQVGDAAKIRAAEPRKQKHNRRDAELILKLLVEKRFPAIWMPSKELLDLRALLLHRHHWVRLRTQIQNALQAIALANGLRRGPSLWSYDGQAKIAFLPLPPHASYRRSALQTMYRKMQEETDNLTEQIAEQARQRSGARLLMTHPGVGPVTALATDVFLGDPQRFADGKALASYVGLIPREYSSGERQRLGAVTKQGSPLLRFLWNEAGAHAARRDPELQRFYRRKLVQKGLGKARVAVARKLGIRLWIMLRDQIDYQEFCRRGQKQSGDACAGMLETRFGANGHRPVD

SEQ ID NO: 92430 - protein, 368 aa, unidentified
MTKTVYIGMDVHSTNYTLSSYTCEADNCFSTVKLGPDVKNILKYISRIKKDHGDDIEIVTGYEAGCLGYTLYKSLEREGIKCIIIAPTTLPKQKAGEIKTDKRDAQKIARALGTGTYKSVYIPDQEDDDVKQYIRMRDDHKQTLKKTKQQINAFCLRNGFTFTEGKSKWTQKHIKWLRSLEMTAMQREILDEYLITFDYYTLRIKQMDEKIEEISRQERYKENVDKLCCFAGMSTHKALCHIVETGDFSRFAKAPSYSAYLGTVPGEDSSSTSVNRLPITKAGNSHLRLLDIEAAHAIGRTSKQKSRALIERQKGCSPEVIAYADKANARMRKMYREISERKNKNVAAAAVARELACFIWGMMTDHIS

SEQ ID NO: 92431 - protein, 428 aa, unidentified
MNVEDTIRREQFCQIQDEIRGSDAYLIVGIDVAKDKHHAFMGSSTGKSLLRKLIFENNLDGFGKLLERSEAIKKQNALSEVVFGLEPTGNYHKPLGAYLIRCGCHLVLVTGKAVKNNRELLDGRWDKNDDKDAANVADLVSRGRCLYYDYPSSSINELRQSLSLRRRLKKEEHSLRMRIRNNLLAQYFPELDCFYSACESESLAIVRWCLDPGRIAGMDFEPFFSMVTRSRRGIAQKRRLQKIHQLAVKSVGCAMGPTAEFEAALLVDKLKEVRGQLKQVADLMQDVCLQLTDYNFLLTIPGFGPYVAARVLASIANPWRFDSSNQVIKMSGYDLGANRSGKRSDDAVPVISKRGNSELRYALYQAAHVASTRNRDFIGYFTRILRGRERERGIKTKMKVKLAAKMLKIAWTLMRKQEVFDPDHLIIE

SEQ ID NO: 92432 - protein, 358 aa, unidentified
MEQITRIGMDTSKHIFQLHGVNAAEKPVLRKKVRRKEMVKFFEGLPPTEVAIEACGSSHHWARLLQSLGHEVKLIPPQFVKPYVKRNKNDAADAEALCEATGRPTMRFVPVKTAEQQAALMLVGVRDRLLRNRTQLSNSIRGYASEFGLIASKGLCRIEQLLVRAASDETIPTLARELFAIHGKEYGQLQVRLEEIEARLMAWHRADACSQRLAEIPGIGPIGASMLVMKTPAPETFRSSRHFAAWLGLTPKDHSTAGKSKLGGITRAGDEALRSVLVVGSTSLLYRVRQRGTGSPWLIDLLKRKPPKLAAVALANKNARIAWKLMVSGERYRTKPTPTVNPKSGFNPPRGALQARPC

SEQ ID NO: 92433 - protein, 327 aa, unidentified
MTVYIGIDVSKRKFDCAWLRDPDRVKVKTKVFGNDTAGHAAVLDWLAQQTGTPADQIHIIMEATGIYHEALAQALYEAGLGVSVMNPAQVREFAKSLGVRGKNDRKDSVVLARYGAARRPRLWQPEPAAVRGLKARLARLEALDKDIQRERNRREKAEVVQAEEIIASIDTVLDALRAERDRLTRDIDDHIDRHPALKKDRALLESVPGIGPTVSRRLLATLRSRDFTSARQAAAFIGVIPVPWDSGSSVHGPPRLSKAGNPKLRQLLYMAAIVSTKHNPDIAAQYQRLTARGKSDMSALGGAMRKLVHLAYGVLKHQTPYQPQGAT

SEQ ID NO: 92434 - protein, 409 aa, unidentified
MLDTLFVGIDVGKKQNVIRFTDSAGNTLTLFKAPNNYDGATKILDRLKDTILHTDFRAVTIGMESTSIYADHLAVFLRNDDFLKKWHVKVHVLNAKQVSKFKESYPELPKTDNIDTLIIADYLRFGRIAKEVNLDEKYIALRNLTRARFQVSQNLSREKTRFLETLFYKFSDLDTSKIFSDIFGATSIAVISDFFSVDDINSMPLEELVDFIVVKGKNKFIDPEKIALELKSAARSSYRLSKTVNDSLNQLLAIRLVGLKSLQQQLKDLDKAIQSYMKLFPDILSSIPGIGPVYSAGILAEIADIRRFSGHASLAKYAGITWTRHQSGSFEAEDRKLILSGNKYLKYYFLEAANKVRVHDPEFQRFYQTKFKEVPKHQHKRALALTARKLVRLVYALLYTNRLYIPPTK

SEQ ID NO: 92435 - protein, 350 aa, unidentified
MGIDCGKKSLEVVRIHSENSLKERRQFSTTEIGINNLLKWLTQNDIVGLEAGTQSFRIAKSILNKGIQVIVLNPGDLATIYQSLKKTDKEDSLKIARLIQRYPIEELPTVPVPTDEEEDNRRLCTEQENWTRQLTQGKNRLHSLFTQAGLTEITKKHLRTKSPRETSVTLLPSRYQKEAERILKVLDLVEQNLKLIEEETKDALKKNPAYVQTIMSMPGIGMVTSLAIMSYMGDCKRFSSGKQAAYYAGLVPRVDISGDTVRYGKIVSRGCHSIRRVIVQAAWSLVRCQHGGKLKEFYERLYSKKGAKKSIIAVSRKMIEVLYSMIRTGALFDSMPESVLYRKLAQHGLM

SEQ ID NO: 92436 - protein, 340 aa, unidentified
MKLYSAIDLHSSSNHLAIMNEEMKRVLVKKLANNTQLILDTLAPHREEIAGIVVESTYNWYWLVDALMEAGYRVHLANPSAIQRYKGLKYTDDTHDACWLARLLSLGILPEGYIYPKQDRPVRDLLRKRGHLVRLRTSLLLSLQNIITRSSNVKVAAKDLKKLTEDRVSAHMCGHDALELCGTVSKETIDVLTRQIQRIESSVLKKIKPTASYRTLVTLPGVGPVLALTIALETGPISRFSTVGSYASYCRKVASIWLSNDKRKGTGNRKNGNRYLAWAFSEAAEHARQSHRASRRFYDRKRSQSNLWVAHNALAHKLSRAAYYIMRDNVPFAAHKLYCS

SEQ ID NO: 92437 - protein, 341 aa, unidentified
MKTFIRIGIDLAKNFFQVHALEREGAPAVTRKLRRGKVLAFFAQAAPSRVGMEACGSSHYWAREIRALGHEVVLIPPAYTKPYVKRGKNDANDAAAICEAMSRPEMRFVPIKSADQQAVLMLHKTRELLVKQRTMTVNALRGHLSEFGLIAPKGIHRVKELLALAQADETLPEEAKQATAMLASHSDGLDEEIDDLEKTIARTSAKNQTSRLLDDIPAFGPLIASAMVAFNPDPGVFRSGSDFSASLGITPSQHSSGGKDKLGAITKKGNRYLRKMLVVGCTSVLRVAHKYKGALAEWIVAMRARKPERVVAVALANKLARTAWAMMSTGEAFRSELYTKA

SEQ ID NO: 92438 - protein, 381 aa, unidentified
MTTPATCNVPESTTAGTLFVAFELSEKTWKLGFTTGHGQKPRERTVTARHQERVLEEIAHAKRRLGLPDTAPVVSCYEAGREGFWLHRFLQGHGITNHVVDSSSIEVNRRRRRAKSDGLDVRKLLSMLMRYAQGERQVWQVVKVPSVEAEDQRHLHRDLETLKQERASTTTRIQGLLSSQGIRVTSLSNLPEQLEALRLWDGSPIPPGLRRRVLRVYAHHTFLSAQIAAVEAERRAQLQASTDANIEKVRQLMQLKGIGINGAWLLVMEFFGWRAFKNRREVGGLAGFTPTPYQSGESAREQGITKSGNRHVRWMTTELAWSWLRFQPDSALSVWFRERFGGGGKRLRRIGIVAVARKLLIALWRFLETGVLPEGAALKEA

SEQ ID NO: 92439 - protein, 313 aa, unidentified
MEPQEINVGIDTSSKQLDISVRPTGQFFSVTNDKDGIKDAIKRLQPLKPKRVLIESTGRLELEFVCAAHKAGLPIVVCNPSQVRNFAKSAGRLAKTGKLDAVDIAHFGEAMKPRLSSIKSEKLRNISDLLVVRSQCLEMSTMQKNRLKRMPKSVHKPIQSILKAIKKELEVIDKQPDKLVSSIAEWRQKRDLLLSAKGVGNVLAYTLMSELPELGKLNRKEIAALVGIAPMNRDSGSFQGKRYIRGGRHRVRTVLFVSIMSAIQCHPKLKPMYKRLVDAGKPKKVALIACMRKQLTILNTMVKNNTYWDENMA

SEQ ID NO: 92440 - protein, 317 aa, unidentified
MKKHIMVCGGIDTGKRKLDVALDGSTGRLQVANTAAGHGELSAWLREHQVKRVGIEASGGYEQAVVARLRRDGFVVIVFQPAQVRAYAKFHMQRAKNDKIDAALIAACTAAAKKIHAPPDARLAPMAEQQTLIDQITDQIARCKNYLESCRNPESRQFWQDEIKRFRGLFRKELKRLVAAIRRHPDLAARLDLIASVDGIALRTATAILVRLPEIGRISREQAAALVGLAPYDNDSGDQNGARHIAGGRKRLRGSVYSAAFAASFRWNPELIELYNRLTAAGKDHKVALVACARKLLIFANTVVARGTPWVSHAAAS

SEQ ID NO: 92441 - protein, 340 aa, unidentified
MRQLYAGCDLHGNSNLIGVIDGDGKRVFKKKLSNDLVLVRDTLKPFQEELVGIAVESTYNWYWLVDGLMEKGYKVHLANPSAIQQYSGLKHCDDQHDAFWLAEMLRLGILPEGYIYPKEERPVRDLLRKRGHLARLRTSLIISLQNILSRNLGRKVNVNDMKAIKEDRVSLLLEMNEDLALAGRVSKEAIDHLTQQIHKIEWVVQKRIALKQAYRYLLTLPGVGKILSLTIMLETGPIDRFKAVGDYVSYCRKVPSQWTSNGKHKGSGNKKNGNKYLAWAYSEASEFARQLYPEPRAYYHRKMQKTNAAVAHSALANKLSRAAYYVMRDQVPFQPEKLFG

SEQ ID NO: 92442 - protein, 357 aa, unidentified
MEAQTVDTLPPVAADHDPVRCLLAIELSKKSWIVAITTALSDKISQYTLDGCDWTGLLELMERVRTRVAREAGRPVEMISCYEAGYDGFWLHRLLERQGVRSHVIDPASVQVDRRARRAKTDHIDAKRLLRSLMAYLRGEPKVWSVLRVPSVAEEDDRRLHRERDRLIAERGQHVNRIKGLCAIHGIYDYEPMRRDRMLRLEQLHTGDGRELPSRLKAEIARELQRLELILGMLKEIEAERDAVALTEKVSEHTNSKKIQNLVKLKAIGAEIATVLTGEVFYRPFNNRHQVASYVGLTPSPFQSGSKCRDQGISKAGNPKARSTMIELALGLGADAGRACSVERAWPRGDARSAGAG

SEQ ID NO: 92443 - protein, 343 aa, unidentified
MEAITTIGLDIAKSVFQVHGIDAEGNVIFRRQLKRRYVLTFFQKLPPCLVGIEACASSHHWSRELQALGHTVRLMPPAYVKPYVKRHKNDATDAEAICEAVTRPNMRFVATKTPEQQSCLTLHRTRHLFIRQQTSVINAIRAHLAEFGIVAPVGRQGVEQLLGVAADTNDKRLPEVARACVAALGAQLRTLKAQILQFDRMIRAWHRSNEESRRLDDIPGVGPALATALVSSVADPRAFRSGRDFSAWIGLVPKQNSSGRKDRLGNISKRGDRYLRSLLTTGALAVIRYAKTHSTRHRPWLTVLLTRRPTKVAAIALANKIARIAWAMMAKGERYKEPAALAA

SEQ ID NO: 92444 - protein, 348 aa, unidentified
MRFYTSHHAHYCGIDLHAKTMYLCLLDREGQVQLHENLRSRPEPFLAAVAPYREDLVVGAECIFTWYWLADLCAREGIAFVLGHALYMKAIHGAKAKNDRLDAFKIAHLLRGGNLPQAYVYPPEMRATRDLLRRRLHLVRRRGNLLAHVQNTHHQYNLDVPAKKVAHESNRKGVAERFVQADVRKSVETDLALVGDYDVRIRELQLHLERRAKEHDRDAYHRLRSVPGIGKILALTILYEIHDIGRFERVQDFLSYARLVKCEHSSAGKRLGSGGAKVGNVHLKWAFSEAAVLFLRKNPRGQQYVRRLAGKHGKAKALSILAAKLGRAVYHMLRRERAFDTERFFAMS

SEQ ID NO: 92445 - protein, 347 aa, unidentified
MNFYTQQHKYYCGIDLHAKSMYLCILNQEGNLMLQRNIRTGPEVFLKTIAQYREDIVVAVECIFTWYWIADLCAQEHIPFVLGHALYMKAIHGGKAKNDKIDAHKIAVLLRGGMIPMAYVYPQQMRSTRDLLRRRMHLTRKRAELLAHIQNTHYQYNLPAIEKKISYKANREGVSERFQDESVRKSIELDLKLLDYYDQLLPSLEHQISLIAKAHDADSYFRLRSIPGIGRILGLVILYEIHDIRRFPTVQDFVSYCRLVKSAKESAGKRLGTSGKKIGNVHLKWAFSEAAVLFLRRNLQARKYREKLQKKHGKAKSMTILAHKLARAVYYILKRKEVFHMNTFFER

SEQ ID NO: 92446 - protein, 348 aa, unidentified
MDSMTYVGLDLHKRAVAYCVKTPSGRIVDEGTVQSSRAALREWAQSLRKPWEGGMEATLFTGWVYDLLLPYAAHLRVGHPLMLKAICCSKKKSDKIDARKLADLVRSNLFPDCTMLPKELRQLRRVLRFRNRIVRQAIRMKNTVCGLLMEAGQSYSKRKLHGKRYFAELLDSLEDVPESVIELLNLSHGTLEFFTSMQKKLIAGLRGQPLLCERVDRLMTIPGVGEITALTWALEVGDPDRFGSVREAVSYCGLCSAYSESGGKERRGPISKQRNKYLQTILIEASKIAPQWNAELRALRDRERMRGHHNRATLVVGRKLVAYLLAVDKRGTAFEDRASRAGGEGLAA

SEQ ID NO: 92447 - protein, 372 aa, unidentified
MTRERPVDPVTAAVAQEAFVITIGVDAHKQVHAAVAVDDAGRDVARWRGPNSRAAWDELHCWAAQLADERQWGVEGAGGYGRGLAQRLVDLGEPVFEVNSRWTASGRRSARKGEKTDALDATAVARTVRMEGSALPRVQPDDESSILSVLTTERDELIRESSRIRNQIHHLLLQVDPEYKGQIGCLTTRRSLGALSRYTAPDEGALQEHRAAAVRRLAVRLELVKHHIEDVSLQIKNLAAARFPALMRLCGVNALTAGVLAGLLGPGQRFASDAQLAAYAGVAPLEASSGLRVRHRLSRSGNRRLNSVIYWIVLTQAHHSPEARAYLARRMSQGKTRREAHRALRRYIARALWRLWVECHSPSVSMSTQAAA

SEQ ID NO: 92448 - protein, 366 aa, unidentified
MKKTSTVQAFQNEIFKGRKLTIGLDLGDRWSFYCVMDEAGQIILEQTLPTTPEAMKQTFGKIPRSLLALETGTHSPWVSRLLSELGQEVIVAHAQKVQWITKSSRKDDRHDARTLARLARVDPELLGPVRHRSAQAQLHLTVIRARAELVSARTALVNAARGLVKSYGQRLPKCGTYQVSRELAAALSTELRDVLEPLLKEIESLNERVKEYDERMEKLAKEVYPEVALLQQVKGVGTQIALTYVLTIEDPHRFAKSREVGCFLGLRPGRRNSGESEPQKGISKEGDRYLRTMLVQGAHYILGPFGEDSDLRRWGRKLAERGGKNAKKRAVVAVARKLAVLLHRLWVGGEVYEPLRNSQKAMRDVA

SEQ ID NO: 92449 - protein, 355 aa, unidentified
MTSTKYIGLDVHKESISIAVLNFAGKVVMECVIETKASTLLQFIHGLRGDLHVTFEEGTWAGWLYDLLKPHVTELVVCNPRKIALLKDGSKSDRIDAHKLADLLYMNKIRPVYHGEHGLCMLKELSRSYLTITKDLGRVMNRLKALYRSWAIPCAGTQVYAPRFRSEWLSKITEAGVRRRAELYYQQLDALRLVRQQARKELLAEARKHRATKLLRQIPGIGPLRAAHLVALMQTPHRFRTKRQLWTYSGLGLETHDSAQYRVVEQQLQRSKKPVTLRGLNTNHNHDLKDIFKGAAMRASTAAGPLHDFYEALLAKGRKPTMARLTLARKIAAITLIVWKKEVRFDANYLKQQAA

SEQ ID NO: 92450 - protein, 338 aa, unidentified
MALELLAIDLGKRSFHLYGIDTNGEILSRKVSRTKLAEVVNNLAPKAIAMEACASAHYWARCWLAAGREVRLINPRFVKPFVKGSKNDAVDAEAIFEAAMRPTMRFVPVKSRDQQDLQSLHRARDRLICQRTALINHTRGLLAEYGVVLPQGPWRFTAQAPAAVAGAELSDLARSIFGELMGQLDELDRRVKKLDATMVALCRTNETCRRLAKLPGVGPVIATAIVAAVNDGRQFRSGREMAAWIGLVPRQYTTGGKPRLGGIGRRANHYLRRQLIHGARAVVSRLPRHDARHDARRSTWLKALVARRGFNRTIVALANKTARIAWALLNRKEDYAIA

SEQ ID NO: 92451 - protein, 426 aa, unidentified
MSETVIDLYSRAAGIDIHQSLAVVSAIIPIGDDPFKCKFVRGEFDTFSEQGLKALVDFLRPLGVEMILMESTGVYWMAPYDALLEAGFNVAIGNAHEIRGMRGRKTDMNDADWLARVAKHGTFHPSYVPEREYRGLRSLARHSTRLRGMVSSEKNRLGKLFNAAGYRLNSVFSNIFGAGGMLCVRGILNGEKPEEILKKLPSARYKHSREDMLLALGGKFEEGDLVAARAALKIIDFLDAAISEGVGELERIVREKEERKCELLQTIPGIDVLAACLILAELGGGGLEAFDSAEALCAWAGLCPSQNESGGKSRPAKSRKGSKYLRRDVCECAQAAVKTKNTTMRSKFQSFMQRGKGYKKSIMAMGRKLLTYVYYVLKKDQPYVDPHIDYQKRHAEKNFQRFAAQLRRCTAKYDIQIVNRETGEAV

SEQ ID NO: 92452 - protein, 365 aa, unidentified
MATIVESEPRRVVGGVDTHKDVHVAVVIDVIGRALASESFPATRHGYRCLLSWLRSHGELEAVGVEGTGSWGAGLARYLTTRGVAVVEVNRPNRQNRRRRGKSDAVDAEAAARAVLNGQATVTPKSGTGPVEAIRQLRIARSGAMKARTAAANQLHSLCDTAPDPVRAQLVPLSLRKKVAVAERWRPGSASTVETAAKRALTTVARRWRALDDEARELDRHIKAILDQIAAALLAVHGVGYETAGQLLVTAGDNPDRLGHEKSFAALCGSSPVQASSGRTNRHRLNRGGDRQANSALWTIVLTRMVSHAPTKAYVQRRTTEGLSKTEIMRCLKRYVARELYPLLQAVTIATTLEQRHANPRESHA

SEQ ID NO: 92453 - protein, 342 aa, unidentified
MQISTIGLDIAKNVFQVHGIDAAEKVVVRKRLRRRQVLEFFKALPQCLIGIEACATAHYWARELTKLGHRVRLMPAKDVKAYVKRNKNDSADAEAICEAVRRPTMRFVQIKSAEQQGRLMLHRTRDLLMRQRTQVINALRAHLAELGIVAAQGREGIKELLKIIASEADARLPVDAHTSLVVLAAELQAMQTLIGSIEKRIMAQHRLNEASQRLEIIPGIGVIGATAIAATVPDPKVFRSGRDFAAWIGIVPREDSTGGKQKLGPISKQGDRYLRRILVVGACAVLRYARHKPEKYPWLTQLLARKPFKVVAVALANKMARIAWAVLAKGGTYRAPALAAAA

SEQ ID NO: 92454 - protein, 421 aa, unidentified
MRRKNDNRQVEKRQRITDATLVIGMDIGCECNAMCLMSKEGTILGRYPKIYNSRKGFDYFHGIVESMKKKYGFTDVLIGMEPTGHYWRKIAYFAMDKQYEVRFIRTTALKHQRELDESSSAKNDIRDAYTIANIAREGKYIDTVIEDNIFRQLRTLAHTREKIQRISTGAKHALKGMLEDYFPELKHIFWSMKAKGLWALLEHYPFPEDVLKTDIDTVTELIAQSTRRKIQAHEKALQIYKAAQHSIGLQRVGDADRFRVAAYLSEIRHSETQLKEIEAQMEALLKKIPFAEYILSMPGIGTLTCGVFLGELGNPCNFTNPKQIVKYAGYDPKEHDSGQRTGRRIISKKGRWLLRKYLYFMAMRVVHRSPFLKDYYENKQKTMTKKEALCAVVIKLIKVIFALLRDKRTFTEKQSCLKQAA

SEQ ID NO: 92455 - protein, 319 aa, unidentified
MAQNDLIVVGIDVAKDKVDACIRRFTLRQTLPNTAQGHRKLVAWLRKYKVGKAVMEASGGYEREWRNVLHNAGIEVRIVDPRRVRSFAQSAGRLAKNDPIDAEMIAWFAETFSQAPGQIPDAAREELAALAKARTALVNVKIRLQAQDEHAAPEPARKACARVLKSLAAEIDKLEAAISAKVKATPEFAERAEIIESVPGLAQATSAILIAGMPELGQVSDKIAAALIGVAPYDDDSGKRRGERYIKGGRRWVRNAIYMPCLGAATQCNPVLKAFYQRLLAKGKEPKVALVACMRKLIIILNTMLARRQKWNPGGHAMG

SEQ ID NO: 92456 - protein, 331 aa, unidentified
MNTLMMPAAAARFNHVIAFDVAKATLSLHILPTGESLCLENDGAAIRRLLKREQKRNRKQGLGPMLVICEATGGYEDAVLKAASELGLECHLAHGSSVRAYAKFRGRHAKSDPIDAFLIAEYGRDKPDLRLYKPPRPEESALRALMGRRAELKEMILAETSRLEHASLKAVRLSLESHLVALKEQLALIEKEIRALTRRDEAFTHKSRLMQTLAGIGAVAAQTLLAFLPELGQIPSSAAVALVGLAPYDRDSGKERGKRRIFAGRSQIRRCLYMAALAAIRSHAVFRDFAERLSRRGKPFKVAVTAVMRKLIVILSAMLRHNQPWKHAQTA

SEQ ID NO: 92457 - protein, 355 aa, unidentified
MWSLGIDQHERQITISLRDENGDVLLARQVSTQPEKIQAFFQQLTQDRLQKGEEFVAILEVCGFNDWLIRMLQDYRCYKVILIQPDERKKCKTDRRDAAALSELLWVNRARLLAGKPVRGVRQVDIAASTDQENRRLTTLRKEARQARTRVINKIKHIVRRHNLRWHLPTKTFPTQSAIAWLKALVLPAVDRLEMNYLLADLEHLEQRYVDLEKVIAERCIASEQAGILSSMPGVGNFTATALACRVGRVERFPRSHSLPNYWGLTPRCRDSGEKTQRLGSITKNGSSMARWLLAQVAYQVLRKDRRLREWYKNIKRRRGSNIARVAVMRKLATIIWHMLKHRKTYAECRAFVTK

SEQ ID NO: 92458 - protein, 367 aa, unidentified
MPLSTNRYLSLCPKIRNTQEVKSPMMRTTYVGMDIHKNFIQAAALDEQGNIIKEQKLKTDEKEIKRFIETLKPQKIHAAIEATCTWYHVYETLNALDVETTLVNMRRTKTIAESKIKTDKLDAKTIAQCLRTGFIATAYIPPKAIIEQRNLLRHRMSLRKEIIRYKNKIHAILLRNGVHHPDYSDLFGVGGMKFLRSLTTLPDSEHYSLTSYLNIVETLIREKTQTAKNIETLCKNNHQAMLLTSIPGVSYYSAMIILTEMGEVQRFSNPKKLCSYAGLVPRTIQSGNHVYQGRILKECNHNLKWILDQCAHIHIRHCPNSSITRLYHRVETKKGAGKATIAASRKLLTCVWHMLMKDETFKYHNDN

SEQ ID NO: 92459 - protein, 352 aa, unidentified
MLIIGCDYHPSMQQIAFVDTETGERGERRLMHRDGEAERFYRELKQRRVEVRVGMEATGYARWFERLLAELSFELWIGDPARIRARRVRKQKTDRQDAQLLLRLLLEEDGFPRIWVPSPENRDLRQLLWHRHRLVQMRTRIMNQLQAVAMNEGLRRKRALWSEAGRKQLESFLLAPWATRRRKDLLELMDRLNPTIRELTGAVEKEAENKPEVQLLMSHPGVGPLTALAFVLIIGTPQRFHCGKQMGSYLGLIPCEDSSADGQRLGHISKQGSSLLRFLLVEAAQVAARVDAEWRRRFLHLAMRRGRKIAKVAMARRVAVGLYWMWRKEWDYQQVVKFGSHVGQLELRHGVQ

SEQ ID NO: 92460 - protein, 390 aa, unidentified
MIYVGIDVAKDKHDCHILTSDGEVLCDNFSFLNSREGFNAFITLLFGYCKDISNIKIGLEATGHYSKNLLLFLYKANLFVVVFNPLSVSQSRRAISLRKTKSDKSDSRYLAEMLFSNMSCPYQEQTSDVSTLKSLTRARYRLVKEIQPLKNRYRRSLQILFPELTSFFPSFYSNTVFTLLKAMPSAKDIACCNILRLTNILSKSSRGRLKRDKAEALKLAATNSIGSYNFGDATELKFIIERIEFLKSQQIELENSIKSVMNNINSPITTIPGIGFTLGAIILSEIGDISRFSSPSKLLAFAGCEPSTYQSGKFTATNTPMVKHGSKYLRNALYLATTMAYLHSPSFHTYIDLKRSQGKHYYIAISHGMKKMSRVIYSILSSDKPFTEVI

SEQ ID NO: 92461 - protein, 385 aa, unidentified
MDEEANPTTKNGDKHMKATDKYVGLDVHQDTTVIAVADGGRVGEVRSYGTIPSDLQALGKVLGKLGAEGARLHVVYEAGPTGFVVFRRLKQLGIDCIVVAPSKTPQPKGVRLKTDRRDALQLARLHRAGELIGINVPDEVDESIRDLTRARADAVHDLTRAKQRLKAFLLRQGYRYPGAANWSEAHQRYLRKLTLPLPALRSVLEEQLLAIDQVTERVKRLDELIEVQVPQWRYYPAVQAVMCLRGFQLNAATVIVAELGDVRRFAHPKNVMAFLGLVPKEETTGNTRRLGSITKAGNAQARWCLIEAIQKALTPPKVSARLSLRQEGQPAVYKELAWKIQVRLHKRGWHLLHRGVMKAKVNVALARELAGFIWDLLRQVPAPEA

SEQ ID NO: 92462 - protein, 330 aa, unidentified
MYLGIDTHSRYSQVAVVDDDGNLQDEIRLPNDRLAELAEQYTGGEAAIEASGHYRSVYEMLDEHLDVTLVNPSKNRLIAEASVKTDRIDAKRLAHMLRADMLAESYVPSDEIRTLRDLVRTRKALVEERTAEKNRVRAVLKRTDNAYDSELFGPTGREFLAELSLSNADRTIVEAHLSVIDEYSDQIDRLEDKIEQKVLESSAAQRLLSIPGVGQSTAALIVAEIGEIDRFDRHEELVSYAGLDPQVHQSGETEVHGSISKEGSAPLRWALVQCAHVSVRYDDYLGNFYTRLKQRKNKQIAIVAAARKLLVSIFYMLKRKEPYDPPEVSA

SEQ ID NO: 92463 - protein, 389 aa, unidentified
MKPDGSKHSSFSVQNNLGGAKLLSERIVSALGSMQLERVVIGLEATSIYGDSLVYALREDGRLGRFQRKIHVLNPKQVRKFKEAYSDLPKNDWVDAFVIADHLRFGRINREVYMDDYRYKALQTLTRARFDVIQNLTREKQRFANYLFLKCSGMAQDKDIQNTSATTIAFMEHFETVDDLANADLEELTAFITETGRGKFADPDATAKAVRAAAKGSYRLPKTVNDTVNQAMAVSIASMRALKGQVKVLDKAIEQQFEIIPNTLTSIPGIGKVYSAGIIAEIGDIHRFDSQASVAKYAGLVWNRSQSGDFEAEHSRMIKSGNRYLRYYLLEAANSVRRCDSEFRRYYDLKFKEVNKYQHKRALALTARKLVRLVFRLLKDNRLYIPPEG

SEQ ID NO: 92464 - protein, 355 aa, unidentified
MDSKKYIGMDVHKESISIAVMNGAGKIGMECVIETKASTILQFIDGLRGDVHVTFEEGTSAAWLYDLLKPHVTKLVVCDPRKNASMREGNQSDKIDARRLAELLRLNHLNPVYHGEHGLRSLKELVRSYLTITKDLVRVMTRVKAIYRSWAIPCTGKQVYAPRHRAEWLGKIGEPGVRRRAEFYYQQLDALRTVRQEVRRELLAEAKKHQSWKQLCQIPSIGPIRAAVLLGILQTPHRFRTKRQLWTYSGFGIETHSSADHRRVDGQLKRVKKQSSIRGLNRNCNHDLKNLFKGAAIVASSKPGPFQEFYTALLTKGIRPEMARLTLARKIATIMLMMWKKGVCFDAQHLKPQTA

SEQ ID NO: 92465 - protein, 408 aa, unidentified
MDVFCGIDWAEGHHDVAIIDNTGKQLAKCRIDDDLDGYQLLLDLLAEHGDSAETPIPIAIETSRGLLVATLRTGTRQVFAVNPMAASRYRDRHGVSRKKSDPGDALVLANIIRTDMHMHRPLPADSDLAQAIGVLARAHQDAIWNRQQLANQLRSLLREYYPAAIEAWRDKAGALTRPDARKVLGAAPTPTQAAELPAWKLRLMLTNAGRKRGITEDAERLHTLFRQPAGRQPAAVEEAMGLQAKALLTQLNAACKAVDELAKAVERTFRTHPDAPIMLSFPGVGPGVGARLLAEIGDDRTQFATAGGLKAYAGAAPITRASGKRKYVGRRFVKNNRLNHAGYLWAFATLSHSPGANAHYRRRREAGDWHAQALRHLFNRMLGQLHHCLQNRVTFDASIAFPPPTAAG

SEQ ID NO: 92466 - protein, 347 aa, unidentified
MRFYTTQHRYSCGIDLHARSMYICILDQGGAVLVHRNVSTSPEAFLRVVAPYRDDLVVAVECIFTWYWLADLCAREGIPFVLGHALYMKAIHGGKAKNDKIDAHKIAVLLRGGMLPMAYVYPAEMRATRDLLRRRCHLMRKRAELLAHIQNTNSQYCLPPFSKKIAYKANRTGVAARFVDPSVRKSIEIDLALIARYDALLTDVELSITRTAKVHDVNAFYRLRSVPGIGKILALVILYEIHDIARFPTVQDFASYARLVKCSKASAGKRLGTSGAKIGNAHLKWAFSEASVLFLRQNPPAQRFVEQLASKYGKAKALSILAHKLGRAVYYLLKRQEAFDMNKFFRA

SEQ ID NO: 92467 - protein, 326 aa, unidentified
MPQAYLGIDISKAKFHVALQLEEKRHNQAKIKVFPNNLSGFEQLQQWLQQHRIEQVHACLEATSTYGEAVAEFLVEQGHRVSIVNPARIKGFAVSELSRSKTDKADAQLILRFLMALRPEPWQPPAPEVKQLQMLLRRLEALQQMIVQEQNRLETTTVTLRKSIQSHIDYLQRDVEQIKQQVKDHFDQHPGLKQQRDLLVSIPGIGEQTAAAILSEIMHWSVFESPRQLAAYAGLTPRERSSGSSVRGKSGLSRVGNRRLRKALYMPAMAARRCNPLIVPLCERLLEKGKAKKQVIGAVMRKLLHLVYGVLKSGRPFDPNFLATTP

SEQ ID NO: 92468 - protein, 402 aa, unidentified
MNAVGIDVSKGKSMVAIMRPFGEIVSAPFEIKHTASDIHSLVELINSVEGESRIVMEHTGRYYEVLAHQLSEANLFVSAINPKLIKDFDNDSLRKVKSDKADAVKIARYALDKWQNLKQYNVMDELRNQLKTMNRQFGFYMKHKTAMKNNLISILDQTYPGVNTYFDSPARSDGSQKWVDFASTYWHVDCVRKMSLNAFIDHYQNWCKRKKYNFSQSKAEEIYGKAKELVPVLPKDAITKLMIKQAVDQLNSASTTVESLRTLMNETASKLPEYPVVMAMKGVGTSLGPQLMAEIGDVSRFTHKGAITAFAGVDPGVNESGTYEQKSVPTSKRGSADLRKTLFQVMDVLIKMMPQDDPVYQFLDKKRSQGKPYYVYMTAGANKFIRIYYGRVKEYLASLPES

SEQ ID NO: 92469 - protein, 367 aa, unidentified
MGKIRLIEGGGQQGPNTPRRPDPGSQVWIAIDISRTKLVCCVRWGGAEQRQLSTPMGLEHVRALVEQYRDCCVHVAYEACGFGYEIAWWLQEHGVGVTVIAPSRVERVAGLSVKTDRLDAGKLARKLEKGELKGIYVPSRTLHEQRAFGRTYAQCLKERKRAQARIRALMQEHARLGPLPAQGWRAYSEWLRLQPLPDPLEVSVDALLALRALADQQARRLRAQLEGLAVSEPYAPLVQALREQSGVGTMSAIRLVVELGQIDRFPTTGSLPHYLGLTPSQYSSGDTDRRGHILKCGPGTLRALVLQCAWVAVRRGGDEELGKVFAGLAPRVGRKRAIVAVARRLAIKLRRRWLEVEQSAPVVAATA

SEQ ID NO: 92470 - protein, 444 aa, unidentified
MRVMYERCAGLDVHKKVITACRMWTKEDGQVAAETRTFSTMTAGLLQLLEWLQEWGCTHAAMESTGEYWKPVYNILEGQVEVVLVNARHVKNVPGRKTDVGDAEWLADLLRHGLLRGSFVPPRPQRELRDLTRQRSNLVRERAAVVNRLQKVLEQANIKLASVATDVMGASGRAILEALVDGETDPTAMAELARGRLREKKAELEQALVGRMSDHQRFLLASHLRHIDFLDEQIRQFDERIARHIEQMSSPSVTAGEASPAAPVPSEEKPEPALTWSQAVELLDTIPGIDRRLAEVLVAEMGIDMSRFPTAKHLASWGGVAPGNNESAGKQRSGKTPPGNPGLRKALVQAAHGAKRKKDSFLKAQYHRLAARRGKKRAIVAVAHSILVIAYHVLRRGEPYRELGGNYFDERKRESIVHQLVRRLEKLGYQVTLEMQPIPVGVVI

SEQ ID NO: 92471 - protein, 372 aa, unidentified
MNSIVYVGMDVHASNYTLSCYTLTSDECFATVQMEPDVKNILTYLKKVQRNLGTPCEFRCGYEAGALGFSLYYQLQKHGIPCTVLAPSTMPTFHRNEIKTDRRDAMKIARCLAFGAFRPVHIPTKEDAAVKDFIRMRDDHKIALKKIKQQIQAFCMRYDLHFTEGRSYWTQRHLAWLKALALDDLLREVLDEYLVTLHQLADKIERLDARIEELAQGERYAENVKKLSCLIGVRTHTALALVAETGDFRRFAKAEQYAAFLGLVPGERSSGDKQSRTGITKAGNTHLRKLLVEASQCYGRGKPGYKSRLLKERQQGNTSEVIAYADKANERLRRKFYRMVLRHNKKHNVAVTAVARELSCFIWGMMTGHTAI

SEQ ID NO: 92472 - protein, 348 aa, unidentified
MEIDTIGIDLGKTVFHLVGLSTAGEVVVRRKFSRPQLLRFMANLRVRLMGMEACGGSHFLGGRLREQGHEVRLMPAQYVKPYVKTNKNDYIDAEAIAEAVGRAKMRFVPIKSDDQLDMQSLHRVRDRWVGRRTSVINQMRGLLLERGITFRKGRRHAEATLPGILEDPDNGLSGALRMLLAQLQGELRQLQSQIDEADTLIGKAAGDHEACRRLMAIPGVGPVTATAVVASIGNGAEFRKGRSFAAWLGLVPEQRSTGGKQKLLGISKRGNSYLRKLLVHGARAVLQCRDKQSPGLRAWLSQLAARAHTNIVAVALANKMARIVWAVLSKGEAYRPPLRAGSVDAMAC

SEQ ID NO: 92473 - protein, 385 aa, unidentified
MTNPAQVSSFIPRDYDIFGGLDVDKKSMAVTFTDHGNMQKSFKLPYSASQLLSYTRKHFPGQRVAFVYEAGPTGFGLHDELTAASHPCLVVSPAMVPTAPGQRVKTNRLDSKKLSEGLRGGQLRSIHVPTESYRELRHLVQLRDTQVAQLTASKCRIKSLLLYEGIPFPAANGRWSGQVLRQLEALPCRAAVRFKLDRLIDALQFHFESAAVVQKEIRRFCQNDPELRQCISFLTSLPGIGSITATHALARLGDWRQISNVRQIAGFLGLVSSEHSTGDKDNRGQITRIGDSRLRNKLIQCAWVAISKDPELRAFYRRIYERQPKKVAARKAIVAVARKLTTRMYAVLKEQRPFVIRADSSVAPLTAEETVGPRVRLDAAQNEQP

SEQ ID NO: 92474 - protein, 412 aa, unidentified
MKDLLEISCGLDIHKEKIVACILTGPLGKPTHSEIREFTTLIPDMLALRDWIISENCHHIAMESTGIYWIPIYEILEDAFSGDITLLVVNARHMKNVPGKKTDMRDSEWISTLLRAGLLNASFIPEKRIREFRDLNRYRKSIIRDITSQKNRVEKFLQSSGFRLSSFISDIFGASGRNIILHLMEHRQIDKISLDSYLKTKTRKRIDEILMSVNGTLSEHQKSFLKILMCHYDSMKEHLIEIETHLQEDMLPFALQIEQLNTIYGISTTASCAIIAEIGTDMKPFKTAEHICSWAGLCPGNNESAGKRKSTSITKGNPYIKSMLCEIAWVIAGKRNTYLSAWYWRIKQKKGARKAIVALARKLLVIIYTMLKQGTNFDENCFEVRRKNCEQKQLSRYIRELEKHGYTVEAQV

SEQ ID NO: 92475 - protein, 343 aa, unidentified
MDYFAGLDVSVKETSVCIVDDAGKTVREARVASEPEALLQVLTNTIYRFKRVGLEAGPLSQWLYSVLAEAGLPVICVETRHMRAVLKAQINKTDRNDARGIAQMMRVGLYRPVHVKTLRSQKLRMLLTHRKLLQSKAIAIENDLRATLRNFGLKVGIVGTVKFEARIKELVENLPDLAVLVEPLLIVRRVVREQIGILHRRLLAIIRDDDVCRRLMTVPGVGPVVALTYRVTVDVPARFRNSKAVGAVFGLTPAKYQSGEIDRTGAISRCGDEMMRMMLYEAAQSMLVRSAKWSWLKAWAIKIARHRGMKKAIVALARRLAVIMHRIWVDGTEFRWTREVAAA

SEQ ID NO: 92476 - protein, 338 aa, unidentified
MNSNVVGLDLAKSIFHLYSLSAEGKPVKKKLKRSELLDYIANMPVSLIGMEACGGAHHWAREFMKLGHEVVLLNARFVKAFVVGNKNDFNDAEAIFAAVTRPNKRTVEVKNMEQQEMQMLHRLRQDLIDQRTALTNRIRGFLSELGIVMPQGVNQVRKQLSLVLANVENGLPPLSRELFAELYAGLRKLDDDIKAQDRRINRLCEQNALSRRFLDVPGIGPITATILASDIGDGKGYAKSRDYAASLGVVPRQHSNGDKQVLLGISKRGNRYLRTLLIHGARSVIRCCTDKTDPLSRWLQALVERRGFNKAAVALASKNARVLWAMARQDRAYEAAAA

SEQ ID NO: 92477 - protein, 435 aa, unidentified
MEEVTDEPLYRDRVCGIDIGKAGLVATIRVPSEKDPARRAAETRSFGTTKREVLALADWLRAWQVPAVVMEATSDYWKGPFYRLEAEGLECVLADAKQVKNLPGRPKRDPADSRWLAACFERGAVTSCFVATPEFRIIRLHTRYRRDLTEERTREKQRAEKLLESAAIKLSSVVTDLHGVTGRDIMDHLIAGEHNPKVLAQLARTAARRKISQLEEALEGAEFFTAEHAALLAAMLGRIDRLNADIDQLSQVIERLLAPYEEQLAQAESMPGWRRRAAQDTLAETGPDMTRFPTGAHLASWAGRAPLDHQSGKRAGRSKAKKGNRYLGAVTGETAVAAGRTQTREGARYRRLARRRGKAKACVAVGNTQLKVYHKLLSSPGMRYQDLGPDYYERPRDIRRQIAHHVGKLGDLGFEVTLCRTPGPDPDGTGQTQAA

SEQ ID NO: 92478 - protein, 390 aa, unidentified
MIYVGIDVAKDKHDCCILDAEGRKLYPVFTISNNKVGFDELFSRIEEVTSDKTEIKVGLEATGHYSNNLLASLVDKGFPTVVINPLHTNLYRKGLSLRKTKTDKVDASSIAMMLMTDRTLKPYSETSYHNEELKSLTRYRFDKVHERSKLKASLARLVNILFPELEKLVPTLHLNSVYTLLEEFPGADYIARCHLTHLKKLLETSSKGRYSRDKAIEIRNAAIDSIGTPMDAKSMELRHTIHLIWILSEEIEEIEASIKAIMDEMQSPIMTIPGISYRMGAMILAEVGDFERFDNADKILAYAGLSPSTYQSGQLDSSHSHMEKRGSRYLRYALFNATKFVCKWDESFGIYLGRKISEGKHYNVAISHAAKKLIRTIYRMELTGQAYSPS

SEQ ID NO: 92479 - protein, 320 aa, unidentified
MTKQAQNLKKIGVDVSKKKLDIELDEKHIFCIDNTEKAFIDFLEKLDAPLDSIHFVLEATGGYERKFASFLLSQSIAVSVVNPKRVRDYAKALGILAKTDKIDAGVIRQYANAANLILLKKKSKEDERLMSLCKRRKQLLKHQSTEKQYLETTTDEEVRHSIQAFLDILAEQIELLDRTIQALMEADAAYNVRKQLVVDVQGIGERTASTILVQLPELGQVSNKQISALAGIAPFCNDSGERKGKKMIWGGRKEVRTALYMPMLSAIQHNKVIKAFYDRLIAKGKIRKVAVIACMRKLLTILNAMLKNNTPWNPDYAKNI

SEQ ID NO: 92480 - protein, 401 aa, unidentified
MISVGIDVSKEKSMVCILKPYGEVVASPYEIAHTEREVSELLSLVGALTGDVRVVMEATGAYHLPLLTRFKQAGMFVSVINPLAMKKYASRAIRKGKTDKLDAVRIANYGLDNWFHLVDYTPSKEVYEELKMLGRQYAHYISIKIQSKLALTSLLDRTMPGIKKLISGNRSEEPTRNKLNDFIEEYWHYDNITKESETRFVSDYCIWTKKKGYQANEAKAKAIYAMARNGIPTLSSSAASTKMLTLEAVRVLNEVNRTLAAILTQLQALANVLPEYGVVRAMSGVGDVLAPRLIAEIGDVRRFYSGSALIAYTGIDSPPYESGNFIGTKRKISKRGSSLLRKTGYEVMKCLKTIKPTQDSAVYQFMLKKESEGKPKKVAKIAALNKFLRIYYARVSEVYRL

SEQ ID NO: 92481 - protein, 390 aa, unidentified
MEHPMQKLNDLSRSLTPLKPDGTLIAVIEMSLSSWLVAGIVPGVERQPSKKLEVDENALLKLLNRWRDEAQKAGYGIERIAVAFEAGRDGFWLARWLRVRDIEAHVIHASSVAVSREHRRAKTDRLDTELLKRSFLGWLRGERDHCKMVAIPTIKDEDAKRPNRERENLIGEQSRIVNRMKAALIRLGIRGFNPKLKKAAERLDGLRSPEGEPIPPNTLAELRRDMARRRLVSDQIRQIEDARLERLKQAPSDGPHAMVHLLARVIGVGVETADMLAQEVLSRSMRDRRAVARYSGLTGSPDESGRRRREKGLTRSGNARVRRGMIELAWRFLRFQKDSALAQWFRTRTENARGTRKTMIVALARKLLIALWRLVREGVVPDGVVLRPAS

SEQ ID NO: 92482 - protein, 521 aa, unidentified
MAEGWPCIKARLCPDGESALFSQAEPSLGLKFRLEEYDMRKRRMSTFERLNSDRMNRKQRRVLARRVAAADPGLSIVNPNAAGIDVGNASHFAAVPPDRDPTPVREFGFWTADLHKMAEWLVSCRIDTVAMQSTGVYWIPLYDILEQHGLRVVLVNARHTQNVPGRKTDVQECQWLMKLHTYGLLRDSFRLALNMEGVRTVWRVRGRHVEEAARSVQHMQKALTKMNVQLANVISDISGLTGQAIVGAILQGERDPYKLAELSDPHIQASKEEIARSLEGTWREDVLFELQQAVDGYQFAHRQIRQCDDKLRVYLASLESRVLEKPAVPAGTKPLQPKTRKARQQGANAPPMDLTEELVRICGADLTSIDGINIIAAMTIIAEVGPDPSKFPDEDHFTSWLGLTGSQNISGGKRVKGPQRKVKNRVADVLRMAATSLLNSDSYLGARYRQLRRNAKIPAVAVKAMARYLAVLVYRLLTKGQAWVDRGAELFEHQRRERDLMILQEKAKRHGLQLVPVAAAN

SEQ ID NO: 92483 - protein, 337 aa, unidentified
MSRIPVFVGLDYHQNVVQVCVVDPDGTVLGNRGCPNDGPQIVAYVERLGSVKRVAIEACTGAANLAEELVERAGWSVDLAHAGYVARMKQGPDKSDFADARMLADLERVGYLPRVWLAPEKIRSLRRMVRYRQQLMNERRNVKLRIRALLREHRLRCSLGRPWTKPWMHWLRETDELEENSRWIMNRHLTRLDALVEEVAATHERLRHLTSDDPVVAKLRTFCGVGEITAWMLRAEIGRFDRFGSGKQLARFCGLSPRNASSGTRQADAGLVKAGNPELRAILIETAHRLMRFDKRWMEFTARLLARGKKKSVIAAAVGNRWMRWLYHQMQDATVVA

SEQ ID NO: 92484 - protein, 431 aa, unidentified
MQRTIGLDISRDTAEVAVLRLGISEPQRGRFPARPAHIRAFAEKLGPQDQVVLESCTNALAFQRILCQHAGRVVVSNPLKTRVIAEAKVKTDKVDAEVLARLLAADFLPAVWVPDPLTDQLRHLVFHRQGLVTQRTQGKNRIHAVLHRNLIAPEMTDLFGKAGRAFLATVELPPSERQLLEADLRTIDFLNREIAAAEQSMAQAVQHDTEIQRLLSVPGISLTSAVGLRAAIGDVHRFKAPGNLVSYFGLNPSVYQSGLKAYTGHISRRGRSHARSVCVEVAHQLVKAPGPFHAFFQRLLRRKPYNVALTAAARKLVVLVWHMLTHEEDYRYAPPALTRDKRNRVQRLATGQLVGRGKQPTPDRSLDRQPARRAEVDYLRFLEDRFGPEGPAGVEHPNRVGSPPASPKQRPRELTRQRPQRIRKAPPKKGA

SEQ ID NO: 92485 - protein, 328 aa, unidentified
MFYLGIDVAKAKLDCCLLLDHDSMKRKSKSVANTKAGFATLLEWLIRKGISLPQLHAVMEGTGVYHEQAALALVDAGVTVSIINPAQIRDFGRGLGVRTKTDGVDSFVLARYGALLKPAAWQPPAPETCVLRALLARREAIAQDLQRELNRLEKADATETCALIRQSIDDSIDFLRKQLAKLQQDIDHHIDRHPDLRRDMELLTSIPAVGRQTGTNLLAIVRGHRFDSAEQLAAYLGLVPVERQSGSSVLGRARLSKAGPPRIRAVLYMAAVVATKYNPHVKAVYDRLVAKGKAKMAAIGAAMRKLVHLCFGVLKTRMYYQADYVKIN

SEQ ID NO: 92486 - protein, 366 aa, unidentified
MDAIYIGVDFHSRQQTICYLKTETGELVITELKHQDKERVRAFYQQFLGHVIVGLEASGYSPWFEAMLEELRCEVWLGDATEIRRRARWRYKDDRRDAELIRDLMVHHEFPRLHQPTPQSRDILRMLRYRQKLIKVRTMTKNSLQAIAMQAGLAKGRRLFTIAGQAEFKAVAMSPVLQYQRDHWLELLKPLNQELLETMKWCKAAAKGDAAIARLRTHPGIGLLTALCFLHTLQPVSRFRNQRKVVAYGGFDPMVRRSADLSIHLGISKAGSRMLRYLTVEAVHTAIRHDEDLKRFYKRVAARRGRPKAKVAAARKLLIRAYIMMRDEIDYAEFNRRAVAARLARNSQGTPCVPEVLIGQSASPGA

SEQ ID NO: 92487 - protein, 343 aa, unidentified
MRYIGVDLHTTQLTVCYMDELGKERIEMFKIDLVDKFISSLDATDKVAFEATGNSLFLYKKLFPVLGDSNITVVNTCKFKLISKSVKKTDKNDSRLLAEYLSKDMLPKARIKDEFNARIYGLIETRDNLIKIIVSFKNQIHNIFVQPGVKLTARRVANEKNLTKLLEEYEFDEATMFHLDLAKKAIIQNDNLACEIEAKLSELKDQMEQIDNLTSICGIGLKSAMGIKAVIGDISNFENEDKLVAYAGLCPRVHNSNETVSHGRITKMGNKLIRKLLVQCAWVSIRYNPIMKAQYEKLRKRKPAGVAIIAIARKLLVQIYFTLKYNWYFNDTANTQKEIKVFA

SEQ ID NO: 92488 - protein, 365 aa, unidentified
MSKEIKKRTSQKSESEYLKYSLGLDISKEKFDACISIIDKEQYVKVLASRSFTNNENGFNAFLEWKMPKCKLSIPEVYVMEATGIYYERLAWFLHRKELYLSVVLPNKSKKYMQSVGIKTKNDKIDAAGLSRMGAEQKLTAWNAPTQAIVELRDFTRQRESLQESRTIFNNQMSAYKCGEFVNPLIVENLENIIALLNEQIKENDKIIKQKIKSDSGMDEKVDKILGIKGVGIITVATVLAETNCFEMFKNHRQLVSYAGYDVIENQSGNHVGRTKISKKGNSHIRRILHMPALSVVSNGEPVFCNLYQRVFDRTKIKMKGYVAVQRELLCLIYALWKKNEKYERDYKNEHPEMRSRSSSFRIAS

SEQ ID NO: 92489 - protein, 335 aa, unidentified
MQIYGIDLAKEKFDVSFFDLTSKKVSNHPSHKVVKNNFKSIGRFLETLPSDAVLVAEHTGVYGDTLLKCCMDSNVKIAFVGGYVIHRYRATPDRAKTDVLDCALLRDFGERYPDKLKYKTFPEEALYELRQLARHREMLVEQRKQLITADKSEDCRPIRSLAVKRSMDRIKEMLDTEIGETEKEMLKVINGHDSIHHNYELVKSVDGVGLITAVELLVKTENFTKITTARQYSAYAGTAPYEKSSGKMDKGAHISKIGNRRSKTLLYICAESARLHNKEIKLYYERRTLIDKKPRHYVLNAIANKLLRIIFTLVEKGEYYDANFIRQDPRVVKYN

SEQ ID NO: 92490 - protein, 478 aa, unidentified
MSKQSSSTGSSTADNGRREDGPKVAGRKRKTTQGEPRVCQPAAAGCDIGAREIFVAAPPDLDENPVRKCGTFTWELNAMAEWMVSCGIKTVAMESTGVYWIPVYDVFEKHGLQVQLVNPRNMKNVPGKRTDFHECQWIQYLHSMGLLAGAFRPDADVRAVRTLMRHRSDLVDMASQHVQHLHKALTQMNVQFQHVISDITGLTGLAILDAIIAGERDPAVLAKLRDPHVKASEETIRQSLEGNWCPAQILVLTQRLSLYRGYQRQIEECDKSIENLLNTFTPMTDPAQKPMPADRKQKQRKRKKKTGDPNFNMREEAYKLFGVDLTQIPGLMTLVFPLFSEVGRDMSRWPSSAHFVSWLGLCPDNDISGGKVLWRGNRRVKNRAGTLFRLAAHSLHRDTTPMGAYLRRMKAKLGPSAATTATAHKIAVIFYTMLKNQVEYNATLWAERDHLREKRIEANLHKQAARRGYQLVPLEAIA

SEQ ID NO: 92491 - protein, 362 aa, unidentified
MFKIFRKNCCGLDVHKTWIYACIGITDVNGRTDYKEARFSTFSRGMRELADWLAKYECKEVCMESAGRYWFPVFNILEKTCWVTLAHPKYTKPQKGNKTDWKDAKWICDLFMCDMIKPSFIPPPDIRHLRDLVRYRFKLTNILTGEKNCAQNCLTISNLKLDDVFSDVFGKSASSITTYILDHPGEQFDIAPFVDGRCKTPIEEIQVAVDGSISPEHAIKLRTVLSHIDEIKAHKQTIEAEILRLAAPYETLLELIRTVPGLSAAPMTAIALISEIGVDMSVFPTAKNLSSWAGCCPHNDSSGGKRKSTRISRTGVYLKPILVQVANAVVKSNKYPGCKERYRRLKAHCGHKKPSLPSAVCS

SEQ ID NO: 92492 - protein, 346 aa, unidentified
MSTVPVFVGLDYSLTGVQVCVVDREGNMLGNQKVPDEVETIVQAASRFGPVHSAAIEACCGASDLAERIVQRHGWLIHLGHPGYVARIKQNPDKTDFSDAHLLADLERVGYLPRVWLAPKSLRELRTLARDRQALVRQCRSIRLRITALLRDHRQVSPFNRWTQKWYVWLKHGVELGEHSRWVLDRQLDRLAWMTQEIRQVEKRLHEAMKNDRLVQYLLTIKGVGYVTAWTLRTEIGRFDRFRTGRQLARFCGLSPCNRSSGLKMADAGLIRAANPELRRVLIEAAWSLIRHQPRWQKLAASLRERGKSGSVTCAAVANRFVRWLWHQVMKNIESPRLADVPVHAG

SEQ ID NO: 92493 - protein, 378 aa, unidentified
MHATGVARVVESPAGTGSVVAVDLAKNVLQVCVADGAWRMRESHRLTRAQFERFFLNREVSLVVMEACGSAHHWARWLNRLGIEVRLLHARYVRAYVRRNKTDAADAAALLQAARDSELKPVRVKSVEQQALQALHRTRSLWKADRTRRINTLRGFCREFGLVIAQGARHGVEQIARLVAEPHSALPALLRPSMALLIEEIRLLEARISQLERELAELVRTSAACTTLLTIPGVGLLTATAMLAATSGDVAHFKNARQFASWFGLTPKEDSSGQCRRLGRISKQGDTYLRMLLIHGARSVLRAAALAASQGKSVEGLRAWALSVQQRTNHNKAACALANKLARICYACLRDHAPYGQSARVTRKLERQTFTLPVATAA

SEQ ID NO: 92494 - protein, 362 aa, unidentified
MAKSTTIIAFDQHAATTVAAVLTPGTRTPELSQLTSDSPTILRFVERLRRNGPVQCCYEAGPCGFELQRALTAQRIPCDVIAPSLIPRRPGDRIKTDRRDAGQLAVLYRAGALTAIHIPTDQEEAARDLLRCREDIRADILRARHRLSHFLLRHGRRFTATKRAWTKRHAEWLQAQRWPLAALEQTHRAYVRAVDEAVARLHAVDLELRDLLSLEPLRARVERLRCFRGIDDLTALTIAAELGDPRRFPNAPSVMAFTGLIPSEHSSGAKQARGPITKTGNAHLRRVLVETAWQYRHHAFLGPALTKRQRGAPPHAIEIAWRAQRRLHRRYRAFAARGKPKQHIVTAVARELTGFLWAALTQ

SEQ ID NO: 92495 - protein, 321 aa, unidentified
MQNDTRIAVDLAKSVFQLAISDRPGKVSGRARLRRPQFLPFLAQQPPALVLMEACGSAHFWARRIEQLGHTVRLLPPHQVHPYVRRNKTDRTDTDAMLEAGRNEAIHPVPVKTVPQQVLTSLHRMRSAWIAERTARLNMIRGLLREFGLFIPVGAHQVVPAVWALLEDADVELPDALRPLFAQACHEVRDIEARIKAVERQLEALAQQLPVVSHLLTIPGIGLLTATALFAFVGDVRRFPSPRHLASWLGLTPREFSSGLKRHLGRISKRGDGYLRTLLIHGARSVILHARTKQPDHLRRWAHGLAQIQPHNNVWVPETLA

SEQ ID NO: 92496 - protein, 304 aa, unidentified
MSKTELVVAVRPSGESFTLAYDRAGLRQLVGRLGKLQPELVVVEATGGLQRQVVAALWSAGVTVAAVNPSWVRSYARGSGLLAKTDRIDARLLALFAQREQPAPRPPLDAETQALQELATRRDQLLEMRVAEQQRLQRASAQVRKEVRQHIAYLEGRITQIDDDIDKTVRRSEAWRRKREVLRSFPGVGKVFCTTVLAKLPELGTLSGKAAAALVGIAPFPDDSGGRVIRGGRYPVRSKLYMCALSAIRCNPVLKQFYERLCARGKLGKVALVAVMRRIIVILNAMLKSNTTWRQPCAAAVEKN

SEQ ID NO: 92497 - protein, 346 aa, unidentified
MTTAYLGLDLHANSCTLGVMDGNGTFQGHQKFPTSEAELIPRVSSIEADTKRLALEASTLSRWAARTLDPHVEEVLVCDPRENQLLSRNPHKSDEADAYNLCRLLRLGNLQEVYHASDDTRAVFKAAAQRYLSLRKQQVALKQKIKATFRRWGVLDVEGQRIYSEEGRKDYLGRLDRPEVTEQLRGLYRMLDLALETQAETKAQMKRLGSEYLEIEEFQEMPGVGPIGAHLFDAIIQTPHRFATKQKLWSYSGLGIRNQTSDGKPLGYEKLDSNGRTELKAISYRAWLSALRHSPNEVETFFEESVGRTGDRTHARLNTQRKILATLLSLWKNDSTYRPKRFLGSA

SEQ ID NO: 92498 - protein, 478 aa, unidentified
MKRYLPLACGLDIHRDTIEACIAVSNAYEEPEMIRQSFTTLRGDLIKLRTWLAQHGCKNVAMESTGVFWRPVYEVLEEVEGINLCLVNAQHMKNLPGRKTDVNDAQWIAELFMCGLLEYSFVPDKRIRDLRECTRYYRKLKQERCRALNRMGKLLQTHGFKLSSVLSSIDGVSAKRILERLCECGEVSVADVRTALARGVKKSAEEIAFAVNGRLPETARALLRHMLYALNTKDYELEYLNEIMESTRAPYNAQIELLSTIPGVDTLAATYIIAEIGVDMSRFSVTCDWKKPASRICAWAGLSPKNDTSAGIVKSRKIKKGNNYVKTILVQCAWAVTNCRNKRLSHWYWSHVGKLGEKTAIIAVARKLLVYIFHMLSNGCAYNNNLDCEAADRIKAKKLESAKKLLSKDVQNDASNEDPATQNTKNTKSLKNHSVVESEVNLSDLPSGIKSPMSSPCVTTTSHPHKKRGRTTKTTAIA

SEQ ID NO: 92499 - protein, 317 aa, unidentified
MTVIICGVDVASKKLDARIGREGPFETFDNDAAGVSALAAFCRQHGALLVVMEATGGYERQAFAPLWGLGLKAAIVNPRNVRDFAKAMGWLEKTDKIDAGAIAWYGEVRQVKPTLLANPTQQRLSALVIRLGQLTTLRTAQNQQRRGVTDASVLSTISAIPAVTARQIRALEIEIAQEIAADPLWKKLDATFRSLKGVADRTVARLMARLPEIGLLSGKAIAKLVGLAPIARDSGTSHGKRAIRGGREDVRAILFVVADIVRKFDPDFTRFRDRLLAAGKPKMVVRIALAHKLLVRLNAKARAGRAEFARQTAAPAA

SEQ ID NO: 92500 - protein, 332 aa, unidentified
MSIIGCDIHSRYQVIAMLETGTGEVITRRLEHEDGEAKGFYAGLAKPVLIGIEATGYTQWFERLVAELGHELWVGDPAEIRARAVRRQKTDTRDAEHLLDLLVSNRFPRVWVPTPEERDFRQLLKHRDKLVKMQTSVRNQLHFLAMSQGVCRKQKLWSARGRQELEGLGLGPWASLRRQELLELLDRLGPRIEELDGAVKAEAARRPEAVRLMGQKGVGPVTALAFVLTVGPVERFATSRKLVSYLGLNPSEASTGGHQRLGHISKQGNEMMRWLLVEAGHAAAQYDEELRRQYQRLKFRRGGKVAKVAIARRLAVRLYWRLRRDAAGSHVR

SEQ ID NO: 92501 - protein, 423 aa, unidentified
MSYRIAGIDVHKKMLAVVVSDVEVDGEYQFERVRFSSSPEHLRFLADWLMAQQVEEVVMESTAQYWKPVWGALERYWKPICQKREGAGPMSGTLHLAQAQSNRGRRGRKKDFPDAERLVKRLVADELVLSFVPDTEQRLWRAVTRRKYQLTRNHVRLQNQLEGLLEECHIKLSSLVSDLLGASARRMLKALAEGETNPATLAAMADKNLRATQAQLCDALGACTELKPIYRRLLKMFLEELQFIDQQISKLDQELASMLSRHHDAVVHLAEIPGLGVDSAQQIIAEVGAGAATFPSAKQLSSWVGACPGEEESAEVSKSHRSPKGNRHMRRILNQAANAAAKSKGTIFEIVYRRLVSRLGHNQTIGAIAHRLCRLIWIILHRGVRYEERGPSVNAKTRRHRTNRMIRELRNLGYRVEPLVNTV

SEQ ID NO: 92502 - protein, 363 aa, unidentified
MVSPILAQRTTLSEDFVLLGAIMDTVSLIGIDLGKHCFHLHAQDGSGRMVLRKKLTRSQMFALLGNFPSCTVVMEACAGAHWIARRLQTLGHEAKLISPHFVKPFRQGNKNDFADAQAICEAASRPSMRFVSPRNEAQQVVSALHRVREALVRNRTGTINQIHAFLLEFGISLPRGMAVMRRLPAVLEAQALPPRLVAVLERLQAHFKYLDEQIGQVEHELLTQLHEDERSERLLEIPGIGPITASVLMSELGDARQYGSARQFAASIGLVPRQYSTGGKPTLLGISKRGDKGLRRLLVQCARVIMLRIERRTDSLGVWVRSLLARRHSNVVACALANKLARIAWAILAKGTHYRSAPTALPA

SEQ ID NO: 92503 - protein, 440 aa, unidentified
MSKRRNRVCGADVHKELIVATIVGEDETEIQAKFGTVRSELERFKDWLVANNCEQVAFEATGVYWIPVYDALSSSIDTIVANPWQIKTIPNDKSDSKDSKRIASFCLNGQIKRSRIFTKDDRDLRTLTRARSGYIKTRTQFRNRIHKYLASSGIKLSSCIYDIFGKSGKHILNGLVEGKSINEILDSIPSGKIRKKRDLIKAALDKGLGETSRMLVEDTLDLLNNLETKIEATSHEIFNKLQSRSKDLAIVMSVPGIGFVAGSIILAEIGDYRDFQTPEQLAKWCGLNPGENESAGKKRSCGITKQGSKYLRTVLVEIAHVVARMGNSRLSRFFQKLKGRKNYNVAITALARKLICLIYHLLINQELYLEDDCVKRGPKPESCDHASSSSPKERLEDKVAAIVDAFYHLNARDRKDVLKDKSGALSVSEFVPRRPFDGGG

SEQ ID NO: 92504 - protein, 411 aa, unidentified
MDRVVERCCGLDVHKDTVVACVRTPGEGGKRRQEVRTFGTTTAQLLALRDWLVAERVSLVGMESTGVYWKCPFYVLEDAVECWLLNARHLRNVPGRKTDVGDAEWICQLVEHGLVRASFVPPKPIRELRNLTRYRKAQIEERGREAQRLDKVLQDAGVKLSSVATDIQGKSARAMLESLVAGERDPEVLAQLARGRMRAKVPQLEEALVGRFGAHHALLVRTILAKVDFLDQAIEELSAEIDRVIAPFGPEVDLLRTVTGIDRRAAEGIIAEIGVDMGRFPTSGHLASWAGMCPGNHESGGKRHGGRSRKGSKWLAALLAESASAAGHSKGTYLGAQHRRLTGRIGYTKANKAVGHSILVACWHILSQHVPYDDLGDDWFLKRRPEAHARRLARQIEALGFTVTITPSEAA

SEQ ID NO: 92505 - protein, 347 aa, unidentified
MLYARLDLSRQRLDVHLLDEDGRTVEVTAVRPDADALRSLVTRFDRYGQPVSAAIESMNGARFVHDQLELAGWDVEIADALKVKGLAPLAAKTDRIDARVLAELGRRDLVPAIWLPDPTNRAERERARFRLHLVRHRTALKNRIHAILIAFGHPVPVSDLFGVAGRDLLAGLAIPEPWATTLATSLRFVDELDTEIDACERELRTMGADHPYVELLRTAPGIAWVLGYTIAAEIGDIARFSSPKKLAGYTGLCPIVRQSGGRDDRGPLAKNGPKYLRWALIEAATHAARHPAYKERYERTKKRLGRQRGSKVARVDIARELATAIWHMLSKNEPFAPGRSPARPLVA

SEQ ID NO: 92506 - protein, 361 aa, unidentified
MKTTSATPTTPAAPILAIDLGRYKSVACLYDPATRAAEFRPLDTGRAAFDRLFARHPGARVVVEAGANAGWAADLAAAHGLAAKVANTNGEAWRFTHLKRKTDRDDALRLAELEALGQLPTVALPDPAARQRRALIAHRQALVGRRVAAQNRIRALFAGQGLPSPRGHRAWTEVGLAGLDLQAKPLAECGPAELWRGMLDLALADYRHLLGQIAAAEAALDRLAAADPATRLLETAPGVGPRTAEAVAAHLGDPRRFATGKQVSAYAGLVPRQYQSGASDRKGRITRRGPGVLRKLLVECAWAALRYNPWARATYARLTRGGATRRKPAIVALARRLLVRLWAMLRDGRPWRPDPAPAALP

SEQ ID NO: 92507 - protein, 411 aa, unidentified
MKLFCGIDWAEGHHDLAVIDAEGQLVAKKRITDDPAGFAELIEVLTAAGDSVEDPVPVAIETPRGLLVAALRATGRPVYAINPLAVARYRERLSVARSKSDHADAMTLAHILRVDAHLHRRLPADGELCQSIAVLARAHQDAIWARTKAHNELRSLLHDFYPTFLTTFTGRFALGISSPEARAVLAIAPTPGQAMKLTVSRISAALRRAGRSRGIDQAATDITTALRTPQLRQPLRVETAMGKHALALLAVLNTACANVDELGQAAAELFQTHPDHAIITSFPGLADSTGARVLAEIGDDRTRFADARALKAYAGSAPVTRASGRSISITHRRIKNDRLAAVGWIWAFAASTNSGAAGDHYRRRRDHGDRHAAATRHLFNKLLGQLYHCLHNGLSFDEAQAFPTALGAAAA

SEQ ID NO: 92508 - protein, 339 aa, unidentified
MEKWAGVDLHKRKMSVCWMLEDGRKEEAEYQLDKSGIKRFKSRLNAEVEVAIEATGNSGYISDEIRGKVKAVRLINPRQFKVISDSVKKTDRNDAETIVEYLSKGLIPEVRQMSSEQRQLRSLINTRDKLVKLRSALKNKIHGIMNEHGVITEREMFSSEVSLEKIKEMPIGETSRFEIGVIVEQIRSLGKTIKDIDEKIKEQGKNIPGQKNLTSITGIGELSSAIILNGIGDIKDFDDSKKLCAYAGMVPTVRDTSDNVHHGHITKRGNKILRTTVVQSTLIAIKYNDYLRKFYLRLKQKKGSGKAIIATSRKMLEIIYNTLKNDWVFKDFNNFEIVN

SEQ ID NO: 92509 - protein, 462 aa, unidentified
MRERHARKTSESSRQQLEGLPVLRRNVAGIDLGSEQHWVCAPTLDGNGRERASFGATTPELIGMAEWLKARPVEWVAMESTGVYWIAPHEVLEAQGLQLLLVDTGQLARVPGRDKKTDPTDCEWIQRLHSCGLLRGSFRPEEAVCMLRTLVRDKANLVAESGDWLRRMQKSLDQMNVRVHRAVSDIDGVTGMAILRAIVGGERDAQKLAKLRDQRCSKTEQEIAEQLRGHWREDHLFSLQQALKMYDAVQERIAAYEKEILQRLGEMERDEQRGQTAPPLPNANKAKAIKKRGQEPMRQALYRMSGVDATHIDAIGVETLEVVLSEYGPDLSRFPTEKQFVSHVTLAPHVPTSGGKPLRKRKRNSTSTRVAAALRMAALSLRHSQTALGAYYRKMAQRLGGDIAVFATARKLATLIYRLLRWGQPYVDEGAKAYEARYRQQRIGRLAATAKQLGYQLAPINA

SEQ ID NO: 92510 - protein, 408 aa, unidentified
MDILCKCCCGLDVHKKTITGCIITPQGKDIATFGTMTKDLRALLAWIKDHGCTHVAMESTGVYWIPVYNLLENEALTVIVANANHIKNVPGRKTDVSDAEWIADLLRHGLLKGSFIPPRGQRELRELTRYRRSLIAEHTREVNRIQKVLEGCNLKLSSVVSRITGTTASHILKALIQGEVDPEVLANFAKGRLVRKKRELMEALDGFIGPHQKKLLALQIDHLEYLEKQIKALDQEVAERLRPFEDDLARLDTIPGVGRRNAEDILAEIGPNMDPFPSAEHLSSWAGISPGNHQSAGKWKSGRTTKGNRYLRVTLCESAQAIGRMKPNFLSHQYHRIAARRGKKRAAIAVGHSILVICYHLLKRKTEYLELGANFYDERKEDSIVKHYLKRLESLGYTVSLKKVEACP

SEQ ID NO: 92511 - protein, 335 aa, unidentified
MHYLYYVGLDVSKETFDASLVAFEDANEMAHRKFANSRKGICSCLHWVEKRHGIRLDDVIFCAEDMGSYISEMAVCASDRTLNFNFSLISPLVIKYSMGIARGKTDRVDARRIAEYAITHYRKIALYLPAEKELCQLRTWLILRAHLAKQRVAKLVLLEKLDYKEKFADVSIQRSMLQEEIAYAETHMKTIEREMKELIAADSNICRNYKLLTSIKGVGPITAIVMLCSTLNFTKITDHRKFACYCGLAPFEHSSGTSVRGGCHTSCMANRDIKVQLNRSALIAIRCDPQLKAYYERKVAEGKHKFSVLNAVRAKIAARCFAVVRRGTPYVALQI

SEQ ID NO: 92512 - protein, 342 aa, unidentified
MPVTIGIDPHKSTHTAVAVERDEHQLARLTLPADRHQTDRLLAWAEPLDTDRVWAIESAAGLGRLLAQQLVAAGEHVIDVPPTLTARVRLLGSTKASKNDPHDALATAIAGLRHCGLRNVAPDGDTAILRLLADRHHDLTGLRTQAACRLHVMLRELSAGGAGLRISAAQGTEFLKRIDATDRVSIERKRLAAEHLADIRRLDIDIAAIKIRIANAVTASTTTLTELHGVGPLIAAIILGHVHDISRFRTRAQFASYNGTAPIEASSANKQRHRLNPRGNRCLNHAIHIIAVTQVAHDTPGRAYYLRRQAEGKTRKEALRALKRRVSDAVWRQLQIDTHTRR

SEQ ID NO: 92513 - protein, 425 aa, unidentified
MKSTQNEKISQIKFETLVVGIDIGKETHYARAFDYRGIELARLLKFSNTDQGFERLDQWMRDICKQQEKTEIIAGFEPTGHYWFVLGDHLKRQGHKLAIVNPFHVKRTKELDDNSPTKNDRKDPKTIAMLVKDGRYREVYIPDDIYQELREAVSERERLQEQLTSIYNRVVRWLDIRFPEFTTVFKDWRRNAALITLRSFPTPEKVVKIGVDAIVETWRKQMKRASLKRAEALVKAASRSVGRTSGKVASEASLQNLLAEYDLYCQQYDGLEQLMQELLMQVPNADKLLDIKGVGLITAATFVGEVGNISRFQDPRQIQKLAGLNLVENSSGKHKGKTTISRRGRKRLRHSLFFSMIAMLGKNQEFRLLHQRNLTRENNPLNKMQSIIALCGKLVRVFFAILTKGVDYSPEKMLRDMEQSIKVAA

SEQ ID NO: 92514 - protein, 345 aa, unidentified
MDHVAIDLGGRESQICVRQGDGTIVEEKRWPTRSLGKYLKGLARSRVVMETCAEAFGVADAAIEAGHEAVVVPATLVRALGVGSRGLKNDVRDARNLSEASCRMARLPSVHIPSQISRELKMSCGMRQALVGSRTKLINTVRGWLRGQALGALQSGAPESFPGRVRKLLAKQGRETPSCVERQLTAIGSLSEQVTAAEREMDELAKKDPVCRRLMTVPGVGPLTAIRYLSTIDKVERFPEAHAVQSYIGLTPGENSSSDRQRNTSITKAGSRQLRWTLVQAAWCAQRSRPSDPMVVWAKEIAQRRGKGIATVALARKIAGILYALWRGGTSYESGRASSPPPLSA

SEQ ID NO: 92515 - protein, 407 aa, unidentified
MICVGIDVSKRKSTVCFMAPGDKIIRRPFDVKHTKEELQPLVDEIRVQAKYDEIKVVMESTGVYHLSIAYFLQQNGIFVSVVNALKVANFNKAENFRHTKTDSIDSTNIARYGIAYWAKLPQFDLNGDKYFLLKRLCDAYLNFSEERSRILLQLQSQLEQTMPGIFDLFGGFDINSGKDKLLDFLERYCHIEDIIAKSEAEFVASYREWAEEKGYRSNESKAATIYAQAKNGIPSIPNNPIVRETIMWYVGLLRRADEALMASLTRMEDIAKDLPEYELVGEMGGVGRVTRVALIAQIGDVRRFKNKHSLICFAGLTPSIHESGKFRASQNHIVKKGPARLRKVLYQVMMSLVMHKIPKDDAVYRFIKKKEAEGKYKKVAKVAGMAKFLRIYYGRVMHLYRDLGLAA

SEQ ID NO: 92516 - protein, 408 aa, unidentified
MNPLYVGIDVSSKSNVVYFMLPDGSKHCNFSVANSHTGSSQLVKRILSAMTSCSLDTVLIGLEATSVYGDNLVYFLREDAALARFNSKIHVLNPKQVSKFKEAYNDLPKNDLIDSFVIADCLRFGRINKEVYLGDYHYKALQNLTRARYFAVSNLIKEKQRFMNILFKKYSTMTQEKVFSDTFSTTALAVYDEFESAEALADMDLHELTAFIMEKGKNRFPNPNAVAKAIQKAARSSYRLPKTVNDSVNQVLSISITSIKALEAQIKEFDKAIATQMELLPNVLISIPGIGPVFSAGIMAEIGDINRFHNQAQLAKYAGLAWKQHQSGDFEAQTTRLINSGNRFLKYYLCEAAFSLVRCDKEYSDFYHLKYKEVNRYQHKRALALTARKFVRLVFRLLKDNRLYTSAE

SEQ ID NO: 92517 - protein, 329 aa, unidentified
MKDLLIVGVDVSKLTLDFHCKPGDFALQTENKLAGFKLWLTGIRKLFGLELPIFVVMEHTGRYSARFEMFLRSKSIDFCKVPALQIKRSIGVARGKNDKVDAARIAEYAWLRRDLLVADVPVLQGIAELRNLLSLRSKLVKDRSGYLCRLKEMRATESCSKSDITIQIQERIIQELTRAIKKTEDQIRLIIRTNEVLKKTCTLLTSIKGVGLIVAAYMIANTNNFTRFANARKFNCYAGLAPFAHESGTSIKSRSRVSHLANKEVKTLLNLAAFAAIQFDPELKTYYQKRVAEGMKKMACLNIIRSKIVSRMYAVVKRETPYITLTLAA

SEQ ID NO: 92518 - protein, 392 aa, unidentified
MQSSEGWPSEDGSEPHAWETSQVKAITRYIGLDVHKSTISVAIAEEGRGGEVRHYGVVENRADILARLTDRLGRRGERLRFCYEAGPCGYGLHRLLSRLGHDCAVVAPSLIPKKPGDRVKTNRRDAAMLARLHRAGELTSVWVPDAAHEAMRDLVRARATAGRVLTKARQHLTGFLLRHGKGYAGARAWTLAHRRWLTTVRFDHPAQQIVMQDYIYAIEDAEKRIIRLVEQIEMLLEHWSMAPVVKAIQAMRGVAFVNAVTIVAEIGDFARFDNPRQLMAYVGLVPSEHSTGDSVKRGGITKAGNSQARRALIEGAWTYRMQARVSRKLHDRIDDLPQGIRDTAWKAQVRLCARYRRLIARGKTKVIVTTAIAREMIGFIWAIARQVGPQSA

SEQ ID NO: 92519 - protein, 373 aa, unidentified
MKKVRFLGLDVHAETIAVAMAEPDGEVRSLGIIPNREESIRRLVKKLGPAEQLQACYEAGPTGYVLYWQLTAVGVKCEVVAPTLVPVKAGDRVKTERRDAMKLARSYRAGDLTAVWVPNEEHEALRDLVRAREAAKQDQLRGRHRLSKFLLRHGRRAPAGIKVWTQKHEEWIKKQVHFEQPAQEYTLLDYLHEVEHMGDRIQQLEQAIAEAVKLAPPRMQEVVQSLQALRGIAQISAVTVVAELGEISRFEGARQLMGYSGVVASEHTSGKRIQRGPITKTGNAHLRRIAIEAAWAYRHRPSIGPRLRQRQEGLSEEVKEIAWKAQHRLHKRYRSLSAAGKEKQKVISAIGRELLGFIWAIGVQAERNSKRVA

SEQ ID NO: 92520 - protein, 367 aa, unidentified
MSIVRISATTSEKHTVWSGCDVAKATFDAGLWLPLPEGQSRDLRDIPVRTFPRTREGVREFLAWHDRLIAPTDLLDGSMWTFHAILEHTGRYSEELVVWLLAERPTIRWTLLNPQQAAHFARSLAPRAKTDKTDARALTLYGLERRPACDEPISPERAELRDLSRYRTALVEMRTAEKNRAGESNASPLVRQMQQKHIAQLDREIERIEAKMHQLIRQLPDLQCDAELIDSIYGVGFVTAIAVVRRFRRARQISAFVGLCPRTINSGSSVHPKTRMSKAGEPRLRALLYMCATSALVHNPHMKQVYDRLTAAGKTHMSALGAIMRKLLVLMRALVISGQRYQPDYQPCAIPQKNLRKTTTTTGEKCA

SEQ ID NO: 92521 - protein, 409 aa, unidentified
MRYYLGVDWADQTHAVWVVDESGAKITARAVAHTAEGLGEWGRELDEWRAQGIDLWAAIERPDGRVVDCLLDHGVVVYPVNPKALDRARDRFRQSGAKSDPFDARVLADFLRTDHAHLRALQPSSEAAQELKLLTEDCQRHIRQQTRLVNQLTATLKAYYPRALEVAEVTSALAREFLPAYPTPAAVTALTERQWQRWARAHGLSAARAGDLWAVLRQPHVPVPAHVVRAKARLMQALMEQLMPVVAAVAQYRKAIDDFFASMPAARWARTLPIGKHGITAPTLWARLGDAPGRWESFRHLQAHAGAVPVTKRSGKQQVVHFRFACDKALRHVVDQVAFLSLLSSAWARAYYDQQRARGHSHRQALRALGAKWLKIIFVMWQRQVPYDEQYHLATMTRQQLQRGQKQIA

SEQ ID NO: 92522 - protein, 464 aa, unidentified
MEVLNIGVDLGVTAKHHAEVINSEGIKICSSVTFPGTKEGFDMVSKHALEHVAKETKLRFICEPTSMSWFPLAVYAKRNGHEIMRVKAQKSHDLRKYYSRHTKSDKLDATALSMMPIVDREAIEEVYLPDKITNALDRRCRQREKIAKEIASIKTRIKSLYHWVMPGLTDCFEDPYGKRAKAFYKKYSNPFKVKHLGISRLHRVLEKAGRQQSSEGLAERVYKAAIRGCELYGHLGEYIDFDELQKEVDCELELLDSHERVQKKVDESINRLYKEAHPTKSIETIPGIGETLGPVFLGIIGNSERFSSQSKARGYSGMIPRQKDSGESSKKGLNITKDGPSRYRRALYLASDTGRQWDPHLAKVYYDQMVHKGNCHNQAVCAVSTHLIGRIIRVLKDKRPYELRNLEGTLITKKEAKTLIAREFTVPEDVRKRTRSRRTNKGYKRDQNRGIAKMQSSGSAQYPS

SEQ ID NO: 92523 - protein, 315 aa, unidentified
MEATPVYIGIDVSKAQLDVAERPSGERAVMPHTEDSITMLVERLRHRQPAGLVLEATGGLEVPLASALAVAGIPVAVVNPRQVRDFAKATGQLAKTDAIDAQTLARFAEAVRPAPRPLPDEAAQAFSALLTRRRQLIEMLVAEQNRMQRAPRPIQPQIQAHVTWLKQQLAALDEDLTHRIQSTPIWREQEDLLRSVPGIGPVVSRTLLAELPELGTLTHKQIAALVRVAPLNRDSGTLRGRRTTWGGRAVVRAALYMSTLVATKHNPVIKVFYQRPRVAGKAPKVALVACMRKLVTILNAIVTQRTPWRLAVPNT

SEQ ID NO: 92524 - protein, 484 aa, unidentified
MVYETVFTRKMLPENVKQKQCSMKLYLGGDVSKGYADWVILSEKKQTVLENFQLDDTYAGHCKLYSMLETYFDKHPELEMSAAVESTGGYENNWFSTLKSYQKVFNLKVARINPTGVNLNRRASMKRNVTDAISALSIAEYMINHPDNIVFDQDDKWKTLCRHWNFVEMQKAQRTQTINQLETILYCANPILMRYKKNNLPGWLLELIIKCPTADKLAKARPESLAKIPYLTLPRARDLVAEAKQNIASATDRNAELLVRQIALQIKAFDQNIKSQMQLIEKNMICPEIEILKSFKGIDTVSAIGLLLEIETIERFPTVKGFSCYFGLHPRFKQSGDKIIGIRMSKQGSKNMRKILFNITKGAITFNPLITEVYERKLSEGMPKMAAIGVCMHKILRIIYGMLKSKQPFNPLIDKQNYEKSKSMQQEKQFQESANTQRNRRYQEFDESAPISRKQTKKRKEHDLSQCEITSHSTGSACSSKTKL

SEQ ID NO: 92525 - protein, 343 aa, unidentified
MEAYSGKQFVGIDLHRRRTVIVRTTEGGEVLETVRIVNDVERLASVMARAGECPEVVLEATYGWYWAVDALQAGGASVHLAHPLGVKAFEYRRVKNDVRDASDLADLLRMGRLPEAWIAPPPTRELRELVRHRAKLVGLRSHCKAEIHAVLAKCGVQVLMSDLFGAAGTQLLDRLDLPSPYAARIASLRRLIDDLEFEIDLFAGMVRGRMAREPGYTAVQNIPGIGPTLAAVFVAEIGDITRFASAPKLTCWAGLTPKHHESDTHVHRGRITKQGSRLVRWAAIESVKNLPAGTVAGVLRERVADRRGRNVGSVAAARRQLEFVFYALRDGHVRALEHLPGVA

SEQ ID NO: 92526 - protein, 382 aa, unidentified
MSTHERETSEIQVTTIGLDIAKSVFQVHGVDERGRVVLRRRRARGKVLALFANLPRCVVGLEACGARRSAPTSGGRRWEPGAHPWARELIRLGHDARLMPPQYVKACVKTHKHDAADAEACCEAVPRPSLRLVAVKTESQQATLMLHRVRDQLIRQRAATIPGLGRGALRGHLAELGIVAAQRQAGLRELMTACGEVEDHRIPPGTEVLQLLVARIRELADTIAGLDRRLIALTRTDATCRSLTTVPGIGPVIATAFAATVPDARVFRSGRHLAAWLGLVPGQHRTAGKERRLGLSQRGDGDLRRQLIHGARALVRVSRGRTGKLCAPLRADLRWSAPGARRGIEGLRARRPFNVAVAAVANKLARIIWVILSRGEVYRAAA

SEQ ID NO: 92527 - protein, 344 aa, unidentified
MEYFVGLDVSLRSCALCILDGRGKVCMERELPCEVDEIVNCLNAFGHPIVRIGFEAGALSQYLFFGLKDKGFEIVCMEARQVSAALSAMRNKTDKTDAKGIAQILRTGWFSPVHMKSREAHGLRALLSTRKALLKKTMDLANEVRGLLKIFGVRLPRTVKHGSFDDLVRPMIEMDEVLAHAVIPLLDARAVLFQHYLELDRRVKHAASQDEVCMRMMTVPGVGPIAALTFKAAVDDPNRFKRSRTVAAHFGLTPRRYQSGEHDNPGRISKAGDQNVRATLYAAANALLMRTMAGSQIKSWGMRLMRTKGRRRAVVAVARKLAVLLHRMWIDGTEFRQEKVGGQA

SEQ ID NO: 92528 - protein, 339 aa, unidentified
MPLYVGLDLHSNNNFMAVMNKQGKRVDHKKLPNDPELILQALRSHRAKIGGVVVESTYNWYWLVDALMEAGYPVHLANPSAIQQYSGLKHADDQHDAFWLAEMLRLGILPEGFIYPREERPIRDLLRKRRHLVKLRTSLIISLQNIISRNCGVQFKVSEVKRLKEDRVSPLLESNEDLALAGKASKETIDYLTRQIRRIEATIVKRIELRESYRYLLTLWGVGKILALTIMLETGPISRFAQVGNYVSYCRKVPSQWTSNEKAKGKGNKKNGNKYLAWAFSEAAEFARRHHAEARAYYNRKMQKTNFMVAHSALAHKLARAAYYIMKDQVPFMPEKLFG

SEQ ID NO: 92529 - protein, 394 aa, unidentified
MLYLGIDIAKNNHVASLISENGKTLFKAFSFSNTSDGGEALLSKLNSFSNNISDFIVGMEATGHYWLALYSFLFEKGFKIHVINPIQTDGWRKGTEIRKRKTDTIDSLLIADLIRYGSFVETSLSNEDMFSLRNLTRFHSYLVQSISDLKRKVISVLDQVFPEYQSIFSNVFGKTSKELLLQFSSPIDFEDISTNSLAELINKLGRKRSGDIKANLIKSKAENSFGVTFSKDSFTFQLKALIQQMNFIESQVKDTENEINDLMSLIKSPITTIPGIGKVNGATILGEIGDINKFDSPKKLVAYAGIYAVVSSSGEFQATHTVMSKRGSPYLRKALFQAALVASFNDPVLNAYYLKKRGESKHHLTCVGAVSRKMCNIIYAVLKNQTPYEVRLNE

SEQ ID NO: 92530 - protein, 347 aa, unidentified
MEYFAGLDVSLEETAICVVDDTGLIVREARIASEPEALVAFFRASGMAMKRVGLEACSLTAWLHQALIEAGIPAICIETRQAKAAMGAMPNKTDRNDARGIAQIMRTGWYRAVHVKDPCCRSWRALLAARRMVLNKRRDLENGIRALLREVGLKVGTPSRRNFAARVIELVADDPVLAALTRSLLSVIAVMTQEIDRLTKRVLDEVRIEPTCRRLMTVQGVGPFTALAFRATIDRPDRFRRSRDVGAHLGLTPRRYQSGETDVQGRISRCGDELARTALYEAAHSRLIRSTKWSALRAWGMNVAKRRGMARARVAVARKLAIILHRIWTDGTEFRWTKQAAASVPAA

SEQ ID NO: 92531 - protein, 445 aa, unidentified
MGCRARRCWREHLIIRSLEVSQALRTSPQAGGEGPKLLFVGDDWAEDHHDVELQDETGRRLAKAKLPEGIAGVTRLHAIIGEHLSEDDDATQVVVGIETDRGPWVQALIAVGYQVYAINPLQVARYRERRSVSGGKSDTADAHTLADMVRADRHQLRPVAGDSDQSEAVKVVTRAHKTLIWEQTRHMLRLRSALREYFPAALAAFADLTAPEALELLAKAPEPASAARVPLTRILAAVKRARRHHAAVKAEAIRDALRADHLGQPPVVTTAYAAMVRAQVAILTTLNTEIKALQEQVRTHFGRHPDADIYVSQPGLSAVLGARVLAEFGGDKTRYASAKARKNYTGTSPITRQSGKRKVVLARHVHNNRLIDAVGLQALTAIRASPGARRYYDQLLARGVGHRAALRQLGNRLVGVLHGCLKNKTIYDEETAWPNLTERPEHAAA

SEQ ID NO: 92532 - protein, 381 aa, unidentified
METSPAPAAPATDMEPATLFVALELSKAKWLVGLHSPTADKISRHTITGGDAPALLRLIEAARRRAEASLGGEVQIVACYEAGYDGFWLHRLLLAHGIANQVVDPASLLVNRRARRRKTDRIDLAGLLRTLMAWHRGEPQVCSMVRVPSLEEEDQRRRGRERERLVKERVQHLGRIKGLLMTQGIRDFQPARRGWQERLEALRTGHGQPLPGCLKAEIARECRRLALVDEMLEELEREREATSDGKAPQQAALLGKLRGIGPISAHVLAEEVFHRDFANRRQVAAYLGLDPSPWQSGQRDHEQGISKAGNRRGRRVAIELAWFWLQHQPDSGLSRWFKERVGTAKGRVRRIMVVALARKLIVALWRYLASGTVPEGASMRA

SEQ ID NO: 92533 - protein, 399 aa, unidentified
MLNDTSTPVTASLSNDLSGATEIKNHILDLNHTYHFERIVIGMEATSIYSFHPAMFFHEDSQLKELHVEIMVEQPNKIKKYREAFEENKNDTIDAFYIADYFRIERFSPSFLKAEKYMALQHLTRTRLQIIEQLTRTKQHFIENIYYKCNTLTYQFKKEELSTNLWSSTMMTLMTDEMTLDELANMPLQELADWLQQMGKGHFKDSEKLAQTIQAAIRGSYRLSKLQQDSVNVILGLLAREIRNLEKMIKEIDKAIEDMVETIPEYQCLTSIPGVGKVYAAGIIAEIGQIKRFKDHPQVAKFAGLNWREKQSGNSNSQHTSLVNRGNRYLRYYLVEAANSVRRYDDEYKDFYKKKYHEVPKHQHKRAIVLTARKFVRLVVVLLRNHQLYTPPRRLREDN

SEQ ID NO: 92534 - protein, 370 aa, unidentified
MDANTYIGLDISKNSTTATAVDQQGHRLSQAKLGPGDAELVRFLDELPGEKHVVLEACSVWEHVYDAALSTGAEVILAHPLKTKLISKATLKTDRVDSEKLALLARLDAVPRAYAPTPEQRALRRICRERVFYLKKHRAVANHTYAVLLQKGIPFTQRILSMKTRRDELRVHGVPEVNRGIDALAKLEEITRPLDRAIHEAFLGSKEAQLVATVPGVGEVTALTLVAFLSPIDRFESLDAVVKYCGLCPSTHQSGERNYSGPLVWDCNPILKWLLVESQWQTRRHERNGDVAKVGRRVARRGAANDGAVAAARKLLRICAAVLRRGTPYQPQAPGSSSRPELPAEPQGCRPLECAGRRPRSSRPPLSRCA

SEQ ID NO: 92535 - protein, 353 aa, unidentified
MDHFIGLDGHKNSCTFVVLDRKGRRKRQKVVATKTEALVEFVSSVSGRRHLCLEEGAQSQWFFEIFSAHVDDLVVVHGRRNPGNKSDGEDAFNLANRMRIGDLGPRIFKSPTSFVALKELMRSYEMLNQDLARVKNRIKHLYRARGVCFAPQGCPFCKDSTAPRLASCAKPGFHQALARLRAQQESLAPLKAAAKKDMITEAHRYPITRILETAPGIGPVRASELLAIVLTPHRFRTSRQFWCYCGLGIVQRSSSDWVPQPNGKWIRAPVLQSRGLNRNFNRTAKAIFKGAAMSVITCMKEDPLHGDYQRLLEKGTKPNLARLTIARKIAALVLAMWKKQEGYAPEKYRVNTK

SEQ ID NO: 92536 - protein, 408 aa, unidentified
MAVEVQTRFVGLDVHRRYATVAAVDSQQQVVLTVRRVEFEDFDVWIRKHLRKTDVVTLEATSNAWHLYDKLKPLVASVTVANPMQVALIAKTLVKTDPRDALALARLLAAGILPCVWVPPAEVRELRALGSHRSRLIKTRTQARNRLRAVLFAHNLFPPEGEAFGPANRGWWEGLDLPASEKLRVRHDLHILDGLESLIKEVEAELVRQSSLEPWAEQAAFLVQLPGIGVHNAMLLLGAIGDIRRFDAAPKLVGYAGLGARVHSSGEQNYGGRITKQGRRDIRSTMIEAAWVAVGSHPYWKELFERLAFRIGKPKAIVAIARKMLLVVWHVLTKHVADREAVAEKVAAKFLEWSWKLGRANRAGLESGAFIRRELRRLQLGDNVRVISRGKRTFAIPPPSEEAERIAG

SEQ ID NO: 92537 - protein, 341 aa, unidentified
MQITTIGLDIAKNVFQVHGIDAAEKVVVRKQLRRGQVMKFFAALPPCLVGMEACATAHYWARELRKLGHQVRLMPAKDVKAYVKRSKNDAADAEAICEAVRRPTMRFVEVKSAAQQGRLMQHRTRDLLLRQRTQVINALRAHMAELGIVAAQGREGLKSLLTIIADEKDERLPVDARASLIVLAAQLQALQTMIGSIEKRIIVQHRASEESKRVATVPGIGTLGASAITATVTDASAFRSGRDFAAWIGLVPRQDSTGGKPKLGPISKQGDRYLRRILVVGAHSVLRRAKQNPEKHPWLMQLLARRPFKVVAIALANKMARVAWALLARGGIYQAPRLAAA

SEQ ID NO: 92538 - protein, 311 aa, unidentified
MAMRSELEVLGIDVAKDWLDIFNGETVVRVDNNAKAIRAFLKSLTHSISIAVEATNVYHELIVRLALAASHRVYLVDAYRVSRYREAVGLRVKTDSVDARLLFRYLNAEMTHLRPYQPPPKAVKRLMTLLRVRAKLTHSKTALKQSLAGVGELAQTSKALLTHIDQAIKLIDNKLINCISHSGYFNDYRRCQTIKGIGPINAAALVAFYHRGEFRKADAFVSFMGLDVRVRESGRFKGQRKLTKKGNPEIRRLLFNAARAGARTEQWKPYYDSLRERGLTTTAAAVAIARKMAKLAFALMRDQTEYQTKMA

SEQ ID NO: 92539 - protein, 343 aa, unidentified
MGEIITIGLDLAKHVFQVHGFDEHGNVVVRKPLRRGAVVKFFAELVPCRVGIEACSSAHYWARELTALGHTVKLMPPAYVKPYVKRGKNDAADAEAICEAVMRPTMRFVPVKSAEQQANAMIYKVRELLVRQRTQLINALRSHLAEMGIVAAKGVGKVDDLVAIVRDENDSRLPPPARQALEELVRQIAALDARIDPLQEGIISQVGSSEAGRRLMSIPGVGPIIAGALLAMVPDPGGFRSARHFATWLGFAPRQKSSGGKQRLGSISKQGNRYLRSLLILGAANILRRRGKASTSPWLAALRGRRPFKVVAVALAHKIARIVWALMVKGGSYRAAAPAAAQG

SEQ ID NO: 92540 - protein, 362 aa, unidentified
MDVVAAVPHYFLKPKSNLMKKYRFFVGIDVSAKTLDVVYGSNLHKTKHVVFDNNAKGIIALIDLVSKQHPKPEQILICCEHTGCYMDKLAYALQPTGITLWAVSPLLMSNYAIELNRFKTDKADARKIFQYALMHQQLVVPYQRPADDVLFIRELFLLRKQLIQDRKQWQCRSHVASHKATPNAYEFIVAQQMITFCTHLIKDLEKQIQAFIRSNKQIQSIYTILTSIPGVGPVIAQHLLAITHCFRRFANYKKLAAFIGTAPYPKDSGTTLKKKARTSKQAYRPLKADLHQGILSVTKPGRLFHQYYQHMQQMKQPKLQILNNIKNMLLKIIFTLVNNQALFDEQIFLKNKKSFQKCLVVT

SEQ ID NO: 92541 - protein, 357 aa, unidentified
MGEGSWVGLDVHARSVLAGVLDAGSGELRTLGVPAVSEQTVAWLKTLPQPVRVAYEAGPTGYGLARACAEAGIACTVAAPSKIPRAPGDRVKTDRRDAERLARLLRLGELVSVRVPDPGEEAARDLVRAREDARGDLMRARHRLSKLLLRHGLVYEGSAWTLAHDTWLRRQRFASGPLALTFDESYSAVVQAKARRDSLDRAIAELAGEAPFADVVGRLVCLRGVSTLTALGLTVELGDWERFQPHSLGPFLGLTPSEDSTGGRRRLGGITKTGNTHARRLLVEAAWHQRRPLRTSAALERRRQGQPAAVRARAEKSARRLHARWHALESRGKRRTIVAVAVARELAGHCWALATMK

SEQ ID NO: 92542 - protein, 339 aa, unidentified
MRREEFECIGVDVSKKTLDVALFHGKVDWSEGHIKVDNNSSGYKELKRWLRLKNAKKKQLRICMEATGLYTHDFRSWLEQEGIIYYVVDPKRMHNFAPPQSIKGIRQTKTDKADAFRIAIYCSLFHDSMEPSRLPSAAYFKLKRLLAERRQYVKQSVLYKQQLHDISVYDSAGSVARKKDEVKILMDNVKQTDAEMMAVMATDPTIKKNYELLTSIVGVGIVVAVTTIVLTENFTTFTNPRKYASYIAIAPFPHESGTSVRGATRVSRQGFRQAKADLSISVLTTITRDPDIREYWQRKKAEGKHAGCILNAIKFKIVLRMFAVVKRGKPYVNTKGYKG

SEQ ID NO: 92543 - protein, 343 aa, unidentified
MSRKLYIGADVSAATIDVAGQCDTQRQVVGQFANSSEGFAEMMTQLASVLAQPATEIYLILEPTGGYELALVAFGHSQGWQVCLPNPKQVRDWAKGDGRRAKTDGQDAQTLAAFGAAKQPKPQADLAPEVQELADLLRRQEDLEQLLRSERNRLGSYQTHPQPSQRVLDSLQRTISAVQAELDDLNQQIEAVVTSQPTLKADRQRLRTVPGIGAKNVLPILVHLYRWQARAGQSADAKGLVAFTGVDPQPFQSGRSVRKRSTISRQGDHRIRQLLYMGALGGLRRKGHNPLRNFYSGLVRRGKAKVLALVAASRKILVWAWAVFTQRVDFDPTRFPVIEPTPA

SEQ ID NO: 92544 - protein, 342 aa, unidentified
MSKVTVFVGLDYHKGKVQVCALDQSGKVLINRPCADDAAELARLVAGFGDHVRGAIEACTGSADLADELIERHGWDLDLAHPGYVARMKQSPDKSDYSDARMLADLVRVGYLPRVWLAPEDVRQLRVTVRLRQQLINQRRATKLRITALLRDARVAEPTGARRWGPGWLGWLRIAEGLGPETRFAVDYHLADLERLDREIVAIEARLVKITAEDPVVDRLVKMRGVGMVTAWALRAEIGRFDRFRTGKQLARYCGLTPRNASSGQRQADAGLIKAGSALLRATLIEAAHRLIRFDPRWAALGAKLRGAGKPGSVVAAAVANRWIRWLFHQVEGGSPTLRAAG

SEQ ID NO: 92545 - protein, 392 aa, unidentified
MNRIVYIGMDVHTSNYTLCSIDPGYGVKKDNYFAEVQFTNNFVTNVVNYVSNLKKKLKDCEFVCGYEAGCLGYSTYKDLTKVGIKCVLMAPSTMAVQKGGKKVKNDRRDARVIAQCLAYQTYKEVYVLSEHDEAVRGYLRMRDSHNKALKRIKQQIIAFCTGHGLFSPTKSNWTVAHLKWLKDLKFNDPVEQEILNEYLSSLTFLSDKIKAMDVRIEELASEKQYCENVKKLRCIKGIETNVALTLLAEIGDFNRFSKPTDFAAYLGLIPGEQSSGDKVRGTGITKAGNSTLRRKLTESAKGYWRGRIGIKSATFKKLEKELPKEVTEYALKANTRLQRKFFNMTHVKGKNMNVAASACAREMACFVWGLITNHYEKAPAVPKTDEELLDLN

SEQ ID NO: 92546 - protein, 325 aa, unidentified
MAIVVGVDIAKKAFDIAVLQSNGKYRTKGNLSNDQSGFSVFGQWLQKHAEPGAWVVMEATNIYHEALGDYLLAQGYRVCVMNPARIASYAQSQLQRVKTDKVDAKLIALYGTRHVEDLQLWQPDPVSVRQLRALVRRYEELKELFQMEINRLETAKSDVVKESILSVSAHLEQQIEQTLEAIRQHIDDDPDLRGKRDLLTSIEGISDKTAALLLAELGSISRFESARAVVAFAGLNPRLRESGQHKGQVRISKIGSRLLRAGLFMPAICAMSHNQAIRALRLRLEEKGKAGKQIICAAMRKLLQIAYGVLKSGQPYNVELALARG

SEQ ID NO: 92547 - protein, 355 aa, unidentified
MDGKKYIGMDVHQASISIAVRDATGKVVVESIIETKAATILGFIRGIQGNLWITFEEGTSAAWLYDLLKPHVTKVIVCNPRKNALLNAGNKNDRVDARKLSDLLRAGLVTPVYHGESGVRTLRELGRSYLTINKDLTRVMNRLKALYRSWAIPCAGEKVYSPRHRNAWLEKLSEPGVRRRAEQYYQQLDGLVQIRREARRELLTESQKHPATQLLRQVPRLGPIRVALLIALIQTPHRFRTKRQLWAYCGLALQTRASGEYRFSGGELQHSKKLPALRGLNVNHNHDLKNLFKSAATHVSTSTEPLGDFYRSLLAKGMKPTMARLTLARKMAAIVLTIWKKGARFDPGELKRQAA

SEQ ID NO: 92548 - protein, 346 aa, unidentified
MKYYVLDVSMKETSICVVDETRRVVKEGRVGSEPETIAGWLAQTGLKFERVGLEAGSLAPALHDGLAAAGLPAVCLDARHLKAATSAMPVKTDRIDARNIAWALQSGWYRVVHVKSQATHKLRALLRSREMLVRSRVMLDNHLRGILKAFGLKVGKVDPGRLDQRVRDLIEGDEVLERVVGAVLSVRQEVVERLEDLHRMVLAAVKADPVCRLLISVPGVGPVTALAFRTAVEDPTRFAKSWLVGAYFGLTPRKYASGETDRNGGISRCGDRLVRSLLCDAANVLLTRVQRWSWLKRWGVEVARRRGKVRAQVAVARRLAVIMHRMWIDGTPFRWTKETADEAASA

SEQ ID NO: 92549 - protein, 378 aa, unidentified
MSKIRFVGLDVHAETIAVAVAEAGGGEVRSLGTIPNRPESVRKMIGKLGPVENLKCCYEAGPTGYVLYWQLTQLGATCEVIAPSLVPTKAGDRVKTDRRDAEKLARCYRAAELTAVWVPDEAHEALRDLVRAREAAKQDQLRHRHQLGKFLLRHGKRPTEAGPVWSAKYLNWIKVHVRFEQAALEATLADYLHEVEHAAERIIRLEQCIEEAVAQATPEVRAVMEALQSLRGVAHITAATVVAELGSLARFENPRQRMGYTGLVPREHSSGNRTQRGSITKTGNAHLRRVLVEAAWAYRHRPAVNGRLRRRQKALTLSEETKRIAWKAQQRLHKRYTAMMARGKHKNQVMTALARELLGFLWAIAVQTEAQFKVKKAA

SEQ ID NO: 92550 - protein, 336 aa, unidentified
MNKGQSGSRQQETEVFCGIEVSQRELLVDCGGRQRGFANTAAGRRSLLQWLKNGGGVVRACLEATGQYGLDAALELDAAGVQLMVVNPRAVRHFAQALLRRSKTDPLDAAVLREFAARMEFRRWRRPSREELALVGMARRMQSLAEMITAEKNRLHAACLSTALPKIVRQQIERSIATMERSQKKLLEAAQQEIGADAGLARKYAQLQSVRGLGARSALALLAELLLLGEQCGARQWVAHAGLDPREYRSGQSVQKQVRISRAGNGRLRRALYMPALVAAHHDPHLGEFYRRLLSRGKSKMTALVAVMRKMLHAIYGMFRHGQDYEGSKLFASAAA

SEQ ID NO: 92551 - protein, 582 aa, unidentified
MAVLASARESRSTAGREGRVKIGASCPSTNLVSGVLDVVIGGRRWLATTGDVTPLGRIIVLKPPRRRSSYFCPSLSLNDKETTVIVPPKDVVRNKLCGKARKKALARAQGRKSKKSAAPGNKPRGRVGKSHRGGQAIPTTPSLNQLEQVNRNAAGIDLAATVHYVAVPPGRDAETDVRCFETFTADLEAIADWLTSCGVDTVAMESTGVYWIPLYELLEQRGFEVLLINPADLKKFRRKTDVSDCQWLQTLHTFGLLRGSFRPEEKIVTLRAYLRHRDTLVKCATDEVRRMQKALEQMNVKLTQVISDITGMTGMAIIRAILAGERDPQRLAALRHVGCKNDVKTIALALEGNWRQEHLFALRQALELYEVYLEKLKDVDGQIGAYLQTFEDRSEGQQLQPSRRKRALDPCLNSRDLMCKMTGIDLTEVDGIAGNAAVQIVAEIGMDMSKWDTDKHFVSWLCLCPELHLSGGRRKSTKSHTQPSKNRAAAIFRMCAQSLLNANCALGAFGRRMRAKKGGAHAVTAMARKLAIIVYHMLKERRPYKDQGATYYEDKYRERVVANLRRRAKELGLELVPLALSE

SEQ ID NO: 92552 - protein, 317 aa, unidentified
MVRSAVVGIDVSKAFLDVAWWAADHAARYANSPQGLAELTRALTQQAPELVVLEATGGYEIAAVDALQAAKIAVAVVNPRQVRDFARASGKLAKTDALDAKVLAWFGATMRPAPLPPIDPSHSAIANLVARRRQVIEMLIAERNRLEHAGAAVRRWIEEHILTLKTQLAQLDAAVALAVEASPSLHRRNEILTSVIGIGRLTAAVLIAELPELGSIGNKQVAALVGVAPFNQDSGNRRGERHIAGGRYSVRCALYMATLVAVRFNPALQSFYRRLRDAGKPAKVALVAAMRKLIIILNALVRDDILWQPNHALQDGC

SEQ ID NO: 92553 - protein, 350 aa, unidentified
MVVVGADVHKHTHTFVAVDEVGRKLGEKTVKALTSGHAEAVMWARERFGAQVVWAIEDCRHLSARLERDLLTAGQQVVRVPPKLMAQARASARTRGKSDPIDALAVARGFLRKPDLPVASHDKVSRELKLLVDRREVLVAQRTAMINRLRWRVHELDPERAPGPASLDRGKHRHLLGAWLATVPGLVAELARDELADITRLTEAINALAKRIGSRVRTVTPALLAMPGCADLSAAKLVGETAGVTRFKSEAAFARHAGVAPVPVWSGNTAGRVRMTRSGNRQLNAALHRIAITQIRLEGLGQTYYRHRLAAGDSNPEALRCLKRRLARIVFGHLHTDHQHRTQPCQTAAA

SEQ ID NO: 92554 - protein, 349 aa, unidentified
MTASHYIGFDVHKKTISFCVKTAAGEIVEEGSTPAERGALRRWAAARPQAWRGAMEATLFSGWIYDTLKPYGEQLEMAHPAKMKAISAGKKKSDTIDARTIADLMRCNLLPTCYVAPPRIRELRRLLRYRSLVVSEAVRMKNKMAGLLMETGAIYVKEKLHRKKYFASLLEELEEVPESVIDLLRLSRGALEMFESTQKRLVRELLDDPELAERIERLMTIPAVGEITALTWALEVGDPQRFRSSSDAMSYCGLTAALKSSAGKQQRGPISKQRNHWLQTTLIEAAKLAPRWNLQLAALHARELERGNRNRATLAVARKLVAYLLAVDKSRQPFQVRAPSEESTPKAAS

SEQ ID NO: 92555 - protein, 407 aa, unidentified
MNKKKVVEFEQVVECGCGMDVHKDLIVATIQGKVIKMQTKSFKTFTSSLIKLKEWLLKNKVTHVAMESTGVYWKPVFNVLGDDFQILLVNARHVKNVPGHKTDKKDSCWLSKLLLSGLLKGSFIPERPIRELRDLTRYRTKLVNQISAERNRFQKILEDANIKLSSVLNDVFGATGTKIINHILEHESYRPEELLYYVHGKVKASRADIKEALTGYITPHHKFMLKTILLNIARIETTVLEVEAQIELCIEPYKIERELLQSIPGVSKDGATCIIAEVGVNMEKFPDQNHLSSWAGVSPGSNETAGKNKSGRITYGNKYLRSLLVECGWAASRTKNTYMSAKYKSLVGRRGKKKAVIALGHKILIATYFIIKDKIEFKELGQEHLNNFRKDRLIAYYKLQLEKLTAA

SEQ ID NO: 92556 - protein, 411 aa, unidentified
MDVFCGIDWAEDHHDIALVDKDGGLLARLRISDDAAGLTRLLELLAEHGDTPEDPVPVAIETPRGLLTACLRATGRKVYPVNPMSVARYRDRHSVAGRKSDKGDSAVLANVLRTDMHAHRPLPADSELAQAIAVLARAQQDAVWDRTAAHNKLRSHLREYFPGFLAAFAGTRDGIMRPEARVILADAPTPGDAAKLTLPQLRALLKKAGRSRGIDAEAARLRDALRTGQMRQLPLVEQAMGRQTTALLRQLDAACASADDLEQAVVESFNQHPDAGIITSFPGLGALTGARVLAEIGDDRSRFQDARGLKAYAGSAPITRASGKSRSVTHRRVKNNRLASAGYAWAFSALTASPGARARYDRRKDAGDRHSAAQRNLFNRLLGCLHHCLATGQHYNETTAFPNQAATPAAA

SEQ ID NO: 92557 - protein, 414 aa, unidentified
MRVVYERCAGLDVHKKTVVACRMVPQTERDWQVDIRTFGTMTKDLLALHDWLAEAQVTHVAMESTGVYWKPVFNILEEDFEVMVVNAKHIKFVPGRKSDVKDAQWIAELLLHGLLKGSFIPEAPQRDLRELVRYRTHLIQERTREVNRVHKVLEDANLKLSSVATDIMGVSGRAMLAAIIAGKDDPAALADLAKGRMRNKIEELGQALTGCIKASHRLLLRLHLEHIDDLNAKLEELEAEIDKLMPPFDQDNLIVRLDEIPGVGQDTAQVIVSEIGTDMSRFPTANHLTSWAGLAPGKNESAGRNRSSRTLKANRYLRPALIQAAHAAGKTNTYLGEKYRRLSRRRGKKRAAVAVARTMLVIIYHLMRDGTRFEERGADFFDQLKPQSTQQWLTRRLERLGFKVTLEPIQTAAA

SEQ ID NO: 92558 - protein, 367 aa, unidentified
MKKISTVATQQSRKISEQKLTVGLDLGDRSSWCCVLDEAGAIVREQKLGTTPKAMKEVFGAVPRSRIALETGMHSPWVSRLLSQLGHEVIVAHARNVRLIGESRKKDDRIDAQTLARLARIDPQLLSPVKHRSAKAQADLTVIRARAGLVRARTALVNTARGLAKSYGERLRGCNVRNMNAEKAQGLSPELRTALEPLLAGIESLSERIRECNEGIERLARESYPEVAQLKQVKGVGTLIALTFLLTLEDAHRFRQSRDVGCYLGLQPGRRNSGQSEPQMHISKEGDPYLRTLLVQGAHHILGPFGADSDLRRWGLKLAERGGKSGKKRAIIAVARKLAVLLHHLWVSGEVYEPLRHSKQTAMPAAA

SEQ ID NO: 92559 - protein, 346 aa, unidentified
MEHYAGIDVSLELSNVCVVDAQGKIVKETKVSSEPEALVSFFKGLGFPMKRIGLEAGPLSQWLHAGLAQAGFETVLLETRHVKAALSAMTVKTDRKDARGIAQLLRMGWFRAVHAKSIGSQEVRALLVARKQLLGRLIDVELSIRGILRGFGLKVGPVTRKGFEPRIRELVTGQATLERVAGAMLLARAALKMEYEKLHKAVLAIVRDDAVCRRLMTVPSVGPLVAITYKSAMDDPSRIAKSKAAGALFGLTPKKYQSGEKDVTGGITRTGDEMVRTALYEAANVLLSRIARFSKLKCWGMDVAKRRGSKRAKVALARKLAVILHRMWVDGTTYRWAAAEPIAAQA

SEQ ID NO: 92560 - protein, 457 aa, unidentified
MQGKQKQARGRSAGQLLTLNEHAAGLDVGSTFHVVAVRSDQDEEPVRTFRSFSGDLHRMADWLGSVGIKTVAMESTGVYWIPVFEILEARGFEVLLVNARDVKNVPGRKTDVNDAQWLQQLHQHGLLRGSFRPRDEVVRLRAYLRHRERIVEYAASHVQHMQKALMQMNVQLHHVVSDITGVTGMRIIRAIVAGTRAPEELAQHRDVRCAASEETIRQALTGNYRPEHVFALKQALELWDVHQAKIAECDIEIETVLKSLNEKRAAPEAPLPPVRHAKARNEPKFDVRPALYTLLGADLSQIHAFGPYTVLKLVAECGDDMTKWPTAKHFTSWLSLAPGNKISGGRVLSSHTRRSSNRAAVLLRIAAVNIGKTQTALGAFYRRLAARTGKAKAVTATARKLAVLFYRALRFGMTYADPGAEYYEERYKRRVIDSLQRRAHGLGFTLVANVAATEGVS

SEQ ID NO: 92561 - protein, 428 aa, unidentified
MERENCNRLAEFRQLRKDIRGSDKHLIVGIDVAKERHNAFFGTATGETLYRRLIFDNDKDGFERLLLQAEAMKVQHGLKKVVFGLEPTANYHKPLGEYLIKNGYAVVLVATDAVKKNRSLLDGRWDKNDKKDPANVADLISQGKCLFYEHPRHEVRDLRNLLSFQRKLKKLEHSTRMRIRNHLVAQYFPEMDTCCNWGVNEGLAIVKSCLDPAAISALQYDEFLRKIQTRGVTLAQQRRLSTVWQRAFKSMGCECGLSVEYEARMMVKILEQVRMSIADTQQQIKTICEKFSEYEYLLSIPGFGPDISAKALGAIGYPFRFDNASQVLKLVGLDLSASRSGKNSNNITPSISKKGKSELRYALYQAALIASSKDKHFIAYFTNKLRGREKEKGIKTKMRVKLSAKMMIIAWTLMKKKEFFDPKYLNME

SEQ ID NO: 92562 - protein, 365 aa, unidentified
MEQITRGERGRVVVRVGVDLAKRVIQVHAVDAAGQLVLGRALARDRFIAWCAQLPGGCVVAMEASSSAHHWARKLCSLGLDARIIAAHLVKPYRKQGSSGKNDANDAAAICEAASRPSMHFVPIKSVEQQSMLCVHRLREGIKEERTACINRIRGLLAEFGLVFAQSPKVLRLALADTIEDASNEMGTLARLTLQRAHAQWRELDEHLAWCDERIAEHTRTNEQVKTATTLLGVGPLTASPVVATVGDFRQFRNAAQFGAWIGLTPKQHSSGGKTRLLGKITKRGDTYLRTLLIQAAKSAVLTAHRRSDRISNWLCTLRERSGWQIAAVALANKNARILWALMTKGEAFDANHLSIKPGMSSQQT

SEQ ID NO: 92563 - protein, 383 aa, unidentified
MSSESTRPRSIIYLGLDVHKDSITIAVLPQSAKTPTRLDRVPNELPKLKRFLDRCAQAGELRACYEASGAGYVLQRAMHAWGYACEVIAPSLMPKRPGVQRKHDKRDACDLARLYRAGELVPVRIPSEAEERVRDVVRCRETFQREVMKARHYILKFLARRGFVYREGCHWRSGHLRWLEHLTSELSPLAPADRLVFREYHALLAYTLQRRDALDREIEQLALEPALAAAVGRLQCFRGISLHAAMVLATEIVDWRRFERPGQLAAYLGLVAREDSSGPRERKGSITKAGNSHCRHVLVQAAWTYHYRPHLSLEIKRRQQGQPPAVVAHAWKAQQRLHARYEYLAFRKQPQIAVVAVARELVGFLWAVMQDVSSSTVARATAA

SEQ ID NO: 92564 - protein, 299 aa, unidentified
MNVPGKTVLKPLTFSNNKAGFELLDLSLRQLNQDCLIALENTGHYAFNLLNFLHEQGYKVYTYTPLLIKEFAKSLSLRKTKTDKKDAHGIALKLLSDPNREQFQHDNRQVELKILARHIHRLKRKQSDWKVQYTRCLDIIFPELDKIVGKHSEYTYQLLTCYPNPQKRLEAGFDKLIEIKRLTASKIQDILSVAPHSIGTTSPAREFEIIENIKHYKRLIDKAEKCVNDLMAEFNSVITTVTGIGNRLGAVILAEIQNIHAFDNPAQLQAFAGLDSSIYQSGQIDLAGRMVKRGSPHLR

SEQ ID NO: 92565 - protein, 354 aa, unidentified
MSQFSKEAVCTIGIDLAKNSVHVFGVDAQGETVFSRKLARGALTAFIAQQPPCRIAMEACGSAHHWARTFQSLGHDVVLIAPQFVKPFVKNNKTDAADAEAICEAARRPRQRFVPIKSVEQQDIQAIHRMRSQVIERRTALINQVRGLLAEYGLIIPRGRTVVMRRLPEILEDADNGLSERFRAELHGLLEELRHLDERAAHYDTQIKTVADTSASAQLLMTIPGIGPLVATALIATLGDGWGLFANGRALAAWLGLVPRQHSTGGKPRLLGISKRGDVYLRQLLIHGARAMMHWVDKKEDAVSRWAHDIKQRRHTNVAIVAMANKLARIAWAVMNTGKTFDPARGALTKPVAA

SEQ ID NO: 92566 - protein, 433 aa, unidentified
MAKLEEIKKNAAGIDLGAKLFFVSIDGVTVKSFETHTAGLKSLVSYLKESAITTVAMESTGVLWLPLYDMLEEVGIEVFLVNAAHSKNIPAQKSDPADCRWLQKLHSFGMLRASYVPRDDIRKLRTYIRQREDHQDIASMHIQHMQKAMELMNLKLKNVISQLHGVSGQKIIQAILDGECDAYKLANLCDTSILKKKKEAVIESLKGNYKEEYVFMLRQAFKAYQFYQNQIKECDKEVDKLLIRMTANKEVVITGDPKVSRHNQPDIKKLHAKMVKLHDGKNPSVLPGITDMTTLRLTAELGCDYTKWPTEKHFTSWLGLSPRKHQSGKTNRSQKRKINTKAGQIFKESAMSIANSKYLALKGFYYRIKSKHGPKAAIKATARKLAVLFYRYMTIGIDYVEVGLKEYEKRYQEQVFKGISKKASALGYQLIRV

SEQ ID NO: 92567 - protein, 387 aa, unidentified
MSQVSDLSRSLVPFDQNITLTVVVELSEASWLVAGLIPGVDRQPVKKQEPEPVALLRLLERWRVEAVRAGRTIGRIALAFEAGRDGFWLARWLQARDIEVHVVHSTSVAVSREHRRAKTDRLDTAMLMRVFLGWLRGERGHCLMVAIPTLEQEDAKRPSRERESLVGERTRIVNRMKAALARLGIRGFKPTLRKAPQRLDALRTPEEVSIPPNTLDEIRRDMVRLAVVREQIDVIERARLARLEQAPAAGPHAMVRLLARVIGVGLETADMLVQEVLSRNLRDRRAVARYVGLTGSPDESGRRRREKGLAKAGNARVRRGLIQLAWRFLRFQRDSTLAQWYRTRTGGPKGARKTTMIVALARKLLIALWRMVTIGEIPAGVALRQVI

SEQ ID NO: 92568 - protein, 384 aa, unidentified
MAQMALQTNDSGLAGVLYMALELSKSTWKVGFEYQGKRRIKNVKGGEVGGLRQALEEAMQKLGVPEGAVVRCCYEAGRDGFWLHRLLEGWGVENVVVDPASIEVSRQARRTKTDRVDLLSLLSKLRQYHAGEFGVWKVVKVPSEQDEEGRLLHRELERLKKERTGHVLRIKALLFAQGVRVEQVGGKKWAGYLMGLTRYDGRALPADLMAQVRRESERLAMVQEQIQAIEKEQERRVREAAEVGGVMAMVQALRQLKGIGSVAAWVFVMEFFGWRQFKNGKEVGALAGLTGTPYASGQMQREQGISKAGNRRVRALAVEIAWLWLRYQPDSALSRWYAERFAGTSKRHKRVGIVAVARKLLVALWRYLQTGELPTGARLKPAKA

SEQ ID NO: 92569 - protein, 402 aa, unidentified
MNAVGIDVSKGKSMVTIMRPFGEIVSAPFEIKHTASDIHSLVELINSVEGESRIVMEHTGRYYEVLAHQLSETNLFVSAINPKLIKDFDNDSLRKVKSDKADAVKIARYALDKWQNLKQYSVMDELRNQLKTMNRQFGFYMKHKTAMKNNLIGILDQTYPGVNTYFDSPARSDGSQKWVDFASTYWHVDCVRKMSLNAFIDHYQNWCKRKKYNFSQSKAEEIYGKAKELVPVLPKDDITKLIIKQAVNQLNSASTTIESLRTLMNETASQLPEYPVVMAMKGVGTSLGPQLMAEIGDVSRFTHKGAITAFAGVDPGVNESGSYEQKSVPTSKRGSSDLRKTLFQVMDVLIKTHPQDDPVYQFIDKKRAQGKPYYVYMTAGANKFLRIYYGRVKEYLSSLPES

SEQ ID NO: 92570 - protein, 350 aa, unidentified
MRIIGCDFHTRQQQIEMLDEESGEIVRFRLEHANGEARRFYEQLEGPVIVGIEATGYTRWFEQMLAELGHELWVGDAAKIRASVVRKQKNDERDAGHLRTLISEGRFPRIWMPTAAERDLRQLVLHRVKLVQMRTKVMNQLHALAMGEGLCRKKKLWSKVGRVELETLALGPWAARRRKELLELLDHLERPIAELQQAAIEQAAAHPRTARLMTHPGVGPLTALSFALTIGEVGRFARSRQVSSYLGLDPKLNCSASRMRIGSISKQGSSTTRWLLVEAGQTAARKDVELRRLYQRLKFRRGSQVAKVAVARRLAVRLYWMLREQADYGELLAQLVRMRGSSGSGVMEAV

SEQ ID NO: 92571 - protein, 350 aa, unidentified
MLYIGLDVHSKWMTVKGFNSETSELIEIKKQPNDEESLRKTFIGLVGPLYGVMESGTNSWAVYRILEPYFEKLIVVDPATVWGKVVRRGAKTDCRDALTLALKMQRGELEPLYVPDEETQDKRALARAKINASRHVTKTVNEIGSQLRSWGIIIDCSLLSEKGQALIEESKSRLPKSSLIVLEMWLKMLKEARAVETELEEMIKTQAAKDEVCQQLMSIPGVGALTAFVVRAEIGDINRFGSAEQLVSYCGLSPTVSQSSDSIHYGKLNRFANKFLKYILVLRAQGMARSKLDNPMRQTYWRVVIKGKNHAKIAVARQLVRVIFSMLKQKTIWDASKITSRRGSPLSVAV

SEQ ID NO: 92572 - protein, 513 aa, unidentified
MGPACSRKLSELAYVRGVEASVSLRSELRGRLWSNHFGWQSLFDVGHAPSWEHWTKSRPADQSLTGHPMSFDRLKRTQSRKRLPGHKLKPSRATLLVQNSKPHLSMKQTYILAIDVAKHKVRAALSGADERLLFEKDLPVSAGGLRELLVRLREHVAEPEGLLVLIEATGMLHLNWSVALIRAGYAVVVINPLIARRLYTLGNSIRDNKSDPIDARQLCGIGRLHGEKLLSLYRFALKPEQLCLQRLQSVRKAVRKSLSNLKKSYGSLLDVSFPELGRLLEIDGVGIRQLLSQAPTPCAIARMRRSSLEKNWMLRPKAAQLKKLAAESMADPELAQASRPALLAMLQSIEAMETRLRELDRQIEALTSQSVDPQTKALVESIPGFGALNAAKLLAFLPGEILHAGSNRQAAARLQAYMGNDPRVRQSGQWQGQTKMSKRGVEMLRTALFQCAFSASQHDPELRSFYQRKRAQGKHHEVALSHLMRILTRRLVAVLRSGQPYQPNDNSELKNAA

SEQ ID NO: 92573 - protein, 403 aa, unidentified
MLAGIDWASEEHAVCVLDEEGRAVDRFTITHSAEGFDRLTARLARHGDPAGVPVAIERPDGRLVDRLLEAGHPVVPVKTNAIKAWREAEVLSGAKSDPGDAEVIADYLRQRRGRLRVLQPFSTETRALRAVVRTRTDLVDQRVAAANQLEAILDAFWPGAKAVFADIWSPIALDFLERYPTPASAARLGEARMATFLTKHGYSGRRPAAELVERLRSAPTGVGEGPEAEARRDTVLAMVRVLRVLGRAIKDLDRSVAAHLDEHPDAEIFRSLPRSGQINAAQMLAEWGDCREAFDSPEAVAALCGATPVTKKSGKHEAVQFRWACNKRFRNAMCTFADNSRRASPWAQSIYQAGLDRGHDHPHAVRILARAWTRVIYRCWIDRAPYDPAHHGAIARMERASAA

SEQ ID NO: 92574 - protein, 450 aa, unidentified
MVGREPEEVVEAEGHEEALQRAAAIDVAKASGTVCTRLPHESTAARRVTKVWQLPSTTGAILELAEQLARERIERVVLESTSDYWRPFFYLLEARGLTVWLVNAQQVKQVPGRPKTDKLDAVWLCKLNERGMLRPSFVPPVEIRQLRDYTRLRVDLTRDRTRCQERAEKLLEDALIKVSSVVSDLFGVSGRAMMEALIEGERDPQALAALAKGRMKTKQAALRQALNGRFDDHHAELLRILLDQNDALSDKIAQLTARIEELIAAMPAAQAPPSGPSGSAGSQTGQPPLAAMDRLDEITGIGMISAQTIIAEVGLDMSRFLTAGHLVSWAKLSPRTIQSGAKNRAAGPGKGNPYLKGVLGEAAAATANTDTFLGERYRRLVKRRGKGKALVAIAKSILVIVWHLLANPHARYRDLGSDFYTTRVNAERKVRNLVHQLEALGHVVTLAPAA

SEQ ID NO: 92575 - protein, 439 aa, unidentified
MRKRQTEVVFPNAAGIDVGASSHWVAVPRHTADEPVREFGTMTDDLHALADWLQQCGVDTVALESTGVYWIPLYDVLEQRGLAVWLVDARQMKYVPGRKSDVQDCQWLQKLMSLGLLRAAFRPEADVRVIRTIVRQRDVLLREQARWVQRMQKALVQMNIQLTEVLTDVMGVTGQAILRDIVAGERDPAVLARHHTRRLKASAKDIQRALTGTWREEHLFLLQQALAIYDDLARRVQECDTTLEALLQPLQRHDKKLPKTTKTRSKNSPTFDLRQALANWAGVDLTRIDGLGITHVLNLLSEIGTDLSHFANVKHFCSWLGLSPGTKISGGKVLASRTKRSANRARQALKMAAMALARSDSALGAFYRRLCSRMDKPRANTAVAHKLARMVYFMLTRGEDYVDRGREHYEEQQRQRTVAALKRRAKAFGFELTPAPVTT

SEQ ID NO: 92576 - protein, 346 aa, unidentified
MEKHVADITIGCDLGDRVSELFVISADGQVSRARVKTTPQGFREGFTGPPAHVIIEVGPHSRWASRLLAELGHTVTVANPRRLKLISANDSKTDRNDAELLARLGRVDKALLAPIEHRGAVAQADLAVAKARDILVESRTRLINCARGMAKSAGALLPRCSAEAFHKKAREHIPEMLRPALDPLFATLEQLDAAIRKHDQEITRLASKYPEVEILSQPVGVGKLTALVFLLTLEDKGRFKSSRQVGAYLGLRPRRDQSGSSDKHLRITKAGDTFLRRLLVSCATYILGPRARDSDLRRWGQELAKRGGKNAMRRARIAVARKLAVLMHRLWVTGEVYEPLRQAAAA

SEQ ID NO: 92577 - protein, 456 aa, unidentified
MKIPQSTIRLLTGRLVKILLNREVSTMKSNTQNKKIEAITEKTLVIGIDVGSETHYARAFDYRGIEYSKKPFKFSNTEAGFVTFKEWILDLKEKHEKDKVVPGMEPTGHYWFNLGKFLQDNEMKPVLVNPHHVKKSKELDDNNPTKNDRKDPKVIAGLVREGRYMIPYLPDGVYADLRTASNIRFQLQSELTRIQNRISRWFNIYFPEYKTVYGKPDAKSGMLILKEAPLPEDILTLGIDGVDQIWRDAKMRAVGKARAKTLIEAAEHSVGSKEGAVSARMEIRMLLEDYESRNMRLQEVMVLIEELVKQIPMAEKLLEIKGVGIKTVSGFLAEVGDISRFNNPKELQKLAGLALVENSSGKHKGETTISRRGRKRLRYLLFEVAMSLVAKNPEFRELHNYYTTRRLNPLKKMQSLMAIAAKLIRVFYAMLTKGVDYDPKKMVRDIKRPAVYLQAA

SEQ ID NO: 92578 - protein, 472 aa, unidentified
MVRPPKKCKPLAEEERKPLVVASETVLKEQQAQARLERLNWDAAGIDIGATSHFVAVPAGRDEQTVREFPAFTADLQRLADWLTQCGIRTVAMESTGVYWIPLFELLESRGFEVLLVNAHHVKNVPGRKSDVLDCQWLQELHTFGLLRGAFRPEESMCVLRAYLRQRANLVRYAGMHIQHMQKALNQMNLHLHHVVSDITGVTGMKVIRAILAGERDPQVLAQHRDRRCRHSCEMIAKALHGSWREEHLFALRQAVELFDTYQQQIARCDEEIARVLVRLDPATEEDTPPPVRKHKGDRNTPRIDDLRGQLFRLVGVDLTRIDGLNPHSVLKILAEIGTDMSRWPSVKQFCSWLGLSPGNKISGGKRIGKSKTTPSANRAAAALRIAAQALSNSQSALGGYLRRQKARLGAPKAITATAHKLATILYSMIANKTEYDPPEVNYYDVQYRKRVLANLRRRADQLGFDLIERPA

SEQ ID NO: 92579 - protein, 433 aa, unidentified
MDIVHPRVAGIDVHKKVAWVAVRLPGEAPGERKVVIKRFTTFWRPLQKMAAWLAELGVTDAAMESTGVYWWPVYHALTGAGIEVCVCNAAHMRNVPGRKTDLKDCQWIAELHEYGLLRPSFIPAAEVAALRARTRYRKRLIEQRTAESQRLSKVLEDAGIKIDSVASRLLGKSGREMIEALIAGERNPGRLADLARGVLRRKTDDLQMACDGRFTDGHGQMCRLHLDAYDHLTAKIAELDALIAEAVAPFAAVIARLVTIPGIGQRTAEVIVAETGGDMTRFATSARLAAWAGLAPGDNESAGKRKYAAARPGNRYLRAAMTESAWATARTRTRPGARFRRLARRFGKGHEKKAAIAVAHTLICIAWAVMARGQDYADAGEDYYDQRDQRNREHLIRHHQQALARLGCQVTLVPPGDGSPPPGTASPHPGQAA

SEQ ID NO: 92580 - protein, 387 aa, unidentified
MTAVGKVRPQVIEDDEQQRVFDRVAAVDVAKATGMVCVRLPRRDGSRYSKVWEVTATMGAVTELGRQLMKDRIQMVTLEATSDYWRIFYYVLEMCGLAVQLVSPSQAKNLKGRPKTDKLDSMWLARLTEWGMLRPCFVPPAPIRALRDYTRARTDLVRERTRCWQRLEKLLEGALIKLSSVASKLTTKSAQDMITAMIAGERDPRVLAEMAQTRMRAKHDALVEALTGMFDSHHGELAEMELDQIAFLNGRIGKLEASIRDTLAAIPAAQGVNADGTTGPDAGHGPDAAVLPAVTRLAEIPGVSEQLAAAIIAETGLDMTRFLTAAHLVSWAGLCRVASQSGPRSRGGKKGHGVRVRPHVSVCVRPDVPVCRGSGGLIMAWAGWCRR

SEQ ID NO: 92581 - protein, 420 aa, unidentified
MSPLPEQRFTAYVGIDWADTKHDICVQAAGDTRRESGCIQHRVAAIDEWSNGLRRRFGGPIAVALELAKGPIVAALQKYDFLVLFPINPATLAKYREAFQPSGAKDDPGDAELALDLLLHHPERFGPLRPQSTAMRSLMSLVERRRELVGDQTRLTNRLGDTLKQYYPQALEWFDDRGTVLFCDFLERWPTLRAVRLARTRTLQAFFGAHHCRSTRLISERIGSIREATALTDDPAIIGPCRLHVLALVAQLRTVLAAITQFDREIAAVARTLPDYALFGNLPGAGAQLGPRLLAAFGEQRERFSSAEELQRYAGIAPVTERSGKKSWVHWRLQCPKFLRQTFVEWAGQTIGRSFWAGAYYRQQRAKGSPHQVAVRALAFKWIRILYRCWQTRTPYDETVYLNALRKRGSPLIANFGVPG

SEQ ID NO: 92582 - protein, 351 aa, unidentified
MYLIGVDYHPSFQTIAFFVEETGECGEQELSHSGGEAERFYRDLQQRGVNVRVGMEATGYSRWFERLLAKLGFELWIGDPAQIKAKRVKKQKTDRKDAQLLLRLMQEDNFPRIWVPSPENRDLRQLLWHRHRLVQMRTRIMNQLQALAMNEGKRMKKKLWSEQGRAVLEKLTLGPWASRRRQELLELLDGMNPKIEELTAAAEQEAKKRPDALRLMTHPGVGPLTALAYVLIIGTPERFPRGKQIGTYLGMIPCEDSSAGKQRLGHISKQGNSLLRFLLVEAAQAAARIHPDWRRRYIHLAMRRHKSIAKVAMGRRMAIQLYWMWRNGCEYSQSGKRGSYAGQLGTVHGGK

SEQ ID NO: 92583 - protein, 411 aa, unidentified
MELVHPRCAGLDVAKDEVVACVRVPDGHGGRAQEVRTFQTFTSGLEALASWLAGEGVTQVVMEATGQYWKPIWYVLEERGFELLLVNARHVKILPGRKTDVCDAAWLAELLEHGLLRGSFVPPVAIRELRDLTRYRKRLIQAHSSEGQRIQKTLEDAGIKLDSVATDVLGVSGRAMLTALVAGERDPQVLAELARGRLRAKLPQLRQALRGRFGDHHALLVRLALAHLEHLEGTIAALDRRVDEVIAPFARVRDRLATITGVGKRAAETIIAEIGTDMTVFPTAGHLASWAGRCPGNNLTGGKRRSGKPTKGNRWLGEVLIECAWAAARSRDSYLSAQYWRLARRIGKKKAAVAVGHSILVIAWYLLTDNCDYQDLGGDYFVRRDTDRQRQRAIAQLQALGYRVTLEPLAA

SEQ ID NO: 92584 - protein, 403 aa, unidentified
MNSVGIDISKGRSMVAVMRPFGEVVISPFEVRHTDSELSELARQLKSLNGETRVVMEATGNYHAPVAKLLHDAGLYVSVVNAKLVHGYGNNELRRVKTDRKDAVKLANYGLDRWLTLPRYVPEENTRLLLKNCYRQYRQYSKVQTVLKNNLISLLDTVFPNVNRLFSSPIRGDGSEKWVDFVAEFWHCRCASEKSERAFTSKYLRWCRKHGYNFREAKAHTIYAEASGHIGVMPKSETTKLLVEQAVAQLRATSTALAALKQEMQSLSSVLPEYPVVMDMFDVGPTLGPQLIAEIGDVRRFYSKKALVAYAGLDAPPNDSGDVTGRHKSMSKIGASSLRRTLFLVMSVYLQTAPLDEPVCQFMDRKRAEGKPYRVYMMASANKFLRIYYATVKAYLESLEHTA

SEQ ID NO: 92585 - protein, 309 aa, unidentified
MEIVVGIDVSKERLDVAVLPQGEVFAVSNDHVGIEELVARLKAIGADVIGLEATGGYEMLAVAGLSAAGLTVLVVNPAQVRAYAHAIGRRAKTDPIDAAVIAAFILATKPEIRPLRDAQTQALSELVARRRQIVQMTVAEENRLRMALAKPAQKSIKRLLVALRRELESLDADLDSHIRKSPVWRLREELLTSVPGVGATTARTLLAELPELGSLNRRQIASLAGLAPWTRQSGKWKGKSFIGGGRGKVRAVLFMAALVAARYNPALKTFRDRLVAAGKPKIVATVATMRKLLTILNAIIRDGRSWQNA

SEQ ID NO: 92586 - protein, 348 aa, unidentified
MRFYTTKHQYYCGIDLHARVMYLCIISSDGEIVLHRNMKADPESFLKAIEPYRPDVVVGVECIFTWYWVADLCAEEGIPFVLGHALYMKAIHGGKAKNDRIDSGKIAAMLKGGMFPMAYVYPAKMRATRDLLRRRNYLVRKRADLISHIQNTNSQYNQPSFGVSNITHKCRREEVLSHFTDPDVYMNMKINMDMIDQFAVQIRAMEKHVLDNAKNHDPQSLYLLRTIYGIGKVLSLTILYEIGDIDRFPRVQNFASYSRLVKCARESAGKRYGTSGSKIGNVHLKWAFSEAAVLFLRGNPEGMKYKKRLERKHGKAKSLSILAHKLGRATYYMLKREKAFDMNKFLRA

SEQ ID NO: 92587 - protein, 349 aa, unidentified
MDHITRIGMDTSKRIFQLHGVDAKEGVVLRRKLLRGDMMRYFERLPPTLIAIEACGGSHHWARELGKLGHEVRLIAPQHAKRYVKRGKNDAADAEALCEAASRPHMEYVPVKSADQQAALMLAGVRDRLVRNRTQLANAIRGMAAEFGLIAAKGIGHVLPLLDRIAADLAVPTLARDLFAAQGEEYAALEARIAQVDAQLQAWYRSSPMAKKLTSIPGVGAVIASLVVMKTPDPHAFQSGRDFAAWLGLTPKDHSTAGKVRLGGITRAGDESLRSLLVVGATSVISHLRRKPQPGARPWLEKLLDRKPPKLVAIALANKMARIIWKLLTSDAVYNPTHPSPACRPALAA

SEQ ID NO: 92588 - protein, 415 aa, unidentified
MALKIVYKICCGIDVHKTFVVACIASTDSNGVTIYEHHRFSTYTSGLKDLLQWLLKRNCRDVCMESTGKYWIPVYNILEDDCSIVLAHPKYVKAIRGKKTDKKDAKWIADLFKHDLVAGSFMPPADIRQLRDLMRYRFKLTCFMSSEKNRLQNCLTVSNIQLGNVVSDTFGKSAQAILDKLLENPADTSFDLEPLVYKSLKKKLPELRDAIDGYITPEQAGKLKVIKAHYENLESRKAELEELILALAAPYQQELAILQTAPGIRSDFTAIGIISEIGTNMEAFPSAKHVCSWAGLTPTNNESAGKKKSVRVSKAGCYIKPLLVQCANAVVTSKKHPEIRNRYLRIKKRRGHKKAIIAIARMLLTALYHMLKNGENYNAELYRKSDLLSVDREITVEQAIIIARKQGYKIKSATA

SEQ ID NO: 92589 - protein, 382 aa, unidentified
MRASTESTPTAAHSGTIFVAIELSQKTWLVTLHSPDRDRISRHKLEGGDHAGLLGLIEKVRARAAEKLGWAPGVVSCYEAGYDGFWLHRLLQAAGITNFVFDAASIAVEQRSRRAKTDRIDGELMLRTLMAYLRGEPRVVRIVRVPSVAEEDARRASRERDRLVKEQTAHSNRIKALLRLLGMAVDTPRRRNWLAWLEQQRDWQGQPLPPHLLAEVQREHARLMLVGEQIAALEQAQVAQASAVPAAMSERRQLLQRLKALGPAFSATLVNELFYKDFRNRREVAAYCGLAPSPWKSGGIDLEQGISKAGNHRARLKAIELAWLWLRHQPDSALSQWFRTRTANAGKRARRIAIVALARKLIVALWRYLSTGIVPDQATMKA

SEQ ID NO: 92590 - protein, 428 aa, unidentified
MKITKKATLINLNKIVDVSVDVHKDNLCFFFEINGTEYYDVCRNRTNVIEKKLASYAEIAGACGKKGLRIICEPTGQYQNKLMRTARRLGLLTCYVNAESVAKFRIIETNDYNKTDQKDPRVINTLGRLNKVIGFRMIGEKYLMLRKLHKIYDECDGAITSLRCRIHKLLVELFCDYSFKKDFLYTRSGQALVKVYGCNPYKIIAAGWSCFCRVMRVNAPGIRSTTLERLWKDAASSCLNDMPPGYVEVLEEYLRQLLDDYNRVSERKERITARMVAILEKLREDDPLIPPPTPNVISEKNLARLLAETGPLSDFDNWRKLMRYAGLNLRTRQSGTFQGHHKISKKGRRLLRKVLQCIALPLVKKGRLYGEYYHYKKEVNKMPGNKAMTVVARHLLRKIYGWYRSGEGFDEKRFFTCKSEYRKTRMAA

SEQ ID NO: 92591 - protein, 367 aa, unidentified
MARQERDRSQRSGSVSLKTVGQLGSSRSSGHQPGQLKGPQARIVQGRETRRCTMSAEIFVGMDVSQGCVDVAVRPGTAFQITQDERGIAEAVERLQAVQPTLIVLEATGGLEVPLTGALAAAGLPVVVINPRQVRDFARATGQLAKTDRLDAQILARFAEAIRPPVRPVPDEQTQALAALVARRRQLIEMLTAEKNRLRLAARPIQKRVQAHITWLEKELAATNTDLTATMRESPVWREKEEGLRSVPGVGPVLTTTLFANLPELGTLTRKEVAALAGVAPFPRDSGTLKGRRAIWGGRAHVRAALYMAALVATRRNPVIRVFYQRLCQAGKAKKLALTACMRKLLTILNAIVKSGTPWRVAVSQSA

SEQ ID NO: 92592 - protein, 350 aa, unidentified
MTSMTSTRRVVTVGVDTHSDTHHAAVIDEVGRPLADAGFPTTPAGYRQLLAWAREHGQITTFGVEGTGAYGAALARHLRAAGQTVIEVDRPDRRTRRMRGRSDPVDAYAAAAAVLCGAASGIPKTRDGLVEAIRTLRVARRSAIKARTQAINQLKAVLLTGPAELRQALTGQSTRELLATCRRLRSSDRPTNAADPVIAAAKLTLRRLARRIAALTEEIDELDAELRPLVTQASPALMEVYGVGTHVAGQLLVTAGDNPGRLHSDAAFAQLCGTAPLPASSGRTTRHRLNRGGDRHANYALHIIALVRLSSHPATQAYAARRRAEGLSNLEILRCLKRYIAREIHHVLTA

SEQ ID NO: 92593 - protein, 348 aa, unidentified
MTLVGCDLHSRKQQVAVLDTTTGEILEQELVHDGDAVERFYRALRPPVTIGIETTGYTQWFHTAMHRLGHTVLVGEAAKIRAMVVRKTKTDRRDARHLLDLLRHDRFPTVWIPDPDTRDLRALVAHRVRLVRMRTMVKNGLQAIALNHRLALRSKLWTERGRAALQGLLLPRHTTRRRDDNLELLIWLTAKIDELDAQVAHAAAADPRAALLLTHPGVGPLTALATVLVLGPIARFPDSKHVVSYIGLAPAINASADKQHLGKITKQGNALLRWVLAQAAPLAARADEDLRRRYFAVLSRRGRPKAKVALARKLLVRLYVMLRDRIDYDEFCRRGQLRRTAHVPVAAM

SEQ ID NO: 92594 - protein, 353 aa, unidentified
MKRTTKYVALDVHQSTTVASVREQRGHVIARAILPTEAAAIVEFFRGMRGCVRVAFEEGTQAQWLHDLLAPMVDGVTVCDRRGEPRGNKADQRDADNLSHRLLTGDLRAVYHGRSDRLTLQELTRAYSNIVEDSTRAMLRLKSLFRARAIRTPGRRIYGKKDRAVWLRKLADRGTRFRAEALYAELDLLAELRPKAKALMVAEARRDPAWGILCSVPFFGPVRVALLLATMKTPWRFRTKRNLWAYAGLAVVTESSADHEFIAGRPVRRRRQPLTRGLNKNHNRVLKEVFKSVATSSLGRAGEFQDLYRAMIARGMREDMARLTLARKFAALTLRLWKTGEPYDPAKLTAQAT

SEQ ID NO: 92595 - protein, 354 aa, unidentified
MSIEETAICVVSDDGKVVLETEVPTDPQLIADTLERYAGRLRRVGHEAGSISPWLHAGMLALGLPVVCLETRPVRAALSAQRNKTDAADALGIAHIMRTGWFREAHIKTEECYRIRLLLVQRRNLKRKFLDIENAIRHSLKVFGIRLGKVGRGSMEKAVREAVAGDPMTAGLMECMLRARAALWDEYLILHKLVTQLAMRDELCRRFMAIPGVGPVTSLSFKSAIDDPARFRRSRNVAAYFGLTSRRWQSGSSIDVKGRISKAGDPDVRRALYEAASAMLTRFKGRDTIKTWGLKLAKTKCHAKARVAVARKLAIVMHAMWRDGTFYVGDPDAETQEVDSAYAAKMQRLSYARS

SEQ ID NO: 92596 - protein, 343 aa, unidentified
MYYIGLDVHKKTISYCVKDVAGHVHREGKIGSTRRELDAWIRTLPQPRMMAMEATIFTGWIYDHLLPHAEQVKVAHPLMLRAIAAAKKKNDRIDAGKIADCLRCDFLPECHMVSTEIRDRRRVLRYRNLVVKQMVQMKNRVSGLLMETGVSYNKQRLHKVGYFGELMSTNEDISQAVRPLLDLSRGMIRHSGKLEYDLISSLERDPLLKERLRLLRTVPGVGSITALTWALEIGDYTRFSSNKQAISYCGLCADEKSSADKVMRMPLSKQRNKHIQRVLIEAAKLAPRESPELAMIRERELQRGNPNRATLAVARKMVCYIMAVERRQQDFVPAGELMPTAAA

SEQ ID NO: 92597 - protein, 462 aa, unidentified
MTHPTYCPHRSQAPAQALAVVHPHAAGIDIGATEHYVAVPADADPQPIRRFGACTADLESLADWLQACAVTTVVLESTGVFWIPLFELLESRGLEVRLVDARQMRRIPGRPKSDVHDCQWLQRLHSYGLLAAAFRPDEPVCVLRSFLRQRQMLVTYAGQHVQHMQKALTQMNVKLQHVVSDITGVTGLAIIRALVAGQRDPVQLAKLRDERCGHSQADIARALQGNWRAEHLFALKQALALYDFYHQQITACDRQIERQLKQFEDKSGGQPLPPKARRQRRGDNRPSFDARGALYRMAGVDRTVIEGIEESTALVVLSEIGTDRKRWPTVKHFCSWLGLCPNHRISGGKVLSRRTKPCANRAASALRLAAYALHRSQSALGAFLRRLKSRVGAPKAITATAHKLARLVYSLLKHGTSYVTQGMAEYERAYRERVVGHLSRRAKELGYALVESVEPAVEPRPT

SEQ ID NO: 92598 - protein, 349 aa, unidentified
MRFYTSAHRFYCGVDLHARSMYLCILDAGGQVVFDKNLPASGPAFLHAIAPFRDGLVVAVECLFCWYWLADLCAREQIAFVLGHALYMKAIHGGKSKNDQIDAGKIARLLRGGTLPQAYVYPAGMRETRDLLRRRQYLVHKRVEAIAHIQNTNSQYNHPVFGKKLGYAANRDELDIADRFTDPSVKKTVEVDLALIDHYDALLGDVELYLTRSAKVDDVQTYHRLQTLPGVGKILALVLLYEIHDINRFPDVGNFLSYARLVRCAHESAGKQKGSGGKKIGNPHLRWAFSEAACLFLRQSERARRWKAKQEKKRGPAKAMGILAAKLARAVYHVLTKKVAFDEQRFWNC

SEQ ID NO: 92599 - protein, 338 aa, unidentified
MSLYAAIDLHSTNSVLAIVNEEGQAVFQRRYPNELAKIVQALAPYQPQLDSVAVESTYNWYWLVDGLMDHDFGVRLVHTTAVPQYSGLKHGDDVTDALHLAQLMRLGILPEAFIYPRALRPCRDLLRRRASLVHQAVQLLLSIQSTYARHTGQCLSSDAVRHGSVEALQAAFPDPTVCYGVLTQYQHWSALQEDIQAMEEWVMHDVADAATLARLRSVSGIGPVLGLTIQLETGPIERFQSVGDYASYCRMVESKRLTNGKCKGHGNRKSGNRYLCWAYIEAAHHAIRWSEPVRRWYTRKASRKPNVVAVKAVAHKLARACYHMMREHTPFEVARAFG

SEQ ID NO: 92600 - protein, 401 aa, unidentified
MNAVGIDVSKGKSMIAIMRPLGEVVAAPFEVGHTATELNELAKFILKISGETRVVMEYTGVYFEPIAMALYDAGLSVCVVHAQLIHNYGNNTIRKVKTDKADAIKIANYALNNWDKLKPYTPIDELRRQLKAYSRQYRKFNKLKTMLKNNLIALTDSTFPGVNELFSSPPRKSDGHEKWLDFAMKFWHAECVCSLSQKAFTERYRKWCHKAGYYFLESKAEDIYAAACGHIGLLPKNENTKQLVQQTIIQLTSICSSLSVIEYKMTELAVLLPEYPVVMEFHGVGRILGPQIMAEVGDVLRFKKKESLVCFAGLEAPPYESGKFESHNRTISKKGSPHLRAALFQVMDCLLKTQPVNDPVFQFIDRKRSEGKHYYSYMCAGSAKFLRIYYARVKEYLTALE

SEQ ID NO: 92601 - protein, 318 aa, unidentified
MNTKTNQSINVGVDTGKYQLDIYIRPLDIYFSVENNEKGIKEAVKNIIKHNPDRIVIEATGRLEMPFIIACAEANLPFTIANPVHVKRFAGALGQRAKTDKLDAQLIAHYSEAIQPKLSRLKPENMQAMSDLVTRRNQLLTMQTMEKNRLQIMPQALAMTIKPVLTLFKNQIIKIEDKIVKLIESCPEYQAKNMILQSMKGIGKIAAASIISNLPELGYISAKQASALIGVAPINRDSGRYKGQRKIQGGRPQVRTVLYMAMMSAMQSNPIFKATYQRLLAAGKPKKVAIIACIRKMIVILNSMLRDGVMWEAPKVIN

SEQ ID NO: 92602 - protein, 413 aa, unidentified
MSSTLIVGIDISSELNAASFIDETGIRLVKKTFFFPNDLDGAQQLLDFTISLAQQYNISSIKFGMEATSHYAWHLHTFLASSPELAPFNPLFYVINPSIIKSFKGAYIHLPKTDSIDAAVIAECVRFGQVKPTPLPDLRYAALQKLTRMRYHIVPSLVREKNRALNLISFKFSTYPSECPFSDIFGKASLAIIENFTPDDIASMPLDDLIDFIVKNGNNRLSDPTQIAKTLKAAANRAYRLHHDLAEANDLALSMTLENIRFLESQLKKLDGEISRQLKAFSQTLTSIPGIGDVLAAGIIAEIGDIKRFNNEAAVAKYAGLIWNKYQSGNFNAQDTSLVKCGDQYLRYYLVEAANCVRVHTVRFKEYYNKKYREVPKHQHKRALVLTARRLIPLIFAMLSKGQIYQERGVASI

SEQ ID NO: 92603 - protein, 303 aa, unidentified
MVVLPNEQCFSVVNAAAGWAELIEKLRGLNIAAIGIEASGGYERGIVRALLAARYSVRLINPFKLRQFAKACGVLAKNDRLDARMIARFVATMPTRPMQRNVAVERLAELLTARRQLSEEKVAAENGSKLLEDSMLQRLYRRRITRMEADIMLLDKRLADMVAADAALAQRYELLISMPGVGPVLACTLVALLPELGQMSRKQVAALVGVAPYDFESGKLKGMRCIWGGRAPIRRVLYMAALIASRCNPALKVFHDRLQATGKKSKVVIVAVMRKILTTLNAMARDNVLWNDRRNGRCAVSAA

SEQ ID NO: 92604 - protein, 343 aa, unidentified
MQTVTTIGLDIAKSIFQVHGVDAAGQVVVRRQLKRRYVLAFFEKLPPCLIGIEACASSHHWSRELQALGHKVRLMPPAYVRPYVKRQKNDAADAEAICEAVTRANMRFVETKTPEQQSCLMLHRTRHLFIRQQTAVINAIRAHLAEFGIVAPVGRNGVEELLGVVADASDKRLPEIARACLVALGAQLRMLKAQILEFDRMINAWHRSNETSKRLDEIPGVGPALATALVASVADPRAFRSGRDFSAWIGLVPKQHSSGGKDRLGGISKQGDRYLRSLFTAGALAVIRYAKIHGAKHRPWLTALLARRPTKVAAVALANKIARMAWAMMARGERYKEPVALAA

SEQ ID NO: 92605 - protein, 317 aa, unidentified
MAEVTFPQLIQRACGIDVHLKVVVATIDGAGIQRETRSFKTFTSSLNELKEWLLSNGVTHVGMESTGVYWKPVYKVLEDSIPNVWIVNARHIKNVPGHKTDKMDSEWICKLLLAGLLKPSYIPPKEQRQLRDLTRYRNKLIQQIASEKNRMMRILEDCNIKLSSVVSNTSGTTATSLIDMLCEGKVLTLDDINSVYHGKLSASPEELLEACTGFVEEHHIYLLQMIRKDIDQTQTLVDDLSERIKRLLSKYENVLELLREIPGFSTKVVEDLVSEIGLDMSHFPSEKHLSSWAGLSPGNNESAGKKKGHDSLTETDR

SEQ ID NO: 92606 - protein, 349 aa, unidentified
MWIIGCDYHPRFQQIAYVNTEGGEWGQRRLAHGGEAEGFYRSLRGQTVRVGMEASGHSRWFERLLEELGYELWIGDAARIRAAVVRKQKTDARDAEHLLELLLSGRFERLRVWVPGAEARDVRQLVLHRHRLIGMRTRVKNQLKAVALNEGLGPKPGLWSKPGQEQFRALVLPAWTERRRQDNLELLAELERRTDPLDEAVMQQAQQRPEAVRLMTHPGVGPVTALTYVLVLGDPRRFACGKQVASYVGLIPSEGSSGGRQRLGHITKQGNALLRTLLVEAGHVAARREPELGRCYRRLAMKKNCGVAAVAVARKLAVRLWWMWMREVDYGQWRASGSHAGTGPVQPVG

SEQ ID NO: 92607 - protein, 423 aa, unidentified
MKLTYPVCCGVDVHKTFLVATIITSDSVTPKYKQKRFSTFYSGLLSFKQWLLENNCKDVCMESTGKYWVPVWNVLEGSVHVVIANPKWVSAVKGNKDDKKDSKWIGDLFRMGLVPGSYVPSKDIRILREFTRYRSKLVSMRASEKNRFQNAFTVCTLTLDAVVSDMFGKSAASIENYLLSTDSVDPDYCVSLLQGSLKKKASDVVNAVEGFSMTAEQKKRVRIIQGHFADIDKRIVELDDTIGSLVSDCEGVISLLCTIPGIDRRLAIIILSEIGTDMSQFGSSKRLCRWAGLTPGNNESAGKKKSVRISRAGVYLKPALVEAAHAAVKSSQSNSYFRTKYERIMKQRGKKRAIIAIARMMLTCVFAMLQSGEVFNPCDIQKFDMPEELRKRQVLSSAKDAVKLLVSLGVVSEGAISLEKLAS

SEQ ID NO: 92608 - protein, 366 aa, unidentified
MFSERTSVVLDVHARSVAAAAIDGVTGELFQARLTPSHDHIRGWIGALPGPVAVTYEAGPTGFGLARALRADGIRCVVAAPSKLQRPSGDRVKTDANDAVHLARLLRMDEVTAVVIPSADQEAARDLVRAREDCRGDLMRARHRLSKLLLRHGIVYDGGQGWTGAHDVWLRRQHFDAPTVQMAFDSDYDAVLATGARRDRLDAAITAMATDSEFTPVVRRLSCLRGVSTLTSFALAVEIGDWRRFTGNTIGSFVGLVPSEYSSGASRVQGSITKTGNTHARRLLIEAAWHHRTRYRPGSTMLARWDLASPAARARGDEGNRRLHARWARFDEHHKRPVIANVAIARELAGWCWSLAVLEEDAVMAC

SEQ ID NO: 92609 - protein, 320 aa, unidentified
MSKINVLGVDISKSTFDVALLLEGKVKTKKFDNKIKGFSELVEWLKKKETDLHVCMEATGTYGEALATYLFDVGYTISVVNPAQIKGFSQSELSRNKTDRADAKLIARYCLALNPKPWAPKPPHVRELQAWVRRLEALQSMYFQENNRLEISSDNVRASIEKMIKKLIEEIEEVKKKIHDHIEQYPDLRTKSNLLETIPGVGEATIAQVLAFIGNVEDFKSAKQLAAFVGLNPKQHQSGTSVRGRTRLSKIGNSNLRKAFYMPAVVAKRHNPTIKKFCDRLKKAEKPTMLIIGAAMRKLVHIIYGVLKSGKPFDANLGTV

SEQ ID NO: 92610 - protein, 347 aa, unidentified
MLNDTAIAVDVAKNVFQVGVSERPGRLRQTLRLQRPQFLLFLATQPACTVVMEACGSAQFWAGRIERLGHRVVLLPAHLVRPYVRGNKTDRTDVKGILEAYRNEDIRPVPIKTPAHQALVALHRLRSAWVADRTARLNTLRGLLRELGIFIPVGSRKVIPEVWAQLEDADSAVPDSVRPLLAEACEEVREMEHRIGLVERQLEALAEQTPVVTRLRTIPGVGLLTATALFGLVVDIHRFPSARHLASYLGLTPRERSSGNTRRLGAISKRGDVYLRTLLVHGARSVLARARQKTDASHLDRLRDWAARIEKSRGHNKAAVALANKMARMVWAVWRNDVDYKPEAVAA

SEQ ID NO: 92611 - protein, 404 aa, unidentified
MIFIGCDWSRRKHDLNIMNSNGETLLKTAIDHSGESLAALAQKIACFEPDTEKVSVCIELHNGSMLAWMLDRGYTVYGINPKSAERSRDRYRCSGSKDDNIDAFVLADIIRTNTGYFRPIRRESERTRELRAWVRMRAGKVHETTATYQRLRAILDEWCPGLSILCNDLNNMWQRDLLMDFPLHKDLCSAHGNRINTFAKKHRLQKATRKRIQETKEQLPLPIPEGLLDALRMEIRLLIESIENLAKTISKIEAKLDQLIDSHPDSVIFKSLPVSGTATVAAFLSAFGQNRENAPHWRELSARWGAAPVTVKSGKSCHVKRRRACDHTMKQAFVAFAFNTAFKQGCWASEYYQHKRKNGAGHHTTLRCISQKWIKIIYCLWKNRILYAEHVHQNNRLLQGEHAA

SEQ ID NO: 92612 - protein, 426 aa, unidentified
MGIDWSDKAHAVCVVNEAGEKEQSFRVAHSPEGLATLMRRLRDRGGVRGVAVETKRHLLVWALVEAGFPVYPINPKLSHAWRQGWTVSEAKGDDRDAWVLADGLSHGHARLAVFVPQDEATRTLQQCCQDEQRLIGDRTRLVQRLEDALKQYYPGVLAWFADWTSPSAWDLVWRFPTAEALASSSKRQLMGFLKQHRIRVSPRWQERIAGRAGMRAWPVDPAAVVAKAEFVRALVAQLRGLAAILKRYRKQIDALFQAHPDHAVFASLPGAGPKLAPRLLSGFGADRAQFPSAQVVEQVSGTAPVTYASGASKQVHIRHACRKGFRCALHQFAGETISRSAWARAYYDLARARGQSHALALRNLAKKWLKILYRMWQTGETYDEQRYLEQLVKRGSPIAQAITRWKTRGKTTSKKLDLAHKKSSSG

SEQ ID NO: 92613 - protein, 316 aa, unidentified
MNTSINNEINIGIDTSQTQLDIYVRPNGDFQSFANTPEGIKQALRFIKPFNAVRVLIEATGRLELDFFCAAHDVGLPVVVCNPSQVRNFAKSTGRIAKTDKLDAQDIAYFGEATKPALSTLKPENLRRVSDLLTTRNQLLDMSTMQKNRLKRMPKTMHTFINNVLKTLKNEIARVEAQLDKCIAKIPAWQDKVDQLMSAKGVGKVLAYTLISELPELGKLNRKEIAALVGVAPMNRDSGSYEGKRYIRGGRHKVRTVLFVSMMSAIQCHPKLKPMYQRMVAAGKPKKVALVACMRKQLIILNTMVRDGTYWDENMV

SEQ ID NO: 92614 - protein, 397 aa, unidentified
MIAVGIDISKAKSTVAVIDSDGTVLASPFTMAHTQPEMEAFVTYLKGLGEPTTILMEYTGHYHYPVLKKLQDEGFPVCIVNPYQMKKYGDIEIHKAKTDKKDALRIAAYALEKSYKLVPYSSMEQKYEDLKFLSRQYSQRITYVAKLKVQLIALLDQTMPGITRILPLNSRNPEKCALLLFIKRFKSFDEIQRIGKARFLASYDVLAKKASERSASSKGLSIYELAVDSITTRGEDPYIWLSQNQCVDLLSATQNAADEIISQMRNIAETIPEYKVLRAMRGIGDRLGPIILAEIGDVHRFHSGKALNSYAGNDAPPYQSGQFESRNRHISKRGSSALRKACYEVMQALKLTKPQDDPVYLFMLKKEQEGKPFNVAKMAGVNKFLRIYYARAMELYK

SEQ ID NO: 92615 - protein, 366 aa, unidentified
MKKNSTVAKNRNEIFKQPKRTIGLDLGDRSSYYCMLDEAGNVILEHHLPTTPKAIQQVFRKIPRSRIALETGTHSPWVSRQLTQLGHEVIVAHARNVRLIGESSRKDDQLDARTLARLARIDPGLLGPVRHRSAKAQIHLTVIRARAALVGTRTALVNAARGLTKSYGERLRKCGTGQMNREIAKGLSQELRDALDPLLREIESLNERIAEYDRRIEQIATEVHPEVARLKQVKGVGTLIALTYVLTLDDPHRFRRSRDAGCFLGLRPGRRNSGQSEPQLHISKEGDRYLRTLMVQGAHYILGPFGQDSDLRRWGLKLAERGGTNAKKRAVVAVARKLAVLLHKLWVSGEIYEPLRNNHKVVSAVA

SEQ ID NO: 92616 - protein, 421 aa, unidentified
MNQLSGKSYTAYIGIDWASSKHDICLQLAGSEERLFERIKHTPEAIEEWARALYQRLGGPVAVALELSEGPIVSALGKYDFLVLFPIDPKRLARYREAFVPSGAKDDPTDAEFAMDYLMRHPEKLTPLKPESAPMRKLRYLVEARDRIRGDQSRYVNRLIQALKQYYPQAIDWFNDHNTLVFCDFVQQWPTLTKVRRARKTRLERFFKEHNVRFAHIIEERIQAIKAATPLTHDAAVIEAHRLQVEVLVEQLRLTIKAMKCFDEQIAAIAAQFPDYEHLYTPLPGAGKVIAPRLLAAFGEDRDRYHCAAQLQKRSGIAPITKRSGDSTWVHWRFQCPKFLRQTFIDFAAQTINKSAWAGAYYRQQRDKGASHHMAVRALAYKWIRVLYRCWQQRTPYDESKYLETLRRRGSPLLKQLAEAA

SEQ ID NO: 92617 - protein, 333 aa, unidentified
MNKFKHFLGIDVYKEFFDAVLILEGKKEHPVHNQFINNYKGIRALVKWLRDMGATGENTLVCLEHTGMYGKLIIKYLIGFSFSLWVEMSLRIIKSIGIQRGKNDKIDAERIAFYALKNVESAVIYRAPRQVVDKIRTLLSLRDKLTTNKLRLLQYDNEMVDFDKELTKISTKFNKNTLAGINKDLLSIEKQLDKFIKEDENLNKIFNQATSVTGVGKITALYLICFTNEFTMYSNPRQLACYAGVVPFEHTSGKSIKGRAKVHYMANKTLKKHLHLCAMAATNYDPEIKQYYQRKVEEGKSKMLVMNNVRNKLIHRICSCIKNEKLFEVKKIE

SEQ ID NO: 92618 - protein, 397 aa, unidentified
MSVVHKKHENLATFHALHRSAIGIDVHSNLIVATYQNREYGSSSLFNENRESGASKTELDAFASWCKAKEAEVLIMESTGVYWQSLYEALENVGFTNKQIVVVNARDVKNKRCSKTDLADAIHLAEVARQGTYRASFVPAKEFRQLRCLWRSFFTLKISRKKFLNIMHKQLCQVGCRASSVFSDIRGKKATKIIDCLINGEHGETLYNHIIEITSCKQGKLKATPQQIYDALQADMESEVWFAIRQNMEHIKYLDVQIVEAETNLRDKLKPYEHLMKLLTSIPGIKDITAMGIICELGDDLSQFTSIRRFCKRIGLAPGNNESAGKKYSGRTTPGNKYLKALLVEAASGIGLMKNGFLHEVHQRFKERRGTKKANVALAHKMCRIIFSVLTHGTAYQ

SEQ ID NO: 92619 - protein, 420 aa, unidentified
MSPPGASEPASELLLQYLLQHLLVQTQLSDQLLQPLILILQLPQTPQFRHARPGKFFLPVNGMDYLLPLRLTVRNVLTRRITMNIVFLGIDLAKNVFQLCGLNQAGKPVYTKRTGRKELLQTLANIPACLIGIEASTGAFYYWQREFEKLGHKVRVISPQYVKPFVRGQKNDGNDAQAIVVALMQPTMQFVPPKSPEQQDIQALHRARQRIVNHRTATVFQIRGLLLDRGIPIGSAVSRARRAIPLILEDAENGLSSRMRRTIAELYDLFNDLGRRIHFFDKEIETVFRQSEACQRIAKVKGIGPKTATAVVAIGKGTEFKNGRHFAAWLGLVPRQHSSGDRQVLMNMTKKGDKHLRTLFIHGARAVVRVATNNNDGHMNQWVNRLKERRGFNKTTVAVANKNARIIWSMLRNDTGYQVV

SEQ ID NO: 92620 - protein, 419 aa, unidentified
MPDERDNRPVRKFATFTEDLHALADWLMACSIKTVAMESTGVYWIALFQILESRGLEVCLVNARHVKGVPGRKTDIQDCQWLQYLHTVGLLRGSFRPAQAVCAVRSILRHRDILLKSASRQVLLMQKALTQMNLQLHNVISDITGLSGLAIIDAILSGEREPLKLSALCDSRIKASRQVVAKSLVGDYRPEHLFCLQQALESYRHFQSQIAACDEHIENMLAHFDSQEQCAEAPSTKYRAQGNQPAFDVPSEMHRILGVDLTAIPGMSAQAVLTFFCEVGPQITRFPSSRHFASWLGLCPDNRISGGKILSSKTRNVRCRLANALRMAATTLYRSHSSLGEYFRRLRAKLGSPAAITAAAHKLARILFGMLRDRRSFDPQLLEVLNEKHLRRRQNSLRKYAASLGFELVPIQNLAHSVS

SEQ ID NO: 92621 - protein, 457 aa, unidentified
MKKNKKRNMHNSEFKQINFNAAGIDIGAETHYVAVPDGRDPNGQDIRHFGTFTSDLYAIADWLQQCQIDTVAMESTGVYWIPLFEILESKGFDVKLVNPRFIKNVPGRKTDVVDCQWIRQLHSYGLLKGSFRPEDQICVLRSYLRQRALLVSYASHHIQHIQKALEQMNIKLNRVIRDITGDTGMKIIRAILAGERKPKKLAQLRNSRCKNDVKTIAKALHGNWRSEHLFALQQSVELFDFYQKQIADCDFKIEQHLFNFEDRSNGEPLDKSRKATGRNKLSFDARTHLFQMTGVDLTKVDGLDSLTVLKIISEIGLDMSRWPTVKHFASWLGLSPGSKISGGKVLSSKTKKCANRAAHYLRLAAYSLHSSKSAIGAFFRRKKAHLGPAKAITATAHKLARIIYNMLKNGTEYKDVGQDYYEQRYKNRVLQNLKRRAKQLGYELNYVKEQQELIQII

SEQ ID NO: 92622 - protein, 370 aa, unidentified
MSTSTDHSRTDLPSDPGSPGSRMYAGIDVSKAKLDLARSGSGSGSDAVETFANDAAGVGRVVEVLAALGPALSVVVVESTGGLERPLVEALLDAGLPVALVQPGRVRYFAKGLGILAKTDRIDALVLRRFGELAAPRLLERRSKNQAELRDLVACRRQLVQTRAQQYNRRSSTFSKAALRSIDAVVGALDRQVESLDRQIRRLLEADDDFKHLDGLLRGVPGVGPALSATIAAELRELGRVDRQRACALAGVAPFNDDSGAVKGKRSIRGGRTALRCVLYMAALSAMRSNPVIRAFAARLKAGGKAGKVVVTACMRKLLTLINAMLRAASPGTSSTSSKNSQRTVDSKHSRSVSLWRICSAEIRPTQGRH

SEQ ID NO: 92623 - protein, 430 aa, unidentified
MEDWWGGNSCFYRDRGGMRMSKVLERASLSFFLGIDISKEKFDACCIGSNGDKRFRMSASMSREGFEEVLMKVSSITKDKETIIIGMESTACYHINLYSFLTAKGFAVVILNPMLISNFMKLQLRKTKTDKKDALVIAQFLLMKKDSLFQNVLSAESVDMRDLSRQRESLIDQMTAIKNDTKRLLTVTFPELEHIGGIFTKSMLRLISHYPSAKAIRKAKRSKIAAILIPGTYGKQTEESVDAIIKAAATSIGTASPAKEMLIKQKTAILTQLEDHLQEITDMLLEHCQAQMKDNIDILTSILGIGEKSATNFLIELGGDPRLFPGHRQVIAMAGLDPSIYQSGKYVGLSKISKRGNSHLRRIIWLMTVKVIQFEEYFRCYFEKRMKEGLIYKKAVLATAHKLIRVLFAMLSKRTPFNAEANARSMVSVG

SEQ ID NO: 92624 - protein, 343 aa, unidentified
MSEQYVGRQIVGMDLHRRRSVLVRMTETGERLETVRISNDPEYLREVMARAGEAPEVVLEATYGWYWAADALAELGATVHLAHPLGVKMFGLRRVKNDERDAADLADLLRMGRLPEAWIAPPATRELRGWVRHRAKLVALRSCVKNQIHAVLAAAGVQVPMSDLFGPSGRKLLAAAPLVVESRSRVESLLRIITALEFEIDLYTRLVAGRLRTDPGYRAIQAIPGIGPVLAAVFVAEIGDITRFHRAAELASWAGLTPKHHESDATVHRGPITKQGDRLVRWAAVEAVQRIPAHTRLGQVRDRVGERRGRNIGVVAAARELITLVFYGLRDHHLRCLPTRPAA

SEQ ID NO: 92625 - protein, 315 aa, unidentified
MSDVPCFVGIDVAKAQLDIALRPSGERWAVPNDASGVMTLVDRVQALHPTLIVLEATGGLERAVTSALATAGLPVVVVNPRQVRDFARATGQLAKTDALDARALAHFADVIRPTPRPLPDAQTQELRALLGRRQPLIGMRTAEQNRLAGTNARLTKDIAAHMTWLNAAIATLDDDLETILRASPLWRENDDLLQSAKGIGPVCARTLLLELPELGTLTRQQIAALVGVAPLHCDSGTLRGRRMIWGGRAHVRTVLYMGTLVATRFNPQIKVFYERLLAAGKVKKVALTACMHKLLTILNAMLKHRTPWQPQEVQS

SEQ ID NO: 92626 - protein, 343 aa, unidentified
MAQQTIIGIDLAKHVFQVCMVTPTGTLKTNTTVARGKLLALIARQPPALIFMEACGGAHDWARRFGALGHEVRLLAPQYVTPFRRGQKNDPNDALALTEAGQRPNIPTVPIKTVEQQDLQALHRVRERLVKHRTAVVNQVRGLLLEYGIIIPQGIARLRKRLPRVLEEADNGLSFLMRDLLQSLQSELSALDTRITEVTSQLTRLGHEMEACQRLQAMEGIGPLSATALVAALGNGHDFQTGRQVAAWLGLVPRQHSSGGTTRLGGITKGGNSYVRRLLIHGARSVISHVRDKPDAKSAWIRQLVTRIGVNKACVAVANKMARVAWALLHTGEHYRKPAVLPI

SEQ ID NO: 92627 - protein, 341 aa, unidentified
MMIIGCDFHPRFQQIAFVDQETGEYGERRLNHPEEAEQFYRSLSGTRVRVGAEATGNFRWFRHLMEELGHEFLLGDATAIRAACPRRQKTDKRDARHILNMLVEDRFPTVWQPPMENDHVRQLLLHRCRLVRMRTRIKNQLDSMAKNEGVLSSRVWSPRRRSEIEALPLPGWYAHRRADLLGLLDELDKRICPLDKAVQEAAEGNLEARLLMTHPGVGPIVSLAYVLTIGDWRRFPRGKQVGSYLGLIPAEESSGNSRRLGHVSKQGSSLVRWLLVEAATTAQRYDASWHRQYVRLSMGKHHGVAKVAIAHKLAVRLYWMLRSGEDYSKVMERGSHAGQSV

SEQ ID NO: 92628 - protein, 369 aa, unidentified
MADRITYVGLDVHKESIVVAVAEGGLRGEVREYGRIANTATALDRLLRKLGVDGMLLRFCYEAGPCGYGIHRRLSTQGYECAVVAPSLIPKRAGDRVKTDRRDASSLAKLHRAGELTAVWVPDARHEAMRDLVRARLDAVHSLRRARQQLSGFLLRQGCHYGRPAWTKLHRRWLAGLKFEQAVHHLVLEDYIATVEAAETRRDRLTAQIEAILPDWTLAPVVAALQTMRGMALVNAATLIAELGDLSRFTNPRQLMAYLGLVPSEHSSGASVKRGGITKAGNGAARRLLIEAAWSYRFPARLSRELLLRQENQPRSIRDIAWKGQVRLCARYRRLTRAAKPANVVTTAIARELSGFVWAIARHVTMPAS

SEQ ID NO: 92629 - protein, 365 aa, unidentified
MIVLGADMHKRSHTIAAIDAASGAMLSERTAQVGVRGFDELLGWARGLGEQRVWALEDCRHVSGSFERFLIGRGERVIRVPTTLMAGERRGSRQRGKSDSIDALAVARAAIREGLDTLPTAHLDGPELDLRLLVDHRERLIRQRVALNSTLQWHLHDLWPELEIPSCSLFYGNWGPRIARRLARAEQTMRVRVARDELRRIRELSQTVKAVEKEIGVLVAAIAPQLLDEPGIGPLTAAKLVGEIAGAGRFKTDAKLARAAGLAPIPVSSGKTNRHRLDRGGNRQINAAIHRIAITRARCHPETQAFIARKKAEGKTTREAIRSVKRHLVRRIWHLLRAPDPLLFNDAISIEKKELQNRSTALLLT

SEQ ID NO: 92630 - protein, 468 aa, unidentified
MTADKKLWRNRKERKEWARRLQSEDPGLEVVHPHAAGIDVGNSAHYVAVRPERDPQPVRRVECFTADLRRLADWLQSCGVKTVAMQSTGVYWIPLYEILEERGFEVYLVNARHTRNLPGRKSDVQESQWLLKLHTYGLLNNSFQPPAEIRALRTYWRQRGEHVAGAATCIQRIQKALTQMNLQLANVISDISGLTGQAIVRAIVAGERDPRKLAEFRDPRIQASEEEIAKSLEGNWRPELLFVLQQELEMYDTYNGGSPSATCNYRSTSPVSRITFRRGRPEVEPDGKKRKRAKPAKNAPRFDLSCELQRITGVDLTRIDGIDVMIAQTLLSEVGVDMSRWKTEAHFASWLGLCPDNRVSGDKVLRRGTRHVVNRAANALRQAANALIRSRSYLGAQYRRLRTKLGAPKAITAMAHRLARLVYRMLKYGQRYVDKGTEYYEQRYRNQQIQLLRKNATKLGFQITEAQA

SEQ ID NO: 92631 - protein, 343 aa, unidentified
MSTVVTIGLDLAKSVFQIHGVDDAGRAVLRRRLSRHELTSYFAQMPACLVGMEACSAAHHWARELTRLGHSVRLIPPQYVKPYVKRNKTDAADAEAICEAVGRPNMRFVPIKNLDQQGVLSLHRVRSLFVRQRTAAINTVRGLLTEFGIVAGKGIRRVAELRQRMDKVGSDLLPAEARAAIAEAFDHVDELTERISAMEDRIVAWHRNSEASQRLASAPGVGPITASAIIASVGGGRQFRSARHFAAWLGLTPRIHASGGKEHIGKISKGGDRYLRALLIHGARAIVGTSFRKDVKPRPWLKQLLARRPVNVAAVAVAHKTARALWAMITREEEYRRIAVQAA

SEQ ID NO: 92632 - protein, 446 aa, unidentified
MAQRTRPKLDIANPNAAGIDVGSASHFVAVPSDRDDEPVREFKSFTEDLERLADWLIACGIDTVAMESTGVYWIPLFELLESRGLSVYLVNAQHVKNVSGRKSDVLDCQWLQQLMSYGLLSGAFRPKQEICALRSIMRQRGMLLSYQGQHVQHMQKALAQMNLQLANVISDVVGETGQRILRAIIAGERDPLKLAQLKHARVRASKEHIAMSLHGNWREEHLFELTQAVELFDAYSQALQRCDLKLESMLERLGRSQDQPGPSKRRRYSKVKNAPKFDVRTYLFRICGVDLTAIDGIDTTTALKVIAEIGPDLSRFKSAKHFASWLGLCPGTKISGGKLLSGTTKRTANRVAQALKMAAISLRASQSALGAYFRRMCARLDKGKAVTAVAHKLARLIYAMLTKGAAYLDQGQDYYEERYRQRVLFHLKKKAAALGLELIPVQTQPA

SEQ ID NO: 92633 - protein, 362 aa, unidentified
MSPQDLWVGIDTGFDQSHLCVIDGELNLIADCILTTSATAVIEVLAANGMAKVQSIALEATACSTELVRGLREAGYPAVMYDAGQVSKYLRIRGNKTDRNDALGLAEVAKFGLPALSAVHLKSPEIQRVRAILQLRHKLIEQRVASENMVRSLLRMHGGRLPHAGSAVAFERNLVAEVDRLKLEGKIDLEDQLLPLGHVCINQRRAAQALSRALERWAKQNEQCERFREIPGVGVICAVSFFTAIEDPHRFEKPETVGAYFGLTPDIRQSGKSLSRGRISRRGNKLTRTHLRAAAKTVLSSRTKSSTLKEWGARLAARIGTGKAQIAVARKLAITMLAMWKDNTKFRQPNLEVFEAIEIPSA

SEQ ID NO: 92634 - protein, 326 aa, unidentified
MTSSSKYIGMDVHKESISIAVMNAVGKIVMECVIETKANMILQCIDGLRGDLHVTFEEGTSAAWLYDLLKPHVTELIVCDPRKNASMREDNQNDKIDARRLAELLRIDHLSPVYHGEHGLRTLKELVRSYLTVTKDLVRVKTRVKAIYRSWAILCDGKQVYAACHRAEWLEKIKELGVRRRAEFYYQQLDALRVLRQGVRRELLAESKKQKAWKQLRQIPAIGPIRAAVLLGILQTPHRFRTKRPLWKYSGLAIETCSSADHRSINGQLQRSKKNSVREPKLQSRSKESVQGGGGHRLQQTRSVPGVLRGFIGQRHEARNGATDLG

SEQ ID NO: 92635 - protein, 414 aa, unidentified
MVVGWAHWIGTTTEVPVSHDVWAGIDAGKIAHHCVVINDAGEKLLSRKVSNDEADLLRLIEDVAAIANSGRVQWALDLNAGGAALLITLLVEHQLDFVYIPGRTVHHASAAYRGDGKSDAKDAAVIADQARMRRDLHPFRQRDEITMDLRLLCARRTDLAMDRNRAIARLRATLLEYFPALERAFDYAHRRGALTLLTRFQTPAAIRQAGPVKISAWLRRHGAYSPDTIAQTAVSAAASQRTVVPGQQTAAKIAAQLAQQVITLDAEMDTIEADITERFRDHAYAPAIESMPGFGPLLGAELLVGINGDTANYENVDRLASIAGLAPVPHDSGRITGNLKRPRRYDRRLLRACYMAAHNSLRTNPESRAFYDRKRAAGKRHNQAVLALARRRLNVLWALIRDETTYQPVTLKAA

SEQ ID NO: 92636 - protein, 412 aa, unidentified
MRRLIERCAGLDVHRDTVAACVRVPGEGGERQQEVRTFGTMTSQLVALREWLVGLGITLVGMESTGIYWRPVFAQLEDHVECWLLNAEHLHNVPGRKTDVADSVWICELTEHGLVRPSFVPPKPIRVLRDLTRYRTVVARERGHEIQRLHKVLEDAGIKLSSVASKVLTASGRDMIEALVAGTRDPEVLAEMARGRMRPKIPQLVEALQGRFGPEHALVATRMLARIDHAEEVVTSLSAQIKEVIAPWEHQVDLLVTIPGVGRRIAEVIVAEIGPDMGRFATSAHLASWAGMCPGNNESAGKHRSGKTRKGSRWLRVALVEAAHAAARSKGTYLSSQYARLRGRRGPAKAAVAVGHSILVIAYHIISNQERYSDLGADYFIARQSKETYKNRLVAQLERMGHKVTLEPIATA

SEQ ID NO: 92637 - protein, 319 aa, unidentified
MNTTTAAHINRSERNVGIDIGKSMLDMCIYEVDIYTQYPNTPEGVRQLLKQLSRYKVTRIIVEATGGYERTLVESCADKELPLIIIQPMQVRQFAKAQGIIAKTDKMDSRLIAQFGAVMKPEPKPLNSKKIRYTRDLLSRKRQLNDMRTQELNRQHKAAAALVATHKRVIKVFDTEIERINKLLAKAVSEVTEWQRTYEIASSAPGIGDGVAFTLLGELPELGNLSARKIAALCGLAPFNRDSGVMKGRRRIQGGRAPIRTVLYMAMLSAIQCNPIIKHFYQKLVAQGKHKKVALTACMRKMVTMLNAMVRDNCEWQTN

SEQ ID NO: 92638 - protein, 385 aa, unidentified
MAQFEDLSRCLAAFDQNSTLVTVVEMSQSSWLVAGLVPGVTRQPLKKLEPDGAALLRLVQRWRSEAVKAGRMIDRIVLAYEAGRDGFWLARWLRSHGIESYVIHPTSIPVSREHRRAKTDRLDAAMLLRALLGWLRGEPKHCTMAAIPTIEEEDAKRPSRERESLVSERTRIVNRMKGALARLGIRGFKPELRKAAQHLDGLRTPESTPIPPNTLGEFRRGTARLAVIHEQIKAIEVARLEHLQQAPDSGPPAMVRLLARVLGIGVETADMLVHEILYRKLRDEKAVARYAGVTGSPDESGTKRREKGLAKAGNARVRRGLIQLAWRVLLFQPDSALVQWYRARIAEGARKTSTIVALARKLLIALWRMVNTGEIPVGFVLRPAV

SEQ ID NO: 92639 - protein, 389 aa, unidentified
MQVIADRPEAPSAIRSDLGAIFVSLELSRSSWLITSLSPGGGERMSKHSVAAGDIRVLLTRFSALQQKALARTGRSFPIIVIQEAGLDGFWIHRALQKEGIESHVVDPASIATSRRRRRAKTDKIDGEALLRALLAYKRGEPRVCAMVKAPTPEEEDRRRLCRERKVLIAERVSHVNRIKGLLFCQGVSGYQPLDRDRRGRLDELKTGYGRPLPKHLKVQIGRELDRLELLLEQIKAVEAERDALLDAQRIVATSPVAMLLDFNGIGPEFAAVLWSEGLFRHFDNRRQVASYAGLAPTPWQSGSIDREQGVSKSGNPRLRTTLIQLAWLWLRHQPKSALALWFEERVKRNGGRHKKSAIVALARKLLVALWKYVTAGVVIEGAVMKTAG

SEQ ID NO: 92640 - protein, 449 aa, unidentified
MKILALDLGKFNTMCCFFDTKTRKHSFLNAPTERNYLNTLFKNHKIDLVVMEACGPSGWINDLASSHGLKTLVCSTNEDAWKWSNVKRKTDKDDALKLSRMAAMNELKAVHMPSETHREFRSLVKYRKTFDCRINKMKCTIRAWFVNHGIEIDTGEKAWHSGRERINSFRKPLVECQPNELWKGELDLELTQFDALTVQLENVVKKLEALGKADPRIQRIRTIPGVGPRTAEILVACIDDPHRFTTGRQVSAYFGLVPRQYQSGETDRNGRITKRGNPLARTILVECAWASLRYNEWAKGVYDRICGKQKTRKKKAAVALARKIAVLAWAMLRDEKDWAPTHMIHVTESFGKMKRELKESLQSMKPKENSDQRKSRLRREAREAKAVADRPKKSVRTATAKRSRSKTTVVPNAAPPSNPTKRTTPKSTARTNLKPKPKPRRAGKLVSAV

SEQ ID NO: 92641 - protein, 345 aa, unidentified
MQITTVGLDLAKRIFQLHAVDASGDVVVRKALRRSQVLPFFTKLPPCLIGMEACGTSHHWARTLTELGHEVRLMPPAYVKPYVKRGKNDAVDAEAICEAVTRPTMRFVAMKSAEQQAALSIHRTRNLLVKQRTQLVNMIRGLLAEFGMDIPEGLERALALAREIAAKETTPDVPAVAMQILGLLCGQVLDTHVRLQAIDRSILALQKSDEVARRLSTIPGIGPVGATAFAASVADPRQFRSGREFAAWLGLTPSQNSSGGKDRLGRITKMGDRYLRKLLVVGATSLIRRARYKPETADPRLVALLGRKPVRVASVAMANKMARVVWAVMARGEIYRSRHAPNLAA

SEQ ID NO: 92642 - protein, 413 aa, unidentified
MKSWKEFTHFAALDWAKNHHDVVVVDRQGTVVADFRITHDCAGWQSFAEKLRRFEAVAVAIETSEGPAVEQLLASGFDVYPINPKSARRYRERKRPSGSKTDRIDAWSLADALRMDGHGWRPLPPVDPLLSELRQLCRDEIALIEERTALINQLQHALGYYYPTALEAFEDWALPSAWAFVEAFPTPEALLQAGHRKWERWLHANKLFHSRSNERRLELFAHAGEFRASSATTLAKSLLAVSRVKMLRLIERQLALYRKRIEMLFAQHPDHELFASLPGAGPKLAPRLLSELGEDRERFQDAESVQCYAGTAPVSFQSGQISRVTVRRSCNLHLRQAVHLWVDLSRKYCVWAQIYYRTHRDKGQSHACALRCLGQRWLKILWKMWQSRKPYDAALHQQNQVKHGSWVLQLKAE

SEQ ID NO: 92643 - protein, 335 aa, unidentified
MDREYVGIDFHRRRSVIVRENAAGEKLSSVRVANDPWVIAAAVAEAGPEPEVVIEATYGWYWIVDWLHEQGATVHLANPSGLNWGTRRVKNDERDATDLIDMLRLGRLPEACIAPPATRELRELVRYRAKLVALRSGLKAQVHAVMAKEGVLPAVTDMFCKAGNAQLDTMALGEAYTIRVESLRDLIEVYDREVAMLETKIRERLRGDRGYRAIQAINGIGPTMAAILVAEIGDVTRFRSAAALCSWAGLTPKHKESDTTVHRGQLTKQGSRLVRWAVIEGTVRYHGGSKLGADFRTIAERRGKNKATVAIARKVLTLVYYGLRDGEIRCLAKTA

SEQ ID NO: 92644 - protein, 363 aa, unidentified
MEAEKRRYVGIDLGKREYTMAIIGKNGKTSIHHGKTSIQGRQGLYRLLERSDKVALEAGNLAFIMAREIMERVGSEVRVLNSAKLPLIWDAPTKTDKEDARKLAHLIEERRDEKLPLVPLPSEKEMERRKILASYGREVKNRTKLINTLHALFVHQGHTTVVKKDLATAERRQQAIEILRGHEREDAEWILKYLELHEQRMGALKQKIQQEAKADEDMKRLQSVAGVGPIVAYAYVAHIGDGSRFSKGAQVSNYLGFVPRLDYSGTIQRHGHITKRGNGYLRGLLVQAAWSTVRSKNGGALRERYKHITAYQSASKKKTIVSIGRRLAEIMFSVLKNKTVYEPQQWKGIRNGTAALIEQAMSA

SEQ ID NO: 92645 - protein, 426 aa, unidentified
MRFIGLDVHKDFCEVAVVEGDACWSGPRVRSTPEDLEVFAQSLGPKDQVVLEATGGALAIARILEPHVGRVLMANPMAVRAIATAKAKTDRLDARTLAKLLAAGFVPGVWISDERTRLLRRLVSRHAHLVRQRTRAKNEVHAVLQRTLAGRPPVSDLFGKRGRAWLGAQDLPADERQTVEASLRHIDFLDGELRLVDRTMAIQVLSWPEVRWIMTIPGMGAVAAAGVMAAMGDVRRFPTSRHLVGYLGLDARVRQSGSGPARHGRISKQGSAEARHLLVEAAWAAMRTPGPLRAFGERIRARRGANIATVAVARKLAVLCWHLLTREEDYAFGQPSLVREKIRRLELAAGAPNRNGYRNPVRVFATPAQRRLEREVGDQAEKAYRRFVKDFRSSGKKGAGATTGARISAARKGQAARQEQAPDPAL

SEQ ID NO: 92646 - protein, 480 aa, unidentified
MNIKAKKAKVQPLSKKSVINVLSQDEIKKKVQVIEQELKASTWRELETKGKFEKNDKLSFISEEMLIVGCDIGSETHYIRAIDTRGKELSKGAFEFSNSSEGFASAKAWVLKLAAKNDKKQIVLGLEPTGHYWFAIAAWMVSNGISVVQVNPYAVKQSKEIEDNSQLKDDRKDPKIIANLVKDGNYGMPYLPEDIYADMRRLSMFRDQLTEDRIRNINRLHREMKIYFPEYMDAFGKIDGAFTLEILKVAPIPSDIVELDEEGLKSLWHEAKLRGRGYSRARVIVDYAKKSVGLTGGTDAGRESIKWFVEQIIQLDEQLAEIENVLHQKCMEIPHAENILEINGVGENILAGILAEMGDISRFDDVKEIQKLSGMGLVACSSGKHKGQTKISHRGRKRLRYWLFQAAKSAVAHAVEFKQLHAYYTTRSMNPLKKLQSLVVIACKILRVIYTILNIGMKYDPERMLRDIRYPQGNTVQAAA

SEQ ID NO: 92647 - protein, 411 aa, unidentified
METLIARCCGLDVHKAQVTACVRLLIDGAVTEIVETFGTTTPDLLALRDWLKSHAVTHVAMESTGVYWKPVYYTLEDEFNVLLVNARDVKHLPGRKTDTIDAAWIAKLLAHGLLRASFVPPKPIRRLRDLTRFRKALIEERSRAVNRLHKLLEDAGIKLSCVATDVMGVSGRAMMRALIEGKAEPEALAELAKGKLRRKLPELRKALTHRFSGHHAFLLERMLAHIEELEDDIEAISTRIEEEIRPFEPAVELLRTIPGVERRAAEVMIAEIGVDMTVFPTAGHLASWAKVCPGQNESAGKRKSAKTGKGSKWLRKTLTESARAAARSRETYLSERYRRLAARRGDKKAIIAICHEILCVAWHMLQTGELYREQGADQFRQRDQDRIRQRAINQLEKLGHKVVLQELPQAA

SEQ ID NO: 92648 - protein, 379 aa, unidentified
MDNTTLVAHCTQETMGLDLGDQRNRYCIVDADGKIIDEGQVGATQRGIEKLLSGRQPLLVAIEAGTHSGWVSRAVVKLGHRVLVANPRKLRLIYGNERKNDRVDAEYLARLARLDPKLLGPIQHRGAEAQSHLAMLRSRDALVGARTEMINHARGVVKAFGGRLPSSSTPAFCKRAWEEVPQELRGALGPIFEQIASLSKHIRDFDRSIEELAQKKYPETRNLYSVPGVGWLTALAFVLTIEDPRRFPKSRSVAAYLGLVPRQDESGARAPQLRITKAGDTTVRRLLVTAAHYTLGPHGPDSDLRRWGRALATRGGKNAKKRAVVAVARKLAVILLRLWVTGQEFQLVRSGGPAPAVGAVAAGTVATSESASASDEAQG

SEQ ID NO: 92649 - protein, 336 aa, unidentified
MKKLYFLGIDVAKDCCDFALLNAKGSRLWSAQFDNNPTSIKDWLRGLKARGLDLSQILFGCEATGVYSQALLLTLQKANVAVCLLNPARVKYFGVSILRRTKNDGADALLIARYLLERQPVASRPLSPLENQLKDLVHEREALSIDLARERNRAEKHRILPSKGHPVLLNQRKERLSQLKTWLGDLDLAIKELIDSEPSLRAQAQLLCSIPGIALCSAAKILSQLVGKEFQSAHQLALYAGLNPMQNQSGRLKGKTALSKIGNALLRKALFMPASVAARYCAPIKHWAQQIRARRPEFSKLQIRGAVMHKLIRIVFGVLKHRSPFDPKLASTFYNA

SEQ ID NO: 92650 - protein, 342 aa, unidentified
MDYYAGIDVSLECSSVCVVDASGKIIREAKVASEPQALIDGFRALRFGLVRIGLEAGPLSQWLYAAMTQEGLAVELLETRHVRDAFKAMTVKSDRNDARNIAQLMRLGWFRPVHCKSLAAQEVRAMLTARKLVQSKLLDVENSLRGILRGFGLKVGKTTKTSFASRIEELVKAHPNLKTIAEALLRARAVLLAEFNDFEKRVRRLSALDAKARLLMSTPAVGPIVSLTFASAIDDPSRFTSSKKAGPLFGLTPKKYQSGETDYSGRISKTGDASVREALYEAAHIMLTKPIKGCSQLKSWAMRIARRAGPAKAKVALARKLAVIMLRMLMNNMPFNPAARGA

SEQ ID NO: 92651 - protein, 364 aa, unidentified
MKQKEKHNTIGLDLGEGRHRFCVLDEAGEVVEQGSLSNERAVLARLTQRYRGALVVMEAGTHSPWLSRYLKELGSEVIVSNPRKVRAIYQHERKSDQRDAQMLARLGRMDRALLYPVHHSSEQAQQDLLRIKLRDSLVRARVGLINSVRFSLKSLGYTVRNPSSERFHKVVWETLPEAVHQIISPSVQALAELSARIKVLEHEINLLARTKYPQTLWLQQVPGVGALTALYFVLKIEDPQRFENVRDVGAYVGLCPRRDQSGGSDPQLRISKRGDAYLRRLLVSAAQYILGPFGPKSALRAYGLMLAADGSARAKKRAVVAVARKLAVLLLSLWKNRSHYEAFPQWQTIEDKRSGTIAMHRVEA

SEQ ID NO: 92652 - protein, 378 aa, unidentified
MKEESTMSNVTSLAVDLAKNVFQLYGIDANRKEVLKKRIKRSQLLEFMANLNPCDVYMEGCGSANYWGRKFKELGHKVKLINPKYVKPYVKRNKNDLNDAAGIISAAYDPNMKFSEVKNEEQQDVQSTHRIRSRLISQRTALANQIRGLLAEYGITIPKGISNISKHLPRIIGNNEGNFSGLMLGNLISLHEDFMYLNKKLASYDEKIDIMFKSNEVCQRLKKIPGIGRIGATILAAVLGNGAGFKNGRHFAAFLGLVPKEHSSGDQKKLLGISKGGDTYIRTVLIHGARAAVRCSKGKDDPHSKWINCLKTRAANNVTAVALANKTARIAWAIVHGNGDYNPNHKPPEFADPAINNASEFATAHNKVRAHSLAQLGS

SEQ ID NO: 92653 - protein, 346 aa, unidentified
MLYAGLDLSRKRLDFHLLDGEGETVDVGAAPPDADGLLGLTRRLDRHREPIRAAIESMNGARFVHDRLELAGWQVEIADAQKVKGLAPLACKTDRIDAWVLAELARRDLVPAIWLPDPLVRAERERARWRLHLVRHRSSLKQRVHAVLLTHGKPCPVSDLFGVRGRQLLARLGLPQPWQATIEASLRLIDELDREITNCERELGRLGADHRYVPLLLTVPGIGWVLAYTIAAEIGDISRFPSPRKLAGYTGLCPRVYQSGERDLRGPLAKQGPKYLRWALVEAATHACTAAIYRDRYQHTKARIGKQRGAKVAQIDLARRLSEAIWHMLSRNEPFAPKGATDPLAA

SEQ ID NO: 92654 - protein, 340 aa, unidentified
MTIVTLGLDLGKNWVHMVGLDADGRIVLRRRVRRDRLFVETVDMPPCLIGMEACCGAHHLGRALAAQGHTARLMPPQYVKRFVKSNKNDHRDAEAAAEAVQRPTMRFVPLKSEAQLDLQTIHRVRQRLVGRRTALINQLRAILLERGITVPRRRRVLELRLRAILADESARLSARVRHLIEDMRAEWRDLDARIDAFDAELTAKARQDDACRRLCEIPGIGALNATALVAAVGNGAVFDRGRDMAAWLGLVPREYSTGGKQRLLGISKRGNKYLRTLLIHGARAALPYLAARNDRLGSWLRSLLARAHRNVAVVALANKLARIVWAVLANDGCYAMPTTA

SEQ ID NO: 92655 - protein, 341 aa, unidentified
MNNQVAGLDLHKNQSYITVMDGDGQILEEVNLKSSADSILNFLGKFDKPEVVFEATRNWYWLYEALQRKGYDVTMAHPKKTKAIGEAKIKTDKIDSHTLAHLKRADLIPESYLAPLETRERRELLRHRVFLVRERAKVKSKLRTLLSKLNLNCPYSDVLGKKAICWLKERQEEMPQVFTGKLDDFLQLGGSLSTIIQVVEKKVGNQAADDRIVKLLVTIPGIGEFSAMVIKAEIGTIYRFPDADHLASYCGLVPSTHSSGNYTHKGSITKEGNRWLRWILVEAAGKLKAKSPHFKDFYYRILSKKTKQVARVATARKLAVAIYYMWKREEPFKEPEPRSTG

SEQ ID NO: 92656 - protein, 402 aa, unidentified
MTENQVWAGIDVGKEHHWVCVVDGNGNMMLSRKFVNDERTIRDLVTEVDELASEVSWTVDLSNVYAALLLTVLAEAGKTVRYLAGRQVWQASVTYRGGESKTDAKDARVIADQSRMRGEDLPVLRPGDDLITELRMLTAHRADLVADRTRTINRLRQQLLAVCPALERVAELTQDRGWAVLLAHYQRPKTIRRTGVSRLTKMLDAAGVRNAATIAAAAVTAAKAQTVGLAGEDIGARLVAELAQGVMSLDERIKTTDADIEERFRRHPLAEVITSLPGIGFRLGAEFLAVVGDPALLESPDQLAAWAGLAPVSKDSGKRTGRLHTPRRYSRRLRRVMYMSALTAIRCDPASKAYYQRKRDQGKRPIPATICLARRRVNVLYALIRDNRTWEPDAHQIASAAA

SEQ ID NO: 92657 - protein, 358 aa, unidentified
MQQRKKINFEGQNIYIGIDVHLKNWSVTTITQSGYKKTHSQNSSARELFEHLRKHYPGGKYQAVYESGFTGFSTYYALKEYDIDSMVIHAADVPTTQYESVMKSDSVDSDKLAKALKTGTLKGIYVHRRENLDARGVVRLRKTLQTQLGGYKSRVKHLLHNNGVVFPEYFTKNTTHWSKRFMRWLREDVILLSPTRTSLDLLLDQVELFRKNLLNATRQIRALSRSEHYARTYENLASIPGIGMLTGMSLLTEIDDVERFHNEKHFASYLGLVPTSYSSGEKIVNGEKTFRGNKLLGPMIVESAWIMIRYDSVMAAAYGEYCKRMKSQEAVIRIARKLANRILKILRSGQKYEYDRCH

SEQ ID NO: 92658 - protein, 352 aa, unidentified
MNATTVAVDLAKNVFELAVADSRWKIVERARLTRAQFERWFDNRSVELVVMEARGSAHHWARTLRARGIEVRLLPAQYVRAYVKRNKTDAADAQALLEAARANDIRPVAVKSIEQQALQALHRTRSGWMSTRTRRINTLRGFCREFGLVVPEGAATGLAQIARYLADERSGLPALLRPAMRLVLEEIRLMEARLGELERQIAQLAKRSPACQVLQSVPGIGLLTSTAMVAAVADPASFASGRRYASFLGLTPREYSSGSTRYLERISKRGDRYIRMLLTHGARSILRAAAVARRAGRQIDRLKSWALAVQARTNHNKAACALANKLARIAWAVWVKHEKYRAESAHTASLSA

SEQ ID NO: 92659 - protein, 446 aa, unidentified
MGNGSGLSRGDRNRNARLARLRELVPLSNAIVGIDLADDTQAAVVTDHDSRVIARRRVSARAWELGEVLDWAAARAAGAGFASVTVACEPTGHRWRVLDQLAAGRGLALVCVQPLLVYRAREGEDLTRDKSDPKDAVLIARLASELRCYEPERASAVWARLRHLGARRGQLTTGATAAVNQIRDLLDCAWPAALAASASPFRSVSWCASLAVVLDRCAGDLSRVRRLGLDRFTAAVRRELPRWGGIRPCLRIIRAVFAALADPAGVTAHRPGALERAHLALGDWRDIRGRLADTEARMRTVMDDLGLADLVTTIAGLTVTGAAAILAETGDPARFATPRALVKHAGLCPRDNASGAAQGKTSISGRGRPGLRLAAWRAVWAAMPNNPVMAARFAHLTTRQDNRLASQQARTACAAALLRWIHVVVTRHVAWDPAIAAGSAPAHRAG

SEQ ID NO: 92660 - protein, 423 aa, unidentified
MPYRITGIDVHKKKLAVVMADVEVDGEYQFERRWYGSNPEQLQLLAKWLVEHQVEEVVMESTAQYWKPVWSALERSWKPMCQMGQGAGRMSGALHLAQALSNRGRRGGKRDFLDAERLVKRLVSQELTLSFVPDTEQRLWRTLTRTRYQRTRDKVRLQNQLEALLEETHIKLSSLVSDLLGVSARRMLKALADGENDPAALAALADHRLRATPAQLCDALGACTELNSVYRRLVKMTLADLQFIEQQIEQLDQEIASLLREHQNAVQRLAEVPGLGVDSAQQIIAEVGAKAATFASAKNLTSWVGACPGEEESAGVNKSRRSPKGNRQMRRILNQAANAAVKRKGSIFEILYRRLVLRLGHNKAIGAIAHRLCQLIWIILHNGVVYEERGPAVCEKSKRVRTLRMIRTLRTLGYRVEPLGNPA

SEQ ID NO: 92661 - protein, 375 aa, unidentified
MALPILWVGIDVHKDSVMIAVFRGRATTPAYLEKVSFDPNRLRRFFQRVADRGEIRACYEASGAGYVLQRWLAAWGYGCDLIAPSLIPSKAGDRRKHDKRDAIQLARLYRAGELTTIHIPTEAEERMRDLVRCRETFQREILKSRHYILKFVRRRGFVFREGQNWTARYFDWLRWLYTETKLSREDRIVFGEYLALLEYKLDRRVELDRQIEALALAKPYQAAVEALRCFRGIDTHSAMVLVTEIGDWRRFERPQQLMAYLGLVPSEDSSGDRRRQGSITKAGNSHGRHVLVQAAWNYRHRPTIGAALRVRQQGQPPSVIAHAWKAQHRCFKLYHRIAAQRPPQIAAVAVARELVGILWAVMTALEESTSRRRAA

SEQ ID NO: 92662 - protein, 413 aa, unidentified
MTDESLSWFAAVDWGSEKHQACILDAKGDVAGEREFPHSGTGLTELCDWLLSVACDTSAVAVAIETPHGPVVDVLLDRGFAVYAINPKQLDRLRDRFCVSGAKDDRRDARVSADGLRADRHLYRLVQVSDPAVIELREWSRLLEELQQERVRLCNRVRHQLWRYYPHLLDLTDDVGADWFLELWALAPTADKAGRLRETTIARLLKQHRIRRLNAETACRILRQPAIKVAAGVTEAAVLHLRSLFARLRVVNRERHQAERKLDELCTELSERASEGQSGEPCDVAILKSLPGIGRVTLAALLAEASGPLSRRDYPALRTLSGVAPVTKRSGKSNIVVMRYAAHARLRNTVFHWARAAVQNDPKSSCRYAALRKRGHSHGRALRGVADRLLQVACILLQRQTMFDPDRCQPAAA

SEQ ID NO: 92663 - protein, 416 aa, unidentified
MPAFTLYIGIDWATQTHQVCVMDAYGAILREFVVDHTGESVREFLRSLEAASVEPSKIAVGIEVPRGPIVEALLERGYAVFAINPKQLDRFRDRHSVAGAKDDRRDAFVLADSLRTDQHCFRRLSIEPATVVRLRELARAEQEAGEELRRVANQLFQLLLRYYPQVLELCRFPDEPWIWGLLEIAPTPEQAHRLTLARLRNMLTKHRIRRVTAEDVREILGRAALPVATGVAEAISERVLLMLPRLRVAYQQRKQIVERMEALFAHISGAEDESCGSLRRDVAILISIPGVGRVIAAALITEAFDALSQRDYDALRAHGGTAPVTRRSGKTTQIVMRYGCNQRFRTALYHWARTSVMHEERSKHHYARLRGVGHKHARALRGVADRLLALLVAMLKSGQLYDGARRHISPKIASAA

SEQ ID NO: 92664 - protein, 344 aa, unidentified
MQHYVGLDVSVKETSVCIIDEAGKVIREVKVATEPVAIFAVLTEEALAIERIGLEAGPLSQWLYSALAEAGLPVICVETRHMKAALSAQINKSDRNDARGIAHMMRVGLYRPVHVKTLASQKRRMLLTSRQLLQAKALDIENDLRGTLRNFGLKVGMVGTVKFEARIRELVADHPDLATIVEPLLIARRVLREQLGVLHRQLLEIVRHDQVCRRLMTTPGVGPVVALTFRATVDVPSRFTSSKAVGAAFGLTPRRQQSGEIDRMGGISKCGDALMRETLFEAALVLMTHSRKWSWLKAWGMKIARHRGMKRAIVAVARRLAVIMHRMWVDGTEFRWTTKEAAAT

SEQ ID NO: 92665 - protein, 343 aa, unidentified
MGEVSTIGLDIAKSVFQVHGVDAAGQVVIRRQLKRRYVLAFFEKLPPCLVGIEACASSHHWSRELKVLGHTVKLMPPAYVKPYVKRQKNDATDAEAICEAVTRSTMRFVATKTPEQQSCLTLHRTRHLFIRQQTAVINVIRAHLAEFGIVAPVGRKGVEALLDVVANPTDKRVPVIARACLAALGAQLCRLKEQILEFDRMIVTWHRSQETSKRLDAIPGVGPVLATALVASIADPKAFRSGRNFSAWIGLVPKQHSSGGKDRLGSISKQGDRYLRSLFVAGALAVIRYAKIHGTEHRPWLTALLARRPSKVAAIALANKIARMVWVLMARGERYKEPIALAA

SEQ ID NO: 92666 - protein, 313 aa, unidentified
MIHAEVIIGIDISKARLDIHVRPTGQCWSIENGRAGIAALVTRLTKLRPAAIGMEASGGYEQPLARALHAAGFDVHILAPARVRAFARAIGQSAKTDALDAAMIARCLDASRDRLEPYAPDPAREQLSALGAHRRRLIAERSGLTSQLDTIDEPIVRRMIQARVRSIALSLICLDKAATALLAAEPRLKRRVDRLRQAIGVGPVLAAALVADMAELGHISAKAAAALIGVAPHARQSGASKRPGRCTGGRKALRDILYMATLSAIKARDPVLATFYKRLREKGKPFKLAMVATMRKMITILNAIARDDPAFQT

SEQ ID NO: 92667 - protein, 500 aa, unidentified
MTVLVTFEKFFMYLPYTSGRMKMDVAASASGIAAGWYYEPVEKFDLSVLGYHGLFPPAMGEDVRENPCIRGTPLMPARRFWHRAEVTMRVEYERCCGLDVHKETVVACVIVPDAAGRAAKETRTFGTMTEELRALAAWLRAQGVTQVAMESTGVYWKPIFNVLEGEFDLLVVNAEHIKKVAGRKTDVSDAEWIADLLRHGLLRGSFIPSAQQRAWRDLTRYRTRLVDERTSEVNRLQKVLEDANLKLASVATDIMGLTGRLILQQLIAGETDPATLAQLAQGRLREKRALLEQALQGKVTPHHRFMLVEHLSHIDYLDEAIGRLDAEIEEQMRPFEEVLARWDQVPGIGPRIAQIMVAEVGVDLKQFEDAAHLASWAGLCPGNQESAGKRKGGKTRKGSRWLRRALTEAAHGAAHTKHKYYQAMYHRLVGRRGKKRAIVAVAHSLLVTGYYLITRKRDYQDLGHNYFDERQRDAVKRRAVRRLEQLGFQVSLTPPPEPVT

SEQ ID NO: 92668 - protein, 310 aa, unidentified
MPDSNKSLPHVIGCDVAKREIVVFDTATQATRAIANTPAALDAFAHSLDPDCLVVCEATGGYESALLAALLAHGRPAHRACARRVKAFIRSHGIQGKSDAIDARWIARYGTERHDRLARWAPVEAWRDQLRAMAGARRDLVCQRTAMGNRLKAPGAQAVAQQLRTVIAALDKAIGQLAKAMTDLVRRHTMLEATVQTLRSIPGVGPVTALELTAFMPELGTLSSRQAAALAGLAPHPRQSGNREGYRRTCGGRQTLKPTLFMAALSAARHHPQLAQFNQRLRANGKKPIVAITATMRNSSPSLTQKSATR

SEQ ID NO: 92669 - protein, 338 aa, unidentified
MKITTIGLDIAKSVFHAVGVDKAGKLIKKKMLRRKDLLPFVAKIEPCLIVMEACGGASYWAREFEQFGHVVKLIAPQYVVPFRQGNKNDYNDALAIAEAAQRPNMRFVKPKSVEQQDVQLLHRMRERLTKQSTALINQVRGMLAEYGIVITKSKSAFKAQLPDILVDEANMLTIKGKAIFYQLYDEVIDIEKRLKSCDTQVLNETHNNLIYQRLQTIPGVGPVTATAIYAAVGDGKDFSNGRHFSAWCGLVPKQHSSGGKDNLLGISKRGNAYLRTLFIHGARAVLRHSGSKSDKLSCWAIQLAERRGFNRACVAVANKLARMSWVIAAREEEFRLAM

SEQ ID NO: 92670 - protein, 344 aa, unidentified
MSNLDTCGIEVSAKELVLRLRRQGELEPLQNFANTSEGRERLLRHLQRTGRRVRVCLEASGLYGLDLALALSAPAGLEVMVANPRAVRHFATALMQRSKNDQIDAGVLEEFAARLPFQPWTRPAPAALALHALARRLTELVEMQTAEKNRQHAAQLSPAIPAAIRRDLARSLRAQQRAIERLTREARKLIAPSPDLAERFALLDSVPGIAETSAVQLLAELAVLAPDLEARQWVAYAGLDPREYTSGTSVHKKVRISKAGNKHLRRALYMPALVAVQHDPYLRAFYQRLLERGKLKLQALVAVMRKLLHAFHGMFKTHQPYNGAKLFQLKPTPAQEVPLATLAS

SEQ ID NO: 92671 - protein, 349 aa, unidentified
MSRVYVGIDIGSKQCAAVSINSRGRMIDSETFKTSARNLIGFVQRQRGEAAVLIEEGEMAGWVHGILKAHVASITVCDPKRNAWVAKGTDKNDGVDAAKLAELLRLGSFSAVWHPDGGEVAAFKVVVQHYDECSRRVARVKCQIKARLRRQGIITRGEAVYKGEGRREALERVESVPVRTVIEHEFALLDHLVSSKAEALRRLIEASRVFPVIKRLKEVPGVGPVLAARFVAYVGDPNRFNKRTIASYSCLAIVKRSSDGSPIGRERLSRAGNTVLKDLSRKVFERARAARGTNGIKEFYESSLARTGSATKARLNAQRKILALMLAIWRDGTEYRDELVTGQRAFTGA

SEQ ID NO: 92672 - protein, 347 aa, unidentified
MRFYTRRHKHYCGIDLHARTMFLCVLNEAGEVLLHRNIDCNPALFLLTIAPFRDDLVVAVECIFTWYWLADLCSGEGIPFVLGHALYMKAIHGGKAKNDRIDALKIATLLRGGMIPQAYVYPPELRATRDLLRRRLHFVRKRGQLLAHIQNTHHQCNLPEPTRNLINRSNRAGIPAAFADPTVRKSVEADFALIDTYDRIIRDLELHIARNARQHDPATFHRLRSLPGIGKVLALTILYEIHDIQRFPTVQDFASYSRLVKCAKESSGKKLGTGGKKIGNVHLKWAFSEAAVLFLRKNPKGQTLLKKLQRKHGKGKALSILAHKIGRATYYMLQRGTLFDREKFMTA

SEQ ID NO: 92673 - protein, 478 aa, unidentified
MAIPFRRFLVPSPGSANLRSLQGAESMVSRVKTSGKCIETVNADAAGIDIGSERHYVAVDPSRSDIAVRNFGCYTPDLEEMAHWLIDCGVGSVAMESTGVYWIPVYQMLEQHGLDVKLVDARHVKNVPGRKTDVVDCRWLQQLHSYGLLSGCFIPEARIGVLREYWRHRASLVESVSREILHMQKSLEQMNVQLHKVLSDITGVTGMKMIRAIVAGERRPLVLAGMRERGVKKSEAEIMKALSGNYRQEHLFTLKQALELYDLLHEKIRECDEKIEECLSGFESKAGPGQMSGKLPKCKSRRKNQPHFDLGKQLYRITGVDLTAIDGIDSLTAQTIVSEVGFDLSMFPSEKHFSSWLALSPENRITGGKVRMRRTRKSGNRVATALRLAAQSLHSSKSALGAFFRRVRARKGAPKAVTATARKLACLVYRMLRYGMEYTDLGQQQYQQRYQEHQHLLLQKRAAALGYQLTPLQTGGVS

SEQ ID NO: 92674 - protein, 350 aa, unidentified
MMIIGCDYHPGFQQIAFVDTETGELQERRLEHREEAEKFYRDLGAQGVQVRVGMEASGHARWFERLLSELHFELWTGDAAAIHAKRVRKQKTDRQDAQLILRLMLKDDFPQIWVPSWENRDLRQLLWHRHRMVQARTRIMNQLQAVAINEGLRCKKRLWRDAGREQLETFRLAPWASRRRRDLLELLDRLTPTIAELTAAIEHETARCPAAQRLQTHPGVGALTALAFVLIIGRAERFQCGKQIACYLGLVPLEKSSGNQRRLGHITKQGNSLLRFLLVEAAQVTVRSLPEWRSKYCHMALRRGRKIAKVAMARKLAVRLYWMMRKEWDYEQLRKFGSYAGKPGHRDGVR

SEQ ID NO: 92675 - protein, 346 aa, unidentified
MLHFGIDLGGMESQVCVREESGKIVLETIWPTGSLQELLKEYGPSRVVLETCAEAFAVAERIKVLGHDVRVVPATLVRQLGVGARGIKTDIRDARALSEVSCRIELPTVHIPKPVSRDIRAVASLRDALVRSRTLLINTVRGWLRTQLIRVPSGAKQTFAARVRKKLLERPEGMPVAIERQLVVIEELVKQVRSADEEIRSIAENDPTCRLLMTAPGVGPLTAVYFMTVVDEVKRFGGAQAVESYLGLTPGEHSSSLRQARTGITKAGSGQVRRVLVQACWSAWVHADKDPLVEWAQQVAKRRGPKVAVVAMARKLAGILYAMWRDGREYDSRLVTSATSSEEAAA

SEQ ID NO: 92676 - protein, 480 aa, unidentified
MNPIFRRCCGIDVHKNSVMVCVLAPVGQSRMGVKKRKFRTFTRDLKQMRAWLKNCKVTEVAMESTGQYWRPLWNLLEGHFGKLILVNPQHIKGLNGYKTDPKDAQWIADLLEGGKVKGSWVPPRPIRELRDLTRHRVNLMADLNRAKNRIEQLCQTGNIKVSSVATDLFGVSGRQMLKDLVEGEKDAGWMADCAKGRLQGKKRELTLALEGTFSVEQRWLLRKELRQVEWLEEQIEALEQEIERRVVDFEEPIRRLVTIPGIDRKTAWTIVAEVGIDMSVYGDAQHLASWAGLCPGNRESGGKRMSGRTRKSNRYVKRAMCQAAWAASHTKQTYLSAFYRRMCIRKGAPKAVMALAHRMLVVIYQILSRGEEYVEMGHDYYDRRNQPKTVLGLVKRLQNLGYDVVIHRAATPSAPEPTPLECDNDAAPETLEEVAEASRPAAQPKRRRGRPCKCEERGIICQHGTRGEVNPLPQQELAAD

SEQ ID NO: 92677 - protein, 338 aa, unidentified
MSILYVGIDLAKNVFAVHGVNEAGAAELRQPKVTRGKLHALIASLPPCVIGMEACSGAHHWARLFQAHGHTVRLMAPKFVAPYRMSGKQGKNDAADAMAICEAVQRPNMRFVPIKTEEQQSRLLVHRARQGFVAARTATINRIRGLMSEFGIVLPLKADVVRAEARNHLEDLPGYANTVIGDLLSEVAHLDERIKQYDAHIHTMARDCALAQRLMQLTGVGETTSTALVAMIGNACDFDNGRQLAAWLGLVPGQYSSGGKTRPGRITKAGDAYIRSLLVLGARAVLNAAANKTDSLSRWAMQLRQRRGYWKAVIAIAAKNARMAWAVLTKGEAFKLPA

SEQ ID NO: 92678 - protein, 347 aa, unidentified
MKEQNNRSEFTIGLDLGERRHRFCALNGKGEVVEEGTLGNDRVSLGRLSARYRGALAVIEAGAHSPWISRYLERLGWEVIVSNPRKVRAIYQQERKSDRRDALMLARIGRMDRALLYPVRHGSEEAQQDLLRIKLRDSLVRARVALINSVRFSLKSLGYAVSNPSSERFHKVAMESLPEAVREMIAPSVQALAELSARIAVLEREISLLARTKYPQTLWLQQVPGVGAITALYFVLKIEDPKRFKNVRDVGAYTGLCPRRDQSGASDPQLRISKRGDAYLRRLLVSAAQYILGPFGPQSALREYGLRLAADGTTRAKKRAVVAVARKLCVLLLSLWKNQTPYQPYPA

SEQ ID NO: 92679 - protein, 312 aa, unidentified
MKGEEPSVGIDVSKSVLDVSLHPSGRTWQVEYSPSCMTALAEELADLGPAVVVVEATGGLEMSLTAALSVAGLPVAVVNPKRVRDFARATGRLAKTDKLDAQVLAQFGAMVRPPIRSLPDATRQELRALVTRRQQLLEMITAEKNRLRRTTPGVRHRIEVNIQFLREQLKELDRDLGDFLKSSPLWQEEARLLRSVPGVGPVVTATLIARLPELGSLNCKQVAALVGVAPFNRDSGAFRGKRKVWGGRGALRTALYMATLVATRYNSVLQAFYQRLCAAGKPKKVALVACMRKLLVILNSMIKHHHTWNPAS

SEQ ID NO: 92680 - protein, 285 aa, unidentified
MQKKVRFLGLDVHAETIAVAVAEADGEVRSLGVIPNRGESIRKLVKRLGPAEHLRACYEAGPTGYVLYWQLTELGVECVVIAPTLVPVKAGDRVKTDRRDALKLARSHRAGDLTAVWVPDAASEALRDLVRAREAAKQDQLRARHRLSKFLLRTGQRATAGVKAWTELYMAWVRQLRYEQWGQEATRLDYLHEVEHMGARVKRLEEAITEAVKLASPQVQEVVRGLQALRGIAEISAVTIVAELGQIARFETARQLMGYSGVVPGRTPAANGSNAGALPRQAMRT

SEQ ID NO: 92681 - protein, 328 aa, unidentified
MMNIVIGIDVSKAKIDCAWLRDIQTGKIKTRVFKNNAESFQLLIQWVESNTQQSIQAVCFVMEATGIYHEALAYALHDAGATVCVVNPAYIHDYAKSLGTRSKTDKKDSVIIARFGTTQQPAPWQPEAAEIRYLKALIARYEAIEKDLQRENNRLEKAEITQVSAEVIHSIQTVIKELTKELNRIKQLIDNHIDQHPTLKQDSILLKSIPGVGPVVSQRMIALIRSRNFTSARQCSAFIGLNPVIRESGTSVRGRSHLSKMGDAKIRAKLYMAAVVAVQYNPDIKQQYDRLLKNGKTKMVALGAAMRKLVQICFGVLKHQMPYQPQVE

SEQ ID NO: 92682 - protein, 312 aa, unidentified
MITLSHAGIDVSKDRLDVAILPDEQAFSVSNDKAGWAELIETLRRFSLAAIGIEASGGYERGTLRALLATGFSVRLVNPFKLRQFAKACGILAKNDRLDARMIARFVATMPTRPAQRNKAVERMAELLTARRQLVEQKVAAENAARLFEDAVLQRLYRRRIARLAADIVLLDKRLAEIVTADAALAQRYRLLTSMPGVGPLLACTIIALLPELGQMSRKQVAALVGLAPYDFESGKLKGARCIWGGRAPIRRVLYMAALIGCRCNPALKVFHDRLATTGKRSKVVIVAVMRKIVTILNAMARDNAEWQRQTA

SEQ ID NO: 92683 - protein, 392 aa, unidentified
MYIVGIDIGKNHHEASIVSPEGKQIGRSLRFATTHKGADSLMSFIFKNIGNSPCVFGMEATGHYWYPIYSFLKAKGYTICVINPIQSDSLRKMYIRQTKNDSIDSFLIAEVIRFGQFGTTSMADENILAMRQLCRYRDSVISSRTEIKLRIGTIMEQIFPEYEKQFSSLWVSTSMGILEKYLTPENIENAPIDELFEIIKDKSHNRLTRAKAISIKEAAADTFGIKIAQDAFSFQLKQLIDRMNFLDKQIEALDCQILEYYEKFDCYLHTIPGIGMIAAATILAEIGDINRFKSSSALVAFAGIDPTVRQSGEFNSTHNHMSKRGSPYLRHAIFLAATTCSFHNSPLNAYYKKKRDQGKHHLTATGAVARKLTTVIYAVLRDSKPYEPKKFC

SEQ ID NO: 92684 - protein, 380 aa, unidentified
MIGQDCANSPDRPSLRSETAVPPLNRLRKEGMAMTIVEAPVGITGGVDTHLDTHVAAALDPLGRLVGTESFDADAAGYKALLTWLETFGQVDKIGVEGTGSYGVGLARFLRRKGVEVIEVNRPNRQARRNHGKSDPLDAVEAARAVISGRALGTGKTKDGPVEAIRVLVVAKRSARQARVKAIVQMRHLVITAPDQLHSRLKGLTVTALVAESAKLRATRATDPVTAATKASLCSLAHRVQALEAELEGLNEQIEALLLATAPELMARFGVGPDTAASLLVAAGDNPERLHSEAAWAHLCGVSPVPADSGKNAGHLRRHCGGDRQANSALWRIAMVRIAHDPETRMYFDRRVKEGRTKRDIIRILQRYIAREVYRYLPRG

SEQ ID NO: 92685 - protein, 424 aa, unidentified
MRKQKGTANMKMYSQLKHYGGLDWAKGHHQVCLVDGQGKIVEQFGFEHSGPGWTQFRERVKAYPEMGMAMETSSGAAVDQLLQSGVSVYPVHPKAAKSYRQRQAPSGVKDDELDAWSLADALRLDGAQWRALREQDPMVEELRLLCRDEEELIEQRTALINQLQQALQEYYPAALEAFADWRQPYTWAFVKKFPTPQALVEAKAYRQKEFLHVHKLWRPDTAPKRLEIFGRADQFCGNAAVTRAKSRLALALCQSLQTLQGQLEEYRAAIEGLFARHPDRDVFGSLPGVGPKLGPRLLSSVGAERKEYPEAQGLQCVAGSAPVSFQSGQMRVVRIRWHCDRFLRHTVHLWADTSRKTCGWAQTYYLAKRAQGKSHSCALRCLAQRWLKILWKMWQTHTPYDPEYHARNQQRHGSWVLQFQPAKA

SEQ ID NO: 92686 - protein, 490 aa, unidentified
MKSQPSKKAAKNKEQSKKVNGNPTPGKWDQMNRKQRRAMTRKMQSDDLSLEVVHPDAAGIDIGNESHYVAVPPSRDPQAVRCFGCTTAELKAMADWLKQCRIRTVAMQSTGVYWVAVFDILEAAGLEVFLVNARETKNLPGRKTDVQESQWLMKLHTYGLLRNSFRPSPKIRMLRTFWRQRHDLVQSATRHIQRMQKALTQMNIQLANVISDISGVTGQTIIKAILKGERDSRELAAYRDVRVKASEEEIAQALEGNWQDDQLFVLQQEMDGYEFCQKQMAECDLQVAQYLGQMEDRSQGATLPTETRKGRRKKKKGNAPQFDLRQDLFRITGADLTQIDSIDVMTAMTVISEVGEDMSKWKTENHFVSWLKLSPDNKISGGKVIGKGRMPTNNRATSAFKMAASTLRESDTYLGAQFRRFRSRLGPPVATKAMAAKLARLVYRMLRYGMKYVDQGAELYEAQYRKRQVSHLKRQAAQLGLQIIEATVAA

SEQ ID NO: 92687 - protein, 401 aa, unidentified
MNAHYTPNELQVGIDVGSINHAVAISDGNGKIIREFEITHTQKGFDKFFTIVAKESKQRDAIASIAMEGYNGWARPLDGLILKQGYKLYNVNNVKLARFKEIFPAAAKTDAIDARKIVELFSLQKHLPIAKKVLQEIQVSDSINIQLKKLSRRRKQLVDERMVITNRMGADLQAEAPDLKSLASCVDDLWFLRFITLRQDMRLLVKVHKSTIEKIPRIRKNHIDKITAWQTEASFTDAIDYIASMFYDDAMRILELKLKIKDNEKQIDQLIPSSNIASTLITIPGFATVSAGTLAGEIGTLNRFEGEGSLALYLGMTNLDNSSGKKTGSKRNMATNRHAKKAMINATMQHSRNSVESSVYLKKKISQGKKYQQAIRSLGRHLVRVIWSMIQQERSYEIREK

SEQ ID NO: 92688 - protein, 338 aa, unidentified
MKNTKYFIGLDVHKEKTTYVVKDRIGNILLQGETATLYTNLYERLEPYLKQSIIGLESSTSYYTLYQNFLKKHYNIKVANTIQLRQLIAKNDKLDAKRLAEMLRLGTFPCSYIPDEKIQRIRSLVQVRHSLMEEKVRCNTRIQAFLDRNGVIMPSYKAFSKKWRQSLMQYMGSGEISMELRHEYDHFLFLEKKMEQLDQELQGYARKNWMKEYYAVQSITGIGPIVACYVIAHILPIERFSSHRKLRRYAGVVPTCKESGNKISRGRIPKTSSRRLLRWALIQAANTIGKTDTNLGRYYRKKKKQKKNAGIAKVAVASSLVDILYKVLTTKKAYLGKN

SEQ ID NO: 92689 - protein, 407 aa, unidentified
MDVIYPRCAGLDVHKQTVVACARIAGDGAPMQQVRTFETTTSGLLSLADWLESFGVEHVAMEATGVYWKPVWHVLEGHFELVLANAAHVKNVPGRKTDVNDAMWLADLLAHGLIRASFVPPLAVQELRTLTRTRKQFVRERASHTQRIEKVLEDANLKLSVVLSDILGKSGRAVLQAIVDGQTDPQKLASHIGTRVKASRAELHEALRGRISTHHRFMIKLHLAHIDALDKAIAEIETEVGRGLEPFRYAARLLSTMPGVNAVAANVIVAEIGIDMSRFATPAHLRSWACICPRNDESAGKRRSTRLRRGGKWLKTTLVQAAWAAVRVKDSYLQALFHRLRARRGAKKAIIAVAASMLTAAWYMLRDGTPWQDLGASHFDRADAQKTANRLIRRLQQMGYTVNATPA

SEQ ID NO: 92690 - protein, 473 aa, unidentified
MKEHKKTKAKTKSQATQALREQEPNAAGIDLGAEEIWVAVPAERDQNPVRRFEAFTQDLMAIVQWLIGCGVRSVAMEATGLYWIPLYQLLEDAGLKVCLVNARHVKNVPGRKSDVRDCQWLQYLHSVGLLLGSFRPAQAICATRSIYRYRQNLISMATEHVQHMQGALDQMNIKLHYVIDDLTGFTGQAIIEAILSGHREPVQLAKLRDKRIQASEEKIVKSLQGDWRKEHLFVLAKAWAQYQEVQKQIQDCDRELLQYTQQLEACTSVVKPVKVMCLRPELMGSEPIAKLPTKKARRKTSKNQPQGPWHQELERFFGTDLTLIPGISVLSGLTLMTELGNDLRAFKSQHHFASWLCLCPDNETSASKVLRRRTRRSQNRVRQALRMAASSLHHDKSYLGDKYRRLRARLTPPKAVTAMAHQLARIIWTLITRKVPFDMSLFSEQEKLNEQRRLKRLAASARHMGYQLTPLAA

SEQ ID NO: 92691 - protein, 361 aa, unidentified
MPTIADTGWLVTGGVDTHAEVHVAGMVDQAGRVLGTREFAATAKGYAAALAWMRGHGELARVGVEGTGSYGAGLARYLAARGIEVAEVIRPNRQARRRRGKSDPADAVAAALAALNGEASGQPKSGDGAVESIRALHVARRGAVKARTQAGNQLRDLIITAPQVLREKLATLPTAERVKLAARFRPGGLASPAGAAKAAMAAAARRHQALTAEITQLDTALQTLLDHAAPAGFLAKNGVGTRVAATLLVTAGGNPGRLRTEASFAALCGASPVDASSGKQRRHRLNRGGDRQANSALWRIVFTRIATDPRTQAYMARRTSEGKTTREIIRCLKRYVAREIYKALTAHTRQPNHDPATPIIP

SEQ ID NO: 92692 - protein, 438 aa, unidentified
MSNKVIFNLDELFISVGIDVGADFSWMSIALPNQQFVGKPYKILHNSIDSLTTAVSKIKEAEELYSLESRIFLESTGIYHYPLFCYLRDKGFNCSVINPIITKNSTNINIRKVHNDRFDSKKAALVGLKPDLKVSLMPSDLALNCRNLCREYYDLMDNRSAYVNKLQGELRMAFPQYLGIFSKVTVNTSLTLLETYTSPSAFLEADKQEIIDIIKSTARFGLTYTQNKYNAIIQAATDANQFGYIIDSNIKRIRLYISFIRKYDEEINSILESLHELVDANEDADFVKQIHLIETFKGAGFLSAVSIMGEIGDFSAFSKPKQLFAYFGLDPAVKQSGKFEGTKVQISKRGSAIARRVIHTLTLQSISISRNGEAKNPVLREYYLKKCDSKPKLVAMGAVSHKVCNMIFAILRDNKPFKIIAPQEHIKQYNAAKCDIAA

SEQ ID NO: 92693 - protein, 378 aa, unidentified
MQIIGIDPHKGSHTAVAIRADETVIKTLRVPSSRRQVDRLLAFAQAWPERVWAVEGAAGVGRLLAQQLVARGERVLDVPPALSTRVRVLSGQSGRKTDTHDARAVALAALHHPSLTVVVAEQDSHGLRLLSVRRHQLTASRTQTVTRLHALLAELVEGGAPQTLSAVTAAAMLRRIHPITDVDVIRKELARDLLADLKSLDAKLIVNHTRITQAVEASGTTLTTIQGIGAITAARILGHTGPIARFPNRAHYASYAGVAPIEASSGKVERHRLSRRGNRQLNSALHGVAITQQRHPGAGKAYYAKKIAEGKTTGEARRALKRHLTDLVYATICADAQRSPGGQVGASTKSSAAGQTPRTSTSDKSLPGLHQQATTAVA

SEQ ID NO: 92694 - protein, 338 aa, unidentified
MFVAGLDVHLRYVTVAVLDSNGAPQLEVEVPTRTPERLVTHLDRFRPLHVVVETCPFWPWLYELLVPRGITFHLAHAKALRAIAAAPQKHDRVDARLLARMYLSGVLPEAYPRSADQRELLCLLRHRTTLVRFRTRLAGRIHSQLHQQRVLLPREQLLRQHTRALVAEAWAQVLTPEQLAIVTQHFALIDALTPQIQALEHRIDHAAQVHPIAPLLATVPGIGPYRSLLLATELAPLSRFPTAAHVVSYAGLAPTTRSSGGHTWHGGIPKGANRWVRGALVSAIPSHVRVAPASPVTTAYTRWKNRRGWRVARVAAARKLARILYTMWRRQEPWRAAA

SEQ ID NO: 92695 - protein, 348 aa, unidentified
MVAGIDTHTDRHQAAVIDSIGRHLATEAFETTPEGYGRLLAWLLSHGEVLAAGIEGTGAYGAEVARFLTAHGVTVVEVDRPDRRARRDNGKSDPIDAYAAATAVLSGRAGGTPKSRNGIVEAIRALRVARKSAVKARTQAINQIRTLIVTAPSAVRDRLRGLSTNELIDTLAKSRPVGELDDPACAVRTALRRLARRYRVLDEEIKDADREIGPLVTQAAPRLVALPGVGPETAGQLLASAGDNPDRLHSEAAFAHLCGASPVPASSGRTNRHRLNRGGDRAANNALHTIVLVRLRYDQRTQEYMARRTAEGMTKKDVVRCLKRFVAREIYRHLPHVTHTTEPLPQTA

SEQ ID NO: 92696 - protein, 367 aa, unidentified
MDEITYVGLDAHAETTAIAVAEAGGAAPRFIGTAGAKFAELSKVLGKLGKPGELRVVYEAGPCGFAMVRQLRQAGYSCEVVAPSKIPRKPGDRVKTDRRDALSLASLARAAQLTFVTVPDERDEAMRDLSRARIDAVRARLKARQQLKALLLRHDRRYTGRTSWTAAHERYLAHKVSFAHQAQEIAFVEYRRGIGEAQARVELLTQALSQELVGWRMRPLVQALMTLRGVDELSATSLVAELGEMQRFAHPRELMGYLGLVPSEYSSGQKRALGAITKTGNSHARRLLIEAAWNYRFPARISLPLQKRQEGQPAAIRDIAWRAQLRLTHRYRRLTARGLQHNKVCVAIARELAGFIWSIGQQVTVRS

SEQ ID NO: 92697 - protein, 407 aa, unidentified
MRLFAGDDWAEDHHDVEVMGEDGKVLARRRLAEGAAGMAALHALVGGLLGEDADDDSQVLVGIETDHGPWVAALIAAGYRVFPVNPQQSARFRTRHGVSGAKSDAGDAHVLADMVRTDAHQLREAAGDSPAAAGIKVLARAHKTMIWDRTRQVQRLRHQLLQYFPAALEAFADLDAPDTLELLAKAPDPARARKLTRAQVSAALKRAGRRDIPAKASAVLAALRSEQLAQPPILAGAYAATARSLITVITTLNEQVKLLEQQVREHFGRHPDAEIITSQPGMGMILGARVLAEFGDDPHRYRDGKARRNYAATSPITRASGKRKVVAARFVHNDRLADALNAQAFSALSASPGARAFYDELRARGIGHNDALRRLANRLVGILHGCLKTRTTYDENTAWNHRQQQAA

SEQ ID NO: 92698 - protein, 385 aa, unidentified
MKGKTFKSTDYEVFGGLDIDKRSISVTFTNHQGFIRSLRMPYSVEHLVNHVRKHFGDQKVAFAYEAGPTGYGLYDGLVAKAYPCLIASPSMIPKAPGQRVKTNRLDSRGLSENLRGGQLRSIHVPCALYRELRHLTQLRDTFVSEMVGMKQRIKSLLLFEGIEFPPAPAGRQWSFRVKDKLRKLECSKTVRFKLDQLLDSLEFSEKQVLKATREIRRFCRNDAELSQCIEYLMTIPGIGWIVASQLVARIGDWRELKNIRQLGGFLGLVPTENSTGERTDRGSITHTGDGRLRSKLIQASWSAIRQDGELREFFRSVCRTHARHLASRVAIVAVARKLSVRISVVLMKQRPYEVRQKVRSTPLTQEETSPQGTTRRQAEPGEKNS

SEQ ID NO: 92699 - protein, 478 aa, unidentified
MEPKKYRRCCGIDVHKKSVTVCILAPEGKRDVGVRKRNFRTFTRDLKQLRTWLKNCKVTEIAMESTGQYWRPLWNLLEGQFEKLLLVNPQHIKGLAGRKTDPKDAQWIAGLLETGRLNGSWVPPRDIRELRDLTRQRVHLMEDLNRVKNRIGQLCETGNIKLSSVTTDLLGVSGRRMLQAIVEGKHDPGWMADYAKSRLRSKKKELELALDGSFTPRQRWLLDKELHHLEWLERQIEQMEQEIERQVAVYEEPMRRVMTIPGIDQKTAWMIVAELGVEMSVFGDAKHLASWAGLCPGNRESGGKRMSGKVRKSNPYVKRGMCQAAWGATHTKNTYLSAFYRRMQIRKGPQKALIALAHHMITIVFNVLSRGEEYVEMGGDYFDRRNKPKVVSRLVTRLTKLGYYVSLQPIEADSPQDDAAVPTSIASTQLPTMSGVDETRRKRGRPCKCIERGIICKHGRAQDPNLNKAQGLPVAEFS

SEQ ID NO: 92700 - protein, 355 aa, unidentified
MVNDRQIAVYGGIDTHADTHHIAVIDAAGRRLGDVQIPTTAAGYRAAVQFLGSWNGLVRVGIECTGSYGAAVTRAVRDAGMTVVEVNRPNLFDRRLRGKTDVFDAYSAAEAVLSGRATAAPKGGDGFVESLRVLRSSRSSALSARTATINQIKGLLVTAPEQLRARYRGLSSTKLIAVLAATRPTATPVSANEATAYSLRLLARRWQTLTEQIEELAGHMQRLLEDHAPALMDVYGVGRDTAAQLLITAGDNPERLRSEAAFAALAGACPIPASSGKTNRHRLNRAGDRQANSALYHIVIVRLRYDQETRDYAARRTAEGKTKMEIIRCLKRYLVRQLYPLIVDTVRPRQDALTA

SEQ ID NO: 92701 - protein, 418 aa, unidentified
MATVDIVYPVCCGMDIHKNFLVACIATTDERSNTKHQVRRFSTFTGDLRKLADWLVSNGCKDVCMESTGKYWIPIFNILEKTCNVFLTHPKYVKAIKGKKTDKRDAKWISELFKCDLIRASFIPPIDIRQLRDLCRYYVKLTYMNTSEKNRAQNCLTMCNLKLDAVFSDVFGASATRVRESFFEHNSTDFDIAPLLHKGCKASVEEVKAALEGELSDVQVEKLKFIQQHQECIRNLQDSLESLILQLAAKYQLQIDLLLTVPGINSPLTAIRIMAEIGVDMSVFETAKKLCSWAGLTPQNNESAGKKKTTRIGRAGVYLKPLLVQIALAVGVANKHPELRDKYQALKKRRGGKKAVIAISRKLLTAIWHILSKNEPYNAELYRKADTPPVNRVLNHEQAFALLRSRGYLICDAEGVVD

SEQ ID NO: 92702 - protein, 331 aa, unidentified
MDQYIGIDVSKQTLQTFDGEKDGTFPNEPNLEALDRFIQDKKRKNKKDPVLIFEPTGAYSSYLRNYCIRKNLKAEIVNPSQSAYFAKATGNRSKTDKVDARMLYGYHLILTGKICKVPFQSEQANRIGAYINSFSLLVTSETRIKNHIHAAKQEGSAVSDLLTLLETHLAQIQEMKEEILQQALVFIQADPALEEAYENLCSIPGIGKISAIHLLHTFLKYPAANRNQLTALAGLDPMHRESGTSLHQRLKISKRGNPLLRRVLYCAAMCSVQHNTEWKRRYESFIARGKPRQVALIAIMRKMLLLSYVVYQEKRQYEHREDTVEINILIT

SEQ ID NO: 92703 - protein, 410 aa, unidentified
MSERPYAFYVGVDWASETHQFTVLTPERHLEAERRIEHTGRALSEMADWLTALADGEPARIAVAIEVPRGPVVETLLERGFHVFAINPKQLDRFRDRHSPAGAKDDRRDGFVLADSLRTDRPAFRQVHVDDPLLIQLRELSRAEEELQTELRRLSNRLWEQLQRFYPQVLRLSPAVDEPWIWALLQLAPTPVAARALRRATLARLLARHRIRRVTAATVLAELHSPALRVAPGTTEAAREHIALLLPRLQLLHEQRGRCARRIEQLLDALEGPDAEHRDVTVLRSLPGVGRVIAATMLAEAARPLAERDYHAVRTQGGVAPITRQSGKSVLVSMRYACNHRLRNALYHWGRVSAQHDPSTRRHYRALRQRGHGHARAIRGVIDRLLVVLMAMLRTGTTYDPARRRVPAAA

SEQ ID NO: 92704 - protein, 425 aa, unidentified
MHERIEIGDRNEYIHPICCGLDVHKKSVFAAVFIYDNSDSPVKYYTAQFTTYPKDLKKMTDWIISKNCHDVCMESTGQYWHPIYDAAEEAGLHPLVSHPKYTKPLKGKKSDPADAKWIAKSYASGRVVASFIPSKEFRIMRSTIRYCQKIHNAMTGEKNRILNCLTGEGIKLDVVFSDVFGKTSRSIIDYMLNHPGEKFNVAPFIGKRCKTPIPVIQEAVAKASSVDISSLSKLKVAFSRLDRTVKDEAVLKQDVAERMKPYAHQLELIRTVPGFDRDPFTAMRVLAEIGPDMSVFPSARHLCSWAGVCPSHDSSAHKVKGRKISRAGKYLKPLLVNIARSVVRSKDHPEITSRFNRIKSRRGYMKAIIAICKMFLTAIWHILSKDEPYKTDGYMTAKKPKKAKRVMTRTQLAEYLASQGITVVD

SEQ ID NO: 92705 - protein, 439 aa, unidentified
MSQSEFAAYVAIDWADRKHYWQLTDSGHQHREHGALLNTPESVDIWATGLLARFPSGSIAVCLEQSRGPLAYQLGKYERLVLFPVHPATMASFRQAFFPSGSKGDPSDAGLLLELLLHHRQRLRRLDPDSVETRLLHMLIELRRKLVDERTRQSNRLTAWLKMYFPQALDWIDNIDSPLGCDFLERWPTLQQLQRAHAETIERFFREHNSRSQARIDERVKAIRQAVPAVQDTALLQAGAAASTSLVALLKALNGALTSVDQQIADQVPKHPEAYLFAELPGVGPALLPRLIVAFGTRREQFQSASELAAYSGIAPVTRQSGKSKSVHFRLACPKFLRQTFHEFAAHSVAKSHWARQFYQQQRNRGMGHHAAARALAFKWIRVLFRCWKNRETYDEVRYIKALEQRHALPNPPSESPSPASSGGVTDNATPIVSNPNLE

SEQ ID NO: 92706 - protein, 409 aa, unidentified
MDQLIERCCGLDVHRDTVVACVRGPGPNGRRQHEVRTFGTTAVELLALRDWLEAHAVTDVAMESTGVYWKPVFYVLEEAFTCLLVNAAHIKQVPGRKTDVKDCMWIAQCLEHGLLRGSFVPPAPIRELRDLTRHRKVLIQERTRAANRLHKLLEDAGIKLASVATNILGVSGRAMLAALVHGTTDPAVLADLARGKLRKKLPALRQALAGRFQPHHAFLVSQLLAHVDYLDEAITTMSEEVEERLAPFAAQLTQLDTIPGINTRTAEVIIAELGVDMSCFPSDRHLASWAGICPGNNESAGKHQSGKTRKGNRWLRMTLIEAAGAAIRTKDSALGARYRRVMRHRGHKKAVVAVAHAMLRAVYHLLAEGTTYREPGADYSDRHHTHRVTRRAIQLLERQGYRVVLEPAA

SEQ ID NO: 92707 - protein, 307 aa, unidentified
MVYIGIDISKSTLDICVLKSLEDKEFHKIDNDIFSITSFFNDISPLNCVISFESTSTYSYNLAKFLTLNCYKYSELNPNKISHFLKYFSDKKTDLQDSYTLAFYCYTFYDTMKFSNFNSDDKLLKSYQSFINLNVKIQTQLKNFLDNQKTILPSSLNKNISNIIRDLENLKSSNEDEIFSILCELIPQTKTILENEKGIGVNLAIYLFPVLYFQRDKNYKQIISFLGFSPVMFESGTSVKRREKINKKGSNLVRKALFMSALSCSRFNPKFKSFYERLISNGKPKKVALVAICNRIIRHLKNQYFRY

SEQ ID NO: 92708 - protein, 386 aa, unidentified
MQASTVDTPTAGHCGTIFVAIELSQRSWLVTLHSPDRDKISRQGLESGDHVGLLALIDRVRERAARALGRAPAVVSCYEAGYDGFWLHRRLLAAGITNYVFDPASIAVDQRARAAKTDRIDGERILRTLMAYLRGEPRVVRIVRVPAAEQEDARRATRERDRLIKEQTGHSNRIKALLRLLGMAVGNPRRRDYLTWLAAQRDWQGQAVPPRMLTEITHEHARLMLLREQLAELAQPQAAAEPSAAAAEMAQRSERLQRLKCLGPAFSTKLTNEVLYKDFRNRREVGSYVGLAPSPWRSGGIDREQGISKAGNPRARCAAIELAWLWLRHQPGSKLTQEYRRRTLNASKRIKRIAIVALARKLIVALWRYLTTGLVPEGAKLKAVEM

SEQ ID NO: 92709 - protein, 431 aa, unidentified
MKKPASSVIKPTPLLYAAYIGIDWADQKHDICLYDPTTEQFEFSIISSQPEAIATWAEGLRKRFNGGAIAICTEQKRGPLIYALCKYEFLVLYPINAQTVAKYRQAFAPSRAKSDRSDAQLLVELLLKHNDKLQAWQPGSAILRSLQQLVENRRMLVAEKVRLTNRITAALKGYYPQVLDWFEDKDTQVFCEFLTRYPSLNAAQVASKQELEQFFKSHHVVQAKTIGRRLEQIQQGVALTEDVGIVEPLQLLVTALIAQLRVLLPSIITFDTKIEELFNSHSDAELFAALPGAGPHLAPRLLVAFGEERTRFQTAQDLLRYSGIAPVKESSGQKSWVHWRWSCPKFLRQTFVEWALQTRKHSFWAEAFYQMQRKKGKTHHGAIRALAFKWIRIVFRCWQDRVPYDEVKYLMALQRKGSPLVQNLALTGETK

SEQ ID NO: 92710 - protein, 355 aa, unidentified
MISVGIDVSKGKSTVCILKPYGEIVSKPFNITHTQKDLSELSSMLFRLNDEVKIVMEATGIYHLPVLTYLQEKGFFVSVINPYLMKSYRNESLRKAKTDKIDSRIIANYGIDHWFKMKEFQTSGEIYEELKLLGQQYRHYMKLHLLSLAELTHLLDLTMPGIKNLLASWNETNRKDKRSDFVERFWHYDVITSMSEQEFTEEYILWAKEKKYVPSQEKAKVIYTLAQESIPTLPSETSSVKMLVTEAVRVLKEVDATLGLILSRMQEIAKTLPEYSVVREMGGVGNTLAPKLIAEIGDVRRFRNGKALVAFAGIDPPPYESGQFVGCNRKISKRGSASLRKVGLLWSSIFVTLMV

SEQ ID NO: 92711 - protein, 407 aa, unidentified
MQVIHRRCAGLDVHKQTVVACVRIARDREAAQHVQTFATTTTGLLALADWLASHDVAVVGMEATGVYWKPVWHVLEGHFELVLANAAHVKNVPGRKTDVSDAMWLADLLAHGLIRASFVPPQAVQELRTLTRTRKQFVRERSSHVQRIEKVLEDANLKISVLLSDIVGKSGRAVLDAIIAGHDDPAYLASCISVRVKARRAELIEALRGCITPHHRFMLKLHLSHIDALNTAITNIEKEVGLGLEPFRESAEHLTTMPGLSAVSASVLIAEIGVDMSRFKTAGHLISWAGLCPRNDESAGKRRSTRLRHGGNWLKTTLVQAAWAAVRVKGGYLQAQFHRLRARRGAKKAILAIAASMLAAAWHMLRNQTDWHDLGANHFDRADRTKTVNRLLARLRQLGINAEVVPV

SEQ ID NO: 92712 - protein, 362 aa, unidentified
MRRVLILESPKTHKMRTDVIIKQIVGIDIGKDSFYACYKVKSDSNKVIIKGTKSFDNTTAGMRSFYDWCLKRNKTPNSPIIFVMEATGVYYEELAYFLHHNKKLVSVQLAQKIKYFAKSCNLKTKTDKVDSVMIAQFGIEKNLIGTDLWAPPSKDFKIIRDLSREHTNLVKAQTGAKSQLHALNTAHNTYKEVSKLKGKEIKFYQNQISLIEKEIVRLVESNPDLKDKIAKIETIKGIRFLTVIKILAETNGFLLFNNIRQLVSYAGLDVVEKESGKYRGKTKISKKGNARIRSALYMPAMSASLHNINLKEFYNRVNEGRTIKRQGLIAVMRKLLILIYTLWKKNEKYDENYLKVPIVTGE

SEQ ID NO: 92713 - protein, 341 aa, unidentified
MKKFIRIGVDLAKNYFQIHALVSEGGPAVTRKLRRSKMHEFFSQIEPCLIGMEACGSAHYWARELKAMGHEVLLMPPAYTKPYVKRGKNDAVDADACCEAMSRPGMRFVPIKSAEQQATLMLHKMRELLVKQRTMSVNALRSHLSEFGIIAAKGIGRVDELLELAESDATLPNAARAGVKVLSQALEGLDKAIDDLEDEITSAHAQNEMTRLLYKVPGIGKIISSVIAASVPDPSVFKSGRDFAAWLGLTPRQNSSGGKQTLGAITKQGNRYIRKLLVLGATSLLNVMGKRKGALRDWIVGLLAKKPARLVTVALANKLARILWAMMKTGESFRTEMFAKA

SEQ ID NO: 92714 - protein, 345 aa, unidentified
MNITTVGIDLAKNVFQVHGVDARGKAVLRKQLRRAQVSVFFGNLPPCVIGMEACASAHHWARTLQGFGHTVRLMAPQFVKPYVKTNKNDVADAEAICEAVSRPNMRFVPIKSIGQQAILSVHRVRKGCVKARTAQANQIRGLLGEFGLVIPQGIINVAKRVPEILEDASNELPVPFRHLIERLTQHLKELDRQVKEFEKEIVAWHRQSEPSCRLEKIPGIGPLAASALVASIADAHSFDNGRQVSAWLGLVPRQSSSGGKPTLLGMSKRGDAYFRTLLIHGARSAILAAKNKTDNTHGWLSNLLNRRHPNIAAVALANKNVRTVWAMLAHGREFKADYVPARMVA

SEQ ID NO: 92715 - protein, 330 aa, unidentified
MVVLGIDVGKSELYACLLRPELKPVRQVVANTAEGHACLQAWLETQGVMVQETSVVMEATGVYWERIALKLHLAGYRVSVVNAAQIKFYAKSTLRRGKTDNMDAELIARYGEKMHPACWMPAERDHEALRALIHERDAVISLITLEKGRQHALDHREHAQELVVQLGRERLALLQQQRATVERAMDACVAESAGLREQVDLLSSVPGIGKLTAAIVLAETSHLQDVQDSRQWAAYAGLSPVPRQSGAMVGRCRISKIGNSRLRRAFYLSAITVSRLKNPMGDYYRRLVGAGKPKKVALIALARKILRTSFAVLRSAKPFDLDYQRPQVAS

SEQ ID NO: 92716 - protein, 386 aa, unidentified
MQADANQTESSVAVRTDLAAIFVSLELSRSKWLITSLSPGAGEKMSKFVVPGGDVSALLERFEHLQRKAAARSGRSFRIISIQEAGLDGFWIHRVLEDSGIESYVVDPASIAISRRRRRAKTDRIDGETLVRALLAHKRGEPRVCAMLHVPTPDEEDSRRLVRERKALINERIRHVNRIKGLLFSQGVSGYEPLNRDRRERLEALMTGDGRPLPKALKAQISRELARLELLIEQIGDVEEARDAVLAEAEHSTRGPALLLNLRGIGPEFAAVLWSEGLSRRFDNRRQVAAYAGLAPTPWQSGQISQDQGVSKSGNPRLRATIIQVAWLWVRHQPTSALAAWFKARVSQNGGHRKKSTIVALARKLLVALWKYVNAGVVIEGAVVRT

SEQ ID NO: 92717 - protein, 359 aa, unidentified
MGVEDGTGRHVVGGVDTHKDLHVAAVVDEQDRVLGTRCFATTRQGYRQMLVWMRSFGEVQRIGIESTGSYGAGLLRFVQQAGIEVLEVTAPDQHDRRRRGKNDDLDAQNAAHAAFAGRRTVTPRSRDGMVESLRVLKACRKTAVAARRIALQMIQNTIICAPDGLRDLLRTMTRMQLVRTLAAWRPDLSAYRDVESAYRISLKSLARRYLELHDEIADLDTMIGAIVDELASDLVARPSIGHTSAAQLLLTAGDNLERLRSEASFAALCGVSPVPASSGKTIRHRLNRGGDRAANSALHIIAIVRLRTDPKTKAYVAKRIAEGHSKLDAIRALKRYIAREVFTLIMRRQKEINQTRITA

SEQ ID NO: 92718 - protein, 421 aa, unidentified
MHVLYQRCAAVDIGKDVIAVAVRLPGDGPKHRQTIKRTFKTFYGVLKHAAGGLTAQQVTHVAMEATGIYSMPVYHALIEHGQFEKVLVCNAGHVRNVPGRKTDLSDAEWLVHLLECGLLRGSFIPPAQIKAARDVIRYRTKLTESRTSELQRLGNVLQDAGIKVDSVASTITTQSVRAMVEALIDGERRPLLLAELAKGRMRARIPDLQRALEGRFDDHHALMCRLHLDHLDHLEEMIARLDTQIQDMMQPFRAQRELLTTIAGIGPFAAAAIISEAGADIGETFPSAGHFASWIGVCPGNHESAGKRHSGKPRKGNQHLQHVLVECAWAASRTPGYLQSLYRWHVRKFGGSRNPTAKNKAIVAVAHKLAIIIWHVLATGKPYADLGADYFDRRIDPAAETRRLIARLQALGHTVTIEPAA

SEQ ID NO: 92719 - protein, 312 aa, unidentified
MSNPVCYLGVDVAKNSLEVAFDRHRWKFSNSKEGHLKFIAQIQKLPTSMHVVCESTGSYHIEMGLALQDAGIAVTIANPARIRYFGKSEGTLAKNDPIDAKLIERFANSKRPPADPPLCRKHLAFSEMAAHRGHLVEMVKVLRTHREQAREPALVKAIDKSIAVLEKRLSLVEDQLRQTMEANPVWKRKFDELTTVKGVGFVTALVMLVKMPELGTLNRSQCAALGGLAPYDNDSGEHQGKRSIRGGRHEVRTALYMAAISVIKFNPILKAFYERLIAQKKLFKVAITAVMRKLLIYLNGLLKTLSEQTSPA

SEQ ID NO: 92720 - protein, 356 aa, unidentified
MSVYLGVDFHARTQTVCWCDQADGLVHQRTLDHQHDDVRGFYTQFAVPAVVGLEATGYARWFHRLLESLGHRLLVGDAYVIRKCALRRQKNDRRDAELLLDLLLHGDFPAVHIPSMASQAVLRLLRYRQRLVEIQTKLRNGTQALALNHQLRLGPKLWSKQGQQQLLALELDDADVLQREHSIELLTQIRTRIRTIEKELTLRADQDTRVRLLRTHPGVGLLTSLVVVHALEPVTRFDRARRVAAYCGLDPCETSSGETVRMGHISKQGNRLLRHLLVEAAHRAVHCKTDNDLRNFYFRLIERKKNAAVAITAVARKLVLRLYRMLRENIDYTEFRRRGREARRARKTASPVVGGC

SEQ ID NO: 92721 - protein, 350 aa, unidentified
MYPFYLGIDLHLKRTYVVLMDKTGQVLDERRLPNEEVKEYLKKRVPKETYAVVEATRNWAFMYDMLVEHVERVELAHPKELKAISAAAVKTDKVDARTLANLARINYLPIAYAAPQEVRDLRTEVRHRDQLVRQRTQVKNRIHAVLASYNLVSPTADLFGVRGRQFLEETLENHLRPAAVRVIRSDLVLIDHLTQQIAAVEASTQLSAEQEQQVKLLCTMPGIGRVGAITLLSEVGTIQRFNSPKALCNWAGLTPKVKSSDLQVHHGRISKQGPALVRAAMTRAATIACRCSKRWYRVHENLISRCGRQAAKVAVARHLLTIVYYMLKRQEPYQENYSAKTGEPAALQGA

SEQ ID NO: 92722 - protein, 402 aa, unidentified
MRAQLGADIAAGAGDQHGPRWRNGPAGEIAEWVVVPETDGVTNRSRELARSSIIGGTTMEHYAGIDVSVESASVCVMDAMGRIVREGKVASEPASLIGWFRALGFELTRIGLEAGPLSQWLYAGMRDAGLAVELLETRHVRDAFKAMPVKTDRKDARGIAHLMRLGWFRPVHCKSLPAQETRALLTARKLMQSKRHDIEMSLRGILRGFGLKVGKTSQRTFESRVRELVASHPTLLSMAEALLVARAALSEQLGRLEKRVRMLARDDQQVRRLMSTPGVGAIVALTYVAAIDEPARFRSSKAVGAHFGLTPKKYQSGETDVTGRISKIGDADARTVLYEAANVILTRPVKGSALKSWAMRLAARAGMRKAKVALARKLAVVLHRMLVDGTTFIADRAATARA

SEQ ID NO: 92723 - protein, 341 aa, unidentified
MSKYVGLDVSMEETSVCVLDAGGSIVWEGKVESEPAAIEKMLRRRAPHAVKVGLETGPTSTWLWHELRRLDVPVVCIDARHAQAALSMRVNKTDRNDAAGLAQLMRMGWYREVQVKQLAAHGDGALLASRALLVRQRCEIENQIRGLLKNFGLRSRATTGRAFEQNVQALTRHHGLLKDVVTPLLAVWLALRQQTAVLTYKVKIRTMSSAACRRLLTMPGVGPMTALAFSAAIDDPARFRSSSSVGAYLGLTPRRYASGEVDRMGRISRCGDALTRSYLFEAANVMLSRSRGTNPLKSWAAKLAKRAGFKKARVALARKMAVTLHRMWVDGTDFGANAANA

SEQ ID NO: 92724 - protein, 398 aa, unidentified
MRLIVGIDISKASFDVAVVDETGTLKVRDKHPMAREGFEALLQTLKPYLSEELHIVMESTGIYHLPLLHYLVEQGLVCHVVNPMQIKHHIQSSTLRKSKTDAKDAEAIARFGRQHASTLPVVDTAQLVSLRPLLREREALTKEIASLKTDIKGLLDRLFPELSKNTNVFTRSILHLLLQAPSRKRIRNLKEKKIARILQEASGNKATLEAKAILGWAKGSIGINDSGLETVLQSKIRRLLHTMQECEAIEKAIDEALDDTDMHEDIDTLTSIPGIGKTTATHFMGEIGNIHRFASAKQLCAYIGFDPAIRQSGSSILSYGHITKRGNRFLRRTLWQMAIGVIRHTDKFRVYYDKKRREGKSFKQAVVAVANKLLRTLFALLKNKTPFQPDLASGGVTP

SEQ ID NO: 92725 - protein, 346 aa, unidentified
MEHYAGIDVSLECSNVCIVDATGKIAREGKVASDPEALIAWFGSSRLDLARIGLEAGPLSQWLYAAMRQAGLAAELLETRHVRRAFETMLVKSDRNDARGIAQLMRLGWFKPVHCKSLAAQEMRALLTARKLMQSKLHDVQNSLRGILRGFGLKVGETTPLRFSSRVTELVTGHPNLEVIAEALLAIHAVLLREFKSFERRLRQTARSDTRARLLMSVPSVGTIVALTYASAIDDPARFTSSKKVGVHFGLTPKKYQSGEVDYTGRISKIGDASVRAALFEAAHIMLTKPLKGCTQLKSWAMRIARRAGMRKAKVALARKLAVIMHRMLADGQSFDPTATAKVAAA

SEQ ID NO: 92726 - protein, 398 aa, unidentified
MKTCGLDVHKDTIFCAIYNGKSYSEVKEFSTMTPDIREMGLYLQSEGVNRVVMESTSTYWIPVWDVLYEQEFELTLVNPYHVKQLPGRKSDVKDAQWLACLLHKGMIRGSFVPPPLIQELRTYSRLHSKLKQRQTRNLNNMDRILTSCGIRISSCLKKMNSKSVQKVILAILAGERSPDRLASLVYANRSNKASGKLRQALTGNIKAHHVLTLQIEKQEYDLHTQHLLECHVAMESLCKEHFAQELELLKTVPGVSTISAISIIAETGGDMGVFENSGKLSGWAGLRPRNDESAGKYKSRAITKGNKYLRAILVQCGWAAARTKKSFFQNVYRRLCMRKSSKKAVVAIARKLLVVSWYILQNKIPYNPQVVQIYDPEKLANRLKYHEKELVKIQKLLQ

SEQ ID NO: 92727 - protein, 337 aa, unidentified
MIHVGVDLHQRFCYMTAVDATGRPLKQGPVANERRALQQWLRGFDEPLTMAVEACSFWPAFKDAVQEQVRTLRLVHPQRVKAIASAKLKNDRVDSATLAQLSRCDLLPEAWMADGETREKRQQMRLRISLGQHRAALKNQVHAILHQHGLRAPVSDAFGKKGRMWLKQVKLSPAARGAVDTYCGLIDQVSREILKQQRRIGVMAAADPRAQWLATIPGIGVYSAMILLSEIGEVQRFPTAKSLFSYAGLVPWVRESAGHKSRGGISRCGSPRLRWVMVEAAHTAVRCSPAAKKYFERLKKRKHPHVARVALARKLLGAAYVLLRDGVCFDESIFAAV

SEQ ID NO: 92728 - protein, 375 aa, unidentified
MREKLRFLGLDVHAETIAVAVAEPDGEVRSLGTIANREDSIRKFIKKLGATEQLRACYEAGPTGFVLYWPLTQLGVECTVVAPTLVPKKSGDRVKTDRRDALKLARSHRSDDLTAVWVPDEGSEALRDLVRAREAAKQDQLRARHRLSKFLLRSGQRPAPGVKAWTQIYMAWIRQIRFAQMAQESTRLDYLHEVEHMGERVVRLEQAIAEAANLASPEVQEVINGLQALRGIAHISAVTIAAELGQISRFKSPRQLMGYSGAVPSEDSSGERTQRGSITRTGNAHLRRIAVEAAWSYRLPPGVGPALRKRQEGVPDEIKEIAWKAQHRLHRRYCRLAATRKDQRKIITALGRELLGFIWAIGIKAETAARQRIAA

SEQ ID NO: 92729 - protein, 383 aa, unidentified
MFYTGIDQHRASSVLTTLTAEGERVMQLTVPNDRRLLTEYFAQWPGEHRAVVEATGRWYWLRDLLAPQGIDLRLAHAKFLKAIAYGKVKTDAVDSDTLAQLLRTGLIPEAHMIAEAQRGPRDVLRARLRLVERRSRSNNSLDRLLEKFNVVEVAALPPFYRLQADLHAAQITLLTEQIPTLERAVQGELLDTPAIQRLLWIPGIGRIVAFTLALEVDDIQRFPTVRHFWSYCRLVPGAADSGGRHRHRASKAGNRYLKLAFSHATVRAIQYFPEIRQWYQRWKRKKPIRIARALVAKELAKSVYVVLHDQVDCNQEFKGTPLTRQNKAQWPRRASPLPNWTRQRAPARDWEARRSCRGEDLGRGRVTALRSPHREPSRAPNGV

SEQ ID NO: 92730 - protein, 421 aa, unidentified
MTQPSHDTFAACIGIDWADAKHDLCLQAAGTAKRERFQLEHTPEAIDAWVTTLRTRFNGHPVAVCLELDKGPLVSALRTYDFLVLFPINPLTLARYREAFTPSRAKDDPTDAELQLELLLTHRDKLQPLQPQSPPMRALAQLVEHRRRVVGDKVRITNRLTSTLKNYFPQVLHWFQEKDTRIFCDFLSRWPTLKAAQLARRSTLETFFRDHHVRTADVLATRLHAIKTATPLTTDEGVIAPNTLLVQTLVSQLRVTLDAIEAFDQAIAQRAQHHPDFPLFQALPGAGPVFASRLLVAFGEQRERYASAAARQKYAGIAPVTERSGKKAWVHWRLQCPKFLRQTFVEWTAESMRHSFWAQVSYQQQRDKGNTHQAAVRALAFKWIRILYRCWQERTPYDESTYLQALHRRGSLLIQHRAKAS

SEQ ID NO: 92731 - protein, 369 aa, unidentified
MTDLTLFVGLDVHKKTISVALVGAAASATVRFYGTIANTPDTLRGLSKRLSKDGEALHFCYEAGPCGYGVQRQLTRLGHRCDVVAPALIPRKVGDRVKTDRRDAMMLAQTLRAGQLTAVWVPDEAHEAMRDLVRLRAQAMRDLRKTRQQLLSFLLRHGLVSPYGHWTKMHRRWLGELVFAHPAQHLAHEEMLRRIERAEALCDRLKGAILELVPQWSLAPVVQAIQALRGISLIVASVIVAEVGCFSRFDSPRQLMAYLGLNPSEHSSGATIRRGAITKTGNALARTCLVEAAWTYRFPARVTQIIRDRLNGLPEPIRNVAWKAQVRLSARYRKLIAAGKPAPKVVVAIARELVGFIWAIARMVEPKFA

SEQ ID NO: 92732 - protein, 343 aa, unidentified
MQIHSVGIDLGKTTFHLVALGVAGQVLVRKKFNRKQLLAFTANMSASLIGMEACAGAHFLGRALRKQGHDVRLIAAQFVKPFVKSNKNDFIDAEAIAEAVERKNMRFVPIKTDDQLDLQGIHLVRDRLISRRTAVINQLRAFLLERGMVFAQRPAKLKAAMADVLENAEADLTPQMRNLIDMLWDEWKLVEQQIEKLNLELERISAADAGCTRIRQIPGIGPVVATAIVAAIGNGAAFRKGRDFAAWLGIVPRQHSTGGKAKLLGISKRGNVYLRKILIHGARAAVLRIKRDRAPIGAWLDALDARAPKNVVVVAMANKLARIAWAVLSSGKDYRPLANTSTA

SEQ ID NO: 92733 - protein, 346 aa, unidentified
MTIVETRAVTGGVDTHADVHVAAALDPIGGLLGVQEFPATPEGYGRLLGWLGGFGTVSLVGIEGTGSYGAGLARHITWAGVRVVEVDRSDRQDRRRQGKSDPLDAISAARAAQSGRARGASKGRDGAVEAIRTLMVVKRTARSERTQTINQARSLVLTGPDDIRVRFIHHTTAGLVADLAGLRPRPGATVGYATRIALRELGRRAQFLGGQLASLDELIIPLLTAHAPGLLALYGVGPDTAALLLIAAGDHPERLRSEAAWAHLCGAAPIPASSGKTVRHRLNPGGDRQANHALWRIVITRMSSHPPTRAYVERRVKEGLSKTEIIRCLKRYVAREVYPHLRPPAR

SEQ ID NO: 92734 - protein, 410 aa, unidentified
MEVLVPRGCGLDVHQATVVACLLTGEPGALPRKQVKTFSAMTGGLIEMRDWLKTADCTAVAMEATGVYWQPVYNLLERDFDLVVANARHIKAVPGRKTDVKDAEWIADLLRHGLLRPSYVPPPELRELRALLRYRVKLVNARSGERNRVTKLLERCNIKLSSVASDIFGLSGRLMLDALRHGQADPEEMAELAKGRMRSKLPLLKLALEGRMEAHHRQLLSMQLDRLDRLEGDLRQMDAKLEARLKPYARQMELLDEIPGVNWVTAATVIAEIGTKMSQWPTVGQLTSWAGLCPGQNESAGKRGSGQIRPGNPYLRAALVEAAVAATCAKGGYFREKYYRLKARRGHKRAVVAVAHKLLVAIYHVLANDTHYRELGADYLERLEPERLKHNLVCRLERLGYQVHLEPKRA

SEQ ID NO: 92735 - protein, 353 aa, unidentified
MDKITRVGVDLAKNVMQLHAVDCTEHVVVRRAIARERFVSWFANLEPCLVAMEACSAAHYWARKLRALGHDVRLIPPQFAAPYRKGGARVKNDAVDAEAICEAASRPHMRFVPIKTPAQQSVLVLHRMRTGFIEERTALVNRLRGLLAEFGVFLPQGIHQLRKHFVDRVEDGSNELAAPAREALMHGLAQWQALDDEIAWLDTQIARHVSDDPQAQRCMKVCGVGRLTASAAVATVIDARQFKNGRQMAAWIGLVPKQNSSGGKPRLGRITRQGNDYLRSLLYQGARSAIQAAHRHDDRLSRWIVQLQARIGYHKTLVAVANKHARILWAVLAKGEHFDPAYVCARAAAKASG

SEQ ID NO: 92736 - protein, 410 aa, unidentified
MLFIGNDWAEAHHDVELVDAEGRVLARRRFPEGVAGLAAFHAVIADHLADSDEPDQVLVGIETDRGPWVQALIATGYTVYPINPLQVARYRERHGVAGAKSDPGDAHVLAEIVRLDRAHHRPAAGDSTVAEAVRLAARAHQTMIWTRQRSSNTLRSLLRECYPAALLAFADDLAGRDALAVLGAAPDPAQGRRLTAARVAALLRKAGRQRNLDRRAGDIVAALRTEQLPVRAGLEAAYAASVSALVAVLTTMVEQVAVLEDQVRQGFGQHPDAEIYLSQPGLGPILGARVLAEMGDDPNRYIDARARKNYAGMAPITKASGTRRVVLARYARNRRLADALYQQAFAALTASPGARAYYDRQRARGATHHQALRTLGNRLVGILHGCLRHHTYYEETTAWPAPENLHTAAA

SEQ ID NO: 92737 - protein, 318 aa, unidentified
MNTNTLQNINVGVDTGKSQLDIYIRPLDIYFTVPNTEKGISDAIKTIKKHKPQRVVIEATGRLEMPFILACDKAKLPYVIANPLRIKRFAGAIGQRAKNDRLDAALIAHYAERVQPELTKLKSENIRLMSDLVTRRNQLLTMQTMERNRLQILPKNISSTITPILTALKNQMEKAEAKIAKLIESCPEYQAKNTILQSMPGVGKVLAASLISNVPELGFITKKQASSLIGVAPITRESGRFKGKRLIQGGRIQVRTVMYMAMMSAIQCNPVFRATYERLLTAGNPKKVAIVACMRKMVVILNSMLRDGVMWDTDSLKN

SEQ ID NO: 92738 - protein, 376 aa, unidentified
MKNVRFVGLDVHAETIAVAVAELNGEVRSLGVIPNRVESVRRLVGKLGKPEQLRVCYEAGPTGYVLYWQLAQWGVHCEVVAPTLVPVKAGDRVKTDRRDAEKLARCYRAGDLTAVWVPDAAHEALRDLVRARLAAKRDQLRARHRLGKFLLRQGRRAPEGTTAWTGKYLAWVKQQHFEHTAQEATLLDYLHEVEHVAERIVRLERGIDAAVESMPESVRAVIAGLQCLRGVAKVSAVTLVSELGQIARFAHPRQLMGYAGMVSREHSSGERIRRGSISKAGNAHLRRIVTEAAWSYRHRPNIGTTLTARQSGASESVKAIAWRAQHRLHGRYRALLARGKTKQKVITAVGRELLGFIWAIGVELERSQHQEVRRAA

SEQ ID NO: 92739 - protein, 340 aa, unidentified
MSFYCGIDLGARESHLCLIDKNDKKLLDKKMDNDLYEVNSNLYPYKSSLKIVVESTFNWEWIVYGLQNRNYDVQLAHTLGLKAISWSKKKTDKWDAFTLARLLRANMIPQAYIYPYELRPIRDLLRERIRLVTKRATEYGAISRMLLRYNIQDYTRNMIKHLTENSMHQLYHHPFIRSKATMELERIELLTKQIHSIDKKLLERTKEDYTFSFLKTIPGIGNILALVILYEVADINRFPNARAFCFYCRVVPGIHQSSDKNYRSPNSNQGNHYLKWAFSQAAIMAIRYYPKIRGLYDRLSAKRKKAARLVARSIISHKLAQSTYHVMKEQSVYTEKLLFR

SEQ ID NO: 92740 - protein, 339 aa, unidentified
MTDVSRIGLDLAKSVFQVHGVNAREEVTVRRPLRRAQLLVWFGRLPPCLIGMEACATAHCWARELTRLGHMVRLIPPGYVKAYVRRNKTDAADAAAICEAVGRPSMRFVAAKTAPQQAASGIHRVRELLMKQRTAAMNALRGLMAEFGIMASKGVSGINDLLASVADPDDSRIADPLRAGLAALAATLGALETQLEAVDKAMVSWGRADKTCRHLNTIPGFGPVLSAAMAARVSNPHAFDSGRHFAASLGVVPRQDGTGGKVKLGPISKRGDGYLRRLLVNGAMAVVRSKRAKQDPWLVKLLATKPLKLVAVALANKMARIGWAVMVRQEDFRAEPVAA

SEQ ID NO: 92741 - protein, 321 aa, unidentified
MSESAVVVVGIDVAKDHVDVAVVGAPLASTRFDNEIDGHAALVGTLQPLAPQLVVMEATGGHEAALACALQAAGVAVAVVNPRQARDFAKALGRLAKTDRIDAEGLAEFGRMLLTRPDLARYLRPLETPAQQDLAALVTRRRQLVTMLGMERQRLAIARPAVRRSVQALIRAIEKQLDQVDGEMTRHLTSHFRELDQLLRTTGGIGPVASATLIADLPELGRLTRRQIAALVGVAPMAWDSGQMRGRRRIQGGRFEIRRTLYMATLTAARHNPVIRAHYERLIAAGKLKKVALVACMRKLLTILNAMARTGATFNPEHHHA

SEQ ID NO: 92742 - protein, 520 aa, unidentified
MHQTKYRGIITEAGSLTFPPWEPAEPLLAKPPGKSVSPFGGDLCFGWLGSPRLYLYKPLGCVSTLWKWMPARKDNAMHYQKVLKMLESIPYLSVGLDVGADFTWMSIMLPNGTLAGKPFKIVHSDPQSRELAVTKIKEAQEAYSLKSRCFLESTGIYHIPLLCFLRDKGLDCSVINPIITKNSTNMNVRKLHNDKFDSKKAAKVGQDASLKTSIVPDDAVIDLRNLVRDYYYFKDLQSAVALKLHAELKMSFPAYLDVFSKVTTQTSLKLLEAYPLAADMLSAPRDELVESIRQTARFGEKYALSKYDAICAAAKDAAVFGRALPSNALRIKLYIKTYREYQAHLDSILEELHKTVDNLQGDPVYDRICLLQSLQGIGFLSAVVLIAEMGSFDLFSSPKKLYAYFGLDPGVNDSGKFHGDRVHMSKRGSSLARRILHMIAINNLKVDKATKTPVNPVIYDYYIRKCGGKKKIVAVGAVMHKICNIIFAMLRDNKPFELITPEEHCKRYAAEHPGSVNTAA

SEQ ID NO: 92743 - protein, 428 aa, unidentified
MLNKLDRLEQFRQLRSTIRGSTSILVVGIDVAKSSHHAFFGDANGKTLHKRLIFDNDLEGFQKLRGMASSLVARHALEQCVYGVEPTASYHKPLAEYLIRNNEQVVYVSNVAVKHNRSLLDGRWDKNDTKDAANIADLIGQSRCQYYDLAANDIRELRSLLAYRNKLKKQEHSLRMRIRNNLLAQYFPELDKQMPPGGQDGLILDIIAKDFDPTHIAETPFETFRQQYNLSRRPITYEKRLRTIWEQSQQSIGCFLPESAAWEGQMMVDQLHHTRQIKHDLERQLKHIGETFSSYRCIITIPGFGPIISAMTLGAISDAHRFTSRKQVLRLAGLDLSASRSGKTSNSAVPVISKQGKAALRYGLYQAALIASYQDATIRNYFTRLLKGRELERGIKTKMRIKLAAKLLIVAWTLMKRNEVFDSGHFKV

SEQ ID NO: 92744 - protein, 328 aa, unidentified
MIMSPAQKAFNHIVAFDVGKESLAVHILPGDERQTIANEPKAIRQLLRAQKRHNARSGLGPLLVVCEATGGYERQLLEICVELEIPAHKAHGSRVRYFAKYLGLIAKNDPIDAGVLARFGSMTDGLRLYVPPTPGLEALIDLRARRDQIQAMLLAETNRLEHVRHESVARNLKEHVAILQQALAALEAEIAAHIQATGELARKAELMRTLKSIGHGTATVLLAYMPELGTFSRAGAASMAGLAPFDDESGKKSLPRHIEAGRAAVRKALYMAALTAIRYNPIMKSFAEKLRQKGKPAKVVITAVMRKLIVTLNAMLRTGEPWRHAQTA

SEQ ID NO: 92745 - protein, 350 aa, unidentified
MIIIGADFHPAYQEIASVNTETGEYEEKRLAHPQEAEEFYRSLASVGQAVRVGMEASGHGRWFERLLEGLGLELWRGDAEVIRAKRGRKQKTDREDARHILKLLLKDDFPKIWVPSWENRDLRQLLWHRHRMVQARTRVMNQLQAVALNEGLRCKKRLWRANGRQQLESFKLAPWASRRRRELLELLDRLNPTIAELSQAIEREAEKCPEAQRLMTHPGVGALTALAFVLIIGNAERFGCGKKVASYLGLVPLETSSGNRRRLGHITKQGNSLLRFLLVEAAQVTVRSLPEWRSKYHHLMIRRGRKTAKVAMARKLAVRLYWMWRKGWDYEQWKKFGSYVGQPGHRYGVQ

SEQ ID NO: 92746 - protein, 320 aa, unidentified
MTETPLALFIGIDVSKEGLEVAAGAAGETWSVENNPTGLASLKDKLQALKPELIVLESTGGFEALALAELYAAGLKVARVNPGRVREFAKSIGQFAKTDHLDAHLLARFAEAVHPEASILPDENAQYLAALINRRRQLLEMQVAEQNRLQTAPKTMRERIHKHLDWLKTEIRELDKELDDFIQSSLLWKEKGDLLRSVPGVGPITTFTLLAELPELGTLDRKAIAALVGVAPFNQDSGHHTGKRHIHGGRPAVRSILYMATLCATRFNPVISSFYQHLLKAGKLPKVALVACMRKLLTILNAILRTRSLWRAPSTSMPAP

SEQ ID NO: 92747 - protein, 347 aa, unidentified
MEEISVIGIDLAKQVFQICGENKAGEVVLTKRLKRKAFMKYMEQEAPRCLVGMEACGGAHYWARWLIERGFTVKLMAPRTVKAYRTGRHKNDFRDAHASCEAAGRPYVAGVAVKSETAQASQALLRVRELQIKQLLQMSNQLHGLLHEFGIVLPRGPSRMLEKLRRLEAEGRLAGLPATMTAIVRLRSDEIEQQAAKLKATTKALESAAQADANCALLMSIPQIGPVNATALTIALETPKAFRNGRAFASHLHLVPRQHASADTNVLLGVGELRANETRRYLVLAAQGLLIRAAKLKEPANDRLLSFARSLLARKHRNVAAVALANKLARIAWAVAATKTPFRSIEA

SEQ ID NO: 92748 - protein, 346 aa, unidentified
MNNTTKDFQVSVLGIDLAKNSFQLHGVNAAGQRSIKKTLTRQKLKEFMVNLSPCLIGMEACSSAHYWARLFQSYGHKVKLMAPQFVKPYVKSNKNDAADAEAICEAVQRPNMRFVGIKNIEQQDIQSLHRMRSLAVGTRTAMINQARGLLSEYGITVPKGPCSIMKKIPLILEDGENGLSMYFRELLMDLYEELQRINEKIAKFDQKIARLSEENEEAKRLKTIPGIGPVTATALISAIGSIDSFKNGKELAAWLGLVPRQHSTGGRNTLLGISKRGDTYLRSLLIHGARTVQRHVERKSDKTSAWLKSVMNRRHKNVAAVALANKMARTVFALLKTKEDFQLSAA

SEQ ID NO: 92749 - protein, 356 aa, unidentified
MSSNIKYIGLDVHNEAIAIAVRNGAGKLVMESILETKAATLLQFLQGLRGELYVTLEEGTWAAWLYDVLKPHVQDVVVCNPRRNALLKEGSKSDKVDARKLSELLRAGLLRPVYHGENGLRTLRELARSYQVISKDLKRVMNRLKALYRSWGIPCAGTQVYAPRYREEWLNKIRQAGVRRRAELFYQHLDGLQLLRRQVRGEFLVESRKHKAVKVLRQIPCIGPIRAALLLALMQTPHRFRSKRQLWTYSGLGVETHDSAQHRYVDGQLQRSKKPQQVRGLNQNHNHEMKEIFKSTATSAIRCAGPFQDFYTSLLAKGMKPEMARLTLARKIAAVTLTLWKKGARFDAQHLKAQAA

SEQ ID NO: 92750 - protein, 312 aa, unidentified
MYHMKEELVYLGVDIAKAHLDAAIGSEKRRFANESLGHRELIKWVKQLGERVQVICESSGGYERKFVQALARGGVKMSLVQANRVRQFARAAGILAKTDGIDAEVLCEFGKVMQPQTVTAAKLEQEQLRELESQRRHLTRLLVMEQNRGARLSDVWVQRLNRRLINQIKRQIDQLDLLIKKHIDQSHELSAKAVKLTAISGVGARTAALLLAQMPELGQLNRREVAALVGVAPFNRDSGRMRGKRTIHGGRRPVRHGLYMAALVAAHHNPILRQFYLRLRAAGKPAKLALTATLRKLLIVLNSALKPDPNYA

SEQ ID NO: 92751 - protein, 417 aa, unidentified
MAKQNQAVTFEEVVERGCGLDVHKKEIVATVSGTGIESETRTFHSTTRSLTELKEWLLALGVTHVAMESTGVYWKPVMNILEPGGFTIMVVNARHIKYVPGHKTDKKDSAWICKLLRAGLLKGSFVPGREQRDLRDLTRYRRKLVQQQASEHNRMIRIFEDANLKLSSVFSNIRGKTCTAVIDAVISGETDPVKLAEMCTHWRLKSTQEEISLAVEGCFTEHHKFMIRAIRTSIKSIESEIEHLDKEIERRMQPIDDEMKQLCEIPGMDTKAIRELLAEIGVDMEVFPTAEHLTSWAGLAPGNNESAGKKKSSHTNHGNKATKAIMTECAWCATRTKNTYFSARYRKLAARRGKKRALVAIAAEMLKVVYHMLKDGTSYVELGEDYMGSKRKDAQIKYHKEQLDKLLGEDSPETQSA

SEQ ID NO: 92752 - protein, 359 aa, unidentified
MLRARRRALVVASVFHKPEQLLGALEPVFARPGRRTEILSTKKSRRSFIGIDVSKRLLEVAAHQSDYHFRCPNEPKAFPALIAELINLRPARIVLEATGGLERPLLQALQAVGLPVVLINPRQVRDFAKALGQLAKTDRLDARVLAHFAAAVEPPLRPLKTAEDTELDALMGRRNQLSDMLSAEKNRRGSAATDAARADIEAHIEWLEQRLKALDKQLKDQLKRSVVWQQKDQILQSVKGIGFVTSVALLADCPELGQLNRHQIAKLAGVAPLNRDSGKQRGTRHICAGRAQVRSKLYMATLTAIRCNPVIKAFYERLRARNKLKKVAIVACMRKLLTIINVMLRDNKTWNVKAQPVSA

SEQ ID NO: 92753 - protein, 409 aa, unidentified
MTAVMIGVDPHKGSHTAVVISPAEEPLGEIRVRASAAQAGKLAEWAAAWPERTWAVEGAAGLGRLLAQQLVAAGERVLDVQPKLASRVRLLQAGDTNKNDPDDALSVAIAALRSRTCRPVAAEDHPAVLKVRAERHRDLARLRNQVACRLHAVLCDLVPGGTSKQISAAQAARILGQITPSGAVGLARAELAAEFLEDMRRLDAQLRGTRKKLAAAVKVSGTTLTEVFGVGPVIAGTIIGDIADVSRFPGRDHFASYNGTAPVEVSSGNRKIHRLSLRGNRRINHAIHMAAITQIRHRHSDGRAYYEKKLAEGKTHKEALRSLKRKISDALFARLQADARQAAAAQAKGPGGHPGNDSASSAAGSHPARQLFGQATPGPGTSLRPGSLRPGTTTGTPPKPVSKKTQTTT

SEQ ID NO: 92754 - protein, 376 aa, unidentified
MENDSTVYVGLDVHKDSITVAYAIGMGEVELLGKTGTTKADIDRLCRRLQSKGRHVRIVYEAGPCGYGLYRQLVQKGFDCIVCAPSLIPKKPGERVKTDRRDAVKLVRALRAGDLSAVYVPGVEDEAFRDLARAWAGARDDLKQARQRLKSFLLSHGVHYTGNANWGAAHRRWLSAYSFGHPWRQLAFDEHRRTIEDRLAQCDRLETALRDAVVNWRFYPALLGLQAMRGVQFVTAVGILSELGDLSRFEHPRQLMAWLGVTPSEHSSGGKRRLGGITKTGNSYARKLLVEAAWSYRHPARVSRDIQRRHEGIPKAIIDRAWDAQVRLCRRYRKLAARGKHVNIATVAVARELAGFIWDISRLAMSLAIPRSEQAA

SEQ ID NO: 92755 - protein, 410 aa, unidentified
MNAAGIDVSKGKSMVSVMRPFGEVVAKPFTVRHTGSELKELADYLKSLDGETRIIMEHTGRYYEPVAQFLHDAGLYVSAVNPKLIKDYGNNSLRKVKTDKADSRKIAKYGLDNWVELRQYVSMDKIRYQLKTLNRQCNLYGKTKTMMKNNLIALLDQTYPGVNDLFDSPVREDGTQKWVDFAASFWHLECVKNMSLDAFTGRYRKWCKRNKYNFSSDKAAEIYAGVQDQIAMLPKDALTKLMIRQAINALNAVSATLEKLKAEMLELSSQLPEYPAVMEMRGVGDSLGPQLMAEIGDVMRFARRSAITSFAGVDPGADQSGGHEAKSVPTSKSGPPELRKALFLVMDHLIQTKPLDDPVYQFMDKKRAEGKPYLVYMTAGANKFLRIYYGRVKEYLAKLEQPLAPNPEQH

SEQ ID NO: 92756 - protein, 346 aa, unidentified
MPHKTAATVAHTIGIDTGKNTLHLIGLDDQGAIVLREKVARGRIAARLANVPQCLIGIEAGMATHYVARELSALGHDVKQVPPAYAKPFRQGQKNDFRDAHAIAEAVQRPSTRCVPVKTDDQLDLQALHRVRSRLVGQRTAVINQIRGFLLEHGIAVRQGLRFLRQQLPDILAKRSDVLSPRMIRIMEDLSGDWRRLDERIQHVTEEIEVLAHGSESCRQLMTVPGIGPLIASAMVAAIGNGAAFAKGRDFAAWLGLVPKQMSTGDRTILGRISKRGNRYLRTLLMQGARVILLRPANWAKHSFGPWLTAAANRLHHNVLATALANKLARIAWTVLMQARSYEARV

SEQ ID NO: 92757 - protein, 411 aa, unidentified
MHERQKHFYVGVDLHKQHHVAVIINCWQEKLDEIKFENKPSAFSTFLLDIYKHMEDGLTPIFGLEDVGGYGRALAKYLADHEQIVKEVNPALSYAERKSNMTTQKSDSWDAECVARILVNKLEQLPDAKPHDLYWSIQQLVSRRNALVKAQSALKNQLHIQLSHHYPSYKKFFSEVDGKTALAFWERYPSPPCLDGVSVKQLTIFLLEASSNTCSVKKASEILKLVKEDGNTLREHQETRDFLVKSIVRDVSFKKQEMRYVERELKGLMSLLDFQLDTMPGIDLVTASALIAEIGDVRRFPNTNKLARFAGIAPVYFGSGGKGREQKSKQGNRALHALFYNLAVQQVQVAKGSKLPRNPVFHAYYQRKLKEGKTKGQALVCIMRQLVNIIYGMMKHKTAYELPIIKEEEVV

SEQ ID NO: 92758 - protein, 360 aa, unidentified
MNTNHYIGFDVHKKSISFCVKTADGAILEESKLRATHRALQDWASKRTTPWCGAMEATLFSAWIYDALKPFAAELQMGNPSMMKAIAASKKKNDKLDARKIADLVRCNLLPACYVASPQIRELRRTLRYRNLVVRQSVQMKNRMSGLLMEVGAEYSKQRLHGKQYFNQLLDQLEETPESVKNLLRLSRGAVEAFGGTQRQILNQLQRDPLLVKRVKLLRSIPGVGEVTALTWALEICDPQRFSSIGKAVSYCGLTSAQVSSAGETKRSPISKQRNRHLQTVLIEASKLAPRWNKQLADLHAIEKDRGDRNRATLAVARKLVAFLLAVDKSGKPFQTRSHKAITQTQTQTQTQTEEVTEVS

SEQ ID NO: 92759 - protein, 345 aa, unidentified
MELYVGVDVSLHESSVCIVDRDGKVVRERKVVSDPDALAHALREDGCAAARIGLEAGALSGWLHDGLKEKGFDVVLLETRHVAAAISAMAVKTDRNDARGIAQMLRLGWFKPVHAKSAGAQEIRALLSARKLLTRKRADIDIGMRGILRAFGLKVGRVGRGRFDERLRELVAGNAMLEKAIGAMLEARNAMVRELIKLHRTVLRLTRESEVCKRLMTVPGVGPVASLTFVAAVDDPHRFRSSRSLGAHFGLTPRKYQSGEIDLTGHITRAGDASVRTVLYEAANALITLSVKPSGLKSWAIRLVKRRGAKRAKVAVARRLAVLLHRMWIDGTDFDSGVGRMTPAA

SEQ ID NO: 92760 - protein, 405 aa, unidentified
MGIYVGIDWAETHHDLCVLDESGTVIAKRRVADGLEGVGQLHALLAEHAAEPNEVVIGIETDRGLLVGALRAAGYQVYAINPLAASRYRERHVTSGAKSDPGDAKVLADLVRTDRHNHRPVAGDSELAASLQVLARAHQNLIWSRQRLANQLRNNLREYYPVALAAFGTELAHPVALGVLDAAPTPARGRTLSQSKLAAILRRAGRERGVEEKAAAIQAQLRAPQLAAPALVSEAYGKSVAATVRILRNINAELASLEAELGPSFEKHPDAEIYRSLPGLGIVLGARVLSEFGDDRTRFAHPKARKNYAGSSPITRTSGKSRVVLARLARNRRLADACHQWAFCALTGSGGARDYYHRLRQRGKTHHQALRALANRLVGILHGCLDHRQAYREDIAWPSSLTVAA

SEQ ID NO: 92761 - protein, 417 aa, unidentified
MEYAPSTLTAVPVNRLACGIDWARDDHAVAIVDGGGRQVHRSIVEHSSAGLRALVTVLARAGVAEVAIERPDGPVVDALLGAGITVVVISPNQLKNLRGRYGSAGNKDDRFDAFVLADTLRTDRARLRPLVPDSESTVALRALCRARKDLVAHRVRVANQLREHLNRVFPGAVGLFTKLDSPISLRFLSRFDCQDRADWLTPRRLQAWLASAVYCGRTDPAVVFGRLGAAPRGLPSTAGAAQIPITQALVATLDNLVKQIAMLSEQIGQQLNAHTDAHIFTNLPHVGTVRAARLLAEIGDCRGRFPTPEALACLAGVAPSTRQSGRMRSVGFRWACDKQLRDAVCDFADGSRRGNPWAADLYSRARARGHDHPHAVRILARAWIYVIWTCWQNNTAYNPAQHRALQTVLHQDQPPGA

SEQ ID NO: 92762 - protein, 367 aa, unidentified
MKNLTTTMMQQTLNKQDRRLTVGLDLGDRSSFYCVLDEAGDVLMEQRLSTTPKAIKEIFGAMPRSRIALETGTHSPWVSRLLSELGHEAIVAHARSVRLIGESRRKDDRLDARTLARLVRIDPELLCPVKHRSAEAQADLTVIRARAALVRTRTMLVNATRGLTKSYGERLRGCNARGMNPKAAQDLSPELKHALEPMMREIESVSERICEYDQMLESMAGNRYPEAERLKQIKGVGTLIALTYMLTLEDPHRFRKSRDAACYVGLQPGRRNSGQSEPQMHISKEGDPYLRTLLVQAAHHVLGPWGVDSDLRRWGMKLAEHGGKRGKKRAVIAVARKLAVLLHRLWVSGDVYMPLRSSGRATLPAVA

SEQ ID NO: 92763 - protein, 363 aa, unidentified
MLGNPSEKGKVMDKITRIGVDLAKNIIQVHGVDCMERVVVRKAISRQKFPEWFANLGPCLVAMEACSAAHYWARKLRALGHEVRLIAPQFAAPYRKGGKHVKNDRLDAEAICEAASRPHMRFVAVKTPDQQNVLVLHRMRIGFVEERTALVNRLRGELVEFGVFLPQGIDAFRTHFVEAMEDGATELNGVARTALLRGWEHLQALDQQIAWCDAEVATQVKHDGNAQRAMTVIGIGPLTASAAVATVGDARAFKNGRQFSAWLGSVPKQASSGGKNRLGRITKQGNTYLRTLLFQGARSAVTTAHRRTDRLSRWIVQLQARVGWYRTLVAVVNKHARILWAILAKGERFDPSYMPTRPAPTGP

SEQ ID NO: 92764 - protein, 349 aa, unidentified
MTLYIGVDFHPHQQTAAWCDMATGETRTVDIKHDLGRVREFYQSFSEPAVIGIEASAKATWFENMLFETGHKLFVGNPVLIRKRATSRHKNDRRDAELILNLLMQGEFPTLWRRPPESTEVIDIMGLRSQLVRHRTQAYNRLQALAHSIGMPKGRMRTAAFQTVLKTAEIDEASSIRREHLFSMIDELNVRIGKLNDWLMKKAEGNSSVRLLQTQKGVGFLTALITVHTLGDLTRFKRVTKGVVSFAGLDPRESSSAGRVRFGSITKAGSPLLRHHLGQAAMIATRFDARLKAFYKRLAKKKPKALARTAASRKLLVKLAIMLRDSISADEFDRRGSTVGNAREARDLK

SEQ ID NO: 92765 - protein, 323 aa, unidentified
MSQPNPLCVGIDVSKTTLDIATANNEFAQFTAGNDTDGFELIIAELRKHSVALVLMEATGGLEAAVACSLQAEGFDIAVINPRQARNFSRAMGYLAKTDRIDAKVLSQMAEVINRHPERERFIKAIPDAERQILAAMVVRRRQLITMLVAERNRLHPAHPQNRKSINTIIKALEDELSRIDEAMNNHIKTHFKELAARLSSIKGVGAMTVATLLSEVPELGSLSRREISALMGVAPVNRDSGTMRGRRTIFGGRAGVRTALYMAALVATRFNPVIKDFYTRLITAGKVRKVALVACMRKLLTILNAMIRKNEEWSDSYHKFSL

SEQ ID NO: 92766 - protein, 317 aa, unidentified
MATESWFVGIDVAKDTLDVAFVRGEEETTSQVSNTPVGWAELLGLCPQRSIERIVLEATGGYERRVAAELMAAGLPVVLINPRQARDFAKATGRLAKTDRLDALGLARFAEAIRPPVRPLPDENAAELQEKLARHRQLVQMRTAEGNRLAHATSDAIRKSIRAVLKLLDQQIESLDKDIEQRIEESPAWRDKDRILQSVPGIGPQTSRALLCNLPELGQCTRQQIAFLVGVAPVNRDSGKMRGARTISGGRGHVRQALYMATLVASRHNPLICNHYQHLLHLGKKKKVALVACMRKLLCILNAMIRDGKTWNPIYSS

SEQ ID NO: 92767 - protein, 351 aa, unidentified
MPFKTDTATIRTIGIDTGKNTLHLIGLDEKGTIILREKVARGRIGARLVNVPQCLIGIEAGMATHYVARELTALGHDVKQVPPAYSKPFRQGHKNDFRDAYAVAEAVQRPATRCVPVKTDNQLDLQALHRVRSRLISDRTAVINQIRSFLLERGIPVRQGLRFLRHQLPDLLATRTDVLSPRMVRIVEDLIGDWSHLDERIENVTEEIEALARGDASCRQLMTVPGVGPIIASAMVAAIGNGTAFAKGRDFAAWLGLVPKQMSTGDRTILGRITKRGNRYLRTLFMQGARVILLRPANWAKHSFGLWLTAAAQRLHHNVLATALANKLARIAWTVLAQGRSYEARVEPKVA

SEQ ID NO: 92768 - protein, 373 aa, unidentified
MPKYSTAFGMDVHLRSTTVCALDADTGEAVTRRFPGNPWGEIAGWMDGFPGPSLAAYESGYLGFAPQRELAGLGVECVVAAVSKIPRSAADSASKNDRNDAARMAKAILAHDISPVWAPSPEVEGIRDLAGAYDGATARLATAKQRLLAFLAKRGFVYGGTTPAGNPRKYWTYDFLRWLDKVRPEDDGGVRTLAALRNEVEAAAEARSDLLSEYRAAVDASPIAAEVAALQSIKGCAFALAAAFSAEVGDFTRFRSGRQVTAYFGLAPSQRSSGDSVRLGGISGAGNALVRKLAVEGSWCYAAARHQPKLMPRDTGVPLEIRMHGRKGSERLLRRREEMLARDMPAAKANAATAAELVRWLWALGMMCREGAE

SEQ ID NO: 92769 - protein, 394 aa, unidentified
MIVIGADTHKGSHALAAVDEGTGRVRGSREIKADDAGHLSAVRWAQGLDDQRVWAIEDCRHVSGRLEQALLAVGERVVRVPPQRMGASRKGEREPGKSDQIDALAVARAVVEDGVQKFPVAYLNGPAMEIRLLLDHRSDLVAERTRTINRLRWHLVTLCPELEASLKRKALNDARGLDRVDRQLRKLPAGARTRIARHEIADLRRMNRQIDALHHELMELVVAHRPRLLDEQGCGALTAAILIGHTAGHERFRSDASFARQTGTAPVPCSSGKRSRHRLNRGGDRQLNHALHIIAITRAQHDPATQEYLARKQAEGKTTKGALRSLKRHLARHFHRLLAEPLADQLTPIDGQPIVEPRQISIPQLPAIPPPSPKQRPVDANTNGQAPSRMACVR

SEQ ID NO: 92770 - protein, 351 aa, unidentified
MPRATSSTNVIATIGIDIGKNTFHVIGLDDKGAIILRHKLSRGQVYARLANIPPCLIGMEACVGAHHLGRQLSALGHDTRLMPARYVRPYSKGQKNDFRDAEAIAEAVQRPTMKFVAIKTVEQLDLQGLHRIRERLVCQRTSVINQIRAFLLERGIAVRQGLRTLRTEMPIVLAKTDKLSQRMIHMIEDLCMDWRHLNGRIETVSKEIETLSEQDDGAKRLMTVPGIGPIISTATVAAIGTGEVFSKGRDFGAWLGLVPKQMSTGGRTILGPISKRGNRYLRMLFVQAARAVLLRPQSWEKHGLKLWIEAAARRLNRFKLAIALANKIARIAWGVLHGGRNFEVRPMNQAA

SEQ ID NO: 92771 - protein, 359 aa, unidentified
MDSPTSPNAEVSVTLGVDTHKDAHVAVALDELGKHLGALSVPTTVTGYKRLLGWARGFGTVEHAGVEGTGSFGAGLARFLRVEGIEVFEVIRSKRRDQYRSGKSDPIDAEAAARAVLAGTATGQPKGANGEVEMIRTLRSARRSALKARTQAVNQLRALLITAPEELRSELRGLSTARLVARASRLRPGANPPDVEAATKFALRSVARRYHQLSEEISELDEQLDRLIAQAAPELLALESVSTDTAASLMITAGDNPERLKSEAAFAHLCGVAPIPASSGKIVRHRLNRHGNRDANRALYVIALGRMSRDERTRAYVARRTKEGKTKKEIIRCLKRYIARELYRILTSSSTSACPITVP

SEQ ID NO: 92772 - protein, 424 aa, unidentified
MSKKKSSLAGLQALYARACGLDVHKKLVVACVRILDSKDGTVQSTLRKFGTMTADLLELRQWLAELKVTHVAMESTGVYWQPVFNLLEGHFKVWVVNAQHIKKVPGRKTDMKDAEWIAQLLQCGLLRPSFVPERQQRELRDLTRQQTKLVQQRNAVDNRIQKVLETANIKLGSVASDVLGVSGRKMIEGLIAGEKDVTALADLAQRQLRGKIPELQRALEGELNDHHRFLLHQLLGQYDFLEKEIASVSERLGAVAPPSFRAAVEQLDAIAGVGERGARALLAETGTDMSRFPTHKHFASWAGRCPGNHESAGKRRSGKTPAANRHLDAVLTEMAHAAVRTKNSYFKAQYHRLAGRRGKKRAIGAVKHSLLVTVYFMLRDNRPYKDLGVDYFDKLNPQQRIRYHVRRLQELGQEVELSPIADAA

SEQ ID NO: 92773 - protein, 344 aa, unidentified
MKYMGIDHHSQYFIAVLADDNGKELRKDRVSMDRNSIRHYFKQFKDDELAVAMEASYGWSYFYDEVKAMVREVKMAHPLKTKAIAEARIKTDTLDAATLAHLLRADLIVEAYAPDRTTRGKKNLLRYRSALVKTRTMLKNRVHALLSAHHIEDRQFRDLTDKFGKQGREYMDKLLLQGHDRKILSEYLSVIDTLDEKIKTAEKLIGEEFRRDEICRLLETIPGVGKILAVTIRYEIDDIGRFLSAQRLCSYAGLVPSTYSSGGKTYQGKITKQGNRWLRWAMIEAAQQATRIDPWLSEVYERIAKKGKKKARVAVARKLLEIVYRIWKEKRPYEKRYGAVALPR

SEQ ID NO: 92774 - protein, 345 aa, unidentified
MLKYKLFIGIDISKKWFDVCLAWEGQTGSCPHVQLEQDESGFQQMIKWINKQLSESGVFDASCSKKDWFVYAEHTGIYGLKLARFFEQQQIPYLFDSPLRINRSLGLKRQKDDSADAQDIARCALRRDFKQKVRPIPAQTLLKIQSLLGCRARLVRYKAGLTVACKELVFATQSDIHQPIGTSTTVVIKSMNKQISLIEKQIKQLIEADEELKRLYKLVTSVIGIGRIMGAYLLVYTNAFTAFDNPKQFNCFIGTAPFKYQSGTSIKRKEKVNAMANHRLKALFSMAAVTAVYHDPQIRAFFQRSLERGKEQPWIYNAIKTKLIKRVFAVVKRGTPYVKLDKHLN

SEQ ID NO: 92775 - protein, 318 aa, unidentified
MQIIGCDLHARQQTLAMLDTATGEVVNKTLTHEGNSVREFYSTLSGPVRVGIEATGSMKWFLHLMEELGIDCQVGHPATIRAAEPRRQKHDQRDAELLLKLLVENRFPSIWQPSQELLDLRGLLLHRHQWVRLRTRIQNALQAIALANGLRRGSSLWSASGQRAIASLPLATHTAQRRSELQAMYARFEGEIEQLNQRVLEQAGQRPTAGLLMTHPGVGPITALATDVFLGDAKRFRDGKALASYIGIIPREHSSGGRQRLGGLSKQGNPLLRFLWCEAAAHAVRRDPELRRFYRRKLVQKGLGKARVAAARKLGIRL

SEQ ID NO: 92776 - protein, 350 aa, unidentified
MPRKFNTAIVTIGIDPGKNTLHLVGLDARGGIVLREKVARARIVSRLANVPPCLIGIEAGMGTHYMTRELLALGHHVRQVPPVYAKPFRQTHKNDFRDAHAVAEAVQRPTTRCVPPKTDEQLDLQALHRVRYRLVAQRTAIINQIRCFLLEHGITVRQRLHWLRHALPDILAQRTDVLSPRMVRILEDLAQDWRRLDDRIEAVSGEIEALSKNTEPCRHLMTIPGIGPIISSAVVAAIGNGTAFTRGRDFAAWLGLVPKQISTGDRTILGRITKRGNRYLRMLFMQAARVVLLRPRNWMKHGFGPWLTAAAQRLHHNVLATALANKLARVAWSVLAQHRIYEARPSVAAV

SEQ ID NO: 92777 - protein, 340 aa, unidentified
MPATTYGLDVAKRVFQMYWVDGDTGEIVSRRFGRNDLIQYLSRRPPGRVALEACGSAHWWARKIKSLGHEVVLLHAKFIRPFVQTNKTDAADARAIWTAVQQPGMRTVAAKTEEQQAMLSLHRIRSLLVKFRTMQVNQLRGLLYEFGASFRAGRVAGLTEIRSRMVELEEALPGTLMCGLQDQLKRIEGLQAEIDQLEHRIGAWQKQDAACRAISEVPGIGRLTATALVATMGDAATFRSGREFAAFLGLVPRQSGTGGRVRLGSISKRGDPYLRTLLIHGARSVLCHTKVPTPWQSAIQERRPANVAAVAVASKMARTAWAILAHGQAYRRDYVSMRPA

SEQ ID NO: 92778 - protein, 322 aa, unidentified
MAEPVTPNTPTRFIGCDVGKTLIVVCDSRDGSTRTLANTPEALAGFAARLDTTCLVVCEATGGYEDALLAALLAAGCPAHRADARKVKAFIRSFGTLGKSDSLDARALARYAQERHARLARWQAPDPQRERLQTLVLTRADLIAQRTACTNRLAAPGAEPVRACLDALRACLVAQIQALEAAIAELVAGTTELTRAERVLRAIPGIGATTAAALIALMPELGRIDRRQAAALAGVAPHPNQSGGADAYRRTRGGRPEVKRTLFLAALTASRYNPALKDAYQRLRAAGKKPLVAITALMRRLIVIANARLRDAYAHPQNSAAN

SEQ ID NO: 92779 - protein, 394 aa, unidentified
MKLIGIDIGKNKHFFCIMDQQTGEIISQPVSFSNDKEGFDFLVQEIKSYPKDSILIGMEDTGHYHFALLKYLLDLQYTVALINPKTTDFNRKMQGGITKNDKLDTINICDVLDTPERKKQYRITKVNSFDLYEQKQLTRHHHNLKEEENVYKNRLQKCIDIVFPEFNNLFNSKYGTVYMNILKMFGSAENIANTDIRTIRKCFEIEGRGNRISLTPERLKECAESSIGISSSAEVIQIKHLTAQIELIEEQLTEIDKKIEEFSIQNNSPILSIPGISHFSGTSILAELGDISNYSKPSQIIKFAGVAPLHYESSQFNAQHTSITKKGSKYLRKTLYQIILPVIRHNQVFYKYYQLKISQGKGHRCAQGHCVRKLLRIIYHLLKTNQQFDPQLLR

SEQ ID NO: 92780 - protein, 354 aa, unidentified
MTKTTTLETIGCDIGDKTSEICVLRADGSKTEARIRTTVKGMTEFFSGRKPAHVVIEVGAHSRWVSQVIEKCGHRVTIADPRRLKLITQSNNKTDRRDAELLAKLGRADESLLSPVTHRSDQMQAELAVAKARDLLVAVRTKVVNHLRGATKCYGSRLPKCSGESFARQTASQIPAVLKPAADPLYAVLEKLEEEIRHFDKQIEEIAERYPETRVVSQPKGVGTLTALVFMLTIGDKTRIERSRTTGAYFGLRPRKGQSGDDDPQLRITKAGDGFVRRLLVNSANYILGPFGPDSDLRRWGLALAQRGGKNAKKRAKVAVARKLGVLMHRLWVTGEVYEPLGYHERQLAEKAAA

SEQ ID NO: 92781 - protein, 321 aa, unidentified
MSSSSPNNIGIDVSKETLDIAVHETETHWTSKHEFTEFPQLVKSLSALQPTRIIVEASCGVEHLLVSYLAAAGLPVIVVNPRQVRDFARATGQLAKTDRLDALVLARFGATIEPDVRQLKSAETQELEALVARRTQLVNMLTAERVRLQQAQQQRRQSIIADLKAHISWLEKRLEKCEGDLSQLLRSSPIWRASEERLRSVPGVGPVTALVLIAELPELGQLPDKQIVALCGLAPHARDSGKWHGKRTTRGGRARVRTALYMAALVATKHNLVIKTFYRRLLRAGKEKKVALTACMRKLLVILNAMFRNQSSWQPRLQDLI

SEQ ID NO: 92782 - protein, 392 aa, unidentified
MMFVGIDIAKMDHVACAVDERGEKLTRPLPFRNDEGGFAKLESWIEGLVEDAAEVFVGMEATGHYWMACFSFLTAAGYACCVVNPMQVRAVRELRSMPRVKNDRVDSWLIAETLRVGDYEQTRLADDDVQSLRMLTRYQQSLKQELATVKTQCICVMDACFPEYAALFSDMFGAASLAVLASKPTPAELSRAHARTLAETLSEASHGRLGAEKAAELKAAAKSSVGVRLGEDAASFQVKSMAAQVEFLNATIAKVDAEVRALLDRVEPLIVTIPGVSYTTGAQIVAEIGDVRRFKNAAAIVKYAGLNSGVSQSGKFEAQGEPITKKGSPYLRRALWLAANRARQHDPRMRAYYDKLREAGKCHRVAVTACARKLCHVVFAVMRDRVPYDPER

SEQ ID NO: 92783 - protein, 402 aa, unidentified
MYFVGIDWADLHHDVAVLDEKGQELKFFTVPHNREGLEQLKQTLLSINPNPESFACMVETKNGLLVQFLLEAGFPVYPLNPKVVDYRRKPSGAKSDPIDARLLANIGRSDLEQLKRLKPDTELIAELKILTRDQDTLIEESTRLTNKLTACLKEYYPAALGFFSKPTLPVALEFLKHYPTLESVRNAAVPEIAAFLKKHKHPRPNQTAISIWQKAQEPQLHASAPTVRAKCRLMLALVDQLKVVKEQIAAYDEEINRLFQLHSDSKIFASLPRAAVRLAPRLLAEWGDDRDRYENAAAVQALAGTSPVLFQSGKYRFARQCRSCVKPFRQAMHLFAFQSIRAVSWAREYYDAKRSQGKTHHEALRALANIWVRIIFAMWKNRTCYDEAKFIAARARHLNRAA

SEQ ID NO: 92784 - protein, 381 aa, unidentified
MDKIYDKCCGIDVHKKLIVACFRCGKQQEVREFGATTRELLELADWLKEGGCEMVAMESTASYWKPLYNILESSDLKAMVVNARHMKAVPGRKTDVKDAEWIADLLQHGLLQPSYIPGKDQRELRELVRYRKSLVGERTRELNRLQKMLEGANIKLSGTVSDINGKSARSILEYLLTGKSIDGSKYDEMYEQKIIAHNLKATKEQIVDDLNGVMSPLQRRMMKELLVHLDELNVHIKNLNDEIDNFMKPEEKQASQAIQDVTGIGNTSAQAIISVIGSDMSRFPTDRHISSWAGLCPGDNESAKKRKSGKTRKGNALLRTTLITCAHAAVKNKKSYFYAQYMRISAHRGPNRAYVAVAHSMLISIYHILKDGVQGFGSRLL

SEQ ID NO: 92785 - protein, 401 aa, unidentified
MNAVGIDVSKGKSMVCVMRSFGEVVLEPFEVLHTAQNLHDLAEKLKALDGETRVVLEATGNYHKPVAFVLHDAGLFVSVVNPVLIHDYDNNSLRRVKTDKKDAVKIANYTLDKWTRLRQYLPEDDTRLALKNCYRQYQQAVAIRTMLKNNLISSLDLTFPDANKLFSSPVKNNGCEKWVDFIGDFWHSECVSSLSANAFAKKYLKWCQKHGYVFTRSKSDEIYACAVNSASLPKSPTSKLLIQQQVAQLKAVSQSVAAFRQEMLRLSQQLPEFDTVMEMYGVGPSLGPQLMAEIGDVRRFSSKKSLIAFAGIEPQPNDSGKVVGNDKGISKVGSAVLRRTLFLIMTVILQTQPQDEPVFQFMNKKRSEGKPYKVYMMASANKFLRIYYAKVKAVMDSERSQ

SEQ ID NO: 92786 - protein, 359 aa, unidentified
MSLQTAVGWDIHRKFSQLSLVQRSEQGEIRVLRRMRLEHADRMGLRKELGNLPPGTPVALEGAFGWPWIADLLTELGLDPHLGHPPAIKILAKHEAKADRVDADRLGRFWLRGIFPESYLSTPEVRDLRERLRYRQALVQLRGGMKNRVQAILHRQGILHNFSDLFGQGGRAFLKTLTLPEACRAALDGWLSQIDLVNEHLAELEAWMTQHLEEDQITRLLKTIPGIGLILAHVIQAEIGQLVERFPSRRHLTSYAGLAPLADDSADRHGRRHIAPACNHTLRWAFIEAAGIVVRSKHCPANLRHLHNRLTHGGRANKQQAKVAIARELCELVYVIWKKGEPYREPNSPARHERTKRRA

SEQ ID NO: 92787 - protein, 412 aa, unidentified
MEGETVIAGVDTHKDVHVLCLLDGLGRKIWSGSFGADPEGYDRLAEAIGDPGSCMVVGVEGTASYGAGLTRRLVELGYNVVEVFRPKRDKVRPGEGKSDPLDAERAARKAASGRGCSVPKSQDGWVEAVRQLYVARRLAVATSTSCVACAKSMLTTAPSALRERFRGRERPKDLMPLLARGRKAGDALEESVLASLRSVAAVWKEARSQVESLDERIRALLEANAPALLGVEGCGTTTAAALVVAAGDNPGRLKGEAAFSMMCGASPIPASSGKTDRHRLNRGGNRQANWALYEIAIKRMAYDERTRRYVARRTSEGKSRREAVRCLKRYIAREVYHVLMDPNPDGAAPEGTELAKMRKTMRVTQKKAAAELGLPAATLGHLERGKRRSTKLERRYYELLCELERTLPQTAS

SEQ ID NO: 92788 - protein, 429 aa, unidentified
MTRISAGVDVSKNRSTVCIMDQDGKFIMRPFLVWHSTEELDFLADTLKRLNGEVRVIMESTSIYQYPIALHLKEKGIFISIVNAYKVKEFANTDFIGGKTDKKDSRTIASYGISYWDKLVEWQIPKDTYFNLDLLNRTYMNAKKHRQIILQELQHYIDCAMPGMDKELHSLNLSTKKDFMLDFVEKFWHRDEIVNMTEAEFTEVFTAWAKKKGYRPVEGKAAKIYAIAKSCIPYYPANPTVKTILQCIVDKLSGVNRTLVTIVTQMIEEAKKLPEYQIVREMPGVGDPLAARFFGSAGDIRRFKNSKALVAYAGIDSPPDESGDFSSTHRHITKKGSKVFRDTGYEIMMALRAQKRTWEKVRKNPEVYDYMLKKEAEGKPRKVAKIAALNKFLRIIYARIKELYDNMALAERAKTKTRYKTRAKTKVTA

SEQ ID NO: 92789 - protein, 375 aa, unidentified
MSKHSEAFVALDTSKLRNAVAIADGGRAGEVRFLGEIENSTAATAKLIRKLEAKYERITFCYEAGPTGYELHRQIKALGHECVVVAPSLIPKKRGDRVKTNRRDAVNLAKLLRAGELTAVWVPDRRHEAMRDLTRARETAVIDLRSKRQQVSAFLLRQGRWYPAGKKTWTNAHRNWLASQKFEQPERRIVFEEMMFAIRQAQERVERLEPAIRAAVPDWSLAKVVTALMALRGIDLISATGLLAELGDLSRFQTAPELMGYLGMGSSESSTGDTIKRGPITKSGNRRARRTLVECAWSYQHPPRVGIAKQQKVAAAPPKVREIAWKAQCRLNRRYRALIRRGKLKTVAITAVARELAGFVWAIAREAGSAEPAAK

SEQ ID NO: 92790 - protein, 374 aa, unidentified
MSSDGITWVGLDAHKKSIHVAMLVPGREEPVSWQEANEESAVRRLARRLNREGPGEVRACYEAGPLGYTLQRELEAQGVICEVVAPSLIPIKPGERIKTDGRDARKLAEMLRSGMLTAVQPPNEADESLRDLCRGRDSVRQDLARSRQRMSKFLLRRGYRYHDTQRHWGVRHMKWLRPLRFEHAAAQAIFDHYLLTIDHLDERQRQVDAQLGLFGSREPYCQPVAWLRCFRGIDTVTAVSLVAELHDFRRFRSARSLRAYLGLVPSERSSGEQRRQGSITRAGNHHVRRLLVEAAWHHRHRPVLSQPLRKRREGQPAHVIAIADRAQERLHGRFIRMTRRGIHYNKTVVAMARELVGYLWATLYPRETEAPPSA

SEQ ID NO: 92791 - protein, 408 aa, unidentified
MEVLYPRCAGLDVHKDVIVACVRCVSEPTHHEVRSFDSTTRGLLELADWLALHACTHVAMEATGVYWKPVWHILEGNFELVLANAQHIRNVPGRKTDVNDATWIADLLAHGLVRSSFVPPAAIQELRDLTRTRKQLVREISQHSLRIQKVLEDANLKLGSVLSDVLGQSGRAMLKAIVAGESDPQRLAALAQGTARKKTAELREALRGHITAHHRTMLKLHLDVINALERTLSELDAAVGKSLTPIQQRVRLLITMPGVSDLTAQVLLAEIGVDMTRFPDAGHLVSWAGLCPRNDESAGKRRSTRVRKSGTWLKTALVTAAWAAVRVKTSYLHAQFLRIKARRGAKKAILAVAASMLTAAYYMLRDGVAYHDLGSDHFTRHDTSKTICRLLKRLADLGCNVDHLAHAT

SEQ ID NO: 92792 - protein, 317 aa, unidentified
MTPAKFYVGVDVAKDWLDVAQRPEGAPWRVSNDERGIAALVERLVQLRPALVVLEATGGMEMPVVGALVIVQLPTAVVNPRQVREFARATGRLAKTDAIDAQVLAQFGEAVRPELRPFPDAATQELSALLARRRQLVGMLTAEKNRLRTAAKAVRADVQEHIRWLERRLSDLDGQLAQSIRSSPSWRELDNLLKSTPGVGPVLSVTLLAELPELGTLGRKEIAALVGVAPLNWDSGHLRGKRRVWGGRSRVRAALYMAALVAARRNPVLRAFYERLVEAGKPKKVALTACMHKLLTILNAMIRHRTPWSVEHHALQP

SEQ ID NO: 92793 - protein, 365 aa, unidentified
MPSVTSAAGTIHLGMDVSKNTIVAGVLMPGREVPVVDRIWNEEGSVRHLIGRLGDPGGLRACYEAGPCGFGLHRLLTSMGVACEVVAPSLIPRRPGDRVKTDRRDAARLARLLRAGELTPVRVPSPAEEAVRDLVRARAALLADRKRAQQRITAMLIRHDRIWRGTYWTQAHEQWIAGQSFGEPALAAALAHYRAALDTRRAELDAAEAALAPWAARDPLGPAVARLGCYRGIAELTGLTLAAEVVDWRRFGSARAFMGFTGLVPAEYSSGDRTRRGPITKAGSAPARTALIEAAWAYRFRPAIGVTLRRRQAGASPATLARSWQAQRRLHARYKAMTARGKPPGLAVTAIARELAGFVWAEMTS

SEQ ID NO: 92794 - protein, 409 aa, unidentified
MEKTLFVGCDVSSTDFVVCFMNHQGDELGYKTYSNNLPGAREFEALLLKMMGQYSFISLKIATEATSFYDLHLVEFLSSSVSLEKFQTQIFQLNPKIVSNFKRAYIDKDKTDINDSFVIADRLRFGRISEPYENNKPYLPLRRLTRYRFHLVETIAREKTYFFTHLYLKYSNFSLENPFTSVFGTTSLSIITEFSPEELAQMTVEELMDFIVKKGRNHFSEPQKIVKAIKSMGSNSYRLKPGLSSSVDIILTTCLHTIKTLEHSLKDIDKAIEREFKAFPNTLQSIKGIGPVYSAALFSEIGDVNKYDNQAALAKQAGLTWRKFQSGNFNAQETTMTKTGNKYLRYYLVQAANMLRVHNKEYKDFYSKKFKEVNKHQHKRAIVLTARKFVRLLYALLKKGQLYLHNYQQ

SEQ ID NO: 92795 - protein, 347 aa, unidentified
MLIIGCDFHSRFQQIALLDTETGEVEERRLEHEKGEARAFYAGLREPALVGIESMGYTQWFEELLAELGHELVVGDAAKIRAKEPRKQKHDRRDAEHLLNLLVKGDFPRLWLPSAEERDARVWLEHRHQLVQVRTRTLNGLQAVALNHGLCLRQKLWTKRGQEELKKLPLREGRARRRADLLALRAQLDGWIAELDERIAQEVAQRPDAQRLLTHPGVGPLTALGTVLILGPVERFPDAKHVTSYVGLIPQEESSGGRQRFGHLTKQGNRLLRFLLVEAAQTASRFDPGLRRAYRRLTFRRGRASAKVAVARKLAIRLYIMLRDKIDYEEFCRRGSHAGMLGEVALA

SEQ ID NO: 92796 - protein, 345 aa, unidentified
MTNIVKQVVGIDVAQKELVVSFGRMSHDTGVDIFAFKTFPNNEKGFKALLGWVSKLAIKETGVRYVMEATGVYHEKLAYYLSDQQQQASIVLPNKISNYFRTLDVKTITDKTASQAICRFGLERKLDVWQKPKRIFKALRQLTREREQLVADRTVLKNQLHAEKAEAFPNDSSIKRATKRIQLINKQELEIKAEIAEIVKKDSELVKKIDTITSIPGVGKLTAVIVLAETNGFELIKCKKQLVSYAGLDVVVKDSGTSIKSKPRISKKGNRFLRKAMHLPALTAMKLNEQHKAVFIRLVSKHSIKMKAIVAVQRKVLELIYTLYKTGKIFDKDHAKVITQQLINS

SEQ ID NO: 92797 - protein, 429 aa, unidentified
MIMGFTKPIEHSNLITKEGDLMNPLYVGIDVSSKSNVVYFMLPNGDKHSNFSVANSHDGSTQLVKRICSALTSESLDTVSIGLEATSVYGDNLVYFLREDASLASFNRKIHVLNPKQVNKFKESYNDLPKNDWIDSFVIADCLRFGRINKEVYIGDYHYKALQNLTRARYFAVCNLTKEKQRFMNVLFKKYSTMTQEKVFSDAFSTTALAVYDEFESAEALAYMDLQELTAFIIEKGKNRFPDPDAVAKAIQKAARSSYRLPKTVNDSVNQVLSISITSMKALESQIKEFDKAIAAQMKLLPNVLISIPGIGPVYSAGIMAEIGDINRFDNQAALAKYAGLAWTQHQSGNFEAQNTRLIHSGNRFFKYYLCEAAFSLVRCDKEYSNFYHLKYKEVNKYQHKRALALTARKFVRLVFTLLKDNRLYRPAE

SEQ ID NO: 92798 - protein, 420 aa, unidentified
MRNAGIHANSLLEVRRMYNAVGIDVSKGKSTVAVLQPGGTVMRKPFDVSHTSQNLNELADYLSSLDGTTKIVMECTGRYHEPMVKALSEAGLFVSIVNPHLIKNFGNNSLRKVKSDPADARKIARYTLDNWTELRQYSGMDNTRTQLKTLNSQFSFFMKQKVAAKANLIALLDNTYPGVNKLFDSPTREDGSEKWVDYAYSFWHADCVRKIGLKAFTERYKSFCKKHHYIFQQDKPEKLFNASKELVAVFPKEKTYKLLIQQSIQQLNLASEHVERLRREMNELASTLPEYSTVMGIYGVGKTYGPQLIAEIGDVSRFTHREALTAFAGVDPGVDESGQHKSKSNRASKVGSARLRKTLFQIMTTLLQNAPEADPVYRFLDKKRSQGKPYYVYMTAGANKFLRIYYGKVKECLRNLEQTE

SEQ ID NO: 92799 - protein, 395 aa, unidentified
MDVHRDTVVATVSGIGIQLETRTYTTYTNDLYRLREWLLSVGVTHLAMESTGVYWKPVYNILEDDFEVILVNASHVKNIPGHKTDKKDSRWLAKLLLSGLLKASFIPCKDIRNLRDLTRYRKKLVRHAAADRNRFERILQDANFKISNVISDIFGKSGMKLIDALLNDNTDFDDLYNLCHGRIQKKKDILRESLMGNLTVHHKFMLTAIRHSLFTILSKIDIIDAQIQELGKSYALELAMLQTIPGINTISAACLLSEIGADMSIFPTVHHLASWAGICPGNNESAGRTMSGRITQGNQYLKPTLVECAWSATHVKDCYLRRKYESLIGRRGKKRALIAVGHKILIAAYHIIKDKVAYKDLGYDYVDARKRTNQVQSYLDRLRNLGVSVEITAIQ

SEQ ID NO: 92800 - protein, 325 aa, unidentified
MKSHFLVAGIDVSKDTLDICFNDDQNREHYFKVQNTPKGHKLLLGKLGAERTFVMESSGPYYLRLAFSLQQAGCDIRVENPTRVKRFIQMQLERNKSDKKDARWLYRYGVEREAAQWQLPAAESLKCAQIMGLVDLYTRQATMIQNQLHSLEQVPVICTEVVKSLQKSLRSVKAEIRKLEHQLQDLLQVWQGEQLRCISSIPGLGKRAVALLIVYTEGFTKVQSHRQLIALAGLASREHTSGTSVRGRKGICKMGNGYLRNVLYMCSLSAIKHNEACKELYDRLKAKGKRGKVALIAVCNKLLKQAFAIATKATMYQPNHKSILA

SEQ ID NO: 92801 - protein, 369 aa, unidentified
MKKTIRFVGLDVHQKTITVAVAEPGSAPAQLLTTLPNDHLALAKCLERIGPAPTLQVCYEAGPTGYGLARWLLESGIRCRVVAPSLVPRDGRRIKTDRRDALKLAHFLRSGDLVAIAVPDAAAEAMRDLERAREDAKNAERVVRHQLSKFLLRHGQIWSGATKWTDAHLRWVRAQQFACPTLQRVCDDGLQAVEQAGHRVAQLTRNLSEQTANWSQRPLVQALQALRGVQLVSAVVLAAEIGDYRRFASPRQLMTYLGLVPSEHSTGETRRQGRITRTGNTHVRRILVEAAWSYRYRPRLTKVIAARQKDVAPAVRAIAWKAQQRLHRRYVRLLSRGKSKQQVVTAVARELAGFVWAIARQDALLVEAA

SEQ ID NO: 92802 - protein, 417 aa, unidentified
MKCFVGLDVSSTKLDVCIMLNDTTTPFTASLPNDLTGAQEIKNQILELNDTYSFERIVIGMEATSLYSFHPAMFFHEDSQLKALNVEVMVEQPNKIKKYREAFEESKNDTIDAFYIADYFRIERFSPAFLKEEKYMALQHLTRTRLQLIEQLTRTKQHFIENIYYKCNTLSTEIKNENLTTSLWSSTIISLMTEDYTLDELANVPLKDLADFIQKLGRGRFKAPEKLAKAIQAAIRGSYRLPKLQQDSVNVVLGLLAREIRNLEQMIKDIDKAIEDMVEVIPEYQCLTSVPGVGKVYAAGIIAEIGQIERFKDHPQVAKYAGLNWKQNQSGNTNSQNTDLVKRGNRYLRYYLVEAANSVRRHDSEYNAFYKKKYQEVPKHQHKRAIVLTARKFVRLVDALLRNRQLYTPPRRLMEDK

SEQ ID NO: 92803 - protein, 355 aa, unidentified
MKEVSRVSIDISKQVFQVHAASSKGEILWRKRVRREDLHNLIKELSPCEIGMEACGGAHFWGREFQALGHMVRLLAPQYVKPYVKRNKNDSADADAILEAMSRPTMSFIPVKSAEQQEVCQLHRARELAVKHRTALVNEIKGFMHEHGIALSCSGYSKLMSEYLSVLEQCGSRLRDGTKRLMSTLFEQLFAINKMIEKYELELKAHHAINEISQRLESVPGVGLLTATAIAASVGDPSRYKSGRDFAASLGLVPRQHSSGATQRLGGISKRGDSYLRKLMVQGGHTVVMHAKKHQDSRSRWVVGIAERRGRVKAAVAVANKNARVMWALMVKGGSYQENYGEKNQREVEPSALAL

SEQ ID NO: 92804 - protein, 284 aa, unidentified
MDEAGEIVEEVRVENANLNDLTQRYAGVQAVLEATSNYYHIHDTLSEHLDMTVANLKKINQIADTDKKTDRVDAKELARMLRLNSVPESYIPTEEVRETRALVRGRQTLVENRTEYANKVHALLSDHGITEDVKPLTEKGRESLRELSLPAPFDTLLESYLDLIESLTEEIQKLDETIEERARSLKETQLLMTIPGVSYYTALTIYAELGGINRFDGDKEAVSYVGLNPEIRESGDSQIEGSISKRVSGRVRWLLVQAANTAVHTSNDEYLSRFYDRLASRKNL

SEQ ID NO: 92805 - protein, 367 aa, unidentified
MREEYVGMDVHSKKTVYVIEDSEGKVRAEGTIPTHREGVHSMVDKHELKSGTRVCMESGTQAAVVCDALAERGLISVVVDAKEVRKKARRTGQKTDRRDAFEICDGLRRGIWDAIVYMPSPVVRRLRRILSRRRHFVRLSTQQVNAGRFLFRTECLSAEVPASFSTPRGWERAMANEQAASIRTHMSLHSKVWELANEHIVLLEQELRAALEPVKEIMDWLSSIPGVGLITAASFIAIVGDPGRFKDSNHLVSYLGLAPSMYDSGDTERHGCITKAGPPQMRALLCEVAQQTSKRTHPLNPYFIRIAAKGGYKKAAIAIAQRLARIMYRMWLNAERFDVSKLNIERDGTERTRIYDWKIKKPTSEVA

SEQ ID NO: 92806 - protein, 412 aa, unidentified
MLKIVYPICGGLDVHKSFVYACIASTNEHGVTTYKSQRFSTFSKGLRELSAWLAAGNCSDVCMESAGKYWIPVYNKLETTCKVVLAHPKYVKSIRGKKTDKKDAKWIADIFKHDLVNGSFIPPPDIRQLRDLIRYRFKLTSYSTGEKNRAQNCLTVSNLKLDDVFSDVFGKSANAIINHILEHPNEPFDVSPFVHKGCKTPIDEIQAAVDGVICAEQAEKLRIVRAHMDDLDKAKANLESAILTIAEKFLPQVNLVSSVPGITPFSAIAVIGEIGVDMSVFPTAKQLCSWAGLTPQNNESAGKKKTTRISRAGAYIKPLLVQCALAAIKSNKHPEIKSRYLKIKKRRGHKKAIIAIARMLLVAIYNILKKNEPYNSELYKKSDNEPPKNFNVSVDFAIRVLQSQGYAITPPG

SEQ ID NO: 92807 - protein, 452 aa, unidentified
MREEKISMSVVNPHAAGIDVGSRSHWVAIGQGAGDFKEFGVYNEDLYRISAWLKENEIETVAMESTGTYWQSLFSVLISEGLQVILCNGKFTKNVKGKKTDILDCQWIQKLHSIGLLSGSFLPDDATEHLRTLCRHRSNLLDAAASTSKKMQKYLRLLNLRLDVVVNDVCGQTGLSIIRAICGGETDPDKLSSFRHPNCRKSAEEIAKALQTNGRKDYLFALKQELEMYEMFQLKIQQCDIEIEKMLTDTIDNNPDKKQHFIEKNPYKKINKNTPKNIDLNLFSYQYFEGVDLMAIEGLSHSTILSLMSEVGLEGIRQFPSAKHFASWLRLAPNNKISGGKVLSSRIPKGSNRLKIALRSAANAIGNLKDSTPLSDFFKRINFRKGRVSAISATARKLAVIIWNMVVKGIPYKNPEGYMYLDEKRKLGVVKRIRKQIEKYGVTSEDLSFITT

SEQ ID NO: 92808 - protein, 402 aa, unidentified
MIFINCLGIDIGKSESVVAHYKDEVLVKEMVIQNNQNGYRYLKNYIKHLDSLFILFESTGIYSRGMKRFCEIHKIDYLEMNPLEAKFKTSSLRSWKTDKSDAHKLALLAFRMKDSKVQRQSEEIYFELRERARFHLEMEINQNRLKVELVETLHQTFTGLEKLFTNRYSKIALSIAKAFPHPDFVSTLTHDELVEKVLHSTDKGISVNKAHKYVQKLIEIQINSFPNVDKSSFLLQKVQYLCDKLLIGIEEMKEFDQEMIDLAKNTTEFENIISIPGIGELTAALLIGELGNIREFKTNKQLNAFVGIDIKRYQSGTSKSRDTINKRGNKKARRLLYLIIMNIIRGRNHYQSHIVDYYYKLREQPHGKTHKTAVIASINRLLKTIHYLIVNNKLYDYQKAPH

SEQ ID NO: 92809 - protein, 472 aa, unidentified
MKKHKRAKTKSKASKPIHDPQPDSAGVDIGANEIWVAVAAERTEKSLRRFDAFTQDLKALVKWLLDCGVRSVAMESTGVYWIPLFQLLEDAGLKVCLVNARHVKNVPGRKSDVRDCQWLQYLHSVGLLLGSFRPHQAICAARSIYRYRQNLLSMAAQHIQHMQAALDQMNIKLHHLIDDLTGLTGRTIIEAILSGQRDPVQLAKLRDKRIQAAESTIVKALEGDWRKEHLFVLAAAWDNWKQVQQQIQKCDQQLWQYTRELEAATTIAKPTKTMRLKPQWIGSSPVIGPQPAPRVRKKTSKNQPEAPWREELSRFFGVDLTAIPGISVLTGLTLMTELGNDLSAFKSQHHFASWLCLCPDNETSASKVLRRATRRSQNRVRQALRMAASSLHHDKSYLGHKYRRLRAKLGAPKAVTAMAHQLARIIWTLIARRVPFDLSIFALQEQANEQRRLNRLAASARQMGYQLTPIAA

SEQ ID NO: 92810 - protein, 357 aa, unidentified
MPSITPEEAAIFDIAGGVDTHQDTHTAAVIDLVGRVLGTQQFPATAAGYAALLAWMRGFGQRLRVGVEGTGAYGAGLARLLRDEGVDVIEVDRPDRKTRRFQGKSDPIDAIQAAKAALAGERTGTPKQRDGRVEALRNLRVARRSAVDQRADAQRQIKALIVTAPDELRARLRGLAVKQLITTCANLRPDRADAATPATATRIALRSLARRHQQLTTEIADLDELLEPLVAAINPGLLAANGVGADVAGQLLVTAGENHDRLTSEAAFAMLCGAAPIPASSGKTNRHRLNRGGDRQANKALYRVALCRLRWDPHTRAYMERRTKDGLSKKEIIRCLKRYIARELYQLIAPNDLETAA

SEQ ID NO: 92811 - protein, 307 aa, unidentified
MRIIGCDLHARQQSLAMLETATGEMVNLTLKHEGNEVREFYSQLPRPVGIEATGSMHWFLNLMDELGIECRVGHPATIRAAAPRRQKNDRLDADLILKLVAENRFPAIWLPTKELLDLRALVRHRHQWVRMRTRIQNALQAIALANGLRRGPSLWSYDGQAKIAFLPLLPHTAYRRSALQAMYQKMDEEIEKLTQQVAEQAGQRSGARRLMTHPGVGPVTALATDVFLGDPKRFADGKALASYVGLIPREYSSGGRQRLGGVTKQGSPLLRFLWGEAGAHAVRRNPELKRFYRRKLVQKGLGRRAWQ

SEQ ID NO: 92812 - protein, 326 aa, unidentified
MEHELHYIGIDTAKEKLDVDVLRPDGRHRTKKFANTTKGHDELVSWLKGHKIDHAHICIEATGTYMEPVAECLYDAGYIVSVINPALGKAFAQSEGLRNKTDTVDARMLAEFCRQKRPAAWEAPHPLEGALRALVVRHQALTDMHTQELNRTETAREVQRPSIDAHLLWLEAELKRLEKQIKDLTDDDPDMKHRRKLLESIPGIGEKTSAVLLAYIGLKDRFAHARQFAAFAGLTPRRYESGSSVRGASRMSKAGHVSLRRALYMPAMVATSKTEWGRAFRDRLAANGKKGKVILGAMMRKLAQVAYGVLKSGVPFDASRHNPVAA

SEQ ID NO: 92813 - protein, 457 aa, unidentified
MGDDVMISVDPHKASNTLAVMDPVTKTVIARQRFMNTAVGYRRLREFAGGWTHRRWAVEGCHGAGRSLAQRLAGDGEIVLDVPAKLAARVRVYSQGHGRKSDADDAISIGLAALNSTRVAVVRRDDTLVSLRLLCDRRDELGALRTQAVCRLHRLLCELTPGGTHRGLRASRAEQLLAKLRPVDPVDVVRCQLAHQHLDDIRALDAKMTAVRAQIAALVDGTGTRLTELYGIGPVIAGRILAEVETIDRFPSKDHFASYNGTAPIDASSGEQVRHRLSRAGNRRLNHALHMMAVTQIRQPETIGRRYYERKRLEGKTPKEALRCLKRRLSDVVYWQLVADRRATITQCGSATTPTRTRPTSTSATTPVPRTAPPRRPPHPTASTGSSHSTGKTAASSASKSSTPAVGSPKTSSTKQKTRAEATRKPTTSSAAVPDRRPTSAAAAGVKAGAATRRARP

SEQ ID NO: 92814 - protein, 402 aa, unidentified
MRYFVGVDWASLAHAVCVIDEDGQIVMRVAVDHTSEGLNKLVEALRRFGHPAELGIAIERPSGLLVDSLVESGFAIYPIHPNVVKASRPRYSAALGKTDPGDAYLLADLLRTDGHRFRALCPLSDETRALRALVRARSDLVGARVGLANQLRALLESFWAGAVAIFGEIDSPIALAFLLEYPTPASAARLAQKQLAAFLSAQSYSGRRSPDELLQRLRSAPAIQLGPAEMAAKGTLVCTYATLLDTTVRQIRELTSAIERAVMAHSDATVFTSFPRIGKVNAAQILAELGVRDRFLTEEQLAGEAGVAPVTRMSGKHRAVVFRWACNHRLRTALTWWADNSRRASPWAHTVYLSARQRGCDHPHAIRILTRAWLRVLWRCWNDAKPYDVTQHHAAVALKQPA

SEQ ID NO: 92815 - protein, 347 aa, unidentified
MKFYTQQHPHYCGIDLHARTMYLCILNQAGAIVLHRNMKADSDSFLKAIAPFRDQIVVAVECIFTWYWLADLCAREGIAFVLGHALYMKAIHGGKAKNDKIDAQKIAVLLRGGMIPQAYVYPQDMRSTRDLLRRRMHLMHHRSQLLAHIQNTNSQYKLPEIGKKIAYKSNRAGVAERFADVSVQSSIRFDLRRIDFYDGLLNEVELEILRHAKLHDANTFRLLDTVPGVGKILALVLLYEIHDISRFPTVQDFVSYCRLVKPKKESAGKTYGFIGAKIGNAHLKWAFSEASVLFLRNNPEGQAYVARLEKKHSKGKALTILAHKLARAVYYMLRRNEAFDMKRFLNR

SEQ ID NO: 92816 - protein, 407 aa, unidentified
MIFVGVDWAEAHHDVHVQDENGRRLAGGRLSEGIEGIARFHDLVAAHAEDPGEVVIGTETDRGLFAAALVNAGYQVFTVNPMSASRYRDRYSSSGAKSDPGDAKVLADLVRTDRHNHRRSVPDSDLAEAVKVLARAHQSMIWNRRRQLNQLRSALREFYPGALAAFDDLASGDAAEVLKLAPEPRLGAALSKTQITAALRRGGRTRRLTERATAIQAALRAPQLQPSPVVAAAMGAAVASLASVTSEMTRQIAVLEQQLAADFEQHPDAEIVRSLPGLGTVLGARVLGEFGDVPDRYPDAKSRRNYAGTSPITRASGTRRLVLARHVRNKRLADAIYLWAFSALSTSPGARQFYDQRRAAGDTHHQALRALGNRLVGYLHGCLASHTPYDETTAWAHRPGIGLTNAA

SEQ ID NO: 92817 - protein, 433 aa, unidentified
MTDTGGGYAVLVGLDWADQKHDLQCLFVQDGKEQHVVLPSAPEDLHEWVSALRARFPNGRIAVCLEQSRGPVVYELACYDFVDMYPVNPVSLKRYRETFHPSGAKDDPSDAAFLLDLLRKHRESLPRLAPEDGKSRELRLLCEYRRKAVDARTALTNALRSALKQYYPQALTLAGEDLHAELACALLMKWPRFDDIAAAKPQTVRKFYYALGSRSETAITERLQLLATSRPLTTDRAVVEPCVLRVHQLVAEIRALNKAIKNFDKSIGCIFQEHSDAFIFKSLPGAGPQLAPRLLAAFGSDRSKYHDALEVNTYSGVAPVIERSGKQKWVHWRWHCPKFLRQSFVEYAGKSIGQCEWARLYYQELMQGSKDRPAKGHQAALRALAFKWNRIIFRCWQERTPYDERKYLASLAKHGSWLAARLNLLAEKTQKTA

SEQ ID NO: 92818 - protein, 347 aa, unidentified
MRFYNQQHKYYCGIDLHARKMYVCIIDQKGKNKVHQNIKTDPEMLFELIFPYIDDIVIGVECVFCWYWVADLCSEHKIPFILGHALYMKAIHGGKTKNDKIDSYKIALLLKGGNFPTAYTYPAKWRATRDLLRRRMYLSRRCSELVAHILNTNTQYNLPGFNKKLSRKYNHEGVAERFEDPQVRKSVEVDLEMINSLNQVLKKLEWHIEKTARQHDYHTLYLLRSIPGVGQILALVILYEIHDIKRFPRVQDFSSYARLIRPVKESDGKWAGHSNKKIGNHHLKWAIKEAAILMLRDSAEAKYYVSKLERKYNKGKALGIFTHKLGRAIYFMMKNKEAFDMKRFFAK

SEQ ID NO: 92819 - protein, 391 aa, unidentified
MPMYFVGIDISKYKHDCCIISAADQQIVSKFTVKNDKDGFEHLLTTLNSLSNPEDIKIGFESTAHYALNLELFLENAHHSFMEVNPVLIKEYKKSTTLRRTKTDSVDCESIARWLMTVEYKPHSKGFYHSYSLKSLTRLRDRLIRQRSFYLVKITNVLDHTFPEFKPFFNERLSKTAIYLLENYGSAEKMAHMNSASYDKLRCASRGKFSIQQFLRLKELAANTVGVNNSIFDIELNSLLTLYNSLCKEIKTLEAEITKLIEEVHPHYMSIPGIGPISAAVIYAEYGDISNFSNPGQMLAFAGIEPGINDSGTESHGGRMVKHGSSQLRYVLLNACLPLIRFDLTFATYYEKKRAEGKKHRVAITHVAKKLIRVIYALERQDVDFNVQKLR

SEQ ID NO: 92820 - protein, 345 aa, unidentified
MKKIIIGIDFSKETFDATLFDCRNSELSEAVQSAVHEKFTNKKEGFQAFLTWIKSSVKKINSDELLLCGEKTGKYSLALSNFLYAKGYSIWLDSGLRIKRSLGISRGKSDKADSLKIALYAYRYQDMAVCYVPLSKNVSRLKELFLYRQHLVSQMKAMAVRKNVTDDFKKELGDVRFIVDSATEIIQQIKATIKKCEEKMQELIEEDEELKTTHDSITSVKGISLINATAFIAYTNNFKDFGGNAKKIATYWGVAAFAQESGTSVHKVARVSKIASKMLKSLLTQAARIAVRWEPKFRQYFEHLISRGKHQGVALNNVKNKLIHVITALAVSKEKYNQEYKCINR

SEQ ID NO: 92821 - protein, 369 aa, unidentified
MTENTLFVGLDVHKKTISVAIIGGGAGAAVRFYGTIENTPDAIRSLCRKLSKAGQALHYSYEAGPCGYGVQRQLVRLGHRCDVVAPSLIPRKASDKVKTDRRDAMMLAQALRAGQLTEVWVPDEAHEAMRDLVRLRSQAMRDLRKTRQQLLSFLLRHGRNSPYRHWTKMHRRWLGELGFAHPAQHLALEEMLARIDRAEALCERLKQAIRDLVGQWSLAPVVQALQALRGVSLITAAVIVAEVGSFARFESPRQLMAYLGLNPSEHSSGGTIRRGAITKTGNALARTSLVEAAWTYRFPARITQIIRDRLKNLPEPIRAVAWKAQVRLSTRYRKLIAGGKAAPIAIVAIARELVGFIWAIARMAEPKFA

SEQ ID NO: 92822 - protein, 369 aa, unidentified
MQAGTFIGPGVHKATISVAVAQGERGGEVGHWGTVPHRPDHVRSLAETLAVGGRRLCSCSEAGPCGYGLHRQLTEMGQDCIVVVPSLIPVTAGDRVKTDRRDAVMVAKLHRAGDLTAVWVPDAAHEAMRDLVRARATAMRVAGKARQHLQGFLLRHGRISPGKKGWTGAYRRWRAMVRFTHSAQQIVLQDYIDAVADAGARVARLTGQIAALLPGRSLVPVVDAVRAMRGVGVIVAGTVGAGVGDFRRFDTRGQPMAWLGLTPPEHSGGASVRRGGITRAGSGLARRALTGGARSYRMQARVSPKLLSRIEALPQAVRDIAWKGHLRMCRRSRHLVAAGKAKVVVITAIAREMVGFIWAIARTTRPATA

SEQ ID NO: 92823 - protein, 454 aa, unidentified
MAPRHQKTKQKIHTQLPTCHPHAAGIDIGAREIWVAVPPGSDSKPVRGFDTFTEDLLKLRDWLLACGVRTVAMESTGVYWMPLFQILEAAGLAVCLVNARHCKNLPGRKTDIQDCQWLQYLHSVGLLRGSFRPPEHICAVRSLLRHRNRLVRCAADQVRLMHKALTQMNVQLQHVISDLVGVTGEAIVQALLAGERDPVKLARLKDHRIKASHDTMARSLRGDWRPEHLFTLSQSYQTWQHYQKQITATDEQIELQLATWDARVDVQVQPLPAPRTTHRTAQRNEPQFDARTECYRVLGVDLTALPGFQAPTALVLLAELGPDFAQKFPSAKHFASWLGLCPDNRITGGKIMSSATRDVKSRVAETLRLAAQSLWHAQNYFGELYRRWKARLGGPKAITAMAHKLARIVWHLLKHRQAFNPEVFRKEEEKMRRKKLARLQNTAAALGYRLVVSQ

SEQ ID NO: 92824 - protein, 465 aa, unidentified
MTTAKLWRNRKERKDWARRLRSEDPGLEVVHPHAAGIDVGNSAHYVAVRPDRDPEPVRRFECFTADLYRLAKWLKSCGVKTVAMQSTGVYWIPLYEILEEHGFEVYLVNARHTKNLPGRKSDVQESQWLLKLHTYGLLNNSFQPPAEIRVLRTYWRQRAEHVSGAATCIQRMQKALTQMNLQLANVISDLSGVTGQAIVRAIIAGERNPQKLAELSDPRIEASREEVAKSLEGNWRPELVFVLRQEVEMYDTYQRRLAECDQQLQKHLASFGDTVLPQSAEAEPREKKAKPTKNAPRFDLSSELKRITGVDLTRIDGIDVMVAQTLLSEVGMDMSRWKTEAHFASWLGLCPDNRISGDKLLGKGTRHVVNRAATALRLAARNLIRSRSYLGAQYRRLRTKLGAPKAITAMAHRLARLVYRMLKYGQRFVDKGTEYYENRYRQQQIHLLQKKAAKLGLQITLAVQS

SEQ ID NO: 92825 - protein, 339 aa, unidentified
MSLSLVARTVIRDTKPVFTRMGEDDCMSTAHFIGIDVSKDHLDIAIRPTNVKFHVLNTDEGVDALLQQLHPLQPTLIVMEATGRYHQLVLSRLLAVGLPAIAINPRQARDFARAIGRLAKTDAIDADVLAEFAEKIRPELRSIADEATQELEAICTRRRQLVAMLSAEKNRLHTAPKRIRSEIQKHIHWLEKEISQLERDLDKRIRSSPAWREKDDLLRTCKGIGPVTTHTMLSCLPELGTLSGRRIAALVGVAPFNDDTGNYKGPRHVQGGRLDVRAVLYMATLAAIRHNRTIREFHRRLIAAGKAKKVAITACMRKLLTILNAMLRDKKPWQPDLLA

SEQ ID NO: 92826 - protein, 349 aa, unidentified
MIARSDAACFVGVDLHKDTLTACVVRRTDREVTYKRIVCKCRDQVREFFSSLPRPSVVAIETVGFYRWLWTELEPLVDQLVLCDARGARALAGRRIKTDREDALNVALLLADGRLPLAWAPPEQVQLLRNWTRHRNGLTRQHAKVLHHVKSTLNRLNFAGPVRLDAAALQRYLLASVERFCADDLTMLWQHQRRLVEIEQDRAQSERRIIELMRAAEFAGLRGILESVPGVGLVTSATVIAEIGDFSRFADSKAIGRYAGLAPTVYASGNSNRLGHISKTGSPDLRWALQQAAWTAIRCDAGFKKTWLRIAKTAGKKAAAVAIARKLLVLMWTLQRKDEPYKSRDPVAA

SEQ ID NO: 92827 - protein, 340 aa, unidentified
MIIGCDFHPRFQQIAFVDQDTGEYGERRLNHPQEAEQFYRSLAGMQVRIGAEATGNFRWFRHLMEELGHEFLLGDATAIRAACPRRQKTDKRDARHILNILVEDRFPVVWQPSVENDHVRQLLLHRCRMVRMRTRIKNQLDAIAKNEGLLSSRVWSAKRRSQIEALPLPGWYAHRRADLLGLLDELDKRIRPLDEAVRETAENNQEARLLMTHPGVGPIVSLAYVLTIGDWRRFPRGKQVGSYLGLIPAEESSGGKRRLGHISKQGSTLLRWLLVEAAVHAQRHDASWHRQYLRLSMTKHHGVAKVAIAHKLAVRLYWMLRSGDDYSKVMERGSHAGQSV

SEQ ID NO: 92828 - protein, 268 aa, unidentified
MHKNLFAGCDISKHHIDACLLRVDGRRHRSRFKNEPSGHEKLIQWLCRGGIVRVVIEATGHYSLDLALALERTAGIELMVANPRAVKTFASAQMRRSKTDRLDAEVICDFAQRMQFVPWQPPDEAVLKLRGISRRMQALTTERTRELTRLEDAHATQTTSGIIINDIEVNLRHLERRLNEMLRQALKIVRSHSRLETAFNRLTSVRGIAEKSAIMILPEVLILPAEMSIRQWVAQAGLDPRRHSSGSSIEKNERISKVGNVRFDQRQL

SEQ ID NO: 92829 - protein, 412 aa, unidentified
MEILYPRCAGLDVHKKSLVACILLPDAQGHQCKQFHSFSTMLSDLQRLRDLLTSLRVTHVAMESTGVFWKPIYNVLEDHFTLLVVNAQHIKAVPGRKTDSKDAEWIADLLQHGLLRPSFVPSRQQRDLRELTRYRTSLVQERARTILRLQKILEDANLKLASVVSDLTGTSAHAILHALLDGTTDPSVLAQLACGRLRSKRDLLEQALAGTLRPHHRFLVTEQLALIDALDDSIEHLCTQIAELMRPFEDLCTLLCTIPGIGRRTAEILLAELGPDMTHFPSARHLASWAGMCPGNRQSAGKRLKSPMRKGNPWLRSALVEAAHAAARSSSTYLSAQYQRLAARRGANKATVALGHTLLVIIYQILSKKEVYHDLGSNYFDEHDRQAVQKRLVRRLETLGYQVQLTIAATDT

SEQ ID NO: 92830 - protein, 343 aa, unidentified
MEAITTIGLDIAKSVFQVHGVDAAGNVVVRRQLKRRNVLAFFEKMPLCLVGIEACATSHHWSREITALGHTVRLMPPAYVKPYVKRQKNDAADAEAICEAVTRANMRFVETKTPEQQACLMLHRTRHLFIKQQTSVINAIRAHLAELGIVARVGRKGVEELLGVAADPGDGRVPEVARACIAALGAQLRMLKAQILELDRRIMVWHRSNETSKRLDQIPGVGPALATALVASVPDPKAFRSGRHFSAWIGLVPRQHSSGGKDRLGRISKQGDRYLRGLFTAGALAVIRYAKIYGTGHRPWLAALLARRPTKVAAIALANKLARMAWAMMAKGERYKEPAALAA

SEQ ID NO: 92831 - protein, 442 aa, unidentified
MKTQIFEFCGCDVHKKMIEVAWLDITGKDFLHGSFENSPEGNQRLWKECLRLGTTKAAMESTSIYWRAVYKSCPESITAMVFNSATIKLKTRPKTDVKDAMWIARCLRAGFISPSNIELGKATEIKELCRLRNTIVEEITRKKNHIHKILDEFQRKPSSFSSSLNTHFALYVVTTLAQGGTIDDLKANCHTTRLRNAVNKNREVLKTFLSPSLPLESRLTLELALRGLLERAQACVKIDSQLAQRLKEPSIRESLGILNSIPGISGVSALHLLFEIGRIDRFPSKRQIVSWAGLCPRIYSSGGKTSRGHITKQGNAHVRRILFQAARASLRVKTNPLEGWYRRLAARKPGRVALVALARKLLVIIYTLLKTRQTFLCAPLKTEIRVHSTAKKLVKGLTSEPIAPLLTILVNWLDTPRQFRDSLAGIFDSMYGEVRQKRGAYS

SEQ ID NO: 92832 - protein, 373 aa, unidentified
MNHHSGAYVGIDTSKLRNAVAVAEEGRGGEVRYLGEIDTTEAATRKLVTKLAAKYRQLTFCYEAGPTGYGLYRLIRKLGHDCIVAAPSLIPKKPGDRVKTNRRDAVGLAKVLRAGELTAVWVPDERHEAMRDLSRAREAARKDLKGKRQQVSSFMLRLGRHFPGKKTWGPAHMNWLMLQKIEHREQRIVLEELLGAVRQESERVERLEQAIRDAVPEWSLAEVVTALQAMRGIDLVAAVTVLAEIGDLSRFQNPRQLMGYLGLVPSESSTGDTVNRGGITKAGNGRARRILVESAWSYRYPPRVSREKQNKVAAAPRAVREIAWKAQMRLCGRFRSLTRKGKRPNIIATAIARELAAFIWAINREVMAHATAS

SEQ ID NO: 92833 - protein, 346 aa, unidentified
MKINRVGVDLAKNVFQLHGADRKGKTVWKRRLSRGKWLKVLCDTVEPGTEIGMEACAGAHHWARQLMQRGYPVKVIPPQFVKPFIKSNKNDANDAQAICEAMGRPDMYPVKVKTVAQQDLQAMHRIRDEIKSHRIAKANQIRGLVTEYGLVAPLQLPALRRAIPEWLEDAENGLTFLFRQLLQGLWGDLHVLDQRMTELDKQIAVIAQEDPTARRLQQLRGVGPLIATALVATIGDGRQYRKGRDMAAALGLTPRQHSSGGKDRLLGISKRGDAYLRCLLVHGARSAVRTAKDKDDRLSRWINNLQARRHSNVVAVALANKMARMAWAMMTRGVDYEPDLAAASVN

SEQ ID NO: 92834 - protein, 325 aa, unidentified
MPLWVGLDVHKQSCHATVLDERGEVVLQKRVPNEPEVLEELFGKLKPVGVAMEATYAWEPVYELLERMGLEVHLAHPTKTRVIADARLKTDVRDSEALARLLQLNWLPEAYVPPREVRELRRLVRLRAYLVRKRTSAANRLRAELVRLGLKAVGNPFSKEWREVLKGASRTAREALELYELLTLKIRRLEAEIEREASGNPQARLLMTIPGVGAYSALTILAEIGDISRFRSPEHLCAYAGLVPSLHQSGSTVRLGPITKEGSRRLRWILIQCAWMHLHHGESRLTEFFWRVARRKGRKRAIVAMARKLLVAVYWMLVRGEPFKG

SEQ ID NO: 92835 - protein, 387 aa, unidentified
MIYVGIDIAKQTHYAAIINSDGEVLVKPFAFSNDHSGFQKLLKHLDSYSKEELYIGMESTAHYAENLTSFLFTRGFQVCIINPIQTSSLRKSNIRKTKTDSVDTYLIIKALTLNHYHLYSERDYNSLQLKNLCRFRQKLMKARTKVKIQLVTYVDLLFPELQYFFKSGIHGKACYTLLKEQPNPDRIAKMHLTRLTNLLSKSSRGHFKQSKAVHLKELASQSVGIKNDTLSLQILQSIKQIEMYTEQLAEVDQSIHEIMDKMDSVIKTIPGVGAINGAMIIGEIGDISRFDKPCQLLAYAGLDPSVYQSGNFTAARTRMSKRGSKLLRYALINAAWQTTLVNKTFKEYYDLKVSQGRRHYNALGHVAHKLVRVIHKMMSSNVEFNLA

SEQ ID NO: 92836 - protein, 364 aa, unidentified
MDPALGLGWDVELSLAEQETTMHIVRIGLDLAKYVFHLHGVDERGKVVLRKTLRRPAVALFFANLPPCIVGMEASNGAHYWAKTFSELGHDVRLISPQFVTPYVKSNKNDRNDAEAICEAVGRPNMRFVPVKSAEQLAIQAIHRIRSRLVANRVRLVNQIRGLLGEHGVVIAQTIGNLRRALPRIVDEESNGLNSIVRELIGELREELIDLDRRVAIYDRKIRELYRTSAACQRLGMVEGIGPITATALVAAAGDAKCFKNGRQFAAWIGLVPRQRSSGGRSRLLGISKRGDRYLRTLLIHGARAALGRIRGKQDPRSLWLLKARERHHPNVVAVALANKNARIAWSLLASGMSYDQRLTVSSA

SEQ ID NO: 92837 - protein, 370 aa, unidentified
MPIGKPVPFTEDREGYDTLLRLLGPPPVLVAMEATGHYWKNLYAALVATGHHVALLNPLRTRRFQDSALERTKTDAIDAAGIARFAFEKRPEPTQLHDAAAEALRELVRHRDRIRQDFDDRVRQLHRLVDLGFPEFTRYVRGLDSMLATCLLAECPTARDFAQATPRRLAKLRYDGRHPVGPELATQLIEAAKRSVGQHHGPAYRLQARHICQDLDLWRRRLAEIERDIDGLLDSHEVGKLLLTIDGIGPQTAARIIAAVGDPARFKSAAAFAAYVGVVPGLKQSGKNPGRRAACAPMGNARLRRALWMPVVGAVRRNAWLKPFYEGLIARGKPPKLALVAAMRKLLHAVYSVAKNRKPFEIATEQARAA

SEQ ID NO: 92838 - protein, 345 aa, unidentified
MTTMNYIGLDVHKKTISYCVKDASGRIQQEGKIGSTRRELDCWMKTLPQPWTVAMEATIFSGWIYDHLLPHATQIKVAHPLLLRAIAAAKKKNDQIDASKLADCLRCNFLPECHMMPRAIRDRRRTLRYRHLLVRQMVQMKNRVSGLLMETGVEYNKQRLHKVSYFRELLFANEEVPPSLRPLLKLSRETIERCQKTEYALVSSLQRDPVLADRIKRLRTVPGVGPITALTWALEIGDVSRFGSIKKAISYCGLCGDERSSADKAMRMPLSKQRNKHIQRVLVEAAKLAPRQSHEMAVIYDQERQKGNSNRATLAVARKMVAYLLAVDRQQRDFVPAEERRTTAA

SEQ ID NO: 92839 - protein, 415 aa, unidentified
MNRYCGIDWAERHHDIAIIDSDGKLVSKRRISDDPTGFAELIALLLENGDSAEDPITVAIETPRGLMVAALRATGRPVYSINPMAVARYRERHSMTRAKSDHVDAMTLANIIRVDGEYHRRLPSDSELAQAIAVLARAQQDAVWRRTKAGNELRSLLREYYPAFLATFTKNSATNLARPEARAVLALAPTPSHAAKLTKTRVAAALRRAGRQRGIDTLADEIVTGLRAPQLRQPALVEAAMGRHALALLATLDAACHGAADLEQATAEEFRKHPDYAVVTSFPGLADLAGARVLAEIGYDRRRFASDRALKAYAGSAPVTRASGKSIAITHRRIKNDRLAAAGWVWAFAAMATEGPAREHYLRRRDHGDRHAAALRHLFNKMLGQLHHCLLTGQEFDPAKAFGPTTDTPPTRAAA

SEQ ID NO: 92840 - protein, 340 aa, unidentified
MSLYGGIDLHANNSVIVLLNEQDEVIYRKRLPNDLTTILGQLAPYHTEMKGLVVESTYNWYWLVDGLMDADYRVHLANPAAMQQYSGLKYTDDHSDARWLAHLLRLAVLPEGYIYPKAERAVRDLLRKRAHLVRQHTANVLSVQNIMARNTGTRFSVKRIQELTKQELTTLLAEETQVLAVTSSLVVLDCLKQQIKTLEQTVHKRLHHTPSYEQLLTVQGIGTILAQTITLETGAISRFPSVGNYASYCRCVDSTKISNGKRKGTGNVKNGNPYLAWAYMEAAQFAMRFQPEAQRFYQRKLAKSRNNTVLARKAVAHKLSRACYYLMRDLVPFEATKAFG

SEQ ID NO: 92841 - protein, 400 aa, unidentified
MLSIGIDVSKGKSTVCGMKPGGEIVYTPFEVQHTREGMSELVSLLHNSGEEVRAVLESTGSYHCLVVAALLENGIFVSVVNSLRMKRFCSQSIRKVKTDRIDAMQIALYGLAYWQELQPARLPEDTYRELQLLARQYYQMTSMLIKAKVDFNALCDQVLPGMQELMNDHAGRHKISDFVLRYHHTTHILEMGETRFRKDYCKWAEKKGYRNCERMAALIFATAQNGIPVLPNAPSTQIVITEAIRVLHTVEASRDAILTQMQALAKTLPEYSLVREMPCIGDTLAPRLIAEIGDVRRFHSKRALIAYAGIDAPPYQSGKFCANNRHISKRGNRYLRKTGYEVMQSYVMHKPANDPIFTFIEKKRSEGKSGKLAMVAGLNKFLRVYYGKVTELYRSLPAIE

SEQ ID NO: 92842 - protein, 346 aa, unidentified
MEHYAGIDVSLERSSVCVVDALGKIVKEAKISSEPAALVAFFEALGFAVRRIGLEAGPLSQWLHAGLKRAGFEAVLLETRHVKAALSAMTVKTDRKDARGLAQLIRMGWFRPVHAKSIRSQEVRALLVARKQLLGRLIDVELSIRGILRGFGLKVGSVTRKGFDARVRELVTGQPTLERIAGAMLSARVALKAEYEKLHKTVLAIVRDDALCRRLMTVPSVGPLVAITYKSAMDDPNRITKSKAAGALFGLTPRKYQSGEKDVTSGITRAGDEMVRTALYEAANVLMSRITRFSKLKRWGMGVAKRRGSKRAKVALARKIAVILHRMWVDGSTYRWTETQPIAAQV

SEQ ID NO: 92843 - protein, 418 aa, unidentified
MTKKLDTTFIQIVHPVCCGIDVHKKKISACLITIDGQGQELYEIKEFGTFTHDLLAMKKWLTDNGCPILAMESTGVYWRPVHNILEGYLEIILVNARHIKNVPGRKTDIGDSKWLAGLLRHGLLRGGFIPPKEIRQWRELTRLRRTYTESLADYKRRVHKLFETANIKIDSVVSDLFGVTGRNLISLLCNESELSLTNIKENAQRGLKAKSKELHHSIQGFFEDHHRFQLVGMMEMITIFEKHISEITDRMDTLTAGHQDLLNRLDEIPGIDKKSAQSIVSEIGVTLDEFICMGALASWAGLCPGNNESAGKRKTGRTSVRSHPFKTILIEVAWAAVKKKDSYYRAKYFKLKSRRGAKKAIVAIAHRISKAIYNIIKHAGTFIDLGEDYLTAKTRQRVIDNIKKRANQLGYELVQCMN

SEQ ID NO: 92844 - protein, 410 aa, unidentified
MQVLYPRCCALDVHKLTVVACLRIADDSKVTSEVRTFETTTASLIGLRDWLTANKCTHVAMEATGVYWKPVWHILSDGEFELVLANAAHVKNVPGRKTDVSDAEWVVDLLAHGLIRPSFVPNSQTQQLRALMRTRKQLVREAASHIQRVQKTLEDANIKLDSVISDIMGKSARAMIEAMIAGETNPAKFARLAHRSLKASPAQLREALRGRVTKQHRFLLRLHLKQIDGLEAAIAEIDQQVEADIEPFRAAVKQLSSAPGVKALSAQVIVSEIGIDMSRFPSDGHLVSWAGICPRNDESAGKRRSNRLRKGAPWLKTTLVQCAWSAVRQKDSYLRAQFYHVKARRGPKKAIIAVAASILTAVYHMLKTGKTYQDLGPNHFQRRNKDQQKHLLIKRLADLGYAAALTPLPG

SEQ ID NO: 92845 - protein, 462 aa, unidentified
MQTIGIDLAIVGDHKAVILDDQGSAIGKVFGLRTDPASLDELLRRAREGAAEDEPVRAVMEPTGLAWLSVASYLIQRGVTVYLVNTQQVSDLRKFYKKHAKSDRIDARVLARLPWVNPEALHPLQLSPADYLSGQRWCKQQEELADLMTAIKNRVQAWERGFWPGLEEVVGDLFAPWVRRWREVWYNPWRLLTVETRELAASLAEAGANPETVERLAAGLRQVARRAVALFGTPEGKPSPYVDYGTLQDQVLRELRLLAVYEAEHQALRRKVQRLYRQLYPQRHLESIKGVGENGAAVYVFFLGDVARFATQRKFRGWHGMVPASQQSSDAETKGLRITRAGPDPVKKYAYINAEVMRQWDPQIAAIYHEQMMHKGNHHCQAVCACATHLLDRVRAVLRDGRPYELRDVDGTPVTWQEARAIIAERYHVPEEVRKRNSKRARKARRDQRAERKRKGRSPPGR

SEQ ID NO: 92846 - protein, 381 aa, unidentified
MKKRTRYLGLDVHAETLAVAVADGGRGGEVRSLGVIPNSPTSVRRLVAKLGGPGGLRACYEAGPCGYALYWELTRQGVACEVVAPTLIPVKAGDRVKTDRRDAEKLARCYRSGDLTAVWVPDEEHEALRDLVRAREAAKKDQLRARHRLGKLLLRHGRRSHETAWGTKYMEWVRGIRFKQPALQHTLVDYLAEVEHCAARIERLEQAIAEAVETAAPAFREVVAALQTLRGVALLTATTAMLEVGAFSRFESPRQLMAYAGIVPSEHSSGGPGKARRGSITKTGNAHLRRVLVEAAWTYRHRPGVGNKLRPRLKDQPEAIKEIAWKAQHRLHGRYVRLAARGKPGQLVVTAVARELLGFMWAIAAPIERERYGLVENRKAA

SEQ ID NO: 92847 - protein, 351 aa, unidentified
MSHKLNSAIAVIGIDIGKNSFHVVGHDNRGAITLREKWSRGQVERRLANLPPCLIGMEACVGAHHLSRQLRMLGHDARLMPAKYVRPYSKGQKNDFRDAEAIAEAVQRPTMKFVATKTAEQLDLQALHRVRERLVSQRTGIINQIRAFLLERGIAVRQGLRFLRAELPRILAAPCDALSPRMLRVVEDLAGDWRRLDERIEGLSSEIEALARQDKGCERLMTVPGIGPIISSAMVAAIGTGDAFSKGRDFGAWLGLVPKQISTGDRTILGSISKRGNRYLRALFVQAAWVVLVKVGPKHWERYGLKSWIEAAKKRLHHNVLAVALANKLARIAWSVLAHGRTFETSKIQAA

SEQ ID NO: 92848 - protein, 353 aa, unidentified
MLAEMVDHVIGVDPDRDRVTAVIVDSKTKGELADAAFPTTPAGYRALVEWADAESQADARVWSIEGAGSYGAGLCATLQAAGEWVLEFDHPSTQSDKDGSKSDGLDAARAAREVLGRKKLSQPRSRGTREGIRTLLVARRGAKQARVAAINGLKALVITAPVELREQLRDLTAAGLVSACRRMRINDGLDDETAGTKAAMRHLARRVAGLDEELADIDRQLKVLVAKTAPQLLAEYGVGPVTAAQVIVSWSHAGRCRDEGAFARLGGVAPIPANSGQTQHRHRLNRGGDRHLNNALHTIVLTRVRDHPETRAYIARRVGEGLTAREARRCLKRYLARRLYRLLENPPEVLDKT

SEQ ID NO: 92849 - protein, 405 aa, unidentified
MISVGIDVSKGKSMACFLDSDGEILYKPFLFEHTFSGIQRLTDRIQEQEKNGPVKIIMEATGIYHLPVAIHLHEQGFDVSVVNPLSTSRYRNIDVRNVKTDKADSVSIANYGRSYWHTLPAFKMHTDEYFWLNDAADDYLTISKSQNRLDLLFKNKLERSMPGIDKELASLNKETGKNKLLDFVMQYPHFAAITAMSEAEFIEDFCIWARKKGYRSSKSKATTIYSLALNGIPSTSDSQYNRDSIQMYADLLREAETALIGILARMREIAKTLPEYELVGEMGGVGNILQVMLIAKIGDVRQFPKKGALVAYAGLDSPPNQSGVNPGTGMPITKRGKSKLRKILYQLVMTLLSHEEPADNVVYNFVKRKVAEGKPKKVAIIAGMAKFLRQYYGRVMNLYRQSGLL

SEQ ID NO: 92850 - protein, 365 aa, unidentified
MASVSHLALVHLGLDVHKDTISAGILRSDQQVPDVERIANDEPSVRRLVARFDDPRLLRACYEAGPTGFELARLLHSMRVSCQVIAPSLIPRAPGDKIKTDKRDCRRLARLHRAGELVCIRIPTVDEEAVRDLCRTRADMVEDLTRARNRLGKFLLRHGRPWRGGSTRTHPYQAWLRSQRFDQPAMTQTFHHYLAVVEVRNAELDAIEVDLADWCTRPPFAWQVARLAAYRGVTRLGALTLAAEVADWHRFAHASQFMGFCGLVPSEYSSGSRVHRGRLTKAGNAHLRAQLVESAWSYQHRPSVGQEIAGRQQGLDPEVVARAWAAQQRLCGRFRALAARKNTKSIVAAAIARELAGFLWAEMTA

SEQ ID NO: 92851 - protein, 425 aa, unidentified
MNYKQNEKINQVKESTLVVGIDIGSTTQYARAFDWRGIELGKVFTFSNSREGFEAFKAWMQRLQDKYRKSDVIVGIEPTGHYWFDLGAYLEDEGILLVMVNPYAVKQTKELDDNSQSKNDRKDPKVIAKLVTEGRYSAPYTPDGVYADLRIMVANRKRLIREMTQIKNRFARWFAIYFPEYTDVFGDYEAQSSMLLLKKVCTPEAIVELGAEKINQIWRDAKLRAVGMKRATTLCETAKRSIGLKKGSSAAQYEMKLLLEDYEYKKAQLDAVIEEIEKLCRKIPESEQMLAIKGIGVITVAGFLAEVGDVRRFESPRQIQKLAGLSLRENSSGKHKGQTTISKRGRSKLRAVLFNAAIPLIATNPEFKSLHEYYTTRANNPLKKKQSVIAISCKLIRVFYAILANGVTYDAQKMLSDIHRQPQAA

SEQ ID NO: 92852 - protein, 387 aa, unidentified
MEVRMENTPSAGSNNDPVRCFVAIELSKSSWVLGFQTPLANQTSRYQVKACDAKALLDLIERVRGRVARELVRPVEVMSCYEAGYDGFWLHRVLEAHGIHNHVLDPASLQVNRRARRPKTDRIDADRMVRALIRHLRGEPEACSVIRVPSPEQEDARRLHRERDRLIAERVAHVNRVKGLCATQGIYDYEPLRRDRLKRLDNLRTGDGRALAPRLKAEIVREIKRLEVVLEMISTVEAERDNILKNKKSTHLNADKIKMLAKLKAIGAEFSTTLVGEVFYREFANRRQLGSYVGLASSPFCSGSLDRDQGISKAGNPKARTMMIELAWTWLRYQPESALSRWFRERVGNLKGRPRRIAIVAMARKLLVALWRYLQTGVVPIGAELKA

SEQ ID NO: 92853 - protein, 415 aa, unidentified
MEVMHPRCAGIDVSKRDAKVCIRIQGSSGRRTSSTVTTWGAMTNQILALRDHLAAQQVTVVIMEATGDYWRPFYYVLETDFEVLLVNARSVKNVPGRKSDVSDAAWLADLGAHGLVRASFVPPEPIRQLRDLTRTRTHITAERTREVQRLEKLLESAGIKLSSVATDITGVSGRLMLQALIDSNGTADPVVMADLAKRRMRSKIPVLTEALNGRFTAHHAFLARLFLDRIDAHTRDIAALSERIDGLMTPLLPARELLESIPGFSQIIAEIFIAETGGDMTQFPTPEQLASWAGVSPGSHESAGRVKSTKTRPGNRYLKGALGVAALNQAKSKNTYFSARYRRLASTRGPMKALVAVEHAMIIAAWHMLSNAEFYRDPGADYYTRQDPAKTRARAVRQLEALGYQVTIQPAQQAS

SEQ ID NO: 92854 - protein, 324 aa, unidentified
MPIITVGIDLAKAVFAVHGVDEAGNATLVKPKVARDQLVPLIAQLPPCLIGMEACSGAHHWARVFAEHGHTVKLMAPKLVSPYRMSGKRGKNDAADAAAICEAVTRPSMRFVPVKDEHQQATLCLHRTRQGFIEERTSTYNRLRGLLSEFGVVLPQSPERLRKEIGPCLDTLPGWARRCMSELLEHTSHIEDRLVELDRAINQIAREDDRSRRLLQLRGVGSTTASALVASIGDGHDFRNGRQVAAWLGLTPSQYSSGGKQRLGSITKAGDAYLRSLLVLGARSVMANLGNKQDPLSRWIRNLMERRGYWRAAVAIAAKNARMA

SEQ ID NO: 92855 - protein, 339 aa, unidentified
MEIATIGLDISKHVFHIHAVDGQGQVAGRQRLRRGEIVSFFSSLAPCLVGIEACATAHHWAREIRQFGHDVRLIPPAYVKPYLRRGAKNDAADAAAICEAVTRPNMRFVPIKSVENQGFLMLHRARGLLVRQRTMTACAIRAHFAEFGIIVGQGRQRVDGLVDLLDDEELTLPAHARIALAVLVNQLKELDRQVEAIEREIAQIQRVNPMAKLLSTIPGIGPITATALAATVPDATMFRSGREFAAWLGLTPKQNSTGGKDRLGRITKQGDSYLRHLLVIGARNVVRYPKARSRVGGGWIEALLERRRPMVVAIAVANKLARIVWALTTGEFYRPKLAA

SEQ ID NO: 92856 - protein, 453 aa, unidentified
MQPSSPRPKKARSTRGLRVIHPDAAGIDIGATSHYVAVPPDRAEEPVRSFGTHTADLHALVAWLKECRVTSVALESTGSYWIALYQVLERAGFGVLLCNARHVKNLPGRKTDVGDAQWLQELHTHGLLSGSFRPADEVCVLRAYLRHRDNLTKATGAHIQHMQKALIEMNLKLHHMLSDLTGVSGMAIIRAILAGERDPLKLAALKHERVKKSDAEIARALEGEYREEHLFALRQAVELYDFFLARIAECDTRIDLELRQWEAKADVAAAPLPGPARRRTAFAHSQHELRSQLYAVAGVDLTTLPGMEVLSVQALLSEIGTDMTRWKTEKHFCSWLRLCPDNRITGGKRQRGKPHKGHNRAAQILRVCAQAAIQSKSALGAFGRRLRARMDAPRAIKALAHKLARLLYRMLHDGTAYQDTGEHYYEERYRTHLISRLTKQAAHFGFHLTPATE

SEQ ID NO: 92857 - protein, 329 aa, unidentified
MKRSSFIGIDISKLTLDVCVYRPEHKEKKVFLKVLNTPKGHELFLKELRKLNVLIDEAFVCMEYCGVYGLELGFYLETKIDYCFCNPLHIKRSLGLTRGKSDKLDSYRIARFSYLFRDELKPMKMPSDCLIQLKSLISERSRIVKSIVIEKQTLSDLTATMSKPAKDRAENRLTGLNIDKDAIEKEILEQVKSVDKINKNYELLISITGISLINAVVMILCTNNFESITNPRSFACYCGVAPFEHSSGTSIKGKTRVNQYANKVVKTYLSNAARAAMMHDPELKAYYNRKRAEGKDHGTVMNALKFKLITRAFAVIKRGTPYVKLKQVA

SEQ ID NO: 92858 - protein, 400 aa, unidentified
MISVGIDVSKGKSTVCILKSYGEIVCSPFEVQHVEKELEGLDSLLKKLDGEIRVVMEATGIYHLPVLTFLEEKGYFVSVINPFAMKKYAKDNSIRGAKTDKLDSTMIANYGIEKWFKLQKHEGDEDTYAELKLLGRRYRYYMELHVKALLELTHILDYTMPGIKKLFNSWDEASGKDKLSDFVERFWHFDIITAQSLDEFVEEYLVWAGEKKYHRSRSKAEAVYELASGGISTLSSGTPSTKMLVQEAVSVLRAVDNSLSRILSRMQELAKSLPEYSTVRSMGGVGDVLAPKLIAEIGDVRRLHSAKALIAWAGIDPPPYESGQFVGSKRRITKRGSSTLRKVGYEVMRVLKSHKAPEDDAVYNYILKKEHEGKDKKHAKIAGLNKFLRIYYARVMAIYR

SEQ ID NO: 92859 - protein, 310 aa, unidentified
MDASYVGIDVSKDRLDVHVCPSGQAFSVLRAPKGLQELVERLRSIEPALIAVEATGGFETIVAAAIGGARLPVVVVNPAQIRHFAQAVGKRAKTDPIDAAVIARFAEAVKPELRELPDEAARLLAELVSRRVQIIEMLVAERQREKRASAVRVRKGISRHIKMLEKELPEVDRDIGTMVRGSPIWREKEDLMISFPGVAQTIARSMLAGIPELGRLNRREIASLAGLAPFTRQSGQWKGKSMIAGGRPAVRAALFMAALSAIRCNPVLRAFYRGLLARGKPKMVALIAVARRVLTILNAMLRDNKPWQPA

SEQ ID NO: 92860 - protein, 350 aa, unidentified
MIIIGCDYHPGFQQIAFVDTETGDCGEQRLEHCEGAQKLYRDLAIQGKKVRVGMEASGHARWFERLLEELKIELWMGDAEVIRAKRGRKPKTDREDALHILNLLLTGDFPKIWVASWENRDLRQLLWHRHRMVQARTRAMNQLQAVALNEGLRCKKKLWREHGREQLEAFRLAPWASRRREDLLQLLDRLNPTIAELTQAIEQEVEKCPQAQRLMTHPGVGALTALAFVLIIGKAERFQCGKQVGCYLGLVPLEDSSGERRRLGHITKQGNSLLRFLLVEAAQVTSRTIPEWRSKYMHLTMRRGRKIAKVAMARKLAIRLFWMMRQGWNYQQVMKFGSHAEQPGNRHGVQ

SEQ ID NO: 92861 - protein, 346 aa, unidentified
MDVYIGLDVSLASTAICVVSAQGKIVKETTAASEPEDLVAVLKAMPGDVVAVGLEAGPLSQWLYRFLTDAGFATVLMETRQVKGALKAMPIKTDRRDAEGIARLLQMGWFRSVHCKSMSAQEMRALLSARKAVQQAAISLELSIRGVLRNFGLKMGRVAKGRFEARVQEPAEGNPMLEAAANPILAARRALRQELAGLEKALRDHAREDPVCRKLMTMPGVGALVALTVKAAIDDPERFQSSKDIGPWVGLTPRREQSGERDIVGQISRAGDVGLRTALYQAATVMLHRGRKNWLTAWALNVAKRRGKKRATVALARRIGVVLHRMWKDDTDFRFTREDAAAVAAA

SEQ ID NO: 92862 - protein, 361 aa, unidentified
MLKKVKITEKKIEEQTIYVGLDVHHKQWNISVVGSEHVHIKGMTVVPDAKALAEYLRRRFSCKAIKLAYEAGFSGFHTQRELEKEGIDAIVTNPADIPTSHKDGRQKTDERDSMKIAISLRANMLEAIYVPSLEDEENQGLFRRRADLVKKHTRIKNQIKSLLKKYGIKPEGKYATAKGWTKTYLKWLEEVAKSHKRLRNQIESMLRELDFISKELNIVEGQLEELSQCERYKDRYDRLLKIPGIGQTVAMAIILELFDINRFESFPRLASYVGIIPTEHSSGDKQRLGSMTKRSRTRLKPLLIESAWIIIRKDEAFKEYYKKLLSRMESKEAVVRCAKKLLRRIYHILQTSKDYQCGLAA

SEQ ID NO: 92863 - protein, 342 aa, unidentified
MDHFAGLDVSVKETSVCIVDDTGKIVREVRVASEPEDLLQILSNPAYHFKRIGLEAGPLSQWLFSALAEAGLPVICVETRHMRAVLKAQINKTDRNDARGMAQMMRAGLYRPVHVKTLRSQKLRMLLTHRKLLQSKAIAIDNDLRGTLRNFGLKVGVVGKVRFEARIRELVSNFTDIAALVEPLLIVRRTLREQFCVLHRRLLAIVRDDEVCRRLMTTPGVGPVVSLTYRATVDVPARFRKSKSVGAVFGLTCAKYQSGEVEWSGRISRCGDEMMRVMLYEAAQSILHSKRWSWLKAWAMQIARRRGMKKAIVALARRLAVIMHRIWVDGTEFRWTREVAAV

SEQ ID NO: 92864 - protein, 353 aa, unidentified
METNIRNFDGESIYVGIDSHLKSWKVTVMSDEMELRNFTQEPDTKKLSLFLHRNYPGANFKCVYEAGFAGFNAQRELTSEGISCIVIHPADVPTTDKEKRQKSDRIDSRKLVRGLKNGDFKCVHIPELLQQQDRSLLRTYDKIIRDTTRVKNRIKFFLMFFGLSIPDEFQGKNWTKEFINWLERLNPGGYANLSLQILLDEYRMLSSQTILLRKQIKELSEQARYKTNAELLKSIPGIGTLTSMILLTEIGDINRFAGLNELSAYFGLIPNCHDSGETKRVGRNTKRGNVYLKYILIEVSWMSIRYDSSLLLTYKSAVRKMDSNKAIIKVARKLLNRVRFVLKNKKPYQVNMA

SEQ ID NO: 92865 - protein, 356 aa, unidentified
MSMVAHTHPFVIGVDAHARNHALAILACPTGEVVDEGQFPATGAGLQRAVNWVARRTGGDLDTLWVVEGVGTYGARLARAAADAGYSVAEAARMNARANRGVGKSDPLDACRIAQAALPLDVAQLRRPRTDDGVRAAVRVLIASRDHISMERTAAINALTALLRVAELGVDARRALTGTQIALVAAWRTREEALATRVARAEAVRLAKRVLAADQEIASNAKQMTALLNSSPARKLLDQPGIGPVTAAVTLAAWSHPGRVRSEAAFASLAGVNPIPASSGNTVRHRINRGGDRRLNRALHMAVVTRMRMDPATRAYVEKRTAEGRTLREIRRCLKRYLARQIYRHLNAASEALLAA

SEQ ID NO: 92866 - protein, 339 aa, unidentified
MQVTTIGVDLAKNIFQVHGITESDEVAFNRPLRRAQVLPFFARLDPCLVGMEACSTSHYWARELTRLGHEVRLIPPMYVKPYVKRGKSDAIDAEAICEAVTRPTMRFVENKSVEQQALLSLHRARSLIVRQRTQLINALRSMLAEFGVYIAKGLARIIGFSQGVLAGTKLELPEIAHDVVHNLCGQLNVLHGQMRWYETRLRIEAKREPRVKLLQTIPGVGPVTASALAATIGSGHQFKNGREFAAWLGLTPTNRSSGGKERLGKITKMGDQYLRQLLVVGMTSLVRQTKSHAERANKWLAALLERKPARLATVAMANKTARIVWAVLTKNEPYMPRTA

SEQ ID NO: 92867 - protein, 407 aa, unidentified
MLFVGVDWAESHHDVCVVDDEGRVLGRRRINDSLAGVGELHSLLGQHVGDGGDPHSIVVGIEKDRGLIVTALLAADYQVFAINPMAAARYRERHAVSGAKSDPGDAKVLADLVRTDRHNHRQVAGDSSLAEATKVLARAHQNALWSRQRHVNTLRSALKDYYPGALEAFGTDLAHHDALSVLAAAPTPALGRTLSRSKLVSALRRGGRQRRLDERAEEIQTKLRLEQLRQPSIVEHAYGLTTKATVTVIVQFNVAIAELEAGLAEHFEQHPDAKIIHSLPGLGTVLGARVLGEFGDDPNRYADVKSRRNYAGTSPITRSSGKSKVVLARHARNKRLADALDQWAFCSMNTSPGARHCYDELRSRDKTHRQAMRRLANRWVGILHTCLERGCLYDEAIAWPTREKIAA

SEQ ID NO: 92868 - protein, 340 aa, unidentified
MTITTLGIDLAKSVFQLHGVDADGAVVLQKKLRRGAVLDFLGKLDPCLIGMEACATSHYWAREIAALGHDVQLIPPAYVKPYVKRQKNDAADAEAICEAVTRPNMRFVPVKTEEQQGILVLHRSRDLLMRQRTMILNAIRAHFAEFGVVAAQGPRRVADLVSRLRDDDTLGLPATARSALLALAGQLESLAAEVRNIERQLMAWHRQNAASQRLETIPGVGIITATALAASVPDPAVFKSGRQFAAYLGLVPRQNSSGGKDRLGHISKMGNGYLRRLLVVGATSVTRRAPTTDTRSGAWVRSLLERKPTRLVTVAIANKTARTAWALLTKGENYKAVPAI

SEQ ID NO: 92869 - protein, 368 aa, unidentified
MVCGARGPSGYNRSGAFGTATIGHLRPNSRLTSSRTHKAGYRDRATIPYCGAKQMICGVDVSSKSLDARIGRDGATASFTNNPKGIAELAEFCQCHKVHLVAMEATGGYEKKPFALLWAAGIQVAVVNPRAVRSFAQGMGLLEKTDRIDAGVIAWYADTKGCVAVSPASAQQQQLKAMVTRLRQLTELRTAQRNQRLLVTDKVVLKSFRKLLDLVQRQIRDLEVAIAGLIDADAVWQKLDQSFRSIKGVADRTVARLMAEMPEIGTLSNKRISKLAGLAPLACDSGQMKGKRTVRGGRRTIREILFVVAAGVSRHNPDFRAFRERLAAAGKAKKVIRIALAHKLLVRLNAKAREVRQLQAACAPALLS

SEQ ID NO: 92870 - protein, 379 aa, unidentified
MDHANTDTPAETILRGALELSKNSWLLALHFPDRAQPSLYPIRGGDTVGLMEKLTAARDRWAKVSGKAPSIVLCYEAGYDAFWLARFLKARGIECLVVDAASMQVNRRARRAKTDRIDVGMLLRALIAWGQGDRHVWSVVRVPSFDEEDLRRSHRERDRLVRERTAHINRIKGLLFGQGIRGINVKSKYKTLQIDKLVTGDGCPLPPRLASEITREIARLALIQEQIATLERERDQAPTPCKATEKKRLQLMCLTGIGPAIAAVMTREVYYRQFDNRRQVAGFLGLATSPHDSGDVERSQGISRTGRGQVRGTIIQAAWLWLKHQPKSAITRWFVQRTAGQSGRIRRIMIVAVARKLAIALWRFLEQGLVPQGAMLANR

SEQ ID NO: 92871 - protein, 343 aa, unidentified
MRHYAGLDVSVKETSVCIVDESGKVCRETKVPSHPEDLARALHDRAWCLERVGLEAGPLSQWLFSGLAATGLPVVCIETRHTKAFLQAQVNKSDRNDARGIAQMMRVNLFRPVHVKTLTSQKRRALLTARKLLQEKALAVDNDIRGLLRNFGLKVGPIGASRFETRTRELVDGMPELAEIIDPLLEARRKLRELFAVLHRKLLAIVRDDTVCRRLMTVPGIGPVVSMAFTATIDVPARFKSSKAVGAALGLTPILNQSGESKRLGRVSLCGDGMTRTLLYEAAQVMLTRTTKWSWLKAWAMKVAARRGLQKAIVALARRLAVILHRIWVSGTDFRWTREVQST

SEQ ID NO: 92872 - protein, 385 aa, unidentified
MSELNDLSRSLTSLEQDKTIIAVIEMSQSSWLVAGIIPGIERHPLKKLEPSEEELVRLLMRWRTEATKNGHTITRFAVAFEAGRDGFWLARWLRARDIETYVIHPTSVAVSREHRRAKTDRLDTGLLKRVFIGWLRGEPDHCHMAAIPTLAEEDAKRPNREREGLVRERTRIVNRMKSCLARFGIRKFNPTLRKAPERLATLGMPEGVPLPPNTLLELRRDMARLRFVMDQIKEVEETRAQRLEQAPQEKTHAMVRLIARVIGVGIETADMLVHEILSRQLRDRRAVARYAGLTGAPDESGNKRREKGLAKAGNARVRRGMIQLAWRFLVFQKDSALARWYRTRTESAGKKRKTMIVALARKLLIALWRLVTIGEVPAGVVLRAA

SEQ ID NO: 92873 - protein, 435 aa, unidentified
MKKLRDHAAGIDIGAKEIYVAIESGEVRSFETFTSDFQQAVDYLLFHKVQTIAMEATGVYWVILYEMLEKAGLDVWLVDGRQTRQVPGRKTDVKDSAWIQQLHSHGLLNRCFVPDDQVKEIRTYQRMREDHIRTAAMHVNHMQKALTLMNIRLKEAISQIQGASGMAIIRAILNGERDANVLLSLCHSTIIKNKSDKVLKALEGHYTSAGIFALKQACEGYDFYQNQIEECDKELEKVMNQISSKIEKKEKLNHSKKKRKPIRHNKPKIDDLGAHLIAIFGGRDATFLPGITDYNWLQLYSELGNDLNKWPTEKHFTSWLGLAPGQHRSGKMNRTRNKKGRPKAGQIFRQTSVSLIESKKIALGAFGRKLKARQGPGTAVKATARKLAVLYWRLMVKGLDYTEKGIKAYEEKVALQKERWLMKTLKEMGLKATLE

SEQ ID NO: 92874 - protein, 448 aa, unidentified
MKKHNTEHGLPIIHVRAAGIDIGSRFHVVAVPTALAEEPVQTFQAFTADLERMAAWLVELGITTVAMESTGVYWIPVYEILETHGLQVILANARDARAVPGRKTDVNDAQWIQRLHACGLLRASFHPEREIAALRSYLRLRERHLDYAAAHIQHMQKALTHMNLQLQHVVSDITGATGMRIIRAIVAGERNATMLAAMRDLRCQSSVETIQRALVGNYQPEHVFALSLALAMYDAYQAQISLCDEQIAQSLQQLSRGKPRPSEALPKPRHRTRQPNALNFDVRTLLYQLVGIDLTQIHGIGPYLALRLVAECGTDLSRWRTAQHFTSWLTLAPGCRISGGKVLSAHTRKTKNRVTAHLRLAAVTIGRTNTALGAFYRRLSARIGKAKAVTATTRKIAVLFYNAMRFGMNYQDPGADHYEQQYRDRVVKGLHRRAAEFGFTLQAIEGVS

SEQ ID NO: 92875 - protein, 348 aa, unidentified
MNILAMDLGKNKTVFCEYDTNNNEHKFGKVKTSPKQIHDVLVEKGPDRVVFEICSAAGWFYDIAEALGIETEVANPSHQAWRWKKLKRKTDRTDALKLAQLSVMRQLPLVHIPKKSVRQRRSLIWYRRKLVERRTKIKNSIRAILDREGLSMPAGKAGWSQLAIKKLKSMAVPISEISNDCLWRGQLWMELLQLEQIEHGLAEVTSALDSLGKENTDVQRLQSIPGVGPRLSEAIVAYLDSPERFDNGKRVGSYVGLTPKQYQSGSMDRQGKISSHGNVLLRSLLVEVSWSGIRYNRWMWETYKRVLRDSPSRKKIAITAVARKLLVRCWAMLRDKQIWHDEIVSEAA

SEQ ID NO: 92876 - protein, 405 aa, unidentified
MEQVIIGVDPHKLSATIEVVNKQEHLLGSGRFTTNQPGYAAMRSYVKTWPNRVCAVEGANGAGRPLAQRLVEAGEQVVDVPAKLAARVRLFDTGHNRKTDALDAHSIAIVAVRTKGLRVLAADGELEALRMLTDRRDGLAHLRVQTVNRLQRLLSELRPGQRKKDLSALQAKAMLATLRPRDIAGKTRRRMAAEELADLVVVDAKLKKIKAELKAMVIARGSTPLQLHGFGPAGAARTLADVGDITRFADRNRFASWTGTAPLDASSGEQIRHRLSRAGNRRMNHVLHIAAIVQLRNDTEGRAYFRRKIAAGKTRMEALRCLKRRLSDVLYQRLVQDARTRDLTSFGTGPGGHCGATQESSAVDLPPHVDTSDKPLPGPAQPTLPRPLRTRKATKASTSRTSLLT

SEQ ID NO: 92877 - protein, 431 aa, unidentified
MSKFFYRPTVGIDVSADFSVVAILAPDGEIYRKPFKIMHNRNGFDYLVDQIKKAEEEFNMKTAIFMESTGVYHLTLFHFLKDTFETCILNPLITNCNKNVDIRKVKNDKKDALTIATIGKFQDVKYTSVFDIEIYTLKSLCRDYYKFTDSKSTFKKKLSTDLRVIFPSYSSVFSDITGKTSIAILKKYSSPEAVLNANRDELINLISINSRKGQAHSEKIYKKLIDAAEEAVYIGLKSPSLFVKIINTIAIIESLEIQIGNLLKEIHLLMRSNRISDEFKKNVQLLYSIPGVGELTAITIMSEIGNIKGFVKPKHLVAYFGLDPSVSQSGKFNSDRNTMSKRGTRIGRRALYAVALASIRTCRNGEPINKVLLNYYKENLNNKSKKVGLVAIMHKLINYIFSVLKNQKEYELRDPKIHAKMHLNNKSNKAA

SEQ ID NO: 92878 - protein, 321 aa, unidentified
MSIRNSSGDFVGVDVSKAYVDVCVINAAGEWLWSEQVARAAAPLEQLAQRLGPHACVVLEATGGLEALPAAVLEAAGIHTSVENPAKIRHFALSHGWLEKTDRLDARVLAEFARERRPRPRRRPDPRVEALSKLVVRRSQLVRLRAAERTRLRGETDPFCRQSLGDLILALKQQIDNCEQQIRLRVEASPELSARARLLRSAPGVGDQTAYALLAWLPELGGFNRGQIAKLVGLAPLVKQSGRWRGRVMTLGGRARVRSALYLAALSAVRCSAYYRDFYLRLLAKGKAKKLALIAVARKLLLALNQMLASSSLWENSFHAA

SEQ ID NO: 92879 - protein, 402 aa, unidentified
MNCVGIDVSKGKSTIAVMRPFGEVVVSPFEVRHTASELSELARLLKSLDGETRVVMESTGNYHAPVAWLLHGAGFYVSVVNAMLVHDYGNNSLRRGKTDKKDAVKLANYGLDHWLTLPRYIPEEDTRLMLKICYRQYQQYSKVQTMLKNNLISLLDTAFPDANRLFTSPPRADGSEKWVDFVATFWHCECVCGRSEKAFTTQYQKWCRKHGYNFSEDKALDIYASACRHFGVIPKTDTAKLLVEQAISQLQTTSSALAALKQEMQSLAASLPEYPVVMGMFGVGPTLGPQLLAEIGDVRRFHSKKALVAFAGIDAPPYQSGQIDVRSRSISKRGSASLRRTLFLVMSVILQCAPIDEPVYQFMDKKRSEGKPYRVYMMASANKFLRIYYASVKAYLESLEHD

SEQ ID NO: 92880 - protein, 337 aa, unidentified
MIFIGCEFHLSFQQIAMLDTECGTTTEHKLMHASGEAERFYRALASPALVAIETVGDDQWFVQLLQRLGHEVWVGDAAQIRASYVRKQKTDRRDAGHILKLLIEGRFPRIWVRGSEMRDHRQSLVHRHKLVQIRTRLKNELQHLMLNQGMQKKQKLWSTEGRAALQALSLDPWADRRRRDLLHLLGILDAQLEQLDEAVKQVALPYPDVQLLLSQPGVVPITALAFVLTIGDVRRFPRGKQVASYLGLIPREHSSGGKQKMGGITKQGSRLMRFLLVEAANIAVRFDPDFRKEYSHRCHQKHFIVAKVAAARKLAIRMYWILRTQKPYPQVLSSRAA

SEQ ID NO: 92881 - protein, 362 aa, unidentified
MAQVRSWAGLDVHAASVLAATVDSESGELVTRRLPGRTSDVVAFCAGLPGPVRVAYEAGPTGFGLARALEAAGVGCVIAAPGKIERPSSDRVKTDKRDAERLLRLLMIGGLHAVRVPSVVEEALRDLVRAREDVRGDLMRARHRLSKLLLRHDVRFDGTAGAWTTHHRTWLGQVDLGERGAQVTITDYLGAIDALLVRRATLESAIGQLVPDSPWAQSVARLRCLRGIDTLSAVGLCAEVGDFARFQRPGQLMSFLGLVPSEHTTGSTRRQGAITKTGSGHGRRLLVESAWHYRRSPRNGDALRRRQAGQPPHVIAISWHAQQRLHRTWQRLDHERGKRRTLVAVAVARELAGFCWATANAD

SEQ ID NO: 92882 - protein, 453 aa, unidentified
MARKRKKETKTNNAVLPVMRPDAAGIDIGATEIFVAVPGDRAAENVRSFPTFTQDLYSLADWLKQCGIKTVAMESTGVYWIPLFQILEDRGFEVCLVNARHVKNVPGRRTDVADCQWLQFLHSVGLLRASYRPEQEVCAVRSLLRHRESLVQMAATHINHMQKALDQMNLQLHHVISDITGQTGLAIVDTILAGERDPYVLAKLRNERIKASEAVIAKSLVGDYRPEHIFTLRQSLAAYRSYQKLIEDCDREIRGSLEQFQPPRRPDVSTDDSQKPQPKKASTESILRSELKRVFGIDLTQIPGIRVGIAQTLFGEIGPDFTKFRSASAFASWMGLCPDNDISGGKVLWTGTRKVNCRAATALRMAAQSLHHSKSALGDFYRRMRAKLGAPKAITAAAHKLARIIFHLVTTRQEFDDSRFAGDQLRYQKRQETKLRAKAKTMGFELIPLQQAG

SEQ ID NO: 92883 - protein, 350 aa, unidentified
MSECTTAVIGCDLGDKQSTLCILRADGRVERPKSIKTVREAFRTFFFARPPAHVVIEVGAHSRWVNALLEELGHRVTVANARRVKLISQNDSKSDQVDAELLARLGKADVELLAPIHHRGMEAQADLAVPKARDALVGCRTKLINTCRGLVKSFGERLPQCSGESFHRQAREYVPAALKPALEPVFQALERIDEAIRKEDKLVARLAKKYPDVEVIAQPNGVGILTALVFLLTLEDKNRFKSSRQVGGFVGLRPRKNQSGEDDPQLRITKAGDPFLRRLLVQCANYMLGPFGRDSDLRRWGLELARRGGKNARKRACVAVARKTGVLMHRLWVTGEVYEPLGYGTKRLAA

SEQ ID NO: 92884 - protein, 412 aa, unidentified
MKDLLEISCGLDIHKEKIVACILTGPLGKPTHSEIREFTTLIPDMLALRDWIISENCHHVAMESTGIYWIPIYEILEDAFSGDITLLVVNARHMKNVPGKKTDMRDSEWISTLLRAGLLNASFIPEKRIREFRDLNRYRKSIIRDITSQKNRVEKFLQSSGFRLSSFISDIFGASGRNIILHLMEHGRIDKISLDSYLKTKTRKRIDEILMSVNGTLSEHQKSFLKILMCHYDSMKEHLIEIETHLQEDMLPFALQIEQLNTIYGISTTASCAIIAEIGTDMKPFKTAEHICSWAGLCPGNNESAGKRKSTSITKGNPYIKSMLCEIAWVIAGKRNTYLSAWYWRIKQKKGARKAIVALARKLLVIIYTMLKQGTNFDKNCFEVRRKNCEQKQLSRYIRELEKHGYTVEAQV

SEQ ID NO: 92885 - protein, 342 aa, unidentified
MKHYAGLDVSLEETAICIVDETGAVLKEMRAPSDPEALAQALAVAAVPLERVGLEACSLAAWLHDGLREAGWSVVCVETRTANAAMKTMPNKTDRNDARALAQIMRTGWFRQVHVKSRQARLQRSLLGSRRALLNEMRSLENVVRAVLREAGLKLGRPARARFEARVRELAGDDAAVMAIVAPLLAVLRTMRAQLEALTRRILAVTREDATCRRLMSVPGVGPITALAFRATVDDPTRFAKSRAVGAHLGLTPARYQSGETDIQGRISRCGDELARTALYEAAHTLLVRSTKWSRLRAWGMAVAKRRGMARARVAVARKLAVILHRMWRDEADFRFGPAPAA

SEQ ID NO: 92886 - protein, 366 aa, unidentified
MWEAPVKSQRTSVGLDVHARSVVACGLDGETGELFERRLTPDRQEILGWIRSLPPPVAATYEAGPTGFGLARFLLAQAVECVVAAPSMLQRPSGDRVKTDARDARHLARLLHLGEIVAVAIPTAETEAARDLVRAREDVRGDLMSARHRVSKLLLRQGIVYYGGKAWTGAHDGWLRGQRFSAPGLQLAYDTAYDTVLATVDRRDRLDRAIAEMAAAGPYTPVVHRLACLRGVSTLTAFGLAVEIGDWDRLSGRRIGAYLGLVPTESSSGATRSQGGITKTGNGHARRLLIEAAWHHRAPYRPGVGLRRRWDQSSPAARARAQAANRRLHTRWQNFDARKKRPVVANAAIARELAGWCWSLAVLEKD

SEQ ID NO: 92887 - protein, 425 aa, unidentified
MDYTQNKKIMQITETTLIIGVDIAKKDHYARAFDWRGIELDKTISFRANGTGFNEFMDWIDRVKLKHYKNKTVIGIEPTGHYWFTFGREVLGKEYTLVQVNPFHVKRSKELDDNTPSKSDRKDPKTIAMLIKDGRYQIPYMPVGNYAELRNMNNLREEMIKKIWSVKNKMIRWLDINFPEFLNVFSTWEGKTALVTLDKLVLPSEIKKYTKEEILKIWRENDIRRGVGIKRAEKLLDESMRSVGVTEGKNTAKFEMSLLLREYKELRDILEDIESKLSEMTLIIPGAKNILEIKGIGIRTVAGFFAEIGEIKRFRHPKQIIKLAGLNVGENSSGKHKGQTKITKRGRKRLRALIFRAVLPLIATNEDFRELHKIYTTRKVNPLKKLQSIMVIGCKLIKVIYTLVVKDTAYDSSKMFKDIKRLEVA

SEQ ID NO: 92888 - protein, 405 aa, unidentified
MKVYIGIDWSSQKHDIVYLNEEGGIIAYQTIPHTPLGFEAFDEQRMKLGLGVEDCLVGIETEHNLLIDFLSSHQYRQIYVIPPTTIKDSRGRFGASKANTDRSDAHLIADMLRTDRARLHVWHADSLLTQQIAALASLEQFLTHTIIQTNNRLRNVLWRYYPNAASVFSGLDLQISLEFICAFPTPQAAAQLTFEQFKVFARSHHYPQPSKLPACFARLQKPQPEARQQTVLAFQSEAVRLARLALQAVQDKAATIRETQDLFVEHPDYPIFSSLPGVGKILAPALLAKFGDDRLRYPTPQVLQSVAGTCPVTRASGKHKVVSFRHACDHEFRSVVQQWAKCSIDASVWAYTYFQTIRPQCDSLSHAYRRLANRWLEIAWRLWQDRVPYDEERHLRQHALRVKPN

SEQ ID NO: 92889 - protein, 315 aa, unidentified
MSDVPCFIGIDVAKAQLDIALRPSGERWAVPNDVSGVTMLVDQLQALHPVLIVLEATGGLERLVTSALATAGLPVVVGNPRQARDFARATGQLAKTDALDARALAHFADVIRPTPRPLLDAQTQELRGLLGRRQQLMVMRTAEQNRLAGTSGRLQTDIAAHITWLNERLATLDDDLETVLRGSPLWRENDDLWQSAPGIGPVCARTLLLELPELGTLTRQQIAALVGVAPLNCDSGTLRGRRIIWGGRAHVRTVLYMGTLVATRSNPRIKAFYERLLAAGKVKKVALTACMHKFLTILNARLKHRTPWQPQEVQS

SEQ ID NO: 92890 - protein, 351 aa, unidentified
MSHKTAATVAHTIGIDTGKNTLHLIGLDDQGAIVLREKIARGRIAARLANVPRCLIGIEAGMATHYVARELGALGHDVKQVPPAYSKPFRQGHKNDFRDAHAIAEAVQRPSTRCVPVKTDDQLDLQALHRVRSRLVGQRTAVINQIRGFLLEHGIAVRQGLRFLRQQLPDILAKRSDVLSPRMIRIMEDLSGDWRRLDERIEHITKEIEVLADTDVNCGQLMTVPGIGPIVASATVAAIGNGAAFARGRDFAAWLGLVPKQMSTGDRTILGRITKRGNRYLRMLFVQGARAILLRPKSWAKHSFGPWLTTAARRLHRNILTIALANKLARIALSVLIQGRSYETRIVPAAA

SEQ ID NO: 92891 - protein, 402 aa, unidentified
MNAVGIDVSKGKSMVAIMRPFGEIVSTPFEIKHTASDIHSLIELINSVEGESRIVMEHTGRYYEVLAHQLSKANLFVSAINPKLIKDFDNDSLRKVKSDKADAVKIARYTLDKWQNLKQYNVMDELRNQLKTMNRQFGFYIKHKTAMKNNLIGILDQTYPGVNTYFDSPARSDGSQKWVDFASTYWHVDCVRKMSLNAFIDHYQNWCKRKKYNFSQSKAEEIYGKAKELVPVLSKDAITKLIIKQAVDQLNSASTTVESLRTLMNETASKLPEYPVVMAMKGVGTSLGPQLIAEIGDVSRFTHKSAITAFAGVDPGVNESGSYEQKSVPTSKRGSSDLRKTLFQVMDVLIKTHPQDDPVYQFLDKKRAQGKPYYVYMTAGANKFLRIYYGRVKEYLSSLPES

SEQ ID NO: 92892 - protein, 350 aa, unidentified
MVVVGADVHKRTHTFVAVDEVGRKLGEKIVKAITAGHAEAVMWARECFGAQLVWAIEDCQHLSARLERDLLTPGQQVVRIPPKQMAQTRASARRRGKSDPIDALAVARGFLREPDLPVASHDEISRELKLLVDRREVLVAQRTATISRLRWRVHELDPERAPKAASLDRAKHRQILGAWLITVPDLVAELACEELADITRLTEQIDALAKRISERVRAVAPALLAIPGCGDLTAAKLVGETAGVTRFKSEAAFARHAGVAPIPVWSGNTAGRVRMTRSGNRQLNAALHRIAVTQIRLQGCGQAYYRKRVATGDSKHEALRCIKRRLSRIVFSRLHTDHHNRTQPCQTAAA

SEQ ID NO: 92893 - protein, 351 aa, unidentified
MHYVGLDVHARRSSLCILDSCGKVVKRLEVKGSWPKLMERVAAEVPRPFSVCFEASCGYGHLHERLSALAERVAVAHPGKLRLIFRAKRKNDRVDAEKQAKLLYLDQVPLVHVPGADVRAWRGLIELRRKLVGRRTAVKSQLRALLRGAGCCDAPAGKALWSKRGLKWLAAAALGEADALRRDLLLEELAQADERVGRVTRELDRRADAHPGVALLRTIPGVGPRTAEAFVAYVDDVRRFARTRQVGCYLGLVPCQDSSAGRDRLGHITGDGPPTARMLLCEAAWQAVRRSPSVKAFFERVMHGEPGRKKIALVAVAHKLARSMAAMLRAGEAWREDEQERDRGQGQEPGA

SEQ ID NO: 92894 - protein, 343 aa, unidentified
MQAITTIGLDIAKSVFQVHGIDAEGNVILRRQLKRRYVLVFFQKLPPCLVGIEACASSHHWSRELQALGHTVRLMPPAYVKPYVKRHKNDSTDAEAICEAVTRPNMRFVATKTSEQQSCLTLHRTRHLFIRQQTSVINAIRAHLAEFGIVAPVGRNGVEQLLGVVSDASDKRLPDVARACVAALGAQLQTLKIQILEFDRMIRAWHRSSEASRRLDDIPGVGPALATALVASVADPGAFRSGRDFSAWIGLVPKQNSSGGKDRLGNISKRGDRYLRSLFTAGALAVIRYAKIHGTKHRPWLTALLARRPTKVAAIALANKIARMAWAMMAKGERYKEPAALAA

SEQ ID NO: 92895 - protein, 387 aa, unidentified
MYLVGIDISKYKHDCFIATEAEKIKAFQFDNNRLGFDLFLTTIKSLDQSQEIRIGLEATGHYGMNLKQFICASGYTFLEFNPYLTHQFSKAMSLRKTKTDKVDAKTISSMLGPVDYKTLHTSFYHINELKQCVRYRDLKMKHRSKILVELTNILDRTFPEFKAFFNHRLIGSAMFILKRFKSRSRIARFKQTDYDPINSYSKGKITNVKFQKLKLLAMNSIGYETDTDILLISESIQSYESLTSTIETIENKIIELMKDIPQTLTSIPGLTLISAANIIAEIGDFKNFSNPAQVISFAGFDSSVNQSGTMETRGHLVKRGSGLLRMTFWQVTFSALKFIPTLYEYYLKKKAEGKHHKVALTHCTRKLIRTIYNLGYNQLVFDQTQFR

SEQ ID NO: 92896 - protein, 447 aa, unidentified
MICAAVERCAGIDVGKTFLAVCVMTGPLDGEARTQKRRFGTIVAELESLREWLKQEGVTHVVMESTASYWKPVFNVLEPDFQVYLANSQEVKNRKGHKTDDKDGWWLAHLLRHAMIHPSFIPPRAIRELRDLTRRRKRLLSNAVAEKNRIQKVLEDANVKLGNVLTDIFGVSGQLMLEALLNCKAEPVDIAQFAKGRARRRIPEMIQALEGHQMSEHHRQMIRYSIQHLEFLEEQIGELDLAIASKIKMAGLQQQWELLQTLPGVQDRSAATILAETGGDMEQFPTGKDLSSWAGVCPGNNRSAGKNKSSRTTGGNPWLRAALTECAWAAAAKKDCFLKGKFWRIVTKSGGEKAPAIIAVAHTLLLLIYQVLQTKTPFEDRTAPPLLDERQKQRLIRHHIRRLGKLGIAIEAVAPSRPGPGKPRRIGQSRPPRTPDRAVLRATPNPE

SEQ ID NO: 92897 - protein, 348 aa, unidentified
MDKITAVGLDLAKQIIQVHGIDAAGRVVLRKAVRRERLLTLLAQLPRCVVGMEACSGAHQWARELRQLGHEPRIMAAEFVRPFRKSLAAKNDANDAEAICTAVVQPNMRFVSIKSVEQQALLSLHRIRQGLIEERTATINRLRGVLAEFGVVLPQSAVVLQRALPAVLADEQRLPALVQRSVQMLREHLHELDARVAEFDRDIAQHAKSSAPAQRLVALSGVGPLTASAVVATVSNAQDYRNGRQFAAWLGLVPRQYSSGGKRKLGSITRRGDAYLRALLIQGARSTLQAALRRTPARHDRLSAWIVQLAQRVGYHKTLVAIANKHARIIWVLLARDQTLDLAPVPTH

SEQ ID NO: 92898 - protein, 390 aa, unidentified
MIYVGIDVAKTTHYAAAADSDGIVLVEPFAFDNDAPGFAKFISKIASFPKEQLIIGLESTGIYSENLICFLFDSGYKLAVINPIQTATLRKTNIRKTKTDKVDTLLIIKSLMVNSYRLYTEQDAQSLKLKSLCRFRQNLKKSKARLKIQLSGYVNLLFPELLSFFKSGIHISTCYTLLKRCSSPAEIAALRLDSLSRLLSNASRGRFSRSTAEALKSLAKSSVGVKNPYISIQIAQTIQQIELLEQQIDEIEKVIKDTMCELDSVIMSIPGIGAIDGAMILGEIGNIDRFASPAKLLAYAGLDPTVCQSGKFKARSTKMSKRGSKILRFALINSAWQLTLNNDTFFNYYQLKLSQGLSHYGALGHVAHKLVRVIFTILKHNLLFDATRLV

SEQ ID NO: 92899 - protein, 470 aa, unidentified
MGRKKKTTMPIINPNCAGIDVGSKSHYVAIGQSMSDVREFGVYAEDLTAMAQWLKDKNITSVAMESTGMYWQNLFIELVNTDIKVILTAGKFTKNINRKKTDVMDCQWIQKMHALGLLPSSFLPDETTERLRTLCRHRDNMVSQKVNCTHKMSKFLKWLNFRLDVVVRDITGLTGRTIIAYICNGNLNPQSLAKHRHGNCRKSEEEIAKALVSNENPEYLFGLKQEFSRFNFVLKLIEECDAEIVKLLTVIINSDVNPIDDMPSKKPDKRVNKNTIKGIDLNITAYQYFGGVDLLTIPGVSFSTVLTFMSEIGRDGIKKFDTAKRFVSWLRLAPNNRISGGKTLSRHIPKGSNRLKIALRNAANAVGNLKESDLGRFFKKIAYRKGRQAAITATARKIAVILWHMLTKKEPYKPKTQYVFLDEKRRAIARLRKKMSKFGINPDELGIFTKPEYKLAYDKRVNNNNDLDKR

SEQ ID NO: 92900 - protein, 410 aa, unidentified
MEVVVTHGAGLDVHKRRILATVITPTVSETRTFGTLTADLLALADWLTACGVTHVAMEATGVYWKPVYNVLEAVEGLTVWVVNPQTIKGMPGRKSDVQDSQWIASLLRIGALKASVIPPRPQRELREIVRYRQSLVQERVAEANRIQKILEGANIKLASVISDILGKSGTRILQALAAGETDPAALARLADARIRASHETLAAALQGLVGAHQQQLLRWQLQHVAFLDAQIAAVSEEIATRLANFDDALTRLVSIPGVGRRTAEIIIAECGTDLQRFPTAAAFVSWAGLSPGQHESGGRAHPAPIRKGSPVLRTALVEAAQAAAKTDTYLAAVFHRLAARRGKQRALVAVGRHILQAVYHILRGTDTVYQDLGPNYFDERDRQAVVRRATRRLEALGYRVTLEPVVPEAS

SEQ ID NO: 92901 - protein, 453 aa, unidentified
MKKKVSSKDKLDDASLPVVHRKAAGIDIGSRFHVVAVPPDLASESIRTFDSFTGDLQEMARWLKDLGIKTVAMESTGVYWIPAFSILQEKGIEVYLVNASLAKNVPGRKTDINDAQWLQRLHSFGLLRNSFQPAENIASLRAHLRHRDNLIEYKAAHIQHIQKALMLMNLQVHHVVSDITGVTGMRIVRAIVAGERDARILASFRDVRCKSSLETIEKSLVGNYKLEHLLQLRHAVELCDHYQQKIDECDQQIESILQLLQLNKSAPEEPLPKHRHRTKQPNDPNFDARSNLYRITGVDVTKVHGMGPHTVLKLIGECGLDMSKWPTAKHFTSWLTLSPGNKISGGKVLSSKTRRSTSKSATMFRLAAVNVGKMDSALGAFYRRLAARVGKAKAVTATARKLAVIFYNTLRYGTKFVDPGAEYYEEKYRERVITHMAKKAKKLGFELRELAPA

SEQ ID NO: 92902 - protein, 406 aa, unidentified
MNQLYVGIDVSSRNNVTYVMKPDGSKHSEFSVANNLPGAKELSFRVCQALDELQLDSVIFGMEATSVYGEHLARALREDGSLGKFNRKIFVINPKQVRKYREILPELPKNDFIDAYVIADSLRFGRILPREYAENNVYESLKTLTRTRLALIQKQADAKQKLANLLFQKCSSLAQDNVFGGISTTFLNLMECFDSVDDLANLSLPELTSFIAGSGRGRFKDPDAIAKAVQAAVRGSYRLPKVMNDSVNQALSLYVSLIQTLKTQIDALDTSIEKHFDIIPNELKTIPGIGKVYSAGIIAEIGDISRFDSHASLAKYAGLVWSQHQSGNYEAESTHLIKSGNRYLRYYLLEAANSVRRCDSEFKRYYDLKYKEVNRGQHKRALALTARKLVRLIFRLLKDNRLYSAR

SEQ ID NO: 92903 - protein, 401 aa, unidentified
MQQRLWAGIDAGKTAHHCMVVDADGQRVLSRRIDNDESALLELIRAVTSLAEGGHLTWAIDLNAGGAALLITLLLAHDQELLYIPGRTVHHAAGSYRGDGKTDAKDATIIADQARMRRDLHPLRRGDELVAELRILTSRRSDLSADRTRTINRLRERLGEYFPALERAFDYSNNQAALILLTGYQTPAALRRIGTARLETWLQNRHARKVSSVAASAVAAAHTQYTAVPGEQLAADLVARLTQEVIDLDAALKEIDVMIEDRFRRHRYAEIIVSLPGFGPRLGAEFLAALGGDIALYDSADRLAGVAGLAPVPRDSGRVSGNLHRPRRFNRRLLRASYLAAQLSIRHDPASKHYYDRKRAEGKRHTQAVLALARRRNNVLWAMLRDRTHYQQPTGDPATAA

SEQ ID NO: 92904 - protein, 342 aa, unidentified
MEMMIGVDPHKAPHTAVAIGETETEVASKKVRATRNQVAQLLAWAEPFPTRTWAIESAYGLGFLLAQQLVAAGETVVDVPATLVSRTRLLASGRSDKTDPNDALSVAITALRNKSLRRVETVDHADLLRLLFRRNMQIGNHRSRSVSRLHALRLELQPGGLAKEIKASDVHRFLESVHPVSPTEQVRYDLAVEMLEEIEHLDEQLKASHQRIREAVTASNTTLTDIYGVGAVVAAALIGYSGDVTRFANRDHFAAYNGTAPREVSSGVRRVHRLSRRGNRRMNHAIHIVALTQISHHGTAGRAYYERRLEEGKTKREAIRALKRHISNTIYQHLLADARREG

SEQ ID NO: 92905 - protein, 421 aa, unidentified
MRKADTRKVKAVGDDTLIIAVDIGMEMNRGYCTTPDGRSSKTFKFDNTRAGMDTLWDMITINKNRFKCNEVIVGYESTGPYGEPMLHYLMKKPVRIVQVNPMHTKKVKEINDNSPLKTDDKDPRVIADIIRWGRALSIVIPEGDAAYLRRLNNSRERHVRERTALVNQLQQLVFLLFPEFRTVIKDIKCKTPLYLLRKYPTPETLSVLDKDVLGEEMRKRSRGKLKEHHADMLINLARNTVGIREGAAGLSMDMRHILIQLEMLTNLIAELESEMEIALGRIPYSPKLLSIKGLGVVSVAGLIGEIGDFKKFKTQSEIMKLAGLDLYEISSGKMKGQRRISKRGRSLIRKILYYTAIQTIRKDGILHDYYTRLTDGGMKRMKALIAVSRKLLGIIYAIVRDDSEYSANFDSMKRQVIKKAA

SEQ ID NO: 92906 - protein, 384 aa, unidentified
MDTVSVVGMDLHRDFSKVAMMSQDGKVLETRNIRHDSRKEMAEFFDGLEDGTAVVMEAGFNWPWVADLAEAAGMKPHLGHAIRCRELAKGMAKNDRKDAIFLAKLWLAGGDVFPEAYLAPQEVRVMRAKFRTRSLLVKIRSQMKNSIHGILHKYGVKCDEATDLYGKKGRKILDGLELPAVAKEEMERKLAFLDDLARHIDSIERQLQSELPLDKRAGLLQTIPGVGRIIAYGMLAEIGEIGRFPDKRALASYAGVLPLDNMSAGEDHGKHTNRRCNKALRWMALEAVRGAVRNSRRMRLLFERVKAKHPSTPGMAVVAVARELLEVAHLMLTRGVPYMENPPPRPGSVQTVDSCHPELLGTRGSRRASQMGRCAASERIQADN

SEQ ID NO: 92907 - protein, 316 aa, unidentified
MFIGIDVGSRFLDAAATEATRTLPQRVTNTADGIATLRAALTGLAPTLVVLEATGNYHRPLLAALLAAELPVAVVNPAQVAAFRKSRLGRHKTDRADASLLARFAALHHEEVRQATADEPDLARLRALMGYRDDLVAQATAARNRRHAAVWRDEPTVVAWLEGDLAAIETRLAEVAHAIAALLATRPERVSLTAQAGVGLLTAAAVLAYLPAGVLGNPKAAAAYAGLHPRQEQSGQRDQSRLSKQGCPALRRYLYLAAMAAIRCDPLIRDWYERLCRRGKAAQSALCAVAHKLLRQMMGRLRDQRARPPALLPAVA

SEQ ID NO: 92908 - protein, 409 aa, unidentified
MDIVPIYKRVIGLDVHQAQITGCAITEQPDGSVTHERREFGGFKRDRKALAEWARAIAPDVVVMESTGIYWKSPYAALEGVGIMAWVVNARHVKAVPGRKTDVADAQWLASLARAGLLRASFIAKADLRSLRHIARQRQKLGGMLASEKNRLHKLLTDAGVRLGVVVSDLHGQSARAMVKALIAGKSVPEVLSLASNRLRASREDIFEALQAEEITPAHRFVLTEIMAHIEELESRMARFDAELLRCLHSAGYSAPLQLLQTLPGIDLMGAAMLLVEIGADMSVFGSAQRLASWVGMCPGNNESAGKRKSGRIRKGNVWVRRLLCEFAQAAGRSRCALKDKFQSLNVRKGHKRSIVALGHKMLRTIYAMLSKNTCYVDKTVDYEALMVARNAPRWLQMLVKHGFVPTPA

SEQ ID NO: 92909 - protein, 334 aa, unidentified
MNYWMGIDVSRATLEVALLDDRGERIGAASVKNEHKAVSGLLKRWTKEVGMANEQLLVCLEPTSHYSNGLLRWLVEAGVRVWLAHPSDIQHSVGSTRGKNDRVDAVRIADYARRFQDKASLFTAERLKYTGLRQLITRRKQLVHDRVKHHKQMTDLNRCVEGQLQAVFARLDRRQIRLLDELIAQVDGMILDTIKSDPELHRLYRLILTVPGVGPVLAANLLAITEGFTRFRKARALSCHAGAAPYEHSSGTSIRGRTRVSPKANQGLKALLHISALSTIQREGELRDYWIRKIAEGKHKMSILNAIRNKIIHRVCAVVDRGTPYLAQNPLLMS

SEQ ID NO: 92910 - protein, 337 aa, unidentified
MNKSQACGIEVSAQELVAVWIDSKGKAVLRRFVNTAAGHKQLLHALTRGSERVSACMEATGVYGLDLALFLSAQEQVRVMVANPRAVRHFAQAMMKRSKNDVIDAGVLCEFVQRMPFVEWKRPSEKTLALWAISRRLGALTKQHAAEKNRLHAASVAISLPAVVRKSVQRMLRLIEREIKALRQEALALIADQERIQRRYRQLRSVTGIGEVSALALLAELLLLPEDRDVRQWVAFAGLDPRQYSSGTSLRKHTRISKIGNRHLRHALFMPALVASRRDPHLRGFYQALLARGVKKKPAVVAVARKLLHAIYGMFKSDSFYNGAKIFHAPTLSPACF

SEQ ID NO: 92911 - protein, 475 aa, unidentified
MEEVEFKFSVDWTKPAFFCGLDVHKYELAVAVYSKDDSQSEFLKTNVFSTDSAGLRRFWQFVKKYKPQGFVMEATGIYHHVIFRFLQKMRTKVHWPFKILVINPADASGIPGRQKFDRIDAENMAKYLSMGLFRSGKPIIEILEDLKAIFRSAARIEKDRTALKNRVKKTLDRVGIRPRGLNLNYEWVREFLHHYIGQDLSLGECLNEIVADKNLLKGYRNKILKNLKKFVPYFEFSLTSAQKALIRQDLVELDFKTARKSILAVEVDQMLLDRPGLRQRAHALSSIPGISPFSAVWILAEIGNVQQFPNKRQLLAYCGCCPRVVSSAGKVYSAHISRHSNSYLRTIFYNAAVVTCNLLKKDSALKEYARQVRNRKGMYSMKLVYCIVAAKIVKIVHAISRDNVVFEPDHGRTLRKQIPSPGNEDFTVSDRKLIRRAKNSLKRVNEVANIGLLGEHSIKLAEQLESILQRKKFSD

SEQ ID NO: 92912 - protein, 383 aa, unidentified
MRIVCGLDVHKDSVFVCILNEKGEKFEAKYGVLTPELEELHQLLLTHEVKEVTMESTSIYWYPIWRILSDIECLKLVNPYFIKQLPGRKSDVRDAAWIAECTMKDLIRGSFVPDEIVQRMRQYNRRIFDLNKEKVYKLTKLDALLQRCNIRISNYVSSTDSKSYKDVVKLLSEGIVNAEKLTEAIHGRTVNRVGKEVITAALTGVVNEVDIDLIRQYREEILMDDKHLKECQEKLTEICRKEFPREFDNLQTIPGVKERSATSILSELGADMKMFITAAALVSWCGLKPRNEESAGKIKSRRITHGNKYIRKTMIECAWGASRTQNCFYSNFSYTQTVVRRKNAMKVKVAIARKMLVVIWHVLSDGVPYNDYKKPEAIAEGNS

SEQ ID NO: 92913 - protein, 322 aa, unidentified
MRYIGIDVSKATFVVAYSSDKGGGIRTFNNTTAGIRQFIGTLPKDGSIHCVMEATGNYSALLLYMLNVAGITVSMENPLKVKNFAKAMLSTVKTDKSDARLITLYGEKMNPQPFKIQGEAILRLRQKRTVIRQLTKQITAMSNLRGSLACLPVPDKGATHTVDETIKFLEKRRDRLQSELTELVEVEFSRQLALLTTIKGIGITLATALIITTGGFTYFQNAKQGSRYLGICPTYEQSGTSVNIRGHINRNGDAYTRGLLYVAAWTASRFNTKCGETYTRLRQNGKPGKLAMIAVANKLVRQAFAVVAHDKEYVDGFVSNRH

SEQ ID NO: 92914 - protein, 389 aa, unidentified
MAKVVIGVDPHKRLNAVVVINLKGKVLARRQFPNSAEGFRELRSFGRQWRPRTWAVEGCNGVGKYLAQRLVAAGERVVDVSTRRAALVRVFAGGNGRKNDDVDAHSVALVGLHTRDLPEVRKDDRSASLRLLANRRKELVDLRTQCVNRLHRDLVGLISGGAPQALTAVKAKALLASIRPRDEMGRLRRRLAADQLADLVALDKKLAAVEAEIRSMVKRTPTGLPDIYGIGPVITATVIGEVGDVARFQDRHHFASYNGTAPDDKGSAGRPVHCVNLKGNRRLNHAIHMAAITQIRNRRSPGRAYYERKLAETKTNKEALRCLKRRISDVVYRQLLADADRQTKAGPGGQTGTTLQSSVTSPTPTAGSSDKPQPGPATEATPTPLRAAG

SEQ ID NO: 92915 - protein, 373 aa, unidentified
MNNSTVYVGMDVHKESFSLCCYTNEKELAEYPQKVDAHFSKVINYIEAMRFHYGDDALFICGYEAGCLGFTLYHQLTDHGVKCVILAPTTMLQQRGKKKIKTDKRDAALIARCLAHHDYSPVHIPTDQDEQTKEYIRMRDDHKLALKKIKQQILSFCLRHNYRYDAARSHWTQAHLAWLRSLKPEGLYKEILDEYLLTFDQLSDKLERLDQRIEELASGDAYRENVHKLTCFIGVKTVTALAVLTEVGDFKRFSSARHFAAYIGLIPGEDSSGDDRNQIGITKAGNRHVRRLLIEAAQCYARGQVGFKSKALKARQQGNDSSVIAYADKANERLRRRYYKMVLGNNKKPNVAKTAIARELACFMWGMITGAIA

SEQ ID NO: 92916 - protein, 456 aa, unidentified
MARRSKAKGTRRRTKLHMIYPRAAGIDVGSTFHVVAVPPELSAEPVQTLQSFTGDLYRLATWLVEIGVTTVAMESTGIYWIPVFDILEAHGLEVLLVNAQHVKTVPGRKTDVNDAQWLQQLHTYGLLRGSFHPAQDWSALRVYLRHRERLVEYAAAHIQHMQKALMQMNLQLHHVLSDITGTTGMKIMRAIVAGQHDPAVLATYRDARCKASEETIRAALTGHYRREHVFALRQALELYDSYQARIEACDQEIQSTLESLQNDARAIETLPAARHKKQQSHAPRFAVREALLRVLGVDLSQIDGFSASTALKLVGECGMDMRRWPTEKHFTSWLTLAPGNKISGGKVLHTKTRRSAHRAAAIFRLSAMNMGQTNTALGAFYRRLGARSGKAKAVTATARKLAVLFYNTLRYGMAYEDPGAAYYEDRYRQRVLKGLHRRAKQFGYQLTEVGTLEGVS

SEQ ID NO: 92917 - protein, 345 aa, unidentified
MEITTVGLDIAKRVFQLHGVDAAGKAVLRRKLQRSEVLAFFKALPPCLVGIEACGTAHYWAREIRELGHDVRLMPPSYVAPYVKRGKTDAADAAAICEAVTRPTMRFVPIKTAEQQAVLMLHRTRDLLVRQRTMLVNALRGHMAELGIIAPQGIARVADLMAVLLGENTTNVPALAREALRGLAAELEALDRRVKEIEGAIVTWHKDNEVSRRLAAIPGVGPITASAIIATITDPFQFHSARHLAAWIGLVPRQHSSGGKQRQGGISKQGDRYLRRLLVLGATAVIRHSRSKSTAEAGWLKSLLERRPARLASVAQANKTARIVWALLVRGEAYRMPAAVPSGAA

SEQ ID NO: 92918 - protein, 398 aa, unidentified
MKTAGLDVHKDSIFCAVFDGKRYSDVEVFETFSTAISSLGDYLRAEGVNQVAMESTSIYWVPVWNILSEMGFDLILVNPFLIKQLLGRKSDVKDAQWIAQLLYKDMLRGSFVPSEQIQELRSYTRAHSKLQQRITRMLIKMDNILVQSGIRLGSLVSDIGGKSMLAVIDALIAGETDTKSLIKLVYANRKNKENGRLAAALTGCMKEHHRFNLRMAKAEHDLLVNQAGEYLEKIDSICLHRFSRQQSLLKTIPGVSRVSSAVIIAETGADMKVFENSGKLSGWIGLRPKNDESAGKYKSTAITKGNKYLKPILVQIAWAASRSKGSYFKEKFNRLSIRKSAKKALIAIARKISVVVWNILTDLKPYNPALQAIYEPRKLEAKIRYHQREMERIAKLKP

SEQ ID NO: 92919 - protein, 392 aa, unidentified
MVVSVGIDVSKDKHDCFIVSSEGEVLADAFIIPNTMDGFHYLLQQIRHCTAPQDKIKVGLEATGHYSYNLLGFLLDNGLTTYVLNPLRTNLYRKSLSLRKTKTDRVDARTIASMLLSDAGLKPYTDTAYHNEEIKSLTRYRFDKVKERAKLKSSIARLVCILFPELEKLVPSLHIASVYALLEEFPGAKQVANTHLTRLKALLETASNGHYKRDMALEIRNAAKNSIGSQMPAKSLELQHTIRLIRELDREIDEIEEQIQSIMDELHSPITTIPGLGFRMAAMILAEVGDFTRFDSPDKLLAYAGMSPSTYQSGQLKNCYPHMEKRGSRYLRYALYNATKCVCHWDPAFADYLAKKRAEGKHYNIAISHAAKKLVRLIFAMEKSRQPYCSAA

SEQ ID NO: 92920 - protein, 393 aa, unidentified
MVSTLPCHHLGWLPNDLAAHQVLVAAWLETGERASTLIRTARRGNPTGQFNEEDVVFIIGIDPHKGSHTAAVLDHREALVGELRVDADRRQRDRLLEFAAPFEPRTWAIEAAGGLGALLAQQLVAAGETVLDVPPALSARARLLDSGRTDKTDPHDARSAAIVALRHATLQPVRRPDHTAVLRLLADRRHDLVALRTQSIGRLHALLCLLIAGGMPRQLTAERAAQALRTIRPDGPVEATRKAMANELLGDIRRLDQQLAALRERIAEAVDTSGTTVTDIHGVGPIVAAIIIGHTGHVGRFPTAGHFARYNATAPIEASSGPRVRHRLNPRGNRQLNHALHIAAVTQIAHDTPGRIYFDRKLAEGKTRKEALRALKRRISDAVYRQLLTDLDH

SEQ ID NO: 92921 - protein, 309 aa, unidentified
MDAKFFGVDVSKSKLDVGCDGRVVLVENSKKAIRAFARRMPVGSFVALEATNTYHLQMADICHSYGMRVFVINPRLTRRYREANGLRGHNDRMDALTLARYIEREHDGLRAYVPLTADQRRLRTLVRRRWKLVGMRTKLVESFGSMGELKRELNALVARIDALIAKLEFLIDKQLEGNAGRARIASIKGVGPVVSAVLVSDLDAYDFASADAFVAYYGLDPAPNDSGRRVGQRKLSKQGQRLGRAMLYNAAMAAVTSKAWRPLYDRCLARGLKKVQALIVLARKIARTAWSIHKYGTTFQQSRAYQALT

SEQ ID NO: 92922 - protein, 384 aa, unidentified
MKKNSTPKWTMGLDVGKRNTNYAIGEGDRGGIRVVSEGVVKTTREALEDLLGGRKPMRVVLEVGRQSPWISRQLKKLGHEVIVADARKLALIYKSQKKNDREDARKLMELGHIDPELLSPIQHRSEKTQIELASMRSRDAAVTARTSLINHVRGACAAVGVTLESCSAPTFHKRMAERIPKSLQGAMVPLLKLIEESTSTIRQYDAQLEQLATKHPATEQLRQVAGVGPLTALCFVLTIEKPERFERSREVGPYLGLVPRQDDSGDSRKQLGISKAGDKMLRRLLVSSAQYILGPFGPDTDLQRWGKKLAERGGKNAKKRAVVAVARRLAVLLHSLWVTKKPYEPLRQADAEQAKTGKRERRYKVNRDSKFEEKPKSLSAQESA

SEQ ID NO: 92923 - protein, 323 aa, unidentified
MAKRITICAGIDTGKHKLDVAVDGSSEQLRVDNTARGHQALVEWLKCRKVKRVGIEASGGYEQAVVAELRRKRFVVALFQPKQVRAYGTFHLLLAKNDKIDATLIAMCTAAVKTVHPAPDPRLQPFAEHLTMIDQITEDIARLKNRLESCRDTRIQGIWKAQIALLAKSKRAELKALLAAIRKHPDLAARLDLIYSVAGCGLPTAVAVLVRMPEIGNITRERASALSGLAPYDDDSGKRSGARHIEGGRERLRWALYNAALAASSRWNPQLKALYGRLIAAGKPHKCALVACARKLLVTINAVVARGTPWMAEVPQLAKLPAV

SEQ ID NO: 92924 - protein, 352 aa, unidentified
MNEGITYRIGIDVAKGVFQAHAVKNEPGEPVAFTKRLKRAQMEAFFAELPPSLIGMEACGSAHYWARVARRYGHEVRLMPPAYVKAYVKRNKTDAIDAEAICEALSRPTMRFVPVKSEADQAMVALHRIRASFVEKRTAAANQLRAELAEFGIVAPAGKRGLSDLLTLVETEAERLVALPEALRLVLAELARQWRSCHEVVSRMDREIAMGVRKNARAMRLTFVPCIGPVGASVIDAMLPNPHVFKSGRHFAAFLGLTPREDSSGKTVRRGGITKKGDTYLRRILVLGATSYLAAVRRGKVKGVAPWVLRMAAHPKRKLAATALANKTARIAWAMLAKNEDYRAPTPALEAA

SEQ ID NO: 92925 - protein, 338 aa, unidentified
MEWTVAIGVDTHKEVHVAVALDALGAQVDCCEIATTPAGYRSLLAWARDLGVPAFAVEGTGSYGAGLARFLARAGVNVFECERPRRQERRRGKSDLIDAALAARRLLSGEGLCLRRGGGQREDLRLLLLERRGAMQARNAALNQLHAVLVTAPDHLRERLGALSGDRLAGAAARLRPSAEVMNGVLRRLGRRVERLSREAAEAERALAAVVAEVAPTLLEESGVGPVCGAQLLVSSGDPGRMRSEASFAALAGTSPVDASSGKQRRHRLNRGGDRQLNWALHVVALARIRHHAETGAYYQRLLAAGKTPREARRCVKRALARHFYRRLRELSTLPLTT

SEQ ID NO: 92926 - protein, 429 aa, unidentified
MKKISTVQVFGNEIFKEQKLTIGVDLGDRWSFYCVLDEAGKIILEQKVSTTPEAMKETFERIPRSLMALETGTHSPWVSRLLKELGHEVLVAHAQKVELISKSNRKDDRHDARTLARLARIDPELLGPVRHRSAKAQIHLTVIRARAELVSARTGLVNAARGLTKSYGERLPKCGTKQVSRELAAELSVELREVLEPLLKEIESLNERIKEYDARMEKIARESYPHIELLKQVKGVGTQIALTYVLTLDDPHRFRRSRDAGCFLGLCPGRRDSGQSQPQMHISKEGDRYLRTMLVQGAHYILGPFGEDSDLRRWGLRLAERGGKNAKKRAVVAVARKLAVLLHRLWVSAEVYEPLRNSHQSDARRSLERRAPQKTGDARGRRSWRSSLLGDPGSKFLCGKLGKTGRKKKSIQERREMVSKQPSSTAEIR

SEQ ID NO: 92927 - protein, 420 aa, unidentified
MKAWNEIKHYAGFDWAKDHHDVIVLDAVGKTVAEFRFDHTAGGWDEFSKKLAAFPDVAVAVETNHGGVVERLLERGCCVFPVHTRSAKGYRQRKVPSGNKTDKIDAWSLADALRLDGAHWKQLSAQDPLTKELRLLCRDEVALIRDRSALITQLRQTLYDYYPAALEAFDDWTMPAAWSFVVSFPTPEVLVKAGKRKREKFLHVHKLARPATYQRRLEIFARAHEFAGSAATIRAKSKLAVARARQLQLLETQIAEYRQEIRRLFAQHPDAKLFGSLPGAGDKIAPRLLAEIGDDRALFSDAQGLQCLAGTAPVSYQSGQIHRVYLRRQCNKSLRNAVHLWANLSREFCPWAATYYTALRAKGKSHACALRALGQRWLKIVWKMWQTRTLYDPDLHARNQLKHGSWVLQMVNQPAAVKTD

SEQ ID NO: 92928 - protein, 362 aa, unidentified
MQQHQVTQVDFQGQHVHVGIDVAQRSWRVHILVGDLFHKRFSQRPDPEALVGYLKRNFPGATYHVVYEAGYCGFWIHARFQELGIDCIVTNPADVPTSDKERRHKNDTVDAGKLVREHQKGSLKAIYVPDRAALEDRNLVRMRAAFVSKQTRCKNQIKAFLAFYGYKQHEEEAGPEHYWSRTYVSWIESIAMKRESGQGALRMLLKELVFLRESIAGLTKQIRRLARDERYQKDVRQLLTVSGVGLICAMTMLTELVTITRFKGLDQLACYTGLIPGERSSGDTEIITGITERRNAAMRHLLIECAWIAKREDPAMLLAFNELRKRMKGRDAIIRIARKLLNRMRFVLRHDEPYVTGVLTSD

SEQ ID NO: 92929 - protein, 319 aa, unidentified
MQDILEICCGLDVHKETVVACLLKGSKESKPEAETRTFSTLIKNLEELKTWLEEENCRHVAMESTGVYWQPVYNVLENAFDGTMVLIVTNARHMKNVPGKKTDIKDAEWIATLLRAGLLKGSFVPSQPIRRLRDLTRYRKSIIEEISSQKNRIEKHLQSCGFKLSSFLTDIFGVSGRGIIDHLAKYGHISPEEVDPLIKKSARAKLNEIKLAVNGNMDSLQRDFLRMLLKHLDDSYMHLQMIDQKIDEELLKYQRQIEQLDGIPGINITAAAAILAEIGIDMNHFKTAEHICSWAGLTPGNNESAGKKSPVVHSTGIPT

SEQ ID NO: 92930 - protein, 416 aa, unidentified
MNAAGIDVSSRKSTVAILRPFGEVVKLPFDVRHNTEDLAALAAQLKSIDGETRVVMEHTGRYYESIAKVLHEAGLYVSAVNPLLIKAYGNNSLRKVKTDKADAMKIAKYALDNWSELRDYTPMDTIRYDLKTLNRQFQLASKQKTATANNLIALQEQSFPGIRKLFDSPVRSDGTQKWVDFTHDFWHVDCVSNGSQNAFTERYRKWCKRNRYQFSMEKAAEVYALAKSAVVLGPKTSVTKTLIQEAANQLTAISRSVETYRSEMNKLASQLPEYPVVMEMYGVGESLGPQLMAEIGDVRRFDRKQSLVAFAGIDPAPSESGDYCSRSNRTTKRGSPYLRRTLFNIMTVHLQRAPADEPVFQFMDKKRSEGKPYYVYMTAAGNKFLRCYYGKVMAYFSTLEGLSPVDMDSTGLHHAE

SEQ ID NO: 92931 - protein, 412 aa, unidentified
MRCSARAVTERTLAERSRATNLHAHPCMLSKGGEKTQNREGRGRSNTLEANKPGGEQDRRATTKPAESPNSRWGHKVEPELRKAGSGPKSKWVKVMSQYAELYVGIDVAKRTLEVALSSGELLSVVNDDAGIAELVQDLVKRAPALVVLEATGGYERKVWLALLEAGIPTARVNPRDTHHFAQAHRQLAKTDRLDARGLMLFAAQMRPRPDVAPAAADERLKELVGRRQQLTTMLAAEHNRHQQAISPANRRSIQTVIRFLERQRKALDQAIEKHLSKTAQAQELNELLQTAKGVGRVVSATLIARLPELGTLTRRQIAALVGVAPYDRKSGDWDGRSHIFGGRADVRCALYMATLSAVRRDPHLRAFYRRLREQGKAKKVALTACLRKLAITLNAMVKNRTPWSPSCPTLA

SEQ ID NO: 92932 - protein, 423 aa, unidentified
MFVGDDWAEDHHDVEVQDETGRRLAKAKLDEGIAGIDRLHAMIAEHADEDSNPDHVAIGIETERGPWVQALIASGYRVHAINPLQVARYRERRSVSGAKSDAGDAHTLADMVRTDGHQLRTIAGDSDLAAAIKVVSRAHKTLIWERTRHTLRLRHALREFFPAALDAFSDLTGADALELLAKAPDPASAAKLTTTQITAALKRARRHHAGAKAEAIRSALRTKHLEQPEAVTAAYAATVRAQLAILTTLDAELKTMQEQVEQHFGQHPAAEIYLSQPGLGRILGARVLAEFGDDPTRYADARGRKNYAGTSPITRQSGKKIVVARYVHNDRLLDALGRQAFAAMIASPGARAYYDLLRDRGVGHHAALRQLANRLVGILHGASRPAPSTARTPPGLSTPSRSQLDTKQHGMSVNQCEALVARV

SEQ ID NO: 92933 - protein, 327 aa, unidentified
MNVVALDVGSRKHAIAVSDARLGSRSEVANEVAALRELFVAVARKAPDAWVVMEATGVYHWQSAVLAHAAGLKVAVLNPKVTANFAKALGQRNKTDQADAGVLLRYAQSVPLQAWRPPRKAVVELRAISRHLLVLSQQQTATKNRLHAEEAMGESPAFVLKAYRREIARMGRQIAKTSAEAMKVIRADADLLAQFEALDSIKGVAQVSAIGLLGELAALPTDMHARACVAHAGLDVRQHQSGISVSKPGKLTKQGNHHLRRTMYMPALVAISHDPHAKAFYERLKANGKKPMQALCAVMRKMLMAAWVLMKTRETYDGARLYAAVEG

SEQ ID NO: 92934 - protein, 473 aa, unidentified
MSKGSGNGTTRGDRRRNARRERLRGLLPRDGAVIGIDLAEDKQALAVVDHDVRVLARKTVKVKAFRLGEALDWAVAQAKVKGFKQVAVACEPTGPRWMQVQRLCAERGLPLVCIQPLVSHIAREQQDYTPHKTDESDCVLIGRLAAELHCYIPEELDETWAQLRHLGRRRAQLITAATASVQRIGDFLSVTWPVVTEVCAQPFKPVTWLAALQVVTSRCGGDPARLAAMGPEEFTAVVRAAVPAWGGKKGWGTICGRVFAATADTEGVVAWSRRGLLRRVADELGDLARTRAQLRAVAADMVMVLSELGLSRLGDIPGLTAVGAAAILAETGDPRRYDSSSSLVKHAGLSPSENASGAFEGQARISRRGRPGLRLTAWRAVWPMLRLNPVMAAKYAAMTQAADAAVASDAGSQPARAAASAARARRAKARVACAASLLRWIYSMVVHGTSWDAAVASGAAACQHAPRCQPEAA

SEQ ID NO: 92935 - protein, 472 aa, unidentified
MRLTLGIDVACRAAHQASLAGRDGALVWSGRKFFTRPADLERLWDDLDLDKACGAGELTVVMEPTRNAWVPLASWFRRRGARVVLVPTTQSADLRAYYSKHTKNDHLDSKILARLPLLHPDGLREHTDAGPAGPLRRIVKQRSSVVKRRTAIFQRLDAQLELLGPAWYDALGSNYGKAALALLARYADPTALLKLGHARLTRFLIRHSRGAWRDDHATALLAAARESLQLWGCPDGRFGIDFAELAADIAVEAEQAQVLTEQIDDLDERIANLYHEADPDAIIASAPGVGPVTSAVIAGRLGDPHRFTSLAAIRAYSGLVPKVNQSGLSEHHNGLTKAGDTLLREALYAAADSARKTDPQLAARYVRLMNNDRHHASALCHIAAILLTRIATCWRTGQRYQLRDTTGRAITEAEGRQIVRDHHQVDRQVRINAANNRQSQRLKNRTGREHKESQSAPASRPATTNSTNPSAA

SEQ ID NO: 92936 - protein, 414 aa, unidentified
MKSARNTLPTEPTNGLTCGIDWARDDHAVSIVDAKGREITRKTIGHHAVGLRDLLTTLQRVGVGEVAIERPDGPVVDALLEAGITVVVISPNQVKNLRGRYGSAGNKDDRFDAFVLADTLRTDRTRLRPLQPDSPATVALRQTCRARKNLVAHRVAIANQLRAHLMIVFPGAVGLFADIDSPISLAFLARFDCQDRADWLSVTRMANWLASVGYSGRTHASELHRRLTAAPRGATGIDGATITATFVEVLSTVSAQIKTLDQSIAEQLDAHADAHIFTSLPRSGTFRAARLLAEMGDCRARFPTPESLACLAGVAPSTRQSGKVKHVGFRWAADKQLRDAVCDFAGDSRRANPWAADLYNRARARGHDHPHAVRILARAWLYILWHCWHDEVAYDPTQHRALQKLINQDQPRAA

SEQ ID NO: 92937 - protein, 320 aa, unidentified
MRNAVGLDISKLTFDATAIVGNAEYSAKFDNDSKGLDQFSDRLKSLGCQNLHICMEATGNYYEEVADYFAQYYSVYVVNPLKISKYAESRFKRTKTDKQDAKLIAQYCRSAQESELVKRQKPTDEQYRLSRMTAAYAQIKSECAAMKNRHHAAKDEEAAKAYAQIIKAMNEQLEVLKEKIKEQTEKPNCKEGVKRLETIPAIGRMTAAVLFHHLTSSKFETSNKFAAFAGLSPQQKESGTSVRGKGKLTKFGNRKLRAVLFMPAMVAYRIRAFPDFIKRLEEKKKPKKVIIAALMRKLAVIAYHVHKKGGDYDPSRYKSA

SEQ ID NO: 92938 - protein, 373 aa, unidentified
MKTSITHVAMDTHKKQHQVAWVHPDTGEIQEFTVANTVREIERMVKKIRKQAAGEIHVCYEAGVCGFVLQRLLEKRGCVCQVIAPSLVPTKPGDRVKTDRRDAKKLLGLFAAGQLTPVHPPDAMEEADRELTRCRECAEIDRKRARQRLHSLLVRHGYIYQDGSLWTGKHAAWLQALVFDQPRVRTVFEEYRSELEHCGQRLESLDKQLAQLATSERYREAVAALRCFRGIDTLTAITLLTEIYSFGRFSSPRALMAYLGVTPSEHSSGESRRTGGITKTGNRRVRRLLTESGWHYRHPPRVSKALKSRRQDQPAWAIDLADRAALRLYKRYKHLTERGKPLPQAIMAVVRELAGFLWAMLHRLQLPAVPASP

SEQ ID NO: 92939 - protein, 506 aa, unidentified
MTTPTPRTTKRKPAPSPTSGPQPQARAQRQAYSRRKTRAQAKSEALRRKAAAQLEALPVHHPHAAGIDVGSRSHWVCVGFTTEAPSGLIREFPAHTAGLKALAAFLQEQQVTTVALESTGIYWIALYELLESEGFEVLLVDPSYTHQLRGRPKTDRRDCQWIYRLHSVGLLAPAFRPDEKTCQLRAYLRQRANVVRQASQHVQHMQKALEQMNLKLTEILSDITGATGRAIIRAILRGTRAPEKLAKYRDKACKASEAEIAQALTGSYREEHLFELKQAYEAWQFSLRQLDKVDTQIALQLGRMKCDRALPPLPLKRRPSRKSNAPRFDVRTALYYVVGLDLTEIEGISEVTALTIISEIGPEVSKFPTVKKFCSWLGLCPNWKKTGGRVKSSRTRPGVNRAATAFRLAAHGLHRSQGALGAFLRRMKARLGAPAALTATAHKLARIVYLALKHGLPYVRKSQEEYEAQMKEKQLKALKRKARQLGLELIERPSADRGTAEAPLQG

SEQ ID NO: 92940 - protein, 434 aa, unidentified
MSCRVEHWSIGSPLGVLQARGKSSTKEEVRELIFVGDDWSEDHHDIYVMDEAGKRLGSRRLPEGLAGICRLHELIAEHADQPEQAVIGIETDRGLWVNALTAAGYQVFAVNPMAVARYRDRHHVSGAKSDASDAKLLADLVRTDRHNHRPIAGDSAAAEAIKVLARAHQNLIWTRTRHTNALRSALREYYPAALGAFENLADRDALAVLGRAPTPEQGAALSLSAIRSALKRGGRQRYIDARARDIQAALRTEQLSAPAPVAAAFAATTRAVVGIIAELNRQIDELETTMAAHFEAHPDADIYLSQPGLGDVLSARVLGEFGDDPNRYTDAKSRKNYAGTSPLTVASGKKHVVLARYIRNERLYDAIDRWAFSALSSSPGARAFYDQRRAAKDGHHQALRALGNRLVGILHGCLRHRTLYDEHTAWAHRTTTAA

SEQ ID NO: 92941 - protein, 346 aa, unidentified
MRELIRIGMDTSKHIFVLHGVDAAEQVVLRKKLSRKQVLDFFAKLPPTVVGMEACGAAHYWARELGKLGHEVKLMAPQLVKPYVERNKNDGRDADAVCEAMSRPRMRFVPVKSAEQQAALMLAGVRDGLIARRTQLCNAIRGYAAEFGLIAPKGLDKIEPLLARIAQDENLPAVARELFAMQGRDYAQLQGELKAIEARLLAWHRANATSRRLAQIPSVGPIIATSLVMKTPDPGAFRSGRWFAAWLGLTPKDHSTAGKTRLGKITRAGDETLRRLLVAGATAVIRQARLGRGQPSRWLVALLRRKPPKLAAVALANKVARIAWKLMVTGESYDAARINAEPAIAT

SEQ ID NO: 92942 - protein, 354 aa, unidentified
MKQYIGCDAHRKYSIFVSVDERGKASAPQRVEHDREAFRAFLRTLPAESPVAVEASGGWYWLMSELEEAGLEPHLVHATEAKRRMRGRNKTDELDAKGLATLLYDNRLPEVWIPPAKLLDLRGLMRSRLAVRAYQTGIKNRILAAVNRYGLRGNEAGEGDCFSGKGRLRLNTWIARLPEQTRLATIEEWDLCDEMEEAIGNLEKQIAEKIGKIGYVRLLETMPGVGKILAATLYLEIGDVKRFPTPGHLASYAGLVPRVFSSGGKTIHGRVPQDANRYLKWAFVEAANCTVMHGWKYGECHVGRIYQRLKTAKGHPKAAVAVARHLAEASWWILQKAQAYREPAPATKSSSENG

SEQ ID NO: 92943 - protein, 358 aa, unidentified
MEYGAIDLHKKESQIRIVMESGEIVDRRIATTRERFTAVFWGRPRMRILLEASTESEWVAQHLETLGHEAIVADPNFTPMYSHRSRRIKTDRRDVAALAGACQRGFYRAAHRRSAPQRTVQSQLNVRRELTDSRTRAISLARAIIRGAGFRMRSGSTGSFLDRVAALDLPPSITETLLPVRTLIAVLSEELTSADDRFAKLVTEDPVVSRLTTLPSIGPITASAYVAALDDASRFGRAAQVASYLGLVPREHSSGEQQRRGRVLRSAHPAVQSLLVQAAWRMSRSKDPRTAGLRAWAQSVARRRGKKVAMVAMARRIARILFAMWRDKAPYDAARIRPTRAMLATPNVHDATRLVVNG

SEQ ID NO: 92944 - protein, 387 aa, unidentified
MPQLNDLSKSLVALEQDATLIAVIEMGQSSWLVAGIVPGVERQPLKKLTTDQDALLQLLHRWRKEANEAGHVIKRITVAYEAGRDGFWLARWLRAHEIEAYVIHPSSIPVSREHRRAKTDRLDTELLKRAFLGWLRGEPKHCSMAAVPTIADEDARRPSRERENLVREVTRLVNRMKANLARLGIRGFRPHLAQAAGQLQTLQTPEGTAVPANTLAELRRDMDRLRFVKQQIKQIEAARVQRLESEPGERRHAMVYLLARVVGIGVESADMLVQEVFSRKLRDRRAVARYAGLTGAPDESGNKRRERGLAKAGNARVRRGMIQLAWTHLLHQKDSVLAQWYRARTADARGRTRKIMIIALARKLLIALWRLVTTGEAPAGLLIRPAA

SEQ ID NO: 92945 - protein, 313 aa, unidentified
MDETLFIGIDVAKDTFHVASCPASINISLPNSSTGTKQLIKTLQPHKIALVVLEATGGYERPIVAELLEANFKVVVASPRQVRDFARGLGEFAKTDPIDAAVLARFAQVVQPKPKPPSSPETDELADLVRRRRQLTDLRTQELNRSETVRHPRVRKSVRKMIKTLDYQISELDELIEQNIKSDDEFRGKDEILRSTPGVGPQTSAMLLSLLPELGQLNRQEIAALVGVAPYDFSSGRFAGKSRIWGGRKEIRSVLYMAALSAIRCNPAIHCFASRLREQGKVFKVVITACMRKLLIILNTMMRNQTLWRPEKI

SEQ ID NO: 92946 - protein, 364 aa, unidentified
MKERKKETRYVGIDLGKRTYEMAIVGKGGKVTMNNGKTYTEGRQKLYKKLQLTDKVALEAGSLAFIMAKEIEASVGCQVYVLNPYRLSIIYKSMKKTDKEDALKLAHIIEDFQEERLPVVSVPSDKEMERRKILAGYRRAQQSRNRDINRLHALFVNQGITTIVRKDLAESEDRKEAIKALNGFEREEAEYLVETLELHEKRMELLEKRIQNEAGEDEVIQRLQSVPGVGPMVSFAFASHVGAERFENAGQLSNYIGLVPRVYMSGDTVRYGSITKRGNGYLRALLVQAAWALVRSKRGGKLKERFNYMTIQKAIGKKKSIVSIARRLAELMYVLMRDGSRYEARPFIVKNEVVRDISGVKFCA

SEQ ID NO: 92947 - protein, 362 aa, unidentified
MSRTSYMVGLDLHKKSISYCIKTPSGRIVEKGRMRSNPDEIDRLAGSIRPKSVVGMEATMFTGWVYDRFRSHGFEVKVGHPLMLRAIAVGKKNDEIDAETICDLLRTGFFPECYIAPREIRSLREVMRLRNMIVMMAVKLKNRIAGTLMGAGIEYNKEKLHGKRYFVRLMDSLDWLPGETVEILRDMKGGVEFLESLQKKLRRGLAQDPRLKERIELLMSVPGVGEVTALTWALEIADPHRFRDSGELISYCGLCSRQKSSGGKDMRGPLTKQRNAHLQPVLIEAAKLAPRYNPWLNEIHERELARGHRNRATIMVARKLASCLLSIDKSGRPFKLKNIPEGGKPGQTKSAEPPVLACLGTA

SEQ ID NO: 92948 - protein, 331 aa, unidentified
MSVYVGLDIGSRTSTAGVRKDARPAGLWDIAQTPAGRKAAVKKLQALQPKAIVMEATGIYYLDLAIELHAADLPVSVINPKSFHNFAKLMLVNSKTDAIDAQLLAEYGERMTPRLWTPPSPVQLELRAIGRHINRLVGHRTRAKNELHALRATHTTISMLIEDEEEAIASLDKRIERFRKAGHDLIAQCPTLSRQFKQLLVAPGMGEVSVLAALAELTTLPEILKSSQVSRHAGLDVRQTQSGTSIDKPGRLGKSGNAYLRAAMYMPALTAVRCDRYAKAFYESLVSRGKKKMQAIAAVMRKYLTGVWACMRGSEPFDTAKLFSAKHLAKA

SEQ ID NO: 92949 - protein, 387 aa, unidentified
MQKPHDDSKACLTAFIQDSTLTVVVEMSLGSWLVAGMIPGVNRDPLKKIAPNPEVLLQLLHRWRDEAIKAGKEITRIAVAYETGRDGFWLARWLRARGIDAHVIHATSVAISREHRRAKTDRIDTAMLRRGFLGWLRGEPGHCSMAIVPTVEEEDAKHPHRERETLIKQRTSTVNRMKSILIKFGVRDFNPALRKAPEKLASVRTPEGIPLPSNAVAALQRHMERFRIIKEQIKAIERTRLQRLQRDPTEKFNAMVFLLVRIIGFGVETAQQLVHEMLSRNLRDRKAVARYAGLTGSPDESGSKRREKGLSRCGNRRVRNILIQLSWRLLKFQPKSDLVVWFKKRTANARGSRKPMIVAFARKLIIALWRYVNTGLVPEGFQLRSAA

SEQ ID NO: 92950 - protein, 340 aa, unidentified
MDKLDFSGIKVSAEELVVALQREGKRRDLKTFPNTAAGHQAVIRHLSCPGRTVRVVLESTGLYGLDLALALQRAQLEVMVANPRAVRHFAQALMQRSKNDRLDAWVLLEFAARMPFQAWQPPATPALQLHAVARRLQALTEMQTAEKSRLAALEATATTPPALRRDLERSLRSQRRALARLSVEAQKIIQQEPGLKLRFDLLISAHGSIAATSAIQILAELAVLSPDMDARQWVAYAGLDPRECSSGSSVHRKARISKAGNAHLRRALFMPALVAIRHQPHLRAFYQHLCAQGKPKMVALTALMRKLLHAIYGMFNHQQPFDGSKVYRRPDPEISTEKAA

SEQ ID NO: 92951 - protein, 439 aa, unidentified
MPDDQSLSVLLLQNQEVILLSFKIFRKNCCGLDVHKTWIYACIGITDTNGRTTYKQTRFSSFSKGLKELSTWLAKYQCTEVCMESTGKYWIPVFNVLEKEDVSVILSHPKYTKPQKGNKTDRKDAKWICDLFMCDMVKPSFIPPADIRHLRDLVRYRFKLICMITGEKNRAQNCLTVSNLKLDDVFSDVFGKSSRSITEYILKHPGDLFDVTPFVDRRCKTPIEEIQAAVDGAISPEQAVKLRQCLNHIDELEKHLEEIEQEILRLSDKYQAALDLIRTVPGFDKNPMTAIQVLSEIGGDMSVFPSAKHLVSWAGCCPRNDQSNKKIKSTRISRAGSYFKPVLVQVANGLLRSKKHLEITDRYKRIKARRGHKKAIIAICRMLLTAIWHILSDLKPYTAEGFRESRPVNESKVLTTSQALNLLKQRGYIIKDDLAPAMN

SEQ ID NO: 92952 - protein, 375 aa, unidentified
MRDHSEAFVAFDTSKLRNAVAIAEAGRSGEVRFLGEIDNTAGATAKLVKKLAAKYGRLSFCYEAGPTGYGLYRQISQLGHDCIVAAPSLIPKKAGDLVKTNRRDALGMVTQFRAGELTAVWVPDPRHEAMRDLTRARGTAVEDLRRKRQHISSFLLRLGLHYAGKKTWTKTHMKWLASQKLEHAEQRIAFEEMLLAVRQAEERIARLEEAIRAVVPDWSLAQVVDALMAMRGIDMVSACAFLAEIGDLSRFRSPRELMAYLGLVPSEHSTGDTVRRGSITKTGNRRARRILVECAWSYRHPPRVGKKKQDKVAAAPRGVREIAWKAQHRLYGRYRALTRKGKPKTVVVTAIAREFAGFIWAINHEIATAGVVASP

SEQ ID NO: 92953 - protein, 344 aa, unidentified
MPEPKSSDHARLGERGVAVESESGKDGAMSETWVGIDVSKEWLDVYVAPSSKRMRVRNDESGFGPLTSELKQAAPTLIVLEASGGYQAAVVAALSVEKLPVAVVNPRQVRDFARGLNQLAKTDRLDAQVLARFAEVVKPEPKPLRDEETLLLEALATRRRQLVEMITAESNRLAQSAKPLRREIQDHIDWLKRRLKDLNRELDEAIRNSPVWREKEDLLRGVPGVGRVLSVTLLSAVPELGKLDRKEIAALVGVAPLNRDSGKYVGKRSCWGGRAVVRGALYMATLSATKHNPVIRDFYQRLCRAGKEKKTALVACMRKLITILNAMMRSGHSWQPALATARAT

SEQ ID NO: 92954 - protein, 333 aa, unidentified
MKDLSTLQHFVGCDVSKSTLDFAIYERGKDYRMFDHISVANTTEGFQAMRKWLRSFKINVKDAVIAMEHTGSYSNALAEWCFKKGITFVLLHPLDVKNAGARGRNKTDKTDAQFIADYAYTMREKLTPSLPEPQSIKKLRQLRNERQLAVRARTAYMNQLKTVTDKSTLHRMEKVTATFTAQIKAIEASIRTAVEADSRIKNTYDLLVSIPGIGMLNALTTIIATGNFTRFQTARQYAKFCCVSPLSRQSGTSVRSGDHVSHAGHNEIKSILTEGARSAIHHDANLKSYYERKRTQGKTHGCVMNAVKFKLICRMFAVVQRQTPYVNVERYRG

SEQ ID NO: 92955 - protein, 322 aa, unidentified
MKKSKNYVGIDISKLSFDVAIYNSKDKYKYYKFSNNQEGFLLLLDVLNSSESICVMEASGSYYLKLATFLSAKKIDVCVINPLVIRRFSQMRMSRTKTDKKDAMLIAEYGKTEKPALWEADADYVLELKQMQAFLEQLNKNRTGFIRQMEAFNHSSNKSLIVDKSLKSVLIKIEQEIAEIEIKMEIIIKKYHQEMFEQLQSIPGLGKKTSLFLIVISGGFSKFKNHKQLASYVGISPRIFESGTSVKGRSKICKMGMSKIRAMLYVCAWSAKRCNKVCKDLYDRLVEKGKSKKLALIAVVNKLLKQAFAIATKKEYYSLKIN

SEQ ID NO: 92956 - protein, 427 aa, unidentified
MSTLFVGIDVSSKTNAVYAMDFEENKYISSSFGNNQPGADKLVNMIAECMQKHKNLDTILIVLESTSVYSVHISNFLSASEVLMPYRPYVFCVNPKAASNYRKSYIGMEKTDPTDAYLIADFGRVGRTKKLEPWRGGQFISLKRLTRHRMHLSECITREKTYMVSNLYLKFSELQLLEGDDKPFGSLYGATSSAVLTEFLSPQEIIDMPEEELLTFLAGKSRNRISDLSKTSELLRKAARDSYRLDKCMYEPLSISLASSFNCIHAYQKEIKLIEQAIEKCINGMNPNALLILQSIPGIGPIWASGILSEIGDITVFHSSDALAKYAGLYWPKGDSGDFTSEDNKMSKAGNPYLRCYLGEAANSVRKHIPEYADFYARKYAEVTKHQHKRALALTSRKLVRLVFGLLVKNQLYTGEKLDTEYNIESN

SEQ ID NO: 92957 - protein, 363 aa, unidentified
MPTTNLENSIDFGGQEFYVGIDVHKKSWAVTVRTLNLEVDRFTQPPNVQDLANHLFRRFPNGTFLSAYEAGFCGTTYHSKLHQLGIRNIIVHPADIPSPDKQKKTKNDLHDSRSIAYYLEKHMLHGIYIFPKAQQELRSLFRLRQSKVKDVTRSTNKIKSFLQYFGIRLPKGNTNNQITHKDIDWLNNLIFDSPAGSSTLQHYISDLQYNRKQLLDATSALRKQIRKIYPDQLNCLLSVPGIGPIMGMAFLAEIGDFSRFKDPDEYSSYLGLIPWEKSSGESLSTKGMQPRCNKFLRPLLIETSWAAIRHSTELLAYYRKHAVKNNKHAIVKVARKIALIARAVVLQLKRYNPEYNCRSHQVA

SEQ ID NO: 92958 - protein, 331 aa, unidentified
MADAKRFIGIDVAKAQLDVALGPNGERFAVANDEHGISALLKRLEPADLVIIEATGGLEVPVASALATAGIGVAVVNPRQVRDFARATGQLAKTDALDAQVLVRFGAAVKPQVRALPDAQAQALEALVNRRRQLVEMLTAEKNRRANSPKVIHKSIDEHIRWLEKRLAGFDDELAALVRETPIWRERDELLRSVPGVGHVLSTTLLAHLPELGALNRKQIAALAGLAPFNRDSGSLRGSRCIWGGRAQVRRVLYMAVVSAVRSNPVIKNFYAQLRARGKYPKSALTACMRKLLVILNAMLHNNTHWHATALTSSTSTLYPLGGAVSEHGCC

SEQ ID NO: 92959 - protein, 403 aa, unidentified
MTVRPLVWVGIDVGKTSHHACAVDETGKVLWNQKVSNEQRAIEQLIARAHKGADEARWAIDLTSPMALMLITVLLGAEQSVVYVPGHVVNTMTGAFRGEGKTDAKDARVIAETARMRSDLSEVAMPDELVVELAQLTGYRTDVMADWVRGVNRLRSLLGSIFPGLEAAFDYSNRTPLILVAHLCTPAEIRAAGIKGVTAYLGDNGGWPTAIAKTAATAVAAAKQQPLALPGEAGTAALVKRLARKLLDLDHEIKDIDKTITERFRDHPYAHIIESLPGFGPGLGAEFVVVTGGDLASFATAGRLASYAGLVPVPRDSGRISGNLHRPKRYNRRLRRVFYMAALSSIRGDGPSRQFYDRKRGERLIHSQALLALARRLVDVLWALLRDGREFTPHKPTPATAAA

SEQ ID NO: 92960 - protein, 350 aa, unidentified
MLIIGADFHPGFQQIAYVDTESGELQERRLQHREEAEKFYRDLAGQGMKVRVGMEASGHARWFERLLSELQFELWIGDAAEIRTKRVRKQKTDRQDAQLILKLMLEDRFPQIWVPSWENRDLRQLLWHRHRMVQARTRIMNQLQAVALNEGLRSKKRLWREAGRAQLAAIRLAPWATRRRQDLLELLDRLNPTIGELTRAVEEEAEKCPEAQRLMTHPGVGPLTALAFVLVIGTAERFGCGKQIASYLGLVPEEDSSGERRRLGHISKQGNSLLRFLLVEAAQVTVRSNQEWRNKFFHLAMRRGRKIAKVAMARRLAIRLYWMWRKKWNYEQLTKFGSHAGQPGNPHGVR

SEQ ID NO: 92961 - protein, 314 aa, unidentified
MTEYVVGIDVSKRYLDVAAADSTGTCRYPNLAEGIAALIGEMRAHPPSLVVAEATGGYELGLVRALQAAQIPVAIVNPRQVRDFARARGKLAKTDAIDAQSIAAFGLALRPRPMPKPIPGREAFAALVTRRRQLIDMMIAEKNRREHADSVVAVFLEESLAALKSQLATVDTAIALAIDADQELAHRRDILVSVPGVADLTAAVILAELPELGTIGSKQAAALVGVAPVNHDSGAHRGERHIAGGRASVRCAIYMATLSAVRHEPNLQAFYRRLRDNGKRPKVALVAAMRKLVTLLNTLLQRNQIWHPPQLHGC

SEQ ID NO: 92962 - protein, 402 aa, unidentified
MNAVGIDVSKGKSMVAIMRPFGEIVSTPFEIKHTASDIHSLVELINSVEGESRIVMEHTGRYYEVLAHQLSEANLFVSAINPKLIKDFDNDSLRKVKSDKADAVKIARYALDKWQNLKQYNVMDELRNQLKTMNRQFGFYMKHKTAMKNNLIGILDQTYPGVNTYFDSPARSDGSQKWVDFASTYWHVDCVRKVSLNAFIDHYQNWCKRKKYNFSQSKAEEIYGKAKELVPVLPKDAITKLIIKQAVDQLNSASTTVESLRTLMNETASKLPEYPVVMAMKGVGTSLGSQLMAEIGDVSRFTHKSAITAFAGVDPGVNESGTYEQKSVPTSKRGSSVLRKTLFQVMDVLIKTHPQDDPVYQFLDKKRAQGKPYYVYMTAGANKFLRIYYGRVKEYLSSLPES

SEQ ID NO: 92963 - protein, 346 aa, unidentified
MELYAGLDLHSRNTYIGIMDKTFNRVFKKRVPNHLELIVQTLDPFRDQIKGFVVESTYNWYWLVDGLMDAGYSSAHLANPAAIKQYEGLKHSDDQHDAFFLAQLLILGILPQGYIYPKKDRPVRDLARKRMFLVQHKTAHILSLQSLIQRCCAMKVRANDMRHLTVEELEMWLEEEHLVLSAQANLDSVNFLKQKIKQLEKAIIQKVKLNKAFKYLLTVPGIGNILAMTIMLEVGNINRFPKVGNFTSYCRCVPSRRLSDGKSKGYGNRKNGNRYLSWAFTEAAQLGRRHNERFRRYYNRKVAQANTSLATKALGNKLARICYYIKSISVRNCSVNKPGTAAVILW

SEQ ID NO: 92964 - protein, 351 aa, unidentified
MAETLKNSIAFVGIDIGKNSFHVVGLDKNGTIVLRQKWSRGQVEARCANMPPCLIGMEACVGAHHLSRGLQKLGHDARLMPAKYVRPYSKGQKNDFRDAEAIAEAVQRPTMKFVATKTVDQLDLQAMHRVRERLVSQRTGIINQIRAFLLERGVAVRQGLRFLRAELPDILARPSDILSPRMVRLLEELAGDWRRLDGRIEGLSNEIEAIARQDSSCERLMSVPGIGPIISSAMIAAIGAGDVFSKGRDFAAWLGLVPRQISTGDRTILGKISKRGNRYLRVLFVQAAWVVLIKPKSWERHGLKSWIEAAKKRLHRNVLAIALANKLARIAWSVLAHGRNFEATKFGEAAA

SEQ ID NO: 92965 - protein, 370 aa, unidentified
MTETTPLFVGLDVHKDSIAVAHAQGQCADPPVFVGAIGTRQADIDKLIRRLEAKTPDLVFAYEAGPCGYVLHRYLTQKGFPCQVIAPSLIPKKPGDKIKTDRRDAVELARLLRSGDLTRVYVPTIDDEAMRDLVRARDAARLTLKNAKLRLKGFLLRLGLHYVGRADWNAAHLRYLAKVVCPTPAQQIVFQEAVRSVDEQVDRLQRLEAELLEHAAAWRLYPVVQALQALRGVQWLVAITVVAELGDLTRFDSPRQLAAFVGLIPSEYSSGQARRQGGITKAGNGRARRALIEGAWAYRHPAKVSQHIQTRIDGLPKPIQDLGWKAQVRLCKRFRRLTARGKHPNVAVTAIARELIAFMWAIAKAVPITA

SEQ ID NO: 92966 - protein, 411 aa, unidentified
MRSIALDVHRDFCEVAIKEGGGEVRSAGRVKTSVEELELFARSLAPDDQVALEATGPANAIARVLEPHVGRVVIANTRRVRAIAEAKVKTDKVDATTLCELLDAGFLPAVWTPHEQVSALRGLLGRRDRLVRSRTRAKNAVHAALGRELKGHPPMTDLFGREGRRWLGRLELPAHERRIVASCLREVDFLSQEIAALESELARLALDSGPIKRLMTVPGVSLISAATFVAVVGEISRFETPKKLVGYVGLDPEVRQSGEAKARHGRISKQGSAQARHMLCEAAWIAVRTPGPLRAFYQRLRSRRGAQIALVATGRKLCVLFWHLLTREQDYAFGRPSLSRHKLRRLELIAGDPPRRGQRSGSKASKREQLHERELSEQVEAAYRRLVEDWQPKPKKTVRVRHRGRASSKAV

SEQ ID NO: 92967 - protein, 344 aa, unidentified
MSEVIIIGLDIAKYVFHVHGADGRGRAMFSKRISRGKLLDFFAAQPSCRVALEACGGAHHWARQLTQLGHEVRLIPPAYVKPFVKRQKNDAIDAEAICEAAQRPSMRFVAVKSEQQQAAGLVFRTRDLLVRQRTQLINAIRGHLTEYGWVSPKGPSHVARLADLIEEEGMASSLPKAAHAMFRLMLDLLTDLNGKVADLDQEIARRAREDEVSRRLMTVPGIGPISATAIAALAPPAETFVKGRDFAAWLGLTPLQRSTGGKQKLGATSKMGERTLRRLLIIGSSAVVQRAGKRGAPRGSWLEQMLARKPRMLVTVALANKMARIVWALLVKCENYRAPVAAKA

SEQ ID NO: 92968 - protein, 408 aa, unidentified
MNTLYVGIDVSSKSNVVYLMLPNGDKHSNFSVANSHEGSTQLVKRIHSALTSHSLDTVLIGLKATSVYGDNLVYFLREDATLAPFNRKIHVLNPKQVKKFHDTYNDLPKNDYVDSFVISDCLRFGRINKEVYLGDYHYKALQNLTRARFFDVQNLVKEKQRFMNVLFKKYSTMTQEKVFSDTFSTTALAVYDEFESAEALANMDLHELTDFIMKKGKNRFPDPDAVAKAIQKAARSSYRLPKTVNDSVNQVISISITSMKALESQIKEFDKAIKAQMELLPNVLISIPGIGPVYSAGIMAEIGDINRFNRQAALAKYAGLAWKQHQSGGFEAEVTRLIPSGNRFLRYYLCEAAFSLVRCDKKYSDFYHLKYKEVNRCQHKRALALTARKFVRLVFRLLKDNRLYCPTK

SEQ ID NO: 92969 - protein, 297 aa, unidentified
MLDTTTFVGLDVHARSIKAVSLDVMTGEVRAATFGYDAGAVAEWVRSVDPGARCVYESGVTGFDLQKRLSGLGVDCVVGAVSKMIKPSADRRRKNDRNDAEFLARMLSVGNVVEVWVPDDECEAARDLTRALEDARDDLSRSKQRLSKFLLRHGLVFDERTPTGRRKGNWTRAHWSWIESIRFAEGADEEVLAYYVDAVRRAAEEKARLEGLVEAEARKPRWRKRVDSLRCLKGVDTASAADLVFEAGEFSRFRNARSFAAWVGLTPSEHSSGESDRRGAITKAGNKHLRKTLLALL

SEQ ID NO: 92970 - protein, 405 aa, unidentified
MEIIVDKGCGLDVHKETVVACIMGRGIQKETRTFSTMTNDLLRLKQWLEEKEITHVAMESTGVYWKPVFNILEDSCEVMLVNARHVKNVPGRKTDVQDSEWLCKLLRSGLVRGSFIPPKEVRQLRDLTRYKRKLIQTMAAEKQRIQKTLEDANIKLSSIASDTFGVSGMRILEELMKGELQPEEMAELSKGRLRKKKADLQEALVGTMEEHHTFMIRVSLGHIKMMEDLLATVEQRIQEKIECHFKEEYKLLKTIPPVKDNASVIIAEMGVNMDLFPTEMHLSSWAGMSPGNNESAGKKKPGTTTYGNKHLKNILVEFGWVASRMKGTYLRSKYHSLVGRRGKKKALVAVGHKILIMCYHILKNKVPYRELGANYLDERKKDRIAKSYLRRLTNLGYTVMLNEAA

SEQ ID NO: 92971 - protein, 370 aa, unidentified
MSGEGTWVGLDVHARSVVGSAIDEASGEISTRRVGPRTEQIVEWVRNHPGPVMACYEAGPTGFGLARALAAAGIACEVVAPSKLERPAGDKVKTDRRDAERLARLLRIGELPAVRVPTEAEEAARDLVRAREDVRTDLMRARHRLSKLLLRQGLVWDATAWTGAHEQWLRGLRFDRRGVQLAFDEALDAVFTVGARRDRLDAAIVEMAETAALAGPVGRLRCLRGVSTLTAVGLCVEVADWHRFTGATIGSYLGLVPSEASSGARRVQGQITKTGNTHARRLLVEAAWHHRRPLRTSRERARRADGQPAMVRDRAEAGNRRLHQRWTRLDRRKKRPTISAVAVARELAGWCWSLAVLDERTPESTTTPPG

SEQ ID NO: 92972 - protein, 345 aa, unidentified
MTVYIGVDFHARTQTISYLTTEEGEIQRLQLDHGQPQEVRSFYQQFAGQQVVVGFESSGYAAWFEELLEELGCEIWIGHATAIRLFARRRQKNDRRDADLILDLLLRGDFPRIHRYSPVSREVLQQLRYRQRLVKMRTMVVNSLLFMAASRGLSLRTQLKSRRGLERLQQLALPQPLTAQRDELCQLLLELKTKVDKVEEWLAAKAGSDVRVKRLRTHYGIGPLTGLCLVHTLECPERFANSRKVTAYVGFDPVEDSSGQRRRIGSISKQGSRLLRFYLVEAGQIAIRQDQDLARVYQRVLVRRGHAKAKVAVGRRLLVRAFIMLRDEIDYAEFQRRGVAARSSR

SEQ ID NO: 92973 - protein, 344 aa, unidentified
MEISTIGLDLAKNVFQVDGIDADGNVVVRRTLRRAQLLAFFASLPPCLVGMEACGTAHHWARELIKLGHNVRQMPAAYVKPYVKRGKTDAADAEAICEAVTRPTMRFVPVKSPEQQAALSMHRARDLLVKQRTQLVNMVRALLAEFGINIPQGVRLALEMARKIVDGEAPPVPREAAKIAGRLSQQALDTHAQLREIDLDLLAWQRTNDTARRLMSIPGIGPIGATALAASVTDASQFRSGREFAAWLGLTPRQHSSGGKERLGRISKMGDKYLRTLLVVGMTSLIKGVKRKPETADPRLVALLARKPVRVATVAMANHTARVAWAIMARGETYRAGHQPRLAA

SEQ ID NO: 92974 - protein, 339 aa, unidentified
MKYTPVGVDIAKHLIQVHFINEHTGEVVDKQVRRQDFMTFFSNREPCLIGMEACGGSQYWARELTKLGHKVRLMQGRLVKAFVMGNKNDVMDARAIWMAVQQPGKEIAVKTEEQQSVLVLHRSRRQLVKFRTAQINALHGTLLEFGETIHKGRAAIDRELPAALERMKKKLPPYLINVLEDQYNRLSELDTLIDGLEKQLTSVARQNETCQRLMEIPGVGPLIATAAVATMGEASAFKSGREFAAYVGLVPKQTGSGGKVRLLGISKRGDTYLRTLFIHGARAASLVAKEPGPWITELKKRRPTGVAIVAMANKLARTIWAIAAHGRAYDKNHVSIRPY

SEQ ID NO: 92975 - protein, 392 aa, unidentified
MFYIGIDIAKQFHQVAFLNDGGNVIVKPFVFQNSNQGFEKLVVAFTKYGISKDNCVIAMEATGHYWFALYFFLSDLGFSVKVLNPIQTDAFRDLSIRKVKNDVIDSINIAELLRFGKFSECVIPDENTIALKNISRFRYAMMDLCSDLKRKAICLLDQVFPEYDKLFSDIFGITSKQLLLKFSTPDEFNEISVTKLSNFISKVSQGRLGKTKAQDLKSAAANSIGISFALDSFSFQIKQLIEQIDFTEKQIEEIDLKLAELLAATQYSVITTITGIGAVTGSLIVGEIGDINRFDSAPKLVAYAGLDASVKQSGNFIGTQNKISKRGSPYIRRALWTAAFVASQHDPVLSVYYSNLIARGKSHKLALTAISRKLCNIVWAVLRSGNPYVPKA

SEQ ID NO: 92976 - protein, 320 aa, unidentified
MPKRDVMDSPLVIGIDVSKAEVVIAVHPSGETWSSATTPEALATLVARVADLRPHLIVMEATAGYELPLAAACAGATLPVAIVNPRQVRAFAQAIGRTAKTDAIDAGVLALFAARVQPPARAVADAETQALAGLVTRRRQLLEMIGAERRRLEHAPPTGPITRDLRHHIRWLERRVSDVDDEIGTAIHQSAVWRVQEDLLRTVPGIGPTVARTLLAELPELGRLDRRAIAALVGVAPFNCDSGQWRGRRRIWGGRASVRAALYMGALVASRFNPVLRVFYQRLRAAGKPAKVALVAVMRKLLTTLNAMMKHHTPWKSVTA

SEQ ID NO: 92977 - protein, 415 aa, unidentified
MNDLIRIGMDTSKSVFVLHGVDAAERPVLRKTLRRRQVIEFFAKLPPTQVGLEACGAAHHWARELGALGHEVKLLPAQRVKPYVARNKNDTADAEGICEAMSRPRMTFVPVKTAEQQAALMLAGMRDQLVARRTQLSNTIRGYAAEFGLVAAKGLEKIEPLLARITADESLPALARELFAVLGAEYHELKLKLRKIEAQLLAWHRQNELSRRLAEIPSVGPIGAALMVMKVANPRAFRSGRDFAAWLGLTPKDHSTGGKQRLGVITRAGDEALRRVLVLGATAVIQQVRRGRGHSSLWLVALLKRKPPKLAAVALANKTARIAWKLMVSGERYRGACATEVTHGNVCFEGASPQPRKAGAVLAAVKARPGSAAARRTGSATAGLDGGCARRPTTIAVGTKKRSMVEQRNESHGHD

SEQ ID NO: 92978 - protein, 354 aa, unidentified
MSEIIRIGIDTSKSVFQLHGVSASEAPVLKKKLRRSQLVPWLAKLGPTKIGIEACGGSHHLARTLKALGHEVVLVPPQYAKPYVARGKNDAADAEAICEAMSRPKVQKRFVAVKAVEQQAGQMLVGTREQLVRRRTQISNAMRGYATEFGHVAPKGLAHLDALLLRIEEDTETPELAKELFRLHRAQFAHVQVQLREVEARLMAFHRHNELSRRLVQIPALGPIGATLLAVKVGDPKAFKSGRNFAAWLGLTPKDHSTAGKYRLGGITRAGDESLRSTLVVGAMAVIQQLKRGNSRHASPWLIELLKRKPPKLVAVALASKTARIAWKLMASGEPYNPRKSAPQRKPDSFKEAA

SEQ ID NO: 92979 - protein, 445 aa, unidentified
MYSLFFMEPYRKEHIMHNKNYISVGIDVGSAFSFMTILAPDETVILKPFKITHNNKDSLERAVSEIKKAEELYSLESRTFLESTGIYHFPLFCYLVDCGFNASIINPIITHSTKNGNIRKVKNDKIDSKGIAKLGLSKDIPVSQFPAKLVLELRSLTRKYYDLTDERSAHINKLKGDLHTVFPQYLDVFCDVTGKTSTMILRQYGTPDKILRGHKKTMIEKISKASRKGLAKASERYEKLCAAANAAKTFGCQIDSIYFNIFLTLDLVEKLDSALDSILNRIRQLITFNKNEKFIQQIKLLNTIPGVGFLTAVTIMCEIGDFSEFRNPKQLFAYFGLDPEVNESGKFVGTQLHMSKRGSRIARRAIFAVALASIRTKRNGEGINPYLRKYYELKSGQKPKMVAIGAVMHKVCNIVFAVLRDEKAFELRSPEEHCKQYQRPALAAA

SEQ ID NO: 92980 - protein, 421 aa, unidentified
MNSLSTAKYTAFVGLDWADAKHDICLQAAGSEQREFDCFAHRTERIEAWAQALHQRFGGRIAVALELSKGPIVYALQKYDFLVLFPINPSTLAKYRQAFTPSRAKDDPTDAELALDLLIRHPERFKPLTPQSVPMRKLCLLVEQRRRLVGDKNRFVNRLCDSLKQYYPQVLEWFKRHDTVLFCDFLARWPTLTGVKRARQTTLRTFFKAHNARSEKLIEARLCAIQAAQPLTHDAAVISAHRLLAEILVEQLRVTLKAIDRFDEEIAATAAQLPDYALLFRPLPGAGPVMAPRLLAAFGEDRQRYRGADELQMYLGVAPVTERSGNKTWVHWRWQCPTFLRQTMVEWAGQTVNYSFWAGAYYRQQRAKGSSHQAAVRSLAFKWLRILYRCWQTRTPYDESKYLNALRRRGSPLLEHLGETM

SEQ ID NO: 92981 - protein, 403 aa, unidentified
MEVIEFPQIIERGCGLDVHKETVVATIKGVGIEEQTQTFSTFTSDLERLVGWLQNEGITHIAMESTGIYWKPVYSVLEEFFEILVVNARHIKNVPGHKTDKKDSEWIAKLLLSGLLKGSFIPDQASRELRVLFRHRKKLVGQRTAEKNRLQGILEDANIKLASVVSDVFGKTGTAIIKALSQGLTDPVKLSNLARGSLIGKKDQLQLALYGRVTSHHQFMLTFILVVIDQINAMIDTLDQRIETYMTNLEESIELLHTIPGVSYHIAMGIIAEIGTTMDTFPTHKHLASWAGICPGSNESAGKKRSSKVTHGNKYLKTLLVEAAWAASHTQGTVLADTYHRIAKRRGRKRANLALGHKILSATYFILRDRMPYRNPYQNPEVIAHRKAAKIKRLEKQLKKLKK

SEQ ID NO: 92982 - protein, 350 aa, unidentified
MLHAGLDLSRTRLDVCLLDEQGGTVQVTQAPPDTDGLRGLARQTAAYGQPVRAAVESMNGARFVHDQLELCGWQVAIADAAKVKGLAPLACKTDRIDARVLAELSRRDLVPEIWLPTPEVRAERERARFRLHLVRHRTSLKNRIHATLLAFGKPCPTSDLFGGGGRELLARLALPQPWAGSVAASLALIDDLEAQIDTCERDLRRLGADHPCIRLLVTTPGIAWVLGYTIAAEIGDIARFPSPKRLGGYTGLCPRVYQSGSRDHRGPLAKNGPTWLRWALIEAATHAARHPVYRDHHQRIRTRLGKQRGPKVARVEVARKLAEAIWHMLTRSQPFAPTAPARPPAHPLVA

SEQ ID NO: 92983 - protein, 355 aa, unidentified
MSGLKHQKEKRSMDHFAGLDVSVKETSVCIVDDTGKIVREVKVASEPEALLAVLTNPAYRFKRIGLEAGPLSQWLFSALAEAGLPVICVETRHMRAVLKAQINKTDRNDARGMAQMMRVGLYRPVHVKTLRSQKLRMLLTHRKLLQSKAIAIENDLRATLRNFGLKVGMVGTVKFEARIKELVENLPDLTVLVEPLLIVRRVLREQIGILHRRLMAIVRDDDVCRRLMTVPGVGPVVALTYRATVDVPTRFRNSKAVGAVFGLTPASYQSGEINLTGAISRCGDEMMRAVLYEAAQVMLTRTIKWSWLKAWAMQIARRRGMKKAIVALARRLAVIMHRIWVDGSEFRWTREAAAA

SEQ ID NO: 92984 - protein, 384 aa, unidentified
MKVVCGLDVHKDSVFCCILCANGEKIQHKFGVLTEELVTLRDLMVSEGVEECAMESTSIYWIPIWRVLEGSVKLHLVNPYFIKQLPGKKSDVNDAEWIATCLSKELIASSFVPDDKIQRLRQYDRRIFDLNVSISRNLVKLDQCIQRCNIRISNYISTTDSKGYRSIVKLISQGVTDAEVLVKELHGRTINRHGRETLVKALTGVVSETDIDIIKQLVEETELQQRHKDEAQEKMTALCMEWFPQEVENLQTIPGVKERSATSIIAEIGTDMTHFQTPKKLVSWVGLRPRNEESAGKIKARGITHGNRFVRKTMIECSWEAARMKESFFAEFSYRQCIERRKNKMKVQVAIARKILAAVWYVLSQGTQYIKPTDHYTAAHMTAV

SEQ ID NO: 92985 - protein, 337 aa, unidentified
MKYSGIDLHSNNSVVTVTDEEDRVIAEKRLPNDLSRIVGFLLPWRDELKAVVVESTYNWYWLVDGLQEAGFVVKLANTGAIKKYDGLKHSGDEADARQLAHLLRLGILPTGTILPPEQRAVRDLARKRMQLVRSRTSHILAVENIVARQQGAKIGGTQIKRLTTDEVDQMGLPADVALAIKSNLAVIITLNEQIDLLEKHLQEKVGKQMEYTLLTSVPGIGKILATIILLETGPIDRFAAVGNFASYARCVDSRHMSNNKKKGEGNTKNGNKYLAWAFIEAANYAHRFCAEAKRFYERKKAKTNTAVATKALAHKLARACYHMLKEQKSFDVTRCFA

SEQ ID NO: 92986 - protein, 362 aa, unidentified
MSKEDIYACFGGVRPDGSHVVKGSRKFGNNSSGIKQFIGWLKKKLAKYNAGSDVPFQMIMEPTGVYHEALLAFAYEEGLPVCLVLAQRVKYYLLSLNQISKTDKVDAKGICKMACQTKQRQWQPCSPNIMKLRSALRHRKSLLNSQTRYKNKLHARKHSSWSGSYEEESLQRLIAILDEELAAIEKIITKLYKQDEVLKDRLQKILDSVHGVGLITALTVVAETNGFTEIRSRKQLARFAGYDIIQNQSGQREGRTKISKRGNSSIRAVMHMASLTAIQKEGPLQAMFLRIHRRNPKIKMKAYVAVQRKLLLLIYTLYQKDAAYDPDYHKELQKELGKAKKGSPHFKSGLHGIDAEKSALPI

SEQ ID NO: 92987 - protein, 365 aa, unidentified
MDHVGIDVHKGASQICMITEGGELIERRVRTEASRLAEALEDRVRARILIEASTESEWVARCLEQLGHDVIVADPNFAPMYATRQRKVKTDRRDARALAEACVLGAYRRAHRLSDAQRHVRGRLGVRDALVRTRTRYIALIRSRLRQEGWRVPTGTAEGFSRRVLALPLPGRLRSEVAPLLAVMRQVTRQVTYSDERIAALTQTDARVRRLQSMPCIGPVTAAAFVAALDDAHRFARAHEVEAYVGLVPREWSSGETQRRGRITKAGSGRVRWLLIQAALSMLRLHDPRTAELRDWAGRIAARRGKKIAVVALARRLAGILFALLRDDTVYAPRTGRPGDNQPAPTRSRQGTHPSPNSDDDLNGE

SEQ ID NO: 92988 - protein, 331 aa, unidentified
MKSPIAIAAALGIDIAKLKFDVCLIKPNGKAKHKIFANTRHGFEQLIAWLDSHQVSDLHACLEATGTYGEPLALFLFEAGCLVSLVNPAAVRAFANAGLSRTKTDKADAELIARFCLAQQPKAWQPPAPELRELQALVRRLESLVEMRVAEENRLSSGVSAAVRQSLEEHIAYLIEQIKQTEALIRQHINNHPDLKEQSELLDSIPGIGEATAALLLAEIVNIKQYTSARQVAAYAGLVPRERRSGTSVRGRVCLSKIGNARLRKALYFPAITALRCSDFFKAWAEPLQTRGKSKMSVIGAAMRKLIHLAYGVIKTGKPFDPNWAKAIEIA

SEQ ID NO: 92989 - protein, 343 aa, unidentified
MKIRHPIIIGIDTHKATHVAVAIDTQGTRLAALSIPANSKGYLELERWSCGLGHVQAFGIEGTGSYGAGLSRCLLAQGHHVVEVTRPNRQLRYTQGKTYSLDAEGAARSVLSGQANSHPKTQTGSSEMIRHLKIARDTAVKSRSQAMVTLKTLIINAPADLREVLDQIKGKIGLIRHIAAFRPGDILNTLASAKAAMRALARRWLLLHEEILGHDKELERLVIKRAQDLMQSHGIATMTVAEMLILVGDDPTRIRSEAAFAKLCGVCPIPASSGKTHRFRLNRGGNRQANAALYRVAIVRMRSHEPTLSYVKKRTKDGKSKSEIIRCLADSTRQCNMLVISYE

SEQ ID NO: 92990 - protein, 348 aa, unidentified
MSISYSGKKVYVGIDVHKKTLAISAICEGVVVKKATITAIPSTLKDFLSNHFPGAEIVCGYEAGFSGFHLQRSITSWGHACLVVNPGSLEVASRDRVKTDKRDSLKIAEHLAHNRIKSVRIPTPENEEARMLSRSRSQIEEHRAQIALQIKSKLYQLGLIDPSNDRVMSRKYIEEVEALSLSGTFNFILKQFCASWRFYDEQLTSINKQLELQEQKDSKLEEVYRSVPGIGAVTSRVLANELGDMSQFKNEDCLFSFVGLTPTENSSGDSTRKGHITRQGNPRIRHALTEIAWRAIGQDEALRAIYDRISGRAGGKRAIVAVARRIIGRIRACFAKNETWKLNFQVKN

SEQ ID NO: 92991 - protein, 394 aa, unidentified
MYFCGIDVAKHKHAVALLDEHGQLCKAAFTTENTRAGMDLLLGELAALGGEVTVALEATGHYWLSLYDVLTRQGYPVVVINPLQIAAYRKSGLRKVKNDRTDAVWIADFLRISNLPPSSRDIPTLLQLRELSRFHYWLSEQIGDAKRKLLTILDRVFPEYESVFSNIFVHSSRALLKEAVSAQEFADFDLQELTELLTKTSRARFGVEKAKQLQEQARQSIGVGFLANAAQVEMRCLLAQIELLEEQQAEVDKAEAVLMEQIPQHITTVPGVGLITGAAILAEIGDVRRFPSEEKLVAYAGIDATVYQSGQFEAGERHMSKRGSPYLRLALWQAAQMATLHDEEFKAYYRKKRAEGKVHGVAIGAVCRKLLIRIYVILKENRPYVAREIAPQNP

SEQ ID NO: 92992 - protein, 386 aa, unidentified
MHDGTNLPVPERTASGGDCATLFVSLELSRSTWVATSLAPGSKKMSKHTLAGGNGRELLNLLARLKTRAEQRIAAPIKIVAIHEVGLDGFWIHRLLEANGVESHVVDPASVAVPRRHRRAKTDAIDGETLLRTLMAWRRGEPRVCAMTVPPNPSEEDCRRISRERAVLLRERIRHTNRIRGLLFGQGITNYNPLRKNRRECLEELRTGDGHSVPARLKAEILREIDRLELVLRQISEVEAERDAMLQPAEASSPAALLMQLKGIGAEFAAVLYLEGLFRHFENRRQLAAYAGLAPSPWKSGSIDHEQGISKAGNPRLRTTMVELAWMWVRYQPDSALSCWFRQRVGSERGRTRRISIVALARKLLIALWRYVTHGEIPAGAVTKPV

SEQ ID NO: 92993 - protein, 386 aa, unidentified
MNYIGIDISKYKHDCFIATETVSHQFSFENSQLGFNELLGHFKPLVKQEMIIGLEATGHYGENLKSFLTLHGYAFMEINPFLVKKFSEAHSLRKTKTDKKDAQMISTYMRSVDYKAYHHQSYHISALKSLTRLRFKLISMRTKHYNMMTKVLDIIFPEFKPFIREQGYSETSLYILKQFSSPNKIAKMNDVHFDKLRRLSKGKFNYPKFVKLKELAKSTIGVTQDHQLFKLKTSISYVKKLNQDIEETEKQIITLMDRYPTKIQTIKGIGIISAAIILCEYGDISLFSNPAEMLSYAGLDSTIKQSGTMSSTGKLVKRGSKYLRATLVNICMMVMIHNPVFYDYYTKKKQEGKHHRVALVHLAKKLVRVIHHLETHQEDFDSSKLQ

SEQ ID NO: 92994 - protein, 429 aa, unidentified
MRTESTPDARGPVFCGVDTHADSHWLCVLDWRGRKVLSRQFPADAAGYEALAGAIAAAGEPACVAMEGTSSYGAGLTRHLASLGMPVREALSPARMQRRRPGQGKCDEADAERAARAAMSGSKLGTPKSQDGWVDGVRCMLAARSGAVKARTSAINTARSLLTTAPEGLRSRFRGMGGTRLMEELPSVRSEGALGAALGALADLWAAARDAALDMERAIEASLEENCPALLAMYGCGPVSAAKLAVAAGDNPGRLRSEASFAAICGACPIPASSGKTVRHRLNRGGDRQANSALHEIARQRVMRDPETAEYAERARGRGKSDREVMRCLKRYVAREAYRALMHPHEVRKPEDASALVAARRAAKISQVRAASILGTSEKYISLLERGQRELKPIRRAYEAWVEAGLPLDWDRQAFEAERKMDSKKDLAI

SEQ ID NO: 92995 - protein, 428 aa, unidentified
MISAVREKCAGLDVHRDTVVACVMWGPAEAEAQWKIETFGTTAAELEKLKHWLEAQECREVVAESTGPYWEPVLHVLESSCHFCLANPQEVKSRRGHKTDKKDAWWLAHLYRHDMIRPSYLPGREVRELRMLTRRRREVVRGAAQEKNRVQKLLEQSSIKLRSVLSDVFGASGAAMLEALIVEGESDPQRIAERAKGSLVKKKAQIAAALEGFHLPAVHRFLLRQALENLARLVEQVDELEAEIQQYLQAHPNFAKSAELLESVTGLNQVGAAETVAEVGPDVKAFPGAGHLSSWGGVCPGNYESAGKRCSSRTTKGNPYWRATLIESAWAASRKKGSRFQACYQRHSPKLQHKGAILAVAHALVYAIYNVLSYQRPYQEAPAVEIGQGKAKRLIRHHQKRIQHLQKFLSSKPEPELAYALRRLEAAE

SEQ ID NO: 92996 - protein, 346 aa, unidentified
MEISTYVGFDVSKSSIAATAVDPLGRRRRQEKLGTNDEEIRRFLEDLPGPIQVVLEACNVWEHIYDAAAATGAQVLLANPFQTKLVSKTTLKTDRVDSEKLAKLARLQAIPEAYVPTTEQRALRKLVRERVFYTHLWTGVANHVYAVLLQKGISFRPGLLQRRTLRHSVADPRFPEIERGLQELASIEEITHSLDRAIREAFEASPEAQLLATIPGVGKFTSVALVAFLSPIERFSSLDGVVKYCGLCPSVHQTGTTSYNGPLVWDANHLLKWVLVEAQWNVRRHEGKGDVYRVGHRVARRKGVGDGAVAAARKLVRITASILRRRSPYQPHAPESSSRQRPIAAS

SEQ ID NO: 92997 - protein, 343 aa, unidentified
MKLHVLGIDLGKTDFHLVGLDSTGRVVIRKKCSRTQLLAFTANLEVELIGMESCSGSHFLGRALREQGHQVRLMPAQYVKPYVQTNKSDFLDAEAIAEAVQRPRMRFVPIKTEEQLDLQALHRVRERWVMRRTAVVNQIRSLLLERGLTLPKGRGYVDRQLPRILEDGELRLSGCFRVLLAQLKLELDQLTARIEEMDRVIQKTAKENEACQRLTEIPGVGPVTATALIAAVGNGSTFQKGRNLAAWMGIVPGEYSTGGKQKLLGISKRGNKYLRTLFIQGARSVLQQRHKQAPGLSSWLAQLLARAHQNVVIVALANKLVRMAWAVLCKNERYRAPVLAVTT

SEQ ID NO: 92998 - protein, 398 aa, unidentified
MRKPSLELRVGVDVGCHSHNVAIGLSTGEILEEFSIVHEPEGFRQFFSRIEENERDYGCPVAVAMEGYNGYARPLDTLVRTHNYRLFNINNLKLARFKEIFPGAAKTDDIDARKALELFQLRDHLPIAKDVLQEIKATPQENDILKRLSRRRRRLVNERVRVLNNLQADLQSVCPGLLEITGEAGNLWFLRFITSTDDLRKLTRMRETTIRKISGIGAKYTNIILKWQKTAEFSPETEWVSDMIQQDAERVLALHYQIETLETRMAEIAANSNIVQLLSTMPGFGPITTAELAGEIGTIERFESESSLALYLGMSNLDNSSGKYKGSKAPKQVNERAKSAMMIAVDRHRKHAPQSQKYYDKKRTEGKKHNQAVRALGRHLCRAIFKMLKENRGYFLAK

SEQ ID NO: 92999 - protein, 322 aa, unidentified
MRYIGIDVSKATFVVAYSSDKGGEIRTFNNTTTGIKQFIGALPKDGSIHCVMEATGNYSALLLYMLNVAGITVSMENPLKIKNFARAMLSTVKTDKIDARLIALYGEKMNPQPFKIQGEAILRLRQKRTVIRQLTKQITAMSNLRGSLAYLPVPDKGATHTVDETVKFLKKKRDRLQAELTDLVKVEFSRQLALLTTIKGIGITLATALIITTGGFTYFQNAKQVSRYLGICPTYEQSGTSVNIRGHINRNGDAYTRGLLYVAAWTASRFNTKCGETYTRLRQNGKPGKLAMIAVANKLVRQAFAVVTHDKEYVDGFVSNRP

SEQ ID NO: 93000 - protein, 412 aa, unidentified
MTVTNQFAAHVGLDWADKKHDVCVQFKNGERVFHVIEHTAEALDAWLTELHQKVKGRIAIALELKKGPVVYALQKYPFITVFPVHALSLARYRQAFSPSGAKDDPQDAELALELMLRYPQKIKAIEPDNANIRLLQQLVEQRRQLVEDKRRFVNRIINTLKQYYPQPLEWFSHRGSLLLCELIIRWPSLQQLKRARRDTIRNFLNAKGGRAIALTEQRVASIDNAIPLTTDPSVIEANALMATALATQIKVVSEIIKTYDERIEALFDTLPDAGLFKSLPGMGPCMGPRMLAALGDNRDRFNSAEEIQNYAGVAPVTERSGQKSWVHWRWQCAKFVRQTFVEWAAKTVTSSYWARLYYQGLREKGKSHQSAIRALAFKWIRIIYRCWKTRTQYDEAKYLLALEARHSPLLKP

SEQ ID NO: 93001 - protein, 387 aa, unidentified
MSTIYCGVDFHARQQTVCYLKTEDGELVVIELKHQNKEEVRAFYAQFTGQVIVGLEASGYSPWFERMLESLGHEVWLGDATEIRRRARWRQKNDRRDAELILELMVHDQFPRLNRPTPESSEILRMLRYRQKLVKMRTIDKNSLQALALQSGLSLRTKLFTKAGKQQLRTAVMSPVMEQQRDQWLTLLETFDQRILETMLWLKQQTQDDQRITRLRTHPGIGLLTALGLVHTLWPVSRFRNQRKVTAYAGLEPMERSSAERKKFLGISKAGSRLLRYLVVEAAHTAVKKDDDLKRFYRHLEARRGRPKAKVAVARKLLVRSYIMLRDEIDYAEFQQRAVAARLARQSTRSTIPVSLIGQPASAQRQARATETISNRGSEDQGDTRSA

SEQ ID NO: 93002 - protein, 322 aa, unidentified
MNKNKHFIGIDISKKVFDVWSAELGHKQFTNNPDGFEKFMLHLDGSCWCVMEYTGSYYNQLALFLYENKIAVSVINPLVIKRYIQMKLQHNKTDKSDAKMIVRYAQEQNMSRWQPLPGYIDHCKDLHTTISLYFKQSTALKNKLHSFLDKGIKGKIITSIKRQIRQITAEIKLLEQALEDTIKEHEQQLLSNLLSIPGIGKKTAIMLIVCTNGFKTFENDRQLSAFLGLSPVIFTSGTSVRGKARISKKGNPLIRNHLFMCSFTAYTKNPQCKALFGRLVAKGKSKKLALIAVTNKLLAQALAIAKSGLKYDPNYKALLTSK

SEQ ID NO: 93003 - protein, 351 aa, unidentified
MNEISMIGLDLAKNVFQIHGVDVSGAVVLRRQLRRGAVEKFFAQLPPCLVGMEACGSAHHWARLIGSYGHEVRLMPPAYVKPYVKRNKNDGRDAEAICEAVSRPTMRFVPVKSVQQQATLAVHGVRSLLVRQRTMAANALRAALSELGIVAAQGYDGLRQLIARLEEPSAQIPEDMRHALLILAGQWQTLDAGERMLEREIVKAARCNQDARRLMEVPGVGPIIASMVLAKVPDAKVFRSGRDFSAWIGLTGRDHGSGGKHRPGRISKQGDRMLRALFITGASAHLRHQKARGISDPWLRELVARRPYKVAMVALAAKTARIIWAMMVKGEAYHASAPAAASSSATAAAIA

SEQ ID NO: 93004 - protein, 332 aa, unidentified
MMAQSDLVVVGLDVAKDKVDACIRSLSQRQTFPSTAEGRRALIRWLRRHKVSKAAMEASGGYERDWARALREAGIEALIVDPKRVRNFARSAGRLAKNDPIDAQMIAWFAEIFVEAKGQTYDAAREKLAQIVNARQFLIEMRTRLRNRREHSVPEAVRKMQAQLLKSIALELAKIEAAIAATIKAVPAFAERAAIIESVPGLAKGTSGGLIAGMPELGQASNDGTAALLGAAPYDNDSGKRRGERHIQGGRRWVRNLFYMACMGAATRHNPVLRAFYDRLIAKGKPKKVAIVACMRRLIVILNVMIARGEKWDPSRYQLSEPARLPPSACAA

SEQ ID NO: 93005 - protein, 343 aa, unidentified
MQTVTTIGLDIAKSVFQVHGIDAEGKVVIRRQLKRRYVLAFFQKLAPCLVGIEACASSHHWSRELKGLGHTVRLMPPAYVKPYVKRQKNDAADAEAICEAVTRANMRFVATKTPEQQSCLMLHRTRHLFVRQQTAVINAIRAHLAEYGIVAPVGRNGVEELLGVVADPSDKRVPEVARACLAALGAQLRMLKTQILEFDRMINAWHRSNETSKRLDEIPGVGPALATALVASVADPKAFRSGRDFSAWIGLVPKQHSSGGREKLGSISKQGDRYLRCLFTAGALAVIRYAKIHGTKHRPWLTALLARRPTKVAAIALANKIARMAWAMMAKNERYKEPLALAA

SEQ ID NO: 93006 - protein, 374 aa, unidentified
MGNIIEAFVAFDTSKLRNAVAIAEAGRAGEVRFLGEIENTEAAIAKLVRKLAAKCGRLTFCYEAGPTGYGLYRQIKSLGHECMVVAPSLILKKPGERVKTNRRDAVALVKQLRGGDLTAVWVPDPRHEAMRDLTRAREVAVEDLRCKRQQLSAFLLRQGRRYPGERAWTKAHRDWLVSQKLEYAELRIAFEEMLLAMRQAQERIERLEQAIRMAVPDWSLAEVVTALMALRGIDFISATAFLAEIGDLSRFRTPRELMAYLGLVPSEASTGDTVKRGPITKAGNRRARRILVECSWSYQHPPRVGKEKQERVAAAPRAVREIAWKAQCRLSARYRALTRKGKLKTVAVTAVARELFAFIWAINRQIANPAAAAR

SEQ ID NO: 93007 - protein, 351 aa, unidentified
MESQQTAPPKLFIGIDIHKRSWKVHCATDLFGGKSFSMNPEPEQLKDYVLRHFSDYEVSSAYEAGCCGYSAHRAFESYGWRSLVVNPADIHRKGKERHTKTDKIDAQLIARELKDGRLDGIHIPEIYREELRSLFRRRNDLVKDFRRIKSYIKMQLLYFGIKEPVEFDNDHWSHKYRKWLDDMVFKYPTAKATLDSRMRFFRFVDQELRDVSTELRRYCKTHHKKDYMLLRSIPGIGGIVACGILCELGDLRRFNSVKHLAGYVGLAPGVHQSGSNYKTLGITPRAHRLIRSYFVEAAWQAIRADPVMQSYYRKHQGRNVKSIIIKVARKLLSRTLAVIKTETPYTIGVIE

SEQ ID NO: 93008 - protein, 385 aa, unidentified
MPKLKDLSRSLITLEQDATLIAVIEMGQSSWLVAGIVPGIERQPLKKLGVDESALLKLLHRWREEAEKAGHRIKRIAVAFEAGRDGFWLARWLNAHDIKTHVIHASSVAVSREHRRAKTDRLDTELLKRSFLGWLRGERDHCKMVAIPTIKDEDAKRPNREHESLVGEQSRIINRMKATMARVGIRGFNPKLKKAAERLDGLRTPEGEPIPANTLAELRRDMVRRRLISDQIKQIEDARLGRLTQAPSDGPHAMVRLLARVIGVGVETADMLVHEILSRSMRDRRAVARYAGLTGSPDESGKKRRQKGLARSGNARVRRGMIQLAWRFLIFQKDSALAQWFRARTENARGARKTMIVALARKLLIALWQFVREGVVPDGVVLRPA

SEQ ID NO: 93009 - protein, 371 aa, unidentified
MKKIAYLGVDYHLNHLSIAVKVSGKKKFYDVIRLENKDKTVKKYLKKLSNDFEIKACYEASSSGYVFQRKMASWGYHCDVIAPSLIPKKRGERRKNDFRDARELARLYAYGLLTVVHPPNEEEESVRSLIRCRLAFKASEKKVKQQINALLLSHDYRWLKSKWTNQHRKWLSELELPYQYLQQVLDEYVEHLGYLQSRIQYLDGQIEKLAQSDIYVESVKKLKAFKGIDTLTAMLLIAEITDFRRFPNPRALMAFLGLIPSEDSSGDKQKGGGITRSGNHRCRKMLVESVQHYAKIPRISLKMRANLAQIDAQSAYIATKCLSRLHKRYWALTMKGKIRPVVITAIAREFVGFIWAMMRPETSMTYCVKEQ

SEQ ID NO: 93010 - protein, 346 aa, unidentified
MTHSTTVGVDLAKNVIQVSVVSARGKELSNRSLTRKKFAEFLGKQRPSLVAFEACATAHYWARAAQRHGHEARIIPAKFVAPFRQGHKTDSNDALAVAEAARRPSIKEAPMKTVEQQGLQAIHRSRQLLIQESTALSNHLRGLLMEFGVVIPQGFASLLRAVPEVLEDGENELPDMYRPTLHRMYTRLLELREHIETMTSEVEVLVKQHPICSRLTALEGIGPIGALLLYATLGSGNAFNGSREFAAYLGLAPRQYSSGGKTNIVGLSKKIGNSRLRSILILGARAYTYRLKEPKSSKDRWLKDLIDRNGHSRAAIALANKNVRTAWAMVTQGTEYQRRGQLKVAA

SEQ ID NO: 93011 - protein, 420 aa, unidentified
MKYAPVSRPGPHPGGVTAGIDWASADHAVCVVDRAGEVVSRFSVEHSAEGLRALVSRLARAGVREAAIERGDGPVVDALLAAGVTVVVITPRQIKNLRSRYGSAGNKDDRFDAYVLADVLRTDRARLRPLIPNSPATVTLRQACRARQDLVRHRVAVTNQLRAHLLCVFPGAVGLFCRLDSAISLAFLARFGCQDRADWLSEKRLAAWLKGAGYSGRTDPAVLYQRLQSAPRGATGNEGTASAQVTRALAAVLATLNTQIKALEAEIAAQLAAHPDGHIFTSLPRSGTIRAARLLTEIGDCRAKFPDPQSLICLAGAAPSTRQSGKHKAVTFRWAVRKQLRGAVCDFADGSRHASPWAARIYNDAIARGKDHPLAVRILARSWLYVIWNCWHNRVPYDPTQHRALQSLLAAQATGAHQAA

SEQ ID NO: 93012 - protein, 408 aa, unidentified
MELLHPRCGALDVHKDVVMACARIQVREYAKHPTAEFSTTTSGLLALADWLEEHQCQHVAMEATGVYWKPVWHVLEGRFQLLLVNPAHARNVPGRKSDVNDAHWLADLLAHGLIRASFVPPQPIQELRDLTRTRKQLVRQIARHTLRIQKTLEDANLKLTGVISNLLGTSGRAILKALIAGETDPERLLEHTTGQLKAPRERLLEGLRGAVTDHHRFMLKLHLRQIDSLESGIRQLERQMEKLLRPFRERVEQLVTIPGVSDTVAQVLIAEIGLDMTRFPTAGHLVSWAGLCPRMDESAGKRRSNRVRQGAPWLKTTLVMAGWAAAGARDTYLRAQFQRLKTRRGPKKAVVAVAASILTAAFYILRDHVPYQDLGADYFDHRDRTSVVRRLRRRIEALGYRVELHHVA

SEQ ID NO: 93013 - protein, 326 aa, unidentified
MCTLGIDVSKNKIDLCLLTAGPGGKKKHKVLTNEPAVARKVVDWLNAQKCVPESVTVVLEATGIYHENLAYGLHEAGVSVCMANPCRVREFAHGMDILNKNDAVDAFVLACYGELKSPAVWVPPSPEVRKLRALLRQRDALREDVQRTVNRLEKANSTSTPQEVIRSLERMKSWLNEELARIEKLITDHTDNDPGLKADLDLLKSIKGVKDQVGREMLALLKDGTFKSASQVAAYLGLTPVEKTSGSSVRGRPHMSKTGPSGVRAKLYVAALTASRWNKQAKAIYERLVAKGKAKKAALRAVMRKLVHLCFGVLKTRLPWDENYVM

SEQ ID NO: 93014 - protein, 391 aa, unidentified
MVCVGIDVAKDKHDCCILDSDGMVRADCFTIPNNMDGFKQLLQTIRNCTKKSGKIKVGLEATGHYSYNILGFLLDNGLPTYVINPLHTNLYRKSLSLRKTKTDRVDARTIATMLLSDVDLKSYTDIAYHNEELKSLTRYRFDKVQECAKLKQSVSRLATILFPELEGLVSSIHGTSIYALLSEYPGAKQISEVHLTKLTNLLTTASKGRYGKEKAIQIREAARASIGSVMPAKSLELKHTIKLIQELASEIDEIEDSIQKIIDELNPPILSIPGMGVNSAAVILAEIGDFSNFSSPDKILAYAGCSPSTYQSGKLTNCYAHMEKRGSRYLRHALYNATKYVCYWNPVFAEYLAKKRAEGKHYNVALSHAMKKLVRLIYALQKSGKTYLTAA

SEQ ID NO: 93015 - protein, 346 aa, unidentified
MAYYAGLDVSLEETAVCVVDATGKLIKEARVSSEPEALIDFFDNLGLPMERIGLEACSMTAWLHDHLTAAGLPVVCMETRQAKAAMGSMPVKTDRNDARALAQIVRTGWFRAVHVKSAPCRSWRALLTGRRMVLNKLRDMENGVRAALREAGIKLGKPGRKQFADRVRELVANDPVLIALVGPLLTIITTMTVELAGLTRQVLVIVRDEPVCRQLMTVPGVGPLTALTFRATIDRPERFRRSRDVGAHLGLTPRRYQSGETDVQGRISRCGDELARTALYEAANTLLQRCSKWSSLRAWGMKIAKSRGMARAKVAVARKLAVILHGMWRDGTEFRWGKEPDARAAA

SEQ ID NO: 93016 - protein, 334 aa, unidentified
MWHVGIDLHRVTVVMAAVNDAGEVMDPITIRCADTAAIVEVVKKLGCFRAVIEASGTYRWLYDLLRAYGTILLAHPHRLRAMIQRRTKTDKLDAQLLANLLRINQIPLAYIPPEPYHQLRELTRCRARLGRGLAEAKVRLRAILARRNVEAPYRVPFGRRGLAWFGEQDFGPIENLVRDELLGRFAHYSRQIAVLDQRLVEVQAEFAETEALLDIYGIGLFSALVIVAELGEVERFRSAKQAGAYSGLTSRVHQSGGHCYRGSITRQGSPWLRWVLVEAAMKAVRKDVGLQNFYTRIRKRSGAKIARVAAARKLAEICWKRLRRWQREHASGAA

SEQ ID NO: 93017 - protein, 409 aa, unidentified
MKLFVGIDVSSQDMKACVMNLDGETLSSLTVENNLTGASYLRNQIVDIARKNLIQEIQIGMEATSVYSWHPAMFFHEDESLKKFNTKVFTINPKLIKKFKESYTDLDKTDHIDAWIIADRLRFGRLRLSAVMQEQYIALQRLTRMRYHLVHNLTREKQYFLQNLFYKCSSFTAEVKSSVFGNAMMELLLEKYSLDEISSMDLQELAHYLQEKGKNRFTDAECIAKSIQKAARSSYRLSKCVEDSIDLLLATSIESIRSITKQIKELDKAIQKLLDGIPNTLQTIPGIGPVYCAGILAEIGQIERFDNQASLAKYAGLTWSKHQSGKFQAEETNMIRSGNHYLRYYLVEAANSVQRNEPEFRAYYLKKYHEVPKHQHKRALVLTARKLVRLVDALLRNDQIYTPRRKVNK

SEQ ID NO: 93018 - protein, 388 aa, unidentified
MIYVGIDVAKDKHDCFITSSEGEIIKDVFTVPNNIDGFNLLLSSIPDVPKDKIRVGLEATGHYSINLMRFITENQLPLVVLNPLQTNLFRKARTLRKSKTDKIDANLIAIMMHSGNFKLHSDLSYHLQELKSLTRHKSRIKENLSKYKISLNRILDMMFPELADLVYSLNQKSTYALLQAFPSKNALASAHLTKLTNVLHQNSRGKYNREKALQIRKTAAVSIGSDSRALSFELLQVLSFIEMYTCEICKIDDEIKAIMDKMKSPILSVPGISYGLGSIILAEIGDISRFESPSKLLAFAGLEPSTYESGKFIASGMKMVKRGSPYLRWALLEAARLISVKDPTFRSYYLKKKAEGKHHFVATSHVAKKLVRVLYHLLTRQLSFIPQS

SEQ ID NO: 93019 - protein, 343 aa, unidentified
MQAPRHIGIDLHRNQFTCCVRLENGRNYLTEWKLEDLPRFVKKLRPNDEIAVEMTGNTRLFRDAIARHVARVVVVDPNQFRVISHSVKKTDPNDARNLALYLEKELLPEVRMKDKTQAQLASLTQTRDTMVKLRTALKNKINNILSAHGINLEKEALSSEKKLNEVVALHFDPMVRIELKVIVEQIRSLNQSIVELEKTIADEGSKLEGHKNLTSIKGIGPLTGSILLSVIGDIHHFADEGKLAAYLGIVPRVSKSNQTEHTGRITKRGSKLGRTALVQCALIAQRYSPYLQRYYQRMKAQTHSTGKAIIALARKLLGIIYRTLKNNWVFEDFPNFVLAEATP

SEQ ID NO: 93020 - protein, 353 aa, unidentified
MNNSRNKAEVILGVDTHLDTHVGVLLNAQGHLLGCLMVTTNISGYERLVTWANSFGCLKRAGVEGTGTYGAGLACVLRKHGVEVFEVNRPDSSKRRLQGKSDPTDAENAARSVLSGSATAIAKTQSGAAEMMRVVSVARRSAVKAKTQAMNQLRTLLVSAPQDVRERLWKSKPADCAKGCARVRSLGSTEFLHTLTTTLCLLAKRWLLLADEVEKLDAMLDALTHQHARRLREQFGVGPQTAAVLLSTAGNNPERLRNEASLAALCGVNPLPASSGKTVRHRLNRGGNRAANNALWTITMVRMRGGPQTQSYVARRSAQGLSSKEILRCLKRYIVRELYPLILADLADSARAC

SEQ ID NO: 93021 - protein, 410 aa, unidentified
MKIAGIDVHKKVLMVVIVDGSAPEEKPTRRRFATMPSQLHQLLIWLQGQGVEEAVMESTAQYWRSVWLELEPHMRLHLAQAFSNRAPRGRKHDFKDAERLVRRQIANELILSFVPNGEQRIWRSMTRMKLQLTRDRVRLQNQMECLLEEMRIKLSIVVSNLLGASGLRILQALAQGETDPKKLAELGDERLQCTEEQLVDALTGRVQPMHREMLSLQLQRLQLIDQQMAQLNGMIAQAMKAHQDAVIRLAEVPGLGVDSAQQIIAEVGAQASTFPSAAELTSWVGTCPGKEESAEQNRSSRSAKGNKYLRRVLNQAAHAAVMKKGSYFQGVFRRLLPRLGYQSAIWAIAHRLCRLVWKILHEGVRFIERDCEADPRAKKQRAQMLVRALRKLGYQVTITPLNQVTATNAI

SEQ ID NO: 93022 - protein, 364 aa, unidentified
MNATAALPIVGVDLAKSVFQLAIADANWRVVERQRLTRTQFERWFANRAVGLVVMEACGSAHHWARWLSGLGIKVRLLPAPYVRAYVKRNKTDAADAEALLEAARCADIVPVRVKSVDEQALQALHRTRSLWMATRTARINALRGFCREFGIAIAQGARVGLEQIARVLAEPNSAIPDLIRETMKLLVEEIRLLEARVGQLERELTQTARQSAACTTLLSIPGVGLLTATAMVAATSANVSHFREARHFAAWFGLTPKEHSSGSTRRIGRISKRGDRYLRMLLTHGARSVLRAATTAVQSGRTLDRLRAWALAVQTRTNHNQATCALANKLARICYACLRDGSPYGQVRTLEKKIGRSAYPIPA

SEQ ID NO: 93023 - protein, 304 aa, unidentified
MDQVIIGVDPHKLPVTIEARDSQEILRATGRFGTDTAGCRGLLKAARQWPARVWAVEGASGIGRLVAQRLLAGGERVLDVPARLAARARVSGTGQGRRTDATGAHAIVMVALRDKGLRELGSGPELMVLRLLCDRRDEISRARAQALNRMHRLFLELLPGGAPVKKSTAQYKALLARVRPRDLAGRTRRRMAAGELAGLDRYDAKLKIMKAGLKAAVQASGSNLMDIHGAGPAGAARILADVGDVSRFPGRSHVASWTGTAPVDASSGEHTRHRLSRAGNRRLNHVLYMAGIAQLRNDTPGRAC

SEQ ID NO: 93024 - protein, 347 aa, unidentified
MRFYNQQHKYYCGIDLHARKMYVCILDQKGKTHVHKNIKTDPEMLFELIFPYIDNIVIGVECVFCWYWVADLCSEHKVTFVLGHALYMKAIHGGKTKNDKIDSYKIAALLKGGNFPIAYPYPAKMRATRDLLRRRMYITRRCGELVAHIQNTNTQYNLPAFAKKISRKYNRKGVAERFEDPAVKKSIEVDLAMIDSLNPILAQLEWYIEKTARQHDYKTLYLLRSIPGVGKILGLVILYEIHDIKRFPRVQDFSSYARLIKPVKESAGKWAGKTNKKIGNAHLKWAIKEAAILMLRESGQAKDYLARLQKKYNKGKALGILTHKLGRAIYYMLKNNEAFSMEKFFKQ

SEQ ID NO: 93025 - protein, 387 aa, unidentified
MLDHLSYGPAAIRTQFGAIFVSLELSRSNWLVTSLSPGQGEKMSKRSIQAGDVAGLMKLFADLKRGAQARTGRSCPIITIQEAGLDGFWLHRVLQQEGTESHVVDPASIATPRRRRRAKTDRLDGETLLRALLAYKRGEPRVCAMVVAPSPEEEDRRRLCRERRTLIAERIEHVNRIKGLLFAQGISGYMPLRHDRRVRLDALHTGDGRVLPSHLRAQINRELDRLELLLEQIKSVEAEQDALLAGASKPAGERAAPRVVTMLLALKGMGPNFAAVLWSEAFYRQFSNRRQLAAYAGLAPTPWQSGGIAREQGVSRAGNPRLRTTMIQLAWLWLRHQDGSALARWFKAHSHRGRKTSIVALARKLLVALWKYVTAGIVIEGAQMKNA

SEQ ID NO: 93026 - protein, 358 aa, unidentified
MLLAEHIDFVVGVDTHKYTHTAALVTPAGRLVAHLTVTADGAGYAQLLRFAREQAAGRRVWAIEGTGSFGAGLTTHLLERAEWVVEIDHPKRPARRNGAKTDELDALRAAREALARDHLAQPRRRGDREALRVLITTRDDAMRARTKAICQLKDLLVNAPEHLRRSLQGLPTATLVERCARLRTTATQSAELGCTIVALRITARRALALQAEAAELEALLEPLVQQVAPVLLAEPGVGPVSAAQLLCSWSHAGRLHSEAAFAALAGVAPIPASSGQVTRYRLNRSGDRQLNRALHTIVVSRMLHHAETHVYVARRTAEGKSPREIKRCLKRHLARHFFKLLERGAARCAGEFEFERAA

SEQ ID NO: 93027 - protein, 352 aa, unidentified
MLIIGCDFHPGFQQVAIFDNLSGEIQEKRLQHRAEAEQFYGSLAGQEVRVGMEACGHYPWFERLLEGLGIELWMGDAAQVRASVVRKQKTDRRDAEHLLQLLLEGRFPRIWVPSLEVRDVRQLLVHRHKQVQARTRTKNQLQAMALSCGVQKKYKLWTKAGRVELEQLPLLRYAAERRKRLLEALDGLEAEIGELDRRVEEEARRRPEAELLMTHPGVGPVTGLAMVLTLGPAERFGSAKQVGSYFGLIPSEDSSGGKQRLGKISKQGSSFLRFLLVEAGQTAARYDPQLKRFYRRLAARKNRSVAKVAVARKLATRLYLMLREGWTYAQLCQAVMQVSPSHSVAGESEPSA

SEQ ID NO: 93028 - protein, 355 aa, unidentified
MKIKIPLITIGLDLGDKKHAICVLNADGEIIDERTITNHRESLRRLSQKHPGARIAMEVGSHSPWIKRFLTELGHEVFVANPRKLRAIYTSDRKSDKNDARMLAKIARMDPQLLHPVEHGTEEAQRDLLQVKLRDNLVRQRVDIISSVRFTLKSLGVALPSPNSACFAKRCRTLLVERDRALLDSVEPSLQVIDLMTQKIRELDRAVETLCETKYPETMRLRQIVGIGPITALSFVLTIEDPELFENPRDVGAYLGLVPKRDQSGGLDKQLRISKAGDAYLRCLLVGCAQYILGPFGPDSDLKRHGLMLAERGGGRGKRKAVVAIARKLAVLMLTLWKHGRDYEPLRGVEPAQAA

SEQ ID NO: 93029 - protein, 400 aa, unidentified
MDETQRFRWFLGIDVSKETFDGCCINMKGERLFSLSTSMNRKGFQELIKQLSGPSVSQESTLVGMESTACYHVNLYSFLISLGYTVMVMNPLLISNFVKLQLRKTKTDKKDATVIAQFLLLNRDSLSQTILSSDISDLRDLSRQRESLVDQMSSTKSEIKRLLTMTFPELEHISGLFSKSMLRLLCHYPSAASIKQAKRSKIAKILIPGSYGKQTDVSVDRILKAAKVSVGTSSATKEIIIRQKASLLIQWEQHLQELTDILIELCEGKIQREKEILTSMKGIGEKSAVNFLIEIGGDMKQFESHKKVIAMAGLDPALYQSGKIDRKGKISKRGNRHLRRVIWIMTTKVIQFNERFKQYYLKRIKDGLPYKMAVLATAHKLIRVMFAMLKNKTLFDPRMN

SEQ ID NO: 93030 - protein, 465 aa, unidentified
MAARKPRVKRMSARIVDDEDYQLRHERVAGIDVAKASGMVCLRLPPEPGKARRSSKTWEVTATVPEIAEAAAELRAAGVELVSMESTSDYWRVWFAVLEDAGLSVQLVNSSQARNLPGRPKTDKEDAAWIARLTEMGLLRRSFVPPPEIRAMRVYTRQLVHLTQDRTRYWQRLEKLLEDALCKLTSVASKLAGSQSCMAMIRAMIAGERDPHALAELAMGPMRAKRADLVKAFTGMRFGEQHAFAAAAHLRAIEFLDAEISALEDRVEAHLAAVPAAWGVDADGATGPEAGRGPDAAVLAAADRLDEIPGVSRQMALGLIAEIGLDMSRFPTPGHLVSWAGLAPVAVQSGPRTGRGKKGKGNVYARRIAALAASAAANTATFLGERHRRLASRPGGGRTKASCAVGRSILIIVWHLLADPAARYRDLGPDHYARHSDKNRKARSHKRQLEALGYDVILTPRDEAA

SEQ ID NO: 93031 - protein, 345 aa, unidentified
MDYFAGLDVSVKETSVCIVDDTGRLVREVKVASEPEALLSVVSNPVWRFKRIGLEAGPLSQWLFSALAEAGLPVICVETRHMRAVLQAQINKTDRNDARGIAQMMRAGLYRPVHVKTLRSQKLRMLLTHRKLLQSKAIAIDNDLRGTLRNFGLKVGVVGALKFEARIRELVEDLPDLAELVEPMLVVRRTLREQIGILHRLLLAIVHNDDVCRRLMTVPGVGPVVALTYRATVDVPARFRNSKAVGAVFGLTPSRYQSGEINRTGAISRCGDEMMRAMLYEAAHIMLVRLTKWSWLKAWAMKIARHRGIKKAIVALARRLAVIMHRIWVDGTEFRWTREQVAAAA

SEQ ID NO: 93032 - protein, 353 aa, unidentified
MEKLTTVGIDLAKDVIAVCVLDVHGAAMERRVLRRDAFERWAEQLPTSNVAMEACGSAHHWGRWFAARGHTARLIAAEFVVPFRKGGKNDTADAEAVAIAARQPTMRFVPIKTVDQQAILAWHSAREGWKEERTGLLNRMRGLLAEYGVVIARSADRFLAALPKLSEDSRLPDPVRALVLEAREHFAALHARLARCDGQIAAHARNSPAAQRAGELLGVGPVTSSALAAMVPDAKVFRSGRQFGAWLGLTPRQHSSGGKTRLGRISLRGNVYLRTLLIQGARSTLQAAVNTPPSRASRLQRWIIELYARKGYYKTLIAIANKHARILWAMLAKDQHYDTSAWQRHPMTQPCAQ

SEQ ID NO: 93033 - protein, 387 aa, unidentified
MIAVGIDIAKRTHEACFMGQDGRQIGKGRRFHNNRRGVRALLDDLQQLPEPVTIGLEATGHYWLAVHDELVRAGHTVQVLNPLQTHAYRKTTIRKLKTDRQDAWLIADVVRIGRGRAAYVPDETILQLRELTRFRWGLVDQIGDAKRRILTILDRVFPEYETLFSDVFIKSSRALLERATTAAEFADADLDELTAVLKQKSRGRLGRDKAEALQAAARESLGLTRLGGVASFELRALLDQITFLEHQVAAVEQQIEALLATIEQHVTDIKGISPVMAASLIAEIGDVQRFQRFESLVAYSGIDPSVVASGEFKATETHMSKRGSPHLRRALWLSAITASQSNPDPAEYLRRRLDEGKPWGTAMGAVARKLLSRIYVILRDNRPYEVR

SEQ ID NO: 93034 - protein, 423 aa, unidentified
MLEPAHDDEQLVERIAALDIGKEEVVCCIRVPDPNAPGKRLQEVSTHRTMTRSLLVLCDRLRQAGVTRVIMEATGDYWKSPFYLLEAAGFDAWLVNAKDVKHLPGRPKSDKIDSVWLCKVGERGMVRASFVPPPPIRLLRDLARYRSDLVGVRTAEKQRVEKLLEDAQVKLSIVASDIFGVSGREMMQALIDGERDPKVLAQMARARMRAKIRDLEEAFYGCRFDDHHTFLLAKMLARIDAVDADLAEVETRIEEAIVPFADAVERLDAIPGVATTTAQVIIAEIGVDMTRFPTAAHLASWAKFSPIISESAGKRKGKNATGKGNRYLARVLGEAAVSAGKTDTFLGERYRRLARRIGKKKAIVAVGRSILVIVWHLLSDPSVDFVDLGPDHYDTRGGTQRAIRHHVNRLNELGYQVTLNPAA

SEQ ID NO: 93035 - protein, 409 aa, unidentified
MEVIVERSAALDVHKAQVTACVRVPGPGRERVQEVVQFQTTVRGLLTLRDWLRAHRVRQVAMEATGVYWKPVWAVLEDDFELLLVNARHVKQVPGRKTDVSDAAWLCQLLEAGLLKASFVPPKPIRQLRQLTRYRKALIKERQREANRLHKALEDTGIKLDCVATDILGVSGRAMLDALCQGTTDPEVLADLARGKLRKKLPALKEALEGRFDSLHALLVGSILAHLDFLDEQIERLSDAIEEQLHPFQPAVELLRSLDGIETRTAQNILAEIGVDMSVFPSAAHLASWAGQCPGNDQSAGKRRSGHTRKGSKWLNDALKDAAMAAIRTNDSYLQAQYQRLRPRVGHGRALGAVKHTLLCTCWQMLTTGELYRDLGGDYFRPRDPERQTRRLVAQLEALGHTVTLEEAA

SEQ ID NO: 93036 - protein, 366 aa, unidentified
MTSVAPAGERIYLGMDVSRDKIAVAVLRPGQDVPAVEMISHDGEMVRRLIGKFADRSVLAACYEAGPGGYELHRLLTSAGVACDVVAPALIPKAAADRVKTDRRDCVRLALSHRAGMLTAIRVPSEPEEAVRDLVRTRADLVDDRKRMMQRIGALLQRHGRVWRAPRWTCQHRAWLDRQSFTEPALEAALRTYLAALDARDAELAVLERQLRGCWASVDPLASMVRQLGCYRGIAELTALTLAAEVADFRRFASAPAFMGFTGLTPSEYSSGARTRRGGITKAGPQLVRDALVEAAWSYRHRPAIGATLRRRQAGCAAETLARSWKAQQRLHATYAKLTRRGKIPSVAVTATARELAGFVWAEMTS

SEQ ID NO: 93037 - protein, 369 aa, unidentified
MTKDTLYVGLDTDKKHIDVALAEPLPQGELRYYGKIANDKTALLRVIKRLRKDGRALRLCYEAGPCGYAIHRWLEGVAGVTCEVIAPSMTPRRPGDRVKTNRRDCLALARLLRAGELTAVWVPDAAHEAMRDLVRGRAAAVADLVRCRQRIASLLLRQHLRYAGKPWTKKHRAWLGGLALPEAAHRLLLGELLDALDQAEARRDRLSDHLAERAPTWSLAWLVEALQVLRGYQLINAATIVAEIGDPRRFENPRQLMGYVGLGVSEHSTGERVWRGHITKAGNGRARKALVEAAWTYARPAKAAKAEVARQAPAVRAIADKARHRLGDRYRKLVTRGKLPAVAVTAVARESLGFIWAVARAAAPDAPQR

SEQ ID NO: 93038 - protein, 341 aa, unidentified
MTAIGIDSHKATLAACAIDELGAAVDERTFPNDPGGHRDLAAWVHRVAPDGVVGVEGSASYGAAAARSLLSDGLRVREVPPQLSRRERIRTRRAGKSDPGDALAIARVTAREVALPPVRVADRTSEIRLLMEAREDVVVEATRVRNRLHADLVVLLPGYQAIAKHLVAEHHRRAIAGHLRGVAGVQAELARGRLARLRVLDREARALQARAAQLVGAHPLLALPGVGVLTAARLIAETGDIRRFRSADAFAMLAGVAPIPASSGQVQRMRLNRGGNRQLNRALHTIATVQAIHHPPAREYLARKVAEHKSEREAIRALKRQIVRTVFRLLREGADGIEMAA

SEQ ID NO: 93039 - protein, 392 aa, unidentified
MKKNSKEKTENKQGRTEGVLLRKLEIARKKKQAAAEERVEYYIGIDLGDRKSNYCILDEGGEILLEGSLPTTAEGFEKHFKALGRSRIALEVGTHSPWVSDQLEKQGHDVYVANTRKMNGGKKSRRRKNDRLDALMLSRQVRSDPSLLYPIRHRKEKSRQGLVLLRAREALVSARTKLVNGARGLVKSFGYRLSRCGSEVFHKASLDGLPEDLREALKPMLEQIGQLTEKIKSYDKEAKRVSLKVYPETAALRQVNGVGILVALAYVLTMEDPEFFHKSRDVGPYLGLVPKQYESGDSSPQLRITKTGDRMMRKLLVQSAQYILGPFGEDSDLRRYGQKIAERGGKNGKKRAVIAVARKLGVLLHRLWKTGEVYEPLYNSRPNDENDLREVA

SEQ ID NO: 93040 - protein, 344 aa, unidentified
MDHFAGLDVSVKETSVCIVDDTGRIVREVKVASEPEAFLTALKNPSYHFKRIGLEAGPLSQWLFSALAEAELPVVCVETRHMQAVLKAQINKTDRNDARGIAQMMRVGLYRPVHVKTLRSQKLRMMLTHRKLLQSKAIAIENDLRGTLRNFGLKVGIAGKTKFEARIKELVENLPDLAELVEPMLVVRRTLREQIVILHRRLLAIVRDDEVCRRLMTTPGVGPVVALTYRATVDVPARFRKSKSVGAVFGLTCSKYQSGEIDWSGRISRCGDEMMRTMLYEAAQVMLTRTNKWSWLKAWAMQIARRRGMKKAIVALARRLAVILHRIWVDGTEFRWTREQAVAA

SEQ ID NO: 93041 - protein, 352 aa, unidentified
MIIGCDFHPSFQQIAYVDQETGECGERRLNHREEAVGFYGELAGKQVIVGLEATGNDRWFRKLLSEAGHQLLVGDASAIHASAPREQRTDKRDARHMLRLLVENRFPVVWQPTADNEEQRQLLLHRCRLVRMRTRIKNQLDSIAKSEGLTETRSWSSKRRRQIEGLPLRGWYAERRADLLLLLDALELQIKPLNMAVESAAEQNQQARLLMTHPGVGPIVSLAYVLVLGDWRRFPRGEQVGSYLGLIPSESSSGKHQQRMGHITKQGNTLLRWLLVEAAVKAQRHDAGWHRQYLRLSVQKHHGVAKVAIAHKLAVRLYWMLRSGQDYGQIMERGSHARQSECPVGRSKGPVE

SEQ ID NO: 93042 - protein, 337 aa, unidentified
MRIIRIGLDTSKHVFQVHGVDENEQPVLRRQLRRSEVEKFFAKLAPSRIGLEACGASHYWARILRSLGHAAVLLPPQYVKPYVKRGKNDRIDAAAICEAMSRPGMRFVPVKTAERQAALMVLRVRDLLIKQRTMLSNAIRGHAAEFGLVAAKGPVKMSELLQRAHAEEAGVPALAREMLSLLANQLDALEARLKALETQLVAWHRQDPVSQCLATQPGIGPIGAVSFALKVTDPQGFRSARHFAAWLGLTPKEHSTGGRRRPGRISRQGDETLRRLLVLGATARIRFAKAGRASPWLMNLLARRPKKLAAVALANKMARVLWAMMVSGETYRQPQQA

SEQ ID NO: 93043 - protein, 310 aa, unidentified
MSSSVYVGIDISKHRLDVATEPATPPTQFPQTEAGVGAVVTHLQALGPALIVLEATGGFETAVVTALAAADLPVVIINPRQVRAFAQAIGRLAKTDAIDAAVLALLAARLQPPRRPLPDAAQQELKARVARRRQIREMITAEQQRLPQTRGRIRADIEAHIAYLKARSDEIDTDLRRLIAESPHWRATDDLLQSVPGIGPTTAAALIADLPELGRLAARPLAALVGVAPLNHDSGTLAAPRITWGGRAPVRSALYMATLTATRYNPIIKAFYQRLLAAGKPRKLALIAAMHKLLTILNAIVKTQKPWAHA

SEQ ID NO: 93044 - protein, 342 aa, unidentified
MYYIGLDVHKKTISYCVKDARGRVQQEGKVGSTRRELDCWMAGLPQPWTVGMEATIFSGWIYDHLLPHAVEIKVAHPLMLRAIAAAKKKNDTIDAAKIADCLRCDFLPECHMMPRAIRDRRRTLRYRHLLVKQMVQMKNRVSGLLMETGVEHTKSRLHKVGYFHEMLSKNAEIDASIRPLLKLSRETIERCQKTEYALVSSLQRDPLLADRIRRLRTVPGVGPITALTWALEMGDVSRFRTIRQAISYCGLCGDERSSADKVMRMPLSKQRNKHIQRVLVEAAKLAPRLSPELAMVHEKEKQKGNSNRATLAVARKMVAYLLAVDRQQREFIPAEQRGSRAA

SEQ ID NO: 93045 - protein, 356 aa, unidentified
MTKVTASFENQKVYVGLDVHKRSWNAAVYLNDQFVRNIHQPPTPQALHHYLTHTYPGASYVCAYESGKFGYWIQRQFKQAGITCLVINPADIPSTHKDEVYKNDSRDARGIGHALVCNQLKSIYVPTEAQESDRYLVRQRKKIWRDLVRCKNRIKGFLDYTGLTVPPQYDNSNWSKNFTNWLAALEFEHSSSRVTLNYQLRQAELLRKELLSICNDIRKLMRSKKYNRLYYLLRTVTGIGPLTAAALLTEIGDMKRFSSFYHLNSFIGLMPMEHSSGEKELKGRITVRKHRQLRSDLVECAWTAKRTDPALALYYSEQIKRGKNGKAAIVKVARKLLSRIRYVWLSGQPYQTAVVK

SEQ ID NO: 93046 - protein, 310 aa, unidentified
MEPVFVGIDVSKDRLDVHVRPGGEVFVVSRDGSGLEELVGRLQALDPTLVAVEATGGFETIVAAAVAGAALPLAVVNPAQVRHFAQAVGKRAKTDPIDAGVIAHFAEAVRPVPRTLPDEAARLLAELVGRRRQIIDMIVAERQRENRATNVRVRKSLARHLAMLEKELGAIDQDINTLVRGSPLWRVKEDLLASVPGIGKTLARTLLAELPELGSLDRRHIASLAGLAPYTRQSGRWRGRSMIAGGRSAVRSASFMAALVASRHNPPLKDFYLRLICAGKPKMVALIAVARKLLTILNAILRDNRPWQSA

SEQ ID NO: 93047 - protein, 346 aa, unidentified
MKITTIGIDLAKEVFQIHGVDSHGKVAVRKQVKRKDMAKFFANIEPCLIGMEACGSAHHWSRKLGGFGHTVKLMAPQFVKPYVKTNKNDVADAEAICEAVGRPNMRFVPQKTVEQQAILSVHRARQGFVKARTAQGNQIRGLLSEFGIVIPKGIDAIAKRIPEILEDAENGLPGTIRQLLDRLTKNLKEMDRQVNELEAQIQRWHKENEASSKLAEIPGIGPITASAIVASVGDAREFKNGRQMAAWMGLVPRQNSSGGKQTLLGISKRGDTYLRTLLIHGARAVTRFAETKAKPDSWLRQLMGRRNKNVAAVALANKNARIAWAILAKGVIFRPDYTPAAVVAGA

SEQ ID NO: 93048 - protein, 337 aa, unidentified
MKITTIGLDIAKRFFHVVCCNEQGRLVKKKMLSRTQVLAFFHSQPPCLVALEACATSHYWAREIKQCGHRVKLIPPQHVKAFLMGNKNDYNDALAIAIAAKQPHIKSIGIKTIEQQDNQAQHKARELAVRQRTALCNQIRGLIAEYGLILRQGVNTIRKQLPLLLADENKQLSGTFKTVLTQLNAQLEALDKSIEQFDKSIIGTVKNNAICQRLETIPGFGPMVSSAYFNEVGNGAHYRRGRDVSASLGLVPRQHSSGGKDTLLGISKRGNRYLRCLLIQGAKAVVSRAGTKDDRLSQWINHLVETRGHNRACVAYANKMARMAWAMTVSGEDYSPA

SEQ ID NO: 93049 - protein, 318 aa, unidentified
MTTQNLALAAGIDVGQRYFDIGLAPSGKTFRVPNAAEGIAAVVERLGQEGVYRVVLEAIGPYAQRLVCALGAAGFEVGLINPRRIKAFRDFEGRRAKTDRLDARLIARFALAMTDTIRPLPTTEQLALKALSTRRRQLVEMIAMEKTRLKQAVEPLLLESHRTAIAALTAECRQIEAELGRRIAADPQMAGTFEILTSIPGIGQRVAGVLITELPEIGRCDRRAIASLAGLAPHISQSGNAPPRAAISGGRPCVRSALYMAALVASRHNPELKAAYLNLRSQAKPAKLALVAIARKLLVTANALVKNRTPYTPQSLDK

SEQ ID NO: 93050 - protein, 389 aa, unidentified
MLLDHLADGPAAIHTQFGAIFVSLELSRSNWLITSLSPGKGERMSKHGVPAGDVPALLKLFAEFKRKAEERTGQSYPIITIQEAGLDGFWLHRALRQEGIESHVVDPASIATPRRRRRAKTDRLDGETLLRALLAYKRGEPRVCAMVVAPSPEEEDRRRLCRERRTLIDERIVHVNRIKGLLFAQGISDYAPLRRDRRARLEGMRTGEGRTLPSHLKMQISRELDRLELLLEQIKAVELEQDALLAAAPKPAGGSAAPDPVTMLLALKGMGPNFAAVLWSEAFYRQFANRRQLAAYAGLAPTPWRSGAIEREQGVSKAGNPRLRTSMIQLAWLWRRHQRQSALARWFEAHSKRGRKSAIVALARKLLVALWKYVASGVAIEGAVMKSVA

SEQ ID NO: 93051 - protein, 411 aa, unidentified
MNASSQPRYVALDLHKHYAVAAAVNRDGEVLLPPRRIDNDRLPNWAQKHLFPTDVVVIEATTNAYHVYDMLSPLVAEVKVAHARKVRQIAESRRKTDKSDVLILARLLAANLIPEVWVPPHHVRELRQLMTQRRRLVGMHTKVANRLHSISHSHHLGHPKGKRFTPETTSWKDALTDMERFQVELDLETLHYLEQQIAHITDKIAELSHQEPWASQAMYLMQLPGFGLITTMTTLAAIGDIHRFPSPRHLISYAGLAPGVEQSGTKHRAKPITKEGRKELRHALVEAAWSAVRSDPFWKQVFQRLTRRKHPNDAIVVIARKLLVILWHVLTKQQSYRQYSEERIAYKFLSWAWRLSKSQRGGMPRPQFVRYYLMRMGIGQELKRIELNPKYPRNIAPPEEVERWLRRESTA

SEQ ID NO: 93052 - protein, 377 aa, unidentified
MTTTDAAAEARETVYVAIELSKKTWVLGIAHPDRDRPSIHRVSGGNIGELVSRLRVAARNNRRILVCYEAGYDGFWLARALAKMGIECRVLDPASIQVNRRARRVKTDRIDVLALLRALIATDRGERHVCAIVRVPSVEEEDARRSHRERQRLVRERTGHINRIKGLLFAQGIRDIKPKLRRSRIDFAALETAEGHPLPDRLRRELEREYARLSLIATQLREVEKERDTADAQDPVVEQRRQLLVALHGVGATSAAILAREVFARSFASRRQLGSYLGLTPSAYDSGSTTRCQGISKAGNSWARRILIEVAWLWQKYQPASPLSHWYIQRTAGQSSRIRRIMLIALARKLAISLWRYVETGLVPEGVAIAKAKLRPA

SEQ ID NO: 93053 - protein, 421 aa, unidentified
MQNCLFIGVDVALKGNQFCVMNFDQHIYFNLKFPNNPEENEMVINKIKDIEDKFFFEKVIIVMESTGMYSFHPACYFSSNEYLNNYHTEVYQINACDFDKYKKSFHDLEKEDGIDAYVLADFARVGRTKGLYPFKGSQYIALQRLTRQRYHICKELIREKTYILTNLYLSFSGLMSLNKNEMPFSDLFGATSSAFLEEFESPNQIAESSVEELINFISEKSKNHSSDLDGKVTALNKAMRASYRLDQTAYEPINVAIACSLNTIKFYQQQLKNIDKAILTTALGLDSNTYNILLSIRGIGKVYAAGIMAEIGNIERFPHNSKLAKYSGLYWKRNQSGEFDSQDKKSSKKSNKYLRYYLVEATASCVRQNFPFIKDFYNLKYNEVTKHQHKRALVLSARKLERLIFGLLRKNQYYKPINSTF

SEQ ID NO: 93054 - protein, 471 aa, unidentified
MSCFRGAIQNRLRKENFMQKQDSYDYYVGIDCAQNKHDFAMKNNQDKFLIKKGHFSNTLQGYEKFLNTVLSKCLDKDKILFGMEVTGIYGTNLYERLKSDGYNVVMIFPDSVKNYRDYKRLNKTDKIDSACIAELLLNGDAQIVHAEKNGYIDLKAYIRRRNALKVTCTQETNRFLAKVCLYFPDLLKVFPSGRATLKAIFSIYPTPYSIIEADFNELVSVLQKASKNKFGVDKANELIHAARNSIVVRKSISDGELYNIHSLIDSIDSLESEIRNLEKIIDSKAEEFPAYHVLLTLTGCGKITAATIVAEIGDISRFHKASQIVSLAGLYGDNSKSGSSVNKRGKISKKGSRYLRHAIYMVAEFARRNNPIFKAYFTKKKNGDRTKHILAVNAVANKLCKVIYSLMKNQSTYIIQYRDLAKLSESTQNEFFQNAETDFSAKTRRKKYLYEDEYGELHEFVFKSIKTALIE

SEQ ID NO: 93055 - protein, 346 aa, unidentified
MLYAGLDLSRKKVDVHVLDEAGKTVAVTAVAPEGWALQDLVRRFAGTGEEVTAVIESMNGARFVHDTLELAGWDVLIADAARARALAPLAAKTDRIDAWVLAELGRRDLVPAIWLPDIATRSAREVCRFRQHLVGHRTALKNRIHATLIAHGHPVAMRDLFGKAGRAYLAELAVPEPWNTTLAQSLELIGETEERIKACERDLLARALHDPYVPLLVTVPGIGLILGSIIAAELGDIGRFASAKKFVGYTGLCPFVRQSGGRDDRGPLAKNGPRLLRWALIEVTTHACLHPLYRDHYQRTRKRLGKRRGPSVARVELARTLATAIWHMLSKNKPFAPAGPVRALVA

SEQ ID NO: 93056 - protein, 342 aa, unidentified
MKISKEVIRMGVDLGKNTFHLFGVDESDMAVVKKKLNRKRLLKYFANLPPCLVGMEACGGSHYWARELTELGHEVKLMSPQFVKPYIKGNKNDYNDAEGICEAVGRPNMRFVTVKAIEQQDIQGLHRIRQSVVKQRTALANQIRGLLGEYGIVVPKGIGKVRSRIPEILEDGENGLTDRFRGWLAELLAAFRTLDERIKKYDQEIQREHAANEVCQRISAIEGVGPQSATAVVATYGDCKQFRDGRQFSASIGLVPRQHTTVDKPILLGISKRGDKYIRTLLIHGARSVINRIEAKTDRRSRWLRSLVARCGKNKAAVALANKNARIIWALLSRGESYQPAV

SEQ ID NO: 93057 - protein, 343 aa, unidentified
MQIRSVGIDLGKTTFHLVALGAAGKVLVRKKLTQKQLVAFTANMQTSLIGLEACSGAHFLGKALRDQGHDVRLIPAQFVKPFVKSNKNDFVDAEAIAEAVERKNMRFVPIKTDDQLDLQAIHRVRDRLVSRRTAVINQIRAFLLERGMVFAQKPARLKAAMTDVLENAENELTPMMRNLVGILWDEWKTVEQQIEELTDKLEQISASDAGCSRIRKIPGIGPIVATAIVAAIGNGAAFRKGRDFAAWLGLVPRQYSTGGKAKLLGISKRGNIYLRKVLIHGARAAAMRMKRDRAPIGAWMDALEARAPRNVLVVAMANKLARIAWAVLSSGEEYRPAACPVAA

SEQ ID NO: 93058 - protein, 449 aa, unidentified
MNRTAVGVDIAKNVFQVHYIDQETGEIVNKPIKRAKFLEHFANRAPCLIRIEACGGAHHWARQLTKMGHEVKLMPGEFVKAFNVRNKSDAADARAIWLAVQQPGKPVAVKTEMQQAMLGLHRMRQQLLKFRTMQTNSLRGLLTEYGEVMSKGRSKLDKEIPVVLERLAERLPAVIIDRFREQWNGLAKLDEQVAQIERRMREWKKEDKSVKAIGDIPGVGLLTATAAVAMMGDPKAFSSAREFAAWVGIVPRQTGSGGKVNLHGISKRGDTYQRTLTGRWRSVSRRQLRYHRLVCESEISSSNPPVLSGAWRVSLCLRGAGYIQRWSRSAVPRLDVQDDPCDRVGLCGLWSELDLGERDDAESDDHKRSGRGDAGKVFHRDLILMANQEPAKLTGVSNHLQRHVCPQPGNAGHGRQIAFADRTGFVQCTINGLFACAVRHPVASGFLIA

SEQ ID NO: 93059 - protein, 339 aa, unidentified
MNNPNTVGVDLAKNTFHLCIQNNKGNILKKVMLSRSKFKHFLATEEVSRIVFESCSTSHYWFRVASSYGHTVQLIHPTFVKAFVKTNKNDFNDAEAICEAASRPSMRYVSAKSIAQQDIQLLHRIRQRQVQQRTAISNQIRGQLLEYGLTIPSGISQVKSRLSSYLEEADNELTTLTRELFNELREELVAINLRISESDKKIKQMAAAHPVCERLMKIPGVGSITATALISTVGKASNFKNGRELSAWLGLVPKQHSTGGKSKLLGISKRGDSYVRTLLVQGAISAMTRCKNKTDNQLLWAQKLRAKKGLQKASVALANKMARIIWSVMANDHDYVVMN

SEQ ID NO: 93060 - protein, 426 aa, unidentified
MKYTQNDKIMQITENTLVIGVDVASELHYARAFDYRGIEYGRLLKFSNDGEGFAAFVEWIGKLRAAHSKNHIMVGMEPTGHYWFTFAQHLKDHQTKIVLVNPFHVKRSKELDDNNPTKNDRKDPKTIAMLVKDGRYMEPYMPEGIYSELRNAMDTRWRLVKGLITIRNRVKRWISIYFPEFNQVFGKWEGKAALMTLKEFPTPARILELGLEGIVASWRREISRAVGVKRAKRLIEAAKGTVGIRQGLRAAENDLKSLLEEYDLLMRQYETTMALIEELALQVPGVDEMLKIKGVGLIIAAGFVAEVGDITRFKHPRQLQKLAGLNLKENSSGKHKGKTTISKRGRRRLRAILFQGIMPIVAKNHEFSELHQYYNTRANNPLKKKQSLILLCCKLIRIFFTLMTKKVAYDPKKMMRDIKRPEIQAA

SEQ ID NO: 93061 - protein, 413 aa, unidentified
MSLERKISMDVIIERACGLDVHKDNITACIMTSEGKEVQTFSTKTIFLLKLLDWIKENNCTHVAMESTSVYWKPIVNLLESEGIEFLVVNAQHMKALPGRKTDVKDAEWIAQLLRHGLLKASFIPNRNQRELRELVRYRRSIIEERARQLNRIQKVLEGANIKLGSVVSDIKGVSSLDMLRAISHGEDDPEKLANFARGTLKKKKEELELALRGYIQQHQRLMLKTILTHIDFLTNQIEMLDQEVANRVSSYKEDVERLDSIPGIATRMAEQILSEIGTDVGNQFPTAAHLCSWAALVPGHNESAGKRKSSKSKKGNKYLKSALTEAAQSVRGSKNYLGALYRRTAGRKGKSKAAIVVAHAMLRIAYYLLTRKEMYVDLGEDYFDKQRQESIVRHSVRRLENLGYSVSITEAS

SEQ ID NO: 93062 - protein, 411 aa, unidentified
MADSYDFYIGIDWGTERHQVCVLDAAGRRVAEQTIAHSGAGLAAWLAELAGYAPAERLAVAIEVPRGAVVDALLAHGCHVYALNPKQLDRFRDRQTVAGAKDDRRDAFVLAAAVRTERGAFRAPPPEDPRLAPLRELTRLTRELGTESLRLTNRLREQLVRVFPQVLTLCPAADEPWLWTLLEQAPTAPQAARLRPQTLRALLAAHRVRRFTTEELYACLHAPPLPAAAGTIAAASEHIAFLLPRLRLAFQQRGRCHRRLEKLLDALAAEEPAPGQPLEHRDVTILRSLPGVGRVVAATMLAEAWPALATRDYQRLRTHSGVAPVTRQSGKTRVVSMRRSCNGHLREAVFHWASNSLRLDPRCRAHYDRLRQQHGHARALRGVADRLLGLLVTLLRAGTLYDPARRHVAAA

SEQ ID NO: 93063 - protein, 319 aa, unidentified
MLGIDVSKDTLACTLFDPHTHKALWTKSFPNTAQGIARLLKQTPAESPWALEPTGRYSTAPAKLARKAGRDVRLAQPKAAQRFLQSLQSRAKTDRLDSLGIGLFALSRSLPLYPLKPPVIEELDQLLSARKGLAGAIASLGLQARELPHAAPALQSAIASLKEQQSGLEKQIADLTRREESLQLTRRLQSVPGIGPIVAATVASRLAAHHFASSDAFVAYCGLDIGVKQSGKRSGHTGLTKQGDGELRRLLYLAAQANLKTLDSPFKAHYQRERDKGLSSTAALCAVARKLARLCWSLHAHNTSYDPQRIYQQLQKKLL

SEQ ID NO: 93064 - protein, 398 aa, unidentified
MDLPVYYELETNNGNRDYRIQIGGHYMNYNTVYVGMDVHKESFTLCSCKYEDEKASHYQRTPASYKNVLRYLAFLRTIYGEDTRFVCGYEAGCLGYSLYHQLENFNVECVILAPTTMLEQRSKRRIKTDKRDAEIIAKSLAQHNYSPVHIPTKMDNQTKEFIRMRDDHKAELKKIKQQILAFCLRQGYQYDGSGNWTAKHVKWLRSLKTEGLYKEILDEYLLTYTILTDKLNRLDQRIEELASKEEYKESVSKLTCFLGIKIHTALSVIVEVGDFQRFVSARKFAGYLGLVPGQHSSGDDRNGLGITKAGNTHVRRLLVESAQSYTRGKIGYKSRVLRSRQAGNSPQIINYADRANERLRRRYYKMVLKDGKKYNIAKTAIARELACFIWGMMTDNIY

SEQ ID NO: 93065 - protein, 454 aa, unidentified
MSIIMVRYVGLDVHKRVVEVCIVDQSGNVVHRERFALNRRTLELFATKILQPTDHVAFEATTNCWAVADALRPHVAKLVVSNPLATKAIAQAKVKTDKVDAHVLAQLLRCDFLPEVWQPDEATRRLREMTGRRSALVGQRTMMRNRIHSVLAMRLIEVSRKHLFDADGLEWLTTVEIDAQGRTLIDSDLRQLEDLQKEIDSLDLELAKRGHASEPVKLLMTLPGADVATAESLLAAWGDFTRFPDADHAASYIGLAPSTKQSAEHCYHGPITKRGNSQARWMLIEAAQHLDKHPGPLGHFFRRLLKKKTRNVAVVAAARKLAMIAWLMLKNNEPYRYAIPRSTETKLAKLRVKATGERRKSGPPKGSKGTAKLPGGSRTIKSLATICQSEGLPQPRALSAGERRTVASAGSEAFVAETAATQVVPRRSRRQQATAGSDGTGSSSLLQENGHGRD

SEQ ID NO: 93066 - protein, 387 aa, unidentified
MEVRVVSTPSAGADNEPVHCYVAIELSKSSWIVGFQTPLTNKTSQYQVKACDANALLELIERIRTRVARELRRPIEVMSCYEAGYDGFWLHRVLKAHGIHNHVLDPASLQVNRRARRAKTDRIDADRMVRALIRYLRGEPEACSVVRVPSVEQEDAKRLHRERRRLIAERVQHVNRIKGLYATQGIYHYAPLRKDRLARLDDLRTGDGRALPTRLKAEIARELKRLEVLLEMIATVETERDVILTSAASTHLNAGKIKMLAKLKAIGPEFATTLVGEVFYREFANRRKLGSYVGLGSSPFCSGPVDRDQGISKAGNPTARSMMIELAWTWLRYQPGSALSIWFRERVGNLKGRPRRIAIVAMARKLLVALWRYLQTGLVPTGALLKA

SEQ ID NO: 93067 - protein, 313 aa, unidentified
MPACFVGLDVAKDRIEVSVRPTNDRWQADQTDAGIAQLVGRLVALPPTLVVVEATGGYETAVVTALAVAQIPVAVVNPRLVRDFAKALGRLAKTDAIDAAVLALFAERVQPEARPLPDEAHQELIALVTRRRQLLEMLVAERNRLATARRSVRASVQQHVRWLERRIGDADRDLTTTIHQSPLWRAKDDLLRSVPGIGPITSRMLIALLPELGLLSRREIASLVGVAPLNRDSGQQRGRRVVWGGRAAVRAPLYMATLVATRRNPVIRTFYQRLRAAGKPPLVALVAAMRKLLTILNAMVKHEAPWHPVTIEN

SEQ ID NO: 93068 - protein, 328 aa, unidentified
MGNRSMFVGLDVHKETIDVSIAEGHRGGEVRHYGVIASDLEPLDKVVRALRAPDRQLHFVYEAGPCGFGIYRHLTKRGEHCVVVSPSMVPKRSGDRVKTDRRDSLTLARRHRAGELRAIYVPNDADEAMRDLVRAREDAVVVGTQAKYRLKAFLLRQGRRYPGREGWTLPYRRWLTDLSVPTAPQHITLQEYRDTIDETERRIERVTEQLRQLAPTWRWAPVVAALQALRGVSFITAVALVAELGDLTRFGHPRELMAYLGLVPSEYSSGPSVRRGAITKAGNPHARRLLAEAAWAYQGIPRIGRQHAYRQEACPRWCATSRGRRNCG

SEQ ID NO: 93069 - protein, 377 aa, unidentified
MKEYSAYVGLDVHKDTIAVAVALPGRGEPVYRGEIVHRRGSLRRLMGRLSPHGEVLSFCYEAGPCGYGVYREITEAGHDCAVVAPSLIPRKPGDRVKTDRRDALMLARLHRSGDLTPVWVPGPEQEAMRDLTRAREDMKDLEFKARQRLGAFLLRHARVYAGRSRWTQAHARWLEEQKFEQPVQQVVFQEYVDAVEQATARVAALAGQMHEALETWSLAPVAMGLKALRGVDTITAMTVLAELGDLTRFDSPRQLMSFLGLVPSERSSGSQRRQGGITKTGNGHVRRVLVEAAWSYRYPARKTAHLRRKAAAAPEAVQALAWAAQKRLCARYRHLLHAGKAKNQVTVAVARELVGFIWAIACEVNGRAHASRAAIPA

SEQ ID NO: 93070 - protein, 471 aa, unidentified
MPRRKSPALPPDPATAALLQTLNPHAAGIDVGATELWVCVPPSAVAAPAAPSVRAVLPPSVRRFGVFTADLHAIAAWLQQCQVTTVAMESTGVYWLPRYDLLERAGFQVLLVDPRQAQRAPNRPKTDVHDCQWIQRLHSLGLLTAAFRPEEPIRVWRAYQRHRATLIDDAGRHLQRIEKALEQMNVKLPEVVSDITGVTGMGIVRAIVRGERDPQAFARLRDHRCKASAAMIARALQGTWQPEPLFALQQSLALYDYYHEQIQACDRVIEAHLKDLALPEVSPLAPTRRVRRRRDNEGTFDARQRLHHVAGVDRTAIEGIEESTALVVVSEIGTDMHRWPNEKHFGSWLGLAPNPQKSGGKGKSSATRPGVNRAAQALRVAAKNLQRSKSALGAFFRRIAARRGLAKAITATAYKLARIVYALLKHGTGYVAQGLAAYEAAYRERVVRQGKRKAAEVGLVVMERDAVVQPS

SEQ ID NO: 93071 - protein, 405 aa, unidentified
MSTDFFAGLDWAVHTHAVCVIDASGAVRDRFEIAHDRQGLAELMRRLGRFGASVRIAIERPSGLIVDALVEAGHQIFPIHPNAVKASRPRYRSHGGKSDASDAYLLADLLRTDGHRWTALSPQSDSIRALRALVRSRDDLVPTRVALGNQLHATLEAFWPGAACIFADITSPIGLAFLRRYPSPASAARLAQAGLLRFCHAQHYSGRRSPPELLARLHAAAQGLVAPLTAESMAQVVRSLVAVLDPLVAQISVLTRRIESFVASLPDGQIIMSFPRAGRVCAAQILAELGDVRERFPTLDRLVAEAGAAPVTYQSGKTRSVSFRWACNHRLRQAITCLADNSRHANAWARSIYAAARARGCDHPHATRILARAWLGVIWRAWTDRKPYDPALHNATLKLASGGGG

SEQ ID NO: 93072 - protein, 393 aa, unidentified
MDMIYVGIDVAKNKHDCCILGSSGTVLREAFTLRNDRKGFQELYSAIQEALHQEGTDQIKTGLEATGHYSENLVAFLRSSGIQPVVFNPLQVNLFRKSQSLRRTKTDKVDAKCIAQLLMSAESTPVPASYQIQELKTLTRHRSRLVSQRTKLKQSISRLVDILFPELPSVCCSATQASIRTLLLELPSARQIADCRIDRLTNMLYAASKGHYSREKALEIKQLAQQSIGANSPASELELRLTLQQLDFLLDQLKQLEKAIQTLVAAIHSPILSIPGIGPTLAAIILAEIGDIHRFSSPDKLLAFAGLDPSTYQSGKFTAGHTPMVKHGSTYLRWALMQASRLASVYCDTFRHYMDTKLSQGKHYFVALGHVSKKLVRVIFRILITNEAFVPQA

SEQ ID NO: 93073 - protein, 410 aa, unidentified
MLFVGDDWAEAHHDIEIETDEGRVVARRRLPEGLAGITMLHELVAEHLDPAAEPDQVLIGIETERGPWVQALLAAGYVVFAINPIQVARYRERHSTSGAKSDQADAHLLAEIVRLDRAHHRPVAGDSEIAEHIKVAARAHQSMIWSRVRQVNTLRSMLREYYPAALAAFGADLAGREALAVLAAAPSPDRGRRLSQARLESLLRKAGRQRNVATTAAKIRATLATEQLTARPAVVPAYAASASALIAVLSAMAEQTEVLARQVEQGFGQHPDAEIYLSQPGLGIILGARVLAEFGDDPDRYADAKSRKNYSGMSPITKASGTKQVVLARFARNRRLGDALFLQAFAALNKSPGARAFYDRQRARGATHYQALRALANRLVGILHGCLRGHTPYDEHLAWHSEPDKLSSAA

SEQ ID NO: 93074 - protein, 358 aa, unidentified
MNRNTGMNAGQIIGTMNGLQVIGLDIAKQIFQLHTVDMGTGEIFNVQIKRAKVLEYFVNRKSCLIAIEACGGAHHWARELTALGHSVHLLHAKIVRPFVSGNKTDATDARAIWLAVQQPGVKFVGIKTAAQQATLTLHRQRELLMKMRTMQTNALRGLLYEFGATFAKGRKALFKDVERELEGLAGQLPQMVSDSLREQIARIKAMGEDIQAIEKRLSLQLKADSHMQRIAQIPGVGLLSATAAIATMGQASAFKSGREFCAWLGLVPKQTGSGGKVRLGSISKRGDTYLRTLLIHGARSVLTHAKDPGPWLEQIKARRPANVVIVAQAAKMARAIWAVTAKEQDYQRGFKSVRPIAA

SEQ ID NO: 93075 - protein, 398 aa, unidentified
MAGVGGAAVPGRLLLVGTEACPTKLFSYKFAYQRQFSVGLDVHKMSMDVAIAATGGEVRHYGRIGGDLEALDKVVRKLQSTSAALRFAYEAGPCGYQVYRHLTGQGYPCLVAAPSLIPRRPGDRLKNDRRDAVTLARLFRAGELTAVRVPEPEDEAMRDLTRAREDAKSVERRAKQRTAAFLLRHGHRFSGKTTWGRGHWRWLQGLFLEHPAQQIVLQEYLDAVAEAAARVQRLTAQIRELIPQWRQAPVVRAYQALRGGSLIVAATMAAEIGDLGRFANPKQLMAHLGLVPSEHSSGATVRQGRITKTGNSHARRGLVEAAWAYRLRARITQPLHRRQEGLSQTVREIAWKAQLRLCARYRRLFARGKNKPMIVTALARELAAFLWPIGQAVQTATA

SEQ ID NO: 93076 - protein, 422 aa, unidentified
MLEETQETEEIIQRVAALDIGKAELTCCVRVPSPGKRGRRAQEVRTYQTMTRSLLVMADRLRELGVTRVVMEATSDYWKGVFYLLEAHGFETWLVNARDVKHLPGRPKTDTLDAVWLCKVAERQMLRPSFVPPRGIRQLRDVTRYRADLVGVRTAEKQRVEKLLEDAQIKLSVVASDIFGVSGRAMLAALLAGERDPKRLAQLARARMRAKLSLLAEAFTGFFTDHHGFLLARMLDRIDQLSADIAALDARIEALIGPFAQTVDRLDEIPGIGQTAAHLLIAEIGVDMTRFPTAGHLVSWAKFAPGVKESAGKRKGTATTGHGNPYLARVLGEAAVAAGRTDTFLGERYRRIARRRGANKAIVAVGRSILVIVWHLLADPNARFCDLGAGFYDTRVNADRAKRNHVRQLEALGYKVTLEPVA

SEQ ID NO: 93077 - protein, 338 aa, unidentified
MAKIMTIGVDLAKTVFHLVCCDRQGKVIGRKVLRRSQVTGYFSNLPPVRVGMEACASAHYWAREFEGLGHTVKLLPPRFVKAFVQGNKNDFNDALAIAEAMVRPEVRGVAVKTIAQQDIQALHRLRAQCVASRTTLCNQLRGLLAEYGVVLPRGVGSLRRRLPAVLEDGENGLSDLFRGLLAQGYQRLCELDSHIEAYTAEVLRNSQQDDACRRLQTIPGFGPVVASVFHSVVGDGQAYRRGRDVSASLGLVPRQHSSGGKSVLLGISKRGDRYLRSLLVHGARAVVRQAARKDDGLSRWITRIQAQRGHNKAVVAVANKLARIGWAVLSKHSVYQPA

SEQ ID NO: 93078 - protein, 389 aa, unidentified
MPSTNLQNSIDFNGQKFYVGLDVHKKSWYVTVRSLERQVAHFTQPPSAQALVKTLKEKFPGGVFNSAYEAGCCGTGHHEQLCKLGITNIIVHPGDVPSTDKQKKNKTDLHDSRSIAEYLEKKNLHGIHILTREQQELRSLFRLRESKVNDVTRANNRLKSFMLYFGIEVPESISKKEFISKKILEWLDNLELASEAGTLTKEGLMEALKYQRQQESQITKLLRKQIQQNHTDAYKHALTVPGIGGITAMGLLAEIGDFTRFDDPDDYIGYLGLTPWNDSSGDTIKTKGVQPRCNKHLRPLLIEAAWVAIRTTPQLFAYYSKHAAKNNKHAIIKVARRLALIVRGVILNKQDYQAEYLQQKQNEKKTEKMLRQTKKQALKDKEVFLASAE

SEQ ID NO: 93079 - protein, 387 aa, unidentified
MSKQNDLSRCLVALEQDATLIAVVEMGQASWLVAGIVPGLDRYPLKKLGPDRDALLQLLHRWRNEATKAGHAIARVAVAYEAGRDGFWLARWLRSKSIEAHVIHPSSVPVSREHRRAKTDRLDTELLKRAFLGWLRGEPKHCSMAAIPTLEDEDARRPGRERQVLVEERTRIINRLKANLARLGIRGFRPNLARAPSQLEALRTPEGVTIPMNTLAEMRRDLDRLRFVKQQIKEIEKTRVERLAKAPDERRHVAARALTRVVGVGVETADMLVQEVFSREIRDRRALARYAGLTGAPDESGQRRRERGLAKAGNARVRRGMIELAWGHLTHQKGSPLSAWYRMRTADARGGTRKTMIVALARKLLIILWRLATTGEAPEGLQLRPAA

SEQ ID NO: 93080 - protein, 312 aa, unidentified
MDACIVGIDVGKDRLDVAVRPSGESFVTARTGAGIEDLAERLKKLVPRIVAIEATGGFETVVAAGLAAAELPVIVVNPAQVRAFAQALGKRAKTDPIDAAVIAHFAEATKAVPRPLPDEMTRLLADLIARRRQIVEMMGAEGQRARRVTDQRLKKSIARLRKALEKELAELDGEIDDHVRGSPVWVEKEDLLASVPGVGPVVARTLIAELPELGSLDRRKVAALVGLAPWTRQSGKWRGKSFIGGGRKTVRNVLFMAAMVAARHNPILKSFRDKLVAAGKPKRVALIAVARKLLTILNAIVRDKRQWQPKTA

SEQ ID NO: 93081 - protein, 425 aa, unidentified
MNYKQNEKINQVKESTLVVGIDIGSTTQYARAFDWRGIELGKVFTFSNSREGFESFKAWMRHLQDKYRKSDAIVGIEPTGHYWFDLGAYLEDEGILLVMVNPYAVKQTKELDDNSQSKNDRKDPKVIAKLVTEGRYSAPYTPDGVYADLRIMVANRKRLIREMTQIKNRFARWFAIYFPEYTDVFGDYEAQSSMLLLKKVCTPEAIVELGAEKINQIWRDAKLRAVGMKRATTLCETAKRSIGLKKGSSAARYEMQLLLEDYEYKKAQLDAVMEEIEKLCRKIPESEQMLAIKGIGVITVAGFLAEVGDVRRFESPRQIQKLAGLSLRENSSGKHKGQTTISKRGRSKLRAVLFNAAIPLIAKNPEFKSLHEYYTTRANNPLKKKQSVIAISCKLIRVFYAILANGVTYDPQKMLSDIHRQPQVA

SEQ ID NO: 93082 - protein, 327 aa, unidentified
MQAPRHIGIDLHRNQFTCCVRLENGRNYLTDWKLEDLPRFIKKLRPDDEIAVEVTGNTRLFRDAVAPHVARVVAVDPNQFKVISHSVKKTDPNDARNLALYLEKDLLPEVRMKDKTQAQLASLTQTRDTMVKLRTALKNKINNILSAHGINLEKEALSSEKKLNEVLTMKFDPMVKLELEVIVEEIRSLNQRIAKLEKTIAEEGSKLEGHKNLTSIKGIGPLTGSILLSVIGDIHDFENEGKLAAYFGIVPRISNSNETERSGRITKRGSKLGSTALVQCALIAQRYSPYLKRYYEKIKARRGTGKAIIALARKLLGIIYRTLTGRV

SEQ ID NO: 93083 - protein, 379 aa, unidentified
MGDVRVRACPAQAERLVTWAAAWPERTWAVEGAAGLGHLLAQQLVAAGERVLDVPPKLAARVRLLEAGDTNKNDPNDALSVAVAALRSRARREVTAEGHAAVLKVWAKRHRDLARARNQVTCRLHAVLCELVPGGVSKEITAGQAARILDQVTPSSAVAQARCELAAAFLEDLRRLDAQLRDTKTKLAAAVRASGTTVTEVFGVGPVVTGTVIGDVRSISRFASRDRFAAYNGTAPVEVSSGDRKVHRLSLRGNRRVNHAIHMAALTQIRHRHSAGRAYYDRKVAEGKTHKEALRCLKRRISDAIYARLQADARQAAAASTRDPGGQPGNDTDASAAGSHPEHRLFGQATPGPGTILRPVTQSDPTVAKRNPKKARKTP

SEQ ID NO: 93084 - protein, 342 aa, unidentified
MERELYIGVDVSKNWLDLAYYDGMTVDWKHGHIRVDNKQSGYNHIGKWLKELGVNKDCVLFCMEHTGLYSQDFRIWLEKEEFLYGMVQPRKMHRFEPDLGENERALDRIKTDEMDSFRIAMYCEKHCRKIKAKPSKLPGKAYFKLKRLLAERKQYTKQSVLYKQQLHDISVYDTEDSYKRKQATLNLLNSQIRRTDEEIQSLMDEDATLGKNYELLCSIKGIGLVVAVETIVLTENFTSITNPRKYACYIGIAPTKKESGVSIRGREHVSRKGFTQVKADLSIVCLTSIRLDPNIKSYWERKKAEGKCTGKVLNAIKFKLVLRMFAVIKRQQPYVIIDSYRK

SEQ ID NO: 93085 - protein, 346 aa, unidentified
MMIIGCDFHPSWQQVSWLDTETGETGEQKLVQASGDAERFYRQVAAPALIGMEATGNCHWLVDLLSELGHELWVGDAAQIRASYVRQQKTDKRDAAHILKLLVEGRFPRIWMPSSEVRDLRQLLLHRYKLVIMRARVKNELQHLCLNKGVQRKHKLWSAAGQQILRELPLQPWAGRRRDDLLKLMAMLDQQIEPLDQAVKAEAQRDKMALLLQTQPGVGPITALAYVLTLGDVSRFPRGKQVASYLGLIPREHSSGGRQKLGAITKQGNRMLRMLLVEAAQIAVRYDPQFRREYLHRCHKKPKAVAKVAAARKLAVRLYWMLRTQQPYPAVVRIESSPRVPLVGAS

SEQ ID NO: 93086 - protein, 319 aa, unidentified
MGQSTMAYAGIDTGKRTLEIAIHNAKARTQVGNDDAGHAELSAWLRRQHVHRVGIEATGGHEKTVVARLRQDGFEVVVFQPLQVRAYAGFRRQRAKNDRIDAVLIAACAADCKDEDIHAPPDPRLVARAEHLTMIEQITEDIARLKTRLSSCRDAAVQHRWQAEIKRLKQWLEQELADLVAGLRQHPDLDERLDLIESVPGIGLRTAVAILVRLPEIGSISPEKAAALAGLAPYDDDSGDHHGQRHIAGGRQRLRNSLYAAALPAAYFWLPQLKAFYRRLTAKGKPHKLALIACARKLLTFANAVVARRSPWIAKSIES

SEQ ID NO: 93087 - protein, 459 aa, unidentified
MRTIGIDLAIQGSHKAIVADEGGRYITPVIKLHTRASEIDKLLARAREGAEGCPLQVVMEPTGMAWFPLAAYLARQEGVTVYLVNSQQVADLRRFYKRHAKSDRIDARVLARVPLVNPEKMHPLVLPPAGAFGCQRGCNQLDQMQTQITAIKNRLRAVDRFAWPGLEELIFADPFSPTARWFRQHWYDPRQVIQAGAQTIRHQWQDSSLAGGDKGEWAEQLVELAEQVLALYGRDTGYLDFALLQAEVGREQEQLAFLEEMHHNLRLQTVRPLYRQIHPSRNLETLKGVGQDGAAVYASFIGDPDRFGSNRRFRGWHGLVPGSKQSADSETKGLHVTKAGPNLLKRYAYLNAEVARQWDPQIAAIYYDQMVNKGKHHNQAVCTCATHLLDRILVVLREDRSYQLRDVDGTPITVEQARAIIAERYTVPEEIRRRNNKRHRRERAERRSERKQKRESRPR

SEQ ID NO: 93088 - protein, 329 aa, unidentified
MFYLGIDVAKAKIDCCLILENSESKKKTKTFSNMPKGFEQLQTWLNHHAANSTQTIILMEATSIYHERLAKYLFDAGYQVCVTNPARARYFAQSMSKLNKTDKADSEVLARFAMTADLHFWQPLPEHIQLLNALLDRRAVLCEDLQREKNRLEKAESTFTIEPVLQSIHKSIKQLNKHIQDIDQQIDDHIDQNPDLKNDKELLSSIPAIADRTSLLMLSFLRSHNFERASQAAAFVGLVPIQRQSGSSIHGRSRLSKAGSSKIRAGLYMAAIVATRHNPHIKEMNERLLANGKTKMMAIGAAMRKLVHLCYGVLKHQQPYQENYCINSQ

SEQ ID NO: 93089 - protein, 338 aa, unidentified
MTIVYIGIDLAKNVFAVHGVDQAGKPALVRPSVPRGRLHELIASLPACTVAMEACSGAHHWARLFAQHGHTVRLIAPKFVAPYRMSGVRGKNDAADAAAICEAVQRPTMRFVPPKSLEQQSQLMVHRARQGYVENRTACINRIRGLLSEFGHVLETKADTVRRQACALLEELPGWANTVIGDLLSELHHLDERIAGYDRHIQAIVKEDARAQQLMQLRGVGPTTATTIVAMIGSGHEFRCGRQFAAWVGLTPGQYSSGGKTRLGRITKAGDAYLRTLLILGARAVLAAAKNKDDSISRWAMALEARCGYWKAVVAIAAKNARMAWAVLARGESFKMPA

SEQ ID NO: 93090 - protein, 423 aa, unidentified
MKTDWTQYTYFAALDWAKAHHDVIVVDRFGTIVAGFQFPHSAEGWKEFEQQMQAFGKCPICIETSSGPVVDQLLQRDYPVYPINPKAAQRYRERKCPSGTKTDRYDAWSMADALRTDGHGWVRLVAQDEATMTLRLLCRDEHVLIEQRTALVNQLQAALAEYYPLALESFEDWTKPFAWAFLRNFPTPQALGKAGKRRWESFLHTQKLWRPGTASARLEAWQRGQQLNASAAVGSAKSLLALSLVNVLQSLQKQIDEYRERIRAAFQNHPDHDIFGSLPGAKDKLAPRLLGELGSQRDAFPGAQSLSCRAGTSPVSFQSGQLRKARIRWACNGFLRHTVHLWADQSRRTCLWAQVYYAAKRENGHSHASALRCLGKRWLKILWRMWQDRTAYDQSIHLQSLQEHGSFVAKPLTLQPSQGASSL

SEQ ID NO: 93091 - protein, 464 aa, unidentified
MNSLFFGIDVSKGYADFCCINQAGSRIGEMAKFDDTPSGHTAVKRLVEGLKTRHPDAQMVFGLENSGGLERNWAVFLKDLVTPFNGKVFTLNPLAVKKFLERDLHRNITDAISAQGIANYLRQGMRPAEVPFEDSLSGPISLYRCLRNAISRCAQMQNELQSLLPRVQPELVQFCRQGLPDWVLEVLQRWPTAPKLAIAKMTQLVKVPHVTEKRAENLIAAAKESVASQGDSFTEISVSFLAKTIIQAQDMIGTLKEQTIESVAKDEGVKIMQSIPGIGVWGATCLRLEIGDIERFPTPEALVAFAGIDPRIKQSGDSTRHIGISRRGRRQIRAILYPLILAGIRFNPAIKEFYVRLRGKGKRHLVSATACMRKMLHIIYGCWISGKAFDPNHEKTRKSIQSETTQISAKTKEPLSKEKIYILHIDAPVSRREANKRRKAATMPQTGISRRERGQVTASEKNVT

SEQ ID NO: 93092 - protein, 340 aa, unidentified
MHIDVLGIDLAKRVFQLHGAARGGAVMHRSKVSRPGLLQAILGLQPRLVVMEACASAHHWGRQLRANGIEVKLISPQFVAPFVKTNKNDRNDAEGIVEAASRPTMRFVAVKSIEQQDIQALHRVRQLYVHQRTAVINHVRGILAERGVVVAKSPAAFHCAMPAVLAASDGEISEVCRNLLVESLEHLEIIEQRIERADAHVKQLMSSSELCRKIGAIDGVGPLTATAVVAAVGDTRDFKNGRHLAAWLGLVPRQHSSGGRSRLSGISKRGDAYLRTLLIHGARSVLRWLGDKADPQSRWLRDLIERRGFNRAAVALANRNARVIQALLSSEKTYRRPVAA

SEQ ID NO: 93093 - protein, 346 aa, unidentified
MKSLFIGIDVSKEKLDLCIQSNGKVLKEWVLPNTAAAIKSSFKSLQKEHGVEKSAFLVCAEHTGQYTYPLMCACEEIGFDLWLDNPAQIKHRSGIKRGDNDRLAARNIADYAARFQDKAQLFSLPQKNIASLRQLISERDLYVSDRGKYKGQLTDQKRFMNEDDYAKKSKRLKSLIEGLDEAITTVENEMEQLIKRDDVLSNQYDLLCSIGGVGKQTSVKMIAETNAFKDFDNGRKFCCHAGVAPFQYTSGTTKRSSNKVSHRADKSIKTILHMAALSAATRKKDGELREYYLRKVAEGKNEMSVLNAVRAKLVLRMFAVIKNNKKYDKNLNEKKVDKVDKVDKVD

SEQ ID NO: 93094 - protein, 342 aa, unidentified
MYYIGLDVHKKTISYCVKDASGQVHREGTIGANRNELDWWMKTLPQPWTVAMEATIFTGWIYDHVLPHAAQVKVAHPVMLRAIALAKKKNDRIDAGKIADCLRCDFLPECHMASTEIRDRRRSLRYRHLLVRQMVQMKNRVSGLLLETGVSHNKQRLHKVRYFQELISNQEEVPESIRPLLKLSRETIVRCQKTEYALVSSLQRDPLLAERIKRLRTVPGVGPITALTWALEIGDVSRFRSIKQAISYCGLCGDEKSSADKILRTPLSKQRNKHIQSVLIEAAKLAPRQNHELALIHEREKQKGHVNRATLAVARKMVAYLLAVDRREKDFVPSEERSTAAA

SEQ ID NO: 93095 - protein, 462 aa, unidentified
MNKNNVKCGSVKSSDKMRVTSKMTKINPDVAGMDLGSAEHWVCVPSDRAQENVRRFGVYTEDFRKLSDYLRASRISSVAMESTGVYWIPLYEFLDKAGFEVVLVNARHLKSVAGRPKTDIYDCQWIQRLHSYGLLQGSFRPSDEICELRGLTRHRAELVAEAGTKIRHMQKALQQMNIRLDKAVSDITGKTGTMIIERIIAGDRNPVELARLRDSRVHASEKEIAEALDGNYRSEHLFALKQSFESMIFIQKQMNECDGEIKRVLDGLDRKLDSNMIPPLQPRKGSMRSNKNQPQFELRPALHEIYGVDLTKVDGFQTSTVLNILAELGPDLRKFRSDKYFTSFLGLCVNKEISGGRVLKNRTKKVQSRAAMAFRMAAQSLKNSNCYLGKFYRRIKAKAGAPKAITATARKLAVIFYNMVTRQEEYKPLDPLSFERKHHDRALKSLIRRAQTMGFDLVPAKV

SEQ ID NO: 93096 - protein, 425 aa, unidentified
MSDDVMIAVDPHKASNTAAVLDPVTKTVIEVARFANSVDGYSRLAGFAARWEHRRWAVEGCHGAGRFLAQRLVADGELVLDVPAKLAARVRVYSRGHGRKTDRHDAVSVGLAALDGTGITMVTGDDALVSLRLLCDRREELAAQRTQAVCRLHRLLAELTPGGMRRELSANKAQALLARIRPANDVGRVRVHIARDHLADIRALDARLKFIAAQIAALVTASGTGLTGLYGIGPVIAGRILAEVGDVARFATKDAFASYNGTAPIDVSSGDQIRHRLSRAGNRRINHALHMMAVTQIRNPDTPGRLYYERKRLEGKTGKEALRCLKRRLSDLVYYQLIADRHGTIGTCGSPTTPPPTRSTSISPATRSREAGPPSRPPHRPAPKGSSRSTGKTTASSESRSSTPAPASTTTSSKRPKSIVKTAAS

SEQ ID NO: 93097 - protein, 320 aa, unidentified
MMAQNDQIVVGIDVAKDKVDACIRSLSQRHTFPNTAQGHRKMIAWLHKHKVNKAVMEASGGYERDWARVLRLAGIEVRIVDPKRVRSFALSAGRLAKNDTIDAEMIAWFAETFSAAPGQPHDAAREELRALVKARKHLLDLQTRLKSQNEHAAPEAVQKAHARILKSLATEIAKLEAAISAKVKATPDFAERAEIIESVPGFAETTSANLIAGMPELGQVSDEIAAALIGLAPYDDDSGKRRGERHIKGGRRWVRNAIYMPCLGAATQNNPVLKVFYQRLIAKGKEPKVALVACMRKLIIILNTMIARRQKWDPSRYALS

SEQ ID NO: 93098 - protein, 406 aa, unidentified
MIFVGIDWSEAHHDVCVLDDQGMVLAKGKVSDDVSGVGRLHAMAAEHAEDPSEVVVGIETDRGLLVGSLVQAGYRVYAINPLAASRYRDRHAVSRAKSDPGDAKVLADLVRTDRQNHREVAGDSELAEAVKVLARAHQNLIWSRQRQVNALRNTLREFYPGALRAFTTSQLATIEACSVLAMAPTPTWARDKLTLQRLRRSLSASGRKRNLDRRAGQILHALQAPELSAPALVEQAYGDVVGSLVVVIDGLTHQIAKLEAELAQRFEGHPDAEIITSLPGLSSVLGARVLAEFGDDPTRYQDARARRRYAGTAPITRASGTRLVVLARVARNRRLFDACYLWAFSSITTSAGARRYYDAHRARGKTHHQALRALANRWIGILHGCLTRHEPYRENVAWVAPVEAAA

SEQ ID NO: 93099 - protein, 369 aa, unidentified
MPHVTSIGLDVHARSVAAAAFNPFTGEVVHRDFGTDAAEIAEWALGFEEPRACYESGPTGFHMARELRALGLDCAVAAVSKMQRPAADARRKNDRRDAEFIARMLATHNIVEVPLPDAAVEAARDLDRALDDATAEYRRARQRLNMFLIRLGHVWDERNADGARKGSWTRAHWRWISGIRLEGPQRDVLEYYVTAARCAESDRRQLEKEVLALARTDRWRPAVEALSCIKGIDTLTAFRLAAEAGSFTRFRTAPAFASWCGLIPSERSSGETERRGGITKTGNRLARTALVESAWHYLTCTPRPKAPAPGADVPAAIRARADDCTARLCRRREALAAAGKSPCKANAAVARELACWVWEIGCRAEGTLG

SEQ ID NO: 93100 - protein, 400 aa, unidentified
MTDETDIGVYLGLDVGKGEHHAAAVNRAGKKVFDKPLPNSEPKLRELFDKLRAKHGTVLMVVDQPASIGALPLAVARDARCQVAYLPGLTMRRIADLYPGEAKTDARDAFVIADAARAMPHTLRAVDPADETVAELAMIAGFDDDLAGESTRIANRLRGLLTQIHPSLERVLGPRIQHPAVLRLLEQFGSPAQIRKAGKRRLVTLIRPKAPRMAERLVEDIFTALDEQTVVVPGTDAAALIVPSLASSLRSVLDQRKLLAARIEELLEAHPLSQVLISMPGIGVRTAARILIDVGDGSGFATAGHLAAYAGLAPVTRNSGSSIRGEHPSRRGNKQLKRAFYLAAFASLSQPESRAYYDRKRREGKHHVAALVALARRRIDVLFAMLRDGTFYQSPTPATA

SEQ ID NO: 93101 - protein, 313 aa, unidentified
MTKPVESILVGIDVSKAELVIARSDSPQIEAISNSPSAIKRWLKSLPQGSRIALEATGTYHRQLATLAHAAAHQLYFLDGYRLSRYRDGVGTRAKTDPSDARLILRYLRNELEELKPWIPAHDAFYRIQSLIRRRASLVHTRVALSQSLQDIPELKQVRKQLDTHIRRVELLITQRLKQALADVGWDADARRCMDIEGIGELSSMALANTFHRGRFKSSDAFIAYLGMDVKVRDSGKQVGRRKLTKKGDPELRRLLYNAAMAARKTAAWKELYETYLSQGLKPIQALIKLARKLARIAFALMQNQTVYRPKTL

SEQ ID NO: 93102 - protein, 340 aa, unidentified
MRVLYAGCDLHGNSNLIGIVDGEGKRVFKKKLSNDLGVVRDALEPFQEELVGIAVESTYNWYWMVDGLMETGYQVHLANPSAIQQYSGLKHSDDKHDAFWLAEMLRLGILPEGYIYPKQERPLRDLLRKRGHLVRLRTSLIISLQNILSRNLGRKVNVNDVKALKEDRISLLLEMNEDLALAGRVSKEAIDHLTRQIRKIEGVVEKKIKLKEEYRYLLTLHGVGKILSLTIMLETGPIRRFETVGDYVSYCRKVPSQWTSNGKRKGSGNSKNGNKYLAWAYSEASEFARQLHPEPRAYYNRKMQKTNAAVAHSALANKLSRAGYYVMRDQVPFQPEKLFG

SEQ ID NO: 93103 - protein, 457 aa, unidentified
MNPKRSKPKNDRTMPMIHPNAAAIDIGATMHTAAVRADRTPEPIRSFGTFTTDLHRLVDWFTECGVETVVMESTSVYWIPIFELLDARGFAVFVVNARDAKHVPGRKTDVSDAQWLQRLHSYGLLRASFRPKGQIAELRAYVRQRERLLEYAASHIQHMQKALTEMNLQLHHVVADVTGATGLRIIRAILAGERDSKVLACLRDYRCHSSAEAIEKALTGNYRAEHLFALELALALYNIYQDKASACDARIEAVLKELSISRGRDACPLPSPRRRLHGKANGPDFDVRAALFKLLGKDLTQIDGLGSYLSLRLIAECGDDLSAWPSAKHFTSWLCLAPSNKISGGKVLSSRTRRSGSRASALLRLAAVTVGRTDTALGAFYRRLSARIGKAKAITATARKIAVLFYSAVRHGMEYVDPGSSYYETRYRTRVVENLHRRAKAFGFVLLPLESKAGAVS

SEQ ID NO: 93104 - protein, 337 aa, unidentified
MEDIIYDHYVAIDWAAQNMAIARMTKKSNKIHVIDVPADIKELQFYLKNLKGSKILTVEETTTSQWLYTELRDHVDRIFVCDPYRNRLLSEGPKTDKIDASKLVQLLKADLMKEVYHSNDKFLYLRRVVSAYEDLIRAGVRLKNQRYALLRICGKSGYEGNGIKIGSRGEQFVLDGMERQIRAYEQEKQSYKTEFKRLSQKYPEIRYQKSLPGIGSTHAVKIVARVVVPWRFANKGHFLSYAGLIKLEKISGGRSYGKKSPRFCRQLKSVYKTGVLAALGGNNQINDYYEYLTTKKNYPPHQARHKACRRLATLSFGVLKSGKNYQPYKRGEISIKE

SEQ ID NO: 93105 - protein, 373 aa, unidentified
MVHLRHAHTRVVVPTLTIPNTTRGFTQLWARIQQAQRATGCREVVCGLEPTGTYHQAVATFLETQGADVVLLSSSVAYWNRRTQDGTWDKHDRKDAVNCADLLEQGKVLFYSRPDGLLAELRHLVKLLRRARTELAGCKARWRTTLRPALAPMGESLPPRCWAELPAVLQAWERVAPGRPAVPRGRLPLGLTTACADLGVQVTAVRARIAAIEAALTPVAERLPAYPLLRSIPGVGSTVGAILLAEIGDIGWFTKFSQLRKLAGLDIVRVQSGQFAGQARISKTGRGLLRWACYQAAVGSRGPRPGARGSPHSRPSGPAIASRVQSRGRAGGEATPGGVGRVAERASVRSDARGWAPAAGALTGPQSDVFPGE

SEQ ID NO: 93106 - protein, 337 aa, unidentified
MYYVGLDAHKQYTTLAVLDARSGNMKLHKRLANTAEAFAQALAGLDGPLHGIVESGRSTWALHDRVCHLFTSLRICDALDLKHCRPPRGATTDPRVARDLAEILASGHAPKPLWVPDADTRINRTLTRGTIRLSQAMNRTINSIRAFCANAGQECPFTSLHGSGAKAWLAEVELPAEIRAMLNLYLANLAQLEALHKQAMKHIRQRAAADPRAQRLMTIPGVGPFTALCILAELGDLHRFTSRRAVVAYAGLGPQVHQSGEHSRTGPLPRTGDRWLRFALVLAAQHIANSKKLDSPLRRHGWCVALKHGKNPGKIAIARKLVLLAHHLLVHEEDYAA

SEQ ID NO: 93107 - protein, 436 aa, unidentified
MKPNGTYRARDVDSIDARALAAVFAVGSTVVVALDIAKRKMMAAFGDRVGTIHQVVRFDHPTQTGTFVRLLSMLRESGLTVEAVMEPTGTYGDSLRHLLTQSGIPTYRVDTKHVHDLAEVYDGVPSKHDAKDASLIAWLHAHQRSVPWLEQSESRRRMRALVAQRELFDDPLRRLIARLEPFLARHFPEFETFFDLSRRRTAYALLLAYPSPRDLADAPLDALLAKVAAVRRRPADPLVIARLHAAAKHSAGVPMLDDERVFVQELAGEVLRLFARRAEVDRRIEEAASADVAVCALRHPLGVVTAAVVVASLGSPAEYRCAAAFEKAAGLNLREHSSGTQIGAKHISKRGPGKVRKYLFLAAMRLIQDDERVRAWYRRRNAFLADDKAKALIAVVRKLCRALFHVARGDTFDVAKLFDLRRLGLPVEAAPIQQEG

SEQ ID NO: 93108 - protein, 357 aa, unidentified
MEYGAIDLHKKESQIRIVTKSGEIIDRRIVTTRERLTHVLWGRPRMRILVEASTESEWVAQHLEHLGHEVIVADPNYGPMYGHRSRRIKTDRRDVAALAEACQHGTYRPAHRRSARQHEVQCRLNVRQELTQARTRAISLARAITRAAGLRIRSGRTETFLARLGALDLPASMHATLSPLRSVIDVLDDELLRADEECEALVAADPMVKRLTTLPSIGPITATAFVAALDVVSRFERAGQVTSYLGLVPQEHSSGEKQRRGRIVRSAHPHLQSLLVQAAWRVWRASDPKTEPFRVWAQAIARRRGKKVAMVALARRLARTLFAMWRDQVDYQAERIRTRRATLVAETTSETSVAVPV

SEQ ID NO: 93109 - protein, 578 aa, unidentified
MNPNDVAPSLTPIGVGFDTARYGHHVTFLREDLQPATTPCEVTESREGYQLLEQKFQELAQRIPNVLFRIRIDAAGQYASNLETFLRQLPFPKTISVGEPVRNQNYRQAIFPKCKSDPAESHCAGRFALREDPKPALEVPAELIPLREIASRLEAQTRQSTRLANQLHNLMARVFPELATIASDFQAQWLLRLLDQYPTPCQLARARASSLTAIPYLTADKAHKLQTAACTSVGSFRGTVAEELVHMLVGQLRRSGQEQDHLRHLLVKVRQALPQSNQIDTIPGIGAGTAAVLTAKMISIDRFETPDQLVGYFGIFPEKDASGLDKDGKPKPGCHTHMSKKGNDLARKYLWNAAKVACQHNPAVRALYRRLRARGRRGDVALGHCMRKLLHLVWAVWKSGKAFDPNHYPWEPASAPPGNAEAAGHNQGASPERKVVTAADSTVSSEAPVVNEPSPAAPENSLDSAAADNGWLDFALLREQVTMEQVLAHLNWLSCLRGSGPQRRGPCPVHGTPADRTRSFSVHLQKNAFQCFHPPCASHGNVIDLWAAVHRLPLRQAAHHLIDTFNLRTTRGTEKRNP

SEQ ID NO: 93110 - protein, 338 aa, unidentified
MKVQILGIDLAKNVFQLHGVDRKGRPVLVRRLRRDQLLRVLGELEPCLIGIEASTGAFYWQRQFEKLGHAVKIMAPQYVKPFVCRQKNNTNDAEAICTAVQQPNMRFVPKKTLQQQDIQALHRARQRLVNHRTALISQMRGLLLDRGIAIAVSATRARQLIPKILAAPSDELTGLMQEIVSSLYAFMLQIDERIRVFDRKIDEIFKASEVCQRIAKIRGIGPKTATAMIAAIGDGSDFKNGQHLAAWLGLVPRQHSSGDRRVMMGISKRGSKHLRTLLVHGARAVVRTAVKKTDSRSMWVNELRQRRGYNRATVAVANKNARVIWAVLTSGEPYRAAA

SEQ ID NO: 93111 - protein, 343 aa, unidentified
MQTITTIGLDLAKSVFQVHGVDAGGQVIVRRQLKRRYVLTFFQKLSPCLVGIEACGSAHHWSRELQALGHTVRLMPPAYVKPYVKRQKNDATDAEAICEAVTRANMRFVPTKTSGQQSGLLLHRARHLFIRQQTSVINAIRAHLAEFGIVAPVGRHGVEELLNVVADPNDKRVPEIARACLSAFGAQLRRIKEQVLEFDRLIRAWHRSNELSMRLDEAPGVGPVLATALVAAVADPKSFRSGRNFSAWIGLVPKQHSSGGKNRLGNISKQGDRYLRGLFVAGALAVIRYAKIHGTTHRPWLTALLARRPTKVAAIALANKIARMVWAMMARGERYKEPFALAR

SEQ ID NO: 93112 - protein, 421 aa, unidentified
MEVVAARCAGLDVHRSVIVACALLGEEHRRIRKVRGEFVSTRAGLERLLAWLCELGVTHVGMESTGVYWMPVYAVLEAAGGFQLTVVNAQHAKAIRGRKTDRKDAEWLGELVRHGLIRGSFVPPQPIRDLRDLTRYRRTLVETQGSERRRLIKLLEMADIKLTGVICDIFGVSGRAILRALIAGGQTAAEMSKLVRGSLRRKRGQLIDALAGELAEHRRQMLALQLARVEADEADIAALDRQIAEHLKPYAAQMARLMTIPGIDWVVAATVIAEVGPDMSVFPSAGHLAAWAGVCPGNNESAGKRKPAGARSGNPYLKTALCNAAIAASRKRGSFFKAKYHKLKSRRGGGRAALAIGHKLLVCIYHMLSTNSPYRELGEDYFDKRDTQRAARRYVRRLRDLGFAVTLQPTAALQPAEANAL

SEQ ID NO: 93113 - protein, 339 aa, unidentified
MGILYVGIDLAKNVFAVHGVDEHGKAVLVRPSVARAKLHELIATLPACTIGMEACSGAHHWARLFLQHGHTVRLMAPKFVAPYRLSGKQGKNDAADAMAICEAVQRPNMHFVPVKSQDEQARLCVHRVRQGLVEQRTATINRIRGLLSEFGIVLPQRAATVRREATVHLEDLPGWANTAIGDSLSDVHRLDERIAEYDHHVRQMARDDQRSRALMQLSGIGNTTASALVSTIGNAHDFKNGRQLAAWLGLVPGQYSSGGKTRLGSITKAGDRYLRTLLVLGARAVLAAAKTKVDRLSRWALALEERRGYWKAVVAIAAKNARMAWAVLAKGENFKLLEA

SEQ ID NO: 93114 - protein, 315 aa, unidentified
MAMPVSVTKPIVGVDVAKNELVIYHAELDVLEAIPNDKAAIKRWLKVLPGPVDVAIESTNTYHLDFTDLAYEAGCTVYMVGGYELHHYRKGVKIRAKTDALDAKLLARYLKNEGHELHPWAPPSPLYRQLLSLFRRRAALVQARVALVQSWANEPLLKTAFAEQIAAMQRLETLIEKTIKDHLKNAGLLGQLNRCLKVEGIGFLTGARLLTAFQRGDFKNADAFIAFLGMDLRVSQSGQKDDRRSLSKRGDPEVRRLLHNAAMSASRTSAWKGFYEKLRARGFATTQALVILARKLARIVFALLKGQSEYQPKAA

SEQ ID NO: 93115 - protein, 357 aa, unidentified
MKKGYQKDKTLARGRDVYIGIDVHKVNWHVAARVGGEEVFHGSMESEYHSLRKLLDRFKECRINVAYEAGPFGFWLYDKLIVDGIETIVVPPSLIPMESGNRVKTDKRDSRKLARLLESNMLKKVYVLTEEDRADRELTRTRRQLLEHRGDVMRQIKSKLLFYGIKSPFSNRREYWSKRYVKWLRELTFEHEVLKAPFESLIDLYEYLTLQVKKISKQVVKLSRSDKYNHKMNLIRSVPGIGILIGMELLVELADIERFKTAEEIASYMGLTPSEYSTGQHVRQGRITRCGNKRARTCLVESSWHLIVKDSLMRSKYMKLKSRKGAKKAIIAIARNLIIRIRRIFLNDEPYVVGMAA

SEQ ID NO: 93116 - protein, 315 aa, unidentified
MTKQLPLVNVGVDVSKDTLDVHLLERNLSLSVPNHEQPIASLINRLARYRLERIVIEATGRLEHAFVSAALAKGLPVVVVAPLKVRRFAEAAGQLAKTDAIDARLIARFAAALKPVARPALDANSQSIKDLVVRRRQLTSLRTTEKNRRGVMPKALQPSIDRIIDTLDREIQALEQLICDAIEQHAVWRHKRDLLTSMPGIGPSVASTLIGDLPELGSLSRRQIAALTGVAPFNRDSGHFRGKRRIRGGRAHSRTALYLSAMVAIRYNPAVKRFYERLLQTGKHKKVALTACIRKIVTALNAMLRDNKPWQPSFA

SEQ ID NO: 93117 - protein, 345 aa, unidentified
MNITTIGLDLAKNVFHVVCFDSHGKEMKKRMLRRNQVAKFFANVPPCRVSMEACASSHYWGRKLCEMGHDAKLIPPQYVKPYLRGNKNDYNDARAIAEASSRPSMPFVAIKTVEQQDMQALHRVRSKCVRSRTGLCNSTRGLLGEYGIVLPRGIATLRRSIPELLEDPDNGLSDRFRQLLQRCYEQLVELDEHILFYTKELERLSQQDEACQRLQTVPGFGPIVASAFRSAIGDGSAYSRGRDASASLGLVPRQHSSGGKDNLLGISKRGDKYMRSLLVHGARAVVIQAARNNDPLSRWINRIREERGWNKAVVAMANKLARIGWAVLRNNTTYKSACAATAITT

SEQ ID NO: 93118 - protein, 344 aa, unidentified
MDEVSTIGLDIAKSVFQVHGVDGSGTVVIRKRVSRVKILEFFAELAPCLVGIEACPSAHHWGREVALLGHTVKLMPPSYVKAYLKRSKNDANDAAAICEAVTRPSMRFVPIKTKEQQTALMLHRTRQLLVRQRTMLSNALRGHLAELGVVSAKGRNGTAELLKIITDVEDDRILPAARGILDVLARQYGAIGAEIGSIDKSILAWHRSCEASRRLAEIPGIGPIVATALVAEIGDWKAFASGRNLAAWIGLVPKQHTTGGKDRLGSITKQGNRYLRWLLVIGATAVIRYAQKHGTKNRPWLGRLMERRPAKVAAVALANKIARMAWAIMVHGDRYKEPKLLMAA

SEQ ID NO: 93119 - protein, 404 aa, unidentified
MYNAVGIDVSKGKSTIAVLQPGGTVIRKPFDVSHTSQSLIELAHYLGSLEGSTKIVMECTGRYHEPMLKALYKAGLFVSVVNPHLIKNFGNNSLRKVKSDPADARKIARYTLDNWAELRQYSGMDNTRTQLKTLNSQFSFFMKQKVAAKANLIALLDNTYPGVNKLFDSPPREDGSEKWVDYAYSFWHVDCVRRIGLKTFTERYRAFCRKHHYIFQPDKPEKLFHASKELVAVFPKEKTYKLLIQQSIQQLNLASGHVERLRQEMNALASTLPEYSTVMGIYGVGKTYGPQLIAEIGDVSRFTHREALTAFAGVDPGVDESGQHKSKSNRASKVGSARLRKTLFQIMTTLLQNAPEDDPVYRFLDKKRAQGKPYYVYMTAGANKFLRIYYGKVKECLRNLEQAE

SEQ ID NO: 93120 - protein, 359 aa, unidentified
MAIKVERNKINFKGKKVNIGIDMHKKSWRITALVEGDIVMAVTLARPNYDSFKKLLVNFLGNYLRIVYEAGPGGFHLYDRLTDDGIECIVTPPSLIPTTSGSKVKTDKKDSYKLARLLESNMLKQVWVLSPEERAHRQLARTRRQIANHRSDVMRQIKSLLLFHGIQIPFPGKQQWSAPFITWLKELDLGDEYLNKSLEALIRLFDYLSIEKKSLTHEVIKLAEEEKYASRVKLLKSVPGIGVLSAMEILVELQDIARFKTADELAAYLGLTPSQHSSGEHTRMGHITHAGNDRLRTTLVECSWILIGKDPEIKKKYDNIKYRSGGKRAIIAVSRTLSARIRRMLLDQIPYKIDLNKPA

SEQ ID NO: 93121 - protein, 406 aa, unidentified
MNAVGIDVSKGKSTVAIMQSFGVVVQSPFEVAHTDSELITLAQHLKSLPGETKVIMEYTGAYYQPIAYILHEEGIFVSAIHAQVIHNYGNDTIRRVKTDKADAVKIANYGISAWLKLRRWSPEEDTRKQLKFYSRQYSKYGKLRVMLVNNFIALTDQTFPGVNELFCSPPRKSDGHQKWLDFAMEFWHCECVCGGTPAAFEKRYQKWCRKAGYNFSKEKAWDIFASAYGHCCVLPNDAVTKLLVQQAIRQLTAVSETIAVIAREMKTIAEQLPEWPVVSAFYGVGEVLGPQIIAEIGDVCRFKKKGSLVCFAGLEAPPYSSGKFESKERTISKQGSPHLRKTLFQVMSVILQQKPADDPIYQFLDRKRAEKKHYYSYMTAGCAKFLRIYYARVKDYLDKQAAEAES

SEQ ID NO: 93122 - protein, 375 aa, unidentified
MKEKLRFLGLDVHAETIAVAVAEPEGEVRSLGTIPNRAESIRKLIKKLGPAGKLRACYEAGPTGYVVYWQLAELGVECEVVAPTLVPVKAGDRVKTDRRDAEKLARCYRSGDLTAVWVPDEGSEALRDLVRAREAAKQDQTRARHRLSKFLLRSGQRAPTGVRPWTRPYLIWVAQLRFTQIAQESTRQDYLHEVEHMRERVARLEQAIMEAVKLASPALQQVINDLQALRGIADISAVTIASELGQVSRFGSARQLMGYCGVVPSEDSSGKRTRRGSITKTGNAHLRRIVVEAAWSYRRPPGIWYGLRRRQESISEEAKEIAWKAQHRLHKRYMRLGAAGKDQRKIVTAVARELLGFIWAIGIRAETISRQQVAA

SEQ ID NO: 93123 - protein, 427 aa, unidentified
MSELTTIGLDLAKHVFQVHGIDAQGTTVLRKRLRRGQVLAFFSRIPRCVVGLEACATAHYWARELGALGHEVRLMPAQYVKAYIKRNKHDAADAEAICEAVQRPTMRFVPVKTAEQQATQLLHRGREQLVRQRTMLVNALRAHLAEFGIVAAQGLRNVGELIAIVRDDGDTRLPDVARQVLQVLANQIEQIETAVAALERQLLAWHKTNPVSQRLASIPGIGPIIATAIATTVADPKVFRSGREFAAWLGLVPRQNSTGGKTRLGGITKRGNRYLRRLLINGASANLLRSKATKADPWVIGLRPAAAAAGRRRGAGEQDGAHRLGGDAAREGIPAQGCGGLVAHGTGAGACERAMTRDGTVGRSDATERSLPFHWDIDPARMMRPRFADSIRASSPSGLREQAGHMTASDFCAARYIFSCQAGAIHT

SEQ ID NO: 93124 - protein, 339 aa, unidentified
MELYSAIDLHSNNSHVAIIDDQQNRVFYRKLANEGKLIASAFAPYREQLKGIVIESTFNWYWLADLLIEKGYPVHLANPCGIQKYSGLKHADDKHDAFWLAQMLALNILPEGYIYPKEDRPLRDLLRKRAHLVRVRTSLVLSLQNIVMRNHGIKIRSNDLKKLTQDPVAELLKDQEELALAGRASKETIDFLTRQIQRIEAAVRSKALLKPPFPKLLTLPGVGDILGITILLETGPIERFKAVGHYVSYCRKVSSRWTSNEKTKGKGNTKNGNRYLSWAFSEAADHARQTHDPSRDFYNRKLKQTNASVAHHALAHKLARAAYYIMRDHVEFKEDKMFR

SEQ ID NO: 93125 - protein, 314 aa, unidentified
MSVSTCFTGIDVSKDQLDVAVRPTNEKMSFANEDDGIDMLIKRLLPFQPHLIVLEATGSYHQLVLGRLLACGLPAIAINPRQSRDFARAIGRLAKTDSIDANVLAEFADKIRPELRSIPDEATQQLDAICTRRRQLVTMLAAEKNRHHSGPAAIRSQIKKHIVWLEKQINELQRDLDKLIRSTPAWREKDDLLRSCKGIGPTTSHTMLASLPALRTLSRHRIAALVGVAPFNSDTGKYRGQRHVQGGRIDVRCVLYMATLAAIRSNPVIRAFHHRLIAAGKAKKVAITACMRKLLTILNAMVRTNTRWTANFGS

SEQ ID NO: 93126 - protein, 333 aa, unidentified
MSRIVGIDIGKAWLDVDALGKLFRLQNNRAGFAELLRRSRPPRGDCCYVCESGSYGRALIKYLHDQEAEVCVVSPLRVRQFGYATGAKAKTDRLDASLIKRFAATLKPPRSLPVERWVERLRAIMRRRQQIVDIARNQKNQKEYLQGKRFRNQAEQIIELLAEQADSLFEEALRVINQRSALRRKMLVLLSTVGVGEICGVQLLAEMPELGRLNRREVAALAGLAPYNNDSGARSGKRSIHGGRGYARRALFMAAFHASRINPILAAFYDRLVRKGKPRRVCRIAVMRKLLVYLNARIRESDAGNDVQPPPKITPSLIRQLCKAKVMRAKTTV

SEQ ID NO: 93127 - protein, 365 aa, unidentified
MAARERDRSQRSRSPKTVGQLGSSRSSGHQPEQLRGPRARIVQGRETRRGTMSGACFVGMDVSQDTVDVAVQPGTAFRIVNDEPGVAAAVERLQELQPTLIVLEATGGLEVPLAGALAAVGLPVVVIHPRQVRDFARATGQLAKTDQLDAQILARFAEAIRPPVRPVPDDQTQGLVALVARRRQLIEVLTAEKNRLRLTAHTLQKRVQAHITWLEHELECINADLTMTMRKSPVWCEKEEVLRSVPGVGPVLITTLFANLPELGTLTRKEVAALVGVAPFPRDSGTLKGRRASWGGRAPVRAALYMAALVATRKNPVIRTFYQRLCQAGKAKKLALTACMRKLLTILNAMVKSGTRWRVVASQPA

SEQ ID NO: 93128 - protein, 343 aa, unidentified
MQVSTIGVDLAKNVFQVHGVDSAGKVVITRQLRRKQIIDFFSKFPPCLVGMEACGTAHHWAREVSKLGHTVRLMPPSYVKGYVKRSKNDAADAAAICEAVTRPSMRFVPIKSTDQQALLMLHRTRDLLIRQRTQLINALRAHLAEFGLIAETGREGLAQLAAIITDESNREALPSAMKQALQAIVDQLAALELQIGTLDRAIHAQHRANDMSCRLETVPGIGVIGATAIASTVTDPSDFKSGRDFAAWIGLVPRQHSTGGKERLGGISKQGDRYLRRLLVIGATAVVRHARQHPQKHPWVMRLLAKKPAKLVAVAVANKMARIAWAIMAKGGYYRAPELAAAA

SEQ ID NO: 93129 - protein, 343 aa, unidentified
MDDCDYKVGLSPQAPGIAHPNMKDPVLGIDIALATFVAALRFDDGRLARMEFANNPNGFRQLLNWLRRHFVGQLAVGLESTSTYGDALAQWLFAHGHTVYLLNPERVATYARSQGQRNKTDPSDAAMIAAFTAQYKGTPWQPPSPEQKKLRSLTRTRHQLVCCQTQLKLQIRTAEPAGAVHLKAVLKKVQSELQALTRQLKEHLRHHPTLDGQVKRLRTFKSVGLTTAATLVAELPPIGPDSDPRSICVWAGVIPQRRQSGPKEYRTRLSRKGNAYLREALYMPALVGRRYNPVLRAFAARLKQKGKTSGAILGAVSHKMLRILVGMLRTQTDFDPNWSPSMP

SEQ ID NO: 93130 - protein, 382 aa, unidentified
MGLVERNTYIGLLVEESNTLLGWGNMVERETEAKSSGSGVTNPYRRTEHCDKIHAYRCDKEVGVIGVDVSKEHLIISRGRVRKYENDLKGYEEILRMKPCAIVLEPTGVYAIRPSQYFKERGVRVLQVSPNVLSREKEFRGKKTDFYDAEKLENMVDKAKEYDYNPLRELVTLYLFLKDIETKYKNRLKRTLFLVSDNDKVSKDRLEKLAKGDFTQEELYQLEYTPIVLEEIKILAKNLLETQERLKEVRRMVEGQVPQDHVLLTIPGVGRLAAGIIIGIVGDVKRFPKPESFVAYCGLDPVVERSGRAVVSRGISKSGNKYLRSLFYFLAMRNYSRNPTLLEFYETHKDRLKGKKLYVALARKLARVVWSVWYNNKPYEPK

SEQ ID NO: 93131 - protein, 412 aa, unidentified
MDVVVERCAGLDVHKDTVVACVRTPGKGGSREQTTRTFRTMTVDLMALRDWLVALGVTLVGMESTGVYWKPVFYVLEDDMQCWLLNARHLRNVPGRKTDVQDAEWICQLLEHGLVRPSFVPPKPIRELRDLTRYRKAQIDERGREAQRLDKVLQDAGIKLSSVATDILGKSGRDMLMALISGTHDPQVLAELARGRLRAKIPLLRRALEGSFVSHHRLIVEKILAKLDFLDETIEDLSAEIDRLIAPFAAEVELLDTITGVDRRAAECIIAEIGVDMGRFGDSARLASWAGRCPGHHESAGKHKSGRSRPGSKWLAATLAQCAEAAGRSKGTYLGAQFQRLRGRRGHAKARKAVEHSILVAAYHVLDQHVPYRDLGADWFQRRRPEAHARRLAQQIEALGFRVTIEPTDQAA

SEQ ID NO: 93132 - protein, 325 aa, unidentified
MTKEDFIYVGIDLHKETHTAVMIDCYNNKLGEITFPNRPADFPKLVTKVKKCNTDAKEVVYGLENAYGYGRPLAVWLIDKGYFVKDVNTAISHRQAKHRGAMYRKSDSDDAEAIALATLNMLDKLPDACPNDAYWSLGQLVHRRDNIMKQRTRLVNQLHEQLCIAYPSYKSFFNDISRPTALYFWEHYPSRKYLRGKSVEDLREELVPVSHNRCSTKNCEKILDAVASDKVKNNAYQDARDMVTLSIVSDLQHYDSQLAEVDKMLEQMYKMLGCTLTTIPGVNVITAVKILAEIGDIKRFGNANKLAQFAGMHHFIYHPAVRVKM

SEQ ID NO: 93133 - protein, 448 aa, unidentified
MVVRDPALGVPSIKSKGGDTVKKRLKFDHLSTLCVGLDIGSRGNFITALNFDSDRLINMRPVPNTASGVEAMESMILAVLEGDPQFRYLLIALESTSFYGVHVANYLSTSDQLKPYDVKVFCLNPKTIANYRKSFTGLGKNDGIDSFLVADYVRAGRIEIDPWRGSQYLALQRLTRQRRHISEAIAREKNYVLNNVFLKFSEFALLSGEDSPVSNKFSATAEAILTEFKTTEDIANAPLEELIDFISASGHGRFSDPDQVASLLQKAARNSYRLDKALYEPITTSIACSFNCIRAFEKEQKALDKAITATVAGLNPTEYQILKSIPGIGPVYAAGILAEIGSVRCFNNNNALAKYSGIIWRDNQSGEFDSEDTPMMKAGNRYLRYYLIQAAGSVVRYCPEYEDYYNKKFAEVPKHQHKRALALTARKLIRLIFGLLDKNQLYSPAKSR

SEQ ID NO: 93134 - protein, 337 aa, unidentified
MIVIGVDVHKHSLTAVAVDELGRTVADRSGPVGGDVVVWAQTLEAERLWAVEDCRHVTRGLERTLLEAGERLVRVPPRLTAPQRRRGRVRGKSDRIDALAVARAFLQEPLLDGPRAGEETLRELKLLVDHRDDLVAERRRCQQRLRWHLHELDPTLAVPLGALDRAVWLDRLGRQLARREQTTQVRIARDLVGRCRTLTRSIGELERELHARTAALAPRLLQLPGCGPLSAAKLLCEIGPIERFPTDAQLARHAGVAPLDASSGKHQRHRLDRGGNRQLNCALHRIAVTQGRVHPPARAYLERKQGEGKTRREAIRCLKRQLARTVYTTLKNEPLLT

SEQ ID NO: 93135 - protein, 356 aa, unidentified
MSEITRVGVDLAKSVIQVNAVDAGGKLITNRQLSRDKFLSWCAQLPPGCLVAMEACGGAHHWARKLIDLGLNAKIIAAHMVAPYRLQGKGGKNDANDAAAVCEAASRPNMHFVPVKTTVQQGILCVHRLREGLKEERTASINRIRGMLTEFGLVVSKSPDKLREKLADMLEDASNDLSGMARLVIQEAYDQWKDLDERIEWCDERIKAHVKDDAQAKAAKELMGIGPVTASAVVATVGDFHQFRNGAQFGAWLGLTPKQNSSGGKSSLGGVTKRGDMYLRTLLIQGAKSAVMTAHKRDDPISKWLRQLREKSGWQKAAVAMANKNARILWAMMTKGCRFDPRHVSIKPVVTAATMV

SEQ ID NO: 93136 - protein, 330 aa, unidentified
MQQINRLGIDVSAANLSTICQEAGGQQRQALFDNDPAGHRKLIAWATRKGAPAQVCLEATGVYSLDLALAWHHHPKTQVMVVNPRAIKAFAGPLLQRAKTDATDAQVILAFLQRMPFQPWQPPAEEVMPLQALTRRIDQLKVTLTQETNRLHAPDYRHTPPTGISQDLQHHLRYLQGRINRLEAQALDLVQQHPQLQATFTRLISVKGIATTSAMQLMAELLVLPDDLQPEQWVAQAGLDPRPRDSGTSVHKPRFIGKARNAYLRAALYMPALVALQHQANVSAFYQKMLRAGKKMMQALVAVMRKLLRRLWAILKYHQDFDGNKFYQLT

SEQ ID NO: 93137 - protein, 458 aa, unidentified
MNRNKSKSKIDHTMPMVHPNAAAIDIGATMHMAAVRADRTPEPVRSFGTFTTDLHRLVDWFKECGVETVVMESTSVYWIPIFELLDARGFTVFLVNARDAKHVPGRKTDVSDAQWLQRLHSFGLLRASFRPKGQIAELRAYVRQRERLLEYAASHIQHMQKALTEMNVQLHHVVADITGATGLRIIHAILAGERDPKVLTRLRDYRCHSSAETIEKALTGSYRAEHLFALEQALALYDAYREKASACDARIEAVLKELSIGRGHSSDSLPSSGRDRSDQANALAFDARALLFALLGKDITQINGLGPYLSLKLIAECGDDLSAWPSAKHFTSWLGLAPSNKISGGKIISSRTRRCGSRASALLRLAAVSVGRTDTALGAFFRRLSARIGKAKAVTATARKIAVLFYNAVRYGMEYVDPGASYYETRYRTRVVNNLHRRAKAFGFVLQPMEPAPGVAVS

SEQ ID NO: 93138 - protein, 348 aa, unidentified
MTVYIGVDFHARQQTISYLTTEEGTIQHLVLLHDNPVAVRAFYAQFAGQRVVVGFESSGYAAWFEELLEELGCELWIGHATYIRQFAKRRQKNDRRDADLILELLHTGDFPRIHRYSRTTREMLQQLRYRQRLVKMRTMAMNMLLFMASSRGVSLRTQLQSKRGQAKLQQLALPATLGTQRDELLSLLQTLNEKISTIERWLEQQTKADLAVQRLQTHPGIGLLTSICLRYTLEDAGRFANTRKVSAFAGFDPMQDQSDERNRMGAISKQGSRWLRFYLVEAGQVAIRKDADLQRVYQRVARRGGHAKAKVAVARRLLVRAFIMLRDEIDYAEFQRRGVAARSSRGTA

SEQ ID NO: 93139 - protein, 345 aa, unidentified
MEHYVGLDVSLKLTAICIVDQTGKIEREGVVPSDPEAIAAFIKSHAPHVARVGLETGATATWLWTELNKLGLPVICIDARHAKAALKMQINKSDRNDAVGIARIMQCGWYKEVRVKDLDSHAVKALLVSRALLVKIKRDLENQIRGLLKNFGLVIGRAKMNVFAVRAAELTVHRPELAAAIAPLLNARAAIEQQIADLDRKVMRLVRNNAQARRFMTAPGVGPITALCFLATIDDPTRFKRSRSVGAYLGLTTRRYASGEMDWTGRISKCGDMMLRSYLYEAANVMLTRVAKWSALKAWGIRIAKRTGLRKAKVAVARKLAVILHRMWIDGTEFRWSKEAANQPA

SEQ ID NO: 93140 - protein, 343 aa, unidentified
MESVTTIGLDIAKSVFQVHGVDAAGRVVIRRQLKRRYVLAFFQKLPMCVVGIEACATSHHWSRELKALGHTVRLMPPAYVRPYVKRQKNDTAEAEATCEAVTRTNMRFVETKTPEQQSCLMLHRTRHLFIRQQTAVINAIRAHLAEFGIVARVGRNGVMDLLDVVADTSDRRLPEVARGCIAALGAQLRMLKAQILEFDRRIMAWHRSNETSKRLDEIPGVGPALATALVASVADPKAFRSARNFSAWIGLVPKQHSSGGKDRLGSISKQGDRYLRSLFTAGALAIIRYAKIHGTKHRPWLTALLARRPTKVAAIALANKIARMAWAMMAKGERYKEPVALAA

SEQ ID NO: 93141 - protein, 331 aa, unidentified
MRHCGMDVHLRSTTVETLDVDTGEVARRVLRTERETLRRWLSAEPPMRVVLEAGSSSHWVAETVEQLGHEVVVVDPRRTSAVAVAGGCKKTDALDASTLAWLSSKGALVPSYRSSPAMRDWRRLLTTRQRIVRSRGDLVRTVRSALAAQGIVLPIRRAATFVARVRELPEALPLAGLLQLIDAFDKQIALANREVLARAHADPTVRRLMTVDGVGPLVASAFRVVVEDARRFHSGRQVAAYIGLTPVVHNSGSRERLGSISKCGDKLLRTLLIEAALVLLNRTRKRSRLQDWGWQVRARIGHRKAAVAVARKLCAVLWAMWKRETECNRMK

SEQ ID NO: 93142 - protein, 315 aa, unidentified
MLIIGVDYHPSFQQIAFAETETGEFGERRLNHSDGEADRFYRNLKQRGIKVRVGMEATGYSRWFERLLAELGMELWMGDAAEIKTKRVRKQKTDREDARLLLKLMLEDRFPRVWVPDPHNRDLRQLLWHRHRLVQMRTRIMNQLQAIAMNEGVRWKKRLWKERGRAQLAQLQLAAWASRRRQDLTELLDRPNPTIEELTAAAEQEAKKRPEVLRLMTHPGVGFLTALAFVLIIGTPDRFRCGKQIGSYVGLIPSEDSSAGRQRLGHISKQGSALLRFLLVEAAQALLDGLDISVGHRRCPCDPSQKTDAGGTPAS

SEQ ID NO: 93143 - protein, 391 aa, unidentified
MISVGIDVAKDKHDCFIINSEGEVLADVFTIPNSLDGFQHLLQRIRDCSSHQGKIKVGLEATGHYSYNILGFLLDNGLATYVLNPLHTNLYRKSLSLRKTKTDRVDARTIAAMLLSDVGLKPYTDTAYYNEELKSLTRYRFDKVKERGRLKQSITRLVCILFPELEKLVPTLHIVSVYALLEEFPGAKQIAEANLTRLKTLLYNASKGRYGQDMAVKIREAARKSIGSVMPAKSLELRHTIHLIRELDAEIDEIETAIQRIMNELHSPITTIPGIGSRMGAMILAEVGDFSRFGSPDKLLAYAGLSPSTYQSGQLKNCYAHMEKRGSRYLRFAIFNAAKYVCHWDRGFAAYLAKKRAEGKHYNVAISHAAKKLVRLIYALEKSGEPYRLAA

SEQ ID NO: 93144 - protein, 422 aa, unidentified
MMYMGKRRNRVCGADVHNNLIVATIQCSDETTLREEFGTNRSELERFKAWVIANNCEQVAFEATGVYWFPVYDVLSPSIDTIVANPWMIKGLPKDKSDDHDSKSIASFCLNGQIKRSRIFSGDDRDLRTMTRARSGYVKTRTQFRNRIHKYLAMRGIKLRSGIRGIFGKSGRHVLNGLVEGEDVDAILDGIPSGRIRKKREIIKAAIAVGLDDTTKFLVKDALDVLDNLEKRIETMSRDILGRTLKKSKDLAIVMSVPGISFVSGSKILSEIGNYHDFSTPEQLAKWCGLVPGLNESAGKKKSCGITKQGSKHLRWILVEIAQVVARMKNNRLTRFFKRIKARKNHNVAIVALARKLICIIHHLLVNQELYDMGLEKAIKSKRKKNAQAQGSSSEDQLQDRVAAIVDAYYRINAKSVLDGGG

SEQ ID NO: 93145 - protein, 410 aa, unidentified
MQTLVERGCGLDVHQATVVACLLIVLQSGKVHKQVRTFGTTTRELVSLREWLLSEGCTHVAMESTGVYWKPVYAILEGAFEIVVANAQHVKKVPGRKTDVKDAEWIADLLCHGLLRASFVPPKPIRELRDLTRYRRKLVESRSAERNRLLKVLETANIKLASVVSNVFGASGRLMLLALAEGRDTAQEMAQLAKKQLRKKIPELQLALEGKMEEHHRFLLSVQLHRLGAVEKDLAIVEQRIEEKLKPYAAEVTLLDEIPGVDTALAGAIIAELGVDMSVFENVSQLASWAGVCPGNNESAGKRRSSRIPKGNVYLKTALVEAANAAAKAKGTYLRDKFYRLKARRGYKRAAVAIAHKILVAIYHMFSHRVCYNELGDLYLDKLNKHHLTRNLVHRLERLGYTVTLEQKAA

SEQ ID NO: 93146 - protein, 433 aa, unidentified
MSNFFYSPVIGIDVSADFSYTAILAPNGDIYKKSFKIKHDLNGFNHLVDEIKKVEEEFNMKTAIFMESTGVYHLSLFHYLNKYFDNTFVINPLVTKSNKNGDIRKVKNDKKDALSIATIGKFQNIKLSQQLSLDIFLLKNLVREYYKLTDTSSTFKKKLSADLRVIFPGYNTIFSDSTSKSSIELLSQYPTPQSILEAPKENIIKIFLNSSKKGIIWSENTYSKLFKVANEAKIIGLPLDGLAVKIASSITLIKTIQSEIDTLLQKINNFIQSETFPESIRANIELIDSIPGIGQLTAITIIAEIGDIDGFLKPKHLVAFFGIDSSVNQSGNFKGDDNKISKRGTRIGRRALYSVALASIRNNRNGVPINKVLLDYYQINLKGKKPKIALVAIMHKIINYIFAVLRNQTPFEQRDPKIHKQMFLENNSLNKVA

SEQ ID NO: 93147 - protein, 374 aa, unidentified
MAGSREAFVGIDAAKLRNAVAVADEGRDGEIRYLGEFDAAPESMRRLVARLAAKYDRLHFCYEAGPTGYGLYRLIVSLGHSCTVAAPSLIPRKPSDRVRTNRRDATTLARLLRAGELTAVWVPDPAHEAMRNLVRARTAAVETVRVHKQQVGAFLLRHGRISPLKKSWGARYYRRWLQEQSFEHPADQIALQGYVEAVRLAEERLERIERAIAEFLPGWSLAPVVEALMALRGVDLVVAVSFAVEIGDVRRFESPRQLMGYLGLVPEERSTGETVRRGSITKMGNARLRQLLVESAWTYRHPPRVGKGKLAKIERVPPKVREIAWKAQSRLTARFRAFAARGKKLTVTCTAVARELAGFMWAVAREVQPASSVA

SEQ ID NO: 93148 - protein, 416 aa, unidentified
MNAVGIDVSSRKSTVAVLRPLGEVVCLPFDVTHDIAGLASLVEKLKALDGETRVVMEHTGRYYEAVEKALHEAGLFVCAVNPLLIKEYGANSLRRVKTDKADAVKIARYALDNWADLRDFTPMDAIRYDLKTLNRQFQLASKQRTASANNLIALLEQSFPGIRKCFDSPVRSDGTQKWVDFAHSFWHVDCVRKQPFAAFCERYRKWCKRHAYFFKLSNAEEVYALAKRAVVLTPKSKVVKVLVQEAANQLISISRSVEVYRAEMDRLAAMLPEYPVVMAMYGVGKSYGPQLMAEIGDVRRFERKQALVAFAGIDPMPNQSGDKNVRSNKSSKRGSPYLRKTLFNVIRTYLQCAPQDEPVFQFLNRKRAEGKPFYVYMLAAANKFLRRYYAKLRDYFASLDTLQPVAPIPTILKATL

SEQ ID NO: 93149 - protein, 416 aa, unidentified
MAHPKTLYTYVGVDSHKDTHTAALIDCFFETLGVISFDNRPSKFEAFLSQAEGLKADGTALMFGLEDASAYGRQLAAFLNGRGHQVRHVTAYLVARERKNQNITQKSDAGDALCAARVLLSKFGELPSVEPDDRYWTLRAMVTRRDFLVKNNVALKNYLHNILAARFPRYSDFFSDIFCKSALAFFEGFPSPAALDGVTVGELAGFLKTPSYGQFGAKKAADILATVKESGHMDSLFQDAHDGAVRSTIRQIRYNLQEIESAEGELAVFLEGFGCTLTSMTGIDTVTAAQMLSCIGDIRKFATPAKLARYSGVAPVAYSSGKTDAHYANRRGNRELNSIFYRLAVRLVSTVNPSGKAVNPFFYEYYHRKQSEGKTKRQALKCVQRRLVNIIWTMLTRNEEYVNPPMLVVGRDKGAT

SEQ ID NO: 93150 - protein, 424 aa, unidentified
MRAIGLDVHLEFCEVAIVEAGKVRSAGRIETKPEQIELFAQSLGKDDRVALEVTGNAWGIKRLIEPHVARVMVVSPNDTGIRQARAKTDRLDARTLAKLLASGELDPVWAPDHATWVMRRRLQRRSQLVWTRSRAKNQIHAALMRCLVGRSPFSDLFGKKGRAWLAALPLPEEEREAVDSALRQIEFLDSEIAAVERLIATDALQSTEIRRLMTVPGVNVICAATFLAAIGDIRRFESPRKLVGYLGLDPKVRQSGSGPATHGRISKQGSVRARHALVEASWSTVRQPGPIRAFYGRIRARRGHQVAIVAAARKLACLFWCLLTREEGYAYEQASLTAKKLRLLELRAGAPKKSTNTGTWATREKMRQAERRLAEQAEAAYRRTVADWQATQRKREGAGATPGGASNGSADPAARQDSTPEPAL

SEQ ID NO: 93151 - protein, 347 aa, unidentified
MAYFTGIDVSLRSVSICVVDDKGTVCREAKVAAQVETIAQWLHEFSGDVRSVGLEAGALSQYLTYGLQAAGFEVICLEARQVKNTLASMRNKTDRNDARGIAQILRTGWYSKVHIKSMHSHRVRALLASRKAILKKCVDLENELRGLLRVFGIRLASRVGHGAFDVQVRETFAHDEMLSCALTPLLDARTVLYKTYLKLDNAIKALVKADPLCTRLMSIPGVGPVTALTFKAAVDDPARFKSSRNVAAHFGLTPKRYQSGEIDNPGHISRAGDSDVRSALYVAAHSLLTRNAQWCSLKAWGMRLAKTRGHRRAVIAVARKLAVILHRMWVDGTEFRWGKAPRQPAAA

SEQ ID NO: 93152 - protein, 495 aa, unidentified
MFVNQSKVFCRNKVGVYYPCLKLALKVVVYNLENPAKFEFYWVSRLAMYQTKILSALLAKLLVMSKLKEIKKNAAGIDLGSAEFYVSVDGVTVRSFETFTSSIIELIKYLKEHFIKTVAMESTGVLWIPLYDMLEKEGFEVFLVNAAHAKNIPAQKSDPADCRWLQKLHSYGLLRASFVPQDAIRRLRTFMRLREDHLDMASSHIQHMQRAMELMNLKLKNVISQLHGASGLRIINAILAGERDPVILTELCEITILKHKKNKVQESLKGNYKEEYIFLLKQAYQAWQFYQEQIKECDAQIEKLLDEATCKILLSDTGSPKPSRHNCPQIKGLHDKIVKLNQGRNATQISGISDTTMLKLTAELGFDYSKWPSEKHFVSWLGLSPKKHQSGKLRKRKRNNAKTKGGQIFKECAMSIANSKHLALKGFYHRIKTKHGARAANKATARKLAVLYYRFMTKGMEYVEIGLIEYEKRYKEIMIKNLCRKGRRLGLQVVA

SEQ ID NO: 93153 - protein, 345 aa, unidentified
MERGLAYQSQSRIMSKHARSRGAAMHQSSTLYIGLDVHKESIAVAYVAQEHHAEVVSLGTIGTRQCDIDQLIRKMQSKSKHLIFVYEAGPCGYWLYRYLTKKGQVCWVVAPSLIPKKPGDRVKTNRRDAIKLARLMRSGDLTPVYVPQVEDEAMRDLCRAREDTIRALKAAKFQLKAFLLRHDIRYTGRATGSPAHLRWLSEVVCPTPAQQIVFQEYVRAVTDHTERLARLEQALTDQVQTWRLAPVVDALQALRGGQFTVAVTTVAERGDLTRFDNPRQLMNYLGLTPSEYSTGERRQQGGITKTGNSHARRALIEGAWAYRYPAKVSRHLQLRLEKVPKRLSH

SEQ ID NO: 93154 - protein, 385 aa, unidentified
MDKSSTLFVGLDVHKDSIDIAVADAPRDGDVRHVGTIGGDLASLDKALRRLISRGQPLHIVYEAGPCGFVIWRHLTRQGLHCEVVAPSSIPRAPGVRIKTDRRDALLLARLARSNDLAVVRVPDAADEAVRDLMRAREDAVREQRNGRHRLKALLLRNGTPYTGKSSWTAAHLRWLAAIKLAHAAQQIAFQEYLHMITEATARIARLEQALRDALPAWHLLPVVQALQALRGVQLIAAMTLVAELQDFLRFESPRQLMAYVGLVPGEHSSGPKRRQGSITKAGNSAVRRMLVEVAWHYREGPRVSPIIAKRHDGLPTAITDIAWKAQTRLHAKFKRLLARKVMKTKAVVAVARELSGFVWAIGREVQTSGWRGTADTGTPQSAAH

SEQ ID NO: 93155 - protein, 336 aa, unidentified
MIIIGCDFHTRYQQIAMLNTETGELVERRLEHENGEARRFYAQLPKAVRVGIEATGFTQWFEQLLGELGHELWVGNAAEIRASVVRKQKTDTRDAAHLLELLVQERFPRIWTPTAAERDVRQLVLHRVKLVQMRTKVMNQLHALAMGQGLCRKKKLWSTVGRQELEALRLGPWASRRRQELLQLLDQLQASLVELDRAVQQQAAGNSAAALLMTHPGVGPVTSLAFTLTLGPSSRFRRGKQVASYLGLNPHEKSSGGQQHMGPISKQGNSMMRWLLVEAGQTAARLDPELRRVYQRLKFRRGSSVAKVAIARKLAVRLYWMLRSQADYAHLVRHAG

SEQ ID NO: 93156 - protein, 324 aa, unidentified
MTDAVLGIDVSKNTFDTNLGAGTKARSKNFANSPAGWHHLIAWLGEHKIRQVHACLEATGRHGLGIALALHQAGHVVSVVNPAQIRDFARTKLGRNKTDQVDAVHIREYAELFKPRPWTPPSPAMRRLCELQTIRAGTVAGLTEWKNRRHSGIMDDLAQSLAKTTIQHFTSQLEAVDQAIAETIDNDAELSAKRDLLVSVNGVGEALAGIVLAELPGPDILGSSAAVTAYAGLNPQQHQSGISVNRPVRISKIGNAVLRTALYMPALSAMRYNPAVAALVDRLKAQGRLKGKQIVIAAMRKLLVLCFGVLKTGKEFDPAMAMGK

SEQ ID NO: 93157 - protein, 389 aa, unidentified
MEARTVNNPPPAASHDETVRCLLAIELSKKSWIVAVNTPLSDKVSRHTLEACDWKGLLELIARIRTRVIQALNRPVEVVSCYEAGYDGFWLHRLLEAHGVRNYVIDPASVQVDRRARRVKTDNIDVGRLLRSLMAYLRGEPKVWSVVRVPSVAEEDDRRLHRERDRLINERVQHVNRIKGLCAVHGIYDYEPLRPNRLARLEQLRAADGRELPPRVKAEIVRELQRLELVLNMIKTIEAERDAIASAGKSSEHANAKKIQDLIRLKSIGPEIGTTLVGEVFYRQFNNRQQLGSYVGLTPSHFQSGPMSRDQGISKAGNPKARTVMIELAWLWLRHQPNSPLSIWFRERVGTAKGRIRRIAIVAVARKLLITLWRYLETGVVPTATVLKG

SEQ ID NO: 93158 - protein, 312 aa, unidentified
MDAIFVGIDVSKDRLDVAVQPIGESFSVSRTGAGIEELAERLKAMSPKVVAVEATGGFETVVAAGLAGVNLPLVVVNPAQVRAFANALGKRAKTDPIDAAVIAHFAEAAKPQVRQLPDETTQMLADLVARRRQIVEMIAAESQRARRLTSARLKKSIARLRKALEKELADLDGEISDHVRGSPAWAEKEDLLASVPGIGPTIARSLIAELPELGSLDRRQIAALVGLAPWTRQSGQWRGKSFIGGGRANVRRVLFMGAMVASRFNPTLKLFRDRLVAAGKPKLVAIIAVARKLLTILNAILRDKSPWQLKNA

SEQ ID NO: 93159 - protein, 294 aa, unidentified
MEGAPMLDTTTFIGLDVHARSIKAVSLDVMTGEVRAATFGYDAGAVAEWVRSVDPRARCVYESGVTGFDLQKRLSGLGVDCAVGAVSKMIKPSADRRRKNDRNDAEFLARMLSVGNVVEVWVPDDECEAARDLTRALEDARDDLSRSKQRLSKFLLRHGLVFDERTPTGRRKGNWTRAHWSWIESIRFAEGADNDVLAYYVDAVRRAAEEKARLEGLVEAEARKPRWRRRVDSLRCLKGVDTATAADLVFEAGEFSRFRNARSFAAWVGLTPSEHSSGESDRRGAITKAGNKGL

SEQ ID NO: 93160 - protein, 378 aa, unidentified
MDVIYPRCAGLDVHAETIVACALWEEDGHIQKDIQTFSTFSKGLGDLLEWLEEHGVTHVAMESTGVYWKPVFAFLEGYVDLTLANPQRIKNVPGRKTDVSDAEWIAKLLRHGLVEKSFVPPADIRELRDFTRLRKKWVGQLTSEKNRIQKVLESSNVKLGSVLSDLFGVSGKDILARLLEKGYVDKDELDECLRGRLKKKKQAVYDSLLGTLTEHELRLLRLLWKHVEELERLIEEVDQHIDRLLEPYREEVNLLMTMPGVKKQTAAVIIAEMGTDMSVFETPERAASWTGLSPGNHESAGKRKSTRTTKGNPHLRSALCEAAWSAARSKTHPLSRKFWSLAARCGKKKALIAIARRMLVIIFCMISRKEPFRQPQLI

SEQ ID NO: 93161 - protein, 365 aa, unidentified
MASVAQLAPIHLGLDVHRDTISVGILAPGREVPVVERIAHDEASIRRLVGRLGDPRRLRACYEAGPTGYELARLLDRMGIGCEVIAPSLIPTAPGDRIKTDTRDCRRLARLHRAGELVAIRIPTPAEEAVRDLCRTRADMVEDLTRARNRLGKFLLRHGRVWRGGSAWTHKHEAWLGGQRFDEPALGTTYVHYRAVVATRHAQLDAVEVDLATWLDRPPFADQVARLAAYRGVTRLGGLTLAAEVGDWRRFARAAQFMGFCGLVPSEYSSGHSVHRGRLTKAGNAHLRAQLVESAWTYRHRPYVGRAIAGRQLGLDPEVVARAWAAQLRLSARFRALAARKNTKSIVAAAIARELAGFLWAEMVA

SEQ ID NO: 93162 - protein, 415 aa, unidentified
MMEQRNKVCGVDIHKRFLIATILSRDGTKIQKRYSTDIDDLFGFRDWVLENNCDCVAIESTGVYWYPVNAVLENKIELILANARQIKHTPGRKTDSIDSEWIAEVALNNLIYPSRIFPKEERDLRRLTRTRESLVKMRSQIKNQVHQGLESCSIKLSSVLSDNFGKSGRHILDGLIKGENIDRIIEEIPSKRVKKNEDQIRAAIRTGLDETQIFLIQSHLNTIDGLTKKLDEIDSEIKHRISRRKDDLQIAMSVPGIGFKAATTILAEVGNYRDFSTPDKLASWCGIVPNVYQSADKLITGSITKHGSKHIRWMLVQVAQAALKKRESRFRRFFLRIKARKGHNVAVVALARKILCILYHLLMNQEMYQEDGVTKSRQSKIDWSSARIDKMSLQSMIEIIAKAGYEVKKIKGQGG

SEQ ID NO: 93163 - protein, 323 aa, unidentified
MNKFRQISADHLFIGIDVAKDSLALFVDSTNQHSECLNQTKDLRKLAKEFKKLNPTLIILEASGGYESLAASIFSEFELPLAVVYPLRVRQFALGAGIIAKTDDIDAQTIAHYGRVVNIQPKPLHSDELLQIHALTTRRQQLIEMRLAEQNRLETAHSSMHSNIKNHLDWLLLQIEAIETEIELQIKQNEALQEKNQLLQSVPGVGQVLSSTLIGELPELGQLSNKQIAALVGVAPFPRESGTWNGKRFCKGGRNSIRRILYMATISASRFNPIIKEFYDNLLKNGKLKKVALIACARKLLVTLNAMVRNNSIWNPKIKSISI

SEQ ID NO: 93164 - protein, 392 aa, unidentified
MIYVGIDVAKDKHDCFITNSDGESLFKSFTIPNNREGFETLFHRIESVSDDLAKVKVGLEATGHYSYNLLGFLLDKGLPTCVINPLHTNLYRKSLSLRKTKTDKVDAHTIASMIMSDVNLKSYSDTSYHNKELKSLTRYRFDKVKERAKLKSSVARLVNILFPELEKLVPALHMASVYALLSEFPSACTIASAHLTRLSNLLSESSKGRYGKDTAILFREAARSSIGSHMPAKSLELKHTINLIQELTSEIDEIEAAIKQIMDEEIQSPILTIPGISYRMGAMIIAEIGDFSRFDSADKILAYAGMSPSTYQSGQLDNCYAHMEKRGSRYLRYALYNATKYVCHWDESFGAYLEKKRSEGKHYNVALSHAAKKLVRLIFAMEKSGQAYISAS

SEQ ID NO: 93165 - protein, 397 aa, unidentified
MIAVGIDISKAKSTVAVIDSDGTVLASPFTMAHTQPEMEAFVSYLKGLGEPTTILMEYTGHYHYPVLKKLQDEGFPVCIVNPYQMKKYGDVEIHKAKTDKKDALRIAAYALEKSYKLVPYSSMEQKYEDLKFLSRQYNQRISYVAKLKVQLIALLDQTMPGITRILPLNSRNPEKCALLLFIKRFKSFDEIHRIGKARFLASYDVLAKKTSERSASSKGLSIYELAVDSITTRGEDPYIWLSQNQCVDLLSATQNAADEIISQMRNIAETIPEYKLLRAMRGVGDRLGPIILAEIGDVHRFHSGKALNSYAGNDAPPYQSGQFESRNRHISKRGSSTLRKACYEVMQALKLTKPQDDPVYLFMLKKEQEGKPFNVAKMAGVNKFLRIYYARAMELYK

SEQ ID NO: 93166 - protein, 361 aa, unidentified
MRTYKVTKADFSGQDIYTALDVGLKSWKVCILTESYEHKTFTQPPDVGHLVDYLHKQFPGARYHCVYEAGYCGFWIYEQLKERGVDCVVVNPADVPTKDRERAFKSDRVDTRKLGRGLRSGDLDAIYVPSQAAQEDRSLVRTRWSFMKKQTRCKNQIKALLSFYGIVIPPEVVSSHWSRRYITYLESLRLQKDSGTQALRILLDELRYLRTTIAQVTKNIRLLSMQPQYGASVTYLVSIPGISTIGAMIFLTELVDIHRFRSLDQLASYVGLVPGEHSSGEQEITTGISHRRNPFLRGLLIECAWIAARRDPALLLAFTKLCKRMPKNDAIIRIAHKLLNRIRFVLLRQQCYQSSVTATAA

SEQ ID NO: 93167 - protein, 390 aa, unidentified
MPKYQDLSRSLAAFDQNSTLVAVIEMGSEGWLVGALVPGLKKDPRKKLSPDKQSLLALLHRWCAEAAKAGRAIKRVCVAYEAGRDGVWLARWLREQDIDAYVIHPTSIPVSREHRRAKSDRLDLRLLLRAFLGWLRGEPGHCSMVAIATVEEEDGKRPLRERETLTGDVTRLINRMKSLLVTHGIRNFKVTLKKAGGKLAELKTAWGEPLPPESLAELQRSFERLRQVKQQIAEIDKARRRRLEKAPEAGVHPMILILARVYGVGLMTAESLVREVLYRNLRDRRAVARYAGLTGSPDESGKKRREQGLAKAGNGRIRRALIQLAWRLLRHQPESALVKWYRARTGDGRRDTRKVMIVALARKLLVAFWELVTNGTVPEGMRLHPAKVAG

SEQ ID NO: 93168 - protein, 369 aa, unidentified
MGQSTEVFVGIDVAKARNAVAVADGERGGEVRYLGEIDASAESMRRFVKRLASKYDYVHFCYEAGPTGYGLHRLITSLGHPCAVVAPSLIPRKPGDRVKTNRRDAIALAKLLRAGELTAVWVPDEGHEAMRDLVRARAAAVESLRVHRQQVSAFMLKHGRVYPRKKGWTMRYLRWLQEQTFDYPAHQIVLQEMVEAVRLAKERVERLEQTIAEFLPHWSLAPLVRALQALRGIDLVVAVTFVTEVGDVSRFENPRQLMAYLGLVPGERSTGETVRRGGITKAGNGRVRHMLVESAWTYRHPPRIGKFKLYRLEATTPKVREIAWKAQTRLSARYRALSRRGKKSTVVCTAVARELAGFMWAVAREVQPA

SEQ ID NO: 93169 - protein, 410 aa, unidentified
MANKVAGIDVHKKVLVVVIADEAQPDVPLVSRRFGAGAAELGHLLAWLCHYGVVEAVMESTAQYWKPVWMELEPHMRLHLAQAQSNKAPKGRKTDLADAKRLVRRFVAGELMLSFIPEPEQRSWRMVTRGRLQLVRSRVRLQNQIESLLEEGRIKLSSVISDLLGVSGRRILRAMANGETNPEVLAKLGEENLKCGVRALVDALTGSMGDIHRKLLTQKLDQIEMLDRQIEELNKMAAGELRVYQDGVTRLIEIPGIGAEAAQEIIAEIGPEAAAFASAPQLASWIGVCPGSNESAGQNHSGKSPKGNRFMRRLLNQAAQAAVKTEGSHLQAVFKRLVVRLGYVKAIWAIAHRLCKIIWNILHKRARFTEFSVTRNPKAVRRAITHHLKALRRLGYDIPPATATPLPARG

SEQ ID NO: 93170 - protein, 482 aa, unidentified
MKAKPQEKNKKSAEHLTQRHWHEMNRKQRREMTRKIQSEDISLEVIHPDAAGIDIGNEFHYVAVPPSRDGQPVRRFGCTTAELKAMADWLKQCGIRTVAMQSTGVYWIAVFDILEQAGLEVYLVNARDTKNLPGRKSDVQESQWLMKLHTYGLLRNSFRPPQEIRTMRAYWRQRNDLVQSAGRHIQRMQKALTQMNIQLANVLSDVSGTTGQAIITAILRGERDPHKLAELRDPHVKASEEQIAQSLEGNWQPDLLFVLKQEQDGYEFCQKQMAECDRQLAQYLQQREDRSQGAPLPEEKRKERLKKKKGNKPQFDLREGLFHLTGTDLTRIDSIDVMTATTIVSEAGYDMSKWETEHHFVSWLRLCPDNRISGAKVIGKGRLPTNNPISIALKMAASSLRLSDTYLGAQFRRLRTKLGAPVAIKAMAAKLARLVYRMLRYGMKYVDKGADFYQLQHRQLKVKQLKWKAASLGYQVIPIPAA

SEQ ID NO: 93171 - protein, 428 aa, unidentified
MGVSVQTDPSNAHTDHAIPYQWFVGIDWGSQTHQVCVLDRDRHRVGERSVEHEGTALAECAAWLTTLAAGEGHRVAVAIEIPRGAIVELLVERGFHVFAINPKQLDRFRDRHTVAGAKDDRRDAFVLADSLRTDRPSFRQVHVEEPHLLMLRELSRTEEALLTEFRRATNQLREQLHRFYAPLLQLCPAADEPWLWELLELAPTPAHAAGLTEAHMAGVLKTHRIRRVSAGDVLKVVQAPALPVAPGTAEAASAHCALLLPCIRVLAAQLQTCARQVESLLTALGTVEAPIAPPSDVAIIRSLPGVGRKITAWLFAEAAQPLAERDYQILRTQGGVAPVTKQSGKRRQVVMRRGCNPRLRNALYHMAHCVAQRDAYFASVYAALKTKGQSHGRAIRSIGDRLLRMLVAMLRNHTLYDPSCRQPVLMER

SEQ ID NO: 93172 - protein, 359 aa, unidentified
MPMLAEVIDAVVGVDTHRDTHHVEISLPTGTPIATCSISNDTSGYAQLLAWIHDHAPGPRLVVSIEGTRSYGIGLARAATAAGLLVLESEQPNRKARRGKGKSDPIDAHLAVLTALRLDTTRLPIPRADGDREALRILLGARHDLTVTSTAQINRLRALLRDGNDTDHQLARAALTDATLTGLARRRLPHDASREQAVRHAEVRRLALAIHDASRALKTNRAQLQSIVDDIAPGLTDRPGIGPVTAAQAIVSFSHPGRCRNDAAFASLAGTCPLPASSGRTVRHRLNRGGDRALNRAIHTIATVRMRDCPTTKAYIARRTAEGKTIREIKRCLKRYIARELYRTLTATMTPTTNAPMAA

SEQ ID NO: 93173 - protein, 355 aa, unidentified
MKTTQSDFSSLQLYIGLDVHKKQWSVSIYTDATHHRTFSQPGTPQALKSYLDHHFPGAKVICAYEACKLGYWIHRVLTSYGYTCLVVNPADIPTSNQEKSNKTDPIDSRKIGKSLRAGLLASIHVPDVATEGDRHLFRYRRRLLGDLTRVKNRIKDKFLFTGTTIPQEFDNSNWSKAFLRWLKQAHLPDAHTRLCVDMLLEQYHFVYRHFLKTSVEVRKLQQESRYKQRSKLLRSIPGIGPLTTVELLTEIADINRFASFKKFNSFIGLKPSSHSSGERDWKGKMSYRQHKGLRSSLVECAWTTLSKDPVMLQRYDELRKRLTGKRAIVKIARKLVSRIYYVLKNEKPYEIGLVK

SEQ ID NO: 93174 - protein, 391 aa, unidentified
MIYIGIDVAKDKHDCFITNSDSEVLFKAFTIANNLDGFNDLYQKIESVMDDVTKVKVGLEATGHYSYNLLGYLIDKGLPTYVINPLHTNLYRKSLSLRQTKTDKVDARTIASMLMSDVNLKSYSDTSYHNKELKSLTRYRFDKVKERAKLKTSVSRLVCILFPELEKLVPTLHMASVYALLSEFPSAKHVATAHLTRLTNLLSESSKGRYGKDTAITFRDSARASIGSNMPAKSLELKHTIKLIQELDSEIDEIENEIKIIMDEINSPILSIPGINYRMGAMIIAEIGDFNRFDSPDKILAYAGFSPSTYQSGQLDGAYAHMEKRGSRYLRYALYNATKYVCHWDPTFAAYLAKKRAEGKHYNVAISHAVKKLVRVIYHLEKTKQQYIKAA

SEQ ID NO: 93175 - protein, 366 aa, unidentified
MALYVGIDLHATNGLVAIVDHEGKRIARRRLRNGLSCYLAYLEPYRSEIAGIAVESTYNWYWIVDGLMDARYSVHLANPAAIQQYRGLKHSDDTHDAFWLAEMLRLKVLPEGYIYPKEQRAIRDLLRTRCRLVQNRTSLILSLQNTLARNGEAKLTAAQIKAVRTDPVTPLLETNEDLLLSGMAIKKAVDFLTVEIRDLEKEILNRVRLESSYEGLLTLPGVGRILALTILLETGPVDRFLRVGNYVSYCRKVPTSWTTNGKYKGRGNKKNGNRYLAWAFSEASEFARRYDRVCRAFFDRKASKTNRMVAHQALAHKLARAAYFIMRDGVSYQASKLFTGSIGRGGEPQKGLDPQPPDLIGSRPGH

SEQ ID NO: 93176 - protein, 321 aa, unidentified
MTYVGIDVSKATFVVAYSSAKSSKTKTFKNTTKGVHEFIQTLSASEHHCVLEATGNYSSLLVYLLSQVGITVSLENPLKIKNFARVMLSVTKTDETDARLIALYGEKMQPAPYRLRSDAILTLKQKRTVIRQLKKQLIATRNLKGSMEALPFFDPKCKKAIEKTIAFLEKQVKNLEEELAVLAQCEYKKQMDLLTSIKGIGVTLAAALIMATGGFTYFDNAKQLTRYLGLSPTYQQSGTSVNVKGHINRNGDSSLRSQLYIAAMASLRCNAECKECFNRLRSNGKPGKVAIVAVANKLVRQAFAVVTQEKPFVDGFKSAKP

SEQ ID NO: 93177 - protein, 373 aa, unidentified
MKGRPPILVKCRYNLATPEGSSPMSNHRFAAADVHAATTTFAVLDDSGKFVMETVVETKAESLLSVVKSISGAVHLTYEEGTHAAWLYDLVRPHVAELVVCDPRKNRNTSGNKSDRIDARQLARWLRSGELSPVYHGQDSTKILKELVRGYENVVADSVRVKNRLKAVYRSQGESTSGGDVYKLEKREEWLSKLRSSGLRSRAEWLYSQMESLDDIRGEAEKAVLREAKKHRPCSLLRSVPGIGPIRSATIVAHVATPFRFRTKRQFWSYCGLAVVTWGSSDWEIDVETLLRRRRPAATRGLNRNHNRHLKDAFKGAVRDARAFRPHLDSLVESGMRDSMARLTVARKIAATTLAIWKKGEKFVLSKAVIRSE

SEQ ID NO: 93178 - protein, 352 aa, unidentified
MTVTIVETRPNTRAITGGVDTHADVHVAAALDPVGGLLGVQEFPASPAGYAQLMGWLRGFGTVCLVGIEGTGSYGAGLARHIAAAGVRVVEVDRADRQDRRRQGKSDPLDAVSAARAAQSGRAAGAPKGRDGAVEAIRALMVAKRTARAGRTQTINQARALVLTGPDDIRIRFTQHTPADLVAELASLRPRSGAVVCYATRIALRELGRRAQFLGRQLERLDELIVPLVTARAPGLLALYGVGADTAAMLLIAAGDHPERLRSEAAWAHLCATAPIPASSGKVTRHRLNPGGDRQANHALWRIVITRMSSHPPTRAYVERRAKEGLSKKEIIRCLKRYVAREVYPHLRAPAG

SEQ ID NO: 93179 - protein, 378 aa, unidentified
MYRIIKIGMDVHSTNYTLCAMEPVIGAEDRIFANIKVTPDYKNVLMFIENLKLKLGLNDTHDIECGYEAGCLGYSLYNQLTAAGVRCVILAPTTMLTQQGQRIKTDARDAVMIAQCLSYGGYHPVYIPTEEDDSVKEYLRMRDDHKLALKKVKQQINAFCLRHGHRYEKTKWTIAHLKWLKQLELSALYRETLDEYMASYDEQTAKIERFDKRIEELASQERYQEKVKKLGCFLGIKTHTALSLIVETGDFERFAKGNVYAAYLGLAPGERSSSDSINRLGITKAGNQHLRLLLIEASGGICKGAVGHKSKDLRQRQNGNPADVIAYADKANTRLRSRYYKFIRHGKKRNVAVAAIARELACFIWGMMTDHIQMQKAA

SEQ ID NO: 93180 - protein, 333 aa, unidentified
MQTAKKIVGVDIGKDWLDVCLPDGRKEHIRNIKSCRTRLIKKAAKLGAMVCFEATGPYEEPLADECLACGVKAVRLNAWGTRKFAESQGRLEKTDSIDCEMIRDYAASLKDNKLHFIKPRTEAQKRLKKSVRARKNLLKARAIIANQFEDDLDQETARHLRSALNSLDKNIAKVEAECDAAIASDERLRELDRRFREVKGVGSCLSRIVLAQCPEIGDFNSKSIAKMCGNAPLDRESCTIKGKAKPRRGRADLKKALYMAAVSASRNNHILRVFYQRLVANGKPCKVALTAVARRIAILLNTIAKHPDFKPAQDPKAPAKAAGAKRGRPRKAQ

SEQ ID NO: 93181 - protein, 356 aa, unidentified
MKYFKNIEKFVTNKTVFCGIDIHLDRWSLCYICDGQVVEKLSLKGEFKYLLSNINQSYVSASSIHFVYEAGFSGFHLYRKLKENGYECTITPPNRVPSVLDKVKTDKRDAEKLARYLAGGLLKSVFVPPPSVEAERHILRMRNSCQTKMTRTKTQIKSLLNLQGIIWPAENGRAWTISHLDWLKTLKFDQNEIRFVLDHYLMEYQFLRQQIATLTKKIRELSKNSAYSANYKRLTACRGIGLITAMTFLLELCDIVRFPSAEKFASYLGLTPSQYSSGTKVRLGHITREGNPHVRRVLVESAWTVIRHDPVLCDKYNRIRSKGTNGKKAIVGVARSLAIRLRRCLLDQVPYAIGVD

SEQ ID NO: 93182 - protein, 352 aa, unidentified
MTKRIEEKEIKVVGIDLAKSSFHLHGVNDQGHTQISKKLNSKQLKAQMFHLAPCLVGMEACGSAHYWARLLSSYGHEVKLMAPQFVKPYVKSNKNDRADAEAISEAVQRPTMRFVAVKAIEQQDVQSVHRVRSQAVANRTAQVNQIRGLLLEYGVKIAKGRARVRQQLPWILEDAENELTVRMRALLSDLYVELVHLDERIVKLDDEIEQIAQADESCQRLMTIPGIGPKGATALVAAIGNIHTFKNGRELSAWLGLVPRQCSTGGKDKLLGISKRGDVYIRQLLIHGARSVLRFVGKKEDARSRWAQNVLARRHHNVAVVAMANKMARTVYALLKHDEDYCVDGAPNRTLA

SEQ ID NO: 93183 - protein, 320 aa, unidentified
MAKRTTICAGIDTGKRKLDVALDCSSEQLQVENTAEGYKTLLEWLGRHKVKRVGIEASGGYEQAVVAELRRKRLVVVVFQPAQVRAYAKYRGQRAKNDRIDAALIAACTAAVNELHPAPDARFSALAVHLTLIEQIGEDIARCKNRLESCRDVRIQKLWKEDITHLVKRKRAEFKALVAAIREHRDLAERLDLIYSVGGAGLPTAVAILVRMPEIGQLSREQAAALAGLAPYDDDSGEHTGARHIEGGRKRLRRALYAAALAGSFRWNPQLMALYKRLIAAGKGHKCALVACARKLLIFINAVVTRGTPWQADAPAAQAA

SEQ ID NO: 93184 - protein, 418 aa, unidentified
MKHTKSEKIKTINEKTLIVALDIGKKIHYGYFRTPKNRDIKPFRIYNTGQSFKLFWKKLCTFKEQHGLDEVIVGFESTGPYAEPISNFLRKKPVNLVQVNPMHTKRIKELTGNSPNKTDRKDPRVIADVISLGHSLTVIVPEGAAAQLRRLSHARERAIGRRTAMNNQLQHLVFVIFPELGDIIKPATKTGMYLIKNHPDPVSIVNLGSEKLGDLVRKVGRGRYSIDRVEKLYKAAKNSVGITEGKESILLETSHLVSNIENENRYIESLEEQMTLYLDQIPYSHSILSLKGIGKITVAGLVGEVGDFRKFKTISEITKLAGLDLFEVSSGNHNGLRRISKRGRALMRKLLFFAALNTVKSHGIMHAKYHTMLDNGTSRMKALVAVARKLLRIIFALARDNTEYDEHYIRKHEYKLAA

SEQ ID NO: 93185 - protein, 484 aa, unidentified
MARNRSTDKIIRGMALVHPNAAAIDIGATMHMAAVSADRTPEPVRSFGTFTADLHRLVDWFTECGVETVVMESTGVYWIPIFELLDASGFAVFLVNARDAKHVPGRKTDVSDAQWLQRLHSYGLLSASFRPKGRIAELRSYVRQRERLLEYAASHIQHMQKALTEMNLQIHHVVADITGATGMRIIRSILAGERDPAVLAAMRDSRCRADAGTIEKALGGNYRAEHLFALEQALALYDTYQEKASACDARIEAVLKELSIDRDRCTTPLPPPGRRMPNTANALDFDVRAALFELLGKDVTRINGLGPYLTLKLIAECGDDLSNWPSAKHFTSWLCLAPRNKISGGKVLSSRTRRSGNKATSLLRLAAISVGRTNTALGAFYRRLATRIGKAKAVTATARKIAVLFYNALRYGMEYIDPGALAYETRYRERVIDNLQRRAKAFGFALQPLEPTRSPGRKPPFSWRNSATVHDRHQRPLRESILPA

SEQ ID NO: 93186 - protein, 319 aa, unidentified
MDNLSHGRVIGIDVSRDWLDIHCLPDGHRFRVPNAPAGHAAVADLARDRDAVVCFESTGGQEWQLWALLEAEGVAARQVPPAQVKAFAQSRGTRAKTDRVDAELIARFFVFRPEAGRGLPAEKLRILRALTSKRAQLIEMRKRLLAQIRAHQKLGTAVMFEDVDSELKQRIDDIIEELEDRITRAIASDEHLSELAVVLRSIPGIGPVASSMLIAEMPEIGTITGEEAAALTGLAPVAHDSGTLRGKRAIAGGRRALRHVMFQAALVAAHHNPSLRSFADRLRRAGKPHKVIITAVARKLVTIANALCKSRQKWVATAL

SEQ ID NO: 93187 - protein, 326 aa, unidentified
MSNILGIDVSKDKLDLILLSEKGKSHKVISNDLAGFKTLDQWLISRHIDQVHVCLEATGQYGDAISEYLYGQGHDVSVVNPTRIKRYGESKLHRNKTDKADAELIAEFCLKEKPALWEPLNPDLKHLRALVRRLIDLQANYRQEESRLSSGEKDAWVIQDLTVHLEYLKACVEATEAEIQNFTKGTPDLKANQTLLVSIPGVGEKTSARLLGEIGEVSRFENAPQLAAYAGLNPKGFSSGSSVHKKTQISKQGRSELRACLYMPAIVAMTHNPVIRALKERLQKKQLPTMAIIVACMRKLLHIVYGVLKSRKPFDPEYDRQFNYSA

SEQ ID NO: 93188 - protein, 540 aa, unidentified
MYHRCSSGSQDGRTYTRDAYADISLAVMHKLAERPAPARRHSSSRKLVNNCAAGDNFAGGRPAPARTRSRVCNPKRIDGRLPVEPEALAPTSNRKTPQEGHHISLVDSRAKRRKNQRQQRHTMNDSQQWKQYPGFGAVDWASEKHSVIVVDQAGKVIEDFEIEHSALGWKKFREKLQAYGSIPFAIETSQGAAVEQLLEAGMIVYPLNPKSAQAYRDRKAPSGVKDDRLDAWSFADALRVDGQGWKALRPEEPLIKELRLVCRDEVSLIEQRTALILQLRHALAEYYPAALEAFKDWTSVSAWMFVQRFPSPELLAKAGKRQWQKFLHARRLWGSDQGPRRMEIFAHATELSGSAPTANAKSLLALSLVQMLFVLEKQLAVYRQRIEALFARHPDHDLFGSLPGAGSKIAPRLLAEIGDERDRFEGDAQNLQCLGGTAPVTMHSGKYRHCHRRWACNKHLRHAIHLFAEKSLSRCAWAQIYYEYHRKKNRSHSDALRRLGHRWLKIIYKMWVDRTPYDPELHHRNQLQHGSWIFQLKACE

SEQ ID NO: 93189 - protein, 326 aa, unidentified
MSRIKGKATTNQTSSETVVVGVDVSKKWLDVFLHPIGERVRVANDATGIGKLLSCCLTNSAKLVVMEATGRYHRTAHTALHEAGIKVAIINPYRTRRFADVLGRLAKTDEIDAEVLARFATIMKPAPTEPSTATMTRIKEIVVARRQVINERLVLENQCEEATSDIVKDLAAERIALCRRHCDVLDAELQAVMKSDPQIAGQYAILTSIPGIGPTTAATLLAEMKELGSANAAEVAALAGLAPMNRDSGMMRGRKTIRSGRVMARNTLYMASVSAVRWNCDLKAFYERLRKAGKPFKVAITAVMRKLLILANTLLKDGRAWSATPP

SEQ ID NO: 93190 - protein, 355 aa, unidentified
MNQEKYIGMDVHQATISVAVMDSSGKLIMECILETKAATILEFIAGLRGTLSVTFEEGTSAAWLHDLLKPHVSHLVVCDPRRNALLKDGSKSDRIDARKLAELLHGNRLHAVYHGEHGLRTLKELGRSYLTITKDLTRVMSRIKALYRSWAIPCSGATVYAPRHRAEWLAKILEPGVRLRAERLYQQLDLLQPVRQKARRDLLVESHKHHAVKLLRQIPSIGPIRAALLVALLQTPHRFRTKRQLWAYSGFAVETHDSGEYRFVRGKLVRNRERITVRGLNHNHNHDLKNLFKGAAQSASTRPGPLCDFYVALVEKGMRPTMARLTLARKMAAITLTIWKKGVEFDAKPLNRQAA

SEQ ID NO: 93191 - protein, 349 aa, unidentified
MLADELDYVVGVDTHLDEHVLAVVAAATGAVVARLAVQTNPRGYSAALRFAEEAGDGARLWAIEGTGSYGAGLARYLAGCGETVLEIGRTPRPERRLRGKDDSLDAARIARAALASETLALPRNGERREALRLLLIARRSAVDVRREALGQLRGVIVTAPNQLREELRGLPVGRLLERCSRLRRSRSAGADELATRLVLRSLARRIEAATLEAAELERELLGHVQALAPRLLDEPGVGPIVAAQLIVAWSHHGRLHSEAAFARLAGVAPVPASSGQTVRHRLSRGGDRQLNRALHTIVLHRRQHDTATQDYIARRIADGKSRRDATRLLKRYLARHLYRLLQNEMPLTT

SEQ ID NO: 93192 - protein, 343 aa, unidentified
MTIDTVAAIPRRFKHVLAFEVSKAELVVQSLPDGTAFRMPNERAAIRKAIRQEIARNAKLGLGPLLVVCEATGSYDRAIIETAHDLGVAMHRAHGSRVRAFARFTGQLAKSDGIDIGVVGAYALASEDLELHRPVRAEQKRLRALIDRRNELAEMIEAERCRLGHVEETDIARSIAAHISDLEEQKRQVETALERLAESDATFANACRLMRSVKGIGTMTPLALLAYLPELGSVPRETIAALAGLAPYDRDSGTSKGRRHIAAGRSEARRALYMPATVAIRHNAHLKAMFERIVARGRPYKAAIAAVMRKLLVILNAVVASGEPCRMANAARTPMRTPIPLDK

SEQ ID NO: 93193 - protein, 330 aa, unidentified
MKEYKYFYGVDVSKNSVDIVYTDKQVNVHQKFSNDSAGMDQLMEWLRQNNTSPDHTLFCMETTGLYCLTLTHFLSSHSIDVWVEHSTTIKKATALARGKNDKVDAQRIAIYATKNLDRLRLWKPMDVTLEKIKHLATLRERLVETVKRLTVPVQEFEERGDHAMAKLLNKSMKKTLAALDKDLETVESQIMEIVGQDENLRHLYKIITSVVGIGFVTAINLMVHTQGFSVMNDARKLACYCGVAPFEYSSGSSIRGKTKVHHMANKKLKCNLHMASITAVRYDAGLKHYYERKVAEGKNKMSVLNAVKSKLLARVVSCVNNQRMYVKIAA

SEQ ID NO: 93194 - protein, 369 aa, unidentified
MTIIPDAGRRPQSRTSVFAGVDTHKEIHVAAVIDPAGTVLGTHSFSTTRAGYRALLTWVRSQGDLVRIGVEGTGSYGAGLTRHLAKHDVFVLEVDRPDRSERRRKGKDDDLDAINAARAALYERRTTIPKSKDGAVEALRILRVARAQAVRERRNTLQLLRMSIVAAPDEVRDQVRNLTRMQLIRHLAAWRPDVSNATDPVVAYRVALKSFGRRYLELTDEIADLDDLINPIVQALAPQLLERVGIGIEVAGQLLVTAGDNPDRLRSDAAFAMLCGVSPLPASSGVTQRHRLNRGGDRQANRALHLAVISRLRIDPRTKAYVAKKTAEGHSKMEIIRCLKRYLAREVYFLLNPGIEHIAPNTKPRKTAA

SEQ ID NO: 93195 - protein, 348 aa, unidentified
MRFYTKQHQYYCGIDLHTKNMYVCIMNQAGNTLYHYNLPARTDSLFQVIKPYLPNIVIAVECIFTWYWIADFCALHHIPFVLGHALYMKAIHGSKTKNDRIDSQKIALLLRAGMIPMAYVYPAKMRSTRDLLRRRMHFVHKRSELLSHIQNTKSQYNLPDFEKRLDRKSNRIGIGEHFNEPAVRKSIELNLSLLDTCETLLKKVELFLVHHAQVHDPNNLYLLKTIPGVGKILALVMLYEIHDIKRFPTVQNFVSYARLIKPRKESSGKITGTANRKMGNAYLRWAFGEAATLILRERDEVKAYHQKLKNKHGKAKAMAILSHRLGRTVYYMLKNQKAFDVIKFISVK

SEQ ID NO: 93196 - protein, 355 aa, unidentified
MSQEKYIGMDVHQATISVAVMDAGGKLIMECLLETKAATIVEFIRGLHGTLWLTFEEGTSAAWLHDLLKPHVNRLVVCDPRKNALLKDGNKSDRVDARKLAELLRGNQLHAVYHGEHGVRTLKELGRSYLTITQDVTRVMNRIKALYRSWAIPCAGTTVYAARHRAEWLAKIAEPGVRVRAQRLYQQLDLLQPVRLEARREFLAESHKHSAVKLLRQIPSIGPIRSALLVALLQTPHRFRTKRQLWAYSGFAVETHDSGEYRSVRGKLQRNRERMTVRGLNDNHNRDLKNLFKSAAISASTRPGPLRDFYVARVEKGMRPTMARLTLARKMAAISLTIWKNGVEFDAQQLQRQTA

SEQ ID NO: 93197 - protein, 360 aa, unidentified
MDIAKTIFEVAVSREPGRVAERRRLSRGTFLIFFAQMPAATVVMEACGSAHSWARKLQELGHKVVLLPPHQVRPYVMRNKTDRTDAKGILEAYRNADIRPVPLKSVSQQVLVTLHRFRSAWMAERTAQINTVRGLLRELGFVIPLGMEKVLPQVRALVEDADSEVPDALRGVLFEACEEIRTLGERIKKTERQLEALAEQTPVVERLRSVPGIGLLTSTAQVTFVGQILRFPSGRHYASYFGLTPREFSSGAKRRLGRISKRGDAYIRMLLIHGARSVLCHAKKEQEHDRLRAWALALERRVGHNKAAVALANKLARIAWAVWKNDPPSSRCPWPLRRRPPQEERRNQGFAHPGTAQSIA

SEQ ID NO: 93198 - protein, 407 aa, unidentified
MVNVGVDLHKTQFTVFVRGLGGKTEAIICEKYPTTNEGYQAFLKRVSVWQDCGEEVRVAVESTGNTRYFKNRMEAAGIKVTVINTLKMKVINESVKKTDKHDAATIAEFLEKDMLPESQLCSRTSEQLRRLLKVRTTLVRTQVMIKNQIHALFMAEGLEDVKGSSLQSKKGRKQALDALNQCKNGLVAQPLFETIDQLEENVNSIEKQLRKLTAADRMVELLMTIPGCGEICAWTIRAYTDDITRFSNAKKYCSYAGLAPWVQNSNETIRHGRITKRGPKELRTALVQVVMGLRRMKAKTLTWRLMQRYELMKAAKGSGKSIIAAARKMAVIIWRMLSDEAAFDLSKMVDRKLSEKSESMSKKAKAEDGCTIEERKISLLTRNDPMVTLDKKSEKTGVAGEKLLKAG

SEQ ID NO: 93199 - protein, 434 aa, unidentified
MLPSTEHPAQAAACAGNAAPINMDATLFVALELSLARWVVVASAPGQSKPGKHAVAACDGPALLALLEELRRRAERLCRCSVAVVTIQEAGRDGFWLHRLLEAHGVQSHVVDPASIAVNRRNRRAKTDRVDAEGLLRALMAFLRGERQVCSMVRPPTREAEDVRRLTREREALLAERIRHTNRIKGLLATQGVFGFEPTRQDRRTRLDALRTPEGQGLPPRLRAELLHQIERLELVLRHIAEVEAARDAALAAERQAAPAATVPSTEATDAKPMVLPADEGAGPSAALPRATARGTFGSSARLLRLKGVGPETAAVLQFEAFQRSFSNRRDLAAYAGLAPTPWQSGGIDNEQGISKSGNPRLRRTMVQLAWFWLRNQPASALSAWYRERVGDKRGRVKRIAIVALARKLLVALWRFVTQGLVPEGAELKPAPAA

SEQ ID NO: 93200 - protein, 342 aa, unidentified
MDHFAGLDVSVKDTSVCVVDDAGKIVREVKVASEPNALLAALKNPVYHFKRIGLEAGPLSQWLFSALAEAELPVVCVETRHMQAVLKAQINKTDRNDARGIAQMMRVGLYRPVRVKTLRSQKLRMLLTHRTLLQSKAIAIENDLRGTLRNFGLKVGMVGKVKFEARIKELVENFPDLAAFIEPLLVVRRVLREQIVILHRRLLAIVRDDDVCRRLMTTPGVGPVVALTYRATVDVPARFRKSKAVGAVFGLTCSKYQSGEIDRSGRISRCGDEMMRVMLYEAAQSMLRSKKWSWLKAWAMQIARRRGMKKAIVALARRLAVIMHRIWVDGTEFRWTREQAAA

SEQ ID NO: 93201 - protein, 453 aa, unidentified
MSRRRATINLKTAKSRVALTITHPNAAGIDIGSAAHFVAVPPDRDDTPVREFPSFTVDLNAVADWLTACKVDTVAMESTGVYWIPLFELLESRGFTVLLVNARHVKNVSGRKSDVLDCQWIQQLMTYGLLSGAFRPADQVCVLRSLWRQRATLLRSQGRHVQHMQKALTQMNVQLANVISDIAGETGQKILRAIVAGQRDGHILGAMKNARIRASIDEIAKSLEGNWRAEHLFALKQALAAFDFIGTQLSECDGEIEQQLQRLQAHDGEPAKGKQRGRSRNAPKFDLRTQLFKMCGVDLTRIDGIDVTTALAVISETGTDMSRFATVGHFTSWLGLCPGTKITGGKVMSGKTKRCANHAAQALRLAAAALRPSQSALGAYYRRMCARMDKPKAVAAAAHKLARLIYTMLTKGEEYVDQGQDYYEERYRQRVLRQLALRAEKLGMKMVAIEQPA

SEQ ID NO: 93202 - protein, 343 aa, unidentified
MNEYDGSQVVGIDLHRQRSVIVRQTAEGEQLSAVRIVNDPVALGLQIEKAGTNPEVVLEATYGWYWAVDALQAAGASVHLAHPLGVKGFRYRRVKNDVRDAGDLADLLRMHRLPEAWIAPPATRELRELVRYRAKLVALRSGLKAQVHSVLAKAGVLIPVSDLFGVEGRERLTKVPLGVAYAQRVISLLELIDVLDAHEGRFFDQIAAELRGHPGYRTIQQLPGVGPTLAAVFVAEIGDVHRFADPSHLCSWAGLTPKHRESDTVVRRGHITKQGSKLVRWAAVEAIQRQPAGTKISVDRKRIEARRGRNIAKVAAARKLLTLVYYGLRDGNIRALAHQRAAA

SEQ ID NO: 93203 - protein, 388 aa, unidentified
MSKIARLGVDTSKGSFELHGVDAKEQVVLRKTLRRKQLLAFLVTLEVDEIGLEACGASHHWARELQHLGHRVVLVPAQYVKSYVPRGKNDKNDARAICTAMSQPWVRERLVPVKSLEQSAGQMLLGVRESLIKRRTQLTNSIRGHAAEFGLVAAKGLDKIEPLLVRIADDESLPALAREMFATLGEDYGELVRRIARIDKRLLAFQRDNEMARRLLEVPTIGPIGACLWVTKVVDPQAFRCGRNCAAWLGLTPKDHSTAGKQRLGAITRAGDESLRATLVAGATAYLRHVRSGRITPSPWLAGLLQRKPPKLVAVALANKTARIAWKLMTSGERYDPEHRLARTSAGPTSAGPTSAGPPDRDRRLKSSARPRSWRTEGQACSSKHEVV

SEQ ID NO: 93204 - protein, 343 aa, unidentified
MQTITTIGLDIAKSVFQVHGVDAAGQVVIRRQLKRRYVLAFFEKLSPCLVGIEACASSHHWSRELQALGHTVRLMPPAYVKPYVKRQKNDATDAEAISEAVTRANMRFVPTKRPEQQSCLMLHRTRHLFIRQQTAVINAIRAHLAEFGIVAPVGRKGVEELLHVVADPNDKRVPEVVRACLAALGNQLLSLKKQILESDRMIMVWHRSNEASKRLHYIPGVGPLLATALVASVADPGTFRSGRNFSAWIGLVPKQHSSGGKDRLGSISKQGDRYLRSLFVAGALSVIRYAKIHGTKHRPWLTALLARRPTKVAAIALANKIARMAWAMMARGERYREPVALAA

SEQ ID NO: 93205 - protein, 295 aa, unidentified
MTKYIGLDAHSSTCTFNVTDERGMEVDNTTVESNGRLLVKYVRGIEGVKKLTFEECELSNWLYEILRPEVDELIVCNPVANGDYKKKKTDKMDARKLSNLLRGGFLVSVYHDGSKRERFRSLMSGYQDFIEEGVRLKNRYKSLFRKSGKKVKGEALYNDESFLEGLERAGFKFIGTQIYQLLEKMEGSRQDYVKEIVRCSKGFKETKYLKSIPGIGSIQAAKIVSQVIEPERFSSKYKYYSYCGLVRHKRISGGRGYGSEKIWGNRIQDGWTFGLKREEWFKEILRFLTVERYQS

SEQ ID NO: 93206 - protein, 356 aa, unidentified
MHYYTSTTEYNCGIDLHAHQMYVCVMDRQGKKLVHCNVKDNDFEYFLKLIQPYRHNLTICAECMFGWYWLADACQAEGLTFVLAHALYLRLIHGGKNKNDRIDSEKLAHLLRSNLIPPSYVYPSAKRPLRALLRQRIFYVWRRSELLARIHSHQLAYNRTPVKQTRRVRDFWEEQLLKTENHPLRQLALKNDLAMIRHFDQQIFQLEEELQRQTKRIACREYTLLKTIPGIGESLSLTILYEIGDIERFPTIKDFLSYCRLVKGTVASAGKIKGLRGAKLGNPYLRWAFGEAAVIAKRDHYRLKPLAQQLETRMNGNKFKANTVIAIKLARAAYFMLKNKTVFDPERLTAALAKAA

SEQ ID NO: 93207 - protein, 415 aa, unidentified
MALKIVYKICCGIDVHKTFVVACIASTNDKGVTSYESHRFSTYTSGLKTLLQWLLDRDCKDVCMESTGKYWIPVYNILESDCSIILAHPKYVKAIRGKKTDKKDAKWIADLFKHDLVAGSFMPPADIRQLRDLMRYRFKLTCFKSSEKNRLQNCLTVSNIQLGNVVSDTFGKSAQAILDKLLENPADTSFDLEPLVYKSLKKKLPELRDAIDGYITTEQAGKLKVIKAHYENLESRKAELEELILALAAPYQQELTILQTAPGISSPFTAIGIISEIGTNMEAFPSAKHLCSWAGLTPTNNESAGKKKSVRVSKAGCYIKPLLVQCANAVVKSTKHPEMRNRYLRLKKRRGHKKAIIAIARMLLTALYHMLKNGENYNAELYQKSDLLPVDREITVEQALMIARNQGYKIKSATA

SEQ ID NO: 93208 - protein, 394 aa, unidentified
MKLVGIDVGKNSHHFCVMDKETGEFNVAPSSFSNNKEGFDFLINSLKPYSKKSILLGMEDTGHYHVALLKFLLSNGYTVALINPKTTDLTRKMEGGITKNDKLDTITICDVLDTPERKKQYRITKVDRFDLYEQRQLTRHHHNLKEELNVYCNRLQKSIDLVFPEFNTLFSSKYGIVYMNLLKTFGSAEAIASTDIRTIRKCFEIKGRGNRISLTPEKLKECAKNSIGISSEVETIQIKHLVSQITLIKEQIAEIDKKIEEFSITNNSPILSIPGISHFSGTSILAELGDIGNYSKPSRIIKFAGVAPYHYESSQYNAQHTAITKKGSKYLRKTLYQIILPVINNNPVFKKYYLLKISQGKGHRCAQGHCIRKLLRIIYHLLETGQSFDPALLR

SEQ ID NO: 93209 - protein, 345 aa, unidentified
MELFTLGIDLAKTTFHLVGMNQRGEVVVRKRLSRTQLLCFTANLKVELIGMEACGGSHFLGRALREQGHEVRIIPAQYVKPYVKTNKNDYIDAEAIAEAVGRPTMRFVPIKSEEQLDLQSVHRVRERWVMRRTAVVNQIRGLLLERGITLRKGRRYVDEALPGILADATSKLSGSLLVLLRELKLELAQLADKIDRSDTAIAQIARQNEACQRLVAMPGVGPVTATAIIATIGNGAAFRKGRDFAAWLGVVPEEHSTGGKQTLWELPRRGNKYLRRLFVQGARAVMQHKTKQSSGLTAWLAQLTARTHHNIAIVALANKLARMAWAVLAKNEVYRPPLLAGTAII

SEQ ID NO: 93210 - protein, 345 aa, unidentified
MDCHARTHTYAVLAATGEHRGTETFPNTPAGRSRAITWAGRRTGGDAEALWAIEGAGSYGAHLARAVIGAGYPVVEAPRVNTRARHGVGKSDPLDARAIAATVLALRIDQLRTPRQDDGVRQATQILLTARDELASERTRAVNALTALLRITDLGIDARRPLSTAKITEAAHWRTHEEPLTKATARSEAIRLAKRILTLDAELGDNMRRIDELVQASPAAELTERIGIGPVTAATTLVAWSHPGRIKSEAAFAAIAGVNPIPASSGNTTRHRLNRGGDRQLNRALNVIAMVRMVHDPGTRAYVEKRRTEGKTDREIRRLLKRYLARSIYRHLNSASNTKPGVDGI

SEQ ID NO: 93211 - protein, 351 aa, unidentified
MMIIGVDYHPSFQAVAFLMEETGECGELELNHSDGQAEKFYRELKQRGICVRVGMEATGYSRWFERLLAELGFEVWMGDPAEIKAKRVKKQKYDREDARLLRRLMLENNFPQIWVPSPENRDLRQLLWHRHRLVQMRTRIMNQLQALAMNEGYRWKKKLFSEQGRALLEKLSLAPWASRRRQELLELLDRMNPTIAELTAAVEREARKRPEVLRLMTHPGVGPLTALAYVLIIGTPTRFERGKQIGTYVGMIPCEESSARKQRLGHISKQGSSLLRFLLVEAAQAAARNHPDWRRRYKHLAMRRHKSIAKVAMGRRLAIRLYWMWRNGCEYSPKLEFGSYAGQLGTGHGGK

SEQ ID NO: 93212 - protein, 423 aa, unidentified
MIKLKYSICCGLDVHKNVIVATIVTTNKDGISEYLQKSFSTINSDIQRFHNWLIENNCYHVCMESTGKYWIPIFNYLENDIDVCLTHPKYVKAIKGKKTDKKDSKWIADLYKFDLVRCSFIPPKDFRQLRELSRYRFKLVCMKSSEKNRIQNCMTVSNVGIASVLSDPFGKTATEIISYLLEHTADSMDEKAVRKLIKKGAKSKSDEIIEAIKGYTIETDQAKKLELARGHLEYLDDMITQTEVELYVRIKPYYKFVEFVSTMPGMTELSSTIVLAETGVDMDIFDDTKHLCSWCGLSPANNESAGKKKSVRIAKAGDYLKPMMVQCALAAIKSKKQPYFAIKYGRIKKRRGHKKAIIAIARMMMVCIYHMVSEKKPFTPTDYEELMNPQNHVKRVVLNENNVFAYLESLGYDSSKLVKRNDN

SEQ ID NO: 93213 - protein, 363 aa, unidentified
MKIMVGIDLHSNNALCGLMDESGQRLVHKKLPCDLPAILELLAPYKERIATLAVESTFNWYWLVDGLQDHGYHVVLANPAGMQPYSGKKHTDDVSDAYFLAELLRLNLLPTGHIYDRKTRPVRDLLRRRLLLVRQRTTLILSFKSLNERTLGQRVPLARVKAMKPEEAQARFTDPADQLLSAQQITLMGHLTDSIAKLEQHILGVAGKWPAYQRVQELPGIGKILGLTIALETGDAKRFADAGNFASYCRCVKSLRQSNGKKKGENNRKCGNKYLAWAFVEAAHFACRYDDQCRRFYDRKKQQTNPIIATKALACKLAKAAWHVMAEDVSYDATRVFGPAKKSDFGETGREPAKGSGHPSQAN

SEQ ID NO: 93214 - protein, 355 aa, unidentified
MFNDSTLFVGLDLGDRMSDLILLDPEGELIEESRLPTSQASFQQKFSALPSARVALEVGAHSRWVSQLLEQLGHEVLVANARKLRAIYNNPRKGDRTDAETLARLARLDPSLLSPIHHRSAQAQADLAVLRSRDAGVRSRTLLINHVRGVVKASGARLPACSADSFSKKAGPSIPEPLRPALLPLLDTIASVTQQIRAYDRQIETLCQAQYPETRSLQQVSGVGPLTALAYVLTLEDPSRFPKSRDLGPALGLVPRRDPSGDRDPQLGITKSGNAFLRRLLVGSAHYILGPFGPDCALRRWGLELADRGGKNAKKRALVAVARKLAILLHHLWKTGQTYDPLYQSQRSREPQLAT

SEQ ID NO: 93215 - protein, 369 aa, unidentified
MEKHTEVFVGLDVAKDRHAVAVAEEGRQGEVRYIGEIGADPESVRRLVTKLEKRHGRLHFCYEAGPTGYGLYRQLIKLGHQCTVVAPSLIPRKPGDRVKTNRRDALQLARLLRAGELTAVRVPDEAHEAMRDLIRARQMAVDDMRRKRQAISSMMLRQGRTYPGKKTWGARHTRRLQAQRFDHLAQHLVLQELLLAVRHAGEQLERIEAAILELLPKWSLAPVVEALQALRGINLVTAATVMAEVGDLQRFDNPRQLMAYLGRVPGERSTGDTVHRLGITKAGNGRVRQALVESAWSYRHPPRTSRNKHYIHENLPPAVRDIAAKAQTRLCARYRALSQRGKKLTVTVTAIARELAGFIWAIGREVQAA

SEQ ID NO: 93216 - protein, 337 aa, unidentified
MTLYCGIDLHANNSVIAIIDDQDQVHFEKRLPNDLHTLLGALAPFRDALAGCVVESTYNWYWLVDGLMDAGIPVHLAHTGGIVQYAGLKHSNDESDARHLAHVFRLGILPQGYIMPKEPRAVRDLLRRRLLLVHQRTLNLLSLQSLITRYTGERLSATQVKALDVDTWRERLPEPMVVGTLVTAQSMRSLDGLIDVLEEDVHRRLHDQADFRLLTTIPGVGKILGATIALETGTIQRFPGPGHYASYARCTNTEKISNGKIKGRGNKKNGNKYLAWAFMEAAHHAAIWSPPIKQFYHRRKAKRHILVAKKTVANKLARACYHMLTNQEAFDVKRAFG

SEQ ID NO: 93217 - protein, 416 aa, unidentified
MESLYTCCAGLDVHKQTVVACLLRPAEGSESEAKEIRTFGTTTTALVELRDWLRAAGCTHVAMEATGSFWKPVHNILDGHCTLLVVNAAHMRALPGRKTDVRDAEWIATLLKHGLLRASFIPTREQRELRDLTRTRTSLIDERSAAVNRIQKVLEDANIKVAGVATDIMGKSGRDILAALLEGEMDAAAMANLARGKLRRKRDALEQALEGRMGAHHRMLIALHLEHVDLLDEQIARISAEIAERLRPYEAALVRLESIPGVGRRTAEILAAEMGLDMERFPTAGHLASWAGLCPGVHESAGKRKAGKRRAGNKALRRALTEAAHAAARTKKKDHTYLRGQYRRLVVRCGKQKAAVAVGHTILRIAHHVLAHETTYQERELVQLDDHRRARMQQRALAQLKALGYDVALTPKQPAA

SEQ ID NO: 93218 - protein, 370 aa, unidentified
MLDTTTFVGLDVHARSIKAVSLDVMTGEVRCATFGYDAGAVAEWVRSVDPGARCAYESGVTGFDLQKRLSGLGVDCVVGAVSKMIKPSADRRRKNDRNDAEFLARMLSVGNVVEVWVPDDECEAARDLTRALEDARDDLSRSKQRLSKFLLRHGLVFDERTPTGRRKGNWTRAHWSWIESIRFAEGADNDVLAYYVDAVRRAAEEKARLEGLVEAEARKPRWRKRVDSLRCLKGVDTASAADLVFEAGEFSRFRNARSFAAWVGLTPSEHSSGESDRRGAITKAGNKHLRKTLVEAAWHYLTCSGRPKDLAKGQAPDRGARRHAAKGVRRLVERREALLARGVHGSKANVATARELACWVWAVGLMAEGA

SEQ ID NO: 93219 - protein, 341 aa, unidentified
MNQRKVIHSLSRGKSAHGYDQYVAIDWSLKTMAIAHMSQRTDAPGVFEQPTSLKDLKAYLGSLKGRTIVTFEESGSAHWLYLELLDYAERILICDPFKNRLLCHGPKTDKIDAGKLCELLRAGLLTEVYHSSSTLYELRALVSSYDDVVRAGVRVLNQREALKLSHRDKGKSAAFIEEVLEKNIDLYRQTKGQYERRFSTMARRSYLVMFQKELPGIGAIGAAKIVACVVDAHRFPCAGKYLSYCGLIKHEKLSGGRSYGRRSPRYNRVLKSVYKTAALAAIKGKNAVREYYDHLLTQGLAEYEARHAAARYIARISYGILKNGTRYEPYRWREKTEVRVV

SEQ ID NO: 93220 - protein, 341 aa, unidentified
MNQKTLYVGIDVSKEKLDVSLTFDGRSIYASKSFSNNSCSFLNLTDWVKKQSRKVYCEKIHVCLESTGIYSEEIADYLQDQENTKVSVMNPSQIKAYGKSIMLRTKTDEVDAKLIAFFAYQVKPLERTKTQISLKEFRRLVRHLDYLIRRRADEKGHLETVKSAMILDSVNKIIASYDQQIDEINKIIKNHTERDEMLKRKIELLETIPGIGEATAQIILSELQIESGNDNISTKSQTAHAGLAPSQKISGSSVRGKSKICKTGNRRLRKCLYLPAMAAIRYNIVIGDFYKRLLEKGKPKKVALIAAMRKLLVIAIGVLNNQTPFDPLWNEKNRVNINKIS

SEQ ID NO: 93221 - protein, 375 aa, unidentified
MATTRRTECSAADAPLYVAFELSAGEWKLACAPGGGVAPRLRTLRGDARLEVPRELAQARRHFGLAVTAPVVSCYEAGRDGFWIHRYLTALGVRNVVVDAASIEVTRRARQVKTDRLDAVRLLDLLVRAAAGRAAWRVVRVPPEAAEDARHVIRERRTVRADRTRVRNRLRGLLATQGVRLALRADFVTRLAAARRWDGTPLGPGLQHRLRREWDALQAIEARLAVIEPRAATRSQPAPAAVAALQQLCGIGDAGAWTLGVEVLSWRTFSNRREAGSFLGLTPTPYASGTQRREQGISKVGPPALRALLIQLAWQWRRFQPRSGLAQWYEARFGGGGPRARRIGIVALARKLWIALWRYVTQGVIPDGAVLKATA

SEQ ID NO: 93222 - protein, 455 aa, unidentified
MPGKRTRGTSSGRLSTIHPDAAGIDIGSTFHVVAVPSDRDDRPVRTFRTFSSDLHQLADWLTAVGITTVAMESTGVYWIPVFEMLEAREFEVLLVNARDVKHVPGRKSDVNDAQWLQQLHQHGLLRGSFRPRDSVVRLRAYLRHRERLVDYAAAHIQHMQKALMQMNVQLHHVVTDITGLTGMRIIRAIVSGNHAPEQLAEFRDRRCHAAEDTIREALIGNYRPEHLFALRQALELYDFHQAKVAECDVEIEAVLRGLNEQRVTPEAPLPSVRHAKGQNEPAFDVRPALYTLLGADLSQIHGFGPYTVLRLVAECGDDMTKWPTAKHFTSWLSLAPGNKISGGRLLSSKTRRTSNRATALLRIAAINIGKTQTALGAFYRRLAARTGKAKAVTATARKLAILFYNALRFGMTYVDPGVSAYEERYRQRVIHTLQRRAKSLGFTLVTVPPATEGVS

SEQ ID NO: 93223 - protein, 310 aa, unidentified
MTNPYVGIDVAKAMLDVAIGSDGEVVQVENSEGGIARLIEQLRERAPTLVVLEATGGYESLVAGALAGQGIAVAVVNPRQVRDFAKATGVLAKTDRIDARVLARFAEAVRPEPRPLPTEEAKELEEFLSRRRQIVDMLTMEKNRLSIAATERAKKSLTKHITWLEEALRRANDDIDTAVRNSPAWREREDLLRSVPGIGPVTARTMLAELPELGTLSRKKIAALVGVAPLNRDSGTIRGSRICWGGRASVRQVLYMAATSAVRCNPTIRGTYLALRARGKKHKIALVACMRKLLTILTAMVRDQRRWSPS

SEQ ID NO: 93224 - protein, 358 aa, unidentified
MKHIGMDLHSTTTDVCVRNGRGKIVFRRQIATTRAELEKFICGIQGPKRVAIEESQMADWVARVLKPHVDEVIRCQPQFNKLISRSEDKCDTTDSESLSELLYLNRLKRVHHPELVYRTLREAVRAYWIASRELTRAKNRVKAFFLFNGVRETGGTIYCVRNRSGNLAKLENPGGNTGLARLLYERMDHCRQLKAKHILILRESARPVKDSVRLLMTMPAIGPISAYTLVAYLEDGRRLPNKRKLWRYAGLSLRRHQSGSVGTEGASHSGNRMMKHVAMSAAITIVARGESNALSTLWEKDIRQQVDPKRARRNLARKIVVIAQHLLRSKQEYSDERVMVSCGRISGMDAEGHFQGMS

SEQ ID NO: 93225 - protein, 317 aa, unidentified
MAMQAGRLIVGADVAKAELVIHHDSSDEVIKLKNSKADIKRWLKQQPLNTAIAVEATNVYHLDLVELAHGLGFSVYVVDGFQLSNYRKSVGGRVKTDPSDARLLSRFLRNEGEDLRPWSPPPAVYGKLQSLLRRRAALVSARTAMTQSWANETLLKAAFEAFVTSIDRLDLLMQKKMKEVLREAGLHEQVARCQAVEGIGFLTATALVMAFVRGEFKSSDSYIAFLGMDLRVSDSGQKTGRRRLTKRGCSEIRRLLHNAAMAASKSTAWKGIYEQHRNSGKATTQALVILARKLARVAFALMKNQDEYVTKASKPAC

SEQ ID NO: 93226 - protein, 432 aa, unidentified
MEPSGTTRGRSFEELTHYAGFDWSKDRHQIAMVDHTGQLVLELSFEDTAAGWAELREKLRAFPQVGVAIETRCGPAVERLLDGGGSVYPLNPKAAQRYRDRKAPSGGKSDRLDARSFADALRTDGHGWRRLQPQDPLTQELRLLCRDEIGLIEQRTALVNRLQEALHEYYPTALQAFDDWTAPGAWAFVVAFPTPQALVQAGQRKWQKFLHTHKLYRPQTAGPRLDLFAHAGEFVNPSPAVTRAKSFLAVALANQLRLLENQLHEYRQRIAQLFADHPDHDVFGSLPGAGEKLAPRLLAELGRNREEFDRPQALQCYAGTAPVSFQSGQVHRVRIRRACNHWLRATVHLWADQSRKWCAWAQAYYQQKKAQGMAHAAALRCLGQRWLKILWRMWQDGVPYDEARHLRNQVAHGSWVIALVQPTAGDSTPCQR

SEQ ID NO: 93227 - protein, 335 aa, unidentified
MNSAGKLIMESIVETKAITIRQFIQGLHGDLHVTFEEGTWAAWLYDLLKPYVTKVIVCDPRKNTLLKVGNKSDRIDPKKLAELLRNGSLSEVYHGENGVRTLKELARSYLTISKDLGRVMNRVKAVYRSWAIPCAGTQVYALCHRSEWLSKITEAGVRRRAEHYYQQLDALQSLRREVRKDLLLESRKHNATKLLRQVPCIGPIRAAQLVALMQTPHRFRTKRQLWTYSGLGLETRDSAQYCYVEGQLQRSKKPQQLRGLNSNHNHDLKNIFKGAATMASVSAGPFHDFYQALLTKGMRPTMARLTLARKIAAITLIVWKKGARFDPQHLKQQAA

SEQ ID NO: 93228 - protein, 360 aa, unidentified
MEYIAFDAHKRYTQVSVETEDGERRYEGRIDHVRGALQQFLTTCERGSPVAVETVGNWYWIVDEIEAAGQVPQLVHARKAKLMLGMVNKTDKLDARGLNRLQRAGTLPTVWIPPGPLRDQRDLPRTRMVLTRERTRLKNRIHATLAKYGLRLEGTSDLFGRRGRQWLLTAALPVLAPHSRYATERLLEQLDVVSAQIEGFEQRLRAVFAPTPELQLLRTLPGVGWVLAVVILLEVGDIRRFPRAAQLAAYAGTTPRVHASGGRTHYGPARGDVNRYLKWAFIEAANTICLNRQVRPQCHVSRLYARVQGRKGHPKAIGAVARHLAEATYWILTKREPYRDPASSTEGPARSAHERATLGI

SEQ ID NO: 93229 - protein, 392 aa, unidentified
MIYVGIDVAKDKHDCFISDSDGVVLFDAFTIPNNREGFETLLQRIGSVSDDPSDVKVGLEATGHYSYNLLGFLFDKGLPTYVINPLHTNLYRKSLSLRQTKTDKVDAHTIASMLMSDVNLKSYSDTSYHNEELKSLTRYRFDKVKERAKLKTSVSRLVNILFPELEKLVPSLHMASAYALLSEFPGAVDVASAHLTRLTHLLDVASKGRYGKDTAVLFREAARTSIGSHMPAKSLELKHTIRLIQELTSEIDEIETVIKRIMDEEIHSPILTIPGISYRMGAMIIAEIGDFSRFDSPDKILAYAGMSPSTYQSGQLDNCYSHMEKRGSRYLRYALYNAAKYVCLWDETFAAYLAKKRAEGKHYNVAISHAAKKLVRVIYQLERSGQSYNKAA

SEQ ID NO: 93230 - protein, 330 aa, unidentified
MMGSKSRMQGKVSLERSAATRVYVGIDVWKAWLDIHVHPTGQSFRVPNTPHGLKQLKRRLAKVDVALITMEATGKFHRQAHRNLHASGFAVAVVNPLRSRLFAEAIGMLAKTDAVDARMLALLAATIEPKAKAPPPETLENLQEIVRGREACVAQRTALLNQLGTAKTTCLRQQIRHQLKTVERAVERLQAEIKRIIEADPALARRFAILTSIPGIGNIAAVTLLANFPELGTGTGKQAAMIAGLAPIACDSGDVRGERHIRGGRAGLRTGIYMAALAAARFNADLKAFYVRLLGNGKQPKVALTAVMRKLVALANTLIREDRLWQPVHP

SEQ ID NO: 93231 - protein, 332 aa, unidentified
MKLKKEIIGIDVSKLTLDVFILSLNHHFVVSNDPLGFSKLLQVIWEKLPNKKESLFFCFEDTGKYSLSLCIFLNGEELSFAMVPALDIKRSMGMVRGKSDKKDARVIALYAWRKRDEIKPTVFPAGSIVRIKHLLSLRNKLVKHKKAYQTGMCGVHDYFKDGDSQFYLDVNKRVIKSLNSEIASIEKEIETIIKSDPEVQKNYKILKTVPGIGKIIAFYLIAYTHNFTRFENARKFCCYCGIAPFENSSGTSLKGRTKVNTLANKMIKALLNMGALSTIQNYPEFKSYYSQRVEKGHNKMSTINIIRNKIVFRAFSVIKRGSPYINLHKFAA

SEQ ID NO: 93232 - protein, 370 aa, unidentified
MEQVTTSVGIDAHKKDLYVAMLVGTQALPVTWTVPHEPQAVRRLVRKLERDAPGPVHVFYEAGPCGYALQRQMTTARVRCAVVAPALIPRKPGERVKTNRRDARKLAELGRAGLLTAVQPPTPADEAVRDLARARDDAREDLQRCRHRLGKLLLRRGLHYAGRHWTRAHRQWLEGLAWAHAAERAVVDDYRLAIDHTEARLGDLDARLAELAEAEPYRTPVGWLRCFRGIDTLTAMLILAELHDFRRFASAPALMAYLGLVPSEDSSGEKHRRGPITRTGNALVRRLLVEVAWHYQHRAGVSQALAQRRRGQPARIIALADKAQQRLCRRFRKLAEHKPTPKVAVAIARELAGFVWAALQPAPAAVTERT

SEQ ID NO: 93233 - protein, 343 aa, unidentified
MGNDIVIGVDTAKAIFEVGVSERPGHICRRERPRRDQFLAFFLAYPGATVVMEACGSAHHWGRELEKRGHKVVLLPPHHVRPYVRGNKTDRTDVKGILEAYRNAAINPVPVKSVAQQSLATLHRLRAGWMTERTARLNAVRGLLRELGIFIPLGAREVIPAVWVQIEDADSALPDVLRRVFAEACQEIRDIEARIKHVDQELAALAEQTPAVVWLLSIPGIGLLTATALVAFLGDIRRFPSGRHLASYLGLTPREYSSGLKRRLGRISKRGDGYLRTLLIHGARSVLVHARKQQPDRLRAWAHALAQTHVHNKAAVAVANKLARIVWAVWTRNVPYQLIPKAA

SEQ ID NO: 93234 - protein, 423 aa, unidentified
MKLASEHRFTALVGIDWSDRKHDFCLQAAGSEQRESGVLTHSPEAIARWATGLYSRFGGPIAVCLEIAKGPLVTALQRHGFIVLFPVNPATLAKYREAFVPSRAKDDPSDAEIALELLLRHRDKLHSLQPQSANMRTLATLVEQRRDLVGDKTRITNRLSSTLKEYFPQALDWFEDRDTLLFCDFLQRWPSLKHVKRARQTTLRSFFSAHNLRRARLVEERIHGIRSASALTDDPAVIRPRQLLVQALVAQLRVTLQAIDGFDAAISEVAERLPDYSLFAALPGAGSILAPRLLVAFGEQRERYGSAAEIQKYAGVAPVLERSGNKSWVHWRLACPIFLRQTFVEWAGSTIPRSFWASAYYQRQRAKGCSHQAALRALAYKWIRIVYRCWQARTPYDESVYLNALKRRGSPLIGDMATTAQIS

SEQ ID NO: 93235 - protein, 415 aa, unidentified
MKVVFPTCCGVDVHKTFVVATIITTPADSLQPHYQKKRFSTFNSDLNRFADWLLEHNCLDVCMESTGKYWVPVFNILEKRGIQVVIANPKWVKAVKGNKDDTKDSKWIGDLFRIGLVKSSFIPDRNIRILREFTRYRYKLVSMKSSEKNRFQNAFTVCNVALDCVVSDMFGKSATAITDYLTSDGSFDPEHCVSLLQCSLKKKAEQVLESIEGFSIADEQKARIKIVREHYDFIEKLIAKIDTCVNEMVAKYEGEINLLCTIPGIDRKSAITVISEIGTDMNQFGSSKRLCCWAGLTPGNNESAGKKKSVRISRAGVYLKPVLVQVAHAAVKDNSNPYYKLKYERIAKRRGKKRAIIAIARMILTAIYSMFCTGEVWNPVDLFKIDMPEHLKEQQLAKAIKQATRFLEKHGLSVA

SEQ ID NO: 93236 - protein, 344 aa, unidentified
MTKNTTVAVDLAKSVFEIAVSPRGGRVTERHRLNRAALLRWFARRRPCRILLEACGSAHFWARELERMGHRPVLLPAQHVRRYRPRNKTDRADTKALLEAYRNEEIHPVPIKTPAQQQLAALHRVRAAWLSSRTARINTLRGLLREQGIVISTGARFVVPRAFELAGDADSDLSEGLRFALFELAREIQDYERRVGEVEQRLAVLAEQNALALRLRTVPGIGLISATALAGFVGDLRRFSSARKFASYLGLTPREHSSGSIRRLGGISKRGDVYLRMLLIHGARAVLAAAPKAKQPDRVRTWSLELAARVGHNKAAVALANKLARYAWAVATHEENFAHQRTAT

SEQ ID NO: 93237 - protein, 322 aa, unidentified
MTRTICGVDVSSTSLDASIGVSGPSASFANTPAGIAELASFCHTHQAELVALEATGGYEQAAFAQLSGRHRLPVAILNPRSVRQFATSMGRLEKTDRIDAGMIAFYAEVRRCRALPAPALEQRQLRALETRLSQLIELRVAQKNQRRLVPEPSIQALFDQMLALIESQIDGLSLEIAKLLAADPLWSQLNAIFRTIRGVADRTVARLMAELPEIGTLSGKAISKLVGVAPLAQDSGKRQGRRPVRGGRSGVREILFIVGSVVARHEPEMKAFEQRLKQAGKPPKVIRIAVAHKLLVRLNAKAREVRRQLANATILDPIPAVA

SEQ ID NO: 93238 - protein, 362 aa, unidentified
MFRPHTLYIRIRIVRKVHEPVFAMRDQDVSDVIKTKNRTAMQYIGIDVSKATFVVAYSSDKGGEIRTFNNTTAGIKQFIGTLPKDGSIHCVMEATGNYSALLLYMLNVAGITVSMENPLKVKNFARAMLSTVKTDKIDARLIALYGEKMNPQPFKIQGEAILRLRQKRTVIRQLTKQITAMSNLRGSLACLPVPDKGATHTVDETIKFLEKRRDRLQSELTDLVEVEFSRQLALLTTIKGIGITLATALIITTGGFTYFQNAKQVSRYLGICPTYEQSGTSVNIRGHINRNGDVYTRGLLYVAAWTASRFNTKCGETYTRLRQNGKPGKLAMIAVANKLVRQAFAVVAHDKEYIDGFVSNRP

SEQ ID NO: 93239 - protein, 352 aa, unidentified
MEKYIGIDVHSESCTIAVMNSAGRQLRQQVVDTQAKVLIEFLKGLSGDRYLCIEEGQLAEWLVETLEPYAKEIAVVQPKAHQGHKSDAADAWALAEQLRVRAKGVYVFKPTRQYRPLREAVRTYGVAVKDMTRAKNRLRSLLRARGVANIDSSIYEPEQRSGWIRKLPPAYRRRAEWFGQQLDSMREAHKVAESWLKEEAEKCPEVERLQTLPGFGPIRAAQVVALVVTPHRFRTTRQFWNYCGLAIVTRASSEWKRASSRDGWQHVPGNVQTRGLNRNCCSQLKAVFKGAAITVIAKPNPLRQHFDQLLANGTKAHLARLTIARRIAAATLAIWKKKEDYDPTKHQSLKPA

SEQ ID NO: 93240 - protein, 340 aa, unidentified
MGCHVFSPHISNSCLGVGARIFCKEESKAMTTQPVFVGIDVSKDNLDAFIRPEGSYVNQPYTSEGIRSLVEYLGKFQPQLILLEATGGYETKIVAGLAHARLPVVVINPRQVRDFAKATGKLAKTDRIDAQVLAHFAEAIRPEPHLLADEDQRELSAQMTRHQQLVEMITMEKNRMVTTSKTVQDQIHKHLEWLDGQLEAVDRNLDEFIAKNAALQRKIEIVKSALGVGPVFSRALISYLPELGTVNNKQISALVGVAPFNCDSGKLKGKRIIWGGRAHIRSILYMSTLTATRFNPVIRSFYQHLLQAGKCKKVALIACMRKLLTILNTMVKNNTLWGEN

SEQ ID NO: 93241 - protein, 411 aa, unidentified
MNNTLFVGIDISKRSNVATFMNCEGKVVGRLTFSNSGSGADRLVAKILSYYEKGDFEAIRIGLENTSVYSKNLVWFLYEHEALNEHKLSIIPLNALMVANYKKSFLDMDKDDITDSFAIADFIRIRPGLLPFKLDDRQEALKIMTRSRYNYVQALSRMKSQFLTRLFLSFSEMEAGKPFYSIFSKTSLSLLEEEFTLDELAEKPIPELVEFLQEKGGGKFQNPEEIAKVLKKAASSSYRVPAMVRESLNRTMASDMEIMRILENEIHNCDKNIEKLMKSVPAILVSIPGIGPVLAAGIMSEIGDISRFQKQESLGKMAGFKWKRNQSGKKESEDKAAVLSGNKKLRYYLVEAANRVRIHDPVFEAYYRKKYAESKTHAHKRALILTARKLVRVIFYLLKENKLYKPDVGIS

SEQ ID NO: 93242 - protein, 422 aa, unidentified
MAVFCGIDWAEGHHDVALIDGDGSLIAKRRINESLDGVAELAAMLATAGDSAETPIPLAIETPRGLLVAVLRATGRPIYPINPLAVARYRERTSVSGKKSDHVDAMALANILRTDAHLHRMLPDDSPEARSISVLARAYQDGVWRRTKLVQELRARLREFYPGFLAAFAAGSGSGRGLSTTQLASGDARAVLAIAPSPADGLTVSKARIETALRRGGRQRRISSLAASVVAGLRVPQLRQDPRVEQAMRVETLALLGVLDVACASVDQLADALVEAFSQHPDHEIITSFPGLGDISGAIVLAEIGDDRSRFRDDRALQAFAGSAPVTRASGKSRTVTRRRTKNNRLAAVGYSWAFTAAARPSPARDHYLRRREHGDGHPAALRHLFNKMLGQLHHCLLTGHTYDSTKAYPHALPRHSGAVAA

SEQ ID NO: 93243 - protein, 346 aa, unidentified
MDQIIRIGMDTSKHFFQLHGVDAAERPVLRRKLRRNEVLGFFAKLPPTVIGMEACGAGHYWARELCKLGHGVKLIAPQHVKAYIKRNKNDGRDAEGLCEAMSRPTMQFVPVKTEEQQAALMLAGVRQQLITRRTQLSNAIRGYATEFGLITAKGLDKLEPLLVRIAQDASLPELAREMFAMQGRAYAQLQVELKAIEARLMAWHRANADSRRLAQIPGIGPIGATALVMKAPDPRLFPSGRHFAAWLGLTPKDHSTAGKTRLGKITRAGDEMLRSVLVAGATAVIQQARRGRGRASPWLLALLARKPPKLAAVALANKIARIAWKLMTTGESYDGARMPGASALAA

SEQ ID NO: 93244 - protein, 414 aa, unidentified
MTNITCSCDTPVTRIAIDIAKKYHDAKIKRSDGRIVYLCFENSLAGYARLITATRSSGEKVVVAFEPTADYHRNIAWWLQEQGIECRLVSSLACARAREMLFKTWDKNDRKDASVILYLMEQGLSSPFFDPLLNKMMDIQEISNTYYQISLARTRSLNSLVNHYLTLYFPEAEQFLHQSRTEWFCHFLLRFPTPQTITSIQKSLFVKEAWDIIGRKQYKQQFLEQLYEIAHNSIALPLPENCEAVVTFKLQIRRYIELTLQQLQLEKMAENYLQNRADYHHLRSLPGVGPVIAMMILAESGDLNRFAHYRQYLNFCGFNLSASQSGEKCSSYRLSKRGNARLRYAFWLAATVAVRMQENTLRNKYERYIREHGDNPDQRRKAVVAVATKLARIAHSLVKKDVDYQRYFDISHGT

SEQ ID NO: 93245 - protein, 433 aa, unidentified
MKQKYKECAAIDIGSKNIFVAILNKDGFKVFGTTTVDFQSAVDYLLSENIKDVAMEATGVYWMGLYDILEQRGLKAVLVKAGDAKQLPGRDKTDGEDCQWLCHLFSGGLLRNSVVPKDSIRTLRQYMRMRNDHIELAAQHKQHIQKNMIMMNLRLPETLSDITGVSGRKIIEAILTGERDPQKLVLLCHGAIGPKGDKILKALQGIYKDEYLFGLKQSYRCWLFYQSQIEECDRMINDWLEKQIKDQPIIVSSDKLKKSSGANKLRIQNVEEKILTLNGGIDVTRLPGISCNNALKLYSELGPDLSKWFSDKSFVKYLGLAGQKANSGKIKKNKRMSVPRAGQIFREAAQTLMRSNKTALGAFARRINARRGPYIAIKATARKLAILYYNLFTKGVDYVEKGVELYSQQLQATELKRLQKLAKKHGMILLNNN

SEQ ID NO: 93246 - protein, 355 aa, unidentified
MNSEKYIGLDVHQATISVAVLDSTGKLVMESILETKAATLLEFFAGLRGTLSVTFEEGTWAAWLYDLLKPHVAKLVVCNPRKNALLKDGNKSDRIDAHKLAELLYLNKLSSVYHGETGVRMLRELARSYLTIVKDLTRVMSRLKAVYRSWAIPCAGRDVYYRRHRSEWLGKIKEAGVRRRAERLYQQLDMLQYLRQQARRELLAESRKHAITVKLRQIPSLGPIRSALAVALIQTPHRFRTKRQLWAYSGLALETRTSAEYCYVKGGLRRSKKQISIRGLNKDHNHDLKGLFKGAATRASVLPGPFQDFYQRSLAKGIKPTMARLTLARKIAAITLTLWKKGENFDADKLKSQAA

SEQ ID NO: 93247 - protein, 414 aa, unidentified
MKSWSEHTHFAGLDWAEDHHDLAVVDAAGEIRLAASFPHTREGWKQLREALAAYPGIPLVIETSQGIVIDQLLQTDGVAIYPINPKAAKQYRERKVPSGVKTDPIDAWSMADALRVDGHGWRQLTQHDALTEELRMITRDELVLIEQRTQLANQLRSALRDYYPAALEAFEDWTLESSWAFLATFSTPQALVKAGKHQWEKFLRTHKLWRPQTLERRLEIFAAADQMAARASVTRAKELLALSLVKLLRALQGQLEVYRARIEALFAKHPDHDLFGSLPGAAKKLAPRLLAEVGDDRSQFPHPQSLQCIAGTAPVSFQSGQIHRVHIRRGVNRFLRTAVHLWSDQSRHACAWAQAYYAAQRKRGKSHACALRCLGQRWLKILWKMWQEKTCYDEQRHTKNQTEHGSWVLKLTVS

SEQ ID NO: 93248 - protein, 325 aa, unidentified
MEKLSGGIDIHKEKLVGCIMDENGNITRDHIFPYSKEAIERFLCGISSSEITIALEACGMWRGVYMILSELGYNVKLANPKKTHDIACNKKTDKVDAKILADLLRTNYLPEVWIPDERVIRLRDLARHKSNLTRLRTMVQLKIKSYLLRKGIKYGKLWNEKALSKLAEEDLDIGNLVNVYLCLIKEEKEVMNRIGKTVRGMKEATLLMSMTGIGAFSSMMILAEIGDIKRFKTPKALVSYSGLCPGIYQSGSTERNVRNNAVNKWLKWIIYECSGRATMLDPRFQECYYKVKQRKGFQTARRVVARKMLTIIWYMLTNEEPYRAS

SEQ ID NO: 93249 - protein, 344 aa, unidentified
MNSMNYVGLDVHKKSISYCVRQADGTILREGSIVATRQALDTWMGELPQPWMAGMEATMFTGWIYDHLVSRGVTVKVAHSAMLKAIAAGKKKNDRLDARKIADLLRCDYFPECHMAPREIRDRRRVLRYRNLLVRQAVRMKNKVSGLLMEAGVPYNQQKVHGKKYFAELMKEQSKQMPPSLPQLLQLSRSTIETLTGMERQLMTALERDALLASRVERLETIPGVGRVLALTWALEIGEISRFSSVKKAVSYCGLCGGEKSSGGKMERPPISKQRNKHLQTMLIEAANLAPRWNPELALVYEREKQKGNRNRATLAVARKLVAYLMAVDRKEKAFGPPRAEVAA

SEQ ID NO: 93250 - protein, 355 aa, unidentified
MNALNENSIVVGVDVHKYSHTAVAMNAWGEEKGKIDFSNNNLETYTEWLEQMGLKENIVIGLEDVNSYGIHLVERLRSENYHIRYVPAILTERERKSSTKRHKSDEVDAKRVGKVILTKYEDTLPAKESIADTRELETAKSLDLLLMERRDLTKQKTITKNQLHCLIHQHYTESYRLHCPRSFSKKAIKWFLDDLKENKSILATSIIRRLQRLLFVEEQIYTISKEVTVIGETSKEAVALTQIHGCGMVTACSIVAEVITVKRFKDKHHFSMYAGIAPTPHSSGRKHKMHTNPFGNRQLNRAIHSIALSQIAIKGDPTGKEYYQKKLKEGKTRLWALRCLKHQLAKVVFQKLKYC

SEQ ID NO: 93251 - protein, 337 aa, unidentified
MGKRAVKAEKAWVGIDVSAATVEVALEDDQGGRRELEAPNTAAGHRALCRVLAMAAREVFVCVEATGIYHFDLALALQGAKRVHVMVANPRATKDFARATMQRAKTDRVDARMLREFAKRMPFQGWAPPPPRVLALRALARRIEALTEARGQEVNRLHAAGVSAHLGPTLQKASRAHIRFLDASMEALDAEAKALIAAEPILARRFAQLVSVRGIGERSAVRLLAELAVLPADMTVRQWVAHCGLDPRPWDSGRSIHRPARISRTGNARLRAALYMPALVAIRCDAHVRRFHDALLARNKKPMQAIVAVMRKMLHAIYGMFANDETYDPGKCYRVAA

SEQ ID NO: 93252 - protein, 295 aa, unidentified
MGSYVGLDVADKQTAICVIDDAGEKRWEGKVRTAPELIAATVRERAPDAVRIGLETGPLCVWLWHALSEAGLPIIALHARQTSAALALQANKTDRNDAAGLARIVRSGWYKAVAVKSLDAHKLRALLATRDQLVGMSTSLVNKIRSTLKTFGVLLGSGRGSAFEKKVREAMPDHPIVRTLIESLLRLWRTVREQRQAIDSRLIAFARHDPVCRLLTTAPGVGAITAISFMTTIGDPRRFGRSADVGAYLGLTPKQYQSGDVKVIGRISKCGDTLTRKLLFEAATVVIARLKRPLG

SEQ ID NO: 93253 - protein, 417 aa, unidentified
MIRKVMQAIYPCVGGLDVHKETVVACRRRLIDEGQAEVEIKTFKTTSGELRELAGWLGEWGCTHVAMESTGIYWVPVWNLLEGQGELLLVNAQHLKKVPGRKDDAPDAEWIAQCLQCGLLRASFVPSVEIRQWRQLTRQRMKLSDHHTAVVNRLHSVLQQGNIKLSSVVSDIMGVSGRAMIKALSQGESDPAKLAGLAKGQLVNKHEELVESLDGQLNENQRWMLDRLLGQLKKLEQEDVVYSEQIREQMRNYDKVLERLDTIPGIGRRSAENLLAEIGPEMNQFPSADDLVSWAALCPGKDKSAGKQRSSRTAKGNRWLKRALIEAAWAATREKDSYLAAVYWRLMPRRGKKRAIIAVARKILLSAWHILKEEVDYKELGGNHFDELNKEKTTKYLVKRLEKLGFEVKLKPKKAAV

SEQ ID NO: 93254 - protein, 409 aa, unidentified
MRIIGLDIHRAFAEAVAWDDGKLRRLGRVDMRRDLLTAFAEQLSADDVVVVEATGNASAVVAVLAPHVKKVVIANPMQVRMIAHAKIKTDTIDAVVLAQLYASGFLPEVWVPDEPTQALRRQVTRRNQIVRQRSRLKNIIQSILHSHLIPSCPHADLCGAKGRAWLVEQVVPEDERLAIERHLREFDRLGEDLKVIERDLARSALADESVKRLMTVPDIDMVVALALTAAIGEVTRFDEPQKLVSYLGLNPSVRQSGPGPAHHGRITKQGRGHARGMLVEAAWAAARAPGPLRAFFLRVRARRGQHVAAVATARKLAVVIWHLLTKSESYVWARPLLHAKKLRDLELRAGYKAARGQKGAAHAYNSKSHRDGERRWVEQAETVYARFVTGWNPQGPKKVRTGAATEVRR

SEQ ID NO: 93255 - protein, 415 aa, unidentified
MLKIIYPICCGLDVHRDFVYACIAGTESGVTTYKSHRFSTFTKGLRELLLWLLQNNCRDVCMESTGKYWIPIYNILESDCKIVLAHPKYVKAIRGKKTDKKDAKWIADIFKHDLVLGSFIPPVDIRQLRDLVRYNVKLTSYTTGEKNRAQNCLTVSNLKLDSVFSDVFGKASSNIIGQILANPSDRISDVSAFRTKGMKATDEEVLAAVDGEMCPEQAEKLRIIREHMNGLELCKANLMSLILATAAKYIDEINLVATTPGFTAFSAISVIGELGVNMSVFPTSKNLCSWAGLAPQNDQSAGKKKTTRISRAGVYIKPLLVQCALAAIKSKNKHPEIVNRYNALKKRRGHKKAVIAIARMLLTAIYNILKKHAPYNAELYRKSDTPPEHRNVTVEEAVFILQRQGYIVSSPNPVG

SEQ ID NO: 93256 - protein, 353 aa, unidentified
MMIIGCDYHPGFQQIAWVDTETGELRERRLEHREEAEAFYRDLAAQGVRVRVGMEASGHARWFERLISERFELWIGDAAEIRTKRVRKQKTDRQDAQLILRLLLEDRFPRVWVPSWENRDLRQLLWHRHRMVQARTRIMNQLQAVALNEGLRCKKKLWRDAGRQQLESFPLAPWASRRRRDLLELLDRLSPTIAELTQAIEQEVEKCPEAQRLQTHPGVGALTALAFVLIIGRAERFQCGKQIASYLGLVPLEESSGERRRLGHITKQGNSLLRFLLVEAAQVTVRSDPEWRSKYFHLAMRRGRKIAKVAMARRLAVRMYWMWRKGWDYEQMKMFSSHAGQPGNRQGVSLNTE

SEQ ID NO: 93257 - protein, 310 aa, unidentified
MECYIGIDVSKATLDVASLPDAETWAVTNDDAGLAELLPRLVTLRPTLIVVEATGGFESAAVAACAKLGLPVVVVNPRQVRDFAKAMGRLAKTDAIDALTLALFGERVRPALRPLPDEAAQLLDALLTRRRQLLEMLTAEKNRLGFARGPVRRDIVTHIRWLEKRLADVDGDLADAIAASPLYRAQDDLLRSVPGVGRVTAITLLGKLPELGHLSRRAIAAVVGVAPLNHDSGTLRGKRFVWGGRAPVRAVLYMAALVGIRHNAVLRAFYERLRAAGKPFKVAATACMRKLLTILNAMVHHQRKWDPQTA

SEQ ID NO: 93258 - protein, 457 aa, unidentified
MGNARARKVPAQVIEDEDYQLRHERVAGIDIAKAKADVRTRLPPAREGGRRASRVEASVPATAAAILALAALLLADRAELVVMEATSDYWRIWYYLLEGAGLNVQLVSPSQARQLAGRPKTDRLDAQWIARLAEMGLLRPSFVPPPQIRALRDLTRTRLQLVRDRTREWQRLEKLLEGALVKLSSALSSLARVKSARAILEAIAGGERDARALAALADGHVKGGRAAVEESLAGMTLAACHPMLIGLHLDHITLLDRQASARDDEIEAALEAIPAARGVGADGVPSPDPGPGAAVLPADQRLAEIPGVSPELARSIIAETGLDMTRFPTAGHLVSWAGLAPAARQSGPRNRKPAKGQGDAYLKGYCTQAATGAARTDTFLGERLRRLSRRLGGTRARCAVGRSILVIIWHLLSDPEARFADLGPDWHDRKTDRDRKTRSHLRGLQALGYEVTITPAA

SEQ ID NO: 93259 - protein, 392 aa, unidentified
MHGLAHSTNFSRILAIDLGKFNSVACIYDPSTHEHRFDSCQTTPQLIHDLLVKHQTSDSAQTLLVVETCDVAGWVYDIAVALGMRVAVANPAHEAWRWTRVKRKTDKDDALKLAKLSVLGQLPTAHMPAPAQRQRRRLVHYRRVLVDRRTQIKNQIRSIHSQQGLSLPKRGKAWTLSGIKQIGAEARPLEECVDVLDLWRGRLHVELQLLESLNRQIEQIDQKLDALGSQDDRVRLLQSVPGVGPRLAETVVAHIDDPHRFRSAAQVASYAGLVPKQFESGTIKRSCRITRRGPTLLRSMLVEVAWMVYLRNDWAKAYVRRISRGVAGRKNIAIVALARKLLVTLWAMLRDGTRWREPKGVDGRFAPGGCVVSPPEDTARVTALSSVARAIG

SEQ ID NO: 93260 - protein, 404 aa, unidentified
MPELWAGTDAGKGEHHCTVIDKDATVFLTRRVPNSETELLELIGDVLELAEGEPVTWAVDLNAGGAALLIALLVSHEQKLLYIPGRTVHHASAAYRGSGKTDAKDAFVIADTARMRRDLQPVQEQSEIAVDLKILTARRMDLSADRTRAINRLRAQMLEYFPALERAFDYSRSKAALVLLTKYQTPAALRRVGRARLVTWLKNHGVRTLTTAKSAADAAVTAGEAQHTAVPGEKTAAKMVHTLAREVMALDQKIAELETLIEGRFREHPDAHVITSMPGIGDTLGAEFIAATGGDMNAFASPDRLAGVAGLAPVPRDSGKVSGNLRRPRRYSRRLLRMFYISAQVAAVHCPESQRFYQRKRAEGKTHKQAVLALARRRLNVLWALIRDHRTFETAMPRTSVTGA

SEQ ID NO: 93261 - protein, 418 aa, unidentified
MQSRISKNLESVKSETLYVGIDLGLDRNKALVMDSRARQLDRFGFPHSRDGYDYLLHRLKAIQDKHQGPAVLVGMEPTNYFWKLLANFLEQQNMNYRLVNAYTVKKHREGDQLDRSKDDARDAFMIADLLRTGKYTKTQLLHGGYAELRTYSTLYEQVQRDIRRHKTILRTVVMQLFPELCLEFKDLTGCTAMAMQRGHVSAIAVSELSQEAFIARVRAHFAGKRLMVSKLRRAHVLAANSIGVQDSLGALQETVRMQIDALELLRRQFDSVRTALVDTLMTLPEAPYLLSVHGLGEVMAAVILGEIGDPSRYQNAAQLIKLAGTQPTPNSSGRKNKGSTPISRKGRPRLRTALYFTVLCLVRVDDAFAREHLRLQTRRKNPLTKMQSIGALMNRLLRILWSLMRNRTLYQPDFRRAD

SEQ ID NO: 93262 - protein, 399 aa, unidentified
MSLAVGIDVGAYKCAAAICRQGEREAERKVLNITTKRSGFAELDGWMARQGAPIDVVVMESSGHYWFNLASHLRRQGYPVAVVNPLQAKYFAKSRLQRSKSDPADARTLAALGTHDQPRIGEPLVGAELKEAARFAMRLVREQAQVCQRIQRLVDIGFPELREAWDDPTCVSALAVLRHAPTAAAVARIRADRLARLKRPGVGGRVVGPMKAAQLKQLAETSVAAPELEQQVRFEMRLLIAQHDLLEQQIVSADTRTASLLDGEVAQRLLSIPGVGPSTAATLMAEIGDIWRFTDVDQLLAYAGVHPKEQSSGKKGANPETSWTMAKTGNAYLRAAAYQMAVVGVQHNPIIRAHYARKRAAGKSAMNALGHCMSKALAIVWGVWRGGKDFDPTLGAEAT

SEQ ID NO: 93263 - protein, 349 aa, unidentified
MKIIGCDFHPSFQQIAICDLETGEFQDRKLSHGDGQAERFYRELGEPALIGIEATGNSQWFLDLVERLGHEIWVGDAAKIRASYVRRQSTDKRDAGHILKLLLEKRFPQLWRPSAAMRDQRQLLRHRDKLVEIRTKVKNSLQHLAMNRGMQKKSRLWTRQGMEQFQQLAMPGWAGTRREDLLQLLKELNGQIELLDQAVKQAAEQHPQAQLLMTQPGVGPVTALAFVLTIGDVARFAGSKQLTSYLGLVPSEHSSGSKRRLGAITKQGNCFLRKLLVEAAQTTVRKDEDFRKEYQHRCHHCPKAVAKVAAARKLAVRLYWMLRSNVGYPEIVHIESNPRVPLGESSPKH

SEQ ID NO: 93264 - protein, 402 aa, unidentified
MKKVCGLDVHKDSIFCAIYNGETYCGVKEFSTMTPEVYLMGEYLQSEGVEEVALESTGIYWIPVWDLLYEMGFHLTLVNPYLIKQMPGRKSDVKDAQWIATLLHKGMVRGSFVPSPLIQELRVYSRKQGKLKQQVTRVLTVMDSVLVKCGIRASSCLSSISTKSFMCVVEAVIAGYTDPGYLTSLVYGNKKNKQSGKLREALTGNIKPHHRQELSWLKQEYGMYQMQLSECLSQMRRICDEHFSVMVKFLQTIPGISQIAAMTIIAETGGDMSVFESSDKIVGWAGLRPSNDESAGKYKSTATTRGNKYLRSILVQVSWGASRMKGSFFKDKFQRLAMRKPRKKALVAIARKLLVVIWNILKYAKEYNPKLLPVQDPVKMKARLAYHKKEYEKTAKLLNITV

SEQ ID NO: 93265 - protein, 320 aa, unidentified
MMAQNDPGVVGIDVAKDKVDACIRAFKLQQTWPSTAQGQRKLVAWLRKHQVNKAVMEASGGYERAWARVLREAGIEVRIVDPKRVRSFALSAGRLAKNDAIDAEMIAWFAETFSEAPSQTHDAAHEELQTLVKARLDLIDFRMRLVSRSEHVAPGLVQKAHARLLKSLASEIAKLEAAISAKIKSTPDFAERAEIIESVPGLAETSSANLVAGMPELGQVSDQIAAALIGAAPYDDDSGNRRGERHIKGGRRWVRNAIYMPCVGAATQNNPVLKAYYQRLLAKGKEPKVALIACMRKLIVILNTMIARRQKWDPSRYVLG

SEQ ID NO: 93266 - protein, 340 aa, unidentified
MKQLYAGFDLHSSNNYLAIIDEEGKRIWSRKLPNDPERIVVALSPHAERIAGIAVESTYNWYWLVDMLMEEGYTVHLANPSAIKKYEGLKHADDWHDAFWLAEMLRLGILPEGYIYPKEQRGVRDLLRKRGHLVRLRTSLIISLQHIITRTCGTKIGVNDIKRVREDRVSPLLSGDEDVLLAGSISKETIDYLRGQIRRIEKAVEGRIKLSSSYARLPELPGVGRILAMTIMLETGPVSRFPTVGDYASYCRKVGSKWLSNGKKKGKGNIKNGNRYLAWAYSEAAELARRYDDKARAFYDRKARETNFMVAHQALAHKLARAAYYMMRDDVPFDAEKLFG

SEQ ID NO: 93267 - protein, 353 aa, unidentified
MILIGSDFHPSWQQVCWLDTGTGETAEQAVTHGPGEAEKFYRRFAAPALIGLEATGNCQWFVELLEKLGHEVWVGDAAKIRASDVRQQKHDRRDAALLLRLLEEGRFPRIWTPSSEQRDMRQLLIHRHNLVRLRVQVKNELQHLAMNRGMQKKGRLWSVVGQQALRELELRPWASRRREDLLKLLAMLNGQVEGMDLAVQAAAEKDEQARLLMSQPGVGPVTSLAFVLTLGDVSRFPRGKQVASYLGLIPQEHSSGGRQRLGSISKQGNRFLRMLLVEAAQGAVRYDPQFRSEYLHRCHSKPKGVAKVAAARKLAIRLYWMLRTQKRYPEIVHVESSSRVPLVVRPTADRPTS

SEQ ID NO: 93268 - protein, 370 aa, unidentified
MKMSIGVDLHKTQFTVCCLSEDRAIQETGTYPTTDQGYRAFIKRISGWHEGGYEVRAAVESTGNSRYFRNRLVKAGIEVKIVNTLKFKVVNESVKKTDKHDSRTLAEFLEKDMLPESILCSQESEDIRRLLKSRSVLVKALVSLKNQVHGLLLGYGIESRRGQLQSKKERQRILDGLADHRSFGNAAQAVKPLLVTIDQITSEVKELERVLSDLVSADEDVALLQTIPGVGMITAATVRAYSDDINRYENAKKYAAHAGLAPWVQNSNKTIRHGHITKRGPVELRTAFVQMVMGMLRLQNKTDGYRLMYRYRTMKKSKGTGRSIIATARKMSAIVYAVLKTKQPFDPSKMLSDPKDVEMSKVARRYVLAA

SEQ ID NO: 93269 - protein, 365 aa, unidentified
MASVSHLVPIHLGLDVHKDTISVGILDPDQQVPDVERISHDEPSIRRFVARFAEPRALRACYEAGPTGFELARLLSSMGVGCEVIAPSLIPRAPGDKVKTDRRDCRRLARLHRAGELVAVRIPTVGEEAVRDLCRTRADMVEDLTRARNRLGKFLLRHGRPWRGSSTRTQAYQAWLRSQRFDQPAMAQTFGHYLAVVEVRNQALDAVEADLVGWCQRPPFDWQVARLAAYRGVTRLGALTLAAEVADWRRFATAKAFMGFCGLVPSEYSSGHTVHRGRLTKAGNAPCAPSWSGSAWSYQHRPSVGGELARRQQGLDPAILARAWAAQQRLSSRFRRLAARKHTKSIVAAAIARELAGFLWAEMTA

SEQ ID NO: 93270 - protein, 417 aa, unidentified
MLKTVYKNCAGIDVHKRHIVVRIAKTDDHGVTEYQLKRFPTFTEDLVKCRDWLVENSTLDVCMESTGKYWIPVWNVLEEQCRNVLTHPKYVKSIPGQKSDNRDSIRIVDLFKYGLVEPSFIPPKDIRQLRDLMRYRNKLVNVKSSEKNRFQNSLTVSNVQIANVVTDVFGKTSQSILKLMLEKQNLTLEDISPLLRKNLKSSPEDILKSIDGNFDESQSSKLVVCLNHLDHIIDCIDQLEEQILKLTINYQAELKLLLTIPGIKELSAIFIIAEIGTDMNAFHSRKHLISWAGLSPRLNESARKKKSVRINKAGAYIKPLLVQCALAAIKDKSCPYIKARYESIKRRRGHKKAIIAIARLLLSTVHHALVNNKDFDYDSFDILLERNQKKSKRIPKSKPDEMISFLESLGYSISQST

SEQ ID NO: 93271 - protein, 422 aa, unidentified
MSKKKSSVAGLGAFYARVCGMDVHKNSVVACVRILNGKDGTVQSTLRRFGTMTADLLELRQWVREQQVTHAAMESTGVYWQPVFNLLEGHLEVWVVNAQHIKKVPGRKTDMKDAEWIAQLMQCGLLKPSFVPGRQQRELRDLTRQQTKLVQQRNAVDNRIQKVLETANIKLGSVASDVLGVSGRKMIEALIGGEKDTSVLADLAQKKLREKIPQLQRALEGEVSDHHRFLLRQLLDQYDFLEKEIARVSERLGAVAPPSFRAAVEQLDAVAGVGERGARALLAETGTDMTRFPSHKHFASWAGRCPGNRESAGKRKSGKTPAANRHLDAVLTEMAHAAVRKKDSYFKSQYHRLAGRRGKKRAIGAVKHSLLVTVYFMLRDHKPYTDLGADYFDKLNPQHQIRYHVRKLKDLGQKVELSTMAA

SEQ ID NO: 93272 - protein, 404 aa, unidentified
MLDQAWVGVDVGKEHHWVVAEDSQGRVVLSRKVANDQQEIVQVLQDAAGLAQRLVWTVDLTTVEAALLLAVLWQGGQRVQYLSGRAVNQAAAGYRGEGKTDARDARVIADQARMRRDLPALRPSDGLVAELRMLTARRADLVCDRTRALNRLRQQLTAVCPALERAAEVTRQRGWVVLLTRYQRPAAIRRAGVARLAARLVADGVRAGTAQAIAQAAVAAVRTQPLALPGEAVTGDLIAELASQVLDLDARIATVDAAIKQRFGRHRLAKVICSMPGFGFRLGAELLAAIGDLELVDSADRLAAYAGLAPVANDSGKRTGRRHRPVRYNRALRRALYLSALVAIRCDPAARAYYQRKRAEGERPIQATICLARRRTNVLWALLRDNRTWQPEPPVKTNHPAEAT

SEQ ID NO: 93273 - protein, 401 aa, unidentified
MAFVAGLDWGGALHAVCVIDTDSGAVAERFETPHDAEGLRALVRRLARLGDAAALPVAIERPSGLIVDVLIEAGHPVVPIHPNAVKAARPRYRSSGAKDDRGDAYLLADLLRTDGHRFRPLSTPSDAIRALRALTRGRDDLVAARVALANQLAAQLGDFWAGAAAIFADVDSPIALAFLERYPTPQSAARLGSKRLAAFLAAHAYCGRRTPAELLARLRAAPTGLAGEAEAEARGEIVRALVAALAPLVARIAELSARIRHALAELPDGRLVMSFPRAGQICAAAILAELGEDRSRYLSADQLAADAGLAPVTRQSGRSRGVGFRWACNRRLRAALTCFADNSRHASPWAARVYADARARGCRHPHAIRILGRAWTRVLWRAWQDRTHYDPAKHAAAAAIG

SEQ ID NO: 93274 - protein, 412 aa, unidentified
MLRIVYPVCCGIDVHKKFLVACIAFTNDKGVTTYKSSRFSTFTSGLRKLSEWLRSSFCTHVCMESTGKYWIPVYNVLEATCKITLAHPKYVKAIRGKKTDKKDAKWISDLFKHDLVAGSFIPPLPIRQLRDLMRYRFKLTNFSSSEKNRIQNCLTVSNIQLANVVSDTFGKSSMKIIDYLLENPHDKDFDFVPLLHASMLDKVDDIRLALDGMITLEQQQKMNIILHHYDELGKCKSNLESLILSLSEPYAKERSLVSTVPGIKNPFSAIGVISEIGVDMSVFPTAKHLCSWAGVTPQNNESAGKKHSVRISRAGVYIKPLLVQCANAVVKSDKHPEIKGRYLSIKKRRSHKRAIIAIARMLLTAIYHILKKGEPYNPELYKKAEPIPASREITVEQAILIARRHGYSVIKD

SEQ ID NO: 93275 - protein, 409 aa, unidentified
MKLFVGLDVSSFDIKVCLLNGEGEKLRSFTVPNDLPGATELRDAILECVDDQEIHTLKIGLESTSVYSFHPSMFLHNDEALRALGTEVLVMNPKQISNFKKSYSDMDKTDEIDAFVIADYLRFGRLPMSVVKESQYVALQQLTRSRYQLIHQVTKEKQHFLQHLSFKCNTFKEEVDSSVFGNAMMELFFEKFSLEELAHMPLEDLAAFLQEKGKNRFGDPESIAKSIQKAVRSSYRLDKVVEDSIDIILGTTIEVIRTLQKQVKEIDKAIERIMAGLTQTLITIPGIGPVFTAGIIAEIGQIERFDDETKIAKYAGLYWRKHQSGRFTADDTSLSRNGNQYLRYYLVEAANSVRRHVPEYQAYYAKKYKEVPKHQHKRALVLTARKLVRLVDALLRNHQVYTPKRSVNE

SEQ ID NO: 93276 - protein, 330 aa, unidentified
MSTDAPAIVGLDMAKAKFDVALRLRGKFKTKVFDNNPAGFAALLAWLAKYGVTEAVFVMEATGTYHEALALHLADQGARVFVINPARIKRYAEASMLRGKTDAADARVIASFFEAQHASLEPWVPPSAEVRALRELTRRLEALKDLRQQEANRLGLAREQRVRASLDAVLATLDEQIAQIERSIHDHIDRHPGLKADRELLASIPGLGTLSVPILMAEMPWRSFASAAQAGAYAGLTPRRFESGATVMAKSRLSKIGAPRLRRALYFPAIVAAQHNPILRRFYQRLLANGKTKMAALAATMRKLIHIAYGVIRSGKPFDPLYLEKTQPAG

SEQ ID NO: 93277 - protein, 454 aa, unidentified
MARPSVKAVRRSAVLEPDAAGIDIGAQEIYVAVPPDRDQQATRMFTSFTCDLQALADWLHACRIRTVAMESTGVYWIPLYQILEERGFEVCLVNAHSLKSVPGRKSDVSDCQWIQYLHSVGLLNASFRPPDAICAVRSLWRHRSSLLQMASEHTLHMQKALSQMNLQIHHVLSDITGVSGQAILDAVLAGERDPMRLAKLCHVLVKTPHETVAKALVGDYRPEHLFTLKQSLEGYRFYRRLIADLDQEIARLMQSLPSANQQDTKLPPRTKHGVYQRNGNDPRFDLRGELYRIAGVDLTDVPGVSAITAQVILTEIGPDVSRFRHASAFASWLGLCPDKRVSGGKVLSSKTRKIKSRAAIALRMGANSLCRAKGYFGEFFRRMRARLGTAQAITATAHKIARILYHVLRTKEPYSETIFHQCDEQAQLRAEARLRKHAAQLGFQVIPINAGSGV

SEQ ID NO: 93278 - protein, 356 aa, unidentified
MDNRKYIGMDVHQASISIAVSDAAGKVLMECIVETKAATVLEFIQGVRGSLSVAFEEGTSAAWLYDLLKPHVAKVVVCDPRKNALLKAGNKNDRVDARKLSDLLRAGLLTPVYHGESGVRTLRELSRSYLAASKDLTRVMNRLKAIYRSWAIPCAGQQVYSPRHRAAWLEKLREAGVRRRAEQTYQQLDFLMGIRKETRKELLVESRKHPARKLLEQIPRLGPIRVALLIALIQTPHRFRTKRQLWNYCGLGLRTRSSGEYRYTGGQLQHARKPPALRGLNVNHNHDLKNLFKSAATQAGTCKDDPLGEFYQNLLASGMEPPMARLTLARKIAAIALKIWKKGERFDPAKLKPQAA

SEQ ID NO: 93279 - protein, 359 aa, unidentified
MLSIGIDVSKEKVDIALYNGTDYAFKSYENSTKGVKRMIREVKKMRVSKGSSQERRSKVRQQRKRDNKQQEVNPEIHFIMEATGTYHLMYANTLHKNGYDAYVVNPLIIKRYGEEKLRRAKTDKADAKLIAEFGYHNIVNKANDTNSSVSPYLFRPNSKTSMKIKLMVRTIDQLYISKNRSSNQIEALSQYDNGYSKESIKALKSINKKIDHEIEKLEKQIKTLIMNTEYRETYERVTSIPGIGDRTASALIGYFEKFDNFENAKQIAAYIGLNPSIKESGKSIKKRGRISRIGNPYLRKLFFMAALSASVHNTQCRELYERLLLKGKDKKLIITAVAHKLLRQAFAVVKYERMYDPAY

SEQ ID NO: 93280 - protein, 404 aa, unidentified
MWYVGLDWADTHHDVEVLDEAGKRVGARRFAHSHAGLHELQAFLLGIAASPDQLACIVETTHGLLITFLLEAGFPVYPVNPKMANQLRKVAGAKTDRIDAHLLAKLGRLDLGELRRLAPDSETVQELKTLTRDQDALIQTQTRLVNQVTACLKAYYPAALHLFAKVQQRSTLVFLQTYPTPQAAQAASLAEITATLRAGKHTNPTKAARKIVEELHRPHLAATELVVRAKSRLLLSLVKQLLVVIQEIAGYDAAIKPLFLTHPDHELWSSLPGEGLHLAPRLLAEWGEDRSRYADAGSRQALAGTAPVPFASGNYAKAHKRFACVKPLRNALHQFAWQSTRQEAWALAYYQRKRAEGKTHSVAVRALANVWVRIIYRMWVNQTSYQTATFEAARLAHAPRPHAA

SEQ ID NO: 93281 - protein, 413 aa, unidentified
MNKRWDKACGADVHKRFIEATILTSDGTKKHKRFLTNIEDLLAFKDWLIGEDCPVVAIESTGIYWIPINTVLEGFVKVLVANAYKIKNIPGRKTDLKDSEWIAELCLNGMIEPSRIFPKEDRELRDLTRAREAFVNSRTQVKNRIHAVLDTANIKLSSVFTDLFGKSGIELVKGLTSGQALDSIISNTRNKWIKERAEEIQQAVKGTLGTTQAFVIRECLEVIRTIDSRIKNIDAEISSRMSAKDDDLKIAMSIPGIGFVSGSTILAEVGNFNDFKTPDKLAAWTGIVSSVYQSANKLSLGRITKRGSKHLRRILVEVANAVIKVKGRNKLKSFFLRVKARQGFKKAIVALARKILCILHHLLTNRELYTEAGEAQVKKSKIPKENGSVTMTADEMIKILSEAGYVVSKPVLG

SEQ ID NO: 93282 - protein, 354 aa, unidentified
MLIIGADYHPSFQQIAFVDTETGELKEQRLAHREGAEEFYRALAARGQPVRVGMEASGHARWFERLLAELKFELWVGDAAEIRRKRGRKQKTDRQDAQHILGLLLKDDFPPIWVPSWENRDLRQLLWHRHRMVQARTRIMNQLQAVALNEGLLCKKRLWRERGRQQLEAFRLAPWASRRRHDLLELLDRLNPTIAELSQAIEREVEKCPAAQRLMTHPGVGPLTALAFVLIIGDADRFPCGKQVASYLGLVPLEDSSGNRRRLGHITKQGNSMLRFLLVEAAQVTVRSLPQWRRKYAHLMMRRGRKTAKVAMARRLAIRLYWMMRQGWDYQQWSKLGSHAGQPGPGDGVRSNIE

SEQ ID NO: 93283 - protein, 353 aa, unidentified
MEYIAFDAHKHYTLASVARPDGQLVREQRIAHARGALQQFLERCEPGSPVAVETVGNWYWIVDEIEAAGCVPRLVHARKAKLMMGEINKTDKLDVRGLNQLQRTGTLPTVSIPPGELRDQRDLPRTRMVLVRQRTQLKNRIHSTLAKYALHDLEVSDLFGARGRALVRQRLELLPPCTAYTTRHLPEQVERLDHQVREFEQQIRTLFKPTPTIQHLLTLPGVGLTLAVVIALEVGDVARFPTAEKLAAYAGTTPRVHASGGKTRFGPSRPDVNRYRKWAFVEAANAICLNRGRTPRRHVTRLYERVAQRKGHQKAIGAVARHLAEATYWVLTKQQPYREPTTAAVSSTGDKRG

SEQ ID NO: 93284 - protein, 344 aa, unidentified
MEHYAGLDVSVKETSVCIIDEAGKAIREVKVATEPAAILAVLVDDAFTIERIGLEAGPLSQWLYSGLAETGLPVICVETRHMKAALSAQLNKSDRNDARGIAHMMRVGLYRPVHVKTLASQKRRMLLTSRQLLQAKAIDIENDLRGTLRNFGLKVGIVGTAKFEARIRELVADEADLAAITEPLLIARRVLREQLGILHRRLLAVVREDEVCRRLMTVPGVGPVVALTFRATVDVPARFKNSKAVGAVFGLTPRRHQSGEIDRMGGISRCGDAMMRTMLFGAAQVMLTRTIRWSWLKAWGMKIARHRGMKRAIVAVARRMAVIMHRMWADGTEFRWTNFNAAAA

SEQ ID NO: 93285 - protein, 409 aa, unidentified
MERQLERSAGLDVHRDTVAACVRVPGRGGHREQHVQTFGTTAAELLRLREWLAEHGVTDVAMESTGVYWKPIYYVLEEAFTCLLVNAAHIKQVPGRKTDVQDCVWIAQLLEHGLLRSSFVPPEPIRELRDLTRYRKGLIQERQREANRLHKVLQDAGIKLASVATNILGVSGRAMLEALVGGTTAPEALADLARGKLRAKLPALRAALAGRFRPHHAFLVTQELAHLDYLDDAIDTVSREVDRLLIPFAEARRRLSTIPGIKTRTAEVVIAEIGVDMSRFPSEHHLASWAGLCPGNNESAGKHKTGTTRKGNRWLRMALIEIALAAIRTKDSAFGARYRRVMRHRGHKKAVVAVAHSLLRTIYHVLADATDYRESGANYYDRRQTARTTRRAVAQLERLGFRVTLEPAA

SEQ ID NO: 93286 - protein, 338 aa, unidentified
MTVVTVGIDLAKNVFAVHGVNAAGKAVLVKPLVRRAKLLELIATLPACLIGIEACTGAHFWAREFQKMGHTVRIMAPQLVSPYRMGGRHGKNDAADAAAICEAVTRPNMRFVPIKSVEQQGQLFVHRAHQGYVSERTALINRIRGLLSELGIVLPQAFKAFLSGGAQVLEDLPGFCNQVIGDLLNELYHIEEKIKNSEKLIQQLARDNSAAQLLMQFRGIGPMTATAIVASIGNGHDFKNGRQFSAWLGLTPRQQSSGGKARLGRITKAGDSYLRTLLVLGARSVLLGAAKNDDPVSRWALQLKERRGYGRALVAIAAKNARMCWAMLHLRDEFRFPA

SEQ ID NO: 93287 - protein, 364 aa, unidentified
MLIIGCDYHPGFQQIACVDTDGGAWSERRLAHREQAEQFYRELKQQDLCVRVGMECSGHSRWFERFLQELGFELWIGDPAEIQTRRVRKQKTDRQDAQLLLRLMLENRFPRIWVPDAENRDLRQLLWHRHRLVQMRTRVMNQLHVIPLNEGLRRKKALWRPAGRKELESIALAPWASRRRQDLLELLDQLTPQIEELTRALEEEVEKRPVTRLLMTHPGVGPLTALAYELVIGTPERFHCGKQLASYVGLVPEEKSSGDRRRLGHISKQGNVLLRFLLVEAAQVTVRSQQEWRNKFFHLAMRRGRKIAKVAMARKLAVHLYWMWRQGCDYGQTQKLGSHAGEPGNLDGVQSITDVMIGHPAPTK

SEQ ID NO: 93288 - protein, 343 aa, unidentified
MKEYISLDCHKHYSKAERESVAGSRVVKARIEHAPGQLQSFLRSCPPGNPVAVEATSNWYWIVDAIEESGREVLLVNPHEAKKRRGKTDKTDDIDVHELNILQRCGALPTIWIPPRKIRDQRELTRTRLVIRHYGTLLKNRLHAVFGKYALFCPETDMFGKSGRAWIEETLHRLPRETLLVTLLQLQELDLIDQHCAQLEKRLEEILQITPTLRRLDTLPHVATILAAAIAFEMGDVHRFRSDECFCSYSGTTPRVISSGGKTHYGRVRQDVNTYLKYAFFEAANGVALGAAVNPRPYANRLYLSLKERRGSQKAKGAVARHLAQAAYFMELHQENYRDPAIR

SEQ ID NO: 93289 - protein, 347 aa, unidentified
MEKAFPTRVQVFAGIDVSARELSVAVQCGVETGIAVTTFSNKAAGHKALLLYLLRGNARARVCLEASGNYSLDLALTLQAHPQVEISVVNPRRARRFAESLGERSKTDPVDARVLCEYAMRMRWVPWVPPNLAALRLRAITRAIEDLVAMQTQEKNRRHSLLASRALPALVMRELEKHLRYLKLRITRLRREAIRLIGRHPELNRRFHLMLTTPGLGETSTLQILGELAVLPETLDARQWVAFSGLDPAHFSSGTSVEKKSRISRGGSRHLRRALYMPALVAIRREPFVRGFYQRLLRRGKAPLQAVVAVMRKLLHALFAMFRLDQPYDGSKVCPAEFARDTAVVCA

SEQ ID NO: 93290 - protein, 511 aa, unidentified
MPKVIHQRGNGSAKNPSPELVNNFAAAHSCGGEQLAAPKPRLDSPRPARARQRSPTSVAAPGPSAERTSPQEGSCIRLRRSRVPERLCTLTPVKPNWTEQNYFAALDWAKHHHDVIVVDRIGAIVADFQFPHTAEGWTQFEQQMQKFGKCPICLETSSGPAVDQLLQRDYVVYPINPKAAQRYRERKNPSGNKTDRHDAWSMADALRTDGHAWAQLIAQDEATAALRLLCRDENVLIEQRTALVNQLQAALAEYFPLALESFDDWTKPFAWAFIRSFPTAEALSKAGKRRWEKFLHAHKLWRPETAETRLQIWQRGQQLNASAPLSAAKGLLALSLVNVLQSLQKQIDEYRQRIRAAFESHPDHGVFGSLPGAKDKLAPRLLAELGSQREVFPDADSLSCRAGTSPVSFESGQLRKARIRWACNDFLRHTVHLWADQSRKTCLWAQLYYQTKRKSGHSHASALRCLGKRWLKVLWRMWQNRAPYDESIHLKSLHEHGSFVAKLLVGAPTQV

SEQ ID NO: 93291 - protein, 427 aa, unidentified
MSYRIAAIDVHKRMLAVVVSDVDGEGEYQFERRKFGATPGELHVLAQWLVQQEVEEVVMESTAQYWRPVWGTLEQYWKPARQQREGAHQMSGTLHLCQAKSNHGPHGRKNDFLDAERMVKRLVAQELVLSFVPDEEQRLLRTVTRRKHQLTRAKIGFKNQLESLLEQAHIKLSSLVSDLLGVSARRMLKALAEGESDPAALAAMADRGLRATPDQLRDALGASAQLNGVFRRLLKLSLEELQVIEMHIEQLDREAMGLLKGHEDVVQRVAEVPGFGPDSAMQMIAEVGLEAAHFQTEKNLSSWVGVCPGNEESAGESHSTRSPKGNRQMRRLLNQSAQSAVKVKGSIFEVTFHRLLPRLGYKQAIWAIAHRLCRLLWLILHKGLRYEERGPAVSAKSKRTRAARMIRELKKLGYRVEGGPLPAVARA

SEQ ID NO: 93292 - protein, 341 aa, unidentified
MDKELYFGVDVSKKTLDLAYYDGETIDWKNAHIKVSNDDAGFKKIGSWVAKVGKDFDTFLFCMEYTGLYNQNFRLWLESKGYIYGMVEPRKMHHFEPDLDDDQRSLDRVKTDELDAFRIAIYCEQNHKKILRNPSKLPSPVYFKLKRLLAERKQNTKQSTLYKQQLHDICAYDTDLSVERKKLLLKNMQENQKAIDKEIDSYMNEDTSIRKNYNLLTSIPGIGRIIALETIVLTENFTAISNPRKYACYIGIAPFKKESGTSVRKRTSVSKKGFSEAKADLSIAVLSAIKNNPSIRDYWIRKRKEKCGGIVLNAIKFKLVLRMFAVIKRGTPYVETDAYKN

SEQ ID NO: 93293 - protein, 528 aa, unidentified
MAFTVRTTHREDRRSSSKASRKRRSLQKPNGVISARVQKVGGDKFAIVCIDPAKHRSEWMMADYFGNVLIEPQTVKHQAAFFKLAVEQVRQAQRQHDIQDTIVVVERTGNYYLFPKRAFSSAGFETRVVHPFATKQYRTPADPGNKTDETDLYAQHRAAVAGFGLCELELGSPYRELQLRARHRRSLVEKGAALACQIRDHLHLAMPGYANLFQRLFETQSAMAIAHRCESPAQVIELGSVGLSRHLRERKIAHRAPTIDKVLSWAAQAVHDNIQDGPLHHAIWTDLHDLFQHFQRKIATLEQQLASDVVRTRYVRLMAIPGINVVSAAELAAEMGPIAQYANANAITGRSGLYPSRHQSDQKDDSGPLIRQANRRLRGVLMRIADNLACHSSYYRGQAKVDQSRGINKRASRVKIAKRFSRLTLACVAGDVPMRHPCFRQPDSILEKLRRFHHEHKTPIDRLLAELEEAIEQLPYNTRNHEAEIVAKVLQQQASRRRGSVAIGELLPAVLARLGVTTINTNESGDRP

SEQ ID NO: 93294 - protein, 341 aa, unidentified
MPTITIGLDIAKHVFQLHGVDTAGQVVIRKKLRRSELLEFFKALPPCLVGMEACGTANHWGRKLAALGHDVRLMPTGYVKPYVKRGKNDAVDAEAICEAVTRPTMRFVPVKSAEQQSILMLHRTRDLLVRQRTMLVNSLRGQLAEFDLIAPQGVWRIPELHALAQDASRTELPDAVRGCVELIIGQIDDLQSRVKVIEKAILACHRASEVSLRLQTIPGIGVITATAIAATVADASVFKSGRHFAAWIGLVPRQNGTGGKVHLGPISKKGDPYIRKLLVLGATAVIRYAKNKPELAAWINALLARRPARVVTVAVANKLARIAWAVMRHGDTFRQASSAIA

SEQ ID NO: 93295 - protein, 343 aa, unidentified
MELYVGMDVSLKETSICVVDDDGKIQCEGTVISEPEALAGFIKANAVKAKRIGLETGPTSTWLWHELRARGLPVICIDARHAKAALSMQINKSDRNDAVGLARVMQCGWYKEVQVKSLACHEIRAVLSSRAQLVKIKRDLENQIRGLLKNHGLVIGKAGGNVFHRRAEELLGEQGLLGAAVRPLLDIREKVSREIAVLYRKLLSLARNDEDSRRSMTVPGIGPITAMAFHSAIDEPSRFKRSRSVGAYFGMTPRRHASGEVDWSGRISKCGDGMVRTYLFEAAGVLLTRVPQWCKLKAWGHRLWKRIGFKKAKIAVARKLAVILHRMWRDGTDFQWSSKEAAA

SEQ ID NO: 93296 - protein, 351 aa, unidentified
MTTMTETNRRVIGGVDTHRDLHVVCALDELGAQLGVESFPTTPAGYRQALRWLRTFGQVERIGVEGTGSYGAGLTHHLQTQGVEVVEICCPNRQRRRSHGKSDPVDAVAAAKAVLSGDATIEPKTRTGNVEAIRALRTADRSARQCRIKTLNQMRALLLTGPPELREQFRGTTAWRMVHTAVRLRPGDPSTPVGATKYSLRLLARRVLELEAELKELKAILTPLVAATAPELVARHGVGTETAGALLVAAGDNPDRLRDERAFAHYCGTSPIDASSGTVVRKRLNPGGNRHANEALWRIVMVRLVSDPDTRAYMERRTKEGKSKREAIRCLKRYVARELYPLVVQSAPCNR

SEQ ID NO: 93297 - protein, 420 aa, unidentified
MAFKIFRFNCCGLDVHKTWIFACIGLTDANGRTEYKEKRFSSFSRGLRELAAWLASYKCTDVCMESTGKYWIPVFNVLEKTCNVILAHPKYTKPQKGNKTDRKDAKWICDLFMCEMIKPSFIPPAEIRHLRDLVRYRSKLTNMLTGEKNRAQNCLTVSNLKLDDVFSDVFGKSSRSITEYILAHPGEAFDVTPFVDKRCKTPIEEIQAAVDGAVSPEQAIKLRQCLDHIDELEKHKAEMEREILRVSNSYLDALELIRTVPGLDKNPFTAIQILSEIGGDMSVFPTDKHLVSWAGCCPRNDQSNFKIKSTRISRAGSYLKPVLVQVANALIKSKKHPEITERYRRIKSHRGHKKAIISICRLLLTAIWHILTDLKPYSAEGYLAPRPVKEDKVLTTSQALSLLKLRGYIIKDDDSPATAC

SEQ ID NO: 93298 - protein, 350 aa, unidentified
MNDTILAIDLGQFNSVFCWFEPDSRAQSFRTATTTPENLRRELLRQPVARVVFEACSQAGWAHDLCEELKLPALVASTTGAAWQWKHLKRKTDRDDALKLARLAAVGEVEGVPVPPRALRQWKSLIGLRKRLVSERVRAQNRIRGLLVSQGLSAPMGAKAWTELGLAGIGQFARPLADCPPAELWRGELHLLLERLRFLDTQTREVEARLDTLAASDSRVSLLTTVPGVGPRTAEVIAVHLFDARRFRGADEVSAYAGLVPRQYQSGETDRRGRITRRGPKLLRAALVECAWCSLRYNAWARDTWLRLQANGLSKKKAVVALARKLLVRCWAILRTGQPWRAPTPATAAV

SEQ ID NO: 93299 - protein, 430 aa, unidentified
MKSNTQNTKIEAITETTLVLGIDVGSETHYARAFDYRGIEYSKKPLKFSNDEAGFVTFKAWILDIKEKHGKDKVVPGMEPTGHYWFNLGKFLQDNEMKPVLVNPHHVKKSKELDDNNPTKNDRKDPKVIAGLVREGRYMIPYLPEGVYADLRTASNMRFQLQAELTRIQNRISRWFNIYFPEYKTVYGQPDAKSGMRILKVAPLPEDILTLGIDGVNQIWRDAKVRAVGKARAKTLIEAAEHSVGSKEGEISARMEIRMLLDDYESRNTRLQEVVALIEELVKKIPMAEKLLEIKGVGIKTVSGFLAEVGDISRFNNPKELQKLAGLALVENSSGKHKGETTISRRGRKRLRYLLFEVAMSLVSKNPEFRELHSYYTTRKLNPLKKMQSLMAVAAKLLRVFFAMLTKGVDYDSKKLVGDIKRPEVYLQAA

SEQ ID NO: 93300 - protein, 352 aa, unidentified
MGYFAGLDVSLEMTSICIVDADGTVMKEAKVASEPDDLIAFFAQCGMVMKRIGLEAGAPSQWLYGGMAEAGLPVVCIETRHAKAALSAMPNKTDRNDARGIANIMRTGWFRAVHVKTQTAQELRFLLVARQTLVRKLMDIELAIRGMLRSFGLKMGVVSKRDFEARVLELAGDRAMLMRALNPMLTARRALAVEYANLQKVAMDFARDDEVCRRLMTVPGVGPIVALTYRATIDVPSRFRRSKSVGAHLGLTPRAYQSGEVDWTGRVSKSGDAMARAALYEAAHIVLVRVKRWSSLKAWGVRLVKNRGHKRAVTALARRMAVLMHRIWVEGTTFLWKTGDGQAIGQKPIPAV

SEQ ID NO: 93301 - protein, 357 aa, unidentified
MPTQSSSKKLDSQNVYIGIDVHLRQWNVCIYQGGIRRRPFQQSPSVKALLSHLRANYPGMIYHSAYEAGVCGNSIHYELEDNGIHNIVFNPADIAQKDKERKRKTDKVDSSKIARALSNGELECIHIPTKERTEHRNMLRVRNCCISDVKRSKTRLRHLLHVNGIGIPPEYCNGRWPQSFFAWLQELYPDPNATGQAIRAMTHGLQSQLSLLKDVESRIRNLMEEACYAEDFRLLRTIPCIGETTAYTLLLECGDLSAFSSADKFCAFVGLIPDSDISDLHEVKCGITRRRHKTLRYMLTEAAWRAISMDSSLSKLYAKYTHRMPKQKAIVKIAHKLAKIIKFVVTNKTAYDASKAT

SEQ ID NO: 93302 - protein, 345 aa, unidentified
MSQTLGTIAVIGIDIGKNSFHVVGLDGRGAIVLRQKWSRGQIDARLANTPPCLIGMEACVGAHYLSRKLKALGHDARLMPAKYVRPYSKGQKNDFRDAEAIAEAVQRPTMKFVATKTTDQLDLQALHRVRERLVSQRTGIINQIRAFLLERGIAVRQGLRFLRAELPRILAAPPEVLASRMVRLIEGLAEDWRRLDERIDYLSGEITALARQDAGCERLVSVPGIGPIISSAMVAAIGTGEAFSKGRDFAAWLGLVPKQISTGDRTILGKISKRGNRYLRVLFVQAAWVVLIKPQSWQRHGLKPWIEAAKRRLHRNVLAIALANKLARIAWSVLAHGRTFEARSA

SEQ ID NO: 93303 - protein, 298 aa, unidentified
MFQKCRWILCLIKRLDHSASNDVDGFDVIIAELKQHSIALVLMEATGGLEAAVACSLQTQGFDVAVINPRQARDFARSMGYLAKTDRVDAAMLAQLAEVINRHPERARFLRNLPNAEREMLNTMVVHRRQLITMLTAERNRLYPSHPQSRKSISTIIGVLQDELKCINKSMEVHISTHFKTLAEILGGVKGIGAATIATLLAEVPELGHLSRREISALIGLAPFNRDSGNMRGRRTIFGGRANVRSALYMATIVATGHNPVIKQFYNRLVESGKAKKSRTGSLYAQTPDNPECDDKEK

SEQ ID NO: 93304 - protein, 409 aa, unidentified
MRYYIGVDWADAEHAVWVADEEGQRVSASMVPHSAVGFSEWGRQLDEWRAAGLGLWAAIERPEGRVVDFLLDHGVRVYPVNPKALDRARDRFRQSGAKDDLFDARVLAGFLRTDHAHLMALEPSSEAAQELKLLTEDYQRQVRAQTRLVNQLTATLKAYYPRALEVAELTTALAAAFLQAYPTPAMLLTLTERQWQRWAKAHHLSAARTTELWTSLKAPHLPVPPHVVRAKSQLMQALVTELAAVMAAVARYRQAIDDFFASMPAAVWARTLPVGKHGVTVPTLWARLGDAPGRWESFRHLQAHAGMVPITVRSGKQVGVAFRFACDKQLRYAVDQVAWLSLPRSEWARAYYEQQRARGHRHRRALRALGAKWLKIIFMMWQRHVPYSEEHHLATMARQALRHPEKRIA

SEQ ID NO: 93305 - protein, 343 aa, unidentified
MNEVTTIGIDLAKSVFQVHGIDALGATVIRRRLRRSQVLPFFRKQPPCLIGMEACATSHYWAREIMALGHEVKLMPPRYVKPYVKRNKNDAADAEAICEAVTRPTMRFVAVKNAERQSVLMLHRTRELLVRQRTMLVNAIRAHMAEFGVVTRVGLPQVKKLLAVIADRDDDRIPSLARTCLEGLARQLLSLECEINGAEGRIRTWHRTSEDSLRLETTPGIGPITASALASSVTDPHIFKSGRGMAAWIGLVPRQNSSGGKERMGRISKQGDQYLRWLLVAGAMTVIRHAKRRGTTDPWLAHIIANKPTKVAAVALANKNARIAWVLLRHGGTYRKAASATAV

SEQ ID NO: 93306 - protein, 393 aa, unidentified
MVYVGIDVAKDKHDCFIANSDGEVLYDVFTIQNNMDGFEDLFFKIKTASRDLSKVKVGLEATGHYSCNILGFLHNKGLTTIVINPLHTNAYRKSLSLRKTKTDKADARAIASMIMSDVSLKPYSDTVYHNEDLKSLSRYRFDKVSDRSKLKQSVSRLVNILFPELEKLVSTLHTKAVYELLSEFPGAHQVASANLKHLTALLSTASKGHFGREKANEIREAARRSISTYLPAKSLELKHTIKLIRELNAEIAEIETEIKKIMDSIDSPILSIPGISYGIGSMIVSEIGDFSRFDSPDKILAYAGCSPTTYQSGQLYSSHAVMEKRGSRYLRWALINAARYVCNWEPTFAAYLEKKRSEGKHYYVALSHAAKKLVRLLYHLETTGEKYIPQTLS

SEQ ID NO: 93307 - protein, 341 aa, unidentified
MDKELYFGVDVSKKTLDLAYYDGETIDWKNAHIKVSNDDAGFKKIGSWVAKVGKDFDTFLFCMEYTGLYNQNFRLWLESKEYIYGMVEPRKMHRFEPDLDDDQRSLDRIKTDELDAFRIAIYCEQNHKKILRNPSKLPSPVYFKLKRLLAERKQNTKQSTLYKQQLHDICAYDTDLSVERKKLLLKNMKENLKAIDKEIDSYMQEDANISKNYNLLTSIPGIGRIIALEAIVLTENFTAISNPRKYACYIGIAPFKKESGTSVRKKTGVSKKGFSEAKADLSIAVLSAIKNNPSIRDYWIRKRKEKCGGIVLNAVKFKLVLRMFAVIKRGTPYVETDAYKN

SEQ ID NO: 93308 - protein, 283 aa, unidentified
MYYTGIDLHKKTSFITTIDERGQVVKRANLKNVTNEIIKYFDDLVDDTRIVIESMSSWYWLYDLLTEKGLKVIISNPVKTKAIASAKIKNDKVDSHMLAQLLRADLIPESHVSSMDTRKLKELLRHRNRLVRDAGRMKNRIHALLMKNNLQQPCSDLFGKQGLAFLYDDIELPDYHREQLKTYLFLYEGIKTEVDHLTKRIYAMAKAHPVANLLTTIPGIGPLVAMIIVAEVEDIKRFPSYQNLSSYAGLVPSLDSSGSKERMGRITKQGSPYLRTALVEMPR

SEQ ID NO: 93309 - protein, 347 aa, unidentified
MLADQLDYIVGVDPHRDSHALVVLHVISGAVVFEAAVSANSEGYAQALELVDQHAAGLRAFAVEGTGSFGAGLTRFLTGQGERVLEMSRLRREQRSGGKTDALDAIRAARSVLAQERPATPRAGGERQALQALVAAREGAVNAKRAGLCQLRDLLITTPEPLRSELRPLTRARLLQRLAATRPDARRDPELRGSMLALRSIARRVLQLTAEERELAREIETLTRKLAPQLLEQPGIGPHAAAQLVLSWSHQGRITSEAAFARLAGAAPIPASSGQTIRYRLDRSGDRKLNRALHMILVTRKRSHPATIAYIARRVEEGKTRREANRCLKRYLARNLYRLLEHPPMTT

SEQ ID NO: 93310 - protein, 333 aa, unidentified
MLYVGVDAHKATSQITVVNETGSILKRAKVASTSSAFQQALSEYDEPLTAVLEASYCWGPIYDWLDDLTEEVVLAHPSKVRAIAEARIKTDKIDSAILAHLLRADLIPKAYAPSKETRALKRVLRQRLFLVQLSTMVKNRIRALLSQHEVQTPQVSDLFGKVGMTWLETVKLTQPDGALLHEDRELLVFLKTRVNATEKLIQELAKNDVAVPWLKSLPGIGTFLSVLIRWEVDDISRFPTAKQFASYTGLVPSTYASSKRVVHGGLTKQGNKWLRWAFIEAITPAVRSSPTLACFYQKLKQRRGVKDARAATARKLAELTWTIWNEQRCYIER

SEQ ID NO: 93311 - protein, 375 aa, unidentified
MKEKLRFLGLDVHAETIAVAIAEPDGEVRSLGTIPNRLESIRKLIKKLGPAEKLRACYEAGPTGYVVYWQLAELGVKGDVVAPTLVPVKAGDRVKTDRRDAEKLARSHRSGDLTAVWVPDEGSEALRDLVRTREAAKQDQLRARHRLSKFLLRSGQRPPSGIRPWTRPYLIWVAQLRFTQIAQEATRQDYLHEVEHMRERVARLEQAIMEAVQLASPSLQQVINDLQALRGIADISAVTIAAELGQVSRFDSARQLMGYCGAVPSEDSSGKRTRRGSITKTGNAHLRRIVVEAAWSYHRPPCIWYGLRKRQESISEEVKEIAWKAQHRLHKRYMRLAAAGKDKRKITTAVARELLGFIWAIGTRAETTVRQRIAA

SEQ ID NO: 93312 - protein, 372 aa, unidentified
MASIIYVGMDVHTTNFTFCCYTADSDRGFAVAQTEPDYRQVIKYMERVQKQRGEECKFVCGYEAGCLGYSLYHQLTRCGVDCVILAPSTMHQEKGKRIKTDRRDAENIARCLAFSLYSPVYVPTTEDDAVKEYIRMRDDIKADLKRVKQQIIAFTTRHGFAFDGKSYWTQKHLKWLETLVFEHPLYKKTLQEYLILYYMLDEKVAVYDTRIEEMSHLEHYEENVQKLCCFRGVAAHTALSLLVEVGDFQRFRSAKHFAAYLGLVPGEHSSSDKQIRTSITKAGNTHLRRLLVEAAQSYNRGAIGKKSAALKARQGGNPAEVIAYADKANERMQRKYYRIAFKSRHNIAKTAIARELACFVWGMMTGNISNAA

SEQ ID NO: 93313 - protein, 390 aa, unidentified
MIFIGIDVASKKHDVIIISEFGEVLSPPFTIENSIDGFKKLHAEISSHMEQHDLVHIGLEETGIYSSNIRDFLYSFGFNVYMINPILTHHSRMAHSLRNTKTDKLDCLAICRYIKDNLSHLKPYISTLYTTGELKSLSRLRLDKLKTLSKAKMEFTRLLQIIFPEFAKHFDQHSLWAKKLFTQYLIPLRISRMHNDTLIDIIRIQGDRVAAASLIKSLAKNTIGRCSLSNELLIQSCLDDIEHFSNQISIIDEHLEILMKDFEFITTIPGVATITGALIIGEIGDIHRFNSSSQLLAFAGLDPSIYESGDFKSKKCRISKRGSRYLRSAIFTSTKVACIGKTKDNQFKQKYNRKMAEGKHHYSAVCNVSKNMINTVFALMKTKEDFRYLI

SEQ ID NO: 93314 - protein, 315 aa, unidentified
MTTKIETYVGIDVSKDRLDLAVLEEKRIEQHANTAGGIKKLVEEMKELMPALIVVEVTGGYERAVVKALFETGLRVARVSGYRARQYARAKGLLAKTDPLDAMNLADYGKHVQPRVFEAKSEVGQCLSGKLVRRRQLGEMLNAEKNRFRLAYGDIGPSIERVIEFLQGEMKQLDEEIRAYLDANPEWLEREQLLRSMKAVGPVTAATLLAELPELGKLDDKQIASLVGLAPINQDSGQRSRYRKTGKGRPSVRNVLYMAALTGLRYNPVIKKQYDGLVARGKVKKVAITACMRKLLVILNAMMRDQQPFRYAPVF

SEQ ID NO: 93315 - protein, 348 aa, unidentified
MSTMTDPSVSVTVGVDTHADVQVAAAIDGQGRLLGTRSVPSTEAGHVELLAWAQALGPTVCFGVEGTGSYGAGLARFLVSTGQRVVEVDRPDRQTRRHRGKSDPVDAEAAARAALAGTARGIPKGRSGMVESIRALRVARRSALKARTQIAAQLHALVCTPPEPLRGHLRGLSLRDLVAQTAASRPGDPAQPLEATRHALRHLARRHQRLSQELQDLDELLDPLVQGAAPALLSIKGVGPEVAGAILVAAGDNPTRLRSESAFANLCGVAPHEASSGRTIRHRLSRCGDRAANHALWRIVMVRMTCDDRTRAYIARRTAQGLTKRETIRCLKRYDAREIYRALTLDQR

SEQ ID NO: 93316 - protein, 375 aa, unidentified
MLKSLNVGIDISLREAVVSLLTWEGKYLGKSFKVANNLSGVKELEDRLLSILSLGSFEHIRFGMEATQNYGFHLAEYLATSDKLSAWKPLVYVINAKYIKDFKRAFPEKDKTDLVDSQFIAEYLRFGKLPHPFEANNRYLPLQRLVRYRYHLVKNIERETKFFLANLFLKFPGWVQNKPVKRLGKTAMDVLSEYYCLDEITQTPLEELALFVAKAGKNRSPNPEKIAKEIKKAARESYRVRADLADSVQFILENTIINLRTFKTSLKKVDKAISQEMKGFSNPLLSVKGIGPVYATGIFASIGNIKRFSSHDKIAKLAGLVWKRRQSGKFEAEEKRLIRQADRYLRYYLVEAATSPASAQRGVPHLLPQKVSGGK

SEQ ID NO: 93317 - protein, 412 aa, unidentified
MKRIYQRCCGIDVHKATLTACVRVHGAGRKLSQEIRSFGTTGDELLSLHDWLMTHRVSHVAMEATGVYWKPVFYVLEQGFTLLLVNPADVQRMPGRKTDVSDAAWLAQLLENGLLRPSFIPPRAIRELRDLVRYRGELKHDHTRVANRLHKVLQDADLKLSSVMSDILGVSGRQILRQLAAGHSDPAALAELARGSLRAKRPALRQALTGRFSEHHAFLIGQALTELDNLEESMSALAARVEQHLVPFAQQIEQLSTIPGIKRVAAAVILSEIGTDMSCFPDTAHLASWAGMAPGNHESAGKRRRAKARHGNRWLRTILVECGHAAGRTRDTALAAIYRRMIIRAGRKHAAFVTGRHILNIAYHLLTQHDTYRELGPSYFEQRRAEQLKRRCLDQLRNLGFQATLAPLPTAA

SEQ ID NO: 93318 - protein, 342 aa, unidentified
MNYYAGIDVSLEASSICVVDASGKIIKEAKVLSEPEALIAWFKALPFTLARIGLEAGPLSQWLYAGLKDAGFAAELLETRHVRDAFKAMPVKTDRNDARGIAQLMRLGWFRPVHCKSAPAQETRALLTARKLVQAKLYDVQMSLRGILRGFGLKVGRTTPVGFAVRIRELTEHHPALAAIAKALLAVHEVLLRELNGFEKQVRKQARCDSRVRLVMTAPGVGAIVGLTYVAAIDDPERFSSSKTVGAHFGMTPKKYQSGETDLTGRISKSGDKGVRTVLYEAAHIILTMPVKGGALKSWAAKLAKRAGMQRAKVALARKLAVILHRMLADSAPFDAAKAAAA

SEQ ID NO: 93319 - protein, 338 aa, unidentified
MKEYKRISIDLAKNVFQVCAFSEKNKIVFNRKVLRNGLLNLLRNIAPTTVVMEACYSSNYWGRAIQDLGHKVLLIPAYQVKPFVVGNKNDANDAVAIGEASWRPKASFVSVKTIAQQDVQTLLRLREQTQKVRIMVSNQIHGFLAEYGVFCKKGHKALVETLAEALAPESQQLSAVAIDVMHMQMDQYKHLKRQEEEINNRLVALCRDNPCYSYLQSIPGIGPIVAATLIASIGDPSYFKNGRQLSAWIGLTPLQYASGEKSRMGKISKRGNRNLREMLIHGARSIVNWVAKKNDKLSLWIKELQKRMNPRKVIVAVANKLARISWAVMSKQVEYVAR

SEQ ID NO: 93320 - protein, 351 aa, unidentified
MVYQNYWVGLDAGHLETAVCLVDTDGQIIFEAICETKSGPIRDILRRHGVEAVQRVTIEAGNGTQMVRELMSFGFPVQVVDVRKSSKFLAIRRQKTDVHDARGLAELGRIARTMGSSVYLKPLEHQNIRSLMNVRRTLLKNRTRTDAVIQSIIRLHGGDIKLLTGQGALLAEVKNQTRLMKRKGLEIGIDLYPIVEIAEALRVQISVLDRQLRDLASSIPACANFMTVPGVGTIVALSFYSAIGDPYRFKHNRDVGAYLGLTPTLHQSGITSRRGRISRHGNKLTRMHLITAATVILCRIETESHLRAWGLRLARRIGLLKARVAVARKLAVIMLNMWKSGLAFRPYGSSS

SEQ ID NO: 93321 - protein, 352 aa, unidentified
MNASAKVVGLDIAKDVFFAVGLDGNGKPVFKRKLSRDQVLAQFAQMAPAMIGIEACAGSHYWARKLVEMGHDAKLIAAQHVRAYVTGNKNDMNDAAAIAEARSRGATKYVPINTVAQQDLQMLHRARSALMTERVAMINRIRAFAGEYGQVFPKRVERFRDGLKAWLNDPGNGLSGMALETFRELKAQLDDKDERILAYDRRLNQAAKSELAKKLMEVPGVGPLTATAVQATIADPHHYKSARDFAANLGLVPREHSSGGKQRLFGITRRGDSYLRTLLIHGARSALRTANGKPDKLLQWAAKLAERRSFNVAATALANKMARVIWALIAHGRAYVPAWSKDTPRPARKALV

SEQ ID NO: 93322 - protein, 309 aa, unidentified
MDAQYVGIDVSKDRLDVHVRPGGEAFVVARDDKGLAELVERLRAVAPRLIAVEATGGYENVVAAAIGGAGLSLAVVNPAQVRHYAQALGKRAKTDPIDAEMIARFAEATRPEPRALPDEATQVLAELVTRRRQIIGMMVAERQRATRLPKRLRRSCERVVRMLEKELAALDADIDTTVRGSPAWRATEDLLASVPGIGSITARALIAELPELGRLDRRSVASLVGVAPFTRQSGQWRGKSFIGGGRRSVRAALFVATMAAVRHNPAIRAFRQRLLAAGKPKMVAMIACMRKLLTILNAIARDQKPWQPA

SEQ ID NO: 93323 - protein, 434 aa, unidentified
MANSEREPLAAFVALDWGDRKHVWALQPAGSEAVEEGEIEATPEAVEAWATRLAQRFGGRAVAVALEQSRGALLFMLTKYGHLVLYPVHPGTLASYRKALCPSGAKDDPSDSSLLLDLLRRHRDRLRAWEPDTVEIRTLQFLVEDRRRLVQEKTRQSNRLTARLKLYFPQVLAWFEDVDSVLVGDLLQRWPTLEELQKARPATVERFLREHNCRSAERLQERLELIQRATPATRDAAVVISSVSLVRILVRLIAALREGIAELDRQIAEQFAQQSDAALFEALPGAGPALAPRLLAALGTRRERYRSAAEVQCYSGIAPVLERSGKKQWTHFRRACPKFLRQTFHEWAAQTIHCSAWARDYYQQQRDQGKGHHAAVRSLAFKWIRILYRCWKERTPYDEARYLQALRCHSSRPKLPTQFHWQTCAGFSRFVGAS

SEQ ID NO: 93324 - protein, 343 aa, unidentified
MDHYAGIDVSLELSSICVVDATGRIMREAKVASEPEALITWLRGLDLELARVGLEAGPLSQWLYAAMREAGLPVELLETRHVRDAFKAMAVKTDRKDARGIAQLMRLGWFRPVHCKSAPAQETRVLLSARKVLQTKRIDVEMSLRGLLRGFGLKVGPTTARNFAGRIRELVEYHPCLTAVAEALLAAREVLGVQLAGLEKRLRDAARTDDRAQLLMTTPGVGVIVALTFVSAVDDPGRFRSSKAVGAHFGLTPRKYQYGETDVTGRISKAGDAGVRTALYEAANTILTRAVKGSALKSWAARIAARTGMKKAKVALARKLAVVLHRMLADGKPFVADRAALAA

SEQ ID NO: 93325 - protein, 367 aa, unidentified
MMGWMAPLRHRGAKLVFSNNHQEKEPSMSEITTIGLDLAKHVFQVHGVDAHGATVLRKRLRRGQVLAFFSRIPRCLVGLEACATAHYWARELGALGHEVRLMPAQYVKAYIKRNKHDAADAEAICEAVGRPTMRFVPVKTTEQQGSQLLHRGREQLVRQRTMLVNALRAHLAEFGMVAAQGLRNVGELIAIVRADGDTRLPAVARQVLQVLANQIEQTESAVRALERELLAWHKTNPVSQRLASIPGIGPIIATAIATTVAEPTVFRSGREFAAWLGLVPRQNSTGGKTRLGGITKRGNRYLRRLLINGASANLLRSKATKADPWVIGLRRRRPPLVVAVALANKTARIAWAVMLRQREYQPRAMAA

SEQ ID NO: 93326 - protein, 419 aa, unidentified
MTKKSQNSTLIQIVHPICCGLDVHKDKISACLITVDDNGKEQHEIREFSSFTQDLQKMKTWLIGNNCPVVAMESTGVYWHPVYNTIEDTIEVVLVNARHIKNVPGRKTDICDSKWLAGLLRHGLVKGSFIPPEQVREWRELSRLRKIYTESLADYKRRVHKLFITANIKIDSVVSDLFGLTGLNLINLLCKNDEVTLEKVQECTKGSLKKKIPELYLSLHGYFKDHHRFQLIGMMEAIEMFQRQIEQINSRLEILTRDHENLLERIDEVPGIDKKSAQSVLGEVGVTLDEFKSMVAFVAWAGLCPGNNESAGKRKSGRNAVRNHPFKTILIQIAWAAIKTKGSYYKAKYYQLKARRGAKKAIVAIAHRIAKAIYNIIKNGDRYKDLGEEYLSKPNKQRMLKNLAKKANELGMKLVPCEG

SEQ ID NO: 93327 - protein, 338 aa, unidentified
MIHVGADLHQRFCYFTVLDARGRQLRAGAVVNEAEALRQWLRQLPGQVQVAVEACSFWPGFREAIESEVAHLRLVHPQRVKAIAAAKLKNDKVDSATLAHLLRCDLLPEAWMADAATRELRQQVRLRATLVRQRTRLKNQVHAILHQQGLRSAVSDVFGVRGRQWLTQLKLPTAARVAVDTYCGLIDHFSQQIATQDRALRQQVKRDQRARWLTTIPGIGQFSALLLVAEIGNIERFADKHALCSYAGLVPWVRESAGHKKARASITRCGSTWLRWIMVEAACTAVRTSPAARAWFQRLARRKHKHVARVALARKLLVAVWAMLKHGEVFDEAVFAAM

SEQ ID NO: 93328 - protein, 459 aa, unidentified
MRKPAQKQSQVVKRTEKSGLPIITADAAGIDVGAREHYVAVPVDRDPQPVRCFGAFTQELHRLAQWLLQCGIKTVALESTGVYWIPLYQILESYGLQVKLVNARHVKHVPGRKTDVQDCQWLQQLESFGLLSGSFRPEAKICVLRSYMRQREMLIRAAGRYIQQMQKALTQMNLKLQHVISDLSGQTGLRIVRAIVAGERDGLKLAALKDRRVKSDVSTIAKALEGDYRAEHLFALKQGLELYDYYQQKIAECDAEIRQEMQRLETRGSASAVLKRKPRSRHAVGFDSQAELYRVLGVDLTNIDGVNESTAQLIVSELGLDICQKWPTEAQFTSWLGLCPNNEISGGKLLKRGTRKVVNRVANALRMCAQSLLKSKSALGAYARRMRSRKDTPVAITATAHKLARLIYRTLKYGQAYVDAGCDLYEAKYKATMLKSLQRKAKLLGYQLVSYQTLDAVVP

SEQ ID NO: 93329 - protein, 346 aa, unidentified
MSHTKKGDNIMQVVRIGLDIAKQSFQVHGVDTHGKVAVRKQLSRSKVLPYFAQLPPCLVGLEACGGAHYWARELQKRGHEVRLMAAAMIQPYRTKQKNDQNDAEAICEAVSRPRTRFVPVKSEAQQAVLTVHRARELLVTERTALANQIRGLLLEYGVVIAQGIQRLRRELPELLTAETLPTLVREVGAELRERLLELDRRIAEYDHRMEQLATQNEAARRLMQVEGVGPVTATAIVATIGDGHAFQHGRQFAAWVGLVPKQHSTGGKTNLGRITKHGNVYLRTLLIHGARAVLQFSAKRTYPKSCWVEAVRQRRGNNIAAVALAAKHARILWALLAHGQEYQCAA

SEQ ID NO: 93330 - protein, 340 aa, unidentified
MNQYAGIDVSLEYASVCVIDATGKIVREGKVLSEPEALLAWFGALGVSLTRIGLEAGPLSQWLYAGLRQADLAVELLETRHVRNAFKIMPVKTDRKDAHGIAELMRLGWFRPVHCKSIEAQETRALLTARKLLQKMLHETEMSLRGLLRNFGLKVGKVSPLQFEARIRDLVEGHPSLQAIAASLLEARATLRREFAALQKRLHTIARNDTRARLLMSTPGVGTLVALTYASAIDDPGRFKSSKTVGAHFGLTPSRHQSGETDRSGRISRIGDASVRASLYEAAHIILTKPLKGVTALKSWAMRIAKRAGMKKAKVALARKLAVILHRMLANGTTFANKTA

SEQ ID NO: 93331 - protein, 343 aa, unidentified
MKITMIGLDIAKSVFQAHGTDANGKCLLKRKLGRSEVASFFGKLERCQVVLEACGTSHHWARVIRDAGHDVKLIPPDMVKPFVKRGKKNDAVDAAAICLAALHPDTRFVPIKNEEQQSLLSLHSTRTLLVKQQTMLVNALRALAAEFGLIVPLGNSRLPDLLAKIKTSPDLPDVMKQTVILLFEQYGKLSESIGCLERRIQAHARQDEDARRLLTIPGIGPMTASLIVASVTDIDTFESARHFAAWLGLVPRQHSSGGKVRLGRITKTGNREIRKLLVLGATSMSFRAQKWTSAAGAWLCKLLERRPTRLATVALANKLARIVWALLSRKEIYRPAGRNVAVI

SEQ ID NO: 93332 - protein, 408 aa, unidentified
MQVAHPVCCGIDVHKDTLTACLRRVDANGQVSKERREFATTYTSLLTLSDWLVEQHCPIVAMESTGVYWKPVYHVLVGTVEVYIGNAHELRSRPGKKTDKRDAAWLAELFAHGLIQPSFVPPPEICALRDVTRTRVALVQTRSQSKNRVHKLLEDTNLKLGSVVSDLFGVTGRRMLAALVAGERDPQVLASLALGALKHKRPQLELALTGQFTAHHGTLLGLLLELIELLDRQIATLDQPIGELMMPLHAQLAQLDSIPGVDIIAARDILAEIGTDMSRFGDAARLASWAGVCPGNHESAGKRYRGKTRKGNRYLRRVLGPCAWGARKTPTFLGRTFRRLEVRIGKKKAALAIAHKILVIVYHLLATGSCYEEARYDHYHPKQEARERQRAIKALERLGYTVTVERAA

SEQ ID NO: 93333 - protein, 365 aa, unidentified
MLLGSELIFPTPYMETAKMASVLNHRWCVGVDLHKDTLTACVFCGCCGEVSFQKLPCKCRKQVAAYFAALPRPHTVAIESVGFYRWLWELLEPIVEKLVLADATQARALAGRRLKTDREDSLNIAQLLAAGRLPTSYAPPLDVQILRDLTRHRNCFSRQHARILHRVKSIMNANNRPGPARLRSDGLIRYLKGQGEKLPARHVEMLWQCVDALALTERQMQQAERTIGELVRRDSFREVIEILLSFPGVAQLTAATVLAEIGDFGRFPDAKAIGRYAGLNPRVFASGGKQRIGHIAKTGSADLRWILQQAAWTAIRTDEYVRRVFLRIAKRSGRKAAAVAIARKLLTWMWSAVTKGEVYRSRTAA

SEQ ID NO: 93334 - protein, 317 aa, unidentified
MMASFLGIDVSSLSFDAAVRPQGIKMHLSNDPTGFEALLESLRKLSIKRVLLEATGGYERDVMRFLQDAGYKVIRVNPRRARSFADSLGIKAKTDAIDAEVLAHYAEVIPDQPSLRISPERALLRELLQQRDRLVQQRDDDLRRLKQVQSIAVANYLNANLKHFKAQIKLVEREIEQQTAMLNDERVTQLIKVKGIGMVTAGKLVALLPELGRVESREIASLVGVAPFNHDSGKFMGKRSISGGRFAVRRSLYMACLVAMKYNPALEARYQSLRERGKLPKVAIVACMRTFIVRLNAMLRTGTSWLDLVLPQPESTT

SEQ ID NO: 93335 - protein, 339 aa, unidentified
MTSMHFIGLDIHKKTISYCVKDVSGTVLSEGTVAATRAQLNEWMKSLPAPWTVAMEATMFTGWIYDHLLPHAAAVKVAHPLMLRAIATAKKKNDRIDASKICNCLRCDFLPECYMVSSEVRERRRTLRYRKLLVRQNVQLRNKISQMLMESGVVYNKQKLHKVGSFKELMATNPDISSELKPLLTICRETIVRIGKTEGALVRSLTCDPLLHVRVERLMTIPAVGLITALTWVLEVGDVARFHSVKQAVSYCGLCGAERSSAETIKRMPISKRLCCTNSLAAVELAALCDQTATGKISNSLFTKRISSSTRGLHVRQCPRRIIRMTSKPLIVAAAVLIV

SEQ ID NO: 93336 - protein, 342 aa, unidentified
MEHFAIDLGGRESQVCIRSAQGEVLVERRVVTARLSSLLERRPRSRVILETCAEAFSVADLALKLGHQVRVVPATLVRSLGVGARGLKTDVRDARVLSEVSTRIELPTVHIPSHTSRERKSLCGMRDALVSSRTQQINTVRGWLRGQVLKPRNGKTETFSDRVKETVHESALPSFVLRQLKSIDELTAHIRAADKELLAMAKADATCPRLMSLPGIGPVTALRFVAALDDIARFPSVSQMQSYLGLTPGENSSSDRVRRTGITKAGPAALRASLIQAAWAARRARGEHPMLRWALEVEKRRGKHIAIVALARKLAAILFALWRDGTFYSSTHLRPVEETMPA

SEQ ID NO: 93337 - protein, 339 aa, unidentified
MQKLNDLSRSLTPLKPDRTLIAVIEMNLSSWLVAGIVPGIERQPLKKLEVDESTLLKLLIRWREEAKKSGHSIERIAVAFEAGRDGFWLARWLRARDIEAHIIHASSVAVSREHRRAKTDRLDTELLKRAFLGWLRGERDHCRMVAIPTIKDEDAKRPNRERESLVGEQSRIVNRMKAALVRLGIRGFNPKLKKAVERLDGLRTPEGEPIPPNTLAELRRDMARRRLVNDQIRQIEDTRLERLEQAPCDGPHAMVRLLARVIGVGIETADMLVQEVLSRNMRDRRSIARYAGLTGSPDESGRKRREKGLARSGNARVRRGMIQLAWRFLMFQKDSTLAQ

SEQ ID NO: 93338 - protein, 352 aa, unidentified
MDYFAGLDVSLEMTSICIVDADGAVMKEAKVASEPDDLVAFFAQCGMAMKRIGLEAGAPSQWLYGGMAEAGLPVVCIETRHAKAALSAMPNKTDRNDARGIANIMRTGWFRAVHVKTQTAQELRFLLVARQTLVRKLMDIELAIRGMLRSFGLKMGVVSKRNFEARVLELAGDRTMLMRALNPMLTARRALALEYANLQKVAVDFARDDDVCRRLMTVPGVGPIVALTYRATIDVPSRFRRSKSVGAHLGLTPRTWQSGEVDRNGRVSKSGDVMARAALYEAAHILLTRVKRWSSLKAWGMRLVKNRGHKRAVTALARRMSVLMHRIWVEGTVFIWKTGDGQVAPPAAVGGA

SEQ ID NO: 93339 - protein, 342 aa, unidentified
MEEISRIFVDTSKQLFQLHGVDAVERVVVRRKLRREQFLAFFAGRAPLVVGLEACAASHHWARELMALGHEVRLIAPQHVKSYVKRNKNDLRDAEGGCEAMSRPTMRFVPVKTVEQQAGLMLLTRRERLVAERTALGNAIRGHAAEFGWTVAKGLDKIALLLTQLAAAADVPDLAKRLFARDGTRFSQLQEEIAELDREVAAWRRNDEVGRRLAQLPGIGELGSMMLPLKTPDPSGFKSGRDFAAWLGLTARDHSTAGKLRLGVITKAGDEPLRAVLVAGAMAVIQQAVRGKGPAWPWLAELLKRKPRKLAAVALANKLARIAWRLMVSGQAFDPQRIALAA

SEQ ID NO: 93340 - protein, 447 aa, unidentified
MHNRNQKLTMINHNAAGIDIGSREHYVCVPADRDKKNVQKFGAFTRDLKNLAVWLKGCGVTTIAMESTGVYWIPVFQILESSGFEVILVNAKQIKNVPGRKTDVKDCEWIQRVHSYGLLSGSFRPDDQTCKLRALVRQRDRLIKSGTIHINRMQKALNEMNIQLHHVISDITGVTGMSIIKAIIDGERDAQKLAEFRNNNIKSDTKTIVKALEGDYREELLFVLKQELESYEFYLNKIKECDRAIEECLKEFDKRGDAELKNKKPTKTKNAPDFDLKQSLYDTTGIELTIVPGLGELSIQTIISEVGLDMSKWKSEKHFTSWLGLSPNNKITGGKVFNTRTRKVNNKASNAFRMAALNLARGRSALAGFYRRIRGRAGAPKAITATARKLACMFYRLLKYGQDYVEQGIEAYEKKYNETMVKNLKKHAARLGFEGVCPIDCVNSHKL

SEQ ID NO: 93341 - protein, 394 aa, unidentified
MKLVGIDVGKNSHHFCVMDKETGEFNVTPTSFSNNKEGFDSLINSLKPYSKKSILLGMEDTGHYHVALLKFLLSNGYTVALINPKTTDLTRKMEGGITKNDKLDTITICDVLDTPERKKQYRITKVDRFDFYEQRQLTRHHHNLKEELNVYCNRLQKSIDLVFPEFNTLFSSKYGVVYMNLLKTFGSAEAIASTDIRTIRKCFEIKGRGGRISLTPEKLKECAKNSIGISSEVETIQIKHLVSQIMLIKEQIAEIDKKIEEFSIKNNSPILSIPGISHFSGTSILAELGDIGNYSKPSQIIKFAGVAPYHYESSQYNAQHTGITKKGSKYLRKTLYQIILPVINNNPVFKKYYRLKISQGKGHRCAQGHCIRKLLRIIYHLLETGQSFDPALLR

SEQ ID NO: 93342 - protein, 423 aa, unidentified
MLEEARDTGEIIERVAALDIGKAELVCCVRVPDGSRPGRRLQEVTPYSTMTRSLLVMADRLRGLGVTRVVMEATSSYWKAPFYLLEAAGFEVWLINAKDVKHLPGRPKTDKLDAVWLCKVAERQMIRPSFVPPPEIRRLRDLTRYRTSLVVARNAEKQRVEKLLEDAQIKMSVAVSDIFGVSGRKMLTALVGGQRDPKALAEMACGAMRRKIPMLEEAFTGHFTDHHAFLLTKMLARVDDIDADIAELDARIEAEIRPFADQVERLDAIPGIDRTAAQAIIAEIGVDMSRFPTPAHLASWAKFAPGVKESAGKQKGRGATGHGNRYLARTLGNAVAGAGRTQTFLGARYRRLARRRGNKRALVAVGRSMLVIIWHLLSDLNLEFVDLGVDYYELRNTDPARKKREHIRHLEALGYKVSLEPAA

SEQ ID NO: 93343 - protein, 388 aa, unidentified
MQTVADRPEAPTAIRTNLGAIFVSLELSRSTWLITSLSPGGGEKMSKQVVRGGDVAELLERFARLREKARARTGKVFPFVVIQEAGLDGFWIDRALQNEGIESHVVDPASIATSRRRRRAKTDGIDGEALVRALLAYKRGEPRVCAMVKAPTPEEEDRRRLCRERKVLIGERVQHVNRVKGLLFSQGISGYEPLRRDRRERLDTLQTGDGRLLPDHLKAQVCRELDRLELLLEQINAVEAERDVLLAAQQVAAPAPAAMLLDIKGIGPEFAAILWSEGLFRHFDNRRQVASYAGLAPTPWQSGSVDREQGVSKAGNPRLRTTLIQLAWLWLRHQPHSALALWFEERVRRNGGRLKKTTIVALARKLLVALWKYVTAGVVIEGAVMKRT

SEQ ID NO: 93344 - protein, 331 aa, unidentified
MNQVGIDVSNDVFDASRDDDKQISRHRFAQTPGGYRQFIQWALRGTNTAQVCLEATGIYHLQLSLELDRHPAIAVMVLNPCAARRFAQAHMVRAKTDAIDADGLLQYLQRMPFRPWRAPSESVLQLQSQAHRMAQLDKEISRERSRLHAARRAGPHTRVVQQDLQAHIKQLQRRLNNMQARAVEVIQHNDQLADDSRLIDSVPGFAERSATKLLAELAPLANNMVAAQWVAQAGLDPRPVESGTSVCSPRQISKQGNARIRAALFMPALVAIQHDANVAAYYEKLLAKGKTKMTAITAVMRKLLHALWGMLHHRQSWDGEKFYRLNQPTIA

SEQ ID NO: 93345 - protein, 387 aa, unidentified
MSPTIAARRPAAVDYQRTLILSIEVSNQSWVLAAQVPGLPHTKAKRTVDPEAEALMAAIAGYRSRAAAMGRSIERVIAVYEAGWSGFWLARWLTRHKVEVYVIQPSSVPVDRRMRRAKSDGIDAELLLRTLLAWLRGEPRVCSMVPVPDEADEDARRCIRERTELISERVGLTNRIGAVLATLGVTDYNPLLRNRRYRLAELRTGLGEPLPPNAHAKIARLLARLELVLAQIAELERERDAVVETETPDHASKMIQQLISLRGIGVQSATVLVREAFVRRFANGKALGSYAGLTSSPYSSGGIDREQGIGKGGNRRLRTVMVELAWLWTRYQPAAAQVCWFRERVGSTGRRVRKIMVVALARKLLIALWRFVIDGVVPEGAVLKPAA

SEQ ID NO: 93346 - protein, 399 aa, unidentified
MFVGWDWASTAHDVTVIDSAGELVHRMAIPHTEDGIARAVAKLADYGDPGELPVAIEATRGLVVDRLLGVGHPVIAVHPNAFHAVRPRWGAARAKNDPGDSFKLADYARTDIHRLPMLVPTLPETLELQALTRQRDCQLALRIAAVSQLAALLDQYWPGGKTIFAQLHSPIALDFLDRYPTPRAAASLTPARIEAFCHRRGYSGRRSGAELLDRLRSAPISASRLGEPVVAQMIRGQVAVVRALQAGIDALDIVIAEKVTAHPYAGLLAVLPRIGTLNLAQIIGEVGPILERATSFDQLAAETGLAPVTRSSGKTHTVAFRYATNRRARQALHTWLDNSRRSSDWAAQRYAAARARGQRHPHALRTIGRAWLRIIWACWRTKTAYDPARDERAKQPTAA

SEQ ID NO: 93347 - protein, 413 aa, unidentified
MDRVFTRVAGLDVHKDVVVACVRTPLPDGNHAVQTASFGATTEDLLGLRDWLVGERVEVVGMESTGVYWKPVFYLLEDDVECWLLNARHLRNVPGRKTDVADAMWIAELVEHGLVRPSFVPPKPIRELRNLTRYRRAQVQERTRETQRLDKILQDAGIKLSSVASDVLGVSGRAMLAALIEGTSDPVAMADLAKGRLRAKLPALTKALRGRFTAHHALLVGEILAKLEFLDEAIGRLSAEIDRVMLPFGQQRDLLDTIPGLNKRSAEELIAEIGVDMARFGSAARLASWAAVCPGHHESAGKSRSGKTRKGSKWLHSTLTESANAASRSKGTYLSAQYTRLRGRRGHSRATVAVAHSILVSAFHILDRGVPYDDLGADWFQRRHSPEHQARKLVHQLRNLGYDVEVQERPGAA

SEQ ID NO: 93348 - protein, 342 aa, unidentified
MSTIQTIGVDLAKNVFSIHGVDAYGKCVLRKTVKRNKLLDTFAKLPRCLIGMEACSGAHHWARELLKLGHNPKIIASKFVIPYRQNEKNDANDAEAICEAVSRPKTRFVSIKSEEQQAVLCLHRIRQGLIKTRTATINQLRGLLSEFGIVMPQGRYSAQNTIGSVLEDAENGLPILARELLQDLSNKIQHLNLEVLHYDRRVSALVREMASAKALMDIPGVGEHSASAIVATVNDAKQFGSSRQFAAWIGLVPRQYSTGGHVHLGRISKRGEKHIRTLLIHGARAVIARCKEKTDRNSIWLNQLVERRGYKRAAVALAAKNARIIWALLTTGKEYKINYVNG

SEQ ID NO: 93349 - protein, 317 aa, unidentified
MSKPNIVCAGIDTAKTKLDVAIRGVAKRWCFDNAAHGHAALSTLLREYHVERIGIEASGGYERAVVAELRRDGFVVIVFQPMQVRAYAQFRLQRAKNDHIDADLIAACTAATEKIHAPPDPRLMPLADRQTLIDQIIDDIAKLKNRRESCRDEYFRQFWKEEITRLKKRERAELKELVAAIRQHDDLARRLDLIASVDGVGLPTAVAILVRMPEIGRVSREEVAALAGLAPYDDESGGRTGDKHIAGGRERLRKNLYNAVLAAAYHWNAQLIAFKDRLLAAGKLHKVMRIACARKLLIYVNTVVARGTPWVSSPLPA

SEQ ID NO: 93350 - protein, 356 aa, unidentified
MVTINKQLIDKWERVMVINLLGIDIAKNIFQLHGVGSNGIAILKKRLSRGKLAEYIANLPPCTIVMESCGGANYWARVFQRSGHTVKLISPQFVKPFVKTNKNDANDAEAITEAASRPSMHFVPIKQVEQQDIQSLHRIRSRLVKNRTALINEIRGLNLEYGIAIPTGALKVRSELCLIISDKNNELTVSSREFMSDLYNELVEIEGKLKHLEKKVKQICRQNEACQRIMKIPGVGELTAMISAVPNPNVFKNGRHMSAWLGLVPRQHSSGDKQTLLGISKRGDIYLRTLLIHGARAALSKCKNLDNEYGRWLTQKKCSLSFNKAAVALANINARIIWSILNTGNEFDLNSKKVAI

SEQ ID NO: 93351 - protein, 347 aa, unidentified
MVTLGGDCHKRTHTLVAVDDNGQQLGAKMVSAVSAGHLEALDWARQWAERRWALENCRHLSRRLEADLLLAGEVVVQVSPKLMAGARRSAREWGKSDPIDALAVARAALRESDLPVAQLEGKSREVKLLLDHRDDLVGERTRVQNRLRWLLHELDPNLNVPERSLDRKVVLKRIAKVLAVHRGVAADIAVEQLERVRQLTERINELEGQIRAVVSHLAPNLLELDGCAALGAAKLIGETAGITRFKTPARFAMHNGSAPIPVWSGNSARHRLNRGGNRQLNVVLHRIALTQMRLGGRGYDYIQHRRACGDTKKEAMRALRRRISDEVYRRMWQDSMKATTDQACAAA

SEQ ID NO: 93352 - protein, 416 aa, unidentified
MTHSEIKSAEFAAYIGIDWADQKHDICLQEAGSNRIESLQIDHKPDSISNWVSELRQRFQGRSIAIALEQKRGALIYSLMHYEFIILYPVNPHALASYREAFTTSGAKDDPVDADLLREMVYLHHNKLHPWTPDDPLTRELSLLVEYRRRLVDEKTRLTNRLQALLKQYFPQALDWAGELDTLRALEFLTRWPQLEAIQVATPEQVRDFYRQHYRLGEKLLERLAEISAAQPLTRDKAVISASITMVKGLLEPLRGLIAAIEAFDQRIETCFEQHSDKDIFNSLPGAGAILAPRLLAAFGADRARYQSAKEIQCFSGIAPVTERSGKTKFVRRRLACPKFVRQSFHEFAKSSINWSAWARAYYDQQRRRGNKHHEAVRSLAYKWARIIYRCWQDHKPYDESVYIAKLELRGSPLSE

SEQ ID NO: 93353 - protein, 425 aa, unidentified
MNYKQNEKINQVKESTLVVGIDIGSTTQYARAFDWRGIELGKVFPFSNSREGFESFKAWMQHLQDKYKKLDAIVGIEPTGHYWFDLGAYLEDEGILLVMVNPYAVKQTKELDDNSQSKNDRKDPKVIAKLVTEGRYSAPYTPDGVYADLRIMVANRKRLIREMTQIKNRFARWFAIYFPEYTDVFGDYEAQSSMLLLKKVCTPEAIVELGAEKINQIWRDAKLRAVGMKRATTLCETAKRSIGLKKGSSAARYEMKLLLEDYEYKKAQLDAVMEEIEKLCRKIPESEQMLAIKGIGVITVAGFLAEVGDVRRFESPRQIQKLAGLSLRENSSGKHKGQTTISKRGRSKLRAVLFNAAIPLIAKNPEFKSLHEYYTTRANNPLKKKQSVIAISCKLIRVFYAILANGVTYDAQKLLSDIHRQPQVA

SEQ ID NO: 93354 - protein, 337 aa, unidentified
MYYIGLDIHKKTISFCVKDAAGCVHREGKIGSSRRELDAWVRTLPQPRMMAMEATIFTGWIYDYLLPHAEKLKVAHPLMLRAIAAAKKKNDKIDAAKIADCLRCDFLPECHIAPTEIRDRRRVLRYRNLVVKQMAQMKNRVSGLLMETGVSYNKQRLHKVGYFGEMMSTNANINDAVRPLLNLSRGMIRRSSKLEYDLVSSLERDPLLRERLRRLRTVPGVGSITALTWALEIGDYTRFSSNRQAISYCGLCADEKSSADKVMRMPLSKQRNKHIQRVLVEAAKLAPRLSPELAMIRARELERGNPNRATLAVARKMVCYMLAVERRQQDFVQTAAA

SEQ ID NO: 93355 - protein, 421 aa, unidentified
MNKEIVVGIDVAKNFSYFVMVDPSGKKLGKAFKVLHQLDSLINAAKKLKEVEHQYDCRVVLIMESTGHYSKIPFHFFSQENFIVHMVNPIQTHSIKNLSVRKVKNDKLDAERIAILYRLGEIKPSNTFNDHEDLKFLCRQYYNLSDEITKFKNNMLSILEQMLPGYEGIFSDITSLSSMYIIEHFQTADKILKADKDELIYNLAKISRRGQSWAKDKYAQLINVAIASQKLSCTPITAEIVLKTNIAIIRELLKQQSIIRTEITLLSEQKEDISLLCSIPALGPFSAAVILSEIRDPKAFSNPRKLIAFCGIDPSVNESGKFKGTKMKISKRGSRFLRRTLYMAALACIKKKPNGQYPNATLAQYYHEKIMTKPKKSALIAVMHKLLKYIFAVLRDCKPFVEYSSEQHIINYKNSILLKAS

SEQ ID NO: 93356 - protein, 430 aa, unidentified
MPFAALDLHKKVIQAATFDDLGNPQWRGRFPATRAAIAAFAQQHLTPHHQVALEATFNTWAIVAILQPLVAEVVVSNPLQTRAIAQAKVKSDKIDTDVLAHLLRCNYLPRVWIPDPQTRQLRSQSTERANLSSDRTRLKNRIHAVLHQRLIEAPHGDLFSPANLAWLRTLDLDPPGRATLDRHLRQLDLIEAELVSLGDELARHAWQHPQVKLLMTIPGVDFTVAESMYSTLGDIERFATPDQAAAYFGLVPSTYQSGETCYHGHITKHGRAHARWLLVQAAQHLTAHPGPLGVFFRRLARRKNRNVAVVATARKLVTIAWHMLKHNEPYRYAQPKASQAKFDRLRIRATGRRRQGGNPKGAPRPAAYGSGHPTRAIPALDQVYQDAGVPPLPGPAPGEIRMLRRRGLAVFAAAIRKPRRVPRKSSAPSE

SEQ ID NO: 93357 - protein, 354 aa, unidentified
MSTQHNVTAGIDLGDRYSHLCLLDVESGEVIEESRIATSPEAFERRFSGAEPMLVAIETGTHSPWVSRMLEDSGHEVLVANARKVRLIYGEGRKTDRIDAEKLARLARLDPRLLSPIKHRGESSQTHLALLHSRDALVGTRTKLVNHVRGTVKAFGVRLPRCTAQSFHHKVAEHLPRQLASALGAVLEIIASLSERIRDYDRKLEEIADELYPETKLLRQVHGVGALSALTFVLTLEDPSRFAKSRQVGPYLGLVPGTNQSGKSDPQRRISKQGNELTRKLLVNCAHYVLGPFGEDSDLRRHGEKIAQRGGKNAKRRAVVAVARKLSVLLHRLWVTAEVYEPLYNASRRGYQAA

SEQ ID NO: 93358 - protein, 439 aa, unidentified
MDIGKHSHVAGFVSKTLLQRHERFEGCPVLAFDQSREGFRALVDRIQTYVPLAQAYVMVEKTGHYHKALVQYLQEMDVSVYLIHVQERPKGMMKTDKRDALGLGNTLYNQLELGVQVADRTQLVRRAVPPTEAASLLRGLMRHRYELSQEAAQRKNKLIAICDEVFPAFTQICKDPCLPSALAIREQFPTPQALATASITALQAARGYNRKLSDEKLVELQRLASQSIGTKDIGRLRGLVIEQTQIIRELKVLQEHLDQLDVEITQAVEHSREGQILTSIPPIGPIQAATIIASIGHIENFESAARLKSYFGWAPAVAQSGSTLDSSKLTRAGTRTMKQMLFLIVGNAIQKKDCEWARLYERLVPVKCRWDERTRSYKGKLVVMGRLAGQITEMIYALRKQGRRDAAEGSKGTGTSSASVVRSRGASGSSARKIPVDEA

SEQ ID NO: 93359 - protein, 409 aa, unidentified
MRYYVGVDWADQTHAVWVVDASGPKITARTVPHTAAGFSEWGRELDEWRAQGIERWAAIERPDGRVVDFLLDHGGVVYPVNPKALDRARDRFRLSGAKSDAFDARVLADFLRTDYLHLQALQPSSDVAQELKLLTEDCQRHIRQQTRLVNQLTTTLKAYYPRALEVAELTTALAREFLQAYPTPDALTALTTRQWQRWAHGRRLSEARIGALWAVLQQPQLPVPAHVVRAKARLMLSLVEQVTPVVAAVAQYRKAIDDFFASMPAAQWARTLPIGKHGITAPTLWARLGDAPGRWESFRHLQAQAGTVPVTKRSGKQRSVHFRFACDKSLRHVVDQVAFLSLLSSAWARAYYDQQRARGHAHHQALRAVGAKWLKIIFVMWHRQVPYDEPYHLATMARQQLRQRQQQIA

SEQ ID NO: 93360 - protein, 311 aa, unidentified
MNDTMGIDISKDTLDAYWLSKRKHKQFANTKMGLRALIRWIRQTDALLIVFEATGVYHRLLETGLATHNIPFARVNPRQARRFCEGTGQLAKTDRVDAAMLAKMGALLELEADQPKSETLHDLKQLATARLALIKDRTAAKARLAATTHSLLSRQIKRRLKQVERDLSQVGEAIDAIVAADNELRVRADILKSIPGIAKITAYAILTEMPELGHLSGKQAAALAGLAPISRQSGKWRGKERIQGGRASVRRAVYLPAVVATRFNPDMKAKYEQLVSIGKCKKLAITAVMRKLIVMANALLRDQRKWGEYPA

SEQ ID NO: 93361 - protein, 355 aa, unidentified
MDNVKYIGMDVHKAAISIAVLNSSGKLVMESTIETKAITILDFLKGLRGSLHVTLEEGTWAAWLYDRIKPQVTELVVCNPRRNALLKEGSKSDRMDARKLAELLRSNMVRAVYHGEHGVRTLQELSRSYLTISTDLIRVMTRVKAIYRSWGIPCRGKQVYAERYRAQWLGQIQQAGVRRRAEFYYQQFDALRSLRQQVRRELLAEAQQHDAWKLLRGIPFIGPIRAALLIALMQTPHRFRTKRQLWTYSGLGIETHSSAEQRFVQGELRRAKKPPSIRGLNRNHNHELKNVFKSAATVAASQAGPFKEFYDALLAKGIRPEMARLTLARKMAAITLIVWKKGVRFDAQHLKPQTA

SEQ ID NO: 93362 - protein, 352 aa, unidentified
MSIVAHEYDQVVGVDTHARTDTFAVIDARTGGLLATDTFPTSPSGLKRALVWARRRAPGHALLVIEGAGSYGAPLARIAVVDGWPVVEAADMPRRRRQGKSDQIDAARIAHSVLGVETSHLRQPRADQGIRAGLRILDTARDAINKERTIAINQLTALVRISDLGVDARNALTKQQISTIAAWRTRTEPVETRLARAEATRLARRIHTCDQELDDNETEMKALVSASPGAFLLNIKGIGAICATVILVAWSHQGRIRSEAAFAALAGVNPIPASSGNTSRHRLNRGGDRRLNWALTVIANSRMAKDSETRAYIAKRLAAGSTKQDAKRILKRYIAREIWKLLNKYETAQPAI

SEQ ID NO: 93363 - protein, 347 aa, unidentified
MERPQNYVGIDVASATFTSAVGRIGEQWQIVVRPAQFANAYDSFAQYLHWLQEHEIQPDNSVICMEATGVYNEVLAHFLVANRYRVAIEPPLKVKRAFKPAGHKSDPVDSCQISEYAYRYWDELSIWAPRQELLEQIKTLLTTREQFVTQKVGHHNALLALKRKAVRTPLAERAHEKAISELKAHIQRLEDEIVRLIDQDPDFHNMVDLLTSIPGVGLLLAAHMLLTLHSTPQPLSPKRLAAFIGICPYEESSGSSLHAPATSRHYGPPGLRRLLFLAAMSVRNHNVQFKTYFLRKQQEGKPKKLILNNIANKLLKIMVAVVRSNTPFIPNYRSVNPGLLKKALTLS

SEQ ID NO: 93364 - protein, 422 aa, unidentified
MLAETQDSEEIIPRVAALDIGKAELVCCVRVPDEDRPGRRLQEVQTYSTMTRSLLGMADRLRCLGVTRVVMEATSDYWKCAFYLLEAAGFEAWLVNAKDVKHLPGRPKTDKLDAVWLCKVAERQMIRPSFVPPPEFRRLRDVTRYRADLVAVRTAEKQRAEKLLEDAQIKLSVVASDIFGVSGRQMMAAMIAGERDPKVLAQMARAAMRGKITALQEAFTGFFTGHHAFLLQRMLARVDAIDADIAALDARIEEMTAPFTAAVGRLDEIPGINVTIASVILAEIGIDMGRFPTAGHLVSWAKFAPGVKESAGKKKGKNATGHGNSYLARVLGNAAVAAGRSDTFLGERYRRIARRRGRKKAVVAIGWSLLVIIWHLLADPDARYTDLGSDFYATRISPERRKRGHIRQLEALGYKVTLEPAA

SEQ ID NO: 93365 - protein, 341 aa, unidentified
MKELMSVGIDISKDEFNVCVKEQTPNAEVKIKGSRKFTNTHNGFTEFKFWISKRSDGKKPVHYIMEATGSYYEDLAYFLHETGSNVFVVLANKVKHFAKSLNLKTKTDKVDASLIAAMGLQHDLQEWHPMAPEYKHLRDLCRERLSLKKERSRALCQLHAMNHSHEVADSVMAIKKSQIVFYDAAILQLETEITKIVDSNAELRLKVQKIEKIKGLRAISIVTVLCETNGFHSFNNIRQVVSYAGLDVVMKESGQYKGKTRISKKGNSRIRQCLFMPALSATNHNQNIKKLYKRIVERNPGIKRKGVVAGMRKLLILIFVLWKKDEDYNPAHTWLPSKDIG

SEQ ID NO: 93366 - protein, 310 aa, unidentified
MDAIFVGIDVSKEQLDVHVRPSDQAFAVARDGKGLEVLVDRLRALAPQLIAIEATGGFETIAAAALAGAALPVAVVNPAQVRHFAQAVGKRAKTDPLDAEMIARFAEAVKPQARPVPDAQASLLGELVARRRQIIEMMTAERQREQRAAVARLRKGILRHVRMLEKELADIDDEIGTLVRGSPAWREKEDLMVTFPGVGNTLARMLLAEMPELGSLSRREIASLAGVAPFTRQSGRWRGKSMIAGGRAPVRAALYMAALSAISWNPPLRLFYQRLLAAGKPKMLALIAVARKVLVILNAMLRDRKQWQPA

SEQ ID NO: 93367 - protein, 310 aa, unidentified
MSTENFVGIDVSKDKLDVAVYPTNQLFTVENDQSGLDQLAQSLEDLDPQLIVFESTGGYELLAVSTLYAAGLPVVVINARQIRDFAKSVGKLAKTDRLDAQVIAHFASAVRPQLRPLKDKLTQELAALVTRRRQIVEMIVAESNRLASATAQNRRDIKTHIRWLKKRLAQIDTNIKGQIRKSPIFVKKDKILQSTPGVGPTTSATLIGSVPELGTLDRKKIASLIGLAPLNRDSGRFKGRRMIWGGRAHVRAVLYMSTLTAIQFNPIIRQFYDRLTQAGKCHKVAITACMRKLLTILNAMVRDQRFWQNC

SEQ ID NO: 93368 - protein, 310 aa, unidentified
MDHLFVGLDVAKDRLDLHVRPGGETFSVSHDEPGLMALVDRLRSLTPTLIALEATGGYEATVAATLASAGLAVAVVNPRQIRDFARATGLLAKTDTLDARVIAHFAEAIRPVARPLPDAQLQHLGELVTRRRQLVEMLGAETNRRHMTRTRAVQRRLDAHITWLERALRELERDLHDTIRSSPIWRETENLLTSVPGVGPITALTLMAELPELGRLDRRQIAALVGLAPFNRDSGTLRGRRMIRGGRASVRRVLYMATVTATRHNPVIAGFYHRLRMTGHPGKVALTAAMRKLLTILNAILRDHRRWQPA

SEQ ID NO: 93369 - protein, 343 aa, unidentified
MQIRSVGIDLGKTTFHLVALGDNGKVLLKKKFTQKQLIAFTANMQTCLIGMEACSGSHFLGRALREQGHDVKLIPAQFVKPFVKSNKNDFIDAEAIAEAVDRENMRFVAIKTDDQLDLQALHRVRDRLMARRTSLINQIRAFLLERGLVFAKSPIRLREALPEVLENVNENLTPRMRNLVAMLWSEWKDLELQIVQMNDEVERIASSDAACRRLRQIPGIGPLVATAIVASIGNGAAFRKGREFAAWMGLLPKQHSTGGKARLYGISKRGNCYLRKILIHGARAVVLRSKRDRIAMGPWMTSLETRAPRNVLIVATAHKLARIAWAVLSSGQDYRAVPEALTV

SEQ ID NO: 93370 - protein, 403 aa, unidentified
MSQNSSVAAERRRDATTDGRVPMAIYCTYFGIDSHLRTTTICALTPEDGELRTRTFKGNDYGEMAEWMADFPQPSHGVYESGCTGFVPARMLTRGDTLVEPVASSKLPSSADSRSRKNDRRDAERLARLALAGEVSPVWVPPEQVEGLRELAQAMDDLACVRGAARQRVNAILCRHGISWDERTPTGRLKKRWGQHFWNWLRSIDLGDAGSQAAYLAALSAAESAEVAYDELRARAEGIARASDLGPVIDALMCVKGVGFSSALAFAAEVGDFSRFASGRKVTSYFGLAPSESSSAESRRLGRISRNGCALVRKLLIEGAWVLARGNPACRKRGGTSVPLAIREHARACSGRLLGRRRELVSRGLMPCKANTATAAEMARMLLYIGRDAQEAAALAAEVALVA

SEQ ID NO: 93371 - protein, 431 aa, unidentified
MSERDYNKQVAKRQRIRSTTLVVGVDVGKAYNAVGFMNKEGKVLGHCAKVYNSREGFEQFMKMVEDLKARDGLKDVLIGMEPTGHYWRKLAYFAKERGYEVRFIRTTALKHHRELDESASAKSDQRDALTITNITREGKYIDTVIEDGPLRQLRTLSKARERLLRYSVSAKNSLHAALDDYFPELHEVFWSMGSRSLWAILDRCPFPEDVLSIEVSTLRGLIVQSSRRKAGGAQKAKALYQAATKSIGLRPIGSADRYRVQMCLEEVKRTVLTLKRIDQQMKSMLKEIPAAPYLLSIPGIGALSAAVFLGELGDPGHFHNARQIVKYAGYDPQESDSGSWVSRKFISKKGRWLMRKYLFFMSMRVVVLTQYFKTYYERKLETKNRVGQLPRRKEILCAVAIKLIKVIFALLRDKRRFDDTRDTVTALSQAA

SEQ ID NO: 93372 - protein, 340 aa, unidentified
MTITTVGIDLAKNVFAVHCIDQNGKAVLVKPKVSRAALSELIAGLPPCVIGMEACSGAHYWARLFRQYGHDVRLMAPKFVSPYRMAGKTGKNDAADAIAICEAVQRPHMRFVPVKDESQQAMQCLHRTRQGFIQERTATYNRLRGLISEFGVIAPQSTDALRHVVSDQKETLPVQVRLCIDDLLTHVTNIEEKIAEYDRVLSRVAKTDHRSQQLMELKGVGPTTASALVASIGNAHDFKNGRQLAAWLGLTPSQYSSGGKSKLGRITKAGDAYLRTLLVQGARSVMVGAENRTDPFSRWVCSLIGRRGYWRAVVAIAAKNARLCWASLYYGDDFRLYSTT

SEQ ID NO: 93373 - protein, 314 aa, unidentified
MKMAMLSFCGIDVSKDRLDVVVLPEGWFFSVSNDTAGWAELVVRLRPLTVSAIGLEPSGGYERGIIRALLAAGLSVRRINPNKLRQFARARGVLAKNDRLDARLIAEYVAIMPTRVVQRDAAVERLAEIVTMRRQLCDEHVAAENQAAHLEDAMLRRLSKRRQTRLEADIRLLDKRLAEMVAANVALAQRYELLTSMPGVGPVLAFTLIALLPELGKMTRKQIAALVGLAPYDFDSGKLKGHRSIYGGRMPVRNVLYMAALSASRYSPALKAFHNRLADADKKSKVIIVAVMRKMITTLNAMLRDNAAWQPQSA

SEQ ID NO: 93374 - protein, 352 aa, unidentified
MPTISTIGLDLAKKVFQVHGVDAEGKVVVARKLRRNEVLAFFAKLPPCLVGMEACGSAHYWAREIAKLGHTVKLMPPKYVKAYVKRGKTDAGDAAAICEAVTRPSMSFVPVKGIEQQGQSMLHSARSQLIGQRTQLINAARGHLSELGIIAARGLLGFAELAEIVRNESDQRLPTTARAALMVLVRQIETISTEIAALDSVLRKENKASELGPRLETIPSVGPVIASALRARVTDPALFKNGRHFAAWIGIVPENDSTGGKVKQKGLSKKGDRYLRSLLVNGAMAVVRQAQKRPDKHPWVAKLLGRMSAKQAAIAIANKTARIAWALMVHGGVYEAGHRAPQYRAEACAAAG

SEQ ID NO: 93375 - protein, 413 aa, unidentified
METLLKCCAALDVHQASVSACVRVHGKRDQRREFNERFGTTTPDLLALCDWLRGHGVTHVAMEATGVYWKPVYYTLEGEFELLLVNAAHVNQVPGRKTDTKDAAWLCQLLECGLLRASFVPPRPIRELRDLTRYRKSLIRDRASEANRLHKVLEDSGVKLSSVASNVLGVSGRLMLEALCQGSNDPAVLAELARGRLRSKLPALRRALESHFRDHHAFLVSQILAHLDYLDEAIEACSDRIGEQIAPFAPALTLLESIPGVGRRNAEVIVAEIGADMSVFPSSRHLASWAKLSPGNNESAGKRKSGSTGKGSPWLRSALVESALAATRTRGYLRAKYWRIRQRRGHQRAVIAVAHAILEISYQMLTTGELYHELGDDFFERRDSEHATRRHLRALERLGYRVTLDAVPEPEAA

SEQ ID NO: 93376 - protein, 456 aa, unidentified
MARRLVGIDLGIASSHTVRVLDETGQQVCRRRCEPTVASLTRIEDAASVGAPPGTVLEVVLEPTGPAWLPVAVFFASRGHRVFRVSSAKSADLRRFLSKHAKSNGIDAETLARLPLFSPGGLLPLELADAEHAALDRRVRACDRLTRAASEHKTRIKDLVRQLLPMTPLIEDIGVADLAVLERWADPRTLLRIGPSKLKSLIVKASHNHHGAERAEQWRNAAAAAVELYGEHPAVAWQDLAAEVATEVRLLKAIQAELAVHSARREQAYRWADHGQLARSLPGIAKVGGPVIAAAIGRAERFPTGAQFKSYAGLAPRASETGNTDRKGQPMSKAGSSLLRTTFFRAADTARKQDPQLAKIYYTQMVERGANHVKALCVVAAHLAERAWAVMARGMPYVICDINGEAVTAQQAKTIIAEHWTVPPQVRARRRSTKTAKVGKAPQRVHTGPAKPNRRP

SEQ ID NO: 93377 - protein, 425 aa, unidentified
MTRPQLTPPAGVLVAIDVAKARNEVLIEVPGSGRRRRLSVLNTRAEHDRLIALLSNLGQPVTCGFEATGNYHRPIAWRLLQAGFAVRLISSVGLARTREALHNGWDKNDPKDAQVMLHMIRIGASQVYHDPLAAGINDVQELSKTHDAVSKAKTEVLHRILTHYLPLYFPEVDRFRHNSRSDWFFAFLDRFPTPASITALSKEVFIAAAWDVVGRKVAKAQLLGDIYETARSSIGLPVPPDAPAVSMFRLVIGEARGLIRQRDAIEATADALLTDSSDYKLLRRIPGIGPINALTILAEAGDLRRFGHHRQFLKFCGLDLATQQSGTFRGQTKLSKYGNARLRRTLWLAGQVAIRQRENGFRDKFERYIARDRHDADLRRKALTAITAKMARVVHAVIKTGDDYRPFVEGPVPGGRTPLSRAVRA

SEQ ID NO: 93378 - protein, 387 aa, unidentified
MTKNKGRVVGLDVHPDSFAGAVVEGSDPAQARVLSSSTRVELEQLEQWALRHTSTGDRLVLEASGNAFAVAARLRTIGRKVEILDSHRAGKVGKVYCANDRVDAVKIARIYLSALSPIVWQPDAKTLERREIFSAYQAVVKESTRAKQQLRSMLNEHCVRLEKGFRLCHPNAITRLLRLREWTPARTMLLQQLHGSLISARARRTLLRRHMAQEIVAEESLLRLTRLCGINLITLYGVVAAVGDVRRFAHSKKLVAYLGLNPSVSQSGNFEGGGALKRHGRGALRALLIQSGKKLLEVNNPLQKWGLAVAARRGRNKAAVAVARKLCVALWHVLMGHIVGALERLDMLETKLSKFATEMGPAALSALGYHNKADFVEKKLYVLRSYS

SEQ ID NO: 93379 - protein, 321 aa, unidentified
MTYIGIDVSKDTFVVAYSPEKNSKTKTFKNTTRGVHEFIRTISKDEHHCVMEATGNYSALLVYLLSEAGITTSLENPLKVKNFARAMLSTVKTDEIDARLIALYGEKMNPAPYKLRSDAILTLKQKRTVIRQLKKQLIATRNLKGSMEVLPFFDVKCKKSIEKTIAFLEKQVKDLEEDLSSLAHAEYNKQMDLLTSVKGIGVTLAAALIMATGGFTYFDNAKQLTRYLGLSPTYQQSGTSVNVKGHINRNGDSSLRSQLYVAAFSSLRCNTECRACYDRLRSNGKPGKVAVIAVANKLIRQAFAVVTQEKPYVNGYISSKK

SEQ ID NO: 93380 - protein, 367 aa, unidentified
MIIIGCDYHPGFQQIAFVNTETGEYEERRLQHREEAEKFCRNLAAQGMKVRVGMEASGHARWFERLLAELNLELWIGDAAEIETKRVRKPKTDREDARLLLRLLMEDRFPRIWVPSWENRDLRQLLWHRHRMVQARTRIMNQLQAVALNEGLRCKKRLWQEAGRQQLEAFRLAPWASRRRHDLLELLDRLNPTIAELSQAIEQEVEKCPEAQRLMTHPGVGPLTALACVLIIGRAERFQCGKQIASYLGLVPLEKSSGNRRRLGHITKQGNSMLRFLLVEAAQVTLRSIPEWRGKYFHLMMRRGRKIAKVAMARRLAVRLYWMWRKEWDYEQLKKFGSHVGQLGSGDGVHQNTEKLIGRPAPLHRGV

SEQ ID NO: 93381 - protein, 349 aa, unidentified
MSPKLNAGIAVIGIDIGKNSFHVVGLDQRGAIVLRQKWSRGQVSTRLATMPPCLIGMEACVGAHHLSRKLTSLGHDARLMPAKYVRPYSRGQKNDFRDAEAIAEAVQRPTMKFVATKTAEQLDLQALHRVRERLVSQRTGIINQIRAFLLERGVAVRQGLRFLRAELPRILATPCDGLSPRMVRVLEELACDWRRLDQRIEGLSSEIEVLARRDAGCERLMSVPGIGPIISSAMVAAIGTGDAFTKGRDFAAWLGLVPKQISTGDRTILGKISKRGNRYLRVLFVQAAWVVLIKPKSWDRHGLKPWLEAAKKRLHHNILAIALANKLARIAWSVLAHGRTFEASKIQVA

SEQ ID NO: 93382 - protein, 351 aa, unidentified
MSHKTAATVVHTIGIDTGKNTLHLIGLDDQGAIVLREKIARGRIAARLANVPRCLIGIEAGMATHYVARELGALGHDVKQVPPAYSKPFRQGHKNDFRDAHAIAEAVQRPSTRCVPVKTDDQLDLQALHRVRSRLVGQRTAVINQIRGFLLEHGIAVRQGLRFLRQQLPDILAKRSDVLSPRMIRIMEDLSGDWRRLDERIEHITKEIEVLAGTDVNCEQLMTVPGIGPIVASATVAAIGNGAAFARGRDFAAWLGLVPKQMSTGDRTILGRITKRGNRYLRMLFVQGARAILLRPKSWVKHSFGPWLTTAARRLHRNILTIALANKLARIALSVLIQGRSYETRIVPAAA

SEQ ID NO: 93383 - protein, 468 aa, unidentified
MQTAKRLWQNRKEKKEWSRRLQSEDPGLEVVHPHAAGIDVGNSAHYVAVRPDRDPEPVRRFECFTADLYRLSDWLKSCGVNTVALQSTGVYWIPLYDILEERGFEVYLVNARHTKNLPGRKSDVQESQWLLKLHTYGWLNNSFCPPSAIRTLRTYWRQRAEHVEGAATCILRMQKALTQMNLQLANVISDLSGVTGQKIVRAIVAGERDPRKLAELRDARIQASQEEIAKSLEGNWRPELVFVLKQEVDMYDTYQQRIAECDQRLQKHLATFANNATPGQPPSPQGESKKKKKKPTQNAPAFDLSHELERISGVDLTRIDGIEVIVAQTILSEVGLDMGRWKTEAHFSSWLGLCPDNRISGDRVLRRGTRRVINRAATALRMAATTLIRSRSYLEAQYRRLRSKLGAPKAITAMAHRLARLVYRMLKYGQQYVDKGMEYHDQRYRNQQIHLLQKKAAQLGLQLVPALA

SEQ ID NO: 93384 - protein, 458 aa, unidentified
MEQALSQRKKVSLKPGKSRAALTLTHPNAAGIDIGSAAHFVAVPPDRDDEPVREFPSFTVDLNAIADWLDACKVDIVAMESTGVYWIPLYELLESRGFTVLLVNARHVKNVSGRKSDVLDCQWLQQLMTYGLLRGAFRPAEQVCVLRSLWRQRGMLLKSQARHVQHMQKALTQMNVQLANVISDVVGETGQKILRAIVAGERDGQVLGSMKNYRIHASVDEIAKSLQGNWRAEHLFALKQALGSFDFVGTQLGECDREIEQQLQTLQVHEGEPGKRKKRGGSTRNAPKFDLRTQLFKMCGVDLTRIDGIDVTTALAVISETGADMSRFPTVAHFASWLGLCPGTKITGGKAISGRTKRCANRAAQALRLAAASLRASQSALGAYFRRMCSRMDKPKAVTAAAHKLARLIYTMLTKGEEYTDQGQDYFEERYRERVLRQLNQRAQKMGMQLVPAPQTAG

SEQ ID NO: 93385 - protein, 356 aa, unidentified
MMVIGVDPHKQSHTAVAADELGRKKAQKTVRARRDGHRELIAWARQACPGGRTWAVEDVRHVAGGLVRELLAAGEAVVFVPPKLMAGQRRGGRERGKSDPIDALAVARAALREEITLPAARLDGPVLEVRRLGDYRDGLVAERTRVINQLRWMVHDLDPALAPAPRSLGSARARAKLEAGLAALPACAGRAVALSQLARVAALSAEITGLEQDLAGLVTPLVPELLALPGVAVLTAAKILGEAGDIRRFTSPAAFARHNGTAPIPASSGTSNGASDGPHRLNRGGNRQLNAAIHRTALAQARCHPGARALLERRGRDKHETRKASFRALKRHLSDAVYRALKADAWRLDNPDQQAA

SEQ ID NO: 93386 - protein, 393 aa, unidentified
MYYVGIDVGKNNHVASMMDASRRTVFKAFTFANTREGAQSLLEKIQCHAAELAQIEIGMEATGHYWLALYSFLFEAGYTLHVINPIQTDGWRKGVEIRKRKTDDIDSLLIADLIRYGEFIETKLTDESLLSLRTLTRFRSYLVDSIADLKRKVICVLDQVFPEYESIFSQVFGATSKEVLLTYSTPAELEGVSVAQLTELLASLSRHRCGAAQAQRLSQAAAHSFGVTFCRDTFSFQLRILLEQMNFIEQQVADTEKQIKALMDKLASPITSITGIGPILGAVILGEIGDISRFDSASKLVAYAGIDASVSQSGQFESSSNRMSKRGSPHLRRALYQAATVAAFHDPELIAFYQKKRAEGKHHSVCIGAVARKLCYIIFTILKENRPYVKRQP

SEQ ID NO: 93387 - protein, 341 aa, unidentified
MKLYGGIDLHSNNSVINLIDEKSTVLLRRRIKNDLESIIMLLEPYRDDLAGLVVESTYNWYWLVDGLMEAGFKVHLANTAAIQQYSGLKHGDDDSDANWLATMLRLGILPTGYIYPKEERMIRDLLRKRLQLVQQQTQNLLSIQGLYDRHLNTRLNTYKIKKLSQKQLDIDFTDLNTRMAVNGNLAILQCLSLQIKTIEQSLKRQLKLKDEFINLTSIDGIGLILGLTIMLETGDISRFEKVGHYASYCRCVNGARYSNGKKKSKTNTKNGNKYLAWAFIEAANFAIRYSDTVKRYYQRKLAKTHVIIAKKAVAHKLARACFYVLRDQVEFDVNKAFGYSQ

SEQ ID NO: 93388 - protein, 369 aa, unidentified
MTVYIGVDLHKTQFTVHVRVGDRIESLSEIKQYPTTAAGYTKFLERIAGYKTADFAVKIGVESTGNTRFFKNQVEKAGAEVTVINTLKFKVINESTKKTDKHDASTISWFLSKDMLPESHICSKETENLRRLLKSRERLVRSIVGQKNEVHALLVSMGLDDELRSLQSKKGRQKVLDTLLSHSDLVLEAQSVKLIFQIIEQMIESVKIIEKHLSELTEDDAMVNRLMTIRGCGKITAWIIRAYTEDIGRFANAKKYAAFCGLVPWVQDSNESVRHGKITKRGPQELRTAYVQLVLGIRRCKDTWGWRIMQRLDYMKKNKGSGKSIVAAARKMAEIVWALLTEGQDFDSKKMMGTYKPMALAEQALAAMN

SEQ ID NO: 93389 - protein, 333 aa, unidentified
MQHPTIGIDTAKDVFHLVVADPMGRPVKRIKLRRNKLATFMANQPVSRVFLESCAGAHHWARKFAGQGHAVEQIAPQFVKRYRDGDKNDHNDAQACVEAGLRPTVRSVGTKSLEQQELQALQRARTLALRHRNALGNQLRAMLVEFGVVVARSIGALRRRIPEVLEDGENELTEGMRQLVAEEFERWKALAERAETLKAQIGWASRTDATMRRLQDELIGVGPLSAAGLWTAVADAGAFVRGRQFAAYLGLVPRQHTTGDRPRLLGIRKGGQNELRALLIHGARAAIRHLGDKDDSQSRWLRALIERRGKNRAAVALANKNARQAWAILRQAG

SEQ ID NO: 93390 - protein, 356 aa, unidentified
MEKRITIGLDMGDRNHSVCVLDADGGVKARATLANTAAALQKYFGALPSCRIALEAGTHSGWISRLLEGMGHEVLVGNPRKLRVIWDSDEKTDERDAEMLARIARFDPHLLHPIHHRGQAAHTDLAVIKARDMLVKTRSMLIAHARGAVKTMGQRISTCSAEVFHRRLLEEMPSELRPALEPVMKSIEDLTTRIRHYDQLLQKLCEQSYPETEGLRAVSGVGPVTALAFVLTLEEHARFAKSRDVGPFLGLVPKRDQSGQTDRQLHITKAGDAYVRRLLVGSAQYILGPFGPDCDLRRFGLKVAERGGKNAKRRAVVAVARKLAVLMHRLWTSGKAYDPCYSQTRKGSQTAESKTA

SEQ ID NO: 93391 - protein, 350 aa, unidentified
MERYASTCDGQQYVGIDLHRRRTVIVRTSAEGEVLEAVRIANNPDTLAEVISRAGEAPEVVLEATYGWYWAVDTLHAIDAKVHLAHPLGVKGFAYRRVKNDLRDAQDLADLLRMGRLPEAWIAPPATRELRELVRHRAKLVTLRSHCKAGVHAVLAKCGVTVPMTDLFGVGGTALLDRVDLPTPYAARITSLRRVMDSLDFEIEVFTKLARNRLAKDPGYTAVQTIPGIGPTFAAVLVAEIGDVHRFATASKLTCWAGLTPRHHESDTTVHRGRITKQGSTLVRWAMVESVQRLPAHTVLGAFREKIAAKRGHNIAVVAAARRQLEFVYYAMRDHHVRALTGPHPAHPAA

SEQ ID NO: 93392 - protein, 411 aa, unidentified
MGYKVAGIDVHKKVLMVVVCDVSAPESEPERRRFGTTTSELQRLSLWLRQQEVDEAVMESTAQYWKPVWYELEPYLRLQLAQAYSNRAPRGRKHDFKDAERLLRRLVSNELTLSFVPAGEQRAWRTMTRMKVQLTREQSRLHSQLECLLEEMRIKLSSVISDLLGVSGYRILRALSAGETDPSKLAALGDERLRCSLGQLIDALTGNPLPLHLHLLGLYLDRYQMIAGQIAKLNGMIAEAMKGHQEAVLRLAEVPGFGADSAQQVIAEVGAQASTFASPANLTSWVGTCPGQQESAEHNHSSRCAKGNRYMRRILNQAAHAAVKKNGSHFQAVFRRLLPRLGYKAAIWAIAHRLCRLVWKILHEGVQFVEQGSEPDPRRKHQRALKLLRILRRLGYEVDIKPVANLAAATG

SEQ ID NO: 93393 - protein, 361 aa, unidentified
MNGTMTCVGLDVHARSTQAAAIDLMTGELCRARFGIGVEPVVDWLRGLPGPVRAAYEAGPTGFGLARAARAAGVELEVVAPSKTPRAPGDRVKTDRKDAELLARLLLAGQLQAVRVPAEWLESIRHVARSREHVRRDLARARHRVSKLLLLHGRVYPGKTTWNQAHRRWLAAQAFEQEPTELAFVDMLAAIEGLLARREALDERLSRLAHDERLWPTVARLRAFRGVDTLTALALHLELAGDWGRFRSPRQLGSWLGLTPSLTQSGESESRGQITKSGSGTARRLLVEAAWHYARAPRTGVTLQNRQAGQPDHILQIAWRAQKRLHRTHQRLKGRGKHSNIATVAVARELAGFLWAAATAP

SEQ ID NO: 93394 - protein, 332 aa, unidentified
MNINPQVRAASGAQRPNAGIDVSKESLDACWSAQEQRLNNDAEGWSELVSRLLQAGVDLVVVEASGGYERGLVLALQAAGILVARINPRQGRDFAKSLGLLAKTDRLDARGLRDFADVLARHPERQKFITALVDEQREVLSGLMTRRRQLVDMRVAETNRLEHAGPRATKSIRSVMKLLDRQLAEIDRDIDEHLDCHFKAQRKLLDSVKGVGAVTVLTLLASLPELGTLGRKQIAKLVGLAPLADDSGKRRGVRRISGGRAPVRAALYMATLSAMRYNPAIAAFYKRLLAAGKPKKVAMVACMRKLLTILNAMLRDGVMWDAAKHLQTARAA

SEQ ID NO: 93395 - protein, 338 aa, unidentified
MHVTTIGFDIAKCAFQVHGTDRQGRAVLKRKLARSKVLVFFANLPPCLVGLEACGGAHFWARQLNRLGHEVRLIAPQYVKPYVKTNKHDAADAEAICEAVQRPGMRFVAIKDEHQQSMLLLHRIRDRLVAERTAGINAIRGHMTEFGMVTAKGQAGLAELRSIIADSDDARLTPPARELLTLAVAHLRSLEEKIVDLDRRVGRLAREDANCRRLSEIPGVGPIVATGVLATAGDLRLFDSGRSFAAWLGLTPRQHSTGGKQRLLGISKRGDGYLRRQIMHGARSIVSLARGREGKLWSWLNALLARRPFNTVVAALANKLARVMWALLVRDEPYRASA

SEQ ID NO: 93396 - protein, 399 aa, unidentified
MNEPASQGWAGVDVGKGHHWVCLIDEAGKTLWSSKVINDETAILEVIDEIRARAAEVTWAVDVTGTMSGLLLALLAAHDETVKYVPGRIVNRMSEAYRGEAKTDARDAYVIAESVRQRGDLTEVEVSATLVAELRLLVTHRTDLVADRIRMVNRLRDVLSGYFPALERAFDYAHSRGALTLLTGYQTPATIRKMGKSRLQAWLVKRNVRSAEQVAAEAISAATAQHTVVPGQDVAATIVADLATQLLALDERLKDLDVRVTATFRAHRQAEIIESMPGMGPILGAELIAAAGDINGYANAGRLASAAGLVPVPRDSGRRTGNMHRPVRYSRKLRRVFYLSANAAMMREGPNRDYYLKKRGEGDKHVQALICLARRRVDVLWALLRDNRVFTPDPPPRTA

SEQ ID NO: 93397 - protein, 406 aa, unidentified
MKQYIGIDIAKHEHVLGARFEDGRQHGKAFAFANDERGFASLLERLRELDAAPESSLVVMESTGHYWMALWEFLVAHGYEAAIVNPVLTDAFRKADTLRKTKTDQVDAFLIAEYARFKNLGPTRVSPEDAEGLKQLTRYRHHLVSERTALKNRLTSVADRIFPELAGLFSDKHSATARAILANYGSAATVARTDIRTLAKTVGTASRGRHGREKAVEVKEAARGSVGVTFAADALAFEAKHIAGLVSHLDAEIGELDAEIARLLDPEVGALLQSIPGIGPVCAATIAAEVGDPDRFDEPKKLMAYAGMDSTKFQSGRFDGDEQHMSKRGSAPLRNALMTAADGARRLDPYFGDYYDSLRARGKHHYVAVSGCARKLCGVILAVLRERRPYEPRPSIQSRQKQPDEG

SEQ ID NO: 93398 - protein, 314 aa, unidentified
MSQPNFVGIDVAKDTVEVACSDASTHSFTNNEAGHAKLVRWLTRKAVALVVLEATGGYEQACALALASAGLPVSVLNPRQARDFARAMGRLAKTDRIDASVLAEFAAVLHARGHQPRPLASTEQRELGALVARRRQLVTMLVSERQRLGVAHVRAKPSIEAVIALLLKQLADIDNDLQHALKERHADLSGLLQSVKGVGPTTASTLIAELPELGLLTRKQITSLVGLAPLNRDSGTFRGQRHIFGGRASVRRVLYVAALVATRFNPAIRTCYQRLVAAGKPKKVALVACMRKLLITLNAITRTKTPWRSDFGSA

SEQ ID NO: 93399 - protein, 335 aa, unidentified
MELTKQSVGIDVSKDSLEVKFKEKSTKGIKIKGSSKFDNTSNGFINLLEWCNKREKVENVVYVLEATGVYHEDVLYFLFDKGKMVSVELPQRIKYFAKSKGVKTKNDLIDSDVIADYGLERELKVWQPPGKEFKTLRDLSREHNTLTNSKSEAKNRLHAAKHSHDKNPRVIERLKSTIEFYTNQLDEIEKDIKTTVNADKELSGKIKKVATIKGVGLMTVVKIIAETGGFYLFQNINQLISYAGLDIVENQSGNHNGKTWISKKGNADLRTALYMPALSAIRFNEKMKSFNERIMETHSYKKQGIVAVMRKLLILIYILWKKNEEFSLNYKWGQA

SEQ ID NO: 93400 - protein, 321 aa, unidentified
MNKNTEIFGIDISKDVFDVYSHQKGHHSFKNDAQGFKSFLKVITKDALVVMEATGYYHYLFAQFLHKKKVQVSVVNPLSVKRFIQMKLAKIKTDKSDAKAICEYGHMNEVTLYTALTDVQAECLQLFRLLDNYLKKRTQTKNKKHGEEVLGIPSKYVYGSLKRDLKHLDKEIGGIEARLLELVKQDQQHQLTLLKSIPGMGMKTALFLIVITDGFKKFETASQLCSYVGITPTIRESGSSVRGRSRISKVGNKKLRNLLFLCAFSACKHNKACREIYERIVNKGKSKKLALIAVANKLLKQAFAIAKSGRPYDENFVSKLV

SEQ ID NO: 93401 - protein, 350 aa, unidentified
MEARETVGGKQTLYVGIDVHKRTWHVTGVLDTGDEVFRVSMRSDIGDLVRYLKRWRHMRIEAVYEAGYFGYGLHDELQAQDIACTVTPPSLIPGEYGNRVKTDKKDSRTLAILFAKGLLKRVYVLTPQERSHRQVVRSRRVFIADRKRKQCQIKAFLTQYGIPLPDDAGPWTRTFVAHMHEIRFGDRYLQKCFDQYLVAFDQADRQVREQTDLIRTLAQEEKYRERVALLCRIPGIGLLTAMELLVELQAIERFRTGEQLAAYVGLTPSQFSSGDHVRMGHITGIGKAHLRGAMIEAAWVYVRKDKRAAEVYANIRARAGAKRAIVAVARRMLLLSRSMLINRKAYLPAA

SEQ ID NO: 93402 - protein, 392 aa, unidentified
MVVSVGIDVSKDKHDCFILSSEGEVLADAFTIPNTMDGFNCLLQRIQDCTTPQDKMKVGLEATGHYSYNLLGFLLDNGLPTYVLNPLRTNLYRKSLSLRKTKTDRVDARTIAAMLLSDAGLKPYTDTAYHNEELKSLTRYRFDKVKERAKLKGSISRLVCILFPELEKLVSTLHMASVYALLSEFPGAKQIAAAHLTRLKALLEAASKGRYKRDMALEIRDAARNSIGSWMPAKSLELQHTIRLICELDNEIAEIEEQIQLIMDEIHSPITTIPGIGFRMAAMICAEVGDFTRFDSPDKLLAYAGMSPSTYQSGQLKNCYPHMEKRGSRYLRYALYNATKYVCHWDPTFADYLAKKRTEGKHYNVALSHAAKKLVRLIFAMEKSRQPYCSAA

SEQ ID NO: 93403 - protein, 410 aa, unidentified
MEVLYPHCAGLDVHKQTVVACARHMVNGIVTREVRTFRTTTKDLLALSEWLASQGCTHVAMEATGVYWKPVWHILSDGDFTLVLANAGHVKNVPGRKTDVNDATWLADLLAHGLIRGSFVPDVQTQELRGLLRTRKQFGRERSSHVQRLQKTLEDANIKLDGVISDIVGVSGRRMIEALIAGESDPEALAVLAHRRIKASPAALREALRGRVTNHHRFLLQLHVQHIDALDAALDAIDREVDIHVEPFREAVLLLTTIPGVSDLSAQVIRAEIGGDMSRFPTVGHLISWAGLCPRNDESAGKRRSNRMRKGAPWLKTTLIQCAWAAARKNGSYLQAQFHRLRTRRGAKKAIGAVAASILTAAYHMLKDGTLYHDLGPDHFDRRAKTVQTRRLLTRLQSLGYAVQITPLAA

SEQ ID NO: 93404 - protein, 319 aa, unidentified
MQSTTIIAFDHHAATTVAAVLLPGHRTPVLHSLSSDFPTIQRFVGRLQRQGAVTCCYEAGPCGFELQRALTARRMPCEVIAPALIPRRAGDRIKTDRRDAGQLAVLHRAGALTAVHIPSEQEEAARDLLRCREDIRADLLRARHRLSKFLLRHGRRFTATKKAWSKRHDAWLRVQTWPLPALDQTHRAYLRAVDEAGARLAAVEEDLRALLTLEPLRARVVRLRCFRGIDDLTALTIAAELGDPRRFGSAPRLMAYVGLVPSEHSSGTKRLQGGIGRLSKGESSRVLCDRRLRSRTRAPRARQLPTNHGHAVVNPRISE

SEQ ID NO: 93405 - protein, 346 aa, unidentified
MEHYAGIDVSLELSSVCVVDAKGNILKEAKVASEPGALVSFFQGLGFPVKRIGLEAGPLSQWLHAGLTQAGFETVLLETRHVKAALSAMTVKTDRKDARGLAQLLRMEWFRPVHAKSIGAQEMRALLVARKQLLGRLIDVELSIRGILRGFGLKVGQVTRKEFEVRIWELVMGQATLERIAGAMLSARATLKAEYEKLHKAVLAIVREDAVCRKLMTVPGVGPLVAVTFKSAVDDPRRITKSKAVGALFGLTPKKYQSGEKDITGGITRAGDEMVRTALYEAANVLLSRITRFSKLKRWGMDVAKRRGSKRAKVALARKIGVILHRMWVDGTTYRWSEAKLIAAQA

SEQ ID NO: 93406 - protein, 423 aa, unidentified
MNNSSGGQYSAYIGIDWADTKHDICLQAADSDRREFDCIPHQVEDIEQWALALRKRFGGPIAIALELSKGPIVYALQKYDFLVLFPINPSTLAKYREAFTPSRAKDDPTDAELALDLLLCHPDRFQPLQPQSAELRALATLVEQRRGLVNDRVRITNRLRNALKQYYPQVLEWFEDLDTPLFCTFINRWPTLVQVKRARSSTLERFFRQHGVRFPQVIARRIKAIKAATPLTRDVAVVMPYRLHVLVLAEQLRVTLESIRRYDDEIAQLAPQHPDYALFSALPGAGPSLAPRLLVAFGEQRGRFNSAAEVQMYSGVAPVTERSGHKHWVHWRWQCPTFLRQTFVEWAAQTVNKSFWAGAYYRQQKAKGCSHRVAVRALAFKWIRILYRCWQTRTPYDELVYLDALRRRGSPLLDQLGATAEHT

SEQ ID NO: 93407 - protein, 336 aa, unidentified
MEQPRYVGIDFHRRRSVIVHKDAAGTLLETVHLDNDPAAFARELEKAGEHPEVVLEAAYGWYWLADLIQELGANLHLAHPLGNAWGNRRVKNDERDAEDLVDLLRLGRLAEAYIAPPELRELREIVRYRAKLVALRSGLKSQVHSVLAKEGVAVPMTDLFGTAGQDLLDTAQLGRSYAIRTESLRDLITHYDTEVAMLEVEIDRWLAGDKGYLAIQRIPGVGPVLGAVFVAEIGDINRFSSPDKLCCWAGLTQRHRESDLHVQRGSITKQGSRILRWAAVEAASRRGSFQSERFERIALRRDSKKIARVALARHLLTLVYYGLRDGEIRCLAKKTG

SEQ ID NO: 93408 - protein, 351 aa, unidentified
MSQNPNTAIAIVGIDIGKNSFHIVGLDQCGAIVLRQKWSRGQVEARFANMPPCLIGMEACVGAHHLSRKLKALGHDARLMPAKYVRPYSKGQKNDFRDAEAIAEAVQRPTMKFVATKTADQLDLQALHRVRERLVSQRTGIINQIRAFLLERGVAVRQGLRFLRAELPRILATPPDVLSPRMVRIIEDLAGDWRRLDERVQNLSDEIETVARQDGGCERLMSVPGVGPIISSAMVAAIDTGDGFSKGRDFAAWLGLVPKQISTGDRTILGKISRRGNRYLRVLFVQAAWVVLIKPKSWERHGLKPWIDAAKKRLHRNVLAIALANKLARIAWSVLARGRSFEARPAVASAA

SEQ ID NO: 93409 - protein, 410 aa, unidentified
MEPVVKVSAGLDVHRKNVMATILSEQDDGSLQEKTCEFGTFLKNRKQLRRWLLKHNVELIVMESTGIYWKAIYSILERAGRNVYVVNARHAKNLPGRKTDVQDSKWLATLARFGLLSPSFIPPKDLRELRLMTRRRMKMQGILSGEKNRLHKILDDAGIRLGAVVSDINGVSAQAIIDGLIRGESPVKLMQYVRGRLKVKIPELLESLEGTISERHIFLLRQIREHIRYLEQDLMELDQYIIAAMSPYQQQWEILQTIPGIDQISAAGLLVEIGIDMKRFGSMGRLASWAGMCPGNNESAGKKKSSRTRKGNRTIRQILCEISNAARRTKTQFQGKYKGLVIRRGHKRAIMAIGHKILRIIYTLLLKKEPYQDSTVDYESLIVQRNAPRWMRALQKFGFLPKVQQACSAC

SEQ ID NO: 93410 - protein, 311 aa, unidentified
MSQPFYVGIDVSKKSLDVAFSENNEFFSITYASKEIETLVQRLRSAAPGKIVLEATGGIERDLVVALAEADLPVVVVNPRQVRDFARATGRLAKTDKIDAKVLAHFASAINPDLRPVKDVACQRLTDHVSRRRQIVGMIAQEKNRLARAPKGRIRADIQDHIDYLKKQLGPLDNDIQNIIKTLYPDTVELLMTVPGVGPATTAAIIAYLPELGKLDRRKVAALVGTAPFNRDSGSRSGARSIWGGRRSLRTMLYMATISATRCNYKIKEFYARLIAAGKKPKVAITACMRKLITILNAMVKQQKPWQPSAV

SEQ ID NO: 93411 - protein, 353 aa, unidentified
MELDKYIGIDAHSSTLVVNARDAFGKVILQSTVATNAEAIVQCIGGLRGRLHVTFEEGTHAQWLYDVLRRRVDDVLVCDARESRLLQDGSHADRIDAGKMSHLLRLGALKPVYHERQGTRALKELVGSYDGLVQDSIRAMNRIKAIYRSRAIPTPGQSVYRANQRESFMEHLKEAGALKRVRLLYEELDTLNLLRHQAERFMVTEARRHPAYGLLRSIPQLGPVRVARLICIVDTPYRFPNKAAFWNYCGFAVVLHSSGEHRFIGDQLVRSPKAVTTRGLNKDHNPAMKEIFKGAAMKARVRGPFAAYYQALVGRGLKSELATITLARKISAITLAIWKKGERFDPKKMTQTT

SEQ ID NO: 93412 - protein, 351 aa, unidentified
MTAYCGVDFHTRQQTIAYCDTRDGEIKLIQLRHDDRESLRRFYSQFEGPVVVGLEAGGYSDWFERFLEDAGIEAWFGNPTEIRRRARSRQKNDRRDAELLLDLLLKSEFPRVYRQKPEARAVLSTLRYRHKLIQLRTKATNSLHALAIREGLTLGSKLLTKAGLLELQALPLTAVQAAQRDEWLGLIAQLSTNIRRIEHELLHLADEDQLVQLVRSHPGIGLMTGLALVHTLSPISRFPNSRKVAAYVGLEPREFSSDTKQRWGGVSKAGSPLLRFLLVEAAHQAARYDPELKNTYLHLSVRRGKARARVAVARKLLVRAYILLRDQIDYATYRRAVAVGKLGNSREQSPA

SEQ ID NO: 93413 - protein, 379 aa, unidentified
MAIKQESVGRQETVYAAIELSKKTWVLGIALPDRDRPSIHRVAGGNLGELVARLRTAARENRRILVCYEAGYDGFWLARALAKIGIECRVLDPASIQVNRRARRVKTDRIDVLALLRALIAIDRGERHVCAVVRVPSVEEEDARRSHRERQRLVRERTGHINRIKGLLFAQGIRGVDPKLRRTRIDFAALKTAEGHPLPDRLRRELEREYARHDLIEAQLREVEKERDTADAQDPVVERKRQMLVGLQGVGGTSAAILAREVFARSFASRRQLGSYLGLTPSAYDSGSMTRCQGISKAGNSWARRILIEVAWLWQKHQPASPLSHWYIQKTTGQSSRIRRIMLIALARKLAISLWRYVETGLVPEGVVIAKAESRCAPA

SEQ ID NO: 93414 - protein, 520 aa, unidentified
MSTTRTRKRPPARRPAATVAKARGVLHPRVQQVGPEHFGIVCFDCAKARSKFLLADFYGRVLIPPTTVAHTRPDLDAAVAQIRRAFADHQLHDGVVAIERTGRYHRVVQGTFAAAGFETRIIHPFVTKHYRQPVDPGNKTDDTDLAAMQRATVTGLALLEPTRDEAWTTLQLVIRHRRDLVRKGAALNCQIRDHLQAALPGFADCFDKLWESQIPWHLLGHFPTAEQLRAAGVTAICHSLRQAGIRFQRRTVQTIFDWAEQAASGDVAASQHQRIALALYDDRQRKTQEIQALERDIAGRLVQTPYVLLLSFPGINVVSAADFAGEAGPMEHYANAHCITGRAGMRPSRSHSDEVDKANGPLVRNCNRSLRAAILGIADNLLLCNHHFQALATQWASQGKDPRDTHIKVGLRFCRIAFQMVAGRQVFRHPCIQGRHYILDKLSAFHREHDTAIADLLRDLQAAVGQLPQREHAAEARPLQEELERIEAGRRRGPQLLGDILPIVLARLGVGVVQSEGSGE

SEQ ID NO: 93415 - protein, 371 aa, unidentified
MSELPAETRPARLKVEASPRPPGARKPETELGAVSTTAVPHPDSRSGPSPHLQGRVMDEQRTVFVGIDVSKDRLDVHLRPSGEAFCVPREGKGMDDLVIRLQGLSVALVVLEATGGFEATVAAALAGVGLPLCVVNPRQIRDFARAMGRLAKTDTLDAEVIALFAERVRPQARPLREPERVHLAELVGRRRQIIEMIGMETNRGRQAIDKPLARRLARHIAYLQKELDAIDHDIGDAIKHSPAWREAEALLKSVPCIGDVTARTLLAELPELGTVSRHQVAALVGVAPINRDSGLMRGRRAIAGGRTSVRAVLYMAALTAIRRRSPFRAFYDQLTAHGRPKKVALVAVMRKLLTILNAILRDHTPWRPLNA

SEQ ID NO: 93416 - protein, 354 aa, unidentified
MSKHSIKLFIGMDLGDKKDQICVIDHDGSIVDSTSIPNTIMGLIQFFDRFDTPQEVLVAMETGTHSPWISHLLNARGFRVLVGNARKLRAIWDTDNKYDDRDAEMLARIARFDPELLYPISHRSRAAHMDLAVIKARDALVRCRSKLINFLRGISKTAGERLPSCSAEAFDRTVVDHIPEDLLPAAVPCLNMIHELNSQIRQFNRQIEKICAESYPEVMELRKITGVGPITALSYVLTLEDPHRISKSRNVGAYLGLTPKRDQSGQTDKPLSITKAGNSYLRCLLINSAHYILGPFGPDCHLRRYGMRIASRGGKISKRKAAVAVARKLAVLMHRLWISGETYNPWYQYCKKAA

SEQ ID NO: 93417 - protein, 423 aa, unidentified
MTKLTSTPAGAVLVAIDMSKNRQEVLIERPEGGRRRRMTVMATKEDYDGFVEQLAAIGRPIIVGFEATGNYHRTLAHRLLTAGFELRLISSVALARTREALHNGWDKNDPKDAQVILHMLRIGATQRYVDPLAAGINDLQELSKTHETISRMKTQTWHRILTHYLPLYFPEIARFAGNSRSDWFLALIERFPTPATITALDREAFSAAAWPLIGRKVSKARLINDIYETAFASTALPVPEDSAAVTMFRMVIAQGRSLIHQRDEIERLAHARLADDVDYQLLRNIPGIGPINALTILAEAGDLRRFNHHRQFLKFCGLDLATCQSGTFRGRTRLSKYGNARLRRTFWMAAQVAARQRDNSFRDKLGRYIAGHADDADRRRKAMTALTAKMARVAHAVIKTGTEYRPFLERSDARWKDPSLQVP

SEQ ID NO: 93418 - protein, 336 aa, unidentified
MRYIGVDLHTTQVTVCYLKTLDDYQFKQYRLDEIEAFLDSLQAEDELAVEACGNSRWLVGLVEQRVTRVVVVNPSGFEVVKRSVKKTDRRDALNLARFLAVDMLPAVRVKSELAEAVGRLNETRNKLVGLKTSLMNKIHALAVSRGWKLKKESLSSKKGLAKVMESDWRAIERVELEIIIEQIGNLKASIKRLDEVIAETGAQLSGFENLISVTGIGARSAGVLLSVIGCVEDFETESKLASYFGIVPRISNSNERVNHGRITKRGSKMGRTTLVQCALVAIRYSPYLKKYYEQVKARRGHGKAKIAAARKYLGIIYNTLKNNWVFEDFNNFVLAE

SEQ ID NO: 93419 - protein, 429 aa, unidentified
MNYTQNEKIEQVTDSTMVVGVDIGSQIHYARAFDNRGRELTKRIFSFHNDLEGFNSFNLWAETLKTENKKTAVLIGCEPTGHYWFAFAKYVNDHQKRLVMVNPFSVKKIKELDDNSPKKTDSKDPKIIAKLVVDGRYSIPYMPEGIYAEIRDLVYSRDRIMKQHNISANRIQRWLAIYFPEYLGLYTRFDAISGLAVLEKAPLPKDVIALGVNGIRKIWHDKKMRGRGVTEDRAKTLVEAAHNSVGLDGGIGTKSELYMLLEEHRLWTSQLEAVNKVLEEMILKVPHVEKLLAIKGVGSITIAGFIAEVGDIRRFDSPKQIQKYAGLELVENSSGKHKGRTRISKRGRRKLRKILYQVMVPLLARNKEFRGIYDYYVTRVKNPLKRRQAMVAVSCKLIRVFYAVLTKGVEYDRFKMMSDIHRKSDIIAA

SEQ ID NO: 93420 - protein, 303 aa, unidentified
MKEDSVIFIGLDTSKLKISVAIADGSRNGEVRFFGDISSEPTSVASMVSKLSKRGAKLHFCYEAGPTGYGLYRQIVELGHDCVVVAPSLVPKRAGDRVKTNRRDAMSLARLHRAGELTAVWVPDEGHEAIRDLVRAREAASDALKQARQQLQSFLLRHGRIYAGREPWTRAHRRWLTCQAFDHPAHQILLAEYCQAVADASVRLDRLTKLVVETAASWSMAPVVAAYQAMRGVAFMTAVTFVVEMGDVRRFDNPRQLMAYLGLVPSESSTGERVKRGGTPRRATQEREGYSLKALGHIAFRLA

SEQ ID NO: 93421 - protein, 405 aa, unidentified
MPKNMQYERAFGLDLSKKTFHGCMLDGPDLGNRHFFTGEMGPQGKAKLAGRLCKGDLVLMEAGTASFSLARFLLENTESEVVVLNPAKLYNIFNSTLKTDKADSEKIAKIARTMPRDEWPTVSIPTREEQAERSVVSLEVFLAQEITMLVNRLYALFNSMGHPFVKKSDLKTEESRLALANRLLCEDSLAIEQAVMLSDQIGNVTGQLEQCKQRLRDICLSHPKEALSLLSIPGIGLMTAASQIAFLGDGSRFDSPDSYVNYVGLSERRFDSGTKVSKGHISHMGNKCIRRNIIQAAWAASKTTKCNPLSERYEHLRLRGKSKPVAAVAVAKKMIQLSYILVTSNGIYEFTKQQGLAAFRRRLQYHKLAELLDYLPEPIRMEMEEIDRTKRKEAAATTSRQKKFA

SEQ ID NO: 93422 - protein, 390 aa, unidentified
MQTLVERGCGLDVHQATVVACLLIVLKNRQVQKQVRTFGTTTRELMGLREWLLSGGCTHVAMESTGVYWKPIYAILEGAFEIVVANAQHVKKVPGRKTDVKDAEWIADLLCHGLLRPSFVPPSPIRELRDLTRYRRKLVESRTAERNRLLKLLETANIKLASVATDVFGVSGLLMLHALVEGKATAQEMAELAKKQLRKKIPELQLALEGKVEEHHRFLLRVQLRRLQAVEEDLGILEHRIQEKLKPYAAQFTLLQEIPGIAETLAAAIIAELGVDMGVFENVSQLSSWAGVCPGNNESAGKRRSSRIPKGNVYLKTALVEAANSAAKAKGTYLRDKFYRLKARRGYKRAAVAVGHKILVAIYHMLSHQVCYNELGDVYLDHLNKHHVTL

SEQ ID NO: 93423 - protein, 316 aa, unidentified
MTSPQPFVGIDVSAKSLDIAVLPDGTHFSVPHTDQGIATLVHRLRELGPQIVVLEATGGYEIQAAYAMSEAGLPVVIMNPKVLRHFAKSTGKLAKTDKLDAQVLAHYAQAIQPPVRPLKAPEQAELATLMSRRRQLRDMIVMEQNRRRTSTPRVQGNIDQHLAYLRQLLKDLDRDIQDAIRRSPLWHEKAAILQSFKGVGPIVSASLIAHLAELGTSRHPQISALAGVAPMNRDSGQWRGKRTIQGGRPAVRQALYMAALTAARCNPVIREFYQRLRQAGKPAKVALTACMRKILVILNAMLKHRTYFNPQLPLAA

SEQ ID NO: 93424 - protein, 346 aa, unidentified
MEKILKQVTGIDVAQKELVVSLGRMYGDLTIEMYANKTFPNTNKGFQALIGWVTKLSDGDATVRFVMEATGVYHESLAYFLDGNGHEVSVVLPNKISNYSRTLEVKTVTDKTSAEAITRFGLERKLDRWKRPQGIFKKLRQLTRERNQLVEMRTVIKNQLHAEQAEAEPNKSSVERIKKQIIFFNKQLKEIKEEIAALINQDQQTKKAIDIICTAPGVGVLTAVTALAETNGFELIRNKRQLTSYAGLDIKEKQSGTSVKGKSRISKKGNKYLRKSMHLPALTAIRFDERFKAVFARLVSKHGIKMKAVVAVQRKLLEIIYILYRTNTAYDKNYLAKNQQTINSNK

SEQ ID NO: 93425 - protein, 369 aa, unidentified
MTKVTCSAVARVGVDLSKRVYQVHAVDRSGRKQLAKAFAPDRFYAWCAELPAGCVVAMETCGGAHHVARRLRLLGLDARLIAGHFVTPYRMAGRSGKNDANDAAAICEAAGRPHMRFVPIKTAEQQGQLALHRLREGYKEERTALINRIRGLLTEFGLVFPQSPDALRGVLAEVIEDAANELTGIARLSLQRAHMHWLDIELQMLWCDERIADHVRRDHRAKQVAQLSGIGPITASALVASVGEFGQFSNARQFGAWLGLVPSQNSTGGKASLGRITKRGDDYLRTLLIQGAKSAVMTAHKRSDRISLWLVQLKERVGWQKAVVALANKNARILWAVLTRGTAFDPDHVPDKPAARCAWPQSQPQPAMH

SEQ ID NO: 93426 - protein, 393 aa, unidentified
MRRISVGIDIAKDIHWACATDADGAVLLDRRLDNTPEAIAALAGDLAALGGEIRIGLDVLGGIAGLLEAMLADRGFQLVHVPGLAVNRARQGMVGGENKSDPRDARAIAEQVRTRADLRPIEPATELDLEIRLLVGRRRDLVAGQTQRISRLRDLLAGIFPGLERGLDLTTKGPLHLLTKFVTPGELRAAGRKRLVRHLQAAGSLPNIESLADRALAAAAEQTIAVPAERMTARLIRELASEALATRTRLLELDRELEALLQRHPDAALIRSLPDMGAVLTTEFIAEAGNLSRFRSADALASAAGMAPVLRQSGRARFLRRPAGGNKSLKRIFYQSAFCSLGHDDSRAFYSRKRREGKQHHQAVIALARRRVDVLWAILHSRKPFQTAFKTAA

SEQ ID NO: 93427 - protein, 349 aa, unidentified
MKEQTKSSEITIGLDLGDRRHRFCVLDGVGGIIEEGSVRNERVALRELSGRFRGALMVLEAGCHSPWISRYLEELGCEVLVANPRKLRAIYQHERKSDRRDAQMLARIGRLDPALLYPVRHGTEEAQADLLRLKLRDSLVRARVALINSVRFTLKSLGYKVANPSSERFHKVVGEGLPEALCQMIAPSVQALAVLTARIKVLEREINTLARTKYPQSARLEEIPGVGPITALYFVLKIEDPNRFTQVRDVGAYAGLCPRRNQSGESDPQLRISKRGDAYLRRLLVSASQYILGPFGPESALRSYGLRLAAEGTARAKKRATVAVARKLAVLLLSLWKSQRPYQPFPQTA

SEQ ID NO: 93428 - protein, 428 aa, unidentified
MSNQDIIRHELFCQIVKEIHKSNEYLIVGIDVAKDKHHAFMGTTTGKLLLRKLIFGNNINGFSRLMKTVEAIKVQNGLSKIVYGLEPTGNYHKPLARHLIRYDCNVVLVAGQAVKYNRQILDGRWDKNDTKDAANVADLVSRGKCLYYDCPSQSIIDIRVLLSLRKRLKKEEHSLRMRIRNNLLAKYFPELDGFYSACESETLSIVGWCLTPDTIASMEFSKFFQLVTKTRRGTAQTLRLRKIHGLAMESIGCPVGSASKYEAELLVEKLKQVRNQIKETNDLIEDFCLKFPEYNYLLTIPGFGPYISARVLASIGDPFRFKNQKQLIKMSGYDLCANRSGKTSDTAIPVISKKGNSELRYALYQAAKVATAKVDLFRAYFTRLLTGRERERGIKTKMCVKLAAKMLVIAWTLMKKREVFNPDYITIE

SEQ ID NO: 93429 - protein, 415 aa, unidentified
MEATVERCAGLDIHQASVVACALVGPPGCKPRKEVRSFGTSTRELEGLRAWLEGLGVTQVGMASTGVYWKPVHAALEGGFELIVGNAHHIKAVPGRKTDVKDAEWLADLVRHGLIRPSFVPPPPIRELRDLVRLRRSLTEARSTERNRTLKLLETANIKLASVASEVFGVSGMAMLRALVEGEAAPAEMAELARGKLRRQRERLTLALEGRLTEHHRYVLAFHLRRLAAIEEDLRALDARIEAKAEPFQAQRRLLQEIPGVDALVAVTIIAEVGVDMSVFGNAKRLAAWAGVCPGNHQSAGKRRSGATRRGNVHLKTALVTAAVSGSRRRGSYYKDKYHRLKARRGRLRAAVAIAHKILVAAYRMLAEGVPFRELGEAFLDRQARQRNVRHLLNRLNHLGYDVLLQPRAVEAAGP

SEQ ID NO: 93430 - protein, 378 aa, unidentified
MATARSVLRHELTAKPGDLYMSLDLGDKRWHISIGDGRCGLSRYSVGAGQTDELADCIAKAKNRLHSSRKAIVHSCYEAGRDGWWLHRWLTEVGVDNIVVDPASIEVNRRARRAKTDRLDADKLVAMLVRHHSGERVWSVLREPSPQDEDARRAHRELQRLTHERVAHTNRIGSLLVLHNLRPSVVIGGRYWSAWWERHRAQVPSSLAAELEREVMRLQLVKQQVRDIEAARTQELLEGQQPQVAQLTRLRAIGTKGAWVLVKEVFGWRTFVNRRELAGSLGLVPTPYASGDSQLEQGISKAGNRRVRGLLVELAWGWLRLQPGSALTQWFNRRFASGGKRLRRIGIVALARRLAIALWRYLKNGEIPAGAQLKPTGA

SEQ ID NO: 93431 - protein, 465 aa, unidentified
MKIKAIRTKKRKKKVSVDDGWEAINPRAAGIDIGSREHMVCVPAETAAPNVRGFGTFTADLEALADWLEQCGVTSVAMEATGVYWIPVFQILEKRGLAVLLVNARQTKNVAGRKTDVQDCQWIQRLHTYGLLQGSFRPADAYCVLRTYLRYRDELVSARSAQALHMQKALQQMNVQLTQVLSDVTGVSGMAIIGAILAGERDPAKLAALVDRRVRATAAQIQKALAGDYRDEHLFVLRQAFSLHGTYEEKINACDEQIVREIAKLSDRVDLKSKPLPPRKEGRQTSRDQMQGQDMRAVLYQKLGSDLTAIEGIGVATALTFLTEVGPKVDRFKTEKHFCSWLGLCPDNRISGGKVLSSRTRRVINRLSDALRMAAVTLERSQSALGGFYRRMKGRLGAAEAITATAHKLARIIYRLIKHGEPYVRQGMEAYEKKFRDRKLYALKKTALAMGFNLVPNQQVASPVS

SEQ ID NO: 93432 - protein, 485 aa, unidentified
MTTVYLGIDVSKGYADFVAMNEAGSELGGWGRFDDTRAGHDQVQARMAAVWARAPETQVVVGVESTGGYERNWLGLCHRLRRAGWALTAYRLNPLVVKRYHERQLHRTVTDRVSAAGIAAYLRTGRRRQDQLWVAGELEGALTLYRTVRRLVRLQADLQNQLQALLSRCHPELVACLRGGLRQWVLALLRQYPTAAALAQADPAVVARIPYVTPAAAARLVAAAAASVADQTDPATGRAVMVLVDEIAHLRLQVRRLQTELAEQLRADPGVQIIDSIPGFGIWSAICLRLELGDIHRFPRPAELVAFAGLDPQHHQSGDTAINRGISHRGQAGVRAILYPVVRAAIRCNPAVGALYTRLRARGKTDAQAVVAGMRKLLHLVFACWVQGVAFDPSRWEQVAGKAQEMAQRAAMAPTSAAAVPLATSLAAPVSKREAKRRKAAHSPQGPCGVVPQKRPEFERPPSAPIIPIRTPSCQGDHAPDFSSC

SEQ ID NO: 93433 - protein, 369 aa, unidentified
MTKDSKSRNWQQEEGLVIGMDLGDKESQLCVLGADHEIRQEVRVRMTPPALEAWFAAVQPAMVVMEAGGHSPWASGLLEQMGHQVVVADPRRLRLISQSDKKNDVEDARMLARVAAAMPELLKVVKHRSAEAQRDLTVIRARARVVEARTKLWCSLRGLAKSLGRRLPRRVREETIRELTILEPLWKAVQDVSQRIKEYDQQIAALEKKYPEAVRLQQIAGVGPLISLTFVLTLDDPMRFHKSRQIGSYLGLRPKQRDSGESQPQLRITKAGDGYLRSLLIQGAQYILGRFGPDTDLKRWGLKLAAARKWNAPFPVSPSGGKPGRAGSPHAGEARCPPAKSADRHRAPAPPTRGLPPPCGSPASAARRA

SEQ ID NO: 93434 - protein, 359 aa, unidentified
MSELTFIGLDVHARSVTAGVLEGSTGEVRSCATPVRTAELVEWLQRQGETLYVAYEAGPTGFGLARACAAAGVPCLVAAPSKIARAPGERVKTDRRDALKLAKLLRLGELTAVRVPSSAEEGARDLVRAREDARGDLMRARHRLSKLLLRRGLVWEGSAWTQAHERWLAGQRFEERGLQLAYEEAVAAVESVRARREALDRAICEEAATEPWAAVVGRLACLRGVSTLTAFALATEIGEWQRFDGRSIGAYLGLVPSESSSGERRRQGAITKTGNGHARRLLVEAAWHQRRPALRPSHELARRREGQPALVRERAEAAGRRLQRRWRRFDARGKRSTVAAVAVARELAGWCWSLAVMDS

SEQ ID NO: 93435 - protein, 373 aa, unidentified
MKRILRIGMDVHITNYTLCAIEPRFDGDDIIYANVKVTPDPDNIMQFIENLQKKIKEECDILCGYEAGCLGFSLYHELVKKGIRCVILAPTTMMTQQGKRVKTDKRDALMIAQCLAYGGYHAVHIPTDKDDDVKVYLRMRDDHKLDLKKTKQRICAFCLSQGFHYDGGKWTQAHLKWLKSLELSKLDRETLNEYLITYEYQSNRIEMFDKRIEELASETEYVEKVKRLVCFLGVKTHTALSCLVETGDFQRFAKGNIYSAYLGLVPGEDSSSDHINRLSITKAGNSHVRKLLIEASKGICKGAVGHKSKDLKARQSGNPPEVIAYADKANERLRRKYYKMIRHGKSKNVAVTAVARELACFIWGMMTDNISIA

SEQ ID NO: 93436 - protein, 317 aa, unidentified
MSAPAASFVGIDVSKQQLDIAVRPRRETWTVAHNEAGLSALVTRLRAHAPTLIVLEATGGLEVALAGALAAAALPVAVVNPRQVRDFARSTGTLAKTDRLDAQMLAQFAEAVRPEPRPLPDAQAQELTALLQRRRQLVEMLTAEKNRLTMASQRIRPQLQAHIEWLHKQIAQFDEDLRQLLRSSPLWREKDDLLRSTPGVGPVLATTLVAALPELGTLSRRQIAALVGVAPLNRDSGTLRGRRTVWGGRAQLRAVLYMSTVVAVRHNPVLTAFYQRLRAAGKAPKLALTACMRKLLTILNAMLKHHTRWAPVMAQHA

SEQ ID NO: 93437 - protein, 344 aa, unidentified
MECYVGLDVSLKQTSICVVNEKGLVVREGVVDSVPEAIAGFVRSKAPGAVRVGLETGPTATWLWTELARLDLPVICIDARHAKAVLKMQVNKNDRNDAAGIARIMQTGWFKEVRVKDLDSHAVKALLASRALLVKIKRDLENQVRGLLKNLGLVIGHGTFNVFAVRAKELIADRPELTSAVSPLLTARTAIEQQIGELDRQVLKLSRQDAQTRRFMTVPGIGPITALCFKATIDDPARFRRSRSVGAYIGLTTRRHASGELDWSGRISKCGDAMLRMYLFEAAGVLLTRVPKWSALKAWGTRLTKRNGLRKAKVAVARKLAVILHRMWVDGTEFNWSNNKEVAA

SEQ ID NO: 93438 - protein, 412 aa, unidentified
MKVAYPRCAGIDIHKESMTVCLIVDRQDGSVPEYHKRKLATHTEGIRELCAWLEQHQVTDVGMESTGVYWKPVWNALERKWGLHLCNPQHVRAIPGSKTDMRDGTRLAELLAYGKLPESFIPPLWQRELRDLTRLRARMTQEVTRAGNRILKVLEDAQIKLDCVVSDALGVTGRLILDGLVNGETDPAKLAELAIGRLKKKKAQIRQALDGHFTDHHRFQVRLLLQIVREYEDKIMQLDIRIERYLEPYPEIVRRLDAVPGIDRLGAAIILAEIGADVRAWEDSRKLAAWSCLCPGNCESGGKRLSGRTRKGNRWLRRAFCQMAWAATRKKGSYCKTQYRRLAGRRGKQRALLAVAHTLVTIVYHLLQDANLEYRELGEDYFHRRDAAQTAAHLVKRLAKLGYDVTLQPKAA

SEQ ID NO: 93439 - protein, 452 aa, unidentified
MQKKKKQKQPEFKKMNPHAAGVDIGSESHYVAVPPGSDPEGKDVRCFGTFTSDLYALANWLKACGVDSVAMESTGVYWIPLFEILESKGFDVKLINPRSIKHVPGRKTDVLDCQWIQQLHSYGLLKESFRPDDQICVLRSYLRQRSTLVSDSAKYIQRIQKALEQMNIKLNSVIRDITGTTGMAIIRAILNGQRDPEELAALRNPRCKNDMATIAKSLHGNWRKEHLFSLEQAVESLDFFQKQIGICDQKIEQHLSSFDDRSNGGSLEKKRQTTGRNKLSFDARKHLFEITGVDLTRVDGLDSLSVLQIIGEIGLDMSHWPTEKHFASWLGLSPGSKKTGGKLLSSKTKKCANRAAHYLRLAAYSLYRSKSAIGAFFRRKRAHLGPAKAITATAHKLARIIYNILKHGTEYKDLGQDHYETRYRQRVLNNLKKRAKQFGYELVNVKEQQAVT

SEQ ID NO: 93440 - protein, 323 aa, unidentified
MQGKNAPEAGAGEPVYVGADVCKAWLDVYVHPTGQSFRVPNSKKGIEALRAQLAGAKVALVIMEATGKLHRLAHRTLSQAGYPVAVVNPLRSRKFAEALGQLAKTDKIDARLLALYGACLNPKATPVPAQILAELQELVLARQAAKDDETALKNRRIAAESPLLKRLLQRRLDACARMIEALDAAILALLDRDPVLKHRYDILISIKGVGPVVAATLAACMSELGLLSAQEIAALAGVAPFNCESGESRGLRRIKGGRAHVRTALYMAAVSAIRCNPDLKAFYDRLRAKGKEAKLALIAVMRKLVILAGTLIREDRYWTEKHA

SEQ ID NO: 93441 - protein, 358 aa, unidentified
MQTQRNKVDFKGQNIYVGFDVHLKSWKVTVMTEKLTHKTFSQPPKPELLHQYLKNNFPGGTYHSAYEAGFCGYWIHNKLKSLGVNSIVVNPADIPTTDKEKVQKEDCRDSRKIARTLRSGELTPIYVPSLKTLEDRGLLRMRSTLVKDLARNKNRIKSFLYFHGIDIPESFANQTRWSKPFVKWMEELSMSHQSGKQAIQAIIVASKNLRQSVLEITREIKALSKTESYSDNITLLRSIPGIGLLTAMMILTELETILRFESFDKLCGFIGLVPSTNSSGENDIVGDITPRGHSLLRGAIVESAWVAARFDPALTKSYHDYCKRMEPNKAIIRIAKKLLSRIRYVLKNRQLYECSIIK

SEQ ID NO: 93442 - protein, 399 aa, unidentified
MRHHTEAFIGIDTSKLRNAVAIAEGGRGGEVRFLGEFPATEAAMRKLVAKLAAKYDKLTFCYEAGPTGYGLYRLIKSLGHECAVVAPSLTPKKPGDRVKTNRRDAVSLARLSRAGELTAVWVPDERHEAMRDLSRARQAAKKDLQGKRQQISSLMLRLGRCYPGKKTWGPAYMKWLRSQKLEHGEQRMALEELLEGVRQEGERVERLEQAIREAVPEWSLVELVTAVQAMRGFDLIAAVGVVAETGDLSRFQNPRELMGYLGLAPSESSTGDSVKRGGITKAGNGRARRILVEAAWAYRHPARVGREKQAKVAAAPRSVREIAWKAQTRLCRRFRFLERKGKRRTVVATAVARELAAFIWAINREVMQNRQATSAGAVDRSSRECARPAHSPSVAIQIK

SEQ ID NO: 93443 - protein, 348 aa, unidentified
MTQCKTIAVDLAKDVYEIGFANRAHRIVQRKRLNRAAFRKLLTTQPAAVAVMEACGTAHFWGRFAIQQGHQVKILPAQYVRPYRRRNKTDRADVSALVEANRCAEIRPVPVRSIDQQQIQQLHRMREQWKKTRTARINQLRGCLRELGVFIPVGAARAIKHATMVLDDDTLPAPLRQIYGHILDDICGVATNIKACEQQLAALTDDNNDVRTLNKITGIGPLTSTAMVAAAGSPHHFKSARHFASWLELTPRETSSGRRRFLGKISKQGGTYLRTLLIHGARSTLIHARRRHMAGQPLDQLQQWAVGLHDRLGHNKAAVALANKLARICWATWKHQRDYDGNFAPAFA

SEQ ID NO: 93444 - protein, 408 aa, unidentified
MEIVGIDWGRKKHYCYLLHQGKKLVLKNKEEDFAKLLKIKEAVYVIEDGNNRIVDYLLRNNRQVYILPSRRSSEARSFFVIEGKSDFIDSKVIAMTYEHNPEWCLQVKREGIAFELDVLVEENAVINVSMMQDIGRLDAYLERYWPEVKEVFSGTSARKLAFISICPTAKDFLSMSDKEILQKLKEMGFLINSNLKSKLKELRKIALERYVPASIRTLIIAFSRYAMEKKVMKEEIGKQMKEIIEESEFSVLLTLPGVGVIIASQLIVAYLTHKFSSYRDLQRYAGTTPTYYGSGNKNTTKMRSNCNHYLRGTLHIASLAATNSSKWMKRFYDNKKSEGKSSAHALRALANTILKIAFAMLRDLTPYSEEKFFKRNPLSDYTPSKKEGEQKPEYSLKVSSVATCRSTA

SEQ ID NO: 93445 - protein, 341 aa, unidentified
MNRFSRIGVDLAKNFFQIHAIEREGGSPVTRKLSRNKFREFFSRTAPCRVAMEACGSSHYWARELGAMGHEVALIPPVYVKPYVKRGKNDAADAAAICEAMSRPDMRFAPIKSAAQQAVLMLHKTRDLLVKQRTMGVNALRGHLQEFGLIAPRGIHRVGDLIALERGRADLPEEAKQAVEILAWLGEELDAKIDALEKKIAQGAAKNPASRMLKQVPAIGPLIASAMAAFVPDPGVFKSGRDFSASLGLTPSQHSSGGKQKLGGITKKGNRYLRKNLVVGCTSVLRVAHKYKGALAEWIVAMKAKKPERVVAVALANRLARICWAIMSTGECFREDIYAKA

SEQ ID NO: 93446 - protein, 434 aa, unidentified
MTATDSSARPRILVAIDIAKAKHEVLVELPTGKRRKMIVHNQLSDFRQLAAYLKRLEGALEIALEPTADYHRNLAYFLKVQGFAVKLVSSIAVARTREALHNSWDKNDPKDAQVILHLLRNGNTQYFYDPVIEQTNDLQELSKTHFQVSLRKTRVQHSLLNHYLPLYFPEAERFLSTSRSSWFARLLFEFPTPQAITQLTENEFLERGSQLLRRKQSKAAVLRALYAKAQESVALPVPLESQAIATFRLTLAQHLELCRIRTELEETAHELLQDQLDYQILRSVPGVGPIIALTVLAEAGDLRRFGHERQFLKFCGLDLATSQSGAYRGRTQLSKRGNSRLRSALWMAARRATHMQENTFRQKFSRYLRADTTNTDLKRKAYTACTAKMARTIYGLIKHQQFYRAYREDAIPEPGGRTRSYGPLRQAASGGLTS

SEQ ID NO: 93447 - protein, 445 aa, unidentified
MASFAGGAAQAGYVDRIRDLAPQRCLVVPVDVGKRTAMALVADHYGQIIDAPFEFDLTVSGAGQLVATITATRQRVGAESVRVGVEAAGHYHQALAATLRSSGFDVVELNPYQVKMARAQLGAARVKTDVRDCTAMVELLVRGQGWPLHRQDGAMAEQLVWVAHRRRKLAAAQALGSQVHALADLAFPGLTGCFTTGLEAKTLRMLLATLPDPARVAAMSAEDLVHHARSHQVRMTRPKAAQVIAAAGEAMCVPDAQRAAAAQLLTAEVKVFDALQRDLATCDQRLAQLLPDTPAGVLTSIPGVGTLTASYYGAALGDPARFANAGAAYRYSGLAPASYESAGRRAAKVKISKVGSVELRQAMIALGTGIALHHPDFAAYKRRQLEAGKKPMVAAIAVAHRAHRLAFAVIRSQQPYDPAKWAISTSHRQRRDRSVMAADPATGAT

SEQ ID NO: 93448 - protein, 425 aa, unidentified
MNYKQNEKINQVKESTLVVGIDIGSTTQYARAFDWRGIELGKVFTFSNSREGFEAFKAWMQHLQDKYRKSDVIVGIEPTGHYWFDLGAYLEDEGILLVMVNPYAVKQTKELDDNSQSKNDRKDPKVIAKLVTEGRYSAPYTPDGVYADLRIMVANRKRLIREMTQIKNRFARWFAIYFPEYTDVFGDYEAQSSMLLLKKVCTPEAIVELGAEKINQIWRDAKLRAVGMKRATTLCETAKRSIGLKKGSSAAQYEMKLLLEDYEYKKAQLDAVMEEIEKLCRKIPESEQMLAIKGIGVITVAGFLAEVGDVRRFESPRQIQKLAGLSLRENSSGKHKGQTTISKRGRSKLRAVLFNAAIPLIAKNPEFKSLHEYYTTRANNPLKKKQSVIAISCKLIRVFYAILAKGVTYDAQKLISDIHRQPQVA

SEQ ID NO: 93449 - protein, 410 aa, unidentified
MELLHRRCCGLDVHKETVVACLRLVSDGKVTTEVRTFKTTTADLLHLSEWLAANGCTHVAMEATGVYWKPVWHILDDGEFALVLANAAHVKNVPGRKTDVNDAMWLAELLAHGLIRASFVPDTQTQEMRNLLRTRKQLVREHSSHVLRVQKTLEDANIKLDSVLTDLMGKSGRAMLEALIAGETNPAKLASLADRRAKASPEEFREALRGRVTKHHRFLLRLHLNQIDALDAAMATVDAQVEANLGPFRTAVDLIISIPGIKNLGAHVIVSEIGIDMSRFPSHAHLISWAGICPRNDESAGKRRSNRLRKGAPWLKTTLVQCAWAAVKKKDSYLQAQFYRIKARRGPKKAIMAVAASILTAIYHMLKDGTMYKDLGRNHFDRRSTDQQKNRLVKRLTELGYAVEIKPLAA

SEQ ID NO: 93450 - protein, 386 aa, unidentified
MTTRPTQPIAIRTDLGAIFVSMELSRSSWLLTSLSPGNGEKMSKHSVPAGDLVGLLTLFGKLRERCEAKTGCDYPIVSIQEAGLDGFWIHRALEKEGIESHVVDPASIAISRRRKRAKTDRIDGEALLRTLMAYKRGEPRVCAMVRAPSPDEEDRRRICRERKALIAERVTHVNRIKGLLFSQGVTNYQPLRRDRRQRLEELRTGDDRALPAHMKAQICRELERLELLIDQIKAVEEERDALIAAQAAEAKPSAVKLLLAIKGVGAEFAAILWSEGLFRHFDNRRQVAAYAGLAPTPWQSGSIDREQGVSKAGNPRLRTTLIQMSWLWLRHQPSSALARWFGERVQRNGGRMKKSTIVALARKLLVALWKYAISGVVIEGAIMKST

SEQ ID NO: 93451 - protein, 415 aa, unidentified
MALKIVYKICCGIDVHKNFVVACIAKTDKQGVTTYERHHFSTYTKGLKQLLKWLLDRNCKDVCMESTGKYWIPVYNVLEHDCSIVLAHPKYVKAIRGKKTDKKDAKWIADLFKHDLVAGSFMPPADIRQLRDLMRYRFKLTCFKSSEKNRYQNCLTVSKIQLGNVVSDTFGKSSQKIIAKILENPDDTSFDIGSLIHGSMKDKLPELELAIDGYITPEQAAKLKIIKEHFDNLEARKAELEELILALANPYQQEISIILTAPGFKNTFTAIGIISEIGTNMEAFPSAKHLCSWAGLTPTNNESAGKKKSVRVSKAGCYIKPLLVQCANAVVKSNKHPEIRNRYLRIKKRRGHKKAIIAIARMLLTALYYMLKNGENYNAELYRKSDLPPVDREITVEQALMIARNQGYKIKSATA

SEQ ID NO: 93452 - protein, 359 aa, unidentified
MLAQSNELDFKGQSIYSGFDAHLKSWKVTVMTEKLLHKTFSQPPEPKALYAYLVKNFPGATYYSAYEAGFCGYWIHNELLSLGINSIVVNPGDIPTTNKEKVQKEDKRDSVKIARSLRGGELKAIFVPCEKTLEDRSLLRTRHTLTRDIVRYKNRIKSFLYFHGIQFPETFNNPQSHWSKRFMSWLSSIEMKQESGKLSLTALIRESENLRQNLLVVTRQVRALSDTESYKESVGFLRSIPGIGLITAMLLLTELETFDRFGNNDHLCGLIGLIPSTDSSGENEKMGDITPRGHHILRSAIIESAWVAVRIDSSLSKSFHDYCKRMEPNQAIVRIARKLLARVRFVLKNRKPYQMSVVH

SEQ ID NO: 93453 - protein, 423 aa, unidentified
MPYRIAGIDVHKKKLAVVVADVEVEDEYQFERRWYGSNPEQLQLLAEWLIQQQVEEVVMESTAQYWKPVWGALEQYWKPSCEKREGAGRMSGTLHLAQALSNRGRRGRKKDFRDAERLLKRLVSQVLTLSFVPHAEQRLWRTVTRTKYQLRRNKVRLHNQLEALLEEAHIKLSSLVSDLLGASARRMLQALAEGETDPAALAALADQRLRATSTQLRDALGACTELNPVYRRLVKMVLEELQWIEQQIGQLDQEMASLLRQHQDAVQRLAEVPGLGVDSAQQIIAEVGAKAATFASAKNLSWLVGACPGEEESAEVNYSARSPKGNRHMRRLLNQAANAAVKVKGSIFEIVYRRLGPRLGHNKTIGAIAHRICQLIWIILNKGVRYEERGPVVSENSRRARTSRMIRTLRKLGYRVELQADPA

SEQ ID NO: 93454 - protein, 407 aa, unidentified
MEIVHPKCAGLDVHQQTVVACARVVAGSSVTHDVRTFGTTTQELVALSDWLTAHGCTHVAMESTGVYWKPVWHVLEESVELVLANAMHIRNIPGRKSDVNDATWIAELLAHGLIRGSFVPPAPIQELRDLTRTRKQLVREITQHTLRIQKTLETANLKLTGVLTDILGVSGRAILQALVAGETNPERLAELACGRLKASRADLVAAPHGRITAHHRFLLQLHLAQIATLEAAVAEVEARLGKALAPFRAAVDRLITMPGVSETVARVIVAEIGFDMTRFPTAGHLISWAGLCPRLDESAGKRRSTRTRPSNPWLKTTLVQGAWAAARKKDGYLRAQFLRLKSRRGPKKAIIAVAASMLTAAYYMLKDGVDYRDLGADHFDRRDKAKLAKRLVARLHDLGFSVELRAA

SEQ ID NO: 93455 - protein, 352 aa, unidentified
MTTMAEPTTRVTAGADTHRDQHVIAALDERGGELGVRSFPTTAAGYRRALAWLRSFGAVERIGVEGTGSYGAGLTRYLHAEGVTVVEVNRPNCQLRRSHGKSDPVDAVAAARAAQSGEASGAAKTRTGSVEAIRALRIARRSAGHGRTIALSQMRALLVSGPDDLRETLRGSTVSKLVTVAARLRPADPTIAAGATRFALRALARRVQSLEAECERLDAVLGPLVSATAPELVACFGVGTDTAGALLVSAGDNPGRLRSEAAFAHHCGVAPIDASSGLITRKRLNRGGDRTANQALWRIVMVRMVHDPRTRSYVERRTREGRSKREIIRSLKRYVARELYRCLPIPSPLDDR

SEQ ID NO: 93456 - protein, 383 aa, unidentified
MGFPNSAATNGMVRRHLKGSLRGVEDLRRRIIPMKICTIGIDLGKTIFHMIGLDEHGEVIAKKRCSRSQLLAYTANIPAALIGMEACCGAHHLGAALASQGHQVRLIPPQFVKPFVKSNKNDYNDAEAIAEAVQRPRMRFVPIKTNDQLDLQALHRVRDRLVRRRTGIINQIRAFLLERGIAFRAGRVYLRSHMAAILEDAELNLSPLLRGLLEQLWEEWKITESRIEEVTDQLEVIADQDTSCKRLQGVPGVGPLVSTALVAAIGNGSAFAKGREFSAWLGLIPRQVSTGGKPKLLGISKRGNSYLRRLFIHGARAILIRERKKYAFGGWMTHLESRAHANVVAVAVANKLARIAWAVLVKGENYRQTPTLSVNNCEGNMAA

SEQ ID NO: 93457 - protein, 343 aa, unidentified
MKLIRVGVDLAKSVFQVHGVDRSEKVAWRRKLSRAEWIKAVQQNVSLEAEIGMEACGSAHHWARQLRALGYAVKLIAPQFVKPYVKSNKNDATDAEAICEAMSRPGMRFVSVKTIDQQDVQAAHRIRSELMNQRKAKGNQIRGLTSEYGLVAPREIVHLRRAIPLWLEDRENGLSQRFRRLLSGLWDDLRVLDERIAELDKEIATIAASDPVAKRLQQLRGVGPLIATALVATVGDATQFGNGRQMAASLGLTPKQNSSGGKERLLGISKRGDCYVRCVLIHGARSMINSAKTKTDPLSLWVLRIAATRHPNVAAVALANKTARIAWAMIRHETHYQPDLTTH

SEQ ID NO: 93458 - protein, 408 aa, unidentified
MSPEKPSPVRFIGLDIHKYYLIAMGVDADLNPLLGPQRVQLSNLEGWTQKTLTPQDAVVIEMTTNTWQIYDELLPHVHSVTVVHPPHIALITRSQVMTDKIAASHLARLHAKGLLVGIWVPPQEVRDRRALSAQRRKMSRLSTQAKNRLHAVLHRHHLPPPAGKPFSPDKRVWWLSLPLTPLEKAMLLSDLDTLTFAQSQIASLEQAMLSLAAQDERIPLLIQMPGISLVNAMTILAAIGDITRFPDAKNLVGYAGLGVRIHDSGLTSRTGRITKAGRKDLRATMVEAAQTAANTHPHWQAELKRLEPRLGRNKAIVAIARKLLVAVWHVLAFQIADRFAVPELVAKKLKNFSDRLRLERRSPGQSTAAYVRSQLDRLGIGAQVSHLYRGKLKSPLRLPPSALRPTGD

SEQ ID NO: 93459 - protein, 391 aa, unidentified
MNSLKEWVLRPRKVQMSRFPEWVQKNLKPTDALVLESTSNAWEIYDLVSPLVAKALVANPLKVGQIAGAKVKTDKLDVERLLILLIADIVPEVWVPPHHVRDLRALISHRWRIHKQIAMTKNRLHSFIHRFNLIPPAGPLFSEKNLSWWQEQEFSSMVRLQIEQDLLILEHLTAHKEAVHQELACLSNRKPWSKDVVFLMQLPGLGVVLSMTVLSAIGEITRFENAKNLVGYAGLGAGIHSSGLKHQGKGITKAGRKELRWAMVEAAWGAVRSDPHWKDQYEQLKKRGKHSNAAIVAIARKLLVSIWHMLTKGESHRHSTEEDLAYKMLIWSQRMDEEALRGMTRQQFAKYGLLRLGKGVHLTRIVRNGLPRRIAPMDEVLALLPEYHLLE

SEQ ID NO: 93460 - protein, 322 aa, unidentified
MAEGEVMVGVDVSMARLDVAVWPGGESFSLSNDPAGVEQLLQQMLELRPQAVVIEASGGPETLLVSELCAAGVAVAVVNPRQVREFARSLGQLAKTDRLDALVLAQFGHSAQSHGRLTLTQLPTVAEAELKALVRRRRQLIGMLVAETNRRQRASKVVKRSIVATIRALKRSLAELEQQVRETIKHSPVHQQKIAMLQQVPGIGPHLSRTLAAEVPELGQLGRRQIAALIGVAPHAHESGKFKGRRMIWGGRAGVRSTLYMAMLSATRCNPLLAPFYRRLLQRGKSKKLAYIACARKLLVILNAMLRDRTAWSPSVDFQHSR

SEQ ID NO: 93461 - protein, 414 aa, unidentified
MSFKILKNNCCGLDVHKTWIYACIGITDSLKRTEYKEARFSSFTKGLQELCDWLSKYNCTDVCMESTGKYWIPVFNILEKNNIWVTLSHPKYTKPQKGNKTDRKDAKWICDLYMCGMVKPSFIPPADIRELRDLVRYRFKLTCMITGEKNRAHNCLTVSNLKLDDVFSDIFGKSSRSITEQILQHPGETFDVSPFVDRRCKTPIEEIQAAVDGAISNEQAVKLRQCLNHIDELEMHKAEIEREIFRLSDKYESVLNLIRTVPGFDKNPLTAIQVLSEIGGDMSVFPTAKNLVSWAGCCPRNDQSNHKIKSTRISRAGSYFKPVLVQVANALIKSKKHPEFTTRYRRIKAHRGHKKAIIAICRMILTAIWHILSDLKPYTSEGFLESRPVNKSKILTTSQALNLLKQRGLYIFNF

SEQ ID NO: 93462 - protein, 395 aa, unidentified
MEDPIIACDVSKGSSHIQGFIGLSNPVGNPFVVRHLKSDLKLIKELAKSLEKQAHKKPKFVFEFTGIYHECIAKYIQSIGLDLYAISPLESAKVRKSQIRVTKTDSKDCLNIATVYYTRSIRKFESDNNDVKALSRSKRNIRRELTEQRCVYRRYLDLIWPCFDEYFDTDSKTSEIVVSTYKHPYVIKRRSVNMVAEILLNNGHFAKPRAFDIAYKIKDYASNCVSGVDEKSDYVNALISSYSKINSLKKEIEEINLELDNLLRKSPVYQLLKTVPGIGANLLIQMSAEIGDYTRFKTAKQFVAYIGLDPSILQSGKDDGEHYSITRKGNGILRSCLYLAVSQMLTQKLDNQITRFYFKKKSSGLSHKVAAVASCRKLACCVFGMLKNGTGFETI

SEQ ID NO: 93463 - protein, 410 aa, unidentified
MHSEQLRYVYVGVDLHKKQHTAVILNCWNEKLSEMTFDNAPAAFPFVLDAVNKHLKPGMTAVYGLEDTGGYGWAFGLYLVKQGQRVKSINPAFSSAKRKSYATVQKNDSWDAECVARVLRDDMNHLPDFKPDEHYWVMRQLVMRRRGITKGISAVVRQLHVQLSYVYPSYRSYFSEVDGKTALAFWRAFPSPRHLETVTAIQLAKFLRKYSNNACSTKKAEQILCSVKADGGANSDYVAEKELIIRSQVRQLRYFKKEIAEFDVTLANMLAQIDCQLDTITGVDVVTAAELTAEIGDVSRFSSADKLARYAGIAPIFAGSGGKGRYYKSKQGDRSLHNIFMSLAIRQLVVHRGTKTSRNPAFLDYFHRKMAEGKTKKQAFVCIMRRLVNIVYGILKHKTPYRLPEKTDCG

SEQ ID NO: 93464 - protein, 384 aa, unidentified
MNKHSMIFIGLDTHKEFHEVAYCEEQRGASPVHYGRIPSSKVSVKKLLRQFESKYPGATLHVVYEAGPCGYWIYRLITSLGHCCYVVAPSLIPKKPGERIKTDRRDALKLVKLLKSEDLTPIYVPEPEDEAVRDLSRAREAAMKDLKEAKYQLKALLLRNNIRYEGTANWSKKHLRWLTELILPHPAQQIVLQEQLQTIEERIRRLERLDNELTHHVHQWRYYPVVKAVQAMRGVRLLVAVGVVAELGDLHRFDHPRKLMAYLGLVPSEQSSGGKRHLGAITKAGNGRARRLLIEGAYSYRYPANVSTELQLRQEGLPKDIVDIAWKAQLRLYKRYQRMSKKGKHYNLIITAIAREMAAYIWAIAKEVVLTPVNPKLRLSRVPA

SEQ ID NO: 93465 - protein, 346 aa, unidentified
MLYAGLDLSRKRLDFHVLDADGATVEVGAAPPDADGLHRLTQRLDRYRTPICAAIESMNGARFVHDRLELAGWQVEIADAQKVKGLAPLACKTDRIDAWVLAELSRRELVPAIWLPDPAVRGERERARWRLHLVRHRSSLKQRVHAVLLAHGKPCPVSDLFGVRGRQLLAQLGLPEPWQGTLEASLRLIDELDREIGDCERELRRLGADHRYVPLLCTVPGIGWVLAYTIAAELGDIDRFPTPRKLAGYTGLCPRVYQSGERDLRGPLTKQGPRYLRWALVEAATHACTAPVYRDRYQQTKARIGKQRGAKVAQIDLARRLSEAIWHMLTRNQPFAPKGATDPLAA

SEQ ID NO: 93466 - protein, 366 aa, unidentified
MDVHSKTYTLCAMEPMIGAEDRILANIQVTADYKNILLFIENLKAKLGSQDTYDIQCGYEAGCLGYSLYNQLTEASVNCVILAPSTMLTQQGKRIKTDKRDAHVIAQCLSYGTYHPVYVPTADDDSVKEYIRMRKVHKDKIKEMKQRIGAFCLRKGLKYDGTNWSLKHLQWLRNLKLSALNREILDEYMATFGELTAKVERFDARIEELAAQERYQEKVKRLGCLLGIQTHTALSLIVETGDFHRFAKGNIYAAYLGMAPGENSSGDKVKRTGISKAGNNHLRKLLIEASQGICRGSIGYKSKVLRARQAGNTAEVIAYADKGNVRLRKKYYKMIRGGKKKNVAVAAVARELACFVWGMMTDNISI

SEQ ID NO: 93467 - protein, 377 aa, unidentified
MKKNIRFIGLDVHGETIAVGVAEPSSEVRSLGVIPNRPESVRKLVKKLGPASSLRACYEAGPCGYVLYWQLTQMGVHCDVIAPTLVPTKSGERVKTDRRDAQKLARSSRSGDLTPVWVPDPEHEALRDLVRAREAAKKDQLRARHRLQKLLLRRGLRPPEQMKPWTTGYLAWIKSLRLQPPALEATLLDYLSEVDHAGERIKRLERTIDQAIEAAPAAIRAVIDGLQALRGIARISAATIVAEVGMLSRFSRPKQLMGYTGVVSREHSSGDRIRRGAITKTGNAHLRRILVEAAWSYRYRPTVGPQLRARQARQSAEVKEISWKAQHRLHYRYARLVGRGKPKQQVVTAVARELAGFIWAVGVQVEKQLPIGNVRAA

SEQ ID NO: 93468 - protein, 411 aa, unidentified
METVVERPAALDVHKEQVTACARTPGMRGGRREQHLAEFKTTVRGLLALRDWLKAHGVTQVAMEASGVYWKPPWAILEDEFECLLVNARHVKQVPGRKTDVSDAAWLCQLLEAGLLKASFVPPKPIRTLRNLTRYRKAQIGERQREANRLHKILEDTGIKLDCVASDILGASGRAMLDALVAGTTDPAVLAELAKGKLRQKLPALREALEGRFDAEHGIVVSAILAHIDFLDEQIDGLSDAIEEQIRPFAQAVELLCTIPGVQQRTAEVIIAEIGDDMSVFPTAGHLASWSGLCPGNDQSAGKRRSGRTRKGSRWLGIALTEAAQANTRSRDSYLSAQYRRLKPRRGHRKAIGAVRHSIIVACWHMLSTGEIYRDAGGDYFTRLDPGKQTRRLVAQLERLGYAVTLQEAAA

SEQ ID NO: 93469 - protein, 345 aa, unidentified
MYRTRVGVDLAKEVIQVCIYRNKKVQSNSEMTPDEFLCWLFKTKPATVIFEACSTSNYWKQKAFEAGHDARLISAKLVSTVRQNQKTDKNDALAIVQAASLPDITFIGGKTVEQQQLQSIKRLRELAVKQQGASQKQLVSLLLELNIRISNRKGGIVCAIQGVLEDATNGLSVECRAAIQVAKEQLSVLIQAVHRFNDCLDKSAATHPDCKKLLKLEGVGAVNAINLYLALGCAEIGTFSKGREASACIGVTPIQYSSGGTVKLGSIGKYTKNSLLRSQLICGAMATIRHVVKREAKTQKDVWLKALIERRGKKCAAVALANKTVRTAFAMLTQGTEYKAVLLAE

SEQ ID NO: 93470 - protein, 364 aa, unidentified
MNKCHSNTELSSHEGTRCQINGGRCAIKLGIDVHQDFYVVVEQMGGTNPKPPQRFGKQAFLSWAAKLKQSGAEVQAVYEACGFGFALQRQLSALSIVCHVVCPQKLDERNKRVKTDGLDAKALCLKLDRFIQGNRDAMALVRVPTEQEEQLRAIHRQREQLVGARKRLEAQGRSLMVNHGFEPVKSWWQRGNFGALQVPEWMKELLLNRQPILLGLQQKIAALTLQLQVAAASKQPRGLGAMTSVIIDREIGDWNRFNNRRQVGSYTGLCPGEYSSGNTRVQSCVTKHGNPRLRAALVELAWRLVRFQPSYKPVLKWRAILAKGALATGAARKKAIVAVARQLAVDLWRVRTGRCKPEALGLEI

SEQ ID NO: 93471 - protein, 343 aa, unidentified
MQVSTIGVDLAKNVFQVHGVDSAGKVVITRQLRRKQVIDFFSKIPVCLVGIEACGTAHHWAREISKLGHTVRLMPPSYVKGYVKRSKNDAADAAAICEAVTRPSMRFVPIKSADQQALLMLHRTRDLLIRQRTQLINALRAHLAEFGLVAETGREGLAQLAEIITDESNREALPSAMRQALQAIVDQLAALELQIGALNRAIHAHHRANDMSCRIETVPGIGVIAATAIVSTVTDPSNFKSGRDFAAWIGFVPRQHSTAGKERLGRISKHGDRYLRRLLVIGATAVVQHARRHPQKHSWIIRLLARKPAKLVAVAVANKMARIAWAIMAKGGYYRAPELAAPT

SEQ ID NO: 93472 - protein, 420 aa, unidentified
MPNIEIGVDFMVKENFIYVGIDLHKETHTAVMIDCYNQKLGEITFPNRPADFPKLVIKVKKCNTDAKEVVYGLENAYGYGRPLAVWLIDKGYFVKDVNTAISHRQAKHRGAMYRKSDSDDAEAIALATLNMLDKLPDACPNDAYWSLGQLVHRRDNIMKQRTRLVNQLHEQLCIAYPSYKQFFNDISRPTALYFWEHYPSRKYLKGKSVEDLRAELVPVSHNKCSTKTCEKILDAVASDKVKNNAYQDARDMVTLSIVSDLQHYDSQLTEVDKMLEQMYKMLGCTLTTIPGVNVITAVKILAEIGDIKRFSNANKLAQFAGIAPLHLSSSGKGKDVATKQGNRRLQATIYFLAIQMVQVSSKGTPRNPVVRAYYEKRKAERKTSQQALICISRRLISIIYGMLKHGTEYRMPVVESAGEK

SEQ ID NO: 93473 - protein, 450 aa, unidentified
MTRYIGLDLHKRVLEVCILDQGGHVEARMRLPVDRDSLASFAKSELRLDDRVAVEATTNTWPVVELLRSYVADVTVSNPMATKAIAQAKVKTDKIDARMLAQLLRADFLPSVWQPDADTSRLRQLTNQRASLVADRISIKNRIHAVLHQRLIPPPSTRLFNEHGRQWLDQLEIDPDGRAALRRDLHLLDELEHAVAEVDRMLFRLAGEDPRIKLLITLPGVDVACAQTILGALGDLSRFADGDHAASYLGLVPSTKQSAEHAYHGPITKAGNTHARWMLVEAAQHLGNNPGPLGAFFRRLEHKKNRNVAVVATARKLVTIAYLLLTRGEPYRYAMPARTGDKLRNLRLRSGGARRPTGCPKGTRPIAKLADGSSRTIKPLATLYADEAVPGLLPPTAAEQSMINRNPAVAAFVASLAEPQVRPRQYRKPQIHAPSVDTGGSTDRARRPAR

SEQ ID NO: 93474 - protein, 391 aa, unidentified
MIYAGIDIAKHDHVIIAVTENGDKLTRPMTFHNSAQGFERCHTFLEELGCETDISIGMEATGHYWLACFTYLTNKGFNIFVINPMQTKAMRKLKGKSRVKTDMIDAYIVAETLRFEDFELTKLASDEVQELKYLTRFQQSLKEEVAQVKTQVICCLDQVFPEFEGQFSDTFGESAMSFLERCPTPDECIAIDIRTLTSVLKKASRGRFGREKAKTLKETARTSIGIKLGAEAVSFQIKLCIAQIEFIEGQIGEVDQRIKALLDDIEPLILTIPGISYTLGSQIIAEIGDISRFSDAPSLVSYAGINPSISQSGKFEGTDDRITKQGSAYLRRAIWLGADGARKFDPKLREYYEQKRAEGKPHRVAVTAVARKLTHVIYAVLKNQQPYDPKR

SEQ ID NO: 93475 - protein, 368 aa, unidentified
MAPQQQPRSRRKEAEPAMEHVAIDLGGRESQVCRRRAEGAILEERRMRTRQLRGWLREIPRSRVVVETCAEAFKVADWAVEAGHEIRVVPATLVRSLGVGARQVKTDQRDAQVLSEVSCRIDLPTVHVPSSEARMRKSLSGMREGLVSARTQLINTVRGWLRTQSRQVRSGSTATFAQRVRRMFEAESANALPRFVERQLEAIEQLTVQVREADTELSEMAERDPVCRRSMTLDGVGPVTAVRFAAAIDEVSRFRDAHAVASYLGLTPGEDSSSDRRRRTGITKAGAPALRRTLLQAAWAARRSRRRGPLQAWADEVEKRRGPNVATTALARKMAGILYAMWRDGRDYEPHRAARPSVQPTPPESPVP

SEQ ID NO: 93476 - protein, 326 aa, unidentified
MKIKLLGIDLAKNVFQLCALNQANKVLFNRTVRRAQFRSTIARLEPTTIAMEACSSAHYWGRTFEAMGHKVLLVPAQHVTPFVRGGKSDARDALAICEAAQRPGLHPVPIKSIEQQDIQLLHRLRQRQVQHSTALANQIRSLGREYGVIFPAGIKSLISRLPEALEDGSNELSPVARYALADQHRCLIDVRKAMTTFLNQIEQLAAQHPAYINLLPLPGIGPMIASAYIAAIGNGHQFKCGRQVSAWLGLVPRQYGTGGKIQLKSITKNGDRYLRTLMIHGARAVITRGLKNRPELAQWIQPIIDRQGFNTKSRYRLQLQAIFQDY

SEQ ID NO: 93477 - protein, 348 aa, unidentified
MQTITTIGLDIAKSVFQVHGVEVEGNVIIRRQLRRRYVLTFFQKLPPCLVGIEACASSQHWSRELQALGHTVRLMPPAYVKPYVKRQKNDAADAEAICEAVTRANMRFVETKSPEQQSCLMLHRTRHLFIRQQTSVINAIRAHLAEFGIVAPVGRNGVEALREVIADPNDKRLPEIARACLAALGVQLQTLKAQILNFDRRIMAWHRSNETSKRLDEIPGVGPVLATALVASVADPKAFRSGRDFSAWIGLVPKQHSSGGNDKLGSISKQGDRYLRSLFTAGALAVIRYAMASCPCRKWCAHLDIAGQILSCHRPPHTSTQLARNADVSLSDMCRAQFGPRRAQGLPR

SEQ ID NO: 93478 - protein, 419 aa, unidentified
MKSASTTPITQLPEMAPNDVTGGLDWARDDHAVSVVDTRGREVLRHTVEHTAAGLAELIGVLTDAGCREVAIERPDGPVVDALLAAEMTVVVISPNQVKNLRGRYGSTGNKDDRFDAFVLADTLRTDRTRLRALVPDTAPTIALRRACRARRDLIAHRVGAANQLRAHLRAVFPGAVGLFADVDSPISLTFLTRFTTQNQADWLSPTRLGKWLSGVGYSGKVDPAVLHARLVAAPRGLTGADADTHAAITRAFVGVLTSLLEQIKTLTAEIETQLAAHTDAHIFTSLPRAGRVRAARLLAEIGDCRAKFPTPESLACLAGVAPSTRQSGKIRTVGFRWACDKQLRDAVCDFAGDSRRANPWAADLYERARARGHDHPHAVRILARAWLTIIWHCWHDGVDYDPTTHRALQRVLQGQRTD

SEQ ID NO: 93479 - protein, 316 aa, unidentified
MAEDVFVGIDVSKHSLDVAVRPNDDFWSVKNSAKGITTLVARLSQLKPTLVVLESTGGYEKQAVKALVAARIPVAVANPRRVRDFARSTGQLAKTDKLDAQVLAKFADRVRPNPVHLSTEAEERLQGLLRRRQQLLDMRVAERNRLESIHPDLAEQVQRHIEWLEEEIRRLEEQMEELIEQESSLKQKAEIIRSVPGVGPVMTYTLLSEMPELGLLDRKQIAALAGVAPLNRDSGKRSRKRHIRGGRPVVRHVLYMATLSAIQHNPVIQRVYHRLKEAGKERLVAVVACMRKLLVILNAMVRSMQPWQPQLPLSQD

SEQ ID NO: 93480 - protein, 401 aa, unidentified
MKTVLSVDVAKNKSMIMLMNSDGEIFIDTKEINHNLEDFEKVKEEIKEINPQNLTVFMESTGTYHLPVERYFKENGFNTLVINSLTTKNNYDTIRKTKTDKKDCYRLAKLFFVNEVEYHDLSKKDLYANLKAMTRQYFYLLQNNVSCKNRYKRLINICFPELEKIFKSTRIYDDTALNFIKEFPHAEIVKEKRIDALYNNLYKTNGRNLNFYKKLATTIKTASINSYPGVDKEHEDVKNLSYMAKIVQNNNNIINELREKMIETAKQSPYYKIINSFYGIGDTLTAEILGELGDITRFDSPKEIIAFCGLDPTIKQSGKSINVKGAISKRGNKYARYILFNCSQMVVKLGASNYPEHPVYIYYQNKKAEGKHYYESLTACSTKILRMLYSMCKNNKQFLEN

SEQ ID NO: 93481 - protein, 417 aa, unidentified
MKSDPKSIPIVRFIAIDLHKYYVTVGGQNAQQDWTLRPRDVRMSRFRDWAHKNLKPGDAVVIEATGNTWDIYDIVAPLVSKAVVAHAGKVRQIAEARVKTDKEDVKRLITLLIADIVPEVWVPPMHVRELRSLVSFRWRLSKQITMSKNRLHSVIQRFNLNPPEGKILADKNISWWEQQDFSDLTGFQVERDLEIVEQLEAQKALIDQKLAELSNSDPWADDIVYLMQIPGFGIIFSMIVLSAIGDISRFERAKKIVGYAGLGAGVHHSGEKYQEKSITKAGRKELRWAMVEVAWGAVRSDPYWKAQLNRLKKRMHPNKAIVAIARRLLVSVWYILTKREPYRHFNEEIIAYKMLTWSQRMDESALKGMTRQQFAKYGLLRLGIGQDITRIVHNGKPRRLAPTEEILSLKPELKPPE

SEQ ID NO: 93482 - protein, 341 aa, unidentified
MEKFIRTAIDLGKNYFQVHGLESEGGRSISRKVKRSRMHEVYSRIEPCRVGMEACGSAHYWARQLTAMGHEVVLIPPAYIKPYVKRGKNDAVDAAAICEAMSRPNMRFVPIKSADQQAVLMLHKTRELLVKQRTMAVNALRGHLAEFGIVAARGIGRVDELLALAEADAALPHIARAAVACMARHLEELDLSLETMEAEIAKAHRQNPTSRLLDEIPGIGTLIASVTAASVPDPGVFKSGRDFAAWLGLTPRQNSSGGKEKLGAITKQGNRYIRKMLVTGATSVLRVAGKRKGALADWINALRARKPERLVAVALANKLARICWAIMTTGEGFRTEMYVKA

SEQ ID NO: 93483 - protein, 426 aa, unidentified
MKNHPPTDPWNALGYYMGLDWSKDHHDIVVVDPQGDILLEMTFDDNAKGWHRLRRRLDERVGADYTQIGAAVETSRGPAVERLLELGCTVFPVHPKAAQRYRDRKAPSGVKNDRLDAWSLGDALRTDGRQWRVLQEEDPRVQELRLICRDEISLIEQQTALINQLQEALHEYYPAALEAFTDWTRPSAWAFVERFPTPQALGKAGKRRWEKFLHANKLYCPQTYPHRLEIFTHAEEFCGAKAVTRAKSLLAVSLAGQLRLLGKQLAVYRQRIQELFDQHPDHGLFDSLPGAGPKLAPRLLCESGGSDGPFEDVQGMQCMAGTAPVSFQSGQMKRVRFRWACNKHFRAAVHLWANLSRTKCAWAEAYYRKKRQEGKSHSCALRCLGQRWLKILFRMVRTGRPYDEALHMRNQVAHGSWVIELVQQKA

SEQ ID NO: 93484 - protein, 424 aa, unidentified
MNNTQNQKIAQVTDKTLIVGVDIGGENHFARAILARGFEVSKKPFPFTNTEEGFESFVTWTYNLAAAHKLTKIMVAMEPTGHYWFAFAAYLKKYDVRVVLVAPQHVKHSKEMDDNTQEKDDRKDPIVIARLVPEGRYLIPYIPEDVYAELRVAFNRRCELVEEQVRIANRMIRWFDIYFPEYRKVYGRIDAKTGIMILKRAPLPADILGIGVDGICQIWKDAKLRGYGPKKAKQIYSAAEHSIGMKGGASVRWKLWQLLEEYELIERQLHDILQLIEGLLYQIPGADKLLKIPGAGLVTVAGFLSEVGDIKRFSDPKQIQKLAGLAVVENSSGKRKGLPGISKRGRSRLRWVLFQLARSMVMFNPEMKAYHQYYTTRKENPLKKLQSLVAISARIARIFYGILKNGTEYDPAMVMKDFNKAVAA

SEQ ID NO: 93485 - protein, 341 aa, unidentified
MGQVSTVGLDLAKNIFQAHGADVSGEVVFRKKLGRGRLLAFFAGLPACVVAMEACAGAHHWGRELTRQGHTVRLIPPIYVKPFVKRQKNDMADAEAICEAAQRPSMRFVPLKQEEQQASSVVFRARDLLVRQRTQTINALRGHQAEYGWIVPKGVPHVERLIARVEDPAEALPPAARTILLVLVSTLRTLDEQIAVLDAEIASRARHDPVARRLMTIPGIGPITATALIALAPSHEAFKSGRHFAAWLGLTPRQRSTGGQQKLGSISKMGERTLRRLLTIGASAVIKQAAIRGAPAGSWLDQMLARKPKMLVIVALANKNARIVWALLAKGDVYRAPGVPA

SEQ ID NO: 93486 - protein, 406 aa, unidentified
MQVVHERCCGLDVHKRVIVACVLSGRERTIRSFGTMTEDLEGVAAWLEECDVTHVAMESTGVFWKPIHNVLEGHAFELLVVNAQHMKAIPGKKTDVKDAEWIADLLRHGLLKPSFVPSRAQRELRELVRYRKALVRERAAESNRVQKVLEGANVKLASVATRVLGLSGRAMVEALSSGVTDPTELADLARGRLRAKHADLQRALRGMVGPHQQMLLAAQLRHLHYLDGEIESLSQEIASREQPDEAALAQLQTIPGVGRRTAEVILAEVGADLSRFPSAGHLASWAGLCPGQNESAGKRRSGRTRKGSAALREALTEAARAAARTRQCYLAAQYRRIAARRGANRAAVAVAHSILVIAYHLLTKGSVYEDLGSNYFDDRDKVATVNRAVARIKRLGYEVTVTPHAA

SEQ ID NO: 93487 - protein, 346 aa, unidentified
MRIIGCDYHPSWQQVCWLETTTGETGELKLDHASGEATRFYRQLPGQALIGMESTGNCQWFVEMATTAGHHVWIGDAARIRASEVRQQKHDRRDAALILKLLLEGRFPRIWTPSGEEKDLRQLLIHRYKLVRLRATTKNELQHLAMNQGVTRKRKLWSKAGEKVLRELALKPWASRRREDLFKVRAMLNEQIESLDAAVLEAAEKNEKAKLLMTQPGVGPITAMAFVLTMGDVSRFPRGKQVASYLGLIPREYSSGGQQRLGSISKQGNRFMRMLLVEAAQIAVRYDPGFRNEYLHRCHSKAKGVAKVAAARKLAIRLYWMLRTNTGYPEVVGVESSSRVALVGAS

SEQ ID NO: 93488 - protein, 355 aa, unidentified
MSQEKYIGMDVHQATISVAVMESGGKLIMECILETKAATILEFMQGVRGTLAVTFEEGTCATWLHDLLKPHVSRLVVCDPRKNALLKDGSKSDRIDARKLAELLRGNQLEPVYHGDHGVRTLKELGRCYLTITKDLTRVMSRIKALYRSWAIPCTGTTVYAARHRSQWLAKISEPGVRLRAERFYQQLDLLQPLRQEARRDFVVESHKHPAVKLLRQIPSIGPIRSALLVALLQTPHRFRTKRQLWAYSGFAVETHDSGEYRYVRGKLLRNRERISVRGLSDNYNRDLKNLFKSTAISASTRPGPLRNFYLGLLAKGMRPTMARLTLARKIAAITLTMWKKGVDFDANQLDQQAA

SEQ ID NO: 93489 - protein, 482 aa, unidentified
MARTKKSTYERLMSGPLNRQQRRELARRLKTEDPGLEIVNRNVAGIDVGNESHFVAVAPSRDTQPVREFGSWTADLERMAAWLKACEVETVVMQSTGVYWIALYDVLETRGFKVCLVNARDTKNLPGRKTDVQESQWLLKLHTYGLLRDSFRPPDEIRALRSLWRLRDRHVKEAARAVQHMQKSMISMNLQLSNALSDISGVSGQAIIRAILKGECDARKLAKLCDRRVKASEEEVARSLEGNWREDMLFERKQAVAAYDFIQVQIAECDQRLLKLLAGLPAREAQTAAIPAAAAVIAKPRKKKKSPAKNAPRLDLETELARICGVDLTSIDGIDIMTAQTIVAELGTDYSRWKDEAHFAAWLGLTPSRDISGGKVVRQQSRKVKNRVATALRTAAQTLLRSDSYLGARYRFLRTRLGARKAIKAMARYLACLVYRLFTHGQAWVDRGAAQFEDRRQQRELAALQNKAAANGFKLVSLNNPT

SEQ ID NO: 93490 - protein, 344 aa, unidentified
MKKVLIGIDFSKEKFDVAIIVKSTSTQEHALFDNKVSGYRKMIKWVNSVVEDVPCSSWLFCGETTGGYSRMMSDWLYAQGYDVWIENALVIKRTFPLKRLKNDTVDAFMIAEYALRFEDRVQLYEPMSQALTELREIFLYRHHLVRHRCSFEVRRIEKRFTQQKSANKNVISQSARHIITEINKEIAKCDEKIKEYIESDDQLSSIFAIVTSMPGVGTINAVSLMVYTNNFTKFAYNPRKIACYYGIAPFGRDSGTSVHTDPRVGFIANKMLKSLLTQAALASVRTCPQIAKYYQRLIERGKKPMVALNNVKNKMIAIITAMVRTGCMYQPDNICLATQSVIVK

SEQ ID NO: 93491 - protein, 339 aa, unidentified
MELYAGLDLHSRNTYIGIMDKTFNRVFKKRVPNDLDQILETLTPFHDQLKGFVVESTFNWYWLVDGLMEAGYGDAHLANPAAIKQYEGLKYSDDQHDAFFLAKLLILDILPEGYIYPKEHRSVRDLARKRMFLVQHKTANILSLKSLLQRSCSIKVSANDIRKLTAEDLEAYLKEEYLVLTAQASLDTITFLKEKIKHLEKAIIKRVKLRKGFRQLLTIPGIGNILAMTIMLEVGDIDRFPKVGNFVSYCRCVPSQRLSDGKSKGVGNRKNGNRYLSWAFTEAAQLGRRYNEPFRRYYNRKVAQANTSLATKALGNKLARICYYVMRDRVPFREELIAH

SEQ ID NO: 93492 - protein, 350 aa, unidentified
MTATTDHYLGIDVHKRQAQVAVLDDEGEVTEEIRVAKADLDEIVQKYAGSSAAPEAGSNYFTIYHRLDEELDVTLANPAKADWLADQKQNNDRKDAKNLARYLRLGKVPESYVPPEEYRRYRALARGRKKLVDKRSDFKNEVSSLLDQNGVTYDESLWSDQGREFLRELTLDDASELLLGQWLEAIDEFTVKIKRMQRRIEEVAAEVDELDTLMSAPGIAAFSGLMIHGEIGEVGRFDRAAEVVSYAGLDPVIRESGDSRREGRISKEGNGYLRWILVQCANTAVHNAEDPYLSQFYWRLRKNRNKPHKVAIVATARKLLVALFNMLSKNEPYDHAHNARIETISTTSGQ

SEQ ID NO: 93493 - protein, 353 aa, unidentified
MQRNSPNVYVGIDTHAETHFVAVIDEHGRRLTDQEFPATAGGYRKIIEFIRANGNALSIGVECTGSYGAEITRQLVGAKFEVIEVNQPSRDQRRRRGKTDQLDAYSAAEAVMSGRASSAPKGRNGLVEALRSLRTVRESALRDRTATINQIKAMLISSPENVRSPYRSLTTPRLVAALAATRPQRQPVTSEECTRYALRLLAKRYQELDEQVRDLTAQIDRLLKAHAPGLMNVFGSGPDTGSQLLITAGDNTARLRSEKQFAALTGSCPRPASSGKTERNRLNRGGDRKANSALHHIVLVRMRYDQRTKDYVARRTAEGLGKKEIMRCLKRYIARQVFPVLVQTLRLNEQGMT

SEQ ID NO: 93494 - protein, 452 aa, unidentified
MTVNAAVLFLCSHPFAKGGTPMNTQQFEVIRPKCAGLDVHKKSVVAAVCTSDPVTLTASYKTKVFNTTNSDIAALRDWLLAQDCHDVCMESTGKYWIPIFNILEPHMHVILTHPKYVKAIKGKKTDKRDAKWIANLFRFDIVKASFIPPADIRVLRELSRYRLKLSYMRTAEKNRYQNSMTISRIRIDCVLTDPFGLSATRIMDYLLSGEPFNEGKCRSLIDGRVKASKDEVMDAVHGYHILEEQKFKMTHAKAHMDFINQSIDEIEAELFLRSRQYDSQIKRIATVSGITELSALFILSEIGADMSVFESDRHLCSWAGLTPANNESASKKKSTRCSKAGQYLKPLLIQCALAAAKSKKEPYFAIKYQRLAKRRGKKKAIIAIARMMLTSIYHMLLNGEDFHPDDYEATVNPPKQKPVILTVENTLQFLREQGADPEILKLIQQQCAAQAG

SEQ ID NO: 93495 - protein, 347 aa, unidentified
MNEEYAGRQVVGMDLHRRRSVLVRMAEDGRKLGTARITNSAAALRAEIARAGENPRVVVEATYGWYWAADTLAAAGAEVHLAHPLGVKAYSYRRVKNDVRDAIDLADLLRMGRLPEAWISPPEIRDLRELTRYRQKLVGLRTSCKDQVHAVLAKLGIPVTCSDLFGTAGSSWLDGLRLPQPYAGKVTSLRQLIGEVNTEITMLTEVTADLLAAHPGYLVIQRLPGIGPVLAAVIIAEIGDVTRFRTSAQLASWTGLTPRHHESDTTVIRGHATKQGSRLLRWALIEAIQHAPAGFPARDAKDAIIARRGRQARNIAKVAAARRLLTLVYYGLRDGEIRCLPEPARAA

SEQ ID NO: 93496 - protein, 459 aa, unidentified
MKKRKSKRTKGQEEVRPFEGLSKVNQNAAGVDIGATEIVACVSDGEEVQLVKSFGNYTVDLQAICEWFRQHEVRTVAMESTGVYWIPLFEELERQGFECLLISSRSLRKVAGQKTDVEDAQWIQTLHSYGLLKGSFRPQGDLVALRTLLRHRAQLVEHRSPHIQHMLKALLQMNIQLSQAVTDVMGVTGQKIIRAIVAGLRKPEELATLRDPGCKHSEEEIAKALTGTWREEHLYVLKQSLELYDFYTEKIEACDAEISRQYGMTRPDWESRELPVVPDKKRHAHSKNAPKEARDIREHLYRINGVDVSLVDGIGVSLAQTVTMEVGSNVGEKFPSEKHFSSWLGLAPKHDISGGKVLNNKTLKTKNRAGQAFRMAANSVKKADCPFGVLYRRLRSRLGPAQATVATAHAIARVVYKMLKYKVEYDPLSVNEYQKQYEEQQVKYMRKRAAKFGYQLIPA

SEQ ID NO: 93497 - protein, 389 aa, unidentified
MIYVGIDVAKDKHDCCILGSEADKLFPVFTIPNNKAGFDELYEKMFSVTDDKTKIKVGLEATGHYSLNLLGSLIDKGLPTCVINPLHTNLYRKGLSLRKTKTDKVDARSIAMMLMTNKTLKPYSDISYHNEELKSLTRYRFDKVQERAKLKSSVARLVNILFPELEKLVPSLHMASVYSLLSKLPGASYITECHLTHLKNLLETASKGHYGRDMAITLRNTARDSIGSVIPAKSMELKHTIHLIKVMTEEIAEIEDSIKSIMDTCNSPIMTIPGISYRMGAMILAEIGDFTRFNYADQILAFAGLSPSTYQSGQLDSSYSHMEKRGSRYLRYALFNAAKFVCKWDENFGAYLSKKIGEGKHYNVAIGHATKKLVRTIYRMELTGEAYRR

SEQ ID NO: 93498 - protein, 338 aa, unidentified
MKLYGGIDLHSNNSVLVLIDEEDRVIYEKRVRNDLALILHELTPYRKKLTGLVVESTYNWYWLVDGLREAGFGVHLANTAAIKQYEGLKHTDDRHDARWLAHLLRLNILPEGYIYPREARAVRDLLRRRHRLVQQRVSNLLSIQNQFARLGMNGFSAERLKRLHDDELDGLIADGNVRSALAANLALVRCLNLQIERLEREVLGQVKLAAQYEPLLSVTGIGKILALTIMLETGEIGRFAKVGRFASYARCVNAQRFSNEKKKGSNNAKCGNPYLAWAFVEAANFAIRYSPRIKRFFDRKCARTNKIVAFKACAHKLARAAFHVMRDRVVFDETRAFA

SEQ ID NO: 93499 - protein, 368 aa, unidentified
MDAPLNGVNAPNWLTHTQLKGTSIMKISTLSIDLAKNVFQVAGFNHHHKRECNKRLNRPKLNAFMANAPPCRVVMEACYSSHYWGRVFTSYGHTVDLISAQHVTPFVRGNKNDSNDALAIYEASLRPNIKFVPIKTEAQQEILMLHKIRERLLQNRIAATNQLRGLLVDFGYVFPVGIKAFQQGIIALESDSELRPQLRIMVSDIYTEYKTLVKRIKAIEAMLTAHVERDTNAKILHSIPGVGVLNASAYEASIGNGQAFKSAKELGVWLGLTPKQYASGDKSKMSGITKRGNSYLRKQLIHGARALIARSHHKTDALSQWINQLREKKHFNCVVVATAHRLARLMWILLTKQTLYSPQFVQNTQKDA

SEQ ID NO: 93500 - protein, 405 aa, unidentified
MNAVGIDVSKGKSTVTIRRPGDVVLMSPCDIPHTQSAINALIEQIKSLDGETKACMEHTGRYYEPVADWLSDAGIFVSAVNPILIRDFGDDSLRTPKTDKADSKKIARYALDRWAKLKQYGSMDKTRNQLKTMNRQFGFYMDQKTAMKNNLISLLDQTYPGANGFFDSPARSDGSQKWVDFVYTYWHVDCVRSKSLQAFTEHYQKWCKRNSYNFSASKAEKIYQRSSDLIAVFPKDDSTKTLIRQAVTMLNTASQTVESLRLKMDQTASLLPEYPVVMAMNGVGPSLGPQLMAEIGDVTRFTHREALTAFAGVDPGKNDSGKRNQKSVRTSKKGSPSLRKTLFQIMDGLIKRSPMDDSVYAFMDKKRSEGKPYYVYMTAGANKFLRIYYGRVREYLASLEESKES

SEQ ID NO: 93501 - protein, 429 aa, unidentified
MNSTQNKKIEQVKETTMIVGIDVGSEKHYFRAFHWRGIELTRKPVAFSNSMEGFNSFCNLIVELMKKNELKEALVGIEPTGHYWFDLGQFMGEKNIKFVMVNPHHVHKTKELDDNSPSKNDRKDPRVIAGLVRDGWYFYSYMPTGVYAELWNASNRQFVLIEEQTRAKNRLQKWITVYFPEYKGIYTHIDAKGGLLVLKQAPTPEEIVRLGVEGIIKIWKDAKLRGNGHKKAMLILNAAMKSIGLKAGLTEARMEIQDLIEDYELQTKRLERVNDLIKELCQQVRYADKLLEIKGIGITTVAGFIAEVGDITRFDSTKELQKLAGLELVADSSGKHNGKTKISKRGRKRLRYLLFEAAISVVGKNEEFKEIHRYYTTREKNPLKKMQSLIAVACKLIRVFHVILTKGISYDASKMLKDIRRPGEQLKAA

SEQ ID NO: 93502 - protein, 335 aa, unidentified
MSSLVCGLDVHKDSVYATVMNYGGEIVDKRKLTNDEVVSYLGRYPIDKVAMESSTSIVPVYRALRGKGYEILVSHPKKTRLIAESRIKTDRVDSWALTELARLDALPLSYMPPDDIAALREKVRRRAFLVRMRSKLKVKIRSQLAMNGFTPPSEYGLFTSKGLEWLRSLQLDAVDCYLPVIQTLDIQVGKLSRELRGLASGDEDVRLLMTIPGIGYYSALLVKSEIGTVDRFPDGEKVCSYAGLAPSVSISGRYRRYGSITKEGSRWLRWIMVECVHTHLKYDTSITRAYHAIAERKGAQIAKVAAARRLLMCCYSVLRNREPYHDPAGSYQASS

SEQ ID NO: 93503 - protein, 354 aa, unidentified
MSAQHFIALDTHCEFCEMVTVSDGGKVTKRERCETTIPALVGIIKGVRRPRLLTFEEGPLADWLARNLREHVDRLIVCEPRRNALIAKEGDKDDPIDAERLAQLLRGGYLKEVHQAESLDRTVLKQHVSFYHDRVRERVRQGHQLVAQLKRHGVFASIKDVVDPDERARLWKKLPNRKVLHNDLGLVLKVYELLLEQEAELRSELIRLARRQEPVRRFEQLPGIGWIRALTFFVYLDTPWRFPSKSALYRYCGIGLERRHSGKGPMRIRLTHGGNRRLKDVLLGAAKSAAVRGDNPFADKFTYWTLQEKMHPSTARRNVARAIAGTLWSLWKNGSQYDPALVRGVGRPSATTPG

SEQ ID NO: 93504 - protein, 553 aa, unidentified
MSRGRLFLGRLLSSVGPWVHGQNAEGTQRHNEAAGTGVTGRVCSGAHVRARSSSVAPGDVIRTVVTLAAERQACDPDWESPYAHGSDPGPRKIDQELKMPGKKLAKKNKRVALPVLNPDAAGIDIGATEIYVAVPANRDPEPIRMFATFTQDLNHLADWLQQCGVRTVAMESTGVYWIPLMQILEARGLEVYLVNAKHVKNVPGRRTDVSDCQWLQYLHSVGLLRASFRPAPEICALRSLLRHRDSLVEMATSHVQHMQKALDQMNLQIHHVISDITGTTGLAILDAILAGNRDVHALAALRDPRIRASQDTIAKSLVGDYRREHLFTLQQSLELYREYQRRIATCEAEMQRLMNALETKADPAVSLSAAKDSVKKCKVMVPAKALALREEAYRILGVDLTTIPGISVLHVQTILAELGGDVSKFRSAGAFSSWMGLCPDNDISGGKVLWTGTRKVKNRVAVTLRMAAQSLQKSESALGEFYRRMRTRLGAPKAITAAAHKLARIIYHMLKNREPYDESIFARAETRHRQRRENRLRALAQALGYTLAPVPAG

SEQ ID NO: 93505 - protein, 411 aa, unidentified
MRRVIGIDVHRTFGEVVFWEDGKLRHAGRVDMTRTALEGFRKTLLASDEVVVEATANSMAVSRVLVPFVARVIIANPLQVKAIAQAHVKTDKIDAGTLASLQAAGYLPQIWTPDAETERKRRLVARRYQVVRHRTRLKNEVHSILHAHLIPKCPHADLFNARGRAWLAAQQLPDDERAAIDRHVRELDRLAEDLALLDREIAQDAMDDPAVNRLMTITGVNLAVAAGIVAAIGDISRFNSPQKLVSYFGLNPRVRQSGLGAAHHGRISKIGRSHARAMLVEAAWAAAKAPGPLHAFFVRIRARRGHQIAAVAVARKLTVLCWHLLTKGEDYLWARPALVANKTRAMQLQAGHPQQKGNRRGPAYAYNIKALRDREMVIAAQAERNYEQFVSQWKARRPRAGARAPQFGKTT

SEQ ID NO: 93506 - protein, 389 aa, unidentified
MEARTVNNLPPAATHDDAVRCLLAIELSKKSWIVAVNTPLSDKVSRHTLKPCDGKELLDLCERIRTRVARETKQRVEIVSCYEAGYDGFWLHRLLEAHSIRNYVIDPASLQVDRRARRAKTDRVDVERLLRSLMAYLRGEPKVWSVVRVPSVAEEDDRRLHRERGRLINERIQHVNRIKGLLAIHGIYEYQPLRRDRMKQLERLRTADGRSLPPRLMAEILRELQRLELVIGMIKTIEAERDAIASAKTETEPTSAKQIQDLAKIKCIGPEFASTLVGEVFYRSFDNRKQLASYVGLTPAHFQSGATCRDQGISKAGNAKARTVMLELAWLWLRHQPDSPLSVWFRERVGKLKGRIRRITIVAVARKLLIALWRYLETGLVPEGAALKV

SEQ ID NO: 93507 - protein, 355 aa, unidentified
MQSNKISFKGQNIYVGIDVHLKTWHVTTLTESGYKYSFAQHSDAKELFDRLNKKFPGAHYKSAYEAGFCGFSVHYALSELGFENIVVHAADIPTTGKEKAMKTDAVDSEKIAWSLKRDELRGIYIKDKCFMDDTNLMRLRQRFIMDLSRQKNRTKHLLYTQGVTYPERFRNSRTHWSRNFMKWLREEVELLSEEKLALTLLCDQVENTRKAILTVTREIRRLSTTEKYRENFSLLASVPGFGLITSMSMLTEFDNDLTRFPNERKFVAMLGLIPTCHDSGEKKVCGEKTNRGNKQLGPLIVEASWVAIYRDYQLGAYYSSCCQSMKPHKAIIKVARKLACRAYAVLKTKTCYVLS

SEQ ID NO: 93508 - protein, 273 aa, unidentified
MKFCGIDLHSNNSVVVVSDEEDRIVFNKRLPNDLAQIRAVLEPHRPDLAGVVVESTYNWYWLVDGLMDTGYQVHLAHPSAIKKYEGLKHSGDFADAAYLAHLLRLGLLAEGYIYPREERGARDLARKRMQLVRYRTAQILAIEGILMRQTGTVPGIGDVLATTIMLEAGTINRSTQVGNFSSYCRCVDSLRESNGKRKGEGNTRNGNKYLAWAFVEAANFALRCCPQAKSFYDRKKSRSNRILALKALAHKLARACYHMLRDQKPFDVHLCFG

SEQ ID NO: 93509 - protein, 312 aa, unidentified
MAHRVVDAGIDVSKAFLDVALWPTREITRVSRDAAGLNELAAWLTLHEAGRIGVEASGGYEREVIDTLQALGFEVLLLNPLRVRRFAQAKGRLAKNDRADARTIAQFVSVMIDAPQPARRRELDPLVEHLTLRRQLLDWITDCTNQLEHLKLAVLRSTIERQKAKFESVLTTIEAKLAKLIAEHDDWSALSRRLRTVPGVGPVLSQTLIALLPELGTLSGRAITSLVGLAPFDRDSGKYAGERHIQGGRAAVRNVLYMAMLSAMQHNPLIAAFARRLVGKKFKVIMVACMHKLLVMLNAMVRDGADWRTNAA

SEQ ID NO: 93510 - protein, 411 aa, unidentified
MQVVYTHCAGLDVHKKTVVACVITPKESGQWQKQIRTFGTMTKDLLNLSDWLTSHNCSHVAMESTGEYWRPVFNILEGNFEVMLVNARHIKAVPGRKTDIKDSQWIAELLQHGLLRPSFIPPVEQRDLRDLTRHRSNFIRERVNLVNRVQKVLEAANIKLASVASDVMGVSGRAMLAAIVEGNSTPELMAGLAKGTMSKKHDLLVPALEGRVRPHQKFILAQLLAQIDSIDSSIALFDQQIEEYCHPFDQAVELVDTIPGIARRTAEIIVSEIGTDMSRFPSAEHLAAWAGVAPGNYESGGKKLSDSTRKGNRVLRTILVQAAHALARTKTYLAAQFRRLSARRGKKRAAVAVAHSILVIAYHLISRQEPYKDLGADYFDKQRPESVKKRLIKRLEKLGYQVTAQSVEVTV

SEQ ID NO: 93511 - protein, 315 aa, unidentified
MAMRVTLEKPIIGVDVAKNELVIYHDQYDRLEAIPNTKVTITQWLKALASSCAIAIEATNVYHVLFADAAHEAGCDVYMVDGYQLSHYRKGVNIRAKTDAQDARLLARYLKNELDELRPWIPASPLYRQRLSLFRRRAALVQARTGLVQSWTNEPFLRTAFANQVNSMKRFEALVEKKIRDVLQEAGLMRQVNRCMKVEGIGFLTAARLVTSFQRGEFSGANAFIAFLGLDLRVSKSGQSDGPRRLTKRGDPEARRLLHNAAMSGSRTPAWKPFYEEQRKRGFSTTQALVMLSRKLARVVFALLKNQSEYQTKVA

SEQ ID NO: 93512 - protein, 359 aa, unidentified
MPMLADHIDAVVGVDTHRDTHHVEIALPTGTPIATCSITNDASGYAQLLAWILEHAPGSRIAVSIEGTRSYGIGLARAATAAGLLVLECEQPHRKARRGKGKSDPIDAHLAVLSALRLDTNQLPIPRADGDREALRILLSARHDLTVTSTAQTNRLRALLRDGDDTDRQLARAALTDATLTRLARRRLPRDASREQAIRHAEIRRLALAIHDARQALKDNRVQLQSIVEDLAPGLTRRPGIGPVTAAQAIVSFSHPGRCRTDAAFASLAGTCPIPASSGRTVRHRLNRGGDRALNRAIHTIATVRMRDCPTTQAYIARRTAEGKTIREIKRCLKRYITRQLYRTLTATMTPTTNNPLVA

SEQ ID NO: 93513 - protein, 343 aa, unidentified
MQIAFLGIDLGKNRCSVAGLDASGRVVLRRRMHRDGVVKLAAQLPACVVAMEACCGAHHLGRVLRGQGHTVRLMSPEYVRPYVKAQKNDDRDAEAIAEAATRPTMRFVELKSEEQLDLQTLHRARDRLVGVRTALINQLRGVLLERGITFPQGRRKLELRLETMMAEEAVSLSAGTRLLINDMRAEWRELDGRIAAFDDEFAAQARSNEAARLLTTIPGIGILNATALTAAIGSGRAFGRARDLAAWLGLVPKQMTTGGRPRLLGISKRGNVYLRKLLIHGARAALPSLSRSETPLGAWLRGLLARAHKNTVVVALASKLARIAWAVLRTGQAFEMRVAAAAG

SEQ ID NO: 93514 - protein, 446 aa, unidentified
MMPNMRVMLYARMCSAISAATLGSVFVTSTCGFRSHGEVDSDRRSGRVRLQTLTLETTMQVIGDRPEAASAIRTNLGAIFVSLELSQSTWLITSLSPGSGEKMSKHVVHGGDIAGLLERFARLQEKARARTGRNFPIIVIHEAGLDGFWIDRVLKNEGIESHIVDPASVATSRRRRRAKTDKIDGEALVRTLLAYKRGEPRVCAMVKAPTPEEEDRRRLCRERKVLITERVKHVNRLKGLLFSQGVCGYEPLRRNRRRRLDELRTGDGRPLPKHLKAQISRELDRLELLLEQIKVVETERDALLAAQQIAAPTSAAMLLAIKGIGPDFAAILWSEGLFRHFDNRRQIASYAGLAPTPWKSGSIDREQGVSKAGNPRLRTTLIQLAWLWLRHQPQSALALWFEERVVRNGGRLKKVTIVALARKLLVALWKYVTAGVVIEGAVMKVA

SEQ ID NO: 93515 - protein, 338 aa, unidentified
MEQVITIGLDLAKNVFQVHGIDAAGKVLVRRQLRRGDVLRFFGGLPRCLVGMEACATAHYWARELTKLGHTVRLMPPAYVKPYVKRGKTDVADAEAIAEAVTRPTMRFVAVKTADQQAALMLHKVRDLLVRQRTMLINALRGHLAEFGIVAARGPGGVTAAIISLHEAQDSLPELARVALHGLIDQLRIVRGEIARVEKRIVAWHRASNASRRLATIPGIGPITASAIAAAVPDATLFQSGRQFAAWLGLTPRAHSSGGKERRVGISKQGDGYIRRLLVTGATAVIRLARQGNASKSWAAKLLERKSARLVSVALANKTARIAWAVLARNQSYVAPAM

SEQ ID NO: 93516 - protein, 411 aa, unidentified
MQVLYPRCSGLDIHKASIAACVLVAEGQTKQKHLLRCRTMTCDLLALADWLAGFGVTHVALESTGVYWKPIWNVLEGKFELLLINAQHFKAVPGRKTDMKDCEWLAELLQHGLLRASFVPPTEVRDLRDLNRNRAILVQERASVSNRIEKVLEDANIKLASVASHVLGQSGRAMLHAMSTGEEDVDKLAEMARAKLRNKIPELRVALTGKVRDHHRFALQQWLQQLKAVEKQIAEFETEIEQRNRPFQAAIELLMTIPGVDRITASAFVAEIGTNMAQFPTAQHLASWAGICPGNHESAGKRLSGQTRKGNPWLRRVLCQAAWAASHTKNTYLSAQFHRLAARRGKKRAIIAVAHSILVIAYFLLSRGERYRDKGSDYFDRINSEGLKRHLIKRLENLGHRVKLEPITAGA

SEQ ID NO: 93517 - protein, 329 aa, unidentified
MMKQNIIFGIDVSSKSSTVCVVIDRIKQGETFKITNDSFGYQDLLDRLNQYLITPLVVFEATGVYSLSLQAFLEDYHIKYLKLNPLKAKKLMDNNLRHNKTDKVDAYRLALIQFNAPQKLRAPQPKEYHELQNASRYYEELTQALIINKNQLHRNLQSTFPQIESILSTSSGRVYWTIVSLFPHAQYVLNHNENQVFQSLLAISGIGRQRAHYLTTRLYALARQAYPYDNESSITIRAIQRNIANLLSLSAERDNVINYMEKLAMQANARSLNIYESIPGIAKTTAVRLVAELGDLRRFDTSAQIDAFVGIDPGRYQSGENNQTWQSLS

SEQ ID NO: 93518 - protein, 350 aa, unidentified
MMIIGCDFHTRYQQIAMLDEATGELVERRLDHESGEAQAFYRDLQGPVRVGIEATGPIRWFQRLLAELGHELWIGDSAKIRASEVRKQKTDERDARLILDLLLAKRFPKIWVPTPAERDLRQLLWHRHKLVCMRTMLGNQLHALALSEGLCRKKKLFTQKGRVELVHLGLAPWASRRREELLKLLDQLEPAITELDRAVMEQAHRRADAVLLMTHPGIGPVTSLAFVLAIGPITRFARSKKIASYLGLNPSEESSGGRRRLGAISKQGNTMVRWLLIEAVYPAVRKDPALRQDYQRLKFRRGHAVAKVAIARKLAVRMYWMLRSGAEYARLVRRQGSPGATLVDASSSLG

SEQ ID NO: 93519 - protein, 360 aa, unidentified
MTTTMTWVGMDVHARSTEAAAIDVLTGELRRARFGSALEPVVEWLDALPQPVHACYEAGPTGYGLYRAAQAAGIRVDVVAPSKTPRAPGDRVKSDRKDAQLLVRLLMAGALTAVAVPPAEFEAARDLTRAREQVRRDLMRCRHRVSKLLLRYGRVYEGGSTWTQAHRRWLASQGFAHTASELAYLDALAAVDGLASRKAALEERLSRLALEPQWWATVARLRCFRGLDTLSALVLQLEVHDWERFRRAPQVAAWLGLTPSLSQSGESTSQGPITKTGSGYARRILVEAAKHYARAPRIGVTLANRQTGQPDHVLQIAWRAQHRLYRLNRRLRERGKPANVVTVALARELSCFLWAAAMAP

SEQ ID NO: 93520 - protein, 394 aa, unidentified
MNFFIGLDVSKEKFDACGIGDTGEKVFTLTCSMDREGFEKLIGYLPKDKTSFLLGMESTASYHIALFTYLAAQDYKVVVINPLLINNFSKRSLRKTKTDKKDALTIAQFLLQEKETLSVKNPDYLITELKDIVRRREKLADHMTSLKGDMKRILSVTFPELEYITGVFTKSTLRLLAQYPSAHAIKEAGHARVDEVFVNQSRGNKPRATIKTLMDAATSSVGVTSPAKELTLRQEASLLMYVEEQIKETTKLLMSLLNERMKEDTDILCSMKGIGENTAMNFLIEMGGAIEIYENDKKLIAASGLDPSTYQSGKYEGKSRISKRGNRHLRRVIWLMATKVIINNDLFKTYFKKRKKDGLPYKKAVLATAHKLIRVIYSMLSRKTCFVERGIKYS

SEQ ID NO: 93521 - protein, 327 aa, unidentified
MMFIGIDISKEKIDLSWLRDQLTNKIKTKVFKNKHQDFEKIEKWLLNTTKSVASELVITLEPTGVYHEALMYFLHEQGFNIILANTGKAKKYADALNIIHKTDKSDATMLAHYGCAKHAVVDYWQPEALEVRELKALIRRLDALESNRQREANRLEASEFSNVSARVRQSIKVTIAFLDDEIKQLKSDIDDHIDNEPGLKRNRKLLESIPGIGHVLSRELTYLFAAKKFNKAKEAAAYCGLIPRHNESGKLKGRTTISKLGPARIRCKLYMAAIVAGQWNKRIKRHKLTLINNGKTPMQTVCANMRKLIHICFGVIKNQEAFKLQVS

SEQ ID NO: 93522 - protein, 402 aa, unidentified
MNAVGIDVSKGKSMVAIMRPFGEIVSAPFEIKHTASGINSLVELINSVEGESRIVMEHTGRYYEVLAHQLSKANLFVSAINPKLIKDFDNDSLRKVKSDKADAVKIARYALDKWQNLKQYNVMDELRNQLKTMNRQFGFYMKHKTAMKNNLIGILDQTYPGVNTYFDSPARSDGSQKWVDFASTYWHVDCVRKMSLNSFIDHYQNWCKRKKYNFSQSKAEEIYGKAKELVPVLSKDAITKLIIKQAVDQLNSASTTVESLRTLMNETASKLPEYPVVMAMKGVGTSLGPQLMAEIGDVSRFTHKSAITAFAGVDPGVNESGSYEQKSVPTSKRGSSDLRKTLFQVMDVLIKTHPQDDPVYQFLDKKRAQGKPYYVYMTAGANKFLRIYYGRVKEYLSSLPES

SEQ ID NO: 93523 - protein, 351 aa, unidentified
MFKQVNLDLLTIKSKVMEFTYFIGTDVSKNELDFAVMRGKTLLFHKEIANTEQAINLFIKDLIKQPGFDWAGAVFCMEHTGIYNNHLLASLHKKKANIWLESAIQIKRSSGNVRGKNDKVDAIRIADYAYTKRDKVRLWNPKREVIQQLTDLTVTRTRLIEAKKMLKTPLQEQDSFSAKRVIKQSAVVCSHTLKAIDADLERADNAIDGLIAKDPELKRLFSLVTSVTGIGKVTATQILITTNEFKNISNPKQYACYAGVAPFVEESGIFKGKGRVSHMANKKVKTLLHMSAIVAIQYNQDLKQYYQRKVNEQKKNKMSVINAVRNKLILRIFACVNHNSYYENNYQKLLA

SEQ ID NO: 93524 - protein, 350 aa, unidentified
MTIKHYIGFDVHKKTVSYCVKAADGNILEEGILRSMPMVLREWAGKRQEPWHGAMEATLFSGWVYDALKPFASALEMGHPSMMKAISAGKKKNDRLDARKIADLVRCNLLPACYVAPVEMRELRRLLRYRNVVVAQAVRMKNKMSGLLMEVGAEYSKRRLHGKKYFSELLDQLEEVPESVKDWLRLSRGSVEMFETTQRQLLDRLQKDPLVVKRVKLLRSIGGVGEVTALTWALEICDPHRFHCIADAVSYCGLSSALVSSAGKQQRGPISKQRNAHLQTVLIEAAKLAPRWNRQLAELHDREQNRGNRNRATLAVARKLVAYLLAVDKSGQAFQVRNSPAAQPELDKTV

SEQ ID NO: 93525 - protein, 316 aa, unidentified
MDGSITSFVGIDIAKHSLDVCILPERKQFTVPYDTAGLKQLRSQLPDMGSCLIVVEATGGYQRRVVAELANADHLVAVVNPRQVRDFARGLGILAKTDRLDAQVIARFGQHVRPRTLANTHEKQEELAQLVTRRRQLVDLRTAEKNRRETLTSKPVRKSVQQVIDLLNKQIERIEKEILALLESDDEWKDKGSIIQSAPGIGSVTVASLLAELPELGFLNRQEIAALVGLAPFNRDSGRFQGKRSIWGGRASVRSVLYMAALTARRCNPVIRAFAQRLEAQGKPFKVVIVACMRKLLVILNTLVKTNSHWNPNYAQ

SEQ ID NO: 93526 - protein, 373 aa, unidentified
MDSNATTYVGLDAHKRTVAVAMLLPGRSEPVEWQETHDATVARRLARRLVREAPGPVVCCYEAGPTGYVLQRRLRAEQVMCQVVAPSLIPVRPGSHIKTDRRDARKLAGLLRAGLLTEVHPPSEEQEALRDLCRCREDVQRDLLRARHRLSKFLLRRHCIYTQTKHHWGTRHLAWLLTLRFEDSVSQATFDSYLLAIQQLDERREQLEAQIAEFGTQEPYREPVGWLRCFRGIDTVTAKSLVAELHDFRRFSSPRQLMSYLGLVPREQSSGERERRGPITKAGNGHVRRLLVEAAWHNRSRPALGLPLRQRRQGQPARVIAIADRAQERLHRRFVRMTFKGKPSQKVVVAMARELVGYLWSVLYWQPEAPSAS

SEQ ID NO: 93527 - protein, 364 aa, unidentified
MFHFTTLFIGMDVHKESFSLCYYDMMTNQFKHSTKVGPNVSYIVNYVNELRRLYGQDAEVLCGYEARCLGFTLYHQLQAYGIPCIVMAPTTVMKEASKRVKTDKKDAAQLAKALAFRSYWPVHIPTVEDEQVKEYIRMRTDHKVALKKIKQQILAFCLRHDFRYTEGSSNWTQKHVRWLHSLNLDGLYAEILTEYLLTYEKLVDQIERYDARIEQLGQSDSYQEKVSQLSCFIGVKTLTALSIVTEIGDFNRFATAQHFASYLGLTPSENSSGDKERRGAITKAGNSHVRRLLIEAAQSLAKGTVGYKSKELKRRQSGNRVEVIAYADKANERLRRRYRTLVLGKNKKQNVAKVAIARELSGFI

SEQ ID NO: 93528 - protein, 337 aa, unidentified
MRLYAGIDLHSSNNYLGIINEEDKRIYKHKLSNDLREVLNALEPFKEELEGVVVESTFNWYWLVDGLMGHRYRVHLANPSAIKQYEGLKQVDDVYESFFLAKLLRLGILPEGYIYPKEERPLRDLLRKRLQLVRHRTSHILSTQNIITRNTGKKMGSRDIKKLDEEWVSDLLKEKHLLLSVNSSVGVIRYLTDKIKQIERVVKDEVKLRKEFKGLLTVPGVGDILALTIMLEVGDMGRFKEVGNYSSYCRCVRSIRISNEKKKGEGNRKNGNKYLSWAYVEAANFAVRFYPRINRYYQRKKAKTNGIVAIKAISNKLSRASYYIMRDQVVYDSKKLF

SEQ ID NO: 93529 - protein, 315 aa, unidentified
MEAMIERCAGLDVHQETVVACVLFGPLDKKPKTSIETFSTTTTGLLALSDWLTTLQVSDVVMESTGVYWKPIWNILEDSFHLVLANARHVKNVPGRKTDVKDAEWLAKLLRCGLIESNFVPPEDIRDLRDLTRYRKKLIHHRTSEQNRIHKILQDANIKLTSVLSDIFGVSGRRILEAILNGEKIETDGLRKMVDWRTKASITDIASAINGRIRRHHRDMLRYHWEHMSYLEKAIEELEKQIDQLLSPYRKEVELLDGIPGVNKAAAATFIAEMGVDMSVFKSAKHLASWAGVSPGNYESAGKKKRVKPHKVTKL

SEQ ID NO: 93530 - protein, 315 aa, unidentified
MDEPRRVTNCVGIDVSKDRLDVHLRPSGEAFAVARDGKGLEALVDRLAAIDVSLIVVEATGGFETTVAAALAAAGLPLAVVNPRQIRDFARALGKLAKTDAIDAEVIALFAEKVRPEARPLASQEARALGELVGRRRQIIEMIGMEANRRRQAAVKRLVKKIDRHLAFLEKELTDVDADIDAGVRASPAWREKEDLLTSVPGVGSVTARTLIAELPELGQLDRRKLAALVGVAPLNRDSGTWRGHRMIGGGRTSVRNALYMAALAATRWNPVIRAAYRRLVARGRPKKVALVACLRRLLTILNAVLRDKSPWQTT

SEQ ID NO: 93531 - protein, 424 aa, unidentified
MHIRKATRMKNWKDLTHYAGFDWAKDHHSVVIVNAEGQIVADFEFAHSLEGWKSFVEKTSGWPYLGVAIETSQGAAVDQLLQREYSIYPVHPVSAQSYRERKAPSGTKSDHLDAWGLADALRVDGHGWKALQPMDPMTQQLRLLCRDEVSLIEQRTALVNQLQQALAEYYPAALEAFDDWTDAFTWEFVLAFPTPQVLVTAGKRRWEKFLHTHKLWRPETAEKRLKLFAQADQFKASEPIIRAKSQLAVSLSKLLCTLRQQLKLYRKQIEALFRDHPDRDLFGSLPGAKKILAPRLLGAVGNDPDRYGSQEVLQCIAGTSPVSYQSGRINKVRIRWSCDKFLRHTVHLWADCFRKASAWGQAYYQKKRQEGMSHACALRCLGQRLLKILFRMLKDKTPYDAELHALNQQKHGSWVLKLVNTPAT

SEQ ID NO: 93532 - protein, 394 aa, unidentified
MFFVGIDVAKRKHEAVVIDDKGRIVQKSFSFPNSLSGYNSLISCVKRITSTRKDIVFGMESTSHYWLALYSHLIKDGYTAHVINPIQSDAFRGLFIRQTKTDPIDAVIIAEVIRFGKYSSTHFPQHKILALREMCRNRLYMVDAISDLKRKTIALIDQVFPEYDQLFSDTFLVSSIEVLYRYPTPKKLLHIRRNTLTNLLIKTSGGHFGSAKADEIIHAAKNTFGIDDPYDVYADLIKTFIKQIKFIQKNVSEIDQKITAIMDEIASPITSIPGIGVTLGAVILSEIGDISRFKSADKLAAFAGIDPSLKQSGDYSSIRNHMSKRGSPYLRRALWMACIPATQVDPMFHAYYLKKRSEGKSHMKTMGHVAKKMICVIYAVLRDNKEYQPVLTAA

SEQ ID NO: 93533 - protein, 403 aa, unidentified
MHAVIGIDIDVSKATSQVAVAVDGKVVQNFKITHDVFGSNQLNSVIMQFNTFPDIVFEATGVYSRRLKTFLEAHNYPYTYLNPLTAKKQLDQLRPNKNDLNDAKHLAETQFILKRAKSYVQNPIYIELQDMSRFYQQLNHDIVSAKNRLHRLLQLTFPEIETLFSTTDSQQYWEIVSLIPHATMAKHSRQTLSDTIQSSVSRQIGVARLTRLVDKLVALGSLSAPAVAVASYNVTEVRYYAQRLIALSQSKANVLATMVDQTKDLPEYDIYQSILGFSDKTVVSLIAELGDLHRFATSNKLNAFVGIDLRFNDSGDYKSSGFITKRGNTIARKVLFKAISNIASTATYGHQNHINDWYQKKKQSSMSKGTKKIAIGAMSRLLRTMHYRVLNNQLYDYDTASKR

SEQ ID NO: 93534 - protein, 376 aa, unidentified
MENDSTLYVGLDVHKDSITVAYAIGMGDVELLGKIGTMQIDVDRLCKRLLAKSRRICIVYEAGPCGYGLYRRLVEKGLDCMVCAPSLIPRKPGERVKTDRRDAIKLVRSLRAGDLSAVHVPTVEDEAFRDLARAWSAAREDLKAARCRLKSFLLSHGVHYLGRADWGATHRRWLSTFSFDSAWQQLAFDEHRRTIEDRLAQCERLEAALREAVANWRFYPAVLALQSMRGIQFTSAVGLASEMGDLSRFEHPRQLMAWLGVTPSEHSSGSKRRQGSITKTGNSHARKMLVESAWSYRHPARVSIDIQRRHEGIPKAIVDRAWDAQLRLCRRYRKLVARGKSAHVAIIAVARELAGFIWDIGRLGMSLASPQCSQST

SEQ ID NO: 93535 - protein, 351 aa, unidentified
MSRTTSAVAASTIGIDTGKHTLHLIGLDEQGMIVLREKLARGRIGGRLANVPPCLIGIEAGMGTHYVARELISLGHDVRQVPPAYAKPFRQTHKNDFRDAYAIAEAVRRPSTRCVPVKTDDQLDLQALHRVRSRLVGQRTAVINQIRGFLLERGIAVRQGLRFLRQQLPEILAKRIDVLSPRMIRIVEDLSGDWRRLDERIEQVTEEIEVLARESESCRQLMTVPGIGPLIASAMVAAIANGAAFTKGRDFAAWLGLVPKQMSTGDRTILGRISKRGNRYLRTLFMQGARVILLRPANWAKHSFGPWLTTAAKRLHHNVLATALANKLARIAWTVLAQRRNYETRVIAEAA

SEQ ID NO: 93536 - protein, 388 aa, unidentified
MYYAGIDVSKYKHDCFIQTDFGDVINAGFSFQNTAEGFGLLQAELEKYGRGNIRIGLEATGNYGINLKLFLEKIGFDFMEINPLLIKEHIKSNTLRKTKTDKLDAMAIADYVASKKYQQHPTAFYPKFALKQLTRLRSSLVTGRSRYMVQLTNVLDCIFPEFKPLFNNKFSVTALYILANYPSPEAIANMNSRSYDILRRKSRGRFSMDKFVRLKALAKNTVGVFNECYRSELETLLDLYSQIDAKIEELETEITEIITALNPPTLSIKGIGAVSAAVIVSEYGDFSRFENPNKMLSFAGLEPGYFQSGTSEHKGRMVKRGSSQLRNALMNCARAIPLHNETFAVYYRKKIDEGKPYNVAVNHVAKKLVRLIFALETKGTMFDPDTLK

SEQ ID NO: 93537 - protein, 428 aa, unidentified
MNCNTQNAKIASITEKTLIVGIDVGSETHYARAFDWRNYEYTRKPLEFSNTEAGFQAFKAWMEDIAAKHGKTAVIPGMEPTGHYWFALGKFLQDSGMRPVHVNPHHVKKSKELDDNNPNKNDRKDPKTIAALVNEGRFSYPYIPTGIYAEIRSLSNLRFQTQEELTRIKNRLARWFAIYFPEYKDVYGDYKAVSGRMVLKEAPLPEDIRKLGVEGVNRIWRDAKLRGAGMKRAKTLVSAAEHSVGSKEAPGAARMELKNLLNDMDVYTSRLEELLVKIEEKLKEIPYVDKLMGIKGIGLATVSGFIAEVGDIGRFDNPKQLQKLAGYAIVANDSGKHNGESRISYRGRKRLRYVLYEAAISLIGKNAEFRAIHEYYRTRKENPLKKMQSVVAVACKVLRIFYTILTKGVDYDAGKLMGNIRRPQSQAA

SEQ ID NO: 93538 - protein, 328 aa, unidentified
MAKPITICAGIDTGKRKLDVALDGSKEQLQVENTAEGHKVLLRWLHQHRVKRVGIEASGGYEQPVVFELRRKHIVVVVFQPAQVRAYAKFQLQRAKNDKIDAALIAACTAAVRKIHAAPDPRLQPFAEQLTMIDQIGEDIARLKNRSESCRDAQINKLWKADIARLEKREKAALKALVTSIRKHPDLARRLDLINSVEGIGLPTAVAILVRLPEIGRITREQAAALAGLAPYDDDSGEHVGVRHIEGGRKRLRRALYTASLAASFRWNPQLIALYQRLTAAGKQHKRALVACARKLLIFANTVVARGTPWCGQPPAAKASPTTASSVS

SEQ ID NO: 93539 - protein, 423 aa, unidentified
MPYRIAGIDVHKKKLAVVVADVEVEDEYQFERRWYGSNPEQLQRLAEWLIQQQVEEVVMESTAQYWKPVWGALEQYWKPSCEKREGASRMSGTLHLAQALSNRGRRGRKRDFRDAERVLKRLVSQELTLSFVPHAEQRLWRTVTRTKYQLRRNKVRLHNQLEALLEEAHIKLSSLVSDLLGASARRMLQALAEGETDPAALAALADQRLRATSAQLRDALGACTELNPVYRRLVKMALEELQWIEQRIGQLDQEMASLLRQHQDAVQRLAEVPGLGVDSAQQIIAEVGAKAATFASAKNLSSWVGACPGEEESAEVNYSSRSPKGNRHMRRLLNQAANAAVKRKGSIFEIVYRRLVPRLGHNKTIGAIAHRICQLIWMILNKGVRYEERGPAVCEQSKRVRTSRMIRTLRKLGYRVELQADPA

SEQ ID NO: 93540 - protein, 347 aa, unidentified
MLHAGLDLSRKRLDYCLLDEHGDHVEVGAAPPDADGLAGFARRVEERHRQPVHAAVESMNGARFVHDTLERCGWEVEVADAQKVKGLAPLACKTDRIDAWVLAELSRRELVPAIWLPGFEARAERERARWRLFLVHKRSALKHRVHAQLLAFGHSCPVSDLFGRRGRELLGRLDLPEPWHGGVLAAVAMIDELDREIAGIDRELRALGAEHRYVPLLMSVPGIAWVLGYTIAAEIGDIERFASPKKLCGYTGLCPRVYQSGGTDRRGPLTHAGPKYLRWALMEAAIHACRHELYRERYQRNKRRLGKQRGAKVAQVDIARRLAEAIWHMLTRNQPFAPAGATQALAA

SEQ ID NO: 93541 - protein, 394 aa, unidentified
MKLIGIDIGKNKHFFCVMDQQTGEIISQPVSFSNDKEGFDFLVQEIKSYPKDSILIGMEDTGHYHFALLKYLLDLQYTVALINPKTTDFNRKMQGGITKNDKLDTINICDVLDTPERKKQYRITKVNSFDLYEQKQLTRHHHNLKEEENVYKNRLQKCIDIVFPEFNKLFNSKYGIVYMNILKMFGSAENIANTDIRTIRKCFEIEGRGNRISLTPERLKECAISSIGISSLAEVIQIKHLTAQIELIEEQLTEIDKKIEEFSIQNNSPILSIPGISHFSGTSILAELGDISNYSKPSQIIKFAGVAPLHYESSQFNAQHTAITKKGSKYLRKTLYQIILPVIRHNPVFNKYYQLKISQGKGHRCAQGHCVRKLLRIIYHLLKTNQQFDPQLLR

SEQ ID NO: 93542 - protein, 367 aa, unidentified
MEKSSTAFVGMDVHKESVDIAIADGREARLFGRVGGDAAALERAVRKIRSVHRDPLFVYEAGPCGFWLYRRLAAQGLRCMVVSPSMTPRRAGDRVKTDRRDALQLARLARAGELAPIYVPDARDEAVRDLVRAREDAVCMQRQARQRLQALLLRNEIRYVGRSAWTQAHRRWIAHLKLPDPAQQIAFEEYVQAVEEAGRRLERLEGSIAAQVEHWRWRPVIQALQALRGVSAIHGVRIVAELGDLSRFESPRKLMGYLGLTPSEDSSGKRRRQGGITKAGNSSARRALIEAAWAYAHPARVSWVIARRHTGLAKSVTDLAWKAQLRLCARFRRLAARRLPRNKVVVAIARELSGFVWAIARQVKPAA

SEQ ID NO: 93543 - protein, 408 aa, unidentified
MNPLYVGIDVSSKTNVVYLMLPDGSKHSNFSVANSHDGSTQMVKRILSAITSLSLDTVIIGLEATSVYGDNLVYFLREDATLAPYDKKIHVLNPKQVKNFKEAYNDLPKNDYVDSYVIADCLRFGRINKEVYQSDYRYKALQNLTRARFFAVQNLVKEKQRFINVLFKKYSTMTQEKVFHDTFSTTALAVYEEFESAEALASMDLQELTDFIMEKGKNRFPDPDAVAKAIQKAARSSYRLPKTVNDSVNQVLSISITSIKALDAQIKEFDKTIKAQMELLPNVLTSIPGIGPVYSAGIIAEIGDINRFPSQAQLGKYAGLAWTQNQSGDFEAENTKLIQSGNRFLKYYLCEGALSLVRCDTEYSNFYHSKYKEVNRHQHKRALALTARKFVRLVFRLLKDNRLYRAAE

SEQ ID NO: 93544 - protein, 437 aa, unidentified
MTQTTAFRLLLLISLLTHRRFYLRDYTAEFSVEDNSAKIFIQEVFSMPMYFVGIDISKYKHDCCIISAADQKVVSKVTIKNNKAGFNELLTIIHSLANPADIRIGFESTAHYALNLELFLENSLLTFMEVNPVLISEYKKSKTLRRTKTDSVDCESIARWLMTVEYKPHSKGFYHAYSLKSLTRLRDKLIRQRSFYLIKITNVLDHTFPEFKPFFNERLSKTALYLLENYGSAEKMARMNSASYEKLRSLSRGKFSPQQFLRLKELAANTVGVNNSIFDVELNSLLSLYKSLVKEINTIEKEINKLIEEVHPHYMSVPGIGPLSAAVIYSEYGDISNFTNPGQMLAFAGIEPGINESGTESHGGKMVKRGSSQLRYTLINCCLPLIRFDMTFATYYAKKRGEGKPHRVAITHVAKKLIRVIYALERQDIDFNAQKLR

SEQ ID NO: 93545 - protein, 337 aa, unidentified
MEYFAGLDVSMAETHVCVVTRNGAVIHNAKVPSTPADIAAELAQAPACRRIVFETGRMAPMLYHGLSQLGLPVVCVESRQAYQALKLLATHKTDRNDARGLAHLARTGFFKPVHVKSLPAHAVRSLIIARKKLVSQRVTLENQIRGLAVVFGVRLPRALSPAFIRQALGASEGIPGLSAAMRGLVAARAAVLAAVVAIDADIKRMVRASDACRRLMSIPGVGQLTALAFTAAVDDPRRFRRSRDIGAYLGLVPRRYQSGEVDYTGSISKCGDRRVRTLLYEAANVMLTRYKGPLKLKDWAFAIAKRSTMRKARIALARRLAIIMHAMLRDGTEFKPA

SEQ ID NO: 93546 - protein, 426 aa, unidentified
MAENKIDRQPEFAALVGIDWADRKHVWCLQAADSRKREAGELEHKVEAVEAWVAELCRRFDHRPIAVAVEQVKGALVFLLNKYECLHIFPVPSTMSAKMREALYPSGAKDDPRDADLLLDILEQHRDKLHRLSPDDESTRRVQNLVEERRKLTAERTAQSNRLTSYLKIYFPQMVEWFEKLDMPLVCDLLERWPTLEELQKVSPEELRTFFCQHHCHRGLRERRILAIGGAIPAGGDRAVIEAKSAVVKVIVQLIRSLLQGIAELDRKIEEVAAEHPDFFIFESLPGAGAVMAPRLLAAFGSQRDRYRSADELQTYSGIAPVTERSGKRKWVHFRWACPKFLRQSFHEWAGHSIAQSVWARAYYQQQRDRGSDHHAAVRALAFKWIRILFRCWKDRVAYDENKYLAALAKRGSPLGKLLVFGMASL

SEQ ID NO: 93547 - protein, 424 aa, unidentified
MKFKMQDKQNQLIERITEKHLVVGVDIAQQFHVARAVNFRGIVVGDPITFPNNEEGFSSLLIWINSIKRLHKLEAAIVGMEPTGHYWINLSKWLMKQDIEVVTVNPHLVKRNKENRDNTQSKSDKKDALVIADMVKNGYYSFVRDTSESFEKLRVLMSNRDVIVKRLVSSINQLNRWVDIVFPELRQVFKDITAKGAIATLRLFPSPMELGSMKPEEIVAGWKLLMKRQPGLKKAYLLLNVARKSVGTRQALEAYKFHLEQLLEEYDLAIQQLERVELAIKDELPKIPFANKLLMIKGISEISLAGILGEAGDLSGFSHGNSLLRHAGLHLAEASSGKWKGQIIISKRGRSRLRRFLYLATMGLVMNNPEFKALHSNNVKLKKMKKMKSIMKLIGKLARIFVGIARKNEAYCAKKVQPLTELAA

SEQ ID NO: 93548 - protein, 330 aa, unidentified
MTVVGIDISAQSFDLVSRRDGRNAKAQHFEQTVQGHARAIRQLKALKPECVVMEATGVYYLDLAVALYEADLPVCVINPRSFRHFAEIHLTASKTDAIDAALLAEYAERMTPRRWTPPPKHCLGLRDIGRQINRLIHARTQAKNRLHALTAKTATPELLIEDEQDGIAQLDRRIERLKQAAMELIAQSETLSRHLNHMSAAPGMGQASSVAVLAELCTLPSDLKSAQVSRHAGLDVRLTQSGTSVNRPGRLSKAGNAYLRAALYMPAMAAIRHEPRAKAFYEALVARGKKKIQALCAVMRKYLTGLWACIKNRTPFDASALFSDQHLDKA

SEQ ID NO: 93549 - protein, 355 aa, unidentified
MNDAKHIGLDVHQATISVAVRDSRGNLVMEAILETKAETILQFIRGLRGSLYVTFEEGTWAAWLHDLLQPHVTRVLVCDPRKNALLKVGNKNDRIDARKLSELLYLNKLSSVYHGEPGIRTLKELARSYLAMTRDLTRVMSRLKAIYRSWAIPCAGKQVYAARNRAEWLAKISEAGVRRRAELYYQQFDALAALRQQARRELLAEARKHPAMKLLRQIPTIGLIRAALLIALMQTPNRFRTKRQLWAYCGLALRTYTSGEYRFVGGQLKRSKKVLAVRGLNINHNHDLKNIFKGAATRAASTVGPFQDFYQACVARGVKPHLARLTLARKIAATTLLVWKKGVRFDAEHLKQQAA

SEQ ID NO: 93550 - protein, 421 aa, unidentified
MGKYRLAFVAFDSAKEKHAVAIAKDGRDGEVRYLGEINNSPDAVKKLVTKLSRQYERLHFCYEAGPTGYGLHRQLSDLGHACDVVAPTMIPKRSGDRVKTNRRDAVMLVKLLRAGELRAVWVPDAVHEAVRDLTRAREVAMLDLRVKRQQLSSFLLRHGRNYSAGKNWTKMHSRWLAAQKFDHPAQQIVFQDQIEAITAAEIRLVALEQQLREIIPTWTMAPVVAAYQALRGVSLLVASTFVAEIGDVRRFATPQQLMAFLGLVPSERTTGDMVRRGSITKTGNRRARRVLIEGSWAYRYPARVGESLQTRLKDLALPVRTIAWKAQVRLCARYRQLVAKGKKPAVAVTAVARELAAFLWAIGHQVAPAKAASSETASPRHRAMGEAATPSSAGRPGPLAAGSSRRQRAAGPARLSAAQAR

SEQ ID NO: 93551 - protein, 342 aa, unidentified
MGEITTVGIDLAKNVFGVHGVDAHGKTETVLRKTVSRGALLELMAQLPRCLVGMEACSGAHQLARDLQPLGHLPRIMMPKFIIPYRRNQKNDGNDAEAICEAVARPNMRFVPIKSVEQQAVLVVHRVRKELVELRNGQINQARSLLAEFGVVIAVGRYRFGQQIGAALDDPRVPELARQVLHEVNARIRALDEDILAYDRRISAQVRDSAAMQRIVAVCGVGPITASAVVASVGDAKLFRNGRQFAAWLGLVPRQFSTGGKPVLGRITKQGDVYLRTLLIHGARSALLTLTRRDDKLSRWASALIARRGFKKACVALAAKNARVIWALLVKGEAFQLDRAAA

SEQ ID NO: 93552 - protein, 372 aa, unidentified
MKKRSSARQNPKSAVKAKRAQQSVTIGMDLGDKTSRYCLLSDEGEILQEGQVATTKAGMTGTFGRIGRARIAIEVGTHSPWVSRLLRSFGHELIVANPRQVKLITESSRKDDRLDAQTLARLARIDPQLLRPIQHRSEKAQTALMVIRVRAALIAVRTSLVNTARGLAKALGERLPKCDADQMGVLRAESLPPKLRQVLEPLLKEVESITEKIKDSDREIEQIARKDYPETALLQQVGGVGPLIALTFVLTVEDKGRFQKSRDIGCYVGLRPRRSDSGQSQPQLRISKEGDPYLRTMLVQGAHYIISRRGPDTDLKRWGLHLAESGGKRGKKKAVVAVARKLGILLHRLWVTGEVYEPLRNQNLRMGRKKAA

SEQ ID NO: 93553 - protein, 338 aa, unidentified
MTIVMGLDQHRAQITAEWVDTETGEITRSRITPAHRQGVRQFCEKFRGQELEVALEATTGWRFVADELAQVGAVVHLAEPAETAARRGNKKRAKSDRGDARHIRELLTIGRLPESWIPPDHLLDLRAQVRLRHTLSHQRGEWQQRVQAVLYHHGCPQRGELLTLGGRTWLAAQPLPPAAREQITVALAVIDALDIQRAPLDARLRAFARHQAGCKALLGQFGVGELTAVTILAELGDARRFSSSRDAVRFAGLDITVHQSDQRRASGHLSRQGPPALRWALFEASMCAARRCSPDYEYYAQAAERLGSNRARLSVARKILKRSYHLLRELGDEAIAPA

SEQ ID NO: 93554 - protein, 313 aa, unidentified
MLYVGIDIAKNKHDVTALNVPGKTVLKPLTFSNNKAGFELLDLSLRQLNQDCLIALENTGHYAFNLLNFLHEQGYKVYTYTPLLIKEFAKSLSLRKTKTDKKDAHGIALKLLSDPNREQFQHDNRQVELKILTRHIHRLKKKQSDWKVQYTRCLDIIFPELDKIVGKHSEYTYQLLTRYPNPQKRIEAGFDKLIEIKRLTASKIQDILSVAPRSIGTTSPAREFEIIKHYKRLIDKAETCVNDLMAEFNSVITTVTGIENRLGAVILAEIRNIHAFDNPAQLQAFAGLDSSIYQSGQIDLAGRMIKRGSPHLR

SEQ ID NO: 93555 - protein, 312 aa, unidentified
METKFVGIDVSKLTLDFDCLPVSAAQPFANDAVGIAALVALLQGSGVERIVIEATGGYETAVASALAVAGLPVVVVNPKQVRDFAKAMGHFAKTDRLDAKVLALFGERIKPALRAIPDEAQRALADVLGRRTQLVVMRAQEKARLATVAAVARKSVEQHIAWLDKCIAKLDADLGDRLRNSPVWCNKATLLDSVPGVGEVTTFSLLAKLPELGTLNRQKISALVGLAPFSDDSGKRQGARYIRGGRAEVRCVLYMATLSAIKHNPPIKAMYERLTKAGKPFKLAMTACMRKLLTILNAMLKTNQPWKIQPTS

SEQ ID NO: 93556 - protein, 342 aa, unidentified
MQVTTIGLDIAKNVFQVHGIDAAEKVVVRKQLRRRQVLEFFKALPPCLVGMEACATAHYWARELTKLGHQVRLMPAKDVKAYVKRNKNDAADAEAICEAVRRPTMRFVPVKSAEQQGRLMLHRTRDLLMRQRTQLINALRAHLAELGIVAAQGRDGIKELLKIIASEEDARLPVDAHASLVVLAAGLQAVQTMIGSIEKRIIVQHRSNEASKRLESIPGIGVIGATAIAATVPDPKVFGSGRDFAAWIGLVPREDSTGGKQKLGPISKRGDRYLRRILVVGACAVLRYARHKPEKYPWLTKLLARKPFKVVAVALANKMARIAWALLAKGDTYRVPALAAAA

SEQ ID NO: 93557 - protein, 368 aa, unidentified
MMGWMAPLRHLSAKVLVDRKPPANREPSMNEITTVGLDLAKHVFQVHGVDAEGTTVLRKQLRRGQVLAFFSRLPRCLVGMEACATAHYWARELRALGHEVRLMPAQYVKAYVKRNKNDAADAEAICEAVGRPTMRFVPVKTAEQQAAVLLHRGRERLVRQRTMLVNALRAHLAEFGVIAPQGLRNVGRLIAIIRDDDDARLPGLARQVLQVLAVQIEQLEAAIAALEKRLMGWHKSNPVSQRLATIPGIGPIIATAIAAMVAEPSGFRSGREFAAWLGLVPRQNSTGGKNRLGGISKRGNQYLRRLLINGASANLLRSKATNADPWVIGLRRRRPSLVVAVALANKTARIAWAVMHRQENYQRMATAA

SEQ ID NO: 93558 - protein, 387 aa, unidentified
MSTATTRTMDPTASSTHLFLAFELGEGHWKLGFSAGFATRVLKRQVPARDGEAVLDEIARAKEHLGLPPTIPVRSCYEAGRDGFWLHRFLVTHGVENLVIDSSSIEVNRRRRRAKTDRLDLEGLVDLLLRYWAGSHKKPFSVVRVPSVEEEDRRHLHRELQSAKRDRTRVTNRMKGLLANHGLTLDLQRKGVPERLCVLEQWDGSPLPTGLRARLEREWERVCFYTKLIRTLQSERREMLRSAADPVAEQVLQLVALRGIGVNSAWLFVMEFFGWREFRNRKEVGALAGLAPTPHQSGESNRELGMSKAGNRHVRSMVVEIAWAWLRFQPQSRLSQWYQERYGSGSKRMRKIGIVALARKLLIALWRFLETGVLPEGAELKAEIRNL

SEQ ID NO: 93559 - protein, 353 aa, unidentified
MAPLPSPTAPLKCVVGIDIAKDSFVACFGQSSLSQQLHFGKETTFDNTASGFAALFSWVAKQHVSGSPLWFVVEATGVYYEELAYFLADNKQLLSVLLPNKVKHFARSTELKSKTDQLDARLLCRLGLERALPAWQPPAPALRQLRALARERQVLVRQAAQLKIRAHAYHHSYQPDSRTLARLAAQQQLLVQQLKALDQDLADLLLAEPELARKLGQLTSIPGIGLTTAIVVVAETNGFVLVENERQLASYAGLDVVQRQSGLSAHATRISRRGNVRLRTALYLPAVSSLRYNPQQMAFYARLRARQPSGKPGVIAVMRKLLVLCYSLWKNDCVYDPHYHPAHLAEKEVAPTT

SEQ ID NO: 93560 - protein, 523 aa, unidentified
MPVTRSRKRSSSRRPEVLQKPRGVIHPRVQKVGPEHFGIVSVDCAKARSKWMLCDFYGNVLVPPTVVEHNRPALTAATTQLRQAMAEHDLRDVIVAIERTGRYHHATQRAFAAAGFEVRIVHPFATKQFRQASDPGTKTDDTDLVAIHRAACSGFALIELPRDDHWKELQLLIRYRRDLVFKTSALCAQIREHLEAALPGYATCFYNLWIRACAFPLVRAFGSAEALLQAGLRGLSEVLRQQHVRFQERTLQRVLAWAEQAAPSDQAAALHLRVALRLEDDRQQKSLEILGLERDIASRLVRTPYVLLLSFPGINVVSAADFAGEMGPIGNYANSRCITGRAGLRPARYQSDQVDRPNGPLVRCANRKLRAAILGIADNLVCCNRHFNVLALRWRAEGKDPRHTRVKIAQRFCRIAYQMVAGGQVFRHPCLQHRSYILDKLNAFHREHDTAMPQALTDLQAAIEQLPRSAYAEEARPLAQELQRIEQGRRRGPQLLGDILPIVLARLGVGALQSRESGEHDLT

SEQ ID NO: 93561 - protein, 356 aa, unidentified
MSKIKDTSINFKGQHFYVGIDVHKKRWSVTIRNNDMNLRTYSMDPSPDILASQLICHYSDGVYHLVYEVGFTGFWICRRFRELGIDCIVVNPADIPTAHKEKDRKTDPLDSRKLARELENGNLAPLYVPSEPDQHLRSLCRLYRNIVQNNTRVKNRIKAHLALNGVQVDRESSYWSGDFITYLRNLPLDKGPSRSCLNICLDELEEHRQRLVYVLKDLRAWVRQQGIERTINNLKSVPGIGFKTAMILYTEIMDIHRFKRLDHLKSYAGLVPSTYSSGEREGIRGLTHRRNRHLRYVLIEAAWIAIRKDPVLLQTYNSLTRKMKKQEAIIRIASKLLSRIRYVWINDCPYVSGVVQ

SEQ ID NO: 93562 - protein, 465 aa, unidentified
MARSMRSRSRSGRQDGKSDPTPPMIYPDAAGIDIGATQLFVALPRDRAAEPVRVFATFTADLEALAAWLKEQRITHVAMESTGVYWIPVFQALETRGIEVCLVNAHHAKGVPGRKTDVSDAQWLQYLYSVGLLRGSFRPPDEIGAVRSLMRHRSGLVAEAARCIQLMQKALVQMNVRLQHVISDLSGTSGLAIIDALLAGERDPVQLAKWRDRRVKASEEMVAKALVGDWRSEHLFTLRQARETYRHCQKQIQECDREIERHLAALRSRVDAQQHPPPEPKPSQTQRGKKGIALVEGDLRTELYRVLGTDATAIPGLGTGIVAGLLAELGADLAAFPTAAHFANWLGLCPSPEISGGKVLKKGTRPVNHRVATLFRLAAQAVHRDETVIGRFYRRMRAKLGAPKAITATAHKLARIYYHLVTTGEAYDVSVFAKNEEREAKRRVERLLKEARALGYVLAPQEVAA

SEQ ID NO: 93563 - protein, 356 aa, unidentified
MDNKKYIGRDVHQATISVAVMDSAGKVVMDSVIETKAVTILEFIQGLRGALWVPFEEGTSAAWLYDLLKPHVAKVVVGDPRKNALLKAGNKNDRIDARKLADLLRSGLLSPVYHGGAGVHTLKELARSYLTITKDLTRVMNRIKGLYRSWAIACAGQKVFSPRYRSAWLKKLTEAGVRRRAEWLYQQLDDLQPLRREARRELLAESRKHPVNTLLRQVPWLGPIRVALLIARIQTPHRFRTKRQLWAYSGLALRTRVSGEYRVTGGGQLQRAKRPPALRGLNENHNHELKSVFKSTATRASTSAGPLGDFYAALLTTGMKPTMARLTVAGKIAAIVLTIWKKGERFDPEHLKRQAA

SEQ ID NO: 93564 - protein, 361 aa, unidentified
MQSTTLVAFDQHAATTVAAVLLPAHRTPALHTLTSDSATIVRFVARLQREGPIACCYEAGPCGFELQRALSARGVACDIIAPALIPRRAGDRMKTDRRDAGQLAVLYRAGALTAIHIPTEQEEAARDLLRCREDIRADLLRARHRLSKFLLRHGRRFTATKKAWSKRHHTWLREQTWPLPALEHTHRAYLRAVDEILARLRDIEQDLRALLALEPLRPRVQRLRCFRGMDDLTALTIAAELGDARRFASAPRTMAFVGLVPSEHSSGTRQARGAITKTGNAHLRRVLVEAAWHYRHRPFIGAALRRRQHGAPAAVIAQAWTAQQRLYRRYHRLAARGKPTQHVITAVARELTGFVWAVLTQ

SEQ ID NO: 93565 - protein, 343 aa, unidentified
MQTITTIGLDIAKSVFQVHGIDAEGNVILRRQLKRRYMLPFFQKLPPCLVGIEACGSAHHWSRELQALGHTVRLMPPAYVKPYVKRHKNDATDAEAICEAVSRPNMRFVATKTPEQQSCLTLHRTRHLFIRQQTSVINAIRAHLAEFGIVAPVGRQGVEQLLSVAADSNDKRLPEVARACVAALGAQLRTLKAQILEFDRMINAWHRSNGASRRLDDIPGVGPVLATALIASIADPKAFRSGRDFSAWIGLVPKQNSSGGKDRLGNISKRGDRYLRSLFTTGALAVIRYAKIHGTRHRPWLTALLARRPTKVAAIALANKIARMAWAMMAKGERYKEPAALAA

SEQ ID NO: 93566 - protein, 349 aa, unidentified
MAVKYSLGLDISFETFDANFSVIDAEQKVKVIASHKFGNNPGGFKEVVKWIEKNRKQKDIGIVITMEATGVYYENCALFLFRKGYTIAVVLPNKAKKYMQSIGLKTKNDKIDAKGLARMGAEQSLKSWEPMTEFFYQLRELTRQQQSLQEHRTVLVNQIHANENGMFLNTMVMRQLKALVAVVDKQLETIEDAIKQHVASDADVAGKVKKIAKIKGVGVLTIATLIAETNGFALFSTAPQLVSYAGYDVVENQSGNHNGKTRISKKGNSRIRRALHMPSLSVVRWEQTPFLKLFERTLDKHKVKMKSYVAVQKKLLVVIYSLWKKNETYDNNYLANKCITEQEQLKKAA

SEQ ID NO: 93567 - protein, 361 aa, unidentified
MKKNKVSKSCFSGKDIFIGIDVHKTRWVVSVRTYDLELKTFSMTASAEELEQILVDNYNDALFHIVYECCFSGFWIYDYFHQRGYDIIVTPTNRIYRDGSIVKTDKIDSRKLAFQHSRDLLRAVKVPTIKIREYRSIFRIYDKEKMREGQILRQIKCILEVKNHPMKWEKWNKAFVEKLKRVKFQEDIFNKKFEQLIREYQYVKEQIKDSEKRIKEIGEEKELSARIKRIEKINGIGIISAVRLVVFLFDMKGRFETGDKLVHYVGLTPGEHSSGNETIRSRTGLIGSRQLRSIIMQLAWVAVRKDGNLLDKFERVYKKSGKKQKAIVAVARKLMMKVHAITEKEEEYVINMPSNQRGIAA

SEQ ID NO: 93568 - protein, 337 aa, unidentified
MRFCGIDLHSNNSFIVIIDEQDRVLYNQRLANNLSAILEALSAYREELSGIAIESTFNWYWLVDGLQEQGYRVHLVNTTAVKQYEGLKHRGDESDAKHLAHLLRLGLLPEGHIMPKVKRAVRDLARKRMSLVQQRSVQILSIESAMQRYMGSRVNSNTIKRLTSDDLAQLPLQASEILSLQSNLAIMQALQNQIDCIEQELARYCRNESDYRLLKSTTGIGDVLATVILLETGDIDRFASVGNYVSYCRCVGSAYLSNGKKKGVGNTKNGNRYLAWAYVEAANFAVRYSEQAKKFYQKKKAKRNSIVAIKAVAHKLARACYHMLKTGEAFSVERCFT

SEQ ID NO: 93569 - protein, 360 aa, unidentified
MQKVQEYVLQDKVIFVGLEDSKSTWRICVRSERMIVDQTGMPSEYENLRNYLRSRYPGCTIRLMYEAGFGGFWLHDKLEADGIDCIVTPPNKVTEEKVNRVKTDRVDARRLSKNLENGDYRSCHVPDRELRDDRQISRTLVMIQKDIIRTKNRIRRFLDFHGLNGLVKSGRWQASDYKRIRALELPGSLGISFGVILSELDMLLEYRTQLKRQLFALTKKARYCQTFRHFESSPGIGWLTAIRLVLEWGEDLSRFYSGKAFSSFLGLTASEYSTGEAIRRGRITGQGHGFVRAWLIQSSWIAVRKDPVLLKKFQNVRKNTGSQKKAIVAVARKLSVRLWHLANFNEDYQRGLLEEQWVTA

SEQ ID NO: 93570 - protein, 386 aa, unidentified
MGVIIGMDPHKRSATVEVVDDRGRVLAVGRYGTDKAGYTQMLAAGREYPDRVWAIEGCNGIGRHIAHRLVRDGETVVDVPAKLSAQVRVFATGNGRKTDPVDAHSVAMVALRTPNLVRVEVDDDLVVMGMLVDRRDELGRARTQTINRLHKLLLELFAGGAPQFLSSHKARTMIATIKPRDLVGKTRRRLAVELVVELEAIDKKIKAVKTDLRELVVARGSTLMDLTGIGPSGAARLLVDVGDIHRFADRDKFASWNGTAPLDASSAEQKRHRLSRAGNRRINRALHIMAVVQLRNPTEGRTYFDAKKTAGKTSMEAMRALKRRLSNIVHNRMLADQKRREATGPGGQSGTTVQSSVTDLTLDVGSSDKPLPGPATTQPKTVIAAS

SEQ ID NO: 93571 - protein, 356 aa, unidentified
MGDGSWVGVDLHARSAVAGVVDAASGELWTERVPAASEPLVVWLSGLPQPVRVAYEAGPTGFALARACARAGIECLVAAPGRIPRAPAERVKTDRRDAERLARLLRLGELTAVRVPSELEEQARDLVRAREDVRGDLMRARHRLSKLLLRHELLWQRSAWTREHDRWLRGLRFAGPFAICFDESYGAVLQAKARRDSLDRAIATLAAAPPYADAVGRLCCLRGVSTLTALALTVELGDWTRFEPAGLGAFLGLVPSERSSGEQRRQGRITKTGNGHARRLLVEAAWHQRRPLRPSLALAARRNGQPAAVRAQAEAVARRLHRRWWDLEQRGKRRTIVTVAVARELAGHCWKLATMP

SEQ ID NO: 93572 - protein, 398 aa, unidentified
MFSFFVGIDVGKWNHHAAFLNSSGTSSAPELAFTNTSEGFDLLLSSLSSFDKTQTVIGLEATGHYWLALFSFLVDNSWTVKVINPMQSDALRNINIRKTKTDRKDSVLIADVLRFGRYTETVLPDEPILQLRELSRCRTGLVESSGNLKRKILGILDRIFPEFASCFSTVFGTTPTELLQEFADPEELANCDIENLIKLLEKESRGRHGSKKAQELKNKAAQSVGIRMGLEALKFELRLLLQQLDFIKKQIKEMDKFLKKLMKQYEILLTIPGISFVLGAAILGEIGNVNRFATPQQLQAFAGMDPSVTQSGNFTGTQGKMSKRGSPYLRRALYLAANGAQRFDSVFKEHYEKLVARGKHPKQAMGAVATKLLRVVHAVLKSRKPYNPQKLANANLAD

SEQ ID NO: 93573 - protein, 353 aa, unidentified
MPKTTGAPIAVIGIDIGKNSFHVVGHDKRGSIVLRQKWSRSQIEARLANLPPCLIGMEACVGAHHLARKLTALGHDARLMPAKYVRPYAKGQKNDFNDAEAIAEAVQRPTMRFVATKTADQLDLQALHRVRERLVSQRTGIINQIRAFMLERGIAVRQGIRFLRAELPIILASRTDALSPRMLRVIEDLAGDWRRLDERIETLSREIETIARQDAGCDRLMSVPGIGPIISSAVVAAIGSGDVFSKGRDFAAWLGLVPKQISTGDRTILGKISKRGNRYLRVLFVQAAWVVLIKPMSWERHGLKSWIEAAKKRLHHNVLAIALANKLARIAWAVLAKGRDFEVTRKETSPQPA

SEQ ID NO: 93574 - protein, 366 aa, unidentified
MKKTSTVRVNGNMIFEGHKLTIGVDLGDRWSFYCVMDEAGRVLFEQKLPTTPEAMKQTFGKIPRSLMALETGTHSPWVSRLLTELGHEVIVAHAQKVQWITKSSRKDDRHDARTLARLARIDPELLGPVRHRSAQAQLHLTVIRARAELVSARTALVNAARGLVKSYGQRLPKCGTYQVSEKLAEGLSAELREVLVPLFKEIESLNEHIKQYDERMENIAKQVYPEVSLLKQVKGVGTQIALTYVLTIEDPYRFAKSREVGCFLGLRPGRRNSGQSEPQKGISKEGDRYLRTMMVQGAHYILGPFGEDSDLRRWGLKLAERGGKNAKKRAVVAVARKLAVLLHRLWVGGEVYEPLRNSQKAMREVA

SEQ ID NO: 93575 - protein, 364 aa, unidentified
MKKRIIHVGLDVHSKSVAMATLDQGDEKPTTVVIPNDPKALRRAFAKLAPLGEVRCCYEAGPCGYEVWRLLAEMGVECAVVAPALIPAKPGDRVKTDRRDAAKLVRLFRAGELTGIRVPTPEEEAVRDLVRAREDVRKELVAARHRLQKFLLRHGRIYSEGKNWTDRYWSWLRKQHFEKPAARFTFEHYQLQVHHLEERRADIERELAAVAATEPYRDSVDRLCCLRGISVLSAVVLLAEVQDFRRFDHPRQLMAFLGLVPSEHSSGGRAKRGAITKTGNSHARRILVEASWAYRHPPAVGPRAKRLLAGQPPHVVAQAKKAQHRLHKRYARLVGRGKRSQVAVTAVARELCGFVWALMVKEAA

SEQ ID NO: 93576 - protein, 309 aa, unidentified
MATSSYVGIDVSKARLDVAVLGAKQAWQVENSCKGIDELVRWMQALQPELIVVEATGGYQRNVVDGLFRSGLAVAVVNPARVRQFARACGMLAKTDKLDAELLAVFGARVQPKRYEGKSEAEKQLSALLVRRKQLEEMLKAEQNRLRTIAPSLRGSVERIISILKEEKKRLEEQIEQYLNEQKGWQEQREILSSAPGVGKVTTATLLADLPELGKMDRKKIAALVGVAPMNHDSGKRRGYRKTKGGRTDVRSVLYMSTLVATRYNPVIQAQYQQLLKRGKVKKVALTACMRKFLTILNAMVRDQQPFCV

SEQ ID NO: 93577 - protein, 410 aa, unidentified
MKIAGIDVHKKVLMVVIVDGSAPEEKPTRRRFATMPSQLHQLLIWLQGQGVEEAVMESTAQYWRSVWLELEPHMRLHLAQAFSNRAPRGRKHDFKDAERLVRRQIANELILSFVPNGEQRIWRSMTRMKLQLTRDRVRLQNQMECLLEEMRIKLSIVVSNLLGASGLRILQALAQGETDPKKLAELGDERLQCTEEQLVDALTGRVQPMHREMLSLQLQRLQLIDQQMAQLNGMIAQAMKAHQDAVIRLAEVPGLGADSAQQIIAEVGAQASTFPSAAELTSWVGTCPGKEESAEQNRSSRSAKGNKYLRRVLNQAAHAAVMKKGSYLQGVFRRLLPRLGYQSAIWAIAHRLCRLVWKILHEGVRFIERDCEADPRAKKQRAQMLVRALRKLGYQVTITPLNQVTATNAI

SEQ ID NO: 93578 - protein, 419 aa, unidentified
MSFKILKNNCCGLDVHKTWIYACIGITDSLKRTEYKEARFSSFTKGLNELCDWLSKYNCTDVCMESTGKYWIPVFNILEQHNLWVTLSHPKYTKPMKGNKTDRKDAKWICDLYMCGMVKPSFIPPADIRELRDLVRYRFKLTCMITGEKNRAQNCLTVSNLKLDDVFSDVFGKSSRSITEQILKHPGETFDVTPFVDGRCKTPIEEIQAAVDGAISKEQAVKLRQCLDHIDELNKHISEVEQEILRLSDKYEIALNLIRTVPGFNKNPLTAIQVLSEIGGDMSVFPTAKHLVSWAGCCPRNDQSNQKIKSTRISRAGSYFKPVLVQVANALIKSKKHLEFTNRYKRIKARRGHKKAIIAICRMILTAIWHILSDLKPYTPEGFLESRPVKEEKVLSISQALNLLKQRGYIIKDEPLSVS

SEQ ID NO: 93579 - protein, 403 aa, unidentified
MPRERSLWAGLDTGADVSRLCVVDADLISILEETLLSDPALIAGALAALGGKVEDIAVESATYSIHLVRGLRDLGFRVSIFHTPQVARFLRLRRNKTDANDASGLAELAKLRLPAIKPVHLKSPDIQRMRTKLQYRHRLLQQRLACEGMMRSMFRLEGGRLKGSQSSRQMARNVMAEVDRLREERGIDLRADIAPLLELAMSIRRYLERIDKDLEDWARGNRICAMFLEIPGVGPLTAVSFYTAIEDPWRFEVATNVGAYLGLAPLVSQSGATVHHGRISKKGSRLTRTHLVSAATVMFAGQIKDCPLKQWGIAVAARAGKAKARVAVARRLAVIMLAMWKSGHRYDGALAAPRNHATLRPRESADRTEPELIGEATTSMSSLGLPVGKVACAGPDFATSAEA

SEQ ID NO: 93580 - protein, 393 aa, unidentified
MRSVGLDLGVRHIAFCEVKDGKVVDRGAVRSLSQLALRLGPKSAPAEVGFEACREGWHVHDTLKKWGHRPRMLDTTRIRQIGVGQHRRKNDAIDAEAIALAVESGRVAEAHVLSPQRRALRAQLSVRGALVQTRSQYVTTIRGLARAAGILLPKSATASFVEKVAGSTMDDDLRALIAPLVRTMQVLDTEIEQVEVRLSTMAEQDPTIALCATAPGVGLIVAATYVSVIDDAKRFRNAHAVAAYLGLVPGEATTGGPSKRRLGGITKQGNTYARTLLVQSAWSILRSRTSTDPIKRWGDHIAQTRGKKIAAVALARKLSGVLWAMLRDGTFYDGALEAQESARGVREQARRTASRASILEYAAKKLRRSAPADAKAERPPAKVGQTARRARTA

SEQ ID NO: 93581 - protein, 360 aa, unidentified
MQTKVNKNFFNGQSLYVGIDYHKKSWKVTILGEHYEHKTMSQNPDPDLLSSYLKRNFPGGHYHAVYEAGFSGFESCRRLSQLGIKCIVIHPADVPSSQKEKLQKTDKADSRKLARMLRSNEFEAIHIPERKLEADRALVRQRFRLMKDVSRTKNRVKSLLYQFGIAIPERFTAAQTRHWSKVYINWLKELSIEQKCLKQTLDNYIRIGETQRKELLLANKQVRNLAQTEDYRKNYNLLISLPGVGLMTAITFLVQIGDISRFKRLDDLCNYVGLVPSMYGSGEKMQTGKMVKRGRKALKIMLIEASWEAIRKDPALMAKFNELAKRMNKNKAIIRIARKMLSRIRYVLQHQQEYVLGVVE

SEQ ID NO: 93582 - protein, 418 aa, unidentified
MSKTLYVGIDAHQKENFCCLLDQDGNKVINIFSVANNLDGAKELENRIDLVMKEHCFTELKTATEAASFLDLHIVDYLASSKLLSKYSPSIYQFNPKITSGFKKAYPDKDKTDTVDAFVVADRLRFGRLPEPYEDSLPYFPLKRLTRYRYHLVSNISREKNYFLTHLFLKYSSFSDVKPFSNVFGKAGIAVITEFFSSDELASMNIEELVEFLIKEGKNRFKDPEAVAQKVKQVARESYRIRPTLANSVNLILSSTIENIRALTLSLKEVDEAISSEFKAFPNTLESVKGLGPVYSAGIFSEIGNIKRFSSHAKLAKFAGLTWRKSQSGNFEAEETRMTKTGNEYLRYYLIEAANSLRVHNEEYRLYYQSKYKEVPKHQHKRALALTARKLVRLVFALLTKNQLYKEKVEFSKNGANF

SEQ ID NO: 93583 - protein, 357 aa, unidentified
MQPTVAWLGLDAHAKFSLLAWMDDQGNRRQHWRFPTSEPQLVKHLKQVPATTKHLALEECGLGRWLAQVAAPHVTDALVCDPRENHRISRHHHKCDEEDSYGLAHLHRLGALKKVWHSPSDERAVFKCATQAYLDAVQRQTALKLQLKAHYRQWGVIPTGSTVYGRSGRASYLAQIPQAGVRAQLQLLYEAMDGALEVERKARRLMAQLGAAFPEIARLRTVPGVGLIGAHLFVAYIQEPTRFETPQRLWRYCRLGIRDRSSDGKPLGFQQLDRCGHGVLKAISYRAWLAAMKQKRGAVHEFYAASLARTGDEVHARLNTQRKILHTLLVLWQSKREFEPKRFLGTEVQPAAKAKCG

SEQ ID NO: 93584 - protein, 402 aa, unidentified
MTYDYVIGMDACKYFHHACVLDIDGTQVLSKRINQNEQSLRALFSALSAYDHKVLVVVDQPNNIGRLTVAVAQDIGIDVRYLPGLAMRQLSRIHAGNAKTDIRDAYIIAHAAKNLPESLRNVDRVEEAFLQLKVLNGIDEDLARSYTRLINQIRSALVGCYPQFEQALRGQIIHRKWVLHLLARYGGPTKIKRLGKAKAAAFARRYKARNPEPVLDAIFAAISEQTVTIAGAHYAEMGVAMSAKDALLKLEHRQQIEKEVIELINDIPHTQFLLSMPGIGPKTAAQILMTAGDMSDFPSAGHLASYAGLSPRTNQSGTSIMSNSLNRAGNKKLKNALWQSSFASIRFHERSRQFYERKRREGKRHNAAVVALARRRLNVLYAMMRNHEHYHDPAPSQEDLAA

SEQ ID NO: 93585 - protein, 388 aa, unidentified
MQIVTDRPQAPTAIRTDLGAIFVSLELSRSTWLVTSLSPGGGEKMSKHTVRSGDVAGLRTRFSQLKDKVQIRMGHVVPIIVIQEAGLDGFWIHRLLQDEGVESHVVDPASIATSRRRRRAKTDKIDGEALVRALLAYKRGEPRVCAMVRAPTPYEEDRRRICRERKTLTAERVEHVNRIKGLLFAQGISDYEPLLRKRRARLEELRTGDGRPLPKQLKAQIGRELDRLELTLEQIKSVETERDAMLSLSDEGTPAPGAMLKSLKGIGPEFAGVLWSEGLFRSFSNRRQVASYAGLAPTPWRSGSVAHEQGVSKAGNPRLRTTMIQLAWLWVRHQPRSILTLWFHQRVQLNGGRVRKVLIVALARKLLIAFWKYVTAGVVLEGAETMAA

SEQ ID NO: 93586 - protein, 407 aa, unidentified
MELVALYKRVIGLDVHQAQITACALIEECDGLIRIEQRQFGTFKKDRRALAQWVVQLQPDEVVMESTGIYWKSPYAALEAAGIRAKVVNARHVKNVPGRKTDINDAQWLATLSRAGLLRASFIPPAKMRELRLIARQRQKLTGQLASEKNRLHKILADGGIRLGVVVSDVHGPSARAMIKALIANKMPQEVLKFASRRLKASREELFDALQGELTESHRFVLNELMQHIEEIEQRIARFDQRLLAGLESEHNWLVLLQTLPGVDLIGAAMLLVEIGNNMDAFGSADRLCSWVGICPGNNESAGKHKSGRTRKGNAYVRRLLCEFAHAASRTTSAFKAKFSSLIVRRGYKRSIVALGHKILRTIFFMFKRRQHYRDSATDYEKLSVQRNAARWIKTLIQHGFIKTAQA

SEQ ID NO: 93587 - protein, 418 aa, unidentified
MGKDLRGEGKEITMKVYIGIDWSENKHDVCFLNETGEVLGVQEIAHTIAGFRQLDPARQSLGVGRQEVILGLETAHNLLVDYLWEQGYEQIYVLPPSAVKSAQKRYRQSGAKDDRWDAHLIANLLRTDQRCYTPWQPDQPLTRQIRAEVRFARQLGQEVVRDGNRLRSLVLRYYPAILDAFPHLDSVVFLAFLQTYPTLSQAQALSFEELKIFLRQHHHTQVRSWPKLYAGLHSDHPQSNQTLEAAYAPLAVAQARILETLLRTRNACLARLDKLFPLHPDHEIYASLPKAGTLLAPALLAKLGDDRNRYPTPAVLQAVAGTCPFTKRSGKHVYVLFRQACDRDFRHIVQQWAHLSLDASPWAATYYHTVRPHCQTDNDAVRRLANRWLEILWRLWVDRKPYDEALHLKQHTLRNQIY

SEQ ID NO: 93588 - protein, 405 aa, unidentified
MGSETHYARAFDWRNYEYTKKPLEFSNTEAGFQTFKAWMEDIAEKYGKTAVIPGMEPTGHYWFALGKFLQDNGMKPVHVNPHHVKKSKELDDNNPNKNDRKDPKTIAALVNEGRFSYPYMPVGIYAEIRSLSNLRFQTQEELTRIKNRLARWFAIYFPEYKDVYGDLKAVSGRMVLKEAPLPEDIRKLGVEGVNRIWRDAKLRGAGMKRAKTLVTAAEHSVGSKEAPEAARMELKNLLDDMDVYTARQEGLLRNIEEKLKEIPYIDNLLAIKGIGMVTVSGFIAEVGDIGRFDNPKQLQKLAGYAIVANDSGKHNGESRISYRGRKRLRYVLYEAAISLVGKNAEFREIHEYYRTRKENPLKKMQSVVAVACKILRIFYAILTKGVEYDPKKLLGDIKRPQVQAA

SEQ ID NO: 93589 - protein, 374 aa, unidentified
MNNSITYVAMDTHKKEHTVALHYPGHEEIVRFTVRNTAREITKMTKKVIKQAPGAVEFCYEAGVCGFVLKRRIEAHGCHCAVIAPSLIPRKPGDRIKTDRRDALKLMTLFQAGLLTEVHAPDPQQEAARELTRCRQAAQENLKRVRHQLLKFLTRHGYLYSDGSHWTGKHLKWLRALEFEETLLQDVFDNYFTEMQHCIQRLSSLDNQVETLAKSESYQEIVGLLRCFHGIDTLSAITIITEIFDFGRFSSPGELMSYLGLTCSEFSSGEKQRRGPITRAGNKRVRRILVEVSWHYRHPCNISKALRERRKDQPQWVIDIADRAGQRLRKRYRHLTHCGKMPCKVTVAIARELAGFIWSVFKEYEARKHVKKAA

SEQ ID NO: 93590 - protein, 335 aa, unidentified
MKHYAGLDLSMETTQVCIVDENGRKLVSEKVESSPEAIAAILKRDGPIERVVIETGRMSPAICLGLRELGVPIVCIDARQAHQSLKAMKANKTDPHDAAGLAQLARTGFYKEVHVKSPAAHGVRSVITARSHLVEARVRLDNTIRGLCATFGYRPGTGQGKAFLERIMQAAHIPGLGEAIASLLAVRAELVEQIKAMDCRLRIIASQSQACEILMTIPGVGVQTSAAFAAAVDEAGRFRQSRNAGAYFGLVPRRHQSSELDWTGRITKQGDGTVRKLLYEAANSILTRSRETFALKTWAMKIAKRRGLKKARVALARRLAVIMHAMLRDGTLFQA

SEQ ID NO: 93591 - protein, 411 aa, unidentified
MKHQNHLFVGVDTHKNQHTAVVINCFHQKLGSVQTFNDPSHYQNFINNLKSLNSTDKTLVFGLEDTQGLGRSLAQWLIENGYTVKEVNPALTKRERHHSPNPDKSDKVDAKAIAKVLFSKWDDLPTITQDDNFKAIRQLNNQRKSLVKQRTRIKNRLHNLLHQQFPNYKEFFSDPFGKTAMAFWERYPHPTKLKHYGPKRLQKFLNNQAKSISNDKANLILSLVDKERRQDMSSDARNSIIPMLIKQLRIINQSLEKVNNKLKNAVNKSQYQLTTMPGIDFKLAAMFISNIKNIDRFDSADKLARYAGIAPSKHSSGKSKNTISKKYGCRQLNHTFYLLAVQQIGSSRSGKIKNPVAYKYYQKKLSEGKSRKIAITCLQRRLVDIIYAMMRDRTAYELPGKPDYKSINKAG

SEQ ID NO: 93592 - protein, 398 aa, unidentified
MTRKNTLKFLPTDTEFRVVGLDLAKSDVSVAAIPVDDNTPSLVDRMTYADLLDWAGKISPTLFAMEPCNGYSLLCLQLENLGHEIKVISGSTVSMWINTHLSGQKTDLNDAIALARLAVSDAELTPIRHKSITEIRIQTVQAVRQQLMSQRSKSIVSFKALAQQWGIPCAAGHRNLKKLRESIEAKVDLITRPVANAMLFLLDAVKSLDRQIGQLNQTLQELVMSDERGRLLQSVLGVGTQISARVITVVGNVERFNSPCSLVAYVGVAPRNFITGHKNLTKKKHGNCPDLSHKGQGKISRRGDKLLRSLFIQGAACLYMQFCKDQLPECQLKRWILKQLASQKPYGKLIVSLAAKLIRIVWAVLTYGEKFNIQKAGMTRSMWSEMALETPLNKEVPA

SEQ ID NO: 93593 - protein, 342 aa, unidentified
MITVTAIGLDIAKSVFQVHGVDAAGQVVLRQRLARGRVLAFFEKLAPCLVGIEACGSSHYWARELTARGHEVRLMPAQYVKPYVKRSKNDAADAEAICEAVTRPTMRFVPVKTPEQQSVMMLHRVRLMLNRQRTQLSNSMRAHLSEFGIVAPIGRRGLDQLLAVVADAEDTRVPADARLCLQMLAAQLAVVKEQILENDRRVRTSARTELGRRLMQVPGVGPLLASAFIATVADPAAFKTGRDLAAWIGLVPKQNSSGGKERLGSITKAGNRYLRQMLVVGAMAVIRYAERHGTRRPWLVQLMQRRSTKVAAVALANKTARIIWALMTSGERHREPTAAMAA

SEQ ID NO: 93594 - protein, 346 aa, unidentified
MEQYVGLDVSLKMTAICIVDRTGKMDREGMVASDPAAIAAFVRLHAPHVARIGLETGATSTWMWTELNKMGLPVICIDARHAKAALKMQINKSDRNDAVGIARIMQCGWYKEVRVKGLDSHAIKAVLVSRALLVKIKRDLENQIRGLLKNLGLVIGRAKMNMFVVRAAELIEDRPELAAAVEPLLKAREAVEKQIADLDRKVMRLARNDVQVRRFMTAPGIGPITALCYLATIDDPTRFKRSRSVGAYVGLTSRRYASGEVDWTGRISKCGDPMLRSYLYEAAGVLLTRVAKWSVLKAWGMRVAKRSGLRKAKVAVARKLAVILHRMWVDGTEFKWSSKEVATQPA

SEQ ID NO: 93595 - protein, 345 aa, unidentified
MKRILRIGMDVHSTNYTLCAIEPRFDGDDIIYANVKVTPDPDNIVQFIENLKKKIKDDCDILCGYEAGCLGFSLYHELKKKGIRCTILAPTTMLTQQGKRIKTDKRDAMMIAQCLAYGGYHAVHIPTDKDDDVKLYLRMRDDHKQDLKKTKQRINAFCLSQGFHYEKGKWTQAHIKWLKTLALSDLDRETLNEYLITYEYQTNRIESFDKRIDELASETEYVEKVKKLVCFLGVKTHTALSCLVETGDFQRFAKGNIYSAYLGLVPGEDSSSDNINRLSITKAGNSHVRKLLIEASKGICKGAVGHKSKDLKARQSGNPPEVIAYADKANERLRRKYYKMIRQRM

SEQ ID NO: 93596 - protein, 372 aa, unidentified
MEEPSKIHVGLDVHKESITVAVADPGRENARLFGKVVHDVPRLLKVLAKIGAVEELHVVYEAGPTGFGLQRALTKSGYVCQVIAPSKTPRQAGNRVKTDARDSLNLAEYSRAGKLSAVWIPDAQDEAIRDLSRAREDAVNGRRQARQQLKGFLLRHDRRYGGKTSWCRAHDHWLARQSFEQAAAQTAFTEYWQAVKSADERVLRLTTALQTSMAEWRFEPVVNALQALRGVASITAIGLTAEIGDLSRFEHPRKLMGYLGLVPSEESSGERTSRGSITKTGNGHARRLLVESAWNYRFKARIGKELNARQEGLSEAVRTQAWKGQLRLTERYAALTKRGIQPNKICVAVARELAGFVWAIGMQAQREKGMIV

SEQ ID NO: 93597 - protein, 323 aa, unidentified
MTERMFVGVDVAKAELVVAVRPSGAQWTVANDEPGRRTLVERLAAERPQVQLLVLEATGGYELSAVAALVAAGLPVVVVNPRQVRDFARSTGQLAKTDRLDAAVLALFAERVQPPVRALPDAATHALEALVARRRQRVEMLVAEEHRLAMARGRGPSARPITASLQQTIAFLRRQLATTDRELGTMIRTSPVWRERDDVLQSVPGIGPVVAHTLLAALPELGTLNRRAIAKLAGVAPLNRDSGTWRGQRTIHGGRASVRAAVYMAALVASRHNPVLRAFYHRLLAAGKPKKLALVACMRKLLTILNTMLRTQQPWAPNIALDA

SEQ ID NO: 93598 - protein, 413 aa, unidentified
MEVWLGGMSCLVSEGGGGMDLLLVGIDVSKALFSVVGIDSKGNESFSGTYSMDSSGFEELIKTITSHCEDLSKVIVGMESTGCYHINLYSFLISRQLHTIVINPLLIANYAKLSLRKTKTDKKDAGTIAKFLLDHRQQISQLSVTQDLQDLRDLSRERESLCHLISATKVEIKRLLRTTFPELESIGNLYTRSMVRFLQEYPSARLVRAAKPKAIANTLKQPSVGNKLTLTAEDIIKAAQKSVATVSPAKEIIVRGKIATLLHLQERLAEVTKLLIDLCQRTRLEDLGILRSIKGVGPATAAPFLAEMGEVNNYSSHKKIIAYAGIDPSVHESGQFVGMSKLSKRGNRHLRRAIYLMTASVVSQNTFFKAYFLKRKREGLAPQKALFATAHKLIRVIFAMLSQRTYFKVKEAQ

SEQ ID NO: 93599 - protein, 341 aa, unidentified
MKYSVISIDLAKNVFQICALNEKREIVLNKKVKRANLINVLRQFPPSLVVMEACYTSNPWGRRIMKLGHTVKCIPAFAVKPFLVGNKNDANDAIAIAEASFRPTIRFVQVKTLEQQDIQSLQRIRERMVKTRTGDINQLRGLLAEYGEVVAATPGALKKAIPYILEDASNELSFIARKFIQRLSINIESINKQIKEVETEIESLITQKIEYTHLRSVPGVGPVVAATVMASVHDMNIFKNGRQFAAWVGLTPSQYASGETNRLGKITKRGNQSLRKMLIHGARTVLNWCEKKNDNLSKWLQAIKQRMHGCKSVVALANKLARIIWAVLVNKTPFNVNKACA

SEQ ID NO: 93600 - protein, 339 aa, unidentified
MPLYAGCDLHSNNNHLALVDQKGKRVDHWKLRNDPKLILATLESQRSKIVGIVVESTYNWYWLVDTLMEAGYKVYLANPAAIQQYTGLKHADDKHDAFWLAQMLRLGILPEGYIYPKEERPTRDLLRKRGHLVRVRTSLMLSLQNIIDRNYGLRVSGNDMKRLREDRVSPVFSGNEDLNLVGSVSKEAIDFLTRQIRRIEKVIEGKVELRASYRSLLTLPGVGKILALTIMLETGPISRFAKVGNYASYCRKVSSQWLSNERVKGKGNKKSGNKYLAWAFSEAAEFARRQEGAARAYYQRKRQKTNLMVAHSALAHKLARAAYYLMRDEVPFQPEKLFS

SEQ ID NO: 93601 - protein, 361 aa, unidentified
MIVIGTDTHKRSHTAAALDEGTGRAVAERTVSAKRRSFDDLLLWGRGLDAERVWALEDCRHVSGALERFLLARGERVVRVAPKLTAGARDSARERGKSDAIDAVAIARAAIRVGLDTLPVAQLAGAELDIRLLVDHRERLVAARTRLINDLRWNLHDLWPELEIPLRGLIAVHWPQRVAARLARAEQTTRVRIARDELRRIRDLTKTIDELQRELALLVAKVAPRLLAERGCGVLIAAKIVGEVAGVTRFATDAKLARIAGSAPIPASSGHTIRHRLDRGGNRQLNCALHRLAVTKGLHDPDTNAYLARKQAEGKTRREALRCLKRYLARRVWHLLQDDPTPPQPAVTIHCNTPYNNFSLT

SEQ ID NO: 93602 - protein, 340 aa, unidentified
MNRTTYAVDLAKKVFQIYWVDSETGEIHNKQYKRSHVIEFFAKRALALVVLEAGGSAHYWARKFVALGHEVKLLHAKYVRPFVLTNKNDRSDAQALWAAAQHPAMRFVAVKSEDQQAILGLHRMRQQLVKFRTMQVNQLRGLLYEFGVALAKGREAGLSELRKRAAELEQTLPEILRQAIAGLLERLQRLEGDIGELERSIARWHRQHEPSLRLAEAAGIGVLSATAVVATMGDPKAFRSGRQFAAFLGLVPSQTGTGGTVRLGPISKRGDPYMRGLLIMGARSVLAHEHKRSAWAQRMLERRPFNVAVVALANKMARMAWAILAHHREYNPSYVSMRPT

SEQ ID NO: 93603 - protein, 391 aa, unidentified
MICVGIDVAKDKHDCCILDSEGTTLADCFTIPNNLDGFKRLLQTIKDCTQKSDKIKVGLEATGHYSCNILGFLLDNDLPVYVMNPLHTNLYRKSLSLRKTKTDCVDAKTIATMLLSDVDLKSYTDTAYHNEELKSLTRYRFDKVQERAKLKQSVSRLVTILFPELEQLVSSIHGTSIYALLSEYPGAKQISEAHLTRLANILVTTSRGHYRKDRATHIRDAARTSIGSVMPAKSLELKHTIKLIQELTSEINEIEDAIRKIMDELKPPILSIPGMGFYSAAMILAEVGDFSNFNSPDKVLAYAGCSPSTYQSGKLTNCYAHMEKRGSRYLRYALYTATKYVCYWNPVFTEYLTKKQAEGKHYNVALSHATKKLVRLIYALQKSGKAYLAIT

SEQ ID NO: 93604 - protein, 389 aa, unidentified
MLHDHPSAGPTAILTQFGAIFVSLELSRSKWVLTSLSPGNGEKMSQYSLAAGDIGGLLARFSDFKCKAKQRTGSDFPIITIHEAGLDGFWVHRVLRNEGIESHVVDAASIATSRRRRRAKTDKIDGEALLRALLAFKRGEPRVCAMVVAPSPEEEDRRRLCRERQTLIAERIIHVNRIKGLLFAQGVSDYAPLRRDRRKRLEGLRTGDGRPLPVHLKTQIGRELDRLELLFDQIHSVEVEQEALLAAESKAAPEGEPHNAVAMLLAVKGIGEHSAAILWSEGLCREFSNRRQVAAYAGLAATPWRSGAVMHEQGLSKAGNPQLRTTMVQLAWLWLRHQPQSALACWFRARGERGRKGSIVALARKLLVALWKYVTHGVIIEGAVMKPAA

SEQ ID NO: 93605 - protein, 352 aa, unidentified
MMIIGCDFHPRFQQIACVDTETGECVERRLHHPAEAESFYRSLAGQRVRIGMEATGSFGWFRRLLNELGHELLLGDATAIRASNPRKQKTDKRDARHLLTLLLEERFPAVWQPTEQNAGLRQLLLHRSSLVRMRTRVENQLDSLGKNEGMVASRRWTGKRRREVEGLALQGWYCERRRDLLLFLDQLEERIGPLDQAVRAAAEADAQARLLMTHPGVGPVVSLAFVLTIGDWQRFQRGKQVASYLGLIPCEDSSADKRRLGHISKQGNPMLRWLLVQAATTAQRYDGPWHRQYVRLSMQKHHGVAKLAIAHKLAVRLYWMLRSGQDYRQVMERGSHAGQSACPNGCGTTPRT

SEQ ID NO: 93606 - protein, 373 aa, unidentified
MNCTTVYVGMDVHKETFSLCCYTNEKERAEYCQKVDGHYSKVLNYLEAMRFHYGEDAKFVCGYEAGCLGFTLYHQLTNHNVKCVILAPTTMPKVSGKKKVKTDKRDAALIARCLAHRDYSPVHIPTQQDEQVKEYIRMRQDHKLALKKVKQQIVAFCLRHNYRYDSTKSNWTQAHLQWLRSLEAEGLYREILTEYLSTYDQLMDKLERLDRRIEELAAQPDYQEKVQHMSCFLGIKTQTALSTLVEVGDFKRFASAQQFASYLGLTPGEDSSGGEQNRLGITKAGNSHVRTLLVEAAQSYTRGQIGYKTKTLKARQQGNPADIITYADKANERLRRKYYRMVLSQGKKVNIAKTAVARELACFIWGMMTENIH

SEQ ID NO: 93607 - protein, 344 aa, unidentified
MNEITTVGLDLAKRVVSLCGEDASGRVVMQRTLRREAVLGWFVQRAPCLVGMEACASAHWFARELTALGHTARIIAPEFVRPFRLSGKNDANDAAAVCVAVRQPQLRFVTVKSAEQQARLVVHRLRQGWQEERTAGLNRLRGLLAEFGRVYANSAAAILSGARAALPDETLPAALRRGVAQQLEHLRELDAHLTACDREIAQQAHAEPRAQRLVRLSGVGVLTASAVTAMVIDPQQFRCGRQFAAWIGLTPRQYSTGGKPRLGRITRRGDTYLRGLLVQGARSALQAALRVAPTRRTRIAAWIAATYERIGYHKTLVAIANKHARLIWVLLARDEPLHAHAAAN

SEQ ID NO: 93608 - protein, 507 aa, unidentified
MSSSVAHWAVGIDVAIKSAHKVSILDRRTGQPIRRTLSIARTFEGVQRLKEILSEADRVEVAIEPAGNAWRPLAGALMAYGFDVYLVDPKKSSRLRKALSDHVKSDRVDAEALARLLMMLPDKLDRLSLPTSESARLRDLVRHRDRLTEATSARKTRIQAMIGQIQPTLMEALGTTKFLNAYRAFLRNYVDPRQVIRLGKNRLHRFLDRRHQRCFDPERTEKIFRAARSGAQLLDVQLEQGGAFFDPDQVQLEVCMELDLMEAEEAQIHQLEERIADLYHELDPGAVLQTLPGVGPIIAAGVLGETGTIDRFPNVGSFRGYVSLIPRYKATGKSHNPRQRIRKAGPRILKKYFYLAAENARKCDLELAAFYTGLRHKGRVHDQAVCAVANKLAGRAYALMKRMSQGQDARYVFRDLQGRPIAKEEARCRVQNEFPGPTAIRRMEAARSDASPTTPSNKARRASPAYARPPGSDASSSGSRTPRHISKILAEPALAELLARSGQVNDE

SEQ ID NO: 93609 - protein, 458 aa, unidentified
MHKKESPRNRTENTAVLKQINHNAAGADIGSDAVWISVGEHAAEQPVRKFGTTTAQLRASAEWMVSAGVETVAIEATGVYWVPAYEIYEEHGLNPILISSRAIRTFNGMKKSDFVDCKWIQLLHTFGILQPSVRVESLMIELRGYMRHRKTLTEQCSEQIQRMQKALTLMNVRLDQAVSDITGVTGMSILGAIVKGERDPKKLAELRKPGCAKSEAEIAEALTGHYRDEQLFCLNHSIQQWDFFQGQMAECDKKIETVLRKMPLKSEPTEVKATRKARKNQVRFDGKTLLEEKLGIDLTQIRGLDVLTVLTVISECGVDLSRFPTSKHFKSWLGLCPGTKKSGHRVLSSRSRRTTNRAATALRVAAQSLLRSDSELGAVGRSLRGRIGPEKTVTAVAGKLADRIYLSLKSGRVMQDRGSEYHDLKYRERSISSLTKRARRLGLRLVPISENTPTPSVK

SEQ ID NO: 93610 - protein, 378 aa, unidentified
MKNVRFVGLDVHAETIAAAVAESGSGEVRSLGTIPNRPESVGRLMRKLGKPEQLRVCYEAGPTGYVLYWQLTQLGVHCEVVAPTLIPVKAGDRVKTDRRDAEKLARCYRAGDLTAVWVPDAAHEALRDLVRARLAAKRDQLRARNRLSKFLLRHGRRAPQGTSAWSTKHSVWVKSQRFEQVAQQLTLEDYLHEVEHAAERIARLERSIDAAIETSPTRMRAVIEALQSLRGIAQISAVSIMAELGEVSRFARARQLMGYSGAVSWEDSSGERVHRGGISKAGNAHLRRIVVEAAWSYRHRPAIGRSLAARQRHGSAALRELAWKAQHRLHQRYVRLIARGKSKQQAVTAVARELLGFIWAIGIEAERAQDAKELRRAA

SEQ ID NO: 93611 - protein, 344 aa, unidentified
MSEVTTIGLDIAKHVFHAHGADERGGTVFSRRLTRGKLLDFFARHPRCVVALEACGGAHHWARELRAMGHEVRLIPPAYVKPFVKRHKNDAVDAEAICEAAQRPSMRFVAVKSEEQQAAALVFRTRDLAVKQRTQIANAIRGHLAEYGWVAPKGAAHLAMLADLLEDGEIGQTLPEAARPMFAMMIGMLANLDKQIAELDKEITRRAREDEVARRLMTIPGVGPITATAIAAIAPAAETFAKGRDFAAWLGLVPKQASTGGKQKLGAISRMGERTLRRLLIIGASAVVLQASKRGAPAGSWLEGMLARKPRMLVTVALANKMARTVWALLVKREDYRAPVAVAA

SEQ ID NO: 93612 - protein, 410 aa, unidentified
MEVLHQRCAGLDVHKKTVVAAVRLAVENKLITEVKTFTTTTAGLLALSDWLAENGCTHAAMEATGIYWRPVWHVLSDGEIELILANAAHVKNVPGRKTDVSDAAWLAELLAHGLIRPSFVPDGQTQELRALLRTRKQFVRERTRHAQRIHKTLEDANIKIDSELSDILGRSGRAMLEAMIAGESDPVRLAALAHRNVKASQGELQQALRGRVTPHHRFLLKLHLEQVDHLDAAIAMLDGQVEENLAPFRTAVELVSTIPGVSTLSAEVIVSEIGLDMNRFPTVGHLISWAGLSPRNDQSAGKRRSTRLRKGAQWLKTTLVQCAWAAKNKKGSYLQAQFRRLLARRGPQKAICAVAASILTAAYHMLKDGTCYQDLGPDHFSRRSKTTHAQRLVRQLQRIGFAVEIKPMPA

SEQ ID NO: 93613 - protein, 403 aa, unidentified
MRAKRDQYRSVAYGGMDVHYKFSSVTLRDAGGRVVVREKLDHRDRTALRAQVARWPRGTPLVLEASFGWGWLSDELRQAGLTPHLSNCYKVEQMRKARGQVKTNAKDADLLSLLPAESARWWEVWLAPPEVRDRRELLRYRMGLVALQTETKNRIHAHFHRQGIFHEFADLFGAAGRQYLLRLCATGRHAGGELPPGAGAALDGQVRLLLGVRAELAQVAGTLRGQLEHDPVVQRLKTIPGFGLILSHVVAAEVGQLQRFRNHKALASYAGLAPQSRDTGEAEADRAPQGRHLAAHCQRTLKWAFIEAAHNAVRSGGRWRAWYDRVTAGGTRDRQRGYIKVARELVKVVFVVWRKNQSYLETPAARPGSLPVSAAPPTRQSSRSGTGQPFVAMVAADLGRQTS

SEQ ID NO: 93614 - protein, 339 aa, unidentified
MNEVTLIGIDLGKHSFHLHAQDAAGRMVFRKKLSRQQLLRTLAKVPSCRVVMEACAGSHWLARQLAGMGHEPRLISPQLVRPFVVGNKNDFGDAQAICEAACRPSMRFVSPRNEAQQTVSAMHRLRERLVRERTATVNQIHGFLLEFGISLPRGAALMSRLPTVLDHETLPPRLVGLVVRLHAQVHYLEEQIRQVVQDLKASLREDDKSRRLLEIPGIGPITASALAVELGDARQFANARQFAASIGLVPRQYSTGGKPTLLGISKRGDRNLRRLLVQCARAVMQHTASRTDALSLWVKTLSTRRHSNVVACALANKLARIAWAVLARGTHYQARALTT

SEQ ID NO: 93615 - protein, 482 aa, unidentified
MKAKPPEKIQKATNPSMRGHWNEMNRKQRRETMRQIQSEDISLEVVHPDAAGIDIGNESHYVAVPPSRDNQPVRCFGCTTGELKAMADWLKQCGIRTVAMQSTGVYWIAVYDILEQAGLEVYLVNARETKNLPGRKSDVQESQWLMKLHTYGLLRNSFRPSQEIRTMRTYWRQRNDLVQGAGRHVQRMQKALTQMNIQLANVLSDVSGVTGQAIIKAILGGQRDPHKLAEFRDSRVRASEEEIARSLEGHWEEDLLFVLQQEQDGYEFCQKQMAECDRQLNHDLEQREDRSQGAPLPEEKRKGRRKKKSGNKPQFDLRTGLFRMSGTDLTRIDSIDVMTATTILSEAGWDMSKWETEDHFVSWLRLCPDNRISGNRVIGKGRLPTNNRVTIALKMAASALRLSDTYLGAQFRRFRTRLGAPVAIKAMAAKLARLVYRMLRYGMKYVDKGAATYQEQHRQLQIKQLKWKAATLGYQLIGVPAA

SEQ ID NO: 93616 - protein, 338 aa, unidentified
MNLYVALDVSLEFTAVCVMDEEGELVLERKVASDPAAIAGLLFELPERPCCVGLEAGPLSEWLARGLAQAGLYAVLMETRHVRAALSAMVAKTDRNDARGMAQLLRMGWFRPVHRKTMNAREQRALLAARSTLGRRLRDVENSVRGILRGFGIRVPRLPRGRWSDGVRGALQGNTVLRGVVEPLLAATQALRDQLAVVDKRARDAARQDAVCRRLMTMPGVGAIVALTYRAGVDQPERFKSSRQLGPCFGLTPRRYQSGETDRSGAISRAGDASVRVALFEAAHVMLTRSTHWSKLKAWAVAVAKRRGAKRAKVALARKIAVILHRMWIDGTEFRFVA

SEQ ID NO: 93617 - protein, 394 aa, unidentified
MKLIGIDIGKNKHFFCVMDQQTGEIISQPVSFSNDKEGFDFLLQKIKSYPKDSILIGMEDTGHYHFALLKYLLDLQYTVALINPKTTDFNRKMQGGITKNDKLDTINICDVLDTPERKKQYRITKVNSFDLYEQKQLTRHHHNLKEEENVYKNRLQKCIDIVFPEFNKLFNSKYGIVYMNILKMFGSAENIANTDIRTIRKCFEIEGRGNRISLTPERLKECARSSIGISSSAEVIQIKHLTAQIELIEEQLTEIDKKIEEFSIQNNSPILSIPGISHFSGTSILAELGDISNYSKPSQIIKFAGVAPLHYESSQFNAQHTAITKKGSKYLRKTLYQIILPVIKHNPVFYKYYQLKISQGKGHRCAQGHCVRKLLRIIYHLLKTNQQFDPQLLR

SEQ ID NO: 93618 - protein, 361 aa, unidentified
MSYTSAWNNATEMPVVTIGLDLGDRTSRIYEVSATAARLTEASVPTTPAALATYFGTRASCRVVLEVGTHSPWVARTLTELGHEVIVANPSAVYGQGRRRKRNDRMDAEFLARQGRADVKLLHPIRHRSAAAQADLALLRARDQLVQTRTGLINHVRGAVKAIGARLTRCAAEAFPRRVRAEVPEALRPALTPLLEVIGELSQRIAGYDRQLVAAIRDRYPVAMRLQQPAGVGPLTALAYVLLVEDPQRFGRSRDVGAYFGLVPRLDESSDSRPQLRISKAGDGLGRRLLVSAAHYILGPFGPPCDLRRYGEALAARGGKNAKKRAVVAVARKLAVLLHRVWVSETAYDPDYLATRPTRAA

SEQ ID NO: 93619 - protein, 409 aa, unidentified
MDIGPMYERVIGLDVHQAKITGCAIIEHADGCVTHDRREFGGFKRDRQALAEWVRSLNPQVVVMESTGIYWKSPYAALEAVGIIAWVVNARHVKMVPGRKTDVADAQWLASLARAGLLRASFIAKADLRSLRHIARQRQKLGGMLASEKNRLHKLLADAGVRLGVVVSDLHGQSARAMVKAIIAQKSIPDILNLASKRLKASREEIFEALQAEELTAAHRFVLAEIMAHIEELEQRMARFDQELLRCLDEAGYTAPLRLLQTLPGIDLMGAAMLVVEIGDDMSVFGSAQKLASWVGMCPGNNESAGKRQSGKIRKGNAWVRRLLCEFAQAAGRSRCALKDKFQALKVRKGHKRSIVALGHKMLRTIYAMLSKKTHYVDKAVDYEALMVARNAPRWIQMLVKHEFITRPI

SEQ ID NO: 93620 - protein, 355 aa, unidentified
MNQEKYIGMDVHQATISVAVMDSSGKLIMECILETKAATILEFIAGLRGTLSVTFEEGTSAAWLHDLLKPHVSHLVVCDPRRNALLKDGSKSDRIDARKLAELLHGNKLHAVYHGEHGLRTLKELGRSYLTIRKDLTRVMSRIKALYRSWAIPCSGATVYAPRHRAEWLAKILEPGVRLRAERLYQQLDLLQPVRQEARRDLLGESYKHHAVKLLRQIPSIGPIRAALLVALLQTPHRFRTKRQLWAYSGFAVETHDSGEYRFVRGKLVRNRERITVRGLNHNHNHDLKNLFKGAAISASTRPGPLCDFYVALVEKGMRPTMARLTLARKMAAITLTIWKKGVEFDAKPLNRQAA

SEQ ID NO: 93621 - protein, 361 aa, unidentified
MFTERTSVGLDVHARSVVAAAIDGVTGEVFRARLTPNNEQVVGWVRSLPGPSVATYEAGPTGFGLARAMATAQIRCVVAAPSKIRRSAGDRVKTDARDAMLLARLLRMDEIVAVTVPSVEQEDARDLVRAREDVRGDLMRSRHRVSKLLLRQGIVYCGGHAWTGAHLVWLRAQHFDTPGLALAFDAEYEAVLAAEARRDRLDEAIAAMAADSQFTPVVHRLGCLRGISTLTSFGLAVEIGDWDRLTGASIGAYVGLVPTESSSGQSRSQGSITKTGNTHARRLLVEAAWHHHKAYRTPGATMRARWELAPAAARARGHAGNRRLHERWLRFTERKKRPVVANVAIARELAGWCWSLAVMDP

SEQ ID NO: 93622 - protein, 339 aa, unidentified
MNCTAVGVDIAKHVFQVHYIDQETGEMVNKPIKRAQFLEHFANRARCLIGMEACGGAHHWARQLVKMGHEVRLIPAEFAKAFNIRNKNDAADARTIWLAVQQPGKPVAVKTETQQAMLALHRMRQQLIKFRTMQINNLRGLLTEYGEVMGMGRGVLDKAIPGVLARVAERLPAVVIDTLREQWNGLSKLDEQVAQIERRMREWKKEDKAVKAISEIPGVGLLTATAAVAMMGDPKAFRSGREFAAWAGLVPKQTGSGGKINLHGISKHGDAYLRTLLIHGARAVLRHAKEAGTWVDLMIKRRPKNVVIVALANKMARMIWAVLAHDRPYQKNYVSTKLA

SEQ ID NO: 93623 - protein, 340 aa, unidentified
MNIVFLGIDLAKNVFQLCGLNQAGKPVYTKRTGRKELLQTLANIPACLIGIEASTGAFYWQREFEKLGHKVKVISPQYVKPFVRGQKNDGNDAQAIAVALMQPTMQFVPPKSPEQQDIQALHRARQRIVNHRTATVCQIRGLLLDRGIPIGSAVSRARRAIPLILEDAENGLSSRMRRAIAELYDLFNDLERRIHFFDKEIETVFRQSEACQRIAKVKGIGPKTATAVVAAIGKGTEFKNGRHFAAWLGLVPRQHSSGDRLVLMNMTKKGDKHLRTLFIHGARAVVRVATNNNDGYMNQWVNQLKERRGFNKTTVAVANKNARIIWSMLRNETEYQIVGS

SEQ ID NO: 93624 - protein, 373 aa, unidentified
MPRYSTAFGMDVHLRSTTVCALDAETGEAVTRRFRGNPWGEVAEWMSGFPGPSLAAYESGYLGFAPQRELSGLGVDCVVAAVSKVPRSAADLSSKNDRNDAARMAKAILSHDVTPVWVPSPEIEGLRDLAAAHDAATARLAAAKQRLLAFLARRGYVYGGTTPAGNPRKYWTYGFLRWLDGIHPADDGGIRALAALRNEVEAADETREALLAEYRAAVAAGPLSAEVEALQSIKGCGFALAAAFASEVGDFSRFRSGRQVTAYFGLAPKQRSSGDSVRLGGISGAGNALVRKLAVEGSWCYAAARHQPKLMPRDTGVPLEIRMHGRKGSERLLRRREEMLARGMPQAKANAATAAELVRWLWALGTMCREGAE

SEQ ID NO: 93625 - protein, 345 aa, unidentified
MATMPQTLGGVTVGVDTHGKIHVGAVADPLGRILGTIEVTTDERGFRQLENYAKGFGTIERFGVEGTGAYGATLCRWLTNRGHEVLEVDRPDRKMRRLRGKSDPIDACAAAQAVLSGRASGVPKARDGAVEAIRVLRMARGSAVRGRTQTMNQMHALVTSAVDPLRMQLRSCSPAKLVDRCVGMRPGKLDSPAAATKFALRELARRHRALDEEVERFDEELSRLVAKRAPRLVALVGVGTDVAGALLVTAGDNPDRLRSEASFAHLCGVSPIPASSGRIHRHRLNRGGDRSANQALWRIVMVRMSWDERTRAYAARRTSEGLSKREIIRCLKRYVAREVYEVLVA

SEQ ID NO: 93626 - protein, 346 aa, unidentified
METRKIEAAYYCGVDMHSKTSYFCVLNRTGEIEYKRNIKNNFQTFKQNIAPFLPDVAIGCESTYNYYWLADGCAQAGLRFYLGHALYMKAIAGHKRKSDPLDAETIANLLRTSYFPEAYPYPKEMRPTRDLLRRRHRLVRLRAEAYTHIQLVCHQYGVIDVATPEIRDEETCQLFLERFRTDDIRTNIMTDLDMIKVLNPMVAGLEDQIEKQARHHRHLYYTLLQTVPGVGRMIGLNLIYEIHDISRFKTVQRFSSYCRVVRCERSSNGKSKGSRNQKIGNPYLKWSMSQIIMNGRKRESIGKYAQRLESKYGIRRARAQLAHEYAVAIYYMLKRSEPFNEERFLR

SEQ ID NO: 93627 - protein, 404 aa, unidentified
MNNVAGGDVSKGKSMVSVLRPFGEVVAKPFSVGHTGSELKELADYLKSLDGETRVVMEHTGRYYEPVARFLHEEGIFVSAVNPKLIKDYGNNTLRKVKTDKADARKIARYGLDNWVELRQHTPMDTIRMQLKTLNRQQGLYSKTKTMMKNNLIALLDQTYPGVNDLFDSPVREDGSQKWVDFATAFWHVDCVRNMSLAAFTERYHKWCKRHGYNFSQSRAVEIHTDAQNLIAMLPKDALTKTMIRQAVDALNAVSKSLEQLKAEMRTLAAQLPEYPVVMAMRGVGDSLGPQLMAEIGDVTRFAHRGSITAFAGVDPGADQSGTHEAKSNHTSKSGPPALRRALFLVMDCLLKTQPEDDPVYRFIDKKRSEGKPYLVYMTAGANKFLRIYYGRVKEYLASLENAD

SEQ ID NO: 93628 - protein, 342 aa, unidentified
MDLHRRRSVLVRMTDTGERLETVRISNDPEYLKAVMARAGEAPEVVLEAAYGWYWAADTLAELGATVHLAHPLGVKMFSYRRVKNDQRDAADLADLLRMGRLPEAWIAPPATRELRGWVRHRAKLVGLRSSLKCQVHGVLAHAGVWVPMSDLFGVAGQQLLAELSAGDRLSIESRSRLDSALRVIGALEFEIELFAKLVNGRLRTDPGYRALQAIPGVGPVLAAVFVAEIGDITRFHRPEQLASWAGLTPKHHESDTTVHRGRITKQGSRLVRWAAVEAIQRVSGHTRLGQHRDRVAARRGRNIGVVAAARELLTLVFYGLRDHHIRALDTPAAPVASTPAA

SEQ ID NO: 93629 - protein, 428 aa, unidentified
MNYNTQNKKIASITEKTLIIGIDVGSQTHYARAFDWRNYEYSRKPFAFSNDESGFLAFQAWMDEIAEKHHKETVIPGMEPTGHYWFNLGAFLQEQGMRVVHVNPHHVKKSKELDDNNPNKNDRKDPKTIAALVNEGRFSYPYIPTGIYAEIRNLSNLRFQTQEAITRLKNRIARWFSIYFPEYKDVYGKLDAVSGMMVLREAPLPEDIVALGVEGINQIWRNAKLRAVGLKRARTLVNKAEHSVGSHEAPEAARVELSLLLKDYEMYSQRMEELMQTIEEKLREIPYIDKLLEIKGIGMTTVCGFIAEVGDIRRFDNPKQLQKLAGYAIVSNNSGKHNGESHISYRGRKRLRYVLYEAAISVIGKNAEFKEIHHYYRSREKNPLKKMQSVIAVACKLIRIFYMIMTKGIDYEGAKMLGDIRRPTVSAA

SEQ ID NO: 93630 - protein, 337 aa, unidentified
MQVITLGIDLAKSVFQICGVNKAGKPVFNVAVKRNKLLETVLQYPNAECVMEACSGSNYWGRLFLQHGYVVKLIPPQHVKPFVRGNKNDRNDAFAITEAARRPQMMFLQPRSVEATDMAVLHRIRLRRQKSLTCLTNQLRGLLAEYGIVLESGVRGLKQAIPELLEQPENGLSDLMRQELSSLYDEWCVLEQLIQTQERHIEANAKQHPAAKLLMSIKGVGSLTATALLSLLSNPHHFKNGRHFAASLGLTPSEHSSGGKHRLGKITKRGNRYLRWLLVQCAMSHLRHLGKSTDSIALWLRALKERRGNQVAAVALANKLARICWAVLARQEVYKPV

SEQ ID NO: 93631 - protein, 343 aa, unidentified
MQAVTTIGLDIAKSVFQVHGVDAEGNVIFRRKLKRRYVVAFFQKLPRCLVGIEACASSHHWSRELQAVGHTVRLMPPAYVKPYVKRHKNDAADAEAICEAVTRANMRFVETKTPEQQSCLMLHRTRHLFIRQQTAVINAIRAHLAEFGIVAPVGRNGVEALLNIVADTSDKRVPEIARACLVALGAQLRMLKTQVLEFDRLIMAWHRSNATSKRLDEIPGVGPALATALVASVGDPGAFRSGRDFSAWIGLVPKQNSSGCKEKLGSISKRGDRYLRSLFTTGALAVIRYAKLHGAKHRPWLTALLARRPTKVAAIALANKIARMAWAMMAKGERYKEPIALAA

SEQ ID NO: 93632 - protein, 363 aa, unidentified
MGVIVVGIDPHMKTHTAVAVDARTGRVAAETTIPCDEGGRAKLLSWARQLDDERTFAIEDCRHVSSRLERFLLGRGESVKRVPPKLMARERRASRTYGKSDPIDAAAVAAAALREPSLPEASLSGTEREVRLLIDHREDLVAERNRIQSRLRWHLHELEVGLYIPPNSLRRASWLARTEAALRDLPHTVQSRIALDLVERCRELTVAADALEREIVSLMQVLAPELLAIPGCGALTAARIVGETGGVARFGDDAKFAMHAGAAPLPASSGQSYRHRLNRQGNRQLNAALHRIAVTQMRVHPPAQAFIERKRSEGMSTREALRCLKRHLARVVFRALSEMERASANRVVTVEFAVEPTGIALGA

SEQ ID NO: 93633 - protein, 360 aa, unidentified
MFTERTSVGLDVHARSVVAHAMDVQTGEVFKARLCPDPVEVTSWIKALPGPSAAIYEAGPTGYGLARTLMGNDIRTVVAAPSKLQRPPGSRVKTDAIDAEHLSTLLRLDAFTAVTIPDELTEAARDLVRAREDCRSDLMRARHRLSKLLLRHGIVYSGGQAWVSAHDAWLRRQRFDSPLVQAAFDEAYDSVITITARRDRLDDRITAMAVNSQYTDVVRRLGCLRGISTLTGFGLAVEIGDWSRFSGNSIGSFLGLVPSENSSGQSRSLGPITKTGNGHARRLLVEAAWHHQHRYVPGRTIRDRWDLASPAARAHGDLGNRRLNHRWNQFKKRNKKPTVANTAIARELAGWCWSLAVLED

SEQ ID NO: 93634 - protein, 326 aa, unidentified
MNETTTLYCGIDVSCDTLDACYQTAGGMLQHLKVSNDVKGYRQLLKQTNTAYHFVMEATGVYHISFMFFLHAFNCSYSVVNALQIKRYIQMHLERNKTDKKDAKRICEYGIERKPPVSEMPAPLYFECKTLNNAIRKITIEITAFTNQVHSIEKLPVYSKEVVKCYKKLIKELKLQQQQLEKALAKKLLEWQPELVKTVSSVTAIGKRATAELIIYTQGFKDMKNYRQLISYAGLSPKEYSSGSSIRIRARICKQGGKTLRNILYMCSLCAIKTNHACKQLYERLVAKGKNKKLALIAVCNKLLKQIFAVVHNQTLFNNNYLKNSY

SEQ ID NO: 93635 - protein, 413 aa, unidentified
MTEENFAWFAGIDWGSERHQACLVDAQGRIVGEREFPHGGKGLADLCDWLLSMCGAAETVAVGIEVPHGPVVDTLIDRGFVVHAINPKQLDRLRDRHSVAGAKDDRRDAYVVGDGVRTDRRLFRRVHVTDPRLVELRAWSRLAEELTEERVRLSNRVHHELWRYYPQMLKIADGDVAATWVLDLWDLAPTPARAHRLRAAPVEKLLKHHHIRRIDADAVLRNLQDPAIKVGKGVAEAASVHLRSLFTRLRVVNRELRQADAKLDALCAAIGETDADSGEGLQRQDVMILRSMPGIGRINLATLLCEGSGPLSRRDYPALRTLCGAAPVTKRSGKSHIVIMRYASHVRLRNVVYHWARVATQHDPKSRERYAALRRRGKSHGRALRGVADRLLGLACVLLQRQTPFDPNFAQAK

SEQ ID NO: 93636 - protein, 336 aa, unidentified
MLYVGIDVAKSKHDCCILNENGKALSTFVIKNNKQGFEELIAEITRFSSVSDLSDAKIGLESTGHYSINIQNYLLQKRLCVRIYNPLSVNLLRKAQSLRKTKTDKSDCKFLATLLFSDDSKSYSQPVLPISELRNLTRNRHRLVSMRSKLKLSLSRLITILFPELPSAVWSVNQKSCYAMLSEFPTAQDISKANIVRLTNLLSANSKGKYTREKAEQIRDLARNSIGHDSGAIGFELRQTIRLIQNLQGEIDLLDSEIKRIMDDVQSPVLSIPGIGYVLGAILVSEIGNIENFSNPAKLLAFAGLDPSIYQSGQYNANPNGKKKEVHYFISRQRSK

SEQ ID NO: 93637 - protein, 373 aa, unidentified
MPKYSTAFGMDVHLRSTTVCALDADTGEAVTRRFPGNPWGEIAGWMDGFPGPSLAAYESGYLGFAPQRELAGLGVECVVAAVSKIPRSAADSASKNDRNDAARMAKAILAHDISPVWVPSPEVEGIRDLAGAYDGATARLATARQRLLAFLARRGFVYGGTTPAGNPRKYWTYDFLRWLDKVRPEDDGGVRALAALRNEVEAAAEARADLLSEYRAAVDASPIAAEVAALQSIKGCAFALAAAFSAEVGDFTRFRSGRQVTAYFGLAPSQRSSGGSVRLGGISGAGNALVRKLAVEGSWCYAAARHQPKLMPRDTGVPLEIRMHGRKGSERLLRRREEMLARGVPAAKANAATAAELVRWLWALGMMCREGAE

SEQ ID NO: 93638 - protein, 359 aa, unidentified
MLTQSNKIDFNGQHFYVGLDVHLKSWKVSIMAEKLTLKTFSQDPRPELLHHYLVKNFPNGTYHSAYEAGFCGYWIHNKLTALGIDSIVVNPADIPTTNKEKVSKTDKRDSKKIAKCLRNGELKGIHVPSLKTLEDRCLVRTRGTLVKDLSRNKNRIKSFLYFHGIEMPEKFKQMSTHWSNRFMNWLRSIELSEYSAKKSLTLIIDESEHLRLIILDATKGIRELSQSETYANHVQLLRSIPGIGILTAMIVLTEIEAISRFNNFDNLCSFIGLVPTTHSSGDKDIIGEITIRGNNFLRSAIVESAWIAARKDMVLNKCYHDYCKRMEPNKAIIRIARKLLNRIRYVLKNNQPYVYSVIK

SEQ ID NO: 93639 - protein, 342 aa, unidentified
MTEIKYSVGVDIASSTFTASVGEIPWKVVLKPQTFENTEDGYQTLLERFAQHHLSAPNTVVCMEATGVYSEGLAYFLYAKGYQVAVQSPLEVKRTFKPYGPKSDAVDSLQIAEYACRHTDKLSFWKPRSEILEQVKALLAVREQFVAQNTAHKNALKAIQRKVVRTPFAEQAYLQLIEQVKQQIKAIDTEVRRLIESDPTFKEMLLLLLSVPGVGLLLAAHFILLAQFSLEYKVLASFLGICPNEHSSGTSVFKHATSRHFGPSAIRKLLYLAACSVCTHRPHFGMYLARKTKEGKPARLVLNNVENKLVRIMCAVLQSKTAFIENYHSVQPLVFQKTLTAS

SEQ ID NO: 93640 - protein, 352 aa, unidentified
MFYVGLDIHDKRIAICVLNETGQIVRRAQVRTIDEMMRILEALPDRFGVCYEASCGYGHYHDLLKPIAARVTVAHPGRLRLIFRSKDKNDRKDAERLAKLLYLGEAPAVHVPSADVRTWRELITCRGRVIAKRTRAKNSVRTLLRGAGVVPPRRPALWTKKGLEWLRRLELATTSQQLRRDLLLEEIESLTNQVRRIEHELNHQAGRSPGVARLRSIPGVGARTAEAVVAFIDDPDRFANAKAVGRYFGVVPSQDQSGDRNRLGHITREGPAVVRQLLAEATWQALRRSPRVRAYFERVRRDDPQRKKIALVATAHYLVRVMLAMLKRGTDWEEGFAPADEPKGVAKAVVRI

SEQ ID NO: 93641 - protein, 407 aa, unidentified
MNAVGIDISKGKSTVAALRPMGEVAFLPQEFLHTEVGLEQMAGAIVALGEDTRVIMESTGRYHEPVAAALHEYGIYVCVLNPLLIKQSGGGSIRKVKTDKADALKIAKYGLDNWVDLREYTPMDTIRQQLKLCSRQYNLYMKTVVSLQNNLISLTDKTFSGVNELFSSPERADGHQKWVDFVMTFWHCDCICRASEKAFTERYQKWCKRKGYHFSAEKALDIYAGSCGHFTTLPKNENTKLLIVTAAQQLLAGKTTLATLRAEMTRLASQLPEYETVCAMYGVGKITAAQLMAEIGDVRRFPRRSSIVGFAGVDPGVDESGKHSAKSVPTTKRGSPHLRKTLYQIICTYLKKSPADEPVYQFLDKKRAEGKPYFVYMTAAQNKFLRIYYARVKECLEAFDTEPAKQS

SEQ ID NO: 93642 - protein, 328 aa, unidentified
MQDILTCAMGLDIHRDVIVACLAKGELGTDPEIEIRSFSTLIPEMRKLRDWVLEAECRYVAMESTGIYWQPIYEMLEPCFDGQISILVVNARHMKNVPGRKTDMRDAQWIATLLRAGLLKGSFIPDKTFRELRHLTRYRKSIVRDITAQKNRIDKFLQSSGFRFTAFLSDAFGASGRNIIRHLMEYGNISREALDRCLKTQTRKRIDEILIALNGSLSEHQRGFLRMIFGHLEALEQHRHTVEDAITKEITKHEEALSLLCSIPGIDVTAAAAIIAEIGTDMSAFPDSQHICSWAGLSPGNNESAGKRKSAHINKGNPYLKSMLCEVG

SEQ ID NO: 93643 - protein, 343 aa, unidentified
MSEIKRIGIDTSKAVFTLHAIDQADRPVLRVNLRRAQMLPFFKKRPRTEIAMEACSSAHHWARKLTALGHDVRLIPPQYVKPYVKRGKNDRNDAEAICEAAGRPGMRFVLTKSEAQQADGLVLKVRETLVAQRTQLINALRGHAAEFGVIAAKGTSQIAPLLAAVAAEESIPAAAKAMLALLGEEIAHLDGRLKELEAKLLAMHRANAISQLLATIPGIGPIIALTLAVEVDPKAFQSGRHLAAWLGLTPREHSTGGKQRLGGISRAGHERLRSLLVSGATAVIRHASQGGGKLASEWLRQLLSRKPRKLAAVALANKMARIAWAVMSSGEAYRHPAAGAAAA

SEQ ID NO: 93644 - protein, 452 aa, unidentified
MTVNAAVLFLCSHPFTKGGTPMDAQQFEVIRPKCAGLDVHKKSVVAAVCTSDPVTLTASYKTKVFNTTNSDIAALRDWLLAQDCRDVCMESTGKYWIPIFNILEPHMHVILTHPKYVKAIKGKKTDKRDAKWIANLFRFDIVKASFIPPADIRALRELSRYRLKLSYMRTAEKNRYQNSMTISRIRIDCVLTDPFGLSATRIMDYLLSDEPFDEEKCRSLIDWRVKASKDDVLDSIRGYNIPEEQKFKMTHAKAHMDFINKSIDEIEAELFLRSRQYDTQVKRIATVTGITGLSALFILSEIGADMSVFESDRHLCSWAGLTPANNESANKKKSARCSRAGQYLKPLLIQCALAAVKSKKEPYFAIKYQRIAKRRGKKKAIIAIARMMLTSIYHMLSEDKDFRPDDYEATVNPPKQKPTVLTIENTLQFLREQGADPETLTLIQQQCAAQAG

SEQ ID NO: 93645 - protein, 442 aa, unidentified
MPAVYYERNFVAAGGLISYGPDFVDQYRQAAGYVDRILKGEKPADLPVQAPTKYELIINLKTAKALGLTVPDTVRMMGWMAPLRHRLAKLVFSRITRNREPSMSETTTIGLDLAKHVFQVHGVDAEGTTVLRKRLRRGQVLAFFSRIPRCLVGLEACATAHYWARELAAVGHEVRLMPAQYVKAYIKRNKNDAADAEAICEAVQRPTMRFVPVKTAEQQANQLLHRGREQLVRQRTMLVNALRAHLAEFGLVAAQGLRNVGELIAIVRDDDDTRVPDMARQVLQVLACQIEQIEAAIAALERQLLAWHKTNPVSQRLASIPGIGPIIATAIATTVADPKVFRSGREFAAWLGLVPRQNSTGGKTRLGGITKRGNRYLRRLLINGASANLLRSKATKADPWVIGLRRRRPPLVVAVALANKTARIAWAVMLRERQYQPRAVAA

SEQ ID NO: 93646 - protein, 314 aa, unidentified
MTDKLYIGVDVSKDWLDIARNDRGEVKRIDNTTQAVANFLARLEQPPTLVVFESTGGYERPLRAGLLAAGVAFARVHPNEVAAFKARRGARAKTDQIDARQLAAFGASELATRGLGPLVEGDDDLREMTTRRRQLVDLLQAERCRAAIADNGVVRHSLAALIATLEKACDDIEAEIDAHIAKSAELAKIAELLRSLKGVGPVTVHTLLGELPELGRLTGKEISALVGLAPRTNQSGKRTFRATTGHGRPGVRRVLFNAARAAVRWNPVMKEFYQRLVVENRRPGKVALTAVMRKMLVVLNAIAKENKPWKHAVA

SEQ ID NO: 93647 - protein, 364 aa, unidentified
MKEQESKTRCVGIDLGKRTYQMAVVGKGGKVTMSNGTTYTAGRQGLYKKLRAEDKVALESCSLAFIMAKEMEAAVGCQVYVLNPGRLSIIYKSMKKTDKEDALKLAHILEDFAEDRLPVVPVPSEKEMYRRKILANSRRAQNNRNRLINLLHALFVSQGITTKVRKDLAAERVRKEAIKELTGIERDEAEYLVQCLGLSEKRIEKLDQMIAEESAGDEEIERLQSIPGVGPKVAFAFVSHVGADRFENSGQLSNYLGLVPRVYMSGDTVRYGPITKRGNSYVRALLVQGAWALVRSKGGGRLKELYEYMTIEKSKNKKKAIVAVARKLAEIIYTMMREKTCYANMKFKPGKETAEVLAQLAMSA

SEQ ID NO: 93648 - protein, 399 aa, unidentified
MNSVGIDISKGRSTIAVMRPFGEVVISPFEVRHTGSELSKLARQLKSLDGETRVVMEATGNCHASVAKLLHNAGLYVSVVNAKLVHDYGNSELRRVKTDRKDAVKLADYGLDRWLTLPRYITRLLLKNCYRQYRQYSKVQTVLKNNLISLLDTVCPNANRLFSSPIRGDGSEKWVDFVAEFWHCRCVSEKSERAFTSQYLCCCRKHGYNFREAKAHTIYAEASGHIDVMSKSETTKLLVEQAVAQLRATSTALAVLKHEMQSLASMLPEYPVVMDLFGVGPTLGPQLIAEIGDVRRFYSKKALVAYAGLDAPPNDSGDVTGRHKSTSKIGASSLRRTLFLVMSVYLQTAPLDEPVYQFMDRKRAEGKPYRVYMMASANKFLRIYYATVKAYLEPLERTA

SEQ ID NO: 93649 - protein, 385 aa, unidentified
MANQNDLSRSLVALEQNNTIIAVIEMSLNYWLIAGIVPGVDRHPLKKLNVDEKALLQLLRQWRDEAAKAGHVITRMAVAFEAGRDGFWLARWLRARGVDAHVIHPTSVAVPREHRRAKTDRLDTELLKRAFLGWLRGEPEHCRMAAIPSLQEEDAKRPTRERENLVGERTRIINRTKACLVRFGIRNFKPTLRKAPERLNQLCTPEGDPLPPNTLAELRRDMARLRFIIDQINEIEAARLLRLEQARVEGPTAMVRLVARVIGVGIETADMLVHEILSRDLRDRRAVARYAGLTGAPDESGSKRREKGLAKAGNARVRRGMIQLAWRFLLHQKDSALTQWYRARTASAGRKRKTMIVALARKLLIALWRLATTGEVPTRVVLRAA

SEQ ID NO: 93650 - protein, 424 aa, unidentified
MNFKMQNKQNQLIERISSNHLIVGVDIAQQFHVARAVNYRGIIVGDPLTFENNEEGFMKLVNWMQDLQKLKHLNAEIVGMEPTGHYWINLSKWLFDKGIEVVTVNPHLVKRNKENRDNTQSKSDKKDALVIADMVKNGYYSFVQISSEAFEKLRVLMSNRDVIVKRLVMAVNQINRWVDIVFPELRHVFKDVSCKGAIATLRLFPTPKEISSMTSLDIMVGWKSLMKRQPGPKKAQLLIKYAKSSIGTGQALDAYKFHLEQLLEEYDLAEQQLERVEQQVKKVLNKISFAKKLLMMKGISEISLAGIIGEAGDLSGFSHGNSLLRHAGLHLAEASSGKWKGQIVLSKRGRSRLRRFLYLATMSLVMNNPEFKAIHAHNVKVKKMKKMKSIMKLIGKLARIFVGIARRNVSYCPSKVQESIPLAA

SEQ ID NO: 93651 - protein, 348 aa, unidentified
MQKNKEYVGVDVSKESLDMVVYSTGVIRSFGNDDAGIAEATSWLKQINPAIIVMEATGAMEVSLYVALQEANLTVAVINPRQIRDFAKSMGILAKTDKVDAKVLARYAATIQPEARPLPDEGDRQLKTLVTRRHQLVEMITAESNRATITRDKTMKQRIHAHIDWLKQELAGIDKGISHMIKENPVWHAKDELLQSVPGVGPVLSATLIAGLSELGILNHKKIAALVGVAPLNRDSGKHRGERNIWGGRCSVRQPLYMAALNAVRFNPTIRIFYERLLANGKEKKVALTACMHKLLIMLNAMLKHNSYWSCNYAIFNDSCIPNAKTVALSSPSRGEDSSFPSPSTGEG

SEQ ID NO: 93652 - protein, 343 aa, unidentified
MISVGIDVSKGKSTVCILKPYGEIVSKPFNITHTHKDLSELSSMLFRLNDEVKIVMEATGIYHLPILTYLQEKGFFVSVINPYLMKSYRNESLRKAKTDKIDSRIIANYGIDHWFKMKEFQISGVIYEELKLLGQQYRHYMKLHLLSLAELTHLLDLTMPGIKNLLASWNETNRKDKRSDFVERFWHYDIITSMSEQEFTEKYILWAKEKKYVPSQEKAKVIYTLAQESIPTLPSETSSVKMLVTEAVRVLKEVDATLGLILSRMQEIAKTLPEYSVVREMGGVGNTLAPKLIAEIGDVRRFRNGKALVAFAGIDPPPYESGQFVGCNRKISKRGSASLRKVG

SEQ ID NO: 93653 - protein, 482 aa, unidentified
MKPSQQNKPQKASCRPEQGSWQQMNRKQRREMTRKMHAEDLSLEVVHPHAAGIDIGNEAHYVAVPPDRDNKSVRRFGCTTAELKEMAAWLKQCGIRTVAMQSTGVYWIAVYDILEAAGLEVYLVNARETKNLPGHKSDVQESQWLMKLHTYGLLRNSFRSPQEVRTMRTYWRQRNDLIRSAARHIQRMQKALTQMNIQLANVLSEVSGVTGQAIIHAILAGERDPRKLAAFRDKRVKAREEEIARSLEGNWQEDLLFMLKQEQEGYEFCQKQMSECDERLQQYLRQREDRSKGAKLPEENRKERLRKNKTNKPRFDLRTELFRMTGTDLTQIDGIDVRTAATVISEAGWDMSKWRTEDHFVSWLRLCPDNRVSGDKVIGKRRLPINNRLSVAFKIAASTLRQSNTYLGAQFRRLKTRLGPPIAIKAMAAKLARLVYRMMRYGMRFVDRGAEFYEAQHRRRQINSLKRKAANFGLKIIDAPAA

SEQ ID NO: 93654 - protein, 378 aa, unidentified
MTEEIHHFTKQTDTMKNTITRLGCGLDISKDKFDVCFGVMLSDASFVIKGSRSFANKKAGINEFLVWLGKNHAKHNPTGELPFQVVMETTGVYHEHVCLSLYEASWPVCVEVSSRVKRYLQSIGQYSKTDKLDAKGICRLACERKVTLWRPFSPKTMAIRTAIRHRKSLIDNKNRLGNQLHALSHSANKDSNMAASIKRLVKAMDKEIAKIEEHIHELYEADPVLKERLDAIVKSVKGLGLVTALTVVAETNGFDLFQNAKQLVSYAGLDIIENASGNSTRPTKISKRGNARIRNALYMCALTMGKYKDAPFAGFFSRIRAKNPKIYKIANVAVQRKLLVLIYTLFKNNTSFDPAYNKQNIQISSSELNSELREIAAA

SEQ ID NO: 93655 - protein, 327 aa, unidentified
MDPTTTAARLFAGVDVSKDRLDVCLRWSEAEMHEKEEAFFVAYDDIGIDALLSRLLEERSALVVLEATGGFERTVVGALAAAGLPVVVVNPRQVRDFARATGTLAKTDRIDASILARFAEAVRPAPKPLPDREIRALQAIVARRRQLLGMIAAENNRLGSAPKPVAKRIKAHIRWLEKELSRTEGDLEAAIESSPVLGENEALLRSVPGVGPVLARTLLAGVPELGTLTHKRVAALVGVAPLNRDSGTLHGRRSVWGGRAEVRGALYMGALVAARRNPVVRGFYERLLAAGKPKKVALVACMRKLLSILNAVLKHRTPWRFPQYLSP

SEQ ID NO: 93656 - protein, 337 aa, unidentified
MSKKEYVGIDLHRRRSVIVRVSESGEKLATYRLTNHRELIAGAIKEAGPHPEVVFEATFGYYWLADLLKELGCVLHLAHPSGLHWENRRVKNDERDALELVKKLRLGELPEAWIPPPEIRELRELVRYRAKLVRLRSGLKSQVHSVMAKNGVLPTREDMFGPGGNAQLDAMVLPDAYADRVGSLRGLIDLYDRQVMITDREIHLLLRNDAGYKTLQKVPGIGPVFASIFVAEIGDVKRFASAEKLCSWAGLTPKHRESDVKIYRGRVTKMGSRLVRWAAVEATAKNHGPERIRSNYSVISKRRGAKKAQVAVARQLLTLVYYGLRDGEIRSLKKEAA

SEQ ID NO: 93657 - protein, 369 aa, unidentified
MEQIIRIGMDTSKHFFQLHGVNAAEQPVLRKKLWRKEMVAFFEKLPPTVVGIEACGGSHHWARLLGSLGHEVKLLPPQYVKPYVKRGKNDAADAEAVCEAMSRPTMRFVPIKGAESQATLMLFGMRDRLIRNRTQLANAIRGYAAEFGLTAAKGMYKVESLLERIAADENLPELARALFALHAKEYAQLQAELETIEAKLMAWHRENECSRRLAQIPAVGPIVASLLTMKTPAPELFRSGRDFAAWIGLTPRDHSTAGKTRLGVITRAGDETLRSAMVVGATSLLRQVRAGRGKNALPWLVNLLKRKPPKLAAVALANNIAGLSGILCGGPVSSVEEPLAKDDGELCLCLDPFPRRPFPLLGRVVKNEI

SEQ ID NO: 93658 - protein, 320 aa, unidentified
MTNLNVFSGFDVSKDYFDFFTIDDQGKSIGQRVVYTREGLKSLARFIPAQSHCVMEATGPYYLKLATWLYQNGYAVSVVNPLVIRRFCQMKLVRAKTDKADARMIALYAKSEKPALWQPPAPYIVKLQQLDALVELFTKNRTALINQLHAFEVTGIADPFTCSLLKKTIADVTKKMEKIETEITAVIGAHYKEMLENLKSIPGIGKRSAVALIVASDGFKRFDNYKKFSSYLGICPRIYESGSSVRGRSRICKLGMSRIRAILYVCAWSAKKGNLACKQLYDRLVEKGKSKRLALIAVANKLVKQAFAIAKSGIKYQPVG

SEQ ID NO: 93659 - protein, 410 aa, unidentified
MELLHPHCAGLDLHKETVVACVRHMADGKVTTDVKSFQTTTHELMELSDWLSSQGVTHIAMEATGVYWKPVWHILSDGEFALILANAAHVKNVPGRKTDVNDAVWLADLMAHGLIRASFVPDEPTQQMRDLLRTRKQFVRERSSHTQRIQKTLEDANIKLDSVITDIVGLSGRRMIEALIGGETDPEALAALAHGRIRATKAELEAALRGRVTAHHRFMLRIHLNHLDALNTTIADIDKEVDGNVEPFRVAIEMLTTIPGVSSLAAEVMVSEIGIDMSRFKTEGHLISWAGLCPKNDESAGKRRSNRMKKGAPWLKTTLIQCAWAASRTKASYLQAQYLRIRSRRGPKKAIGAVAASILTAAYHMLKDGTLYQDLGASHFDNRDKGKQALRLVNRLQSLGFTVQITSMAA

SEQ ID NO: 93660 - protein, 310 aa, unidentified
MIAHVGIDVSKKHLDIALHPQKDVFRISNTLEALTALAERLKPYAVERVLLEATGGYEKLALQVLTGLGLKVVRINPVRVRNFAKAMGKNAKTDKIDAKMLALFSSKLENEQAAVVDEVRDTLNELVTQRQFFVQQRDDIRRRVKQITSEVVRTAYLQQIKTLDDQVKKIDVLIEAKSSEIDSKSVQRLRAIKGMGPVTISSLLCFLPELGSVSGKHIAALVGVAPFNNDSGDKTGERHIYGGRGRLRRALYMCVLSMTRFNPAFKARYAALRARGKCAKVAMVACMRVLAVRLNAMIKNDQDWMDEPAR

SEQ ID NO: 93661 - protein, 392 aa, unidentified
MIYVGIDVAKDKHDCFITNSDGEVLSQSFTIPNNREGFETLFKRIASLSDDVTKVKVGLEATGHYSYNLLGFLFCKGLPTYVINPLHTNLYRKSLNLRKTKTDKVDAHTIASMIMSDVNLKSYSDTSYHNEELKSLTHYRFDKVKERAKLKSSVSRLVCILFPELEKLVPSLHMASIYALLSEFPSASAVASAHLTRLSNLLSESSKGRYGKDTAVIFREAARSSIASHMPAKSLELKHTIKLIQELTSEIDEIEASIKRIMDEDIHSPILTIPGISYRMGAMIIAEIGDFSRFDSSDRILAYAGMSPSTYQSGQLDNCYSHMEKRGSKYLRYALFNATKYVCLWDESFAAYLAKKRAEGKHYNVALSHAAKKLVRLIYAMERSGQPYRKTA

SEQ ID NO: 93662 - protein, 347 aa, unidentified
MLADELDYVVGVDPHRDAHALAVVYAATGGVSFGAEVSASERGYAQALRLAEREAPGRRAWAIEGTGSYGAGLARFLAAHGERVLEVGRTKRERRSHPKTDALDAQQAARSVLGEAKHAAPRAAGEREALRALMVARAGALAAKKAGLCQLRALLVTCPEPLRSELRSLTLARLLRRLALVRPNRHHEAEMRGALIALRALARRVQALTAEERELKREIQALVAGLAPALLDEPGVGPVAAAQVLISWSHRGRFRSEAAFARLAGAAPIAASSGLVLRHRLDPGGDRQLNRALHTIVVSRRKHDPATIAYVERRRAEGKSVRETIRCLKRYLARHLFRLLETGPMAA

SEQ ID NO: 93663 - protein, 346 aa, unidentified
MLKLTLADQLRKALLTVGLDYHSSFVQVCVMDADGTVLTNRRCASTPRAVREAVEMLVEARGATVQAAIEACNGAADFAEELVAGGWQVSLAHAAYVHKLKQSPDKTDWSDARLLADLMRVGYLPKVWLPPAELRQLRHLVRRRQQLSERRRTAKQRVTALLRSERVEFSGSRWTKAWIQAVRNCADLGEQGRWVVNELLDEVIEVQGHLDRTEARLEELTQDDPFVKQLRTHRGVGLITAVTLKAEWGTITRFRSGKQLSRFCALSPRNASSGLKQADAGVIQAGNRELRRVLIETAHRLMRCDQRWHELGAALKSRGKPGNVAAVAVANRWVRWLYHQLQPLGV

SEQ ID NO: 93664 - protein, 340 aa, unidentified
MGEVTTIGLDLAKHVFQVHGVDASGATVLRKQLRRSQVVAFFAGLPRCLVGLEACATAHYWARELQAVGHEVRLMPAQYVKAYVKRNKNDAADAEAICEAVRRPSMRFVAIKTAEQQAALLLHRGRERLVRQRTTLVNALRAHLAEFGVIAPQGLSNVARLIAIVRDESDTRLPYLARQVLQVLATQLEQLGAAVAAIEKRLAAWHRGNPVSQRLASIPGIGPIIATALAATVVEPIGFASGREFAAWLGLVPRQHSTGGKARLSGISKRGNRYLRRLLINGASANLLRSKATNADPWVRGLRRRRPSLVVAVAVANKTARIAWAVMRRAESYRPRAAAA

SEQ ID NO: 93665 - protein, 428 aa, unidentified
MKYNTQNAKIESITEKTLIVGIDVGSETHYARAFDWRNYEYSKKPLEFSNNEAGFVTFKVWMEELAEKYGKDVVIPGMEPTGHYWFNLGTYLQDNGMKPVHVNPHHVKKSKELDDNNPNKNDRKDPKTIAALVNEGRFSYPYIPTGVYAEIRSLSNLRLQAQEEITRIKNRIARWFSIYFPEIKDVYKNPGAVSGLMILKVAPLPKDIVKLGVDGVNQIWRDAKLRAAGLKRAKTLVTAAEHSIGSQEACDSARIELKILLNDYEIYHQREEELMELIEEKLSEVPYIDKLLEIKGIGMKTVSGFVAEVGDIKRFDNPKQLHKLAGYAIVECSSGKHKGESHISYRGRKRLRYVLYEAAISLIARNTEFKEIHRYYQTRGKNSLKKMQSVIAVACKALRIFYAILTKGVTYDGAKMLQDIKRPQLKVA

SEQ ID NO: 93666 - protein, 318 aa, unidentified
MANQIAVGIDISKKTMDVAIGHEQSTAIFSNDGAGHQALIEVLKSHQVSLIVMEATGQYQLACACALQAAGFAVVVINPRQARDFAKAMGRLVKTDSVDARMLAELAQVLNQRPDRDRFIKPMPDQAQQHLHALVLRRRQLVRLLVSERQRKHMAHAEVVQDIAELMEVLAKQLETLDQRIAEHLAQYQSDLAALLKSVKGVGPATAATLISELPELGQLKAKQICALVGVAPMNRDSGQARGKRIICGGRATVRSALYMAAIVAMRFNAVIRQCYERLLAAGKPKKVAIVACMRKLLVIMNAMVRTGRPWNDHLASA

SEQ ID NO: 93667 - protein, 341 aa, unidentified
MKNKSFIGIDISKNVIDVSIFCEETPIKDFSHDVFNNSRKGFGEMCTWLKKNHVVLSNCLFGMEFTGNYSMELEKFLNARKYQFCMLSTHVIKHYPMGSKDKSDKIDSAKIADFLYRYNGTECVKPYKMPDKTMQRLKTLMNERKFLVEQRTCFMNRRQLCTTKEDAQLYDSYIKKLSHDIENIELEIQKLLETDDSLSTTYKNLLAIPGIGFVNAMNVIVITRNFTAFETARQYASYVGVAPHSHTSGTSVKWRPRPSARCDGQAKADLSMAATVAVQYDAELQSFYNRKLGGKQDSDTKRKALNAVKFKLILRMFAIGKQNRKWEPLDSKSSNEKLAIS

SEQ ID NO: 93668 - protein, 378 aa, unidentified
MLSENRILIAIELSLSSWLVAVRLPDAEKSRLHHIEGGDRSALLSLISDLRSRASTKLRRTVDVACCFEAGRDGFWLHRLLTAHGIATYVLEPTSILVARRARRAKTDRLDAEGMLRVLATWLGGDRQVCSMVRVPTPEEEDAKRPHREREHLVQERERIENRMEALLFTQGIRGRPSLRSWERDIVKLRTGDGRALPPLLEAELNRLRRRLMLILELIRETEAERAEAVATSADDATNQKVLQLQRIRGIGANFSAVLVREVLYRSFANRRQLASYVGIAPMPYQSGGMDRDRSISRAGNPRARTTLIQLAWLWLRYQPGSALSNWFRDRVGSLQGRTRRIAIVAMARKLLIALWRFVETGVMPDGVEFRAAEETTA

SEQ ID NO: 93669 - protein, 396 aa, unidentified
MFYLGIDIAKNSHVASLLDENGKIIFKGFSFSNTQDGAKSLIDLIESKVTLSDVIVGMEATGHYWLSIYSFLFEKNFTVHVINPIQTDGWRKGTEIRKRKTDTIDSVLIAELIRYGDFTNTSLSDEKLFSLRSICRMRNYLVQSTSDLKRKIICILDQVFPEYQSVFSNVFGKTSKDILLEFSSPSDLENVSANSLAETLATLSRKKIGEDTAHKLINSAKNSFGITFSKDSFTFQLKLLIEQIKFIETQIKDCEKEIKEILKTINSPITTIPGFGPILGAIAISEFGDISRFEKPAQLVAFSGIDPSVSKSGEYESTYNVMSKRGSPYLRKALFQAALVASNTDPVLRAYYQKKRAEGKHHKTCIGAVARKLCYIIFSVLKNGKPYEVPKTPPLQ

SEQ ID NO: 93670 - protein, 446 aa, unidentified
MSDRSGLSRGDRNRNARLARLRRLLPADHAIVGIDLADDKQAAVVTDHDSRVIARRRVNMRAWELGGLLDWALAVAARAGFASVTVACEPTGHRWRVLDQLAEERGLALVCVQPLLVYRAREGEDLTRDKSDPKDAVLIARLAAELRCYEPERADVVWARLRHLGARRNQLTTGATGQVNQIRDLLECAWPAVLGAAGSPFRSVSWCAALAVVLDRCAGDLARVRRLGPARFESAVRRELPRWGGQRPCLRIIRAVFAALSDPAGVVAHRPGALERAHLALGDWRDTRARLADTEARMAAVLDGLGLTALVTTIAGLTPVGAAAILAETGDLARFATARALVKHAGLCPRDNASGAHQGKTSISGRGRPALRVAAWRAVWAALPNNPVMAARFTYLTTREHNRLARQQARTACAAALLRWIHAVITQHTAWDPRLAAGTKPLPRAA

SEQ ID NO: 93671 - protein, 361 aa, unidentified
MTPVKYVGIDVHKSMCQAAILDEDGKLLDEIRFANDPEEIEEFAGKLTTFRDEVRAVVESTGNLWIQIHDRLEEHGFDVALSNPSKTRLIAEAKVKTDKVDARTLAALLRADMLPTCYVPGEELRSRRELLRHRLNLVKNRTEVKNRIHGLLDKHGLKMPGTTAFSKDNVAWLRGLSLGFMDDAILRSDLVVLEAVDGQVTIIEEKIAVLAAEDRCVRLLMTMTGVGYFTAMLVVSEVGDVGRFRGDKEFASWMGLVPSVHQSGERIRTGGVSGPGNKRLRWALVESAQTAVRHDARLGGMFERLSRRRGSGCAVVAVAHEMARIMYFMLVREEPYRDMNRGLVERKLKSMSKKAFDGLRN

SEQ ID NO: 93672 - protein, 351 aa, unidentified
MSEYIAFDAHKRYTWVDREDHSTGITRCHRLEHAPGAVREYLRGCEPGTAVAVEATGNWYWIIDEIEQAGLQPRLVHPRKAKLMMGLVNKTDRLDAQGLNRLQRNGTLPTVWIPSGPLRDLRELTRTRLVLTAQRTRLKNRLTATLAKYGTPASECSDPYGKRGRAELTQRLERLPEQTRWVSQHLLAQLDFVSRQIQQLEQRLEKLVEVTEPMQWLLTMPGIGVILAATIALEIGEVTRFPSAEHLASYAGTTPRVHASGGKVRYGPLRADVNRYLKWAFAEAANSVAVNHVRCPDRHVSELYHRLRARKGHPKAVGAVARHLAEAAFHVLRKKQMYRDPAQERGCTNPG

SEQ ID NO: 93673 - protein, 435 aa, unidentified
MPSLSKINPHCAGIDVGSESIFIGLEDRDVASFGTFTDDYLKAIAYLKEHHITSVAMEATGVYWITLFDMLEAAGITVTLVNGKQVKYLPGRKSDVADCQWLQQLHSFGLLRPCFIPDDLTRQLRTYTRLRADHLSMASSHIQHMHKALTLMNIKLQNVISQLHGASGMRIMSAIVQGERDPQCLADLCETSILKTKRDRVVASLKGNFKPEHIFALKQALGAYNFYQTQIGECDKQIEALLSAHTDDKPTPSKVTTPKNIRHNAPKIDDLHTKLMKMTNGNDPSQITGLTDKTLLELIAETGVQLQDHWTTEKQFASWAALAPSMHQSGKSNKRKKFKKNSPAGQIFREAALSISASKHSALSAFFRRMKAKKGFLHAMKATARKIAVIYYRIMTKGIAFVERGIELYQQQFKEQQLRLLRKKAQSLGLQLIPT

SEQ ID NO: 93674 - protein, 339 aa, unidentified
MELYAGMDLHSRNTLVGVIDSSFKKVFEKRVPNDLSVIVDRLEPFGDRLAGIVVESTYNWYWLVDGLMDRGYRVHLANPSAIKQYEGLKHTDDRHDAFWLAHMLALGILPEGYIYPKEDRPVRDLLRKRSFLVKHRTAHILSLQSMLEREKAYKLKGNEIKSLRTEDIGRIFSEEHLVMSAQVNRASIEFFGHHIKRIEKAVRKRVKLSKSFEYLLTVPGIGDILALTIMLEVGDIARFPRVGNFSSYARCVSSQRLSDGKKKGQGNRKNGNRYLAWAFVEASHHARRYNERLRSYYQRKCAKRNQAVATKAVCNKLARACYYIIRDQVAFREEALFCS

SEQ ID NO: 93675 - protein, 392 aa, unidentified
MVVSVGIDVSKDKHDCFIVSSDGEVLADVFTISNTLDGFHGLLQRIQECSAPQDKIRVGLEATGHYSYNLLGFLLDNGLATYVLNPLRTNLYRKSLSLRKTKTDRVDARTIASMLLSDAGLKPYTDTAYHNEELKSLTRYRFDKVKERAKLKSSIARLVCILFPELEKLVPSLHIASVYALLEEFPGAKQVAAAHLARLKALLETASNGHYKRDMALEIRDAAKNSIGSQMPAKSLELQHTIRLIRELNREIDEIEEQIQSIMDELHSPITTIPGLGFRMAAMILAEVGDFTRFDSPDKLLAYAGMSPSTYQSGQLKNCYPHMEKRGSRYLRYALYNATKYVCHWDSAFADYLAKKRAEGKHYNIAISHAAKKLIRLIFAMEKSRQPYCSAA

SEQ ID NO: 93676 - protein, 340 aa, unidentified
MRIRKVTQSTEKGKSINEYDHYGAIDWSMKVMAIAHMSRRGDHPIVFERPSDLKDLKAYLGSLKGRKIITLEESGTAHWLYLELIDCVDRILICDPFHNRLLCHGPKTDKIDAGKLCELLRGGLLKEVYHSDSALYELRQMVSAYEDVVKAGVRAMNQKTALTLGHRDEGKTAGFIEKILEENIDLYQRSKEQYEKRFDDVARRNKLVRFQKGISGIGPIGAVRILATVVDARRFPYAGKYLSYCGLVTHEKLSGGRSYGRRKARCNRCLKSVYKVATHAALRGNNPIREYYDHLLAQGEAEHNARNAVARYIARISYGMLKSGTRYEPYRWREKTQKIV

SEQ ID NO: 93677 - protein, 393 aa, unidentified
MICVGIDVAKDKHDCFILSSEGKVLADVFTIPNNAEGFDTLLQTIHRCTRPEDKIKVGLEATGHYSYNILGFLLDCGLPTYVINPLHTNLYRKSLSLRKTKTDRIDAQTIATMLMSDVDLKSYTDTAYHNEELKSLTRYRFDKVKDRAKLKSSVSRLVCILFPELEQLVSNLHRASVYALLDEFPGAVQIAGAHLTRLKALLSSASKGRYGRDMAVEIRNAARNSIGSRMPAKSLELQHTIRLIHELDAEIEEIEAEIQAIMNELHSPITTIPGIGVRMGAMILAEIGDFSRFDSPDKILAYAGMSPSTYQSGQLSLSGAYSHMEKRGSRYLRYALYNATKYVCLWDPTFAAYLAKKRAEGKHYNIAISHAAKKLVRLIYAMEKSRQPYNRAA

SEQ ID NO: 93678 - protein, 416 aa, unidentified
MNFNKLLSGNITKYQKEGFIMISVGIDVSKGKSTVCIMKPCGEMLESPFDIGHTADELDSLISLIKSFDEETRVVMEDTGHYHLPVATYLSSHNIFVCCVNALRMKKFCSQSIRRAKTDKIDSIKIASFGITYWNELVKAYPSNVIYDELKFLARQYYQVTGMLVKSKVNFSNLLDQVMPKINDVLSNQGENHKLTEFVSRYIHFQNILDMGEMKFTSDYCKWAKKKGYRLNERKAAEILALAQNGIPTLPNSQSVKIAVSEAVKLIHSIEESRNTILAQMQDLCNTLPEYSVVKEMDCIGDTLAPRIIAEIGDVRRFKNKHSLIAYAGIDAPPYQSGSFHASERHISKRGNSYLRKTGYEIMQSLIKHKPADNAVYDFIQKKRSGGKCGKEAMIAGLNKFLRVYYGKVMEFYSEH

SEQ ID NO: 93679 - protein, 405 aa, unidentified
MRFAGIDVGSQTHVVAIVDETGQVVLRPASFGEDLSGYQRLFELLGPPADILVALEATGHYSRNLFAALAQRSYPVALVNPLRTRRFAQEELMRAKTDSIDALGIARFAAQKRPPVSKLADQPTAELREIIGLHDRFLQDFQDRVRQLHRLVHLCFPEFTRYVRQLRSQRATAVLRKYPTAAAFDCSAVRGLVGLREAGLLRSMPERLAQDLVKAASISVGQHRGRAYSKHVEYVCQDIDELRARLASLEEEIDQRVAEHEVASLLTTIAGMGALSAARIVAAVGDPARFRHAGAFAAYVGAVPGTNRSGLRRPGHSSLCPLGNARLRRALYMTTLAVIRHNPWLGTYYHRLHQSGKLPKIAILAAMRKLLTAVYSVAKHRRPFVPRLNASPSSPSNELTSPNST

SEQ ID NO: 93680 - protein, 398 aa, unidentified
MMDVRRAIVDLAKDRDGVAANGMARPCSAIYLLSRVGRRKAKLKEHAMRTSQNTAESINTIGIDVGKNTFHLVGLDKRGAIVLQQKVTRHQLGRRLSNISRCLIGMETCSGTHFIARQLAALGHDVRLIPAQYVKPFLKGHKNDYRDAEAIAEAVQRPTMHFVSIKTPEQMDLLALHRVRSRLVRQRTGVANQIRGFLLERGITVRQGFMPLRKALPEILSSKSDALSPRMINLIGELIQDWRRLDDRIASVSTEIEAIAKRDESCQRLMSVPGVGPIVSSAVVAAIGNGTGFKQGRDFAAWLGLIPKQESTGDRTILGKISKRGNKYVRTLFVQAAHVVLERRPRTARQGLWPWIEQASKRLHRNMLAIALANKLARIAWAVLARGHAYQPRIIANA

SEQ ID NO: 93681 - protein, 409 aa, unidentified
MRYYVGVDWADAAHAICVVDEEGGRVTTRTVAHSAEGLSEWGRELDEWRAQAIELWAAIERPEGRVVDFLLDHGVVVYPLNPKALDRARDRFRQSGAKSDPFDARVAADFLRTDQGHLTALQPSSAAAQELKYLTEDCQRLIRQQTRLLNQLTATLKAYYPRALEVAELPTALARAFLAAYPTPEALSQLTERQWQRWARAQHVSASRTAELWSVLHAPQLPVPAHVVRAKARLMRTLVAALEPVLAAVGSYREAIDDFFAGMPAAATARTLPVGDRGLLVPTLWARLGDAPGRWSSFRHLQAQAGSVPVTERSGRQHRIHFRYACDKTLRYILDHLAFRSLQTSDWARAYYDQQRARGHGHRQALRALGAKWLKIIFVMWRDDVAYSEEHHLATIARQQLRCSVPKMA

SEQ ID NO: 93682 - protein, 347 aa, unidentified
MSDGIADRQVVGIDLHLHRSVIALIDEVGNELGWVRIENDPKALVAECRKAGRGAPVAIEATYGWYWAVDALLAARFEVHLAHPLGLKALRKRKRVKTDPRDAYELANLLRLGSLPEAYIAPPDLRELRELVRHRRQLVKLATAVKAGVRALLAKHNIRLAASDLDGDTATGLLDALALPGTYATRLASQRRLLLVLADEIAAIEVELHGRLRHHPGYCNLLKVKGIGPILAAVFVAEIGEVSRFPTAGALCCWAGLTPRHYESDKTVHRGHISKEGDTLIRWAAVEAIQRQTEPAVKAVKDGIIARRGKTVRNIAKVAAARKMLEVVYYVLRDGQARCLTAAADAA

SEQ ID NO: 93683 - protein, 349 aa, unidentified
MGEVSTIGVDIAKSVFQVHGVDADGAVVIRKRVGRAKVIEFFANLPSCLIGMEACATAHQWARELKKLGHDVRLMPPTYVKAYVKRGKNDAADAAAICEGVTRPSMRFVPIKSVEQQSTLMLHRTRDLLIRQRTQLINALRAHLAELGLVAAKGHEGLQQLVMAVTESSDKRLPSNARFACQSLVAQLYALQTQINGLDKRIIQAHRANADSKRLEAIPGFGVILSTAVVATMTDPRAFRTGREFAAWIGLVPRQNSTGGKERLGSISKQGDRYLRRLFVLGAISIVGTARTRPDKYPWVTELLGRRPAKVAAVALANKMARTAWAVLAKGETYRTPTRSSSAVIAAIA

SEQ ID NO: 93684 - protein, 441 aa, unidentified
MKKTTAVKKSAQMNLPVMHPNAAGIDIGATEIFVAVPPDRDLQTIRSFPTFTQDLYRLGGWLKQCGINTVAMESTGVYWIPLFQILEEEGIEVFLVNAHHVRNAPGRKTDVADCQWLQFLHSVGLLRPSYRPAQDVCAVRTLLRHRASLVQTSSTFVQRMQKSMTQMNLQLHHVISDITGQSGLAIVDAILNGEREPNVLAQLCSKRIKASKEIITKSLVGDYRPEHLFTLRQSLQTYRQLQQLISECDTEIRCLINAFESSQHLQNNAPPTSPEITLTAELTRVFGVDLTKIPGLGVESVQTLLGEVGPDFTKFSSASAFACLLTLCPNNKVSGGKILSSKTRKTSSRVATTLRMAAQSLHHSKSALGNFYRRMRSRLGAPKAITATAHKIARIIFHIVTTGQDFDETRSGSDQRIYEKRQENKLRNKAKALGFQLVPLA

SEQ ID NO: 93685 - protein, 376 aa, unidentified
MEHNSEAFVGIDTSKLKNAIAIAEGGRSGEVRYLGEIATTDAATRKLVAKLATKYRKVMFCYEAGPTGYGLYRLIKSFGHDCSVVAPSLIPKKPGDHVKTNRRDAVGLAKNLRAGELSTVWVPDTRHEAMRDLSRAREAAVVDLKSKRQQISSLLLRLGLHYPGEKTWGKSHRNWLASLKLDQREQRIVLEELFGAERQAQERVDRLTSAITDAVPEWSLAKIVTALMAVRGIDLVAAVTIMAELGDLSRFASPRELMAFLGLVPSESSTGDSVKRGGITKAGNRRARRILVESAWSYRYPPRISRDKLAKVAAAPEPVRAIAWKAQTRLSSRFRALIKRGKRPTIVATAIARELCGFIWAIHRAVTAPAGRQIVS

SEQ ID NO: 93686 - protein, 362 aa, unidentified
MPKMIWLGMDVHAASITVAQYEDQAPTATVQTIANDPAQVRRLVRRLPAGSDVRACYEAGSCGYGLHRQLTALGVHCDVIAPALIPRRPGERIKTDRRDAEKLGRFYRSGELTTITVPTPSQEGVRDLVRAREDVRRDRTAARQRLAKFLLRHGHRYPGSHWTKRHWEWVCGHTFDGPARTVFVHYCDHVLALNERLAHLEREIRTLAESAAYQPVVTRLSCLRGLATLSALVLIAELYDLRRFRTPRELMAYLGLVPSEHSSGARERRGRITKTGNALARRLLIEAAWAYRHPARQTRRVQQALTTQPPAVHAISDRALHRLTARYRRLLSRGKTPHHAVTAIARELCGFVWAIALVPDLA

SEQ ID NO: 93687 - protein, 352 aa, unidentified
MEYIAFDCHKKYTYAVVEDEKGRVHWEGKIVHERGALAAFLKEECRPGSPVAVETVGNWYWIVEEIEQAGCVPRLVHAGKAKLMLGMTNKTDKLDARGLNKLQRAGTLPTVWIPLGDLRDKRELTRARITLVRQRTQLKQRIHATLAKYNLAIPEVGDPFGVKGRKLLKEKIAELPPETGAVTRMLLEQVEILDQRIAELEKRMEEVLAPSREVELLMTLPGVGFILATVIALEVGDVQRFPGPEHLASYAGMVPRVQQSGGKVRYGKTREDVNRYLKWAYSEAANVIARYHQKYAFRHVGQLYARIRERKGHQKAVGAVGRHLAEATWWVLHTGQPYQDPAICRLGRVMGA

SEQ ID NO: 93688 - protein, 456 aa, unidentified
MKSIPSGPSTPESLGIVHPHAAGLDIGRAEIWVCVPTDRDPQPVRGFGTFTPDLEALADWLQACHIETVAMESTGVYWIPIYDLLEARGLQACLVNARHVKNVPGRKSDVQDCQWIQRLHTYGLLNASFRPEAELCALRAYLRHRRMLIECRAAHIQHLQKALQQMNVQLTQVLSDITGETGLQIIRAIVAGQRDPVHLAQLRNPRCQHSQDEIAQALTGHYQAEHVFALKQALALYDFYTVQIQACDVEIEQHYHTCSPAGETLPPLPPSTKTNTHSKNTPAFDVRAELYRLTGVDLTAINGLNASTVQDIVSEIGTQMGKWPTEKHFCSWLHLAPHNDISGGKVLRSHVLKGQNRAAQAFRLAAQAVSKTDTALGAFYRRMRARLGAEQAIVATAHKLARLVYHLLKQHEPYQVSSAHEYDQAVQQRELNYLKRKAKQLGFMLEPLPGSSAQPG

SEQ ID NO: 93689 - protein, 393 aa, unidentified
MYLVGIDIGKLKHSFCLLEKETGEILVEPVFFENNRDGFNALLSSFKHLPQKDILIGMEDTGHYNLALLKFLLDRNYQVALINPVATNLTRKMQGGISKNDKLDTLTICDVLSSNQRVKSYRISKYSSFDLYEQKQLTREHHNLKEEENQLSNRLQKCIDVVFPEFNSLFKSKYGIVYMNVLKEFGSADAIAHADIRTLRKCFDTGRGKHISLTAQELKEAARNSIGFPSSSEATQIKHLVARIELIKEQIAEIDKKIEEFSIQNNSPILSIPGISHFSGTSILAELGDIHNYSKPSQIIKFAGVAPLTYESSQFTAQHTAITKKGCKYLRKTLYQIITPVIQYNPVFRKFYLLKIAQGKGHRCAQGHCVRKLMRVIHHLLSTGTQFDPALLR

SEQ ID NO: 93690 - protein, 389 aa, unidentified
MFAGIDIASERHMLARLDDLGAPIGKPMPITEDRSGYDTLLKALEPPPVLVAMEATGHYWKNLFAVLVAAGHDVALLNPFLARRFQDSSLERTKTDAIDAQGLARFAFEKRPEPTQLHDEVTEALRELVRHRDRLRQDFDDRVRQLHRLVDLGFPEFTRYVRGLDSMLATCLLAAYPTAHAFARATPRRLAKLRYDGRHFVGTELAEQLVEAAKTSVGQHHGAAYKLQAMHICQDLDLWRKRLAEIERDIEDLLDSHAVGKLLTTIEGIGPQSAARIIAAVGDPARFDSAAAFAAYVGVVPGLRQSGKQSGRSRAPIAPMGNARLRCALWMPVLTAVRRNAWLGAFYQRLRAAGKPPKLALVAALRKLMHAVYSVAKHRKPFAIRLRNT

SEQ ID NO: 93691 - protein, 422 aa, unidentified
MTKRRYGTTEIKHVDWARVAEQVVGCAVVVAVDVAKDDFVAAVMVCEEAAVVLIKWRHPEQTALLLRGLEQLRAQCELAVAMEPSGTYGDALRWQLTARGIDVYRASPKRVHDAAEVFDGVASLHDAKAALLIGRFHLQGCTQLWLEPDAERRELLAHLRLLEIHKALYRAHLNRLEAQLSRHWPEALRILGLGSVSLAVLVRTYGSPAEVDAHAAHARALLRSTVRGGATSERIERLLDSAAATLGAPCVAAERQLLSTLAAEVLRARDAQHGVEQALKALVQAHESMRRMASVVGEIASATLYANHGDVRGYPQIRAYLKVIGLNLKERSSGKQHGPLRLSKRGAPSSRHSLYYAALGYLRRDEHVRRWYQAKLQRPGAVRTKLIVALMRRLAKALWHVARGARFDSARLFAPPAAASRS

SEQ ID NO: 93692 - protein, 415 aa, unidentified
MKKHSNSVKKSESSMKRRNPRAEERRDSSEVMAELVSQLRQQLEEKSVPAAEAAGEDRDVVGPNLDRLTVGVDLGDQWSNYCILGLGGETLREGQFRTRRQEVEEFFQGLAVSRVVIEVGTHSAWVRELIAGLGHEVLVANAQRMEGRKRRRRKNDRIDAVKLARLGRVDPKSLYPIQHRSTEVREDLLVIRVRDSLVESRTKLISTVRGMVKTMGARVQGCSSVSFSAKAAEQIPAEVRETLEPLLRLIQTLSEEIKSYEKRIEKLGSEKYMDTKLLRQVNGVGPVTSLAYVLTLETPQRFKRSRDVGPYLGLVPQQEDSGDSQPQLGISKAGDRMLRKLLVGSAHYILGPFGPDTDLRRFGMKLCERGGKNAKKRASVAVARKLAVLLHRLWSSGEVYEPLGYGKTITESAAA

SEQ ID NO: 93693 - protein, 334 aa, unidentified
MKTLYVGIDVSKLTLDVALTIDGKKTLVMKKLTNNSAGFKVLEEWTRKRSEKDECHKIHFLIEATGIYSDSLAEYLYSREDLKVTVINPAQVKSFGKSILLRTKTDKIDAELLASYAAMIRPEATVKTPDEIKKLKSIVRELQFQIDLRAKIKTRLESAIDLEIAELIEQDIQYYNEKVKNLEKRIRDHIKNHKLLKEKIDLLRTIQGIGERSAQLILCEFHNEDGTGKISAKAQTAHAGLAPQQKLSGISVNGKPKICKTGNKRLRKGLYLPALTAIRQNQVIKEFYERLLKNGKKKMVALVAAMRKLLVIAIGVLNNKTPFDPNWKNSVQFA

SEQ ID NO: 93694 - protein, 410 aa, unidentified
MNASDSKCLFVGVDLGDERFQVCVVEPTGASGEQRSFAHDAEGIGEAIAWLKSAAVERIAIAIESPCGAVVAGFLEAGFEIFSINPKQLDRFRDRFSVSGSKDDRLDARVLGDSLRTDPRAFRQLIAEPGWLVRMRQASRMEDELKQEQRRSANRLRAVLHEYHVELLALVPAADEPWFWDLVAIASTPALGARLRPKQVERLLAEHRIRRVSAQDVIERLRRRPVPARPGVVEAGSTHALILVPRLHLLTQQLTQCQAQIQKLLDELAAEGQPEQTSEHRDVRILRSLPGAGRYVVATMLAEAFWALQQKDYRLLRALCGVAPITQQSGRSRFVYMRHAGNRRLRNAAHHWAWNATLVDPHFARLYRDMRARGLTHARALRGVADRLLNVTVAALKNGTRYDPSLSAAA

SEQ ID NO: 93695 - protein, 346 aa, unidentified
MMLIGCDYHPSWQQVCWLDTATGETGEKKLEHASGEAVKFYRGLPGPALIGMESTGNCQWFVEMATTAGHDVWVGDAAKIRASEVRAQKHDRRDAALLLKLLMEGRFPRIWTPSGQEKDLRQLLLHRYKLVRIRAQVKTELQHLAMNQGVTKKRKLWSKAGEKMLRELPLKPWASRRREDLFRVREMLHGQIDLLDQAVVEVAEKNEKARLLMSQPGVGPITALAFVLTMGDVSRFQRGKQVASYLGLIPREYSSGGHQRFGSISKQGNRFLRMLLVEAAQGAVRCDPGFRNEYLHRCHRKAKGVAKVAAARKLAIRLYWMLRTNTGYPEIVRVESSSRVPLVSAS

SEQ ID NO: 93696 - protein, 342 aa, unidentified
MEYFAGLDVSVKETSVCIVDDTGRIVREVKVASEPEDLLRVLANPGYHFKRIGLEAGPLSQWLFSALADAGFPVICVETRHMRAVLKAQINKTDRNDARGMAQMMRAGLYRPVHVKTLRSQKLRMLLTHRKLLQSKAIAIDNDLRGTLRNFGLKVGIVGTVKFEARIKELVENLPDLAELVEPLLVVRRVLREQFVIQHRRLLAIVRDDEVCRRLMTVPGVGPVVSLTYRATVDVPARFRNSKAVGAVFGLTCAKHQSGEVEWSGRISRCGDEMMRVMLYEAAQSMLRSKKWSWLKAWAMQIARRRGMKKAIVALARRLAVIMHRIWVDGTEFRWTREVAAA

SEQ ID NO: 93697 - protein, 400 aa, unidentified
MPLGEDIDVFVGLDVAKGVHYAQVISSGGEDLFDRPVPNDEAAVRSLIGEAAGGGRVAVVVDQSASTAQLLLVVARDVGVPVAYVSGLQMRRAADLYAGQAKTDPRDAWVLADYARRNVDRLTWLEVTDELVTELRVLNGRDVDLAHDATRIINRCRDALVAVSPGVERVVGQRFSQAGIRDLLGRYPTPTLLRQAGKARIRRTIGRRSPRVADRVTTSLWDALDAQTVTLAGEATWGQVIAELVTDLDRIVQQRKTLAAQIEQLFLSHPLGKVLVTLTGFGPRTGARTLAEIGDPNRFANGGRLAAYAGFAPVDRRSGTSINSASRSRSGNHRLKNAMFIAAFVASRHDPAAKAYYQRKRGEGKSHNAAITCLARRRCDIILAMLKTATPYQPTLPKAA

SEQ ID NO: 93698 - protein, 360 aa, unidentified
MNSTPLIAFDQHAATTVAAVLLPGQQTPALHSLTSDTPTILRFVKRLARHGALQCCYEAGPCGFELQRALTEQGIACDVIAPALIPRRPGDRIKTDRRDAGQLAVLYRAGALTAIHIPTEQEEAARDLLRCREDIRTDLLRARHRLSKFLLRHGRRFTATKAWSKRHDVWLRGQTWPITALDQTHRAYLRAVDETRARLNDVERELRMLLDLEPLRDRVQRLRCFRGMDDLTALTIAAELGDARRFASAPRTMAFVGLIPSEHSSGTKRAQGGITKTGNAHLRRVLVESAWHYRHHPFVGDTLRARQRGAPAAIIAQAWTAQQRLHRRYMRFAARGKPKQHIVTAIARELTGFVWAALTY

SEQ ID NO: 93699 - protein, 337 aa, unidentified
MVGMVVVGVDAHKRTHTLVAVDQVGRKLAERTVATSSDGHLQAVTWAAQWPQPQVTFALEDCRHLTRRLEADLLRAGHRVVRVPTRLMATARRSGRQPGKSDPIDALAVAQAALREPDLPVAHLDGPTRQVKLLCDYRADLVVERTTLCNRLRWHLHELDPELHVPSRGLRRYKVIDELLARCRELTVRINQLERDLRDLVRVLAPGLLAIPGCGVLAAATILGETAGASRFRSRHAFARFNGTAPIPVWSGNSVRVRLNRGGNRTVNWALHMIAVTQVRGVGPGQAYVERLLGAGKTRTEALRLLRRRLSDVVFRVLLADEHRQATTEPAEAPIAA

SEQ ID NO: 93700 - protein, 346 aa, unidentified
MLYAGLDLSRKRLDFHLLDAEGATVEVGAAPPDADGLHRLTQRVDRYRTPICAAIESMNGARFVHDQLELAGWQVEIADAQKVKGLAPLACKTDRIDAWVLAELSRRELVPAIWLPDPAVRGERERARWRLHLVRHRSSLKQRVHAVLLAHGKPCPVSDLFGVRGRQLLDRLGLPEPWQGTLEASLRLIDELDREINDCERELRRLGADHRYVPLLCTVPGIGWVLAYTIAAELGDINRFPTPRKLAGYTGLCPRVYQSGERDLRGPLAKQGPRYLRWALVEAATHACTAPVYRDHYQHTKARIGKQRGAKVAQIDLARRLTEAIWHMLTRNQPFAPKGATDPLAA

SEQ ID NO: 93701 - protein, 410 aa, unidentified
MKVLHRRCAGLDVHKAEVVACARVLAGRKVVHEVRRFGTTTRELMALAAWLESLEVTHVAMEATGVYWKPVWHILEADLTLILANAQHVRNVPGRKSDVNDATWIADLLAHGLITPSFVPPQPIRELRDLTRTRRQAVGEAVRHQHRIEKILQDANIKLSSVLSDPMGVSGRRMLAAMAAGETDAGKIAELGSPRLECGRGALIEALSGRVSEHHRYLIGWHLRLLDEIEAKIAELDQRIEAQIAPFRAAIERLTGIPGIKQVAASAIIAEIGADMSIFPTAGHLLSWARIVPRLDESAGKKRSRRVKKGGAWLKPVLVQCARAAARKRGSYYGAQYRRLKARIGDQKAIIAVAASILTAIYHMLRDGTEHADLGAAYLSRREGDSKAIAHQLARRIRALGYQVDLREAA

SEQ ID NO: 93702 - protein, 337 aa, unidentified
MNKSESNFVPCGIEVSAQTLLVGLGSKAPRAFPNTPAGHQAVLRFLDQAGGRLRVCMEATGRYGLDLALTLDGARLALMVANPRSVRHFAIADMRRSKTDRLDTVVLVEYARRMRFRPWQPPSPAALKLVAVARRLHALTQMITAEKNRLHAASLAQALPGYVRLEIRGHLQILARHVARLRETAEQFIADDLELSERYQLLQSIPGFGPTSALQVLAELALLGPDLDVRQWVAAAGLDPREHSSGSSVHKKTRISKLGNAHLRRGLYMPSLVAIQHEPHLAAFYQELLARGKAKLQAVVAVMRKLLHAIFGMFKHHQTYDGSKVRALAPLPEALCA

SEQ ID NO: 93703 - protein, 371 aa, unidentified
MGYATILGLDLGKFKSVCCVMDAVTGRHAFEALATTPATIHDLLTRHAAAANGEEVLLVIETCDAAGWVHDVGSAVPGVAVTVVHTQGDERWRWSKVKRKTDRDDALKLARLARLGELPQPPVHVPSPQRRQWRRLLVHRRGVVNRRTRSRNSIRSIYLQQGLTLARGSKQWTRAGIAQLTTDARSIADCTIEELWRGRLHVELTLMAAVDAQLKLIDAKLDELAKTESRIALLQSVRGVGPRLSEAVVLHLGEDPRRFKSGEQLASYAGLVPKQLASGQTTRLGHITGRGPALLRSLLVESAWMVWRLNDWARAFVDKVSRGGRGRRKLAIVALAKKLLILLWGMLKSNRPFRAPGPKENAPPDAALAIA

SEQ ID NO: 93704 - protein, 349 aa, unidentified
MTDKSRVIIGLDVSDRFTYGCTIDADGMRLEEFRVRTREDALRQKLAQAVPARIVIEAGAHSPWMSRLLHGLGHEVIVAHPSRVGLIAKGDRKSDRRDAVQLARLGRADPELLAPIQHRSEQAQKDLMLLRVRDGLVRARTQLISQARGLTKVLGARLPRCSARGFARRMNQVPGDLFPGFEHLVSLVEKLTEHIHDLDRKIEALCNDRYPAAGALRQVPGVGPITAVGFVLTIDNPRRFKTSRRVGAYLGLHPRQRDSGDRSPSLGITKAGNSFMRKVLVQAAQHILGPFGPDTDLRRYGLRIVQQGGRAAKRRAVIAVARKLSVLLHRLWTTGERYQPIGYGPCAAA

SEQ ID NO: 93705 - protein, 344 aa, unidentified
MQITTIGIDLAKNVFQVHGANEHGKPVLRKQLKRDQVVVFFANLSPCLIGMEACGGAHHWARKLEALGHTVKLIAPQFVKPYVKSNKNDVADAEAICEAVSRPTMRFVPIKNIEQQSVLALHRARQGFVKARTAQANQIRGLLAEFGLVVPQGIAHIASRVPDLIEDATQQLTGDFRRLIDRLLDHLKVLDTQVDEIEVQIKAWHRNSEVSKRLEKVPGIGPLTATALAATVGDAKNFDSGRQMAAWLGLVPRQSSSGGKTNLLGMSKRGDAYLRTLLIHGARSVIYRAGQRAEAQSWLFKLITRRNINVAAVALANKTARTVWAMLAHGREFEAGWTKAGAAA

SEQ ID NO: 93706 - protein, 411 aa, unidentified
MRRVIGMDIHRTFAEVVFWEDGRLRHHGRIDMTRSGLEGFGRSLASADEVVLEATGNAMAVVRVLSPFVSRVIVANPMQVKAIAHARIKTDKIDAGVLAQLHASGFLPEVWVPDARTERLRRLVARRNQVVRHRTRVKNEVHGILQAHLVPKCPHADLFNNRGRAWLGRQVLPDDERAAITRHIREIDRLAEDLADLDGDIAREAVDDPQVRRLQTITGVNAIVATGIIAAVGDIGRFSEPQKLVSYFGLNPRVRQSGLGLAQYGRISKHGRSHARAMLVEAAWAASKAPGPLRSFFLRIRNKRGHQVAAVAVARKLTVLIWHMLTKEQDYFWVRPALVAAKQRQLALKAGALSERGVGRRGTAYAYNIKELRDRERASAEQAERAYERMVRHWRPRGPKRRTDATKEERR

SEQ ID NO: 93707 - protein, 482 aa, unidentified
MKKQNIYQNRSQELYALFENAGNNSKVMCIPVDYAKKHHLAMFCNGYGDIIRKPFPVKNSPEGLNYLVDQVKRSCSHRNIQLQHVFFGGEDISSYSESFIHSLRSMGWLVASVNAHEAKKQRENLQASTDRLDLMGIATMLISHRANTCPAQSGIYKNLRTIVRHRKKLVKIKTEVKNRIHALVDQLFPGFLDETRSGIMPFSKSSLYLMSDRFSTRQIKRRKCQSLTKKLNRFGTKNPDKTATKLQSYAANAFSAPKPHMHTLQLSLSCHVKHYCCLVENIEYLEKETALILSQTQGAFLTSIKGIGIILAAGICSEIGDPFIQKSATNLSSYAGVVPRVKQSGGPDSAPRTGSVSKRNNHILKDYLVQASNHIGRHGPEDLNQDFKRRKCQGQNAEFGMARRLMRITMCMMKTWQIYLPDNLRTERADKKDRACYYLSIWPYITKKWSKLTALDKVFAKEQPLGQWRDVVQKIYKVNLDL

SEQ ID NO: 93708 - protein, 419 aa, unidentified
MDVLLERCAGIDIGKEEVVACVRAPGPGGKRRKETRTFRSFTGELEAMADWFSAEGVTQVVMEATGSYWKPVWYVLEERAFGLKLVNAHHVKILPGRKSDVLDAEWLAELLEHGLLRGSFVPPLAIRELRDLTRYRKRLVQAHTSECQRIHKTLEDAGIKLDSVASDVLGVSGRAMLHALVAGERHPEVLAELAKGMLRKKIPELRQALRGRFRDHHALLIGLCLDHTAHLEAATARLDDQIDTLLAANTSEAGVPFERARDRLDTITGVGKRAAETIIAEIGVDMSRFPTAAHLASWAGMAPGNNITGGKRGSGKTTNGDVWLRDILVQCAWSAARTRDTYLAAQFWRLARRIGKKKAAIAVGHSILVICWHLLTEDADYDDLGGDYFQRRANPDRQRDRAIEQLHTLGYQVTLKKPA

SEQ ID NO: 93709 - protein, 462 aa, unidentified
MRPSGQMPVINRHAAGIDVGATSHWVCVPADAVAPGESPVRAFGAFTKDLDELVEWLLKCRVKTVVMESTSVFWIPLFQKLETAGLEVLLVNARHVRHVPGRKSDCKDCQWLQRLHSYGLLNGSFRPSDDICRLRTLMRHRDNLTKNCGAEVQHMQQALNQMNIHLHHAVSDLNGETGLRILDAILAGERDPKKLVELRDAQCSKTTPEELAAALQGDWREEHLFVLRQSLENYRHLLKQMEVCDAELEKALAKVVVNPSTLTEEERPQNPPPAEAKLKTRKQFKKLKSSTGLKRDLSAELTRICGVDLTRVIGLNVLGVLILISEIGVDTRRWRSAKAFCSWLGLCPGNKMSGGKILSSHTVHVVNRVSILLRTVAPAVGRSDTWLGIFHRRMRARLGPAAANTATARKLACMIYHLLKYKEEYIDVDCLIYQEKIRKSRIAKLSRQAEELGFELIKKQAA

SEQ ID NO: 93710 - protein, 343 aa, unidentified
MQQSTHIGLDVHKETIAVAVLRPGTSECEERTIANTPEALRRLFSRYPDRAALRTCYEAGPTGYDTWRLLTDLGVPCEVVAPSLIPRRAGAHVKTDRTDARGLARLHRAGELVAVRVPTPAEEALRDLVRTREDLKSDLRIARQRIRSLLLRYGRRYPAGSGRWGVRYELWLQGLRFEEPAAQAAFDHLMSAASVRAAQLQAIEREIEAAAFAGPLAGPVARLRGFRGIDTLTAVTVASETCDFARFPSARSYMAFTGLVPREHSSGAVRRQGSITKAGNAHVRRVLIEAAWAYRHRPSVRGKLAARQEGLPPELLAYSWQAQVRLHAVYRKLGLTPSDRHPR

SEQ ID NO: 93711 - protein, 428 aa, unidentified
MNTPTSNPPVVAWVGLDWADQRHEIRLQAAGSPRLESFSVEQKPEAFQAWVAELRARFPQGRIALALEQSRGAVIYALMNYDFFLLYPLPPKTLARYREAFASSGAKSDRSDADLLLELVRTHGDRLRAWQPDDAMTRQLRLLVEYRRKTVADRTRLTNRLTDLLKTYFPQALDWLGDLRSLGACEFLGAWPTLEAVQGANRPALRRFFHDHRRLSAEEREKLLDQIRHARPLTQDRAVLEASELMTQTLVEQLRAVISALARLDQALEELFGQHPDQQLFDRLPGAGEALGPRLAAAFGTDRDRYQSAEEIQQFSGIAPVTAASGKMRWVHWRWACPKFLRQTFHEFADASRKKSLWARAYYQQQRQHGVSHHAAVRALAYKWIRILYRCWKTRTPYDEALYLRALQRRHSPLWLAAASLSTQEAHP

SEQ ID NO: 93712 - protein, 362 aa, unidentified
MESMRWVGVDVHAKESVAAVLDQATGEISTHRIAGRPEDVLLWLTTVAQPFRAVYEAGPTGYGLVRRAEERGLDVVVCAPGHILKNATDHIKVDKRDAVRLARLLSAGELRLVRVPQPDEEQLRDLVRSREDVRVDLTRIRNRIGKFLLRRELYPPKHADSWGVLHRKWLQQLRFEDRASELVFQDALHAHEILVARREQLEQALAEIAANSPWSRTVARLRCLRGIDTLSALGLVAEVGDFRRFVHPRFLSSYLGLVPSEHSSGEKRRQGGITKAGSKHARRLLVEAAWQYRHVPRTSHHISQRQQGQDPRVIDIAWRAQRRLYKRWQRLHEERRKRSTVVAVAVGRELATYCWEIATLTG

SEQ ID NO: 93713 - protein, 376 aa, unidentified
MDTSTAAGSILHCALELSKNTWLLGIQFPDRPQPSLYPIKGGNTEDLMAKLTAARDRCAKLNGRAPSIVLCYEAGYDAFWLARFLKARGIECLVVDSASMQVNRRARRPKTDRIDVGKLLRGLIAWLQGDRHVWSVVRIPSVDEEDLRRSHRERDYLVHERTAHINRIKGLLFAQGIRGINVKRQYKTLNVDKLVTGDGHPIPPRLASEIVREIARLALVQEQIAILERERDERPTPCTATEKKRAQLMQLNSIGPAISAVMTREVYYRQFDNRRQVAGFLGLAPSPYDSGETERSQGISRAGRGQVRGTMIQAAWLWIKHQPRSTLTRWFLERTVGQGGRVKRIMIVAVARKLAIALWRFLEHGLVPQGAILSSK

SEQ ID NO: 93714 - protein, 451 aa, unidentified
MSKRSEKPTGLPVIHERAAGIDVGSRFHVVAVAPDLCEEPVQTFQAFTGDLERMAKWLTSVGIATVAMESTGVYWMPLYEVLESHGIDVIVANARDARSVPGRKSDVNDAQWLQRLHACGLLRASFRPGQDIAALRVYLRLRERHTDFAASHIMHMQKAMTLMNLQLQHVVSDVTGATGMKIIRAIVGGERDPAVLAAMRDIRCKADNKTVRAALVGNYRPEHVFALTQALELYDFYQARIDECDSEVERVLAILSADKPAPAEPLKKPRHRTIQPNAMSFDTRPVLYQITGVDLTQIHGVGPYLALRMVAECGTDLSRWPTAKHITSWLTLSPGCKISGGKVLSSRTRKTSNRLSAHLRLAAVTIGRTSTALGAFYRRLSARVGKAKAVTATARKIAVLFYNAMRFGMNYQDPGADSYERKYRERVVKQLHRRAAEFGFTLQEAPATGVS

SEQ ID NO: 93715 - protein, 450 aa, unidentified
MSKGSGVSRGDKRRNARLAELRRLVPRENAIAGIDLAEDNQAVVVTDHDSKVLARRSPRCKAWQLGEVLDWAVAKAQARGFASVTVACEPTGSRWMHVQQACAERGLNFVCVQTLVTHNAREAEDCTRDKSGQKDAVLIARLTAELRCYRPEVIEEDWAVLRYLGQRRDALVTEAIRCRQQITDRLALAWPAALGTAAAPLDSVTFLACLQVVAGRCDGDPGKLRGYGLAEFTQLVRGVLPRWGGQRACHRIVAAFHAALGDSHGAVPARRRGALKLAGHALADLRRARELQARVGAEMIAQLHVLGIADVLATIDGLSLEVAACILAETGDPARFGSSRALVKHAGVAPCDNSSGNSAGQARISRRGRPVLRKAAWRAAWAMIHGANPVLAAKYAHLTSRDTGKLAKGQAHIACMATLLRWIYSVVTSRASWDQRAAAGTISHTAAMAA

SEQ ID NO: 93716 - protein, 376 aa, unidentified
MRRCGEVFVGIDTAKARNAAAIAEAGRQGEVRYLGEFDNTPDAIAKLVRKLCDRYETLHFCYEAGPTGYGLYRQILAMGHGCTVVAPSLIPRRPGERVKTNRRDALSLARLLRAAELTAVWVPDETHEAVRDLVRTRAMAVEDYRRKRQHISAFLLRHGRAYEGTTTWKGRHLRWLDGQNFAHAAQRFAFQEMLNAIRAAVERIDRLDAALVEIVPAWTMAPVVAAFQAMRGVGFLTATAVVAEAGDLRRFEHPRQLMAFLGLVPSERSTGDTRRQGGITKTGNSSARKALVEAAWTYRHSAGVGTTHQRRQQQLPQRVREIAWKAQSRLCARYRRLTAKGKRNTVAITAIAREIGAFLWAIAREVEPASVTPQSK

SEQ ID NO: 93717 - protein, 379 aa, unidentified
MKTELYVGLDVDKEWIVIAVAEWGRNGAVEDLGAISNDLHALEKLLARLRKRYGRDVIVRACYEAGPCGFGIARRLHQLGVECAVVAPSLTPTRAGDRLKTDRRDALKLARLLRAGELTPIYIPEPTDEAIRDLCRARSDAVDDRRRSRHRLKAFLLRHGYRYQGRTSWSAAHERYLRELMLPHPAMKVILEEYLLSVQLASERIARTEAAMSDLLGSWRLDPAVHALMAMKGFQRVAAMIVVSELGALDRFTHPRQVMAYLGLVPSERSSSDRRRQGAITKCGNAHARWLLVECAQHYAAPPKVSKELSRRQQNQSRAVRALSWKAQNRLHQRYRRLMARRLQRNKVIVAVARELCGFIWELLRTQECYHAPAPSGMN

SEQ ID NO: 93718 - protein, 365 aa, unidentified
MQKISTMQTTGKNILEGRLTIGLDLGDRSSAYCVLNEAGEIVLEHKLATTPEAMEQVFGSMPRCRIAMETGTHSPWVSRLLTALGYEVIVGHAQKVRLITKSRRKDDRLDARTLARLARIDPELLSPVKHRSAQAQLHLTEIRARAGLVSARTALVNAARGLVKSYGERLRKCGTQQFDRETTSALNAGLRQALDPLVQEIESLNERIQEYDRRIAKMAKEEYPETALLKQVKGVGDLIATAYVLTVEDPQRFRKSRDAGCFVGLQPGRRNSGESEPQMRISKEGDEYLRTLLVQGAHYILGPFGEDCDLRRWGQKLSARGGKNAKKRAVVAVARKLAVLLHRLWISGEVYEPLRNSQKAMSAAA

SEQ ID NO: 93719 - protein, 424 aa, unidentified
MSYRIVGIDVHKKMLAVVVSDVEVDGEYQFERIRYGSSPEHLRLLAEWLIAQQVEEVVMESTAQYWKPVWGALERYWKPICRERESAGPMSGTLHLAQAQSNRGRRGRKKDFPDAERLVKRLVANELTLSFVPDTEQRLWRTVTRRKYQLTRNHVRLQNQLEGLLEECHIKLSSLVSDLLGASARRMLQALAEGETNPAAVAALADKNLRATQAQLCDALGACTELKPIYRRLLKMFLEELQLIDQQISQLDQEMASLLSQHQDSVKRLAEVPGLGVDSAQQIIAEVGAKAATFPSAKQLSSWVGACPGDEESAEVSKSHRSPKGNRHMRRILNQAANAAAKSKGTIFEIVYRRLISRLGHNQTIGAIAHRLCRLIWIILHRGVRYEERGPSVSAKSRRHRTNRMIRELRSLGYQVEPVVTTTV

SEQ ID NO: 93720 - protein, 533 aa, unidentified
MEARYTIGIDLGITSQHVAVVFDREAGKAVVKGFKFHHTADGFKQLVERVEKVKAKHGPGAAQAVMEPTGKVWTPVAGFLREHDIRTLMPSPMLATAYRKKRSGSGKSNGIDADALARLPQAEGDRLNPACLRDQKTGDLHGLCKFHEKLSGRLAGIKNSIRAEFQLVSPMMLSCFGEGAFTEMGRTFMSRYANPHSLLSRGEKRLIEMLAKHSSKEEDEVKEIVRDLRACAKSAVEMYRPIAEGHGLSFSFELVQRKVCFLLKQLALYEAQLTELEEEIATLHDEIDPDAASRSLPGFGKHISPVVDSAVADICRFARAQSFAGYVRTAPRQSSTGKGRAAEGEHERQPLRKDGNRYLQKQFYLAADVARRYDVELAEVYLKLKAKGRHHNQCVIAVARHLALRYYSLKKRVLEDPDARYAFRDLNGREISKQQAREIVGRMYEEAKQDKSTAKKTPTTPANVPDPCHPTTLSTDHPERLGNIIAQLAVTMGITPQALSGHLDQLQPGAANCRTNGRAQRSQKKRGKTLATT

SEQ ID NO: 93721 - protein, 472 aa, unidentified
MIRSVGIDLHQGRHRARCLDERAQPCDSFSFPTTPEGLAALEERVFRDGANPIIVLEPAGLPWLIVAVYLRSRHPDCHLVKAKTQKVAALRRYLRGPVKSDRLDALTLAKMPFIDPEKLDDIYLPPAKIHALQRLTRQRKRIESDVSGRKIRISAIIDGYLPGVRQAFDNAWSSPFRAFLRSRLSPFAVIRDGEDALHAYLSKASNRSRWSRAQTREAFLACQSMATVCELSKSAGTVDEEFFTDLQDEIARELRMLEADEVESEALAQSIAGLYRKLHPSDNLCTIPGVGEHTAPIFLATVGDPARFRNQSAFANWEGVVPGARQSSDAQAKGLRMTKAGPSIMRMALYQAGDIGRRWDPQLAAVYHREMVYHGKNHRQAMGAVMSHLGARVLRVLKEDSPYEMRDIEGKLISKNEARRLVLSKYHVSEDIRQERRRRNRKVGKDRETATYRTNEADKAPQPVQVQAVSQQ

SEQ ID NO: 93722 - protein, 348 aa, unidentified
MPKFTVGLNIAKSVFQVHVIDRSGQAVIQRKLRRNSVLKFFASLEPSVIGIEACHSSHYWGQKLIKLDHTVPLFSTQYVNPFVVGGKNDANDAAAICMAVSRRDIHTVPVKSAEQQSLQSLHRMREKAIQERTAKSNQIRSMFSEEGHIFPAGLPSLRKGILTLMDDGEAGLTSILKRLGQMYLEQMAVLKAWLDELDAMIDDNFKNNETCQRLVTIPGIGPVIATAIFKLVGEPAQFKNGRRFAAWLGLTPRQHSSGGKTRLSGITKRGDGYMRKLLVQGARAVIYNVHRKTDARAEWIKALLARRPANIVAIALANKIARIHGPCLCVVKNLYQQPVKVCCREKLV

SEQ ID NO: 93723 - protein, 335 aa, unidentified
MQIYGIDFAKDKFDVSFLAPTLKNVSNKPAHKVVRNNESGITKFIKTLPADAVLVAEHTGVYGDRLLKHCTESHINIAYVGGYVIHTYKSAPDRAKTDMLDCAVLREFGERFTDKLIYKTFPKKELYELKQLARHRTMLVEDRKRYVTADKGEDCRPCRSMQVKESMERIMEILTEEIARTEKQMLDIIRAHEELSRNYDIITSVKGVGLVTAVELIVKTENFTTIKTASQYAAYAGTAPYEQSSGKMNKGAHVSKIGNRRSKTLLYICAESARMHNKEIKLYYERRTIIDKKPHFYVLNAIVNKLLKIIFSLVTKGQMFDSDFIRKDPRVIKDN

SEQ ID NO: 93724 - protein, 345 aa, unidentified
MGVTDWIGDSPHAQVRAIDEPEELIVQRSSLKVVVGADVSEATLDVAVSVPCKIKRVANTAAGVAKLVAVLKDIGAELIVLEATGGYERVLVDALHQAGLPVHVANPRRVRAFAIAAGILSKTDKIDAKTLILYGEAIDVEPTPAPDPSAREIAELQKRHRQLVENNVSEKNRLKTAPHHLQDGIKRHIAWLDQEIAQIEQRIKLMIKGDTKLSAKAKLVMSVPGVGVATSAALIGHFPELGQISNKQAAALAGLAPYADDSGKKTGKRSIRYGRSHVRCALYMATLCAIRIAGPFRFSYQRLLGLGKPKKVAIVACMRKLITTLNSLMRTGQTWSPTAAEALPA

SEQ ID NO: 93725 - protein, 405 aa, unidentified
MRNDVFVGLDWAVHTHAVCLIDAAGSVLDRFEVTHDRDGLAELMRRLARHGQRLRIAIERPSGLIVDALVEAGHQVFPIHPNAVKASRPRYRSHGAKSDSSDAYLLADLLRTDGHRWRALAAQSDDIRALRALVRSRDDLVAARVAAANQLTSTLQAFWPGAAAIFADVASPIALAFLRHYPSPRSAKRLTEAQLQRFCKAQHYSGRRSAAELMARLHAAAAGHVGTHTEQAMADVVRAQVAVLVPIVTQIAELTRRIERFMHSLPDGLLMMSFPRAGQVCAAQILAELGDVRERFPSADQLAAEAGAVPVTYQSGKTRSVAFRWACNHRLRQAITCLADNSRHANVWAKGVYQAARARGCDHTHAIRILARAWLRVIWRAWTDRKPYDPSLHGNAVALASTQGG

SEQ ID NO: 93726 - protein, 337 aa, unidentified
MKVTLIGIDLAKSILQVCGVNHAGKRVFNRQVRRARLMELLTQHPDATVAMEACSGSNYWGRELQQRGFKVMLIPPQHVKPFVKGNKNDRNDAFAITEAARRPDLKCVEPRTLTQTDLIQVHRVLDRMIRQRTALINQIRGFLNEYGLVVARGKEKLLAAMPDLLEDAENGLTPASRVLFQELYEQWQQANEAINRLEKGLKRQANNDEAAQRLMKMRGVAEKISTATIAHAGNGYGYKSGRHFSANLGLVPKEHSTGGKQKLGGITKRGNRYLRRLLIQGAWSVVRNADKNDDRMSRWARQLVERRGKHKAVVAVANKMARIMWSMLYHQTEYRMT

SEQ ID NO: 93727 - protein, 355 aa, unidentified
MNKVNSNFNGQTIFVGMDIHKSSWNLGIHLNDMFVKNVHQKPHPHIMASYLKQHYPGAHYKAVYEAGKFGFWIQRQLTALGIECLVVNPADIPKSQKDTLQKTDPRDARNLSMRLESGVLHSIFIPGEQQEADRLFFRHRKRIWKDLCRCKNRIKGMLAFSGIDIPEQYDNASWSHNFINWLKAIDCKQHSRRRALDYMIMQVEYLRKELLSISNELRKMMREKRYNTNYYLLRTIPGIGPLTAASILVEIGDVKRFETFYHLNSFVGLLPMEHSSGQTENKLRLTVRKHRQLRSDLVESAWTARRTDPAMALYFQEQIKRKDSKIVIVKIARKLLNRIRFVLLNQQPYEMGIVK

SEQ ID NO: 93728 - protein, 341 aa, unidentified
MEKYVGLDVSMEETSVCVVDGGGNIVFEGKTSSQPDALSKLLRAKASGAARIVLETGSLACWLWHELRGRNFPVICLDARHVRAALSMRVNKTDRNDARGLAELARMGWYREANVKSMESRYTHSLLAARAKLVDLRRDVENQMRGLLKGFGLPPGKGGIKALLEKIVVIMREAPHLHMLFKPMMLAHSALVTQVEFYDVQILKLAKGDETTRRLMTAPGVGPATALAFRSTIDDPNRFKSSNDVGAYLGLTPRRYQSGELDRTGRISKRGDRLTRLYLFEAASVLLSVVKRWSVLKAWGVRLAKRVGIKKAKTAVARKLAVILHCIWVDGTEFQWGKEKA

SEQ ID NO: 93729 - protein, 319 aa, unidentified
MNTIGLDISQKTIDATLHKTDGSTYYTKVGNNREGFQSLKDWIKANKVRKCVIGMEATGIYYEAAAENLSETHTVYVINPLKIKDYGKSQFNRTKTDKADSNLIAEYTKRHADKIIPYSKPKNRYLQKLINLKQQLKDHQKQIKNRLHSSDDEMIQAIHQDLIQAYQDKIDQTQTAIDAQIGQAETDGHYRNLQTIAGIGKDTAAILYAQLTDKTFQTANQFVSYAGLSPQTEQSGTSVHKKGRLSRYGHRRVKRSLYMPALVAYRTGAFPQLVLNMTNAGKPKMVIIVAIMRKLAKLAYYIVKTGKPYDSTRHKAAQA

SEQ ID NO: 93730 - protein, 355 aa, unidentified
MTSEKYIGLDIHQATISVAVMDSQGKVVMESILETKASTLLEFFAGLRGSLFVTFEEGTWAAWLYDLLKPHVTEVLVCNPRKIPLQKQGNKSDKIDARQLAERLRLHDLKPVYHGETGIRMLRELARSYLTVVKDLSRVMNRLKALYRSWAIPCAGRDVYYRRHRSEWLEKIPEAGTRRRAEQLYQQLDLLQHLRQQARRELLAESRKHAITAKLRQIPSLGPIRCALAVALIQTPHRFRSKRQLWTYSGLGLETRDSGEYQFVQGQPRRRKKQATIRGLNKDYNHDLKGLFKGAATRASVKPGPFQEFYQRSLAKGIKPTMVRLTLARKIAAITLTLWKKGEDFDIAKLNSQAA

SEQ ID NO: 93731 - protein, 341 aa, unidentified
MSTATLVGIDLGKHSFHLHGQDKAGREVFRKKTTRQQMMRLLGNLPSCTVVMEACAGSHLLARQLMAFGHEVKLISPQFVRPFVKGNKNDFIDAEAICEAASRPTMRFVTPKTEAQQTLSVLHRMRESLVRDRTKTANQAHGFLLEFGISLPKGLSLVRRLPCTLGEHELPPRLATLLKRLHEHFCYLDEQIRALDKEMDNQLAADDLGSRLLSIPCVGPITASLLCAEMGDGKQYGGSRDFAASVGLVPRQYSTGGRANLLGISKRGDKNLRRLLVQCARVYLQRLAFQQGALADWVRSLRERRHSNVVVCALANKFARIAWAIAANHSEFEAGPSALAA

SEQ ID NO: 93732 - protein, 340 aa, unidentified
MDCIGLDLHKRDSQLCVLTEAGEVIERRVRTDPARFAAVLGGRPAARILLEASTESEWAARCLEELGHEVVVADPNYAPVYATHARNVKADRRDARALAEACRVGAYRPAHRLSEARRHVRAELMGHEALVRTRTRYAILIRTLTRRDGLRLPSGSAEHLAARAAALAMPDALRAELVPLVALLAPLQAEIDAAGRRLAALVAAGPVMRRLTSVPGVGPVTAAAFVAALDDVGRFGRAHEVEAYLGLVPRERSSGERQRRGAITKAGNPRVRWLLTEAAWNVLRSRRPEAEPLRAWARRIAARRGAGVAVVALARRLAGILFAMWRDGSAFGQRRRRAAA

SEQ ID NO: 93733 - protein, 476 aa, unidentified
MRPKGVTAPTLLFNHRVLRALISARLLKEPRPGGRGRAQFARAGLDRADHRVLHRLCQVLHLNACMFEFMQAALQSDACISQGRLEQGGGNLSKRFAVEPVRKIQAATLQLADKARTVSYGDAFAYQPAFTRPRLASSFHCVHNLIRSLMVTVPKLGIDISKKTFDVALIRDPESMKAKQRQFSNTPAGFQDLQNWLAKHGAERVHAVMEATGAYGDALAEYLYATGHLVSIVNPAQIKAFGQSQLQRNKTDRADGVLIARFAWANNPGPWTPPEPEHQELQSLVRHLDDLIEQRTQVSNRLSEGRLTKTVRESWEKVLDSLNERIADVKMQINQHFDDYPGLKRQRELLDSIPGIGPETAARLLAEMPKLGEFDSARSAAAHTGLTPKRRQSGTSINAPTRISKIGNSRVRYALYMPAMTALRSSKEFKELAARLTERGKKKMQIIAAAMHKLIRLAYGVLKNQRPYDPNYAVAV

SEQ ID NO: 93734 - protein, 350 aa, unidentified
MIIIGADYHPGFQQIAFVDTDTGEFQERRLQHREEAEKLYRDLAAQGMQVRVGVEASGQARWFERLLSELHFELWIGDAADIRTRRVRKQKTDRQDAQLILQLLLEDRFPKIWVPSWENRDLRQLLWHRHRMVQARTRVMNQLQAVALNEGLRCKKRLWRDAGREQLESFRLAPWASRRRHDLLELLDRLTPTIDELTQAIEQEAEKCPEARCLQTHPGVGALTALSFVLIIGRADRFQCGKQIASYLGLVPLEDSSGQRRQLGHITKQGNSLLRFLLVEAAQVTVRSDPEWRSKYFHLAMRRGRKIAKVAMARKLAVRLYWMWRKGWGYEQWEKFGSHAGQPGHSDGVL

SEQ ID NO: 93735 - protein, 328 aa, unidentified
MTNDMQFSSVCGIDIAKSVMQVYKVTSDGVVSNKAVKRANFLDEFRNVPPALIGMEACGGSQHWARELQNLGHTVRLMSPKAVKPYVTGLKNDKNDARGIYTALAMGVREVPVKSAAIRDLALLQTMRTKRQREKVAKINHIRGILSEYGLVMGKSINAFLAKAGSLIAELKERVDVSSYVVSELITLFEEVKGSILKIQELEKNIQSIARDNRQYELFLSAPGVGPITAATMTVLLCNPSVFKNGREFATYIGLAPKSTGSGGKNIVTHIPSKFDCNNEARSLLVQCAHSICRLQHKSEWVSSILMRKPKKVAVIAIANKSSPRERG

SEQ ID NO: 93736 - protein, 322 aa, unidentified
MKMALFQVFVGIDVSRDWLDVHILPFRHRLRVANTPAGWRELSGALAAHPQASIALEASGGYERNSLHHLATAGWQVHCLDPYKVRQFARAGGRRAKNDRIDAATIARYLATFTLQPTRIDPVVERLAEHVTYRRQLVEERTAVANQARLLRDPALRRLSRRRLARLEILIKRLEQSLAEQIAGAPQLAAKAAVLQTIKGVGPTLAATLLALLPELGTICRRKIAALVGLCPYDFDSGRFAGQRHIAGGRKHVRNALYMPTLVAMQHDHAIKTFYKRCVEGRSDKKPAVIAAMRKLLTILNARMRDHLASPDCHAQNIQPVQ

SEQ ID NO: 93737 - protein, 410 aa, unidentified
MLFIGDDWAEAHHDIEIEDESGRVLARRRLSEGLAGITMLHELVAEHLDPAAESGQVLVGIETERGPWVQALLASGYQVYAINPLQVARYRERHSTSGAKSDAADAHLLGEIVRLDRGHHRRVAGDSEIAEHIKIATRAHQTMIWSRVRQVNALRSLLREYYPAALAAFGADLASADALAVLAAAPSPEQGRRLSQARIETLLRRGGRQRNVTATAAKIRAALSSDQLTARPGVVPAYAASASALIAVLTAMVQQIEVLAGQVEQGFGQHPDAEIYRSQPGLGVILGGRVLAEFGDDPGRYADARSRKNYSGMSPITKASGTKRVVLARYARNRRLGDALFLQAYSALRSSPGARQFYDRQRARGATHYQALRALANRLVGILHGCLRHHTLYDEHRAWHTANQELSTAA

SEQ ID NO: 93738 - protein, 340 aa, unidentified
MRALYVGSDLHGNNNMIGIIDGEGKRVFKKRVSNEAQLVRDVLKPYKGEIVGIAVESTYNWYWLVDALMGEGYKVHLANPAGIQKYSGMKHSDDKHDAFWLAEMLRLRILPEGYIYPKEERPVRDLLRKRGHLVKIRTSLVSSLQNILCRNLGRHVIVNEVKRLKEDRVTPLLGESEDLAMAGRVSKETIDYLTYQIHEIEKVVAKRIEVKEEYRCLLTIYGIGKILTLTIMLETGPIGRFETVGDYVSYCRKVPSEWTSNGKKKGAGNKKNGNKYLAWAYSEASDFARRFYPEARAYYNRKMQKSNSVVAHSALANKLARAAYYVMRDQVAFEPKKLFG

SEQ ID NO: 93739 - protein, 416 aa, unidentified
MSGKREIACGVDVHNKFIVATILSSDGLKLQDRFNTNLEELLKFKDWLKKNGCRKVALESTGNYWIPIYSILEGSVNFILANAYQIKHIPGRKTDTLDSEWIAEICLKNLISPSRIFTRDYRELRSFTRSRESLIKVRTKIKNRVTHELEASCIKLSSKLSDIFGKSGRYIVDGLLNGMDPEVILERIPLGRIRATKEEILGAIQSNLSPSQIFLIQSHLNIIDTLTKQIAEIDAKISGLISLRKEDLRIALSMPGMGIISASTILAEIGDFRDFSSPDKLAAYCGLVPSVYQSAGKLINGHITKHGSPHIRAMIIEVAHAIIRSKQNSRLKKFFLRVKARRGTKIGVVALGRKVLCILFHLIISQELYQDELLSKPRNSKHISTHSTTSMSLGEMIETIIKAGYEVRRNECLERG

SEQ ID NO: 93740 - protein, 407 aa, unidentified
MGMCIRYCICEPSKKRALIDVCSFVWLVGVGYSNSIVKKEVKKRIKIESKNKDYYIAVDIGKRNCVVCVTDKNGSIIEETKYDNTLQEAERFASNLNKKYTNRKCHAVCESTANMWLKTYKAFEKNGIDVKLANPMKTKAIAQARIKTDKLDARILAHLLRSDLIAESYIAPDNVREDRSLLRLRINLVHDRTRVANRVHSLLDKYDLKCKYYHLSGVNSIKWLKSITPKLKGNDQIQLANHIKNIEFLNSEIKQIEEQISTEASKNENVKILMSMAGIDYFSAMLISSEIGDISRFNTASKLVSWCGLCPTVHQSGNTMYMGRIKKDGNKKINWIMIQAANTASRTDENRLKKYYKKMAKRHGHNVAITHVANKMIRIIWAMLTYKQLYKERKNELYETKLKKMQK

SEQ ID NO: 93741 - protein, 482 aa, unidentified
MKPKPQKKPEEVTEPRRPSRGHEMNRKQRREMMRKMQSEDLNLDVVHPNAAGIDIGNESHYVAVPPDRDSQPVRCFGCPTAELRAMGDGLNQCGIQTVAMQSTGVYWIAVYDLLEAAGLEVYRVNARDTKNLPGGKSDVQESQWLMKLHTYGLLRNSFRPPQEVRTLRTYWRQRHDLVQSAGRHIQRIQKVLTQMNIQLANVLSDVSGVTGQAIIKAILAGERDPHELAAFRDSRVKASQEEIARSLEGNWQEDLLFVLRQEQESYEFCQKQMAECDRQLKRYLQDREDQSQGADLPEEKRKGRRQSKKGNAPRFDLRRELFRMTGTDLTQIDGIDGMTAMTILSEAGWDMSRWKDESHFVSWLRLCPDNRISGNKIIGKGRLPTNNRASIALRMAASTLWRSNTYLGAQFRRLKTKLGAPVATKAMAAKLARLVYRMVRYGMRYVDRGAALYEGQQRDRQIRYLKHKAAQFGLQILEAPAA

SEQ ID NO: 93742 - protein, 408 aa, unidentified
MTVVGIDVSKGKSMVAAMKPGGELVTTPYEVKHSGIELSRFALDVLCMEPDTRVVMEATGRYHEPVAALLHSEGIFVSVLNPLLIKQSGAGSLRKVKSDPKDALKIAKYGLDNWSTLREYTPMEAIRQQLKLCARQCDLYNKNIVMLTNNLISLSDKTFPGVNELFSSPEKADGHLKWVDFYRTFWHCDCINRMSPDAFEERYKKWCKRKGYHFSADAADALYAASCGLYTTLPRDNNAKLLVTVATDQLIALRENQSKLETEMLNLCKQLPEYETVMAMYGVGKSTGPHLMAELGDIRRFPHRSSIVAFAGVDPGVVGSGKMQLSSVATSKRGSPQLRKALFQVVSAYVKRKPENEAVYQFYAKKRDEGKPYYVCTTAAANKFLRIYYARVKECLNAAESATQAEEG

SEQ ID NO: 93743 - protein, 344 aa, unidentified
MDHFAGLDVSVKETSVCIVDDTGRIVREVKVASEPAALVPVLRNPAYHFKRIGLEAGPLSQWLYSALAEAELPVICVETRHMQAVLKAQINKTDRNDARGIAQMMRAGLYRPVHVKTLRSQKLRMLLTHRKLLQSKAIAIENDLRGTLRNFGLKVGMVGKVQFEARIKELVENLPDLAELVEPLLIVRRTLREQIVSLHRRLLAIVRDDEVCRRLMTTPGVGPVVALTYRATVDVPARFRKSKAVGAVFGLTCSKYQSGEIDRSGRISRCGDEMMRVMLYEAAQSMLRSKKWSWLKAWAMQIARRRGMKKAIVALARRLAVIMHRIWVDGTEFRWTREQAAAAA

SEQ ID NO: 93744 - protein, 370 aa, unidentified
MKKQTKTTPVAVLTPTAAVHAGGFTLGLDLGDRSHYVCVLDAQGQIIHEGPMLNERVALALLLTRYPAATVALEAGTHSPWISRYLTSLGAAVIVANPRKLHAITRHERKCDRRDAVMLARLARADVALLHPLQHGSAQAQLDLLGLKLRDSLVRTRVNLINTVRFTLKSLGHAVANPSSEAFHKSILTAVPAECLPVVQPVLAVLALITNQIKTLERDLVARSKRDYPVTQRLQQIAGVGPLTALCFVLKIGEPTRFGRSRDVGPYLGLCPGRDQSGGTDKQLRISKCGDGLLRRLLVSAAHYILGPFGPACALRAYGQHLVGTSVREKKRAVVAVARKLAVLLLSLWKHGTDYEPRVPAAPTLVLVAA

SEQ ID NO: 93745 - protein, 315 aa, unidentified
MSDVPCFIGIDVAKARLDIALRPSGERWAVPNDASGVAMLVEQLQTLHPTLIVLEATGGLERAATSALAAAGLPVVVVNPRQARDFARATGQLAKTDALDARALAHFADVIRPTPRPLPDAQTQDLRALLGRRQQLIGMRTAEQNRLAGASERLTKDITAHITWLNAAIATLDDDLETLLRASPLWRANDDLLQSAKGIGPVSAHTFLLELPELGTLTRQQIAALVGVAPLNCDSGTLRGKRTIWGGRAHVRTVLYMSTLVATRFNPQIKVFYERLLAAGKVKKVALTACMHKFLTILNAMLKHRTPWQPQEVQS

SEQ ID NO: 93746 - protein, 404 aa, unidentified
MYNAVGIDVSKGKSTVAVLQPGGTVIRKPFDVSHTSQNLNELADYLSSLDGTTKIVMECTGRYHEPMVKALSEAGLFVSIVNPHLIKNFGNNSLRKVKSDPADARKIARYTLDNWTELRQYSGMDNTRTQLKTLNSQFSFFMKQKVAAKANLIALLDNTYPGVNKLFDSPTREDGSEKWVDYAYSFWHADCVRKIGLKAFTERYKSFCKKHHYIFQQDKPEKLFNASKELVAVFPKEKTYKLLIQQSIQQLNLASEHVERLRREMNELASTLPEYSTVMGIYGVGKTYGPQLIAEIGDVSRFTHREALTAFAGVDPGVDESGQHKSKSNRASKVGSARLRKTLFQIMTTLLQNAPEADPVYRFLDKKRSQGKPYYVYMTAGANKFLRIYYGRVKECLRNLEQTE

SEQ ID NO: 93747 - protein, 305 aa, unidentified
MYVGIDVGKTYLDIALGSDQTRRYPNNMAGIKQLMAWLAPLEPRQIAFEATGVYHLPLSRALAKQGWSRLKVNPSQSNALRNALGKRNKTDKEDALLLAECARLEIGRVSQDDEDQAALRRLMSYREGLLKRRGQVNSQLEAASWAQDEQLIGLLEQDLAHLAQQLHTLDKQLDTMLAALCEADVLLEMTGVGRCTTLAVLAYLPRSIWGQAKAAAAFAGIHPALRHSGRTLHSSLSRRGNPRLRKALYMAALVAVRHDETLKAFYHSLISRGKAKKQALLAAAHKLLRHMMGRLNAFYQGRVPS

SEQ ID NO: 93748 - protein, 369 aa, unidentified
MEEGEKARGCRNIGLDIHKYYSVVAGVDRDGEEVLSPCRVEHTELEDWLRKHMLPTDRVVIESTTNAWHVYDLLAPLVAEVLVANPMKVKQIACARVKTDNKDTLILARLLAANLVPAVWVPPQHIRELRQFISHRRKLANMHTQIVNRMHSVAHRHHLNHPKGKDFQPKNTLWQQDKSLSRLEKMQLELDMATRQYLEGQSERMTRELARMSHEEPWASDMLYLMQVPGFGVVTGMTILAAIGDISRFETPKALASYSGLTPGLEQSGLKLRSKGITKEGRRDLRWAMVEMAWRAVRSDPHWKKYFDQLKMRMHTNQAITAVARHLLTVIWSVLINHAPYRHFSPERIAYLYPAGAQVSHLGMGIARG

SEQ ID NO: 93749 - protein, 338 aa, unidentified
MNIVFPGIDLAKNVFQLCGLNQAGKPVYTKRTGRKELLQTLANIPACLIGIEASTGAFYWQREFEKLGHKVKVISPQYVKPFVRGQKNDGNDAQAIAVALMQPTMQFVPPKSPEQQDIQALHRARQRIVNHCTATVCQIRGLLLDRGIPIGSAVSRARRAIPLILEDAENGLSSRMRRTIAELYDLFNDLGRRIHFFDKEIETVFRQSEACQRIAKVKGIGPETATAVVAAIGKGTEFKNGRHFAAWLGLVPRQHSSGDRQVLMNMTKKGDKHLRTLFIHGARAVVRVATNNNDGHMNQWVNQLKERRGFNKTTVAVANKNARIIWSMLTNETGYQVV

SEQ ID NO: 93750 - protein, 394 aa, unidentified
MLYLGIDLHKSQITINLRNENGDVIQTGQISTNHDTINDFFGKLVKRAGKARGFMAIFEVCGFHDWLYARLQRCQCKEIVVIQPDNTARQKTDRRDANALCELLWNNRKRLRDGARPNGIQRIYLPDATDAQVRQLVNLRTFLVAQRTKVINKVRGLLRKHNVEQDAPSQTRYGTQKNRRWLETIALPTADRIEVDIHLKLWKEYDEQILSVESKLVKCYEEHPALLRLVSIPGISAMGAMTLLSRIVDIMRFKTPDSLANYFGLTPGCRNSGEATQRLGSITKAGSRIARHVLNFAVNHVVRKCPQMKAWHKKIKMRRGTKIARVAVMRRLATIVWHILRWDKTYQFRYDPPTAPQKKDDLRSSKEVLVGIGNKNLSHKKTETLSNRKGKTRA

SEQ ID NO: 93751 - protein, 428 aa, unidentified
MPLAGNVPPGASEPASELLIQYLLQHLLVQTQISHQFLHQPLIFILQLPQTPQPGHAWTGKFFLPVNGMDYLLPLRLTVRNVLSRRITMNIVYLGIDLAKNVFQLCGLNQAGKPVYSKRTGRKGLLQTVANIPACLIGVEASTGAFYWQREFERLRHKVKVISPQYVKPFVCGQKNDGNDAQAIAVALMQPTMQFVPPKILEQQDIQALHRARQRIVNHRTATVCQIRGLLLDRGITIGAAVSRVRRAVPLILEDAENGLSARMRRTIAELYDLFNDPGRRINFFDKEIDAVFRQSEACQRIAKVKGIGPKTATAVVAAIGKGTEFKNDRHFAAWLGLVPRQHSSGDRQVLMNMTKKGDRHLRTLFIHGTRAVVRVATNNNDGCLHQWVNQLKERCGFNKTAVAVANKNARIIWSMLRNEIEYQSIGS

SEQ ID NO: 93752 - protein, 343 aa, unidentified
MEVAIGIDSHKGTLAVAAVDALGRVLGVREFGNDPKGHRSLLRWVKEQAQPRRIGIEGSLHYGAAVARALLADGEDVREVSPSLTHLERRRRAKGKSDSVDAMAIARVVAADETLPSARRAALLSDLKLLVDYRDQLVRARTQVANRVHAHLVVIRPGYEKVVPNLRARRHVVRARSLISRDRSVQGELVRRRLGEILRLEAEIAEADRGIADKLRETGTTLTQIPGVGPFITAKILGEVGEVSRIRSKASFALLSGTAPIVASSGQTHRHRLNRRGNRQLNWALHYIALVQSRTTPEAKAYIARQREAGKSHKEAMRCLKRHLSNVVYRHLLIDARRLEQAA

SEQ ID NO: 93753 - protein, 323 aa, unidentified
MHEVFDNKTSGYRRLVKWVKTHAEGFTADTWLFCGENTGGYSIGLSNYVYASGYDMWLECAYKIKHSAGIQRVKNDKADSRTIAEYAMRNYDKMIPYKPQSASLTCLREVFLYRHSLVRQKVALQVRRDEKRLTQEKSEARAFVSFTSKHLITEVNKAIAKCDQKIKDIIASDDELREVFDIITSMPGIGIQNATCLMVYTDNFRKFDLNSRKIGCYYGIAPFGRQSGTSVNSRPQVSPFANRMIKSLLSQAALAAIKFDMNVHNYYQRLIERGKHPLLVHNNIKNKMLHILVAMVRDRVKYNPDNVYRTSNEVSLAPQVLNI

SEQ ID NO: 93754 - protein, 343 aa, unidentified
MQTITTIGLDIAKSVFQVHGVDAGGQVIVRRQLKRRYVLTFFQKLSPCLVGIEACASAHHWSRELQALGHLVRLMPPAYVKPYVKRQKNDATDAEAICEAVSRANMRFVPTKTPEQQSGLVLHRTRHLFIRQQTSAINAIRAHLAEFGIVAPVGRHGVEELLTVVADPNDRRVPEIARACLSALGAQLRRIKEQILEFDRLIRAWHRSNEMSMRLEEAPGVGPVLATALVAAVADPKSFRSGRNFSAWIGIVPKQHSSGGKNRLGNISKQGDRYLRGLFVAGALSVIRYAKIHGTKHRPWLTALLARRPTKVAAIALANKIARMVWAMMARGERYKEPVALAR

SEQ ID NO: 93755 - protein, 411 aa, unidentified
MNNTLFVGIDISKRSNVATFMNCEGKVVGRLAFSNNGSGADRLVAKILSYYEKGDFEAIRIGMENTSVYSKNLVWFLYEHEALNEHKLSIIPLNAIMVANYKKSFLDMDKDDITDSFAIADFIRIRPGLLPFKLDDRQEALKILTRSRYNYVQALSRMKSQFLTRLFLSFSEMEAGKPFYSIFSKTSLSLLEEEFTLDELAEKPIPELVEFLQEKGGGKFQNPEEIAKVLKKAASSSYRVPAMVRESLNRTMASDMEIMRILENEIHNCDKNIKKLMKSVPAILVSIPGIGPVLAAGIMSEIGDISRFQKQESLGKMAGFKWKRNQSGKKESEDKAAVLSGNKKLRYYLVEAANRVRIHDPVFEAYYRKKYAESKTHAHKRALILTARKLVRVIFYLLKENKLYKPDVGIS

SEQ ID NO: 93756 - protein, 430 aa, unidentified
MMEEVDDAELVVERIAALDLGKAGLEACVRVPSPHRPGRRMQELRGYGTTTAQLLEMVAWLRQWGVQRAVMESTSTYWKGVYYLLEAEGFECWLVNAREVKNVPGRAKTDRADAIWLAKVAERGMCRPSLVHPAEIRRLRDLTRYRRALVQDRTREQQRIEKLLEDAQIKISSVLSELHGVTARAMMDALIAGQRDPRALAQLAKGRARKKTAQLEEALRGFFTDHHAAILRMMLDNTDRISAQIAALDARIEKEIGPFSGQAARLAEIPGVDAVAAAELIAEIGVDMTRFPSDAHLVSWAKFCPQTHESAGKSKSKGRGRGNPWLAGTLGRIAFANSRADTFLGARYRRLARRRGKQKAIVATGNSVLTVVYYLLSDPMTTFCDLGPGYYESRINVHRRARDLVTQLQALTGQHIVIRDGKAVITDAAA

SEQ ID NO: 93757 - protein, 346 aa, unidentified
MMIIGCDFHPSWQQVSWWDTETGETGEQKLVHAAGEAQRFYRQLAAPALIGMEATGNSQWFMELVEDVGHGIWIGDAAQIRASYVRKQKTDKRDAAHILKLMVEGRFPRLWTPDREQRDLRQLVLHRHKLVEIRSRVKNELQHLSMNKGMQRKAKLWSQAGQQMLRELPLKPWASCRREDLLGLLAMLDQQIGKLDKAVQDAAEQHAQAKLLMTQPGVGPNTALAFVLTLGDVNRFRRGKQVASYLGLIPREESSGGRQKLGAISKQGNRLVRSLLVEAAQVAVRYDPGIRKEYLHRCHQKPKGVAKVAAARKLAVRLYWMLRTQTGYPEIVRIESSPRVPLVGAS

SEQ ID NO: 93758 - protein, 323 aa, unidentified
MQGKVSFQEDAMPVVYAGVDVSKEWLDVHLHPLGEGRRFSNDKTGIRQLKRLLARHQPKSIVMEATGKFHRSAHRSLWLDGFAVAVVDPLRARMFARACGYLAKTDRLDARFLALLAESLRPPADTPPSPHIEALQELVNARSAAKCDITALQNRSKTATTALLRGELNRLVRRLEQHVERLDKEIERCVGEDPQLCRKAEILTSIPGIGRVTALALMAGMDELGSCSGKQAAMLAGLAPIANDSGARTGRRSIRAGRPAPRRALYMAALSARRYNPALARFADTLKAAGKPAKVILVAIMRKLLVLANCLLAHDRIWTPNPP

SEQ ID NO: 93759 - protein, 391 aa, unidentified
MKSSHHIDTPAAGDKDGTLYVAFELSKSKWLIGIVLSGESKMSRHLVAGGDTAAVWQLISKKRAQGEKKLGRPVRVVSCYEAGFDGFWLDRWLGEQGIENRVLDPSSIELPRRARRAKTDRLDLERLMRVLIRHEGGEPRVCSVVRPPSPEQEDARRLSRERDRLVGERTAHGNRIKGLLHGQGVRDVEPRRKDFREQLARACTGDGRALPPRLVVEIVREHDRLMLIAGQLAEVEGLMKAEREAAAPDSRARQVNQLIELKAIGAVGGETLANEVFWRDFRNRRQVGAYFGLVGTPYDSGESSREQGIAKSGNSRARTLAIELAWGWLRYQPDSALSRWFKERVGDQKGLVKRIAIVALARKLMVALWRYLTQGLVPENAIVRAAAPAGR

SEQ ID NO: 93760 - protein, 310 aa, unidentified
MAEFVGIDVSKAFLDVCIRPSAETLHVSNDEAGIRGLVERFRGAPPALVVVEATGGYESALSASLALASIAVAVVNPRQVRDFAKASGRLAKTDAIDAAVLAHFAEVLKPVSRPLPDEQARILEALVARRRQLVEMLTAERLRFSRAMPAVQPNIKASINWLKRQLADIERDLGDVIKKSPLWREKDDLLQSVPGVGPVVSRTLLAELPELGTLNRKKIAALVGVAPLNCDSGTMKGQRHIWGGRASVRTALYMAALVGKKKNPILKRMYERLLERGKKPRVALLACAHKLLMILNSMMRDNEAWRPVLA

SEQ ID NO: 93761 - protein, 457 aa, unidentified
MSKRKKKVQSQSFNLQSLPKQLQHINLNAAGIDIGSEHHMVAVPEGRAEVAVREFSTFTADLNALADWLQQCGVTTVAMESTGVYWIPLFELLERRGFEVKLVDARHVKNVTGRKSDILDCQWIQQLHTYGLLAGAFRPADEICVLRSYLRQREMLTQTASMHIQHMQKALQQMNLLLHNVVSDITGVTGMKIIKELLAGERDPRVLASNRNKQCHNDRATIAKSLVGNYREEHLFALRQAVDLYEIYQTKIGDCDEAIVKQLSAQPDVKDEPPPPGQKLTPARDRQRGGVNVRDLLFKKSGVDLFAIPGLGADTLLVLTSEVGFDLSPWKTVKHFSSWLSLCPGTKISGGKVLSRKVKRNPNRAAQAFRMAAATLARSQSALGAFYRRVKSRTGGKQAITATAHKIARIYYALLTQGTTYVEMGQKAYEQKYQERRLKHLTAQAKSLGFQLVPSQT

SEQ ID NO: 93762 - protein, 402 aa, unidentified
MITCGIDIGKGKHAVAVIDESGRQLVRTRFYDNTKAGAERMLAELLRHAEPSQIHVGMESTGNYWRAYYDFLKGRGCVVDVINPIVTSASSAGDIRGRKTDRRDAESIAEVVLRGKYACRRDEGLQERKLRALTRQRGFIVEERSAAKLHLASLVAEAFAEFESLFEDPCGALALAVLSKYPTASHLARARKSSLAKIVRANTRGKDADAEALRLIGGAKDSISLSCEITDALARCVTSSIRTIMDLDERVKDVEEAIKGFDPPDLASKLMAIKGSGKVMPMVVAAEFGDISRFRNNPKDGSEAGMHKRLLAYAGCEPRIRESGKWMGRKFISKRGSRQLRTALYLLANNIRQWDPYFKAVYERKIGSGKHHNVAVFYVVAKLIEVLCALYKSGRNYAAIQP

SEQ ID NO: 93763 - protein, 419 aa, unidentified
MDEKSLVWCMEFSAVGKPENHMTDIGRVCEWANFWSGPLNAPSARIGDCRVQANQERNGGEIAMAVYVGIDVHKRYCQAALMSEQGQITHQLRFDNSQQGAASLIDLARSVDPHIKAVVEPSANFWIRIYDKLQDEGVEVKLSNPLRTKAIAEARIKTDRIDAKTLAQLLRGDLVAESYVPSRKNRERRALIRHRASLMRMRVDIKNRIHAVLDKHELTHNYTDLFGKQGLEWLHSLQLSTPDQEILQSSLQVVETLSEQIRSMDIHIAKDATNEEKAKLLMTMPGVDYYAAMVLLSEIGDVHRFSSDEKLVSWVGLAPQVHQSGDSNWTGHITRKGSKRARWILGQCAQSARQHDPRMREFYERIERKHGSQKAIVAVARKMLAIMYVMLIRNEPYRGENPELTDRKHKRLDMLVDSA

SEQ ID NO: 93764 - protein, 371 aa, unidentified
MAKRLKYIGLDVHKETIAVAVAEGERGGEVRFHGTIPNEDDAVRGMVKRLAGPGITLDFCYEAGPCGYGLQRLLTRQGQPCIVISPSMMPRRPGDQIKTDRRDAMTLARLLRAGELAPIWVPDEAHEAIRDLIRARRSAQEDTSAAKQSVRSFLLRHDRRFSGKSAWTKTYWRWLSEQRFDFAHQQLAFEEAKRRVLEAQARTTRLEAALVEAVDGWRFAPLVRSLQALRGVRLIVAATLVAEVGDLTRFQNPKQLMAYLGLVPSEYSSGARVQRGRITRAGNAHARTMLVEAGWTYRLPAREERRYRDRVADLPEDIQAIGWKAQVRLCQRFRRLSATGKPQPKVNTAIARELVGFAWDIARRVQPVVAV

SEQ ID NO: 93765 - protein, 345 aa, unidentified
MDHFAGLDVSVKETSVCIVDDAGKIVREVKVASEPEALLAVLKNLAYHFKRIGLEAGPLSQWLFSALAEAGLPVICVETRHMQAVLKAQINKTDRNDARGIAQMMRAGLYRPVHVKTIRSQKLRMLLTHRKLLQSKAIAIENDLRGTLRNFGLKVGMVGKVKFEARIRELVENLPDLAVLVEPMLIVRRTLREQIVILHRRLLAIVRDDEVCRRLMTTPGVGPVVALTYRATVDVPARFRKSKAVGAVFGLTCAKYQSGEVDRNGRISRCGDEMMRVMLYEAAQSMLRSKKWSWLKAWAMQIARRRGMKKAIVALARRLAVIMHRIWVDGTEFRWTREQATAAAA

SEQ ID NO: 93766 - protein, 420 aa, unidentified
MAYAVAGRAAGLFNRRHRPLGHRFRWLGGWILLVLPERTQVAWMSLVMGIDQHRAQITAEWLDTETGEVSRARVRPADRAGVRRFLARFAGQQLEVALEATTGWRFLVEELRAVGAVVHLAEPAETAALRGNKRRAKSDRADARHHRELVLAGRLPESWIPPDHILDVRARVRLRHTLIEQHTEWQQRIQAVLYHHGCRQRRRLMEGDGREWLASQALSETAREQITVAMAIIDALDVQLAPLTKELCAWARRQAGCKALIDAYYGIGELCAVTVIAELGDCRRFQNSRDAVRYSGLDVTVYQSDRHRAPGHLSRQGPPALRWALYEAAQVARRPGSPDRGYYEQAAERLGGNRACVALARKLLKRCYHTLRELGDDALTPPVERPQPGPGSAAARRASSGSPRSLEPTTTNQRADVLAA

SEQ ID NO: 93767 - protein, 423 aa, unidentified
MKNSAAEKRKQVPAGYLVVGVDPHKKKHAAVFMTQDFMVHSKLKFDNSREGFEKVLERVRTEMLKTGCRGVIFAIETGAHHWRNLAYFLDEKGIPLRLINQFTLKRRREGKDLNHRKNDYRDSEVAAQLLCTGEFNAARLSQGVYAELRAAYGSYRRLVKERTRIVNLIKSLLDGLFPEFTQVFKNPCGQTAASVLCTCAVPQAIAGMTESEFVGAIKAACQGRVMKGKLWALHHVALTSIGIGAGAQSVSSEIAFLIEKLRLIEQQLRQIKEALTRLVHETMEGKYLLSIIGLSYVSVAGIIAELGSFSSYQNAKQLIKMAGSNPTESESGGKRHSHTPISKQGRPVLRHCAWTAVIPMLRFNPDFRDWAKKLRERPAGANPLSGREVMVAAVNKLLRLAFALVKNQTLYQIPESQPVEITI

SEQ ID NO: 93768 - protein, 380 aa, unidentified
MKFKMQDKQNQLIERISDRHLVVGVDIAQQFHVARAVNYRGIVVGEPLTFENNEEGFNRFLEWINKLKAKNSLDTTIVGMEPTGHYWINLSKWLSNEKIDVVTVNPHLVKRNKENRDNTQSKSDKKDALVIADMVKNGYYAFVRSTPESFEKLRVLMSNRDVIVKRLVSSINQLNRWVDVVFPELRQVFKDVKGKGAIATLRLFPTPIELRSMQPQDIVGKWKSVMKRQPGLKKAYLLIDLAKRSIGTHQALEAYKLHLEQLLEEYDLATTQLERVEQEVTNVLQQIPFAKKLLAIKGISEISLAGILGEAGDLSGFAHGNSLLRHAGLHLSEASSGKWKGQIVISKRGRSRLRRFLYLATMSLVMNNPEFKRCTLIMLR

SEQ ID NO: 93769 - protein, 405 aa, unidentified
MEIIVERGAGLDVHKGRVVACIMGTGIKKEIRTYLTMTNDLLRLKAWLKEHGITHVAMESTGVYWKPVFNILEDSFEVLLVNARHVKHVPGRKTDVLDSEWLCKLLRSGLVRGSFIPPKEIRELRDLTRYKRKLIQAITAEKQRVEKILEDANIKLSSIASDTFGKSGARIIQELLKGELRPDQMAELSKGKLRRRKEELKEALVGKVEEHHKRMIRTSLEHIDAMEEIFLSVEQKIQEKIDLHFKEAFELLKTIPPIKDAASVIIAEMGVNMDLFPTEAHVSSWAGMSPGNNESAGKNKSGATTHGNIYLKTILTEFAWIASKMKGTYLWSKYQSLIGRKGKKKTLVAVGHKILISCYQVLKYKLPYKELGANYLTERKRDRIARSYVKRLSNLGYAVTLKEVA

SEQ ID NO: 93770 - protein, 322 aa, unidentified
MSVSNQRCAGIDVSKSTLDIAISSIAQPFTVPNEDGGFNQILKELKRNETQLILMEATGGLESGVAGYLQSEGFDVVVINPRQARDFARAMGYLAKTDQIDARVLLQMAKVINLHPEREKYIRPLPDVHRQLLAAMVVRRRQLTIMLTAERNRLHPSHPQNHESIRFIISVLKSEMARIESEMSAYISKNFSELSALLSAVKGVGAATVAVLLAEVPELGTLSRREISALIGVAPVNRDSGTMRGRRTVFGGRASVRTALYMSALVGTRHNPVIKEFYTRLVAAGKPKKVALTACIRKLLTILNAMLKNNEAWDPLYHQHAS

SEQ ID NO: 93771 - protein, 391 aa, unidentified
MIYVGIDIAKDKHDCVIVDDEGEILVDHFSFSNNSEGFNLLIQNINSASHDFENIKIGLEATGHYSYNILGFLNEKKYSTYVLNPLHTNLYRKGLSLRKTKTDKVDAYVIALMIMSKQFLKSYSNTSYHNEDLKSLTRYRFDLVAQRAKLKQSVARLVNILFPELESLVSGLHLKAVYALLSEYPSAYQIANAHLTKLTNLLLDNSRGHFSKEFAIKIRETAQSSVGSSMPSTSLELKHTIKRIQDMNELVNQTEKQIKFIIENMKPVILSIPGINHALGAMIISEIGDMNRFDNPDKILAYAGLSPSTYQSGKLDSSHAKMEKRGSKYLCYALFNSARFVCRWDPTFNAYLAKKRAEGKHYNVAISHAVKKLVRLIFALNKSGQLYLPKA

SEQ ID NO: 93772 - protein, 415 aa, unidentified
MDVLYPRCAGLDVHKDSVVAGVRLAGDGPVRTEVRTFDTTTPGLLALSAWLAECGCTHLAMEATGVYWRPVWHVLSDGDFVLILANAAHVKNVPGRKTDVADALWLADLLAHGLIRPSFVPEAPTQELRALLRTRKQLVREQASHVQRIQKTLEDANLKLGSVLSQVMGVSGRAILQALIDGQNDPDALLLLVQRGVKAPPEKLRAALTGRITDRHRFLLGLHLRQFDALAAAMAEIDAEVDRDLDPFRQAVRLLRTIPGVSDLTAQVIVSEIGVDMGRFPTAGHLISWAGLCPRNDESAGKRRSTRLRKGATWLKTTLVQCAWAASRKKASYLQAQFQRLRHRRGPKKAICAVAASILTAVYHMLRDGTFYQDLGAEHFRRTSPETQANRLTRQIAKLGFTCVLTPTAAGPVSV

SEQ ID NO: 93773 - protein, 391 aa, unidentified
MKQYCYFCGVDVAKNSFVVSIKNGRPLMKNRVFAMNKAGLRDFEQIIKDFGTNVVVGMEPTGIYHYNLLNFLQKRGYNSVVVNPYMLHQFFKFTNNKPTKTDRKDSKTIAEFLEFKQDDFKKNPVDERFSVRYFVREKERITQDIAKTKTEIKRMLSLVFPEAERLLGVFSQEFLSLLLEFGGAAKIRNISKTEFVSLAKQVLDRGRGRKPKFSPERIYELASSSIAGDWPDYEKLLKIKIKRLKSLLEEKEEVTKLIEEKAQKFFRREIEILCSIPGIGKESAIYLMAEIVDIKRFVSYRRLVGFCGLDPVIKQSGKFKAKLRISKRGNAHARRIIWIMAGCVKRSCPYFREYYLKKRTEGKSYKEAVIATSTKLLRTIFALLNENRCFK

SEQ ID NO: 93774 - protein, 338 aa, unidentified
MSKLFECIGVDVSKNTLDVALFRGEIDWNQCHVRVSNNESGFKELKKWLRNKQVDKKRLRVCMEFTGLYTQVFRMWLESESITYYMVDPKRMYHFTPPLNIRGIRQIKTDKTDAFRIAIYCSFFHESLVPSKLPSPAYFKLKRLLAERRQYLKQSTLYKQQLHDISIYDSVSSRIRKQDELKSLKDKIKQTEVEMKAIIESDTLIKKNYKLLLSVVGVGFVVAVTTIVLTENFTSFTNPRKYACYIAIAPFPYESGTSVRGATRVSKQGFRQAKADLSICVLPAIRFDPEIQEYWHRKKAEGKHTGVVFNAIKFKLVLRMFAVVKRGKPYVNTKGYKR

SEQ ID NO: 93775 - protein, 349 aa, unidentified
MIVGVDVHRREHCAALIDERGVVLGTLSFPNTAAGVRKLRTWLGARDAGGAVVGIENGAGYGQMLCSALAAADLEVLNVPAWRTKRDRGKHGPGKSDPGDAVAIARVVLCDRERLGPALEPELVRALAIVETLRRQTVARRTDAIQRLRALWTQFDPEAEVAVGNVLAARTLRRLRRLRLGSGVLGDAATSCLHRIAAEIARLDAVVRDLDKQLAELLAQSGNPLEDVCGAGLQVAATLIAQSGDVRRFRNRAAYARYGGVAPIPCGSGASAGRHRLHRGGNRQVNAALHRIAIVQAQWDPAAQAYLERKLAEGKTPREARRALKRHLANLVYRRLHRWAENTLPAVAS

SEQ ID NO: 93776 - protein, 438 aa, unidentified
MSNKVIFNLDELFISVGIDVGADFSWMSIALPNQQFVGKPYKILHNSIDSLTTAVSKIKEAEELYSLESRIFLESTGIYHYPLFCYLRDKGFNCSVINPIITKNSTNINIRKVHNDRFDSKKAALVGLKPDLKVSLMPSDLALNCRNLCREYYDLMDNRSAYVNKLQGELRMAFPQYLGIFSKVTINTSLTLLETYTSPSAFLEADKQEIIDIIKSTARFGLTYAQNKYNAIIQAATDANQFGYIIESNIKRIRLYISFIRKYDEEINNILESLHELIDANEDADFVKQIHLIETFKGAGFLSAATIMGEIGDFSAFSKPKQLFAYFGLDPAVKQSGKFEGTKVQMSKRGSSIARRVIHTLSLQSISISRNGKAKNPVLREYYLQKCDSKPKLVAMGAVSHKVCNMIFAILRDNKPFEIITPQEHIKQYNAAKCDIAA

SEQ ID NO: 93777 - protein, 384 aa, unidentified
MGKVVIGVDPHKASNTLVVIDGREQVLAQRRFANDRAGYREMKTFVGDYRDRVWAVEGARGVGAGLAQRLVAEGEQVLNVPAKLSARVRALGGGSGRKTDNADAFAVAVAGLRARDLQPVRPDDVIEILGMLTSRRQELVHARISTVNRLHDVLCHLIPGGATKNLRATRARQLLSTVRPRAAVGKARKQLALDYLAELERLDAKLKEIKKQISDVIDEQQTSVVEVFGVGKVGAAKILAEVVDVRRFPSKAHFASYTGTAPVDVSSGDHNRHRLNRGGNRRLNHVLHIAAVVQSRLPGPGQDYYRRKRADGKTHLEALRCLKRRLSDVVYRCLLDDLAAMSPGGQVGASLQSSAADPIPMISTSERSLPGLTADPTPVAAAVS

SEQ ID NO: 93778 - protein, 402 aa, unidentified
MNNVVGIDVSKGKSMVCVMRPFGEVVLEPFEVLHTAQSLNDLAGKLKALDGETRVVMEATGNYHKPVAFVLHDAGLFVSVVNPVLIHDYDNNSLRRVKTDKKDAVKIANYTLDKWTRLRQYLPEDDTRLALKNCYRQYQQAVAIRTMLKNNLISSLDLTFPDANKLFSSPVKNNGCEKWVDFIGDFWHSECVSSLSANAFAKKYLKWCQKHGYVFTRSKSDEIYACAVNSASLPKSPTSKLLIQQQVAQLKAVSQSVAAFRQEMLRLSQQLPEFDTVMEMYGVGPSLGPQLMAEIGDVRRFSSKKSLIAFAGIEPQPNDSGKVVGNDKGISKVGSAVLRRTLFLIMTVILQTQPQDEPVFQFMNKKRSEGKPYKVYMMASANKFLRIYYAKVKAVMDSERSQ

SEQ ID NO: 93779 - protein, 383 aa, unidentified
MALDLHKKFSRAVVMDPGGEVLDDRRVSHSDRAEVERFFREFERGTDVVMEATFNWPWVADLAAKCGLTPHLGDPMRIKDYRKGLPKSDRKDAIGQGNLWLRRMFPEAYLAPGEVRRRRGLFRMRSLFVRMRTALKNNIHGQLFKLGLNVDETSDAFGEAGRWAMRRLPLDDDSRLELSRKLALLDDIALHIARIERQIKDEVKENEDARLLDTLPGFAEITAHGFLAEIGEVKRFPNARALAAYGGTLPLDNESADKDLGKRTGSHSNRFLRWIVLEAVNGAVRKSPRMRSLYNRVKARNRKQPGKARVAVARELMELAHLVLTRRVPYTETPPPRPGSKEAGVKSQRRRESFPLTGRRLNRRTGKRSAERSPKGYGNDRQA

SEQ ID NO: 93780 - protein, 478 aa, unidentified
MKPVSYSELALETNENLGRDTGTVRKTSMWNGPHYETEALFHFGCTSQIVCPCGLREEKKVMKNQWKLYVGIDVHSREHKVAVIPKALMDRGGTAWKKVRPLAIRNNIADFERFDTVIKSHTSSTKEVAIAVDHTGGHYSEPIVHFLQARGYSVYYLETKGVKAARERFLDEESKSDIIDSTCAAYLLYLRDLHGLSFRISVTTAELGTKAAALNSLALQRLQLIKLVSQATNRLHQFLIAVFPEGEERYFKQLAVIAHCYPTPKDILASKGLDGIAGLHQREKESIQDLAAKTVGVPGDTYHWLIKYLSNQRMEALAKSDTLTSILRAQVRSHPYGRILLSFPNLGEIAAATIIGIIKEIDRWPDKKKLKKALGIYSNTMQSGSSPGRTRKGKEGSRHGRRVLFQVCLGCVRTNISDNDFRDYYFRHVARGKPRIKALVSTMGKLAEIIYHCLKVGEPYQYQGRHRTSSICGNSSPE

SEQ ID NO: 93781 - protein, 427 aa, unidentified
MKKADLLSTLFVGIDISSRENVVVLLEFESKKPLLSFAVSNNYPGAAILAQKLAEFLSSHHELSSIIIALESTSFYGIHIANYLSSCQLLMPFNTAVYCVNPKMIANYKKSFIDLGKNDYIDAFVIADFARVGRITIKPWRGSQFLALQRLTRHRLHLAKALTREKTYMLSNIFLKFSEFSMLEEEQQPFSDNFGATATSVLTDFLSTEEIINMPIDALISYVCEKGHNRFSNPENTAKLLKQAARNSYRLDKCLYEPLTIAIASSFNLITTYTKEMKAVNAAIEKTLKGLNPNAYQSLLSIPGIGPVMSAGILAEIGCIDAFKSQDALAKYAGLVWRENQSGQFKADDTTLSKAGNAYLIYYLIEAVSHIKKHCNEFAVYYQKKFDEVKLHQHKRALVLTARKFVRLIFGLLAKNQLYSSSRVDQI

SEQ ID NO: 93782 - protein, 370 aa, unidentified
MRIIGCDLHARQQTLAMLDTTTGEVVNLTLMHEGDKVRGFYSQLPRPVLVGIEATGSMQWFLNLMEELGIECRVGHPAQIRAAEPRKQKHDRRDADLILKLLAENRFPAIWLPTKELLDLRALLLHRHQWVRMRVRMQNALQAIALANGLRRGPSLWSYDGQAKIGLLPLLPHASCRRSALQAMYKMMESEIEKLTQKVAEQAGHRAGARLLMTHPGVGPVTALATEVFLGDPQRFTDSKALASYVGIIPREYSSGGQQRLGGVTKQGSPLLRFLWGEAGAHAARRDPELKRFYCRKLVHKGLGKARVAVARKLGIRLWIMLRDEIDYQEFCRRGQMQQKAVRPVAGMPETGNGAKSHRPSAEATRLPEC

SEQ ID NO: 93783 - protein, 412 aa, unidentified
MPDPLLVGIDVHRQNNTVHLMNGQGQQVAKAFAVANNRPGSQTLASKISQVASAGGYDCLQIAAEATGFYWWHLFVALAQDPLLQQWPLSLYPFNARPIAHFKKAYIDLDKSDAIDPFVIADRLRWGRDLPQPFRCDATLTAIRCLTRHRFHLTQNLAREKAYCLAYLYLKASEYTRLQAFSDVFGAASRAVISAFASTEEIAAIPFAELVQFIDNKGKGRFADPNSNARQLQQVAQDSYPLPESMQTPVNLILRQSLQSISASERQRQRLDAVIAEHMEAVPNTLQTIPGCGPVYSAGIIAEIGGLERFHYDEAKVAKFAGLKWRQTQSGGFQADETRLTRSGNPYLRYYFCEAANSVRRYDADYAAYYQRKYDEVRTHQHKRAIVLTARKLVRLVVRLLTTNQSYQPRRQ

SEQ ID NO: 93784 - protein, 408 aa, unidentified
MRYLIGIDDAKAKNDIAIFNSDMGLVRKPFTVSQSQSDIQKLVKSFAAIDRDVRAVVESTDRYHLPIVEQLSKERIFVSVANPKQIKQFGDNSLRNVKNDPADAKKICRCGILNWDSLREYTNMDELRTQLQLYNSQFEFFTSQKVSVKSNLIALLDMTYPGVNQLFNSPVRPDGSEKWVDYAELFWHVDCVRSLSLHAFSEKYRHFCEKQGCHFQQGKCESLYASAQDLIAVFPKNAQYKALVKMAIGNLKEVITHVETLRAAMNEIASQLPEYPVVMAMKGVGPSLGPQLLAEIGDPMRFKHREALTAFAGVDPGINQSGTLNQGSNCAFKTGNPRLRHTQFKIMEVLIKLHPEEDKVYQFMDKKRSEGKPYLVYMTAGANKFLRIYYGKTREYLHALEADKGTNE

SEQ ID NO: 93785 - protein, 386 aa, unidentified
MKKVNSNIECAGMDVHYKFSNVTFRDSGGKVVSRQRLNHPDRNQLTMRMNHWPKGIPVVLEASFGWGWLSDLLIEAGLEPQLSNCYKLEQMRKARGWVKTNKKDADMLSLLPFETTDWWQVWRAPVDVRNRREQMRFRGDLVGLQTVVKNRIHAIFHRQGIFHEFSDLFGGKGRKFLAELCLENPTELSSEALLALRGQVILLDHLRRQLADVARILRKQLVKTPLIKRLKTIDGIGLILAHVLTAEIGRIERFRTHKALASYSLLAPRSHDTGQDDPSRSPQGRHLGTHGNRTLKWAFIEAAHGAVRSGGRWRAMFDRVTDGGKKDRNRGYIKVARELVKVVYVVWKKGVDYQPVAPVRPGCRKKEKSRSGTGQLLHPMVHALTA

SEQ ID NO: 93786 - protein, 318 aa, unidentified
MTKAITLTGGIDTSKSKLDVGIHGQKRCETFDNMQAGWCQLLAWLSSEGVSRVGIEATGGYERGVTRYLQDAGIEVVVLQPRQVKAFGQLHLRRAKSDRIDAFLIAACTHLLDAPNRMPPDPRFDALGDHLTYIEQIEEDIARLKTRLEHIGEKRLQRTVNADIARLAKRRDDELERLQAQLRAHADLARRFDLVLSIPGIGARTALSIVVRLPELGQISREQAASLAGLAPFVQQSGKWKGETHISGGRGRLRRALYAAALPAAFRWNPALKVMYAQLTQRGKTHTSALVACARKLLIYANTVVSRGTPWVHNPAAV

SEQ ID NO: 93787 - protein, 479 aa, unidentified
MKKIGFLAADVSKGYADFVLWDQQGNALESAFKLMDNKEGHQQAKRLAKEFISRYELSELYVGMESTGGYENNWFILFKSMQAEGVSRVMRINPKAVKAMGTARMARTITDAVSADNIAQYLLSFADHSNPGYSQDNNFKTVRHVGAWIRNINKQITQTANHLEKLVYQSFPELLVYCRHGFPDWLLNLLQKYPLPSDIIKAGKSRLSKLNFITEEKAAAIIVKAKNSVAGQGRDELLSTTIKSMVKLLYCNRQQIELQKRALINQFKEAHEVQLLDSIPGIAAESAILLMMDIESIDNYSRAKQLCAHFGLHPTFKQSGDGTWASRLSKEGRSSVRGLLYMPALTAVRNNEYFKNLYAMQRAKGKKHKQAICVVMHKMLCIAFGILKSKKPFDIETHQNNQEKGEQKQKEALEKQKLNNKEKKVQRERYIGENQLESPISRKQFKKIKKEPLVPIGNNQDKRDPEALNKDKPISYLSP

SEQ ID NO: 93788 - protein, 322 aa, unidentified
MSVSVLGIDIAKQKFDAALLVDGKTKHKTCKNSVEGFETLVIWLEKQGIKKVHACMEATGNYGEDLAIYLHEAGHIVSIVNPARIKGFAQSELLRTKTDKLDAALIARFCLAMKPGAWIPPSPEIRSLRALVRRVDGLIDMRSQEKNRISTAHESVISLIKEHIAYLDQEIEKIRQQIAGLIEQDPNLKRRKELLDSIPGIGMVTIPHILAELDDLEKFTHVRQMVAFIGLAPRETLSGSSIKGKPRLCKMGHTRLRKTLYMPALVSIQCNPVMIAFYNRLKEKGKNGKVIVCAIMRKLVHVIFGVLKSGKKYDPNYKPASA

SEQ ID NO: 93789 - protein, 355 aa, unidentified
MTSIKYIGMDVHTESTSIAVRNSSGKIVMECVVETKASTLLQFLDGLRGDLRVVFEEGTWATWLYDLLKPHVTEVLVCNTRKNAVRKGSKSDRIDARKLSEQLYMNNVKSVYHGEHGLRMMKELARSYLTIIKDLTRVMNRLKALYRSWGIPCAGKEVYARRYRAEWLAKISEAAVRRRAEHYYQQLDALLPLRQEARRDLLIESRKHKIWKLLRLIPAIGPIRAAILIAVMQTPHRFRTKRNLWTYSGLGLETYDSAEYRAVQGQLERSRKQATVRGLNKDYNHDLKDIFKGAAMRASTAAGPLRDFYDNLLAKGRKPTMARLTLARKIAAITLIVWKKEVRFDANYLKPQQAA

SEQ ID NO: 93790 - protein, 419 aa, unidentified
MSFKIYLKNACGLDVHKTWIYACIGIADANNIVHYHEKRFSSFTKGLNELAEWLAFYGCKDVCMESTGKYWIPVFNILEKNCNIVLAHPKYTKPQKGNKTDRKDARFICDLFMCSMIKPSFIPPADIREIRDLVRYRFKLTNMITGEKNRAHNCLTVSNLKLDDVFSDIFGKSSLSITEYMLAHPGEKFDVTPFVNGRCKTPVEEIQAAVDGAISDGQAVKLRECLDHISQLEKHKEKIEQEILSFTGKYKDSLDLIRTVPGFDKNPFTAIQILSEIGADMSVFPTDKNLVSWAGCCPRNDRSASHVKSTRISRSGSYLKPVLVQIANAIIRSKDHPEFRDRYRRIKAHRGHKKAIISICRMLLTAIWHILTDKKPYTADGFTISTPVREKTILTKSQALYLLRQRGYIIKDDEPQTAS

SEQ ID NO: 93791 - protein, 408 aa, unidentified
MRIIGLDIHRAFAEAVAWKDGKLSRLGRVIMRRERLEEFAKQLSNSDIVVIEATGNAASVAAVIGPHVGRVVIANPKQVRLIAHAKIKTDKIDAGVLAQLYASGFLPEVWIADEPTQALRRQVTRRNQIVRQRSRLKNIIQSILHAHLIPSCPHQNLCGPKGRAWLSEQILPGDERLAVERHLREFDRLTDDLKAIERDLAQSALADERVKRLMTIPGIDMVVALALIAAIGNIGRFAKPEQLVGYLGLNPSVRQSGPGPAYHGRITKQGRGHARGMLVEAGWAAARSPGPLRSFFLRVQSRRGQHVAAVATARKLAILIWHLLTKNENYLWARPALHARKLRDLELKAGYKPARGQKGTAHAYNLQNQRDQERRWVEQAETAYTRFVAGWNARGPKARTGAAKEERR

SEQ ID NO: 93792 - protein, 366 aa, unidentified
MQKISTMQANGSKNFQAGQLTIGLDLGDRWSFYCVLDEVGKVLLEQKLPTTPEAMKQTFAQIPPSRMAMETGTHSPWMSRLLAELGHEVIVAHAQKVDLITKSTRKDDRHDAKTLARLARIDPELLGPVRHRSAKAQIHLTVIRARAELVRARTALVNAARGSVKSYGQRLPKRGTQQVRRELGAGLRQELREVLEPLFQEIESLNERIKEYDRRIETIAQQEYPETELLKQVKGVGELIALTYVLTIEEPRRFRKSRDVGCFLGLQPGRRNSGQSEPQMHISKAGDEYLRTLLVQGAHYILGPFGEDSDLRRWGQKLAERGGKNAKKRAVVAVARKLAVLLHRLWVGGEVYEPLRNSQKVMSAVA

SEQ ID NO: 93793 - protein, 340 aa, unidentified
MDQLYAAIDLHSNNSVVVVIDEKDRVVYEHRLPNELSVILGHLASYREKIQAVAVESTYNWYWLVDGLMEAGYEVRLVNTVAVKIYDGMKYTGDEHDARHLAHLLRLGILPTGYIYPKVERSVRDLLRKRGQLVRCRTAQLLSIENLVSRNCGKRISPEEIRKLDDEQFLRLCNGDVSRSLAIQSNRTVLKCLDEQVALLEKAVLAQAKMKPAFENVLTITGIGKILGMTIMYEMGDPDRFKKVGCFASYARCVDSQRFSNGKKKGSGNSKNGNKYLAWAFVEAAHHATRHSEKIRQFYQRKKAKRNTTVAIKAVAHKLARACFHVLKDQVPFDVDRAFA

SEQ ID NO: 93794 - protein, 345 aa, unidentified
MDQIIRIGIDTSKHFFQLYGVNAVEQTVLRKRLRRKDLAAFFEKLAPTVIAIEACGASHHWARLLRSLGHSVKLIAPQLVKPYIKRGKNDAADAEALCEAMSRPTMRFVPVKTAEQQAALMLVGLRDRLIRNRTQLSNAIRGYAAEFGLTAAKGMAHLVPLLERIQADENLPALARELFAIQAKEHAQLQTQIDDVDAKLMAWYRADESSRRLAKIPGVGPIGAVQLTMKTPDPKLFKSGRQFAAWIGLTPKDHSTGGKLRLGVITRAGDDGLRSVLVVGATAVIQHAQRSGKALPWLAGLLRRKSPKLAAVALANKMARIAWKLLVTGEAYTTRSAPTVSFRAA

SEQ ID NO: 93795 - protein, 364 aa, unidentified
MNEHITHVAFDMHQDSVTAAWLRPGASTPEVRTIPHEPKPFRRLVKEILSHGPARACYEAGPLGYAPQRQLETWGLPCEVIAPSLIPRRPGQRIKTDKRDAKKLVGLYRAGELTPIRIPTPTEEDVRELVRCREACGADALRAQQHLRQFLLRRGLRSPDGPAGSQAWWAWVQALQLPDPAAQRTLDEYCLAATTLRARWKALDPEVAALASRDPWVTPVARLRCLRGIDTLTAVTVLLEVFDFRRFGTPRPFMSFVGLVPREHSSGGKEARGGITKTGNTHLRRVVVEAAWHYQHRPRLSKAIQARRAGQPPAVVALAEQAEQRLHRRFARLLARGKRPVIAATAVARELCGFLWAVMVQVPA

SEQ ID NO: 93796 - protein, 337 aa, unidentified
MQRQYVGIDLHRRRSVIVRMTEDGEVLDTVRIDNDPVALSVELAKAGPDPEIALEATYGWYWANDLLEAEGARVHLVHPLGLHWDSRRVKNDERDATELANRLRRGDLPESWIAPPELRELRELVRYRAKITALRTSAKAQIHAVMAKQGILPTYGDMFGPVGQVLLDEMPFEGAYAIRVDSLRDLLELYERELTMVTRALHRRLADHRGYRAIQAIHGVGPIMAAIFVAEIGDVRRFPDARHLCSWSGLTPSHRESDTKVRRGHITKQGSSLVRWAAVEAVARYHGGDPIAPAYMRIANRRGKMIGRVAAARKLLTLVFYGLRDGEIRCLADREAS

SEQ ID NO: 93797 - protein, 410 aa, unidentified
MRLFVGDDWAEDHHDVELMDAAGRVLAKKRLPEGVTGMARLHELIARHAQDPDERGEDAEVVIGIETDRGPWVAALVAAGYTVYAVNPLQASRYRERHGVSGAKSDTGDAHMLTDMVRTDSHQLRAVAGDSADAGAVKAVARTHKTLIWDRTRQVQRLRHQLREYFPAALAAFEDLDTPDALELLGKAPDPARAAKLTRAQVSAALKRARRRDIPGKATAIMAALRSAQLGQPPAVAAAYAATVRSLIAVITTLNEQVKTLQGEVEADFGRHPDAEIYLSQPGLGPVLGARVLGEFGDDPDRYASGKARKNYASTSPITRASGKKKIVMARFIHNDRLIDALMAQAFTALNASPGARALYDAERARGTEHNAALRKVANRLVGILHGCLKTRTLYDEATAWPNRENKLAA

SEQ ID NO: 93798 - protein, 355 aa, unidentified
MSIVGGVDIHRKQLTFDWVDEQDGRWERGRIAPADREHLAGWLARFAGQAEVAFALEGCTGWRYVAEEMAKAGVVAHLAEPADTSVLRGPKRRAKTDKADAKLLRELLAAGRLPECYIPPTQVLEWRAMLELYQDLRGQHTAWVQRIQAVCFHQGATAPGQAGIVRGDRARLKAIVEEQLTVSGRLQVNTALDVMDTLADHLERLRRRLLSTARGVNGARVLMREIYGVGPLSSLALCAWLGGAGRFSSSRKAVRFVGLDITVHSSDGKRSPGRLSRQGPEVLRWLLFEAAKTSARACAPGYDYYAAVRDRYDANRACLSQARRIVRHAVHLLTELGDDAFTILAQPTAPTTIAR

SEQ ID NO: 93799 - protein, 356 aa, unidentified
MVIVAIESHLGALYMQISTIGLDIAKNVFQVHGIDAAEKVVVRKRLRRRQVLEFFKALPRCLIGMEACATAHYWARELTKLGHEVRLMPAKDVKAYVKRNKNDAADAEAICEAVRRPTMRFVRIKSAEQQGQLMQHRTRDVLIRQRTQIINALRAHLAELGLVAAQGNAGVNELRAIVTDEQDTRLPIDARASVIVLAAQLEALESVIGAIEKRIKMQHRSSEASQRVEAIPGIGVIGASAIVATVADPTIFRSGRDFAAWIGLVPRQDSTGGKQKLGPISKQGDRYLRRILVVGAIAVLRRAQENPGKYPWLTQLLARRPFKVVAVALANKMARMAWALLAHGGTYRAPELAETA

SEQ ID NO: 93800 - protein, 508 aa, unidentified
MNNLAAAVTTEAVHGKTVAGSGSAAESIRSRSRHPARVKSRKPATPAARVQKSERTSPHEGRRISSTMNRVIQDEAAATKRKERQRMQTPWAEITHFAGLDWAKDHHDVLVLDGTGRIVTEFRFDHTAEGWSLCRQKLAEFPQLALAVETGHNAAIERLVTLGYRVYPVHPRSSKSYRTRKLPSGTKTDRADCWALADALRLEGDSWHALTAPQPLVQQLRLLCRDEVGLIGQRTALINQLQQALYEYYPAALEAFDDWCAPSAWAFVETFPTPQALVQAGRHRWQKFLHTHGLYRPQMNEKRLAIFAEADQFCGHEAVTAAKSTLAIALAKMLCTLERQLARYRTLIEECFQAHPAHGLFESLPGAGPKLAPRLLGELLAVQPLAEQPQVLQCLAGMAPVSYQSGRVSVVYLRRQCNRSLRCAVHLWVDLSRHYCDWAQVYYAAHRQKGQSHACALRCLGMRWLKILAAMIRNHTPYDAALHAQNQLHHGSWVLQLQPDQPAVGDAS

SEQ ID NO: 93801 - protein, 355 aa, unidentified
MQKYKFSFKGQNIYVGIDVHLKTWHVTTLTESGCKYSFAQHADAKELFDRLNKKFHEAHFKSAYEAGFCGFSVHYALMGYGFENIVVHAADIPTTSKEKALKTDAVDSEKIAWALKRDELTGIYIKDKQYMDDTNLMRLRQRFIMDLSRQKNRTKHLLYTQGVTYPERFRNNRTHWSRNFMKWLREEVEFLSEQKLSLMLLCEQVENTRMAILKVTREIRRLSTTDRYKENFNLLMTVPGLGLITSMSMLTELDNDIMRFPNERSFVAILGLIPTCHDSGDKKVSGEKINRGNKHLGPLIVEASWVAIQRDLELSAYYSKCCQSMKPHKAIIKVARKLACRAYAVLKTKTRYALP

SEQ ID NO: 93802 - protein, 347 aa, unidentified
MRFYNRQHQYYCGIDLHVKTMYVCILDGTGQVLVHRHVPSTPTALLEIVAPYRTDLVVAAECMFTWYWLADVCAAEGLTFVLGHALAMKAIHGGKAKNDKIDSHKIAVLLRGGMLPQAYVYPAAMRSTRDLLRRRLHLVRKRGELLAHIQNTRAQYNLPAFEKRLAYPGNRDGVVEHFPDPSVQKSIEVDVALIDHYDALVNDLELTIVREAKRHDGDAFHRLRSVPGIGKVLGLTILYEIHDITRFDRVQEFASYARLIKCAKESGGKKMGTSGAKMGNVHLKWAFSEAAVLFLRHTTEGKKILARLEKKHGKGKALSILAHKIGRAVYYMLSRGTVFSMEKFLAA

SEQ ID NO: 93803 - protein, 435 aa, unidentified
MEVNGKFAKNDKLSFITDDMLIVGCDIGSETHYIRAIDVRGRELSPGAFEFSNTSEGFENAKAWVLALAAKHDKKQIVQGLEPTCHYWFALAAWMISNGISVVQVNPYAVKQSKEIEDNSQLKDDRKDPKLIANLVKDGNYGMPYLPEKVYADMRRLSMFRDQFTEDRIRNINRLHRELKIYFPEYMDAFGKIDGAFTLEVLKVSAIPTDITALGAEGMKNIWHNAKLRGRGYSRANEIVNYAEKSVGLTDGTDAGREAVKWYAEQILRLDEQLAEIESALHEKCREIPYAENILAINGVGENILAGILAEMGDISRFDDVKEIQKLSGMGLVACSSGKHKGQTKISHRGRKRLRYWLFQAAKSAVSHADEFKQLHEYYTTRSNNPLKKMQSLVVIACKILRVIYTILKTGTTYDSQKLLKDIKHPAASQAPMAA

SEQ ID NO: 93804 - protein, 373 aa, unidentified
MSTKRILANEIDSNLDYEVIGLDLAKQNVSFVGITGDGEVIRIDRVDYSVLLEKAAEMAPTTFGMEPCTEMNWLCNELKQRGHICKVFSGQAVQAQIQAFFSGQKNDLNDAEAIAFLARDDRLASIRAKTRDEMILQSLCAARELHLKHSKAILVSLKGQAQAWGLKIAKALSSEAKLLDLIESASNVPQEVRELLAEQIKAYKLTERKANQLKKRIEEKIQNNPLCQMAQKIPGIGPMTAANLAVTIGDINRFDKPKKLPAYYGLVPRNLTTGHVEKMGRITKRGDKRTRSLLVQSANVLLILESKGKLPKCQLQKWIAKKRRELSYCRLVIALAAKLLRILWACLKYGKDFDIRRAGIARCNLSTEKRLGI

SEQ ID NO: 93805 - protein, 392 aa, unidentified
MVISVGIDVSKDKHDCFILNSEGEVLAEVFTIPNTMDGFNCLLQKIQDSTTPQDKIKVGLEATGHYSYNLLGFLLDNGLSTYVLNPLRTNIYRKSLSLRKTKTDRVDARTIASMLLSDAGLKPYTDTAYHNEELKSLTRYRFDKVKERSKLKSSIARLICILFPELEKLVPSLHMASVYALLEEFPGAKQIAAAHLTRLKTLLETASKGRYKRNMALEIRDAARNSIGAWMPAKSLELQHTIRLIRELDAEIAEIEEQIQSLMEELDSPITTIPGMGFRMAAMILAEVGDFSRFDSPDKLLAYAGMSPSTYQSGQLKNCYPHMEKRGSRYLCYALYNATKYVCHWDPTFAAYLAKKRAEGKHYNVALSHAAKKLVRLIFAMEKSRAPYHMAA

SEQ ID NO: 93806 - protein, 438 aa, unidentified
MSNKVIFNLDELFISVGIDVGADFSWMSIALPNQQFVGKPYKILHSSIDSLTTAVSKIKEAEELYSLESRIFLESTGIYHYPLFCYLRDKGFNCSVINPIITKNSTNINIRKVHNDRFDSKKAALVGLKPDLKVSLMPSDLALNCRNLCREYYDLMDNRSAYVNKLQGELRMAFPQYLGIFSKVTINTSLTLLETYTSPSAFLEADKQEIIDIIKSTARFGLTYAQNKYNAIIQAATDANQFGYIIDSNIKRIRLYISFIRKYDEEINNILESLHELVDANEDADFVKQIHLIETFKGAGFLSAVSIMGEIGDFSAFSKPKQLFVYFGLDPAVKQSGKFEGTKVQMSKRGSAIARRVIHTLTLQSISISRNREAKNPVLREYYLKKCDSKPKLVAMGAVSHKVCNMIFAILRDNKSFEIITPQEHIKQYNASKCDMAA

SEQ ID NO: 93807 - protein, 350 aa, unidentified
MIIGVDYHPSFQAMAFLMEETGECGEQELHHSDGQAEKFYRDLKQRGISVRVGMEATGYSRWFERLLAELGFELWIGDPAEIKAKRVKKQKYDRNDARLLRRLMLENNFPQIWVPSPENRDLRQLLWHRHRLVHMRTRIMNQLQALAMNEGYRWKKKLFREQGRALLEKLPLAPWASRRRRELLELLDRMNPTIEELTAAVEREARKRPEVLRLMTHPGVGPLTALAFVLIIGTWERFPRGKQIGNYVGMIPSEDSSAGKQRLGHISKQGNSLLRFLLVEAAQAAARVHPDWRRRYMHLAMRRHKSIAKVAMGRRLAVRLYWMWRNGCEYSPSLEFGSYAGQLGTVHGVK

SEQ ID NO: 93808 - protein, 322 aa, unidentified
MKTTADKITPVTTVSPAYAGIDIGKASLDVSLAGQPPCRYANDPAGRAALLAALKKLPQPLQVICEPTGGYERDLLAALWAANLAVSLVHAARVRAFARAQGRLAKSDPSDAVVLRQFAEVFTPAPLAAPAVERERLAALVQRREQVVDLLAMEDQRLAQSRDKAVLKLGQHLRKTLVKQLEELDRLIAAQIADDATLHRQSERLQEVKGIGPVPAATLLAALPELGTLSRGEAAALSGLAPYNHDSGAHKGRRTIHGGRKQVRRVLYMAALVAARYNPILKAVYDRLVADGKAKKLALIALMRKLIVLLNHLLKNPNFKLA

SEQ ID NO: 93809 - protein, 431 aa, unidentified
MSDGMASGGRDAGAVTPAPFVMGEEPGAIVAGFDVHRRQITIDALDTATGEVTRGQIESTPAAVEEWVAGFPGRVVHVAVEACTGWLFVSRALERCGAIVHLAEPVETSALRGRKRRAKTDRADAKWLRQLLFEGRLPEAWLPPEHVRQWRSRARLRNTLVDERTSWTQRIRATLYHHGIAGAPDELRTLAGRQFLAGLELPVDARERITVALEIIDLLDAQLAELERDLRTLAHHQVGCRALMTQYGMGEISSLVTLCELGDVRRLHASRQAVRMAGIDIGVHRSDRHAQLGKLTRQGSAPLRWALFEAAQSASHTGSPDYHDYHALKARGLSHTRACLTIARKLARRSYHLLRALGPAALDPPVTPAKRSDQAHPSPMRSKHAASSSSDRGTHARRGGPRKTERPQSLHRNDRSTIKSPAANARGRGPR

SEQ ID NO: 93810 - protein, 374 aa, unidentified
MKKHSKTGEAAGRKSATQGSHEEQPAITIGIDVGDQYSHFCWLDGAGDVVKRGRVASTEAALEKAFGQIGRSRMALETGTHCHWMSEVLEQLGHEVIVADARELQSIWGSRRKNDPRDAEQLARLARVDVRLLHPVRLRNRKTQQDRSVLRARDVLVEARTKMIVAVRGMVKADGARWEACSAESFPEQARESVPEGMRRALAPLLETLDELNEKIRYYDQLVAHLAQQEYPETSLLTQVPGVGPVTALYFRLTIEDAGRFPRSRDVGSYFGLVPKQQDSGESTPQLRISKAGDEGARRLLVSCAHYIVGPFGPDSDLRRWGLKLAARGGKNAKKRSIVAVARKLAVLLHRLWATGEVYEPLRHSHGAEPAAAA

SEQ ID NO: 93811 - protein, 426 aa, unidentified
MFAESEDDEQIIERVAALDIGKAEVVCCVRLPAPGGGKRRVQEVTTHSTMVGSLSELANRLVELRVERVVMEATSDYWRPPFYLFEAHGLDPWLVNAKDVKHLPGRPKTDVLDAVWLCKVAERQMLRPSFVPPHEIRRLRDLTRYRADLVGVRTAEKNRVEKLLEDACIKLSVVASDIFGVSGRDMLAAMIAGERDPKRLADLARSRMRPKIGLLEEAFAGLKVGTFSDHHRFLLARMLARIDQADADIAALDTQIEDHLAPFADAVARLDEIPGIGPTAAAVIIAEIGTDMTRFPTPGHLASWAKFSPGIKSSAGKSKGNGATGHGNRYLARVLGEAAAGAGRTDTFLGARYRRIMRRRGKKKAIVAVGRSILTIVWHLLADSEARFEDLGPDHYDRRVSTTAKKRSHIRGLEALGYRVTLEPAA

SEQ ID NO: 93812 - protein, 349 aa, unidentified
MTLFVGLDVSVRETAVCIVDDAGKIVCERKVPTEPDDIVRLLASIGEDYSRVGIEAGPLSQWLVNGLTAAGLPVVCVETRHMMALLKAQQINKSDRNDARGIAQMMRVGLFKPVHVKTQMAQEQRMLLTSRKLLQRKLLDVESDLRGTLRNFGLKVGVVSAGKFEARIRELVAGYPRLALVVEPILAVRRVMRQQFAVLHKMLLDTVRHDPVCRRLMTAPGVGVVVALTYRATVDQPQRFIHSRAVGAHVGLTPRRHQSGEIDYDGGVSKSGDTMLRTMLYEAAQSLLTQSGKWSWLKAWGMRVAQRRGMQRAIVAVARRLAVVLHRMWVDGTEFRWSNSTTAVPSQAA

SEQ ID NO: 93813 - protein, 341 aa, unidentified
MKLIRVGIDLAKNVFQVHGVDRGEKVAWRRRLRREEWINVVRERAEPGCEIGMEACGGAHHWARELQKLGYRVKLIAPQFVKPYVKSNKNDAADAEAICEAMARPGMRFVPVKTVEQQDIQAIHRVRASLVEQRSAKANQIRGLVAEYGLVAPKELLHLRRALPRWLEDEGNGLTARFRWLLRGLRDELVALDERIAELDREIEQIAESEPDAKRLMQLRGVGPIIATAMLATVGDARQFRNGRQMSASLGLTPKQFSSGGKERMLGISKRGDAYLRSLLIHGARAVIRTARPKNDPLSRWVIRLADRSHPNVAAAALANKTTRIAWAMLSRGTNYEAAVN

SEQ ID NO: 93814 - protein, 390 aa, unidentified
MGKPRVVPDEDHEVMYQRVAAVDVAKASGVVCLRAPDPARPGRFTSRIWDDVPATRARIAELGAELLVSGVQMVTLESTSDYWRIWYYVLEGAGLAVQLVSASQAKNLKGRPKTDKLDAMWLARLTQAGMLRPSFVPPAEIRRVRDFTRARTDLVAERTRCLQRLEKLLEDAMIKVTAVAADGLKAKSVVAMVQALIAGERDPRTLADLAKGRLRARKDALAAALDGMFDSHHGVIAGMLLDQVAFLDQRITVMEDQAIAALAQVEESWGTDATGETGPAAGTAPGSPVLAAAHRLAEIPGISVWLAIVIIAEIGLTMAVFPTPAHLVSWLGLCRSASQSGTRRGKGKPKKGNSYARAAAGQAAIGAARTASFLGERYSRIARRRGKPIA

SEQ ID NO: 93815 - protein, 417 aa, unidentified
MTQEDSRIIRIVHPICCGLDVHKESVSACVVFPDTETGEERYELQVFGTFTDELMRLREWLLMHECPVVAMESTGIYWRPVHNVLEDLFQVVLVNARDVRNVPGRKTDMGDSRWLAGLLRHGLLRGSFIPPMEVRQWRDLTRLRKQYVHTVGDYKKRVHKLFESANIKIDSVVSDLFGATGQNLMNLLIDERNLTLEDVHACVRGKLKGKEEELFRSIRGFFTDHHRFVLKTILLTISHLETQIETLDQQIRSSMKEHEALLNRMKEAAGISNVSARDILAEIGPTLESFPTAPALASWAGLCPGNNESAGKRKSGRSHVRKHHLKTIMIEAAWAAIKKKGSYFKDKYYRLKARRGAKKAIVAIAHRILLGIYHVIKKGVPFRDLGEEYLSRRNASLKLLHLRKQARSLGFDLVAIA

SEQ ID NO: 93816 - protein, 370 aa, unidentified
MSVRRILAKTIDTDLEYEAIGIDLAKNCVSVALLTTDGEVVCIDRLDYSELEKSAQALSSTTFAMEPCTEMNYLVQKLEAWGHRCLVIGGKNVQNYVENHFSGQKTDLNDAQALAFLAQDTQLRTIKAKDVEQQKYASLTTLREQYIKQYRQTIVSLKGICQAWGLNISKGISGKARLKDLIENHAAFPEELKESLVDMVTHAQTAQKALNKITKTLEELAKSDKVCQLIQTIPGLGSICSCRLRATVGDIKRFKSPKDFPAYYGLVPRSIATGHNERKGKITHRGDRTMRSLMVQAAGSLVNMATKGKLKSKQLTKWILKKQKEKMPWGKLVCAVAAKLLRIVRAVLISNKPYNSKIAGVAKCSLPKGS

SEQ ID NO: 93817 - protein, 291 aa, unidentified
MDHFAGLDVSVKETSVCIVDDTGRIAREMKVASEPEALLQVLKNPAYRFQRIGLEAGPLSQWLFSALAEAGLPVICVETRHMRAVLKAQINKTDRNDARGIAQMMRVGLYRPVHVKTLRSQKLRMLLTHRKLLQSKAIAIENDLRATLRNFGLKVGMVGTVKFETRIKELVENVPDLAMLVEPLLIVRRALREQIGILHRRLLAIVRDDDVCRRLMTIPGVGPVVALTYRATVDVPARFRNSRAVGAVFGLTPSKYQSGEVDRTGAISRCGDEMMRAMLYEAAHIRRPTSC

SEQ ID NO: 93818 - protein, 410 aa, unidentified
MEVVLERCAGLDVHQASVVCCVLIGAPGRKPQKLLRSFGTTTRELEALRAWLAEHGVTHVGMESTGVYWKPVYAVLEGHFDLIVGNAHHIKNVPGRKTDVKDAEWIAQLVRHGLVAKSFVPPPAIRDLRELVRYRRTLIETRTAVRNRVLKLLEGANIKLSGVASDVFGVSGMAMLEALAAGTNNASEMAGLARGRMRRKHAALEAALDGRMREHQCFLLGMQLRSLGTIDQDLDALDARIGAQLEPYQAQHRLLMQIPGVDGVTAASIIAEIGIDMDVFASARRLAAWAGVAPGNYESAGKPKGAGTRRGNVFLKSALCAAASAAVRTKGSYYRDKYNRLRARRGPVRAIMAVAHKLLIAAFHMLSTGEAFRDLGESYLDQVARKRSTAKLVQRLSNLGYDVMLVPKAA

SEQ ID NO: 93819 - protein, 411 aa, unidentified
MRIVGFDVSRSVAEIAYLEDGTLHAGGRTGLRRDELERFAEKLRATDHVVLEATGNTAAIVNVLRRHVARVAIANPLQVRLIAEARVKTDKIDAAVLAQLYASGFLPEVWMPDEHTLALRRQISRRSQLVRQRTRLKNEIHAVLAAHLIERCPATDLFGKKGRAWLGVQPLPLDERLGVEQRLRELDRLGEDLREVEQALAQATIDDARLRVMLTITGVNTTVAIGLLSAIGNIERFPNPEKLVSYFGLNPSVYQSGPTPARHGHITKRGRSYARAMLVEAAWGATQAPGPLRAFFLRVRDRRGQQIAVVATARKLAVIVWYVLTRDEPFAWDRPALTAHKLRALELQAGMPAQHGSRKGPAAAYSLKSVRQQERAVAEQSERTYQRLFNRWKQSRPKSDSAPIRWPEART

SEQ ID NO: 93820 - protein, 337 aa, unidentified
MSIIRVGLDTAKHVFQLHGVDESEQPILRRQLRRGEVERFFAKLPPTRIGLEACGAAHHWARVLRALGHAVVLLPPQYIKPYVKRGKNDALDAAAICEAMSRPSMRFVPVKSAEQQAALMMLRARELLVKQRTMLINAMRGHAAEFGVVAAKGPVKVRELLLRAHAEAAGVPELALEMLRLLASQLDALDLRLKTIEAKLMAWHKQDAVSQCLASQPGIGPIGAVSFALRVSDPKLFRSGRHFAAWLGLTPKENATGGRSRPGRISRQGDQSLRRLLVLGATTVIQFAKPGRASPWLLQLLARRPRKLAAIALANKMARILWAMMVSGEFYRRPQPV

SEQ ID NO: 93821 - protein, 347 aa, unidentified
MGKDIVLVCDYHDQNLVFCWFNEVTGEVRTLKRRTEPAAISEVLTEAMQAAGVQGGQVVWIMESTTGWARVQPLVERDSAFLTVNVLQVALPPKAKRRKTDKLDTARLLREYEHGQLPRAYQPSRSVRRLRRVVDCHQSLIRRRTALRNYLNRYLAHETWVDRPDLSAIKGRRSLAELARGQRGWDRHVLQQKLGELEAVMLRIAELEATLERVARRWATARRIDAIRGIGPIGAVAIAARIGDVRRFGSAEQLIGYAGLAPAVRQSDQTCRHGRLAGAGTDALLRHYVIEASVWARQLPRYEKTYGRVAKRRGSKVGRLVVARSLLRSVYVMLRDGVAFEPTRQAA

SEQ ID NO: 93822 - protein, 353 aa, unidentified
MKYVGVDWAYRTAQWCALAPGGEIAGEGRIAADRDGLARLVLELGDEVTACLEMMSGALWVHDQLVDCGWQVEVADARKVKTVAPLAAKTDKVDARLLAELSRRELVPALWLPSLDERALRERLRRRMHLVRLRTSAKGRIFGLQTQWGVRVSLARLRRADGLTLLERAGVPEVWRRSVGECLALIDFLDARLEPLDAELRPFAKADPRAVLLDTIPGIAELLALTIAVEVGEISRFASPEKLVSYGRLAPRVRQSGQARPRSGPLSKSGSRLLGWAAVEAAQQAWRESNPWHGLYVDVSARSGNRNSAKAAVARKILIAVWHMLSRNEPFNPAPRSTRGDSVPASSRLALAA

SEQ ID NO: 93823 - protein, 358 aa, unidentified
MMSETVPDTDVVIGVDTHKLTHAAVAISALGVRLGSVTIPANSTGYQTLQAWAQSLGTIRAFGVEGTGSCGAGLSRFLSKHGHCVFEVNRPNRQQRHQKGKDDPLDAESAARSVLAGQVTALPKSGTSTVEMIRHLKVARDTAVKARSQAMQALKSIIVSAPPMLREQLDQITGKVALLRHLAALRPGPLTSTTASAKASLRAIARRWLALTAEVKDHDAQLEQLTQQLAPDLVQAHGMGAGTAAEMLLLIGDNRERVRSEAAFAKLCGACPIPASSGKTNRHRLNRGGNRQANAALYRVVIVRMRAHQPTLDYVRRRTAEGKTKLEIIRCLKRFVAREIFGYLCRDPKTTRPEQTAA

SEQ ID NO: 93824 - protein, 350 aa, unidentified
MKTILAIDLGKHNSVFCRLESGSLKPEYFKAKTDPKKFHSIFAELDCGNSIVLFEVGSQAGWLCDMLRAMRIEFKVANVNHSAWKWSNNPNKSDRNDAHRLAMMYHHGFFPEVYVPVKPVRQKRSLIYYRQKIVNRLTQVKNGIRALLTTQAIDLPSGKACWTKKHRRQLEQLARPFEAIDDPCQLWRGQLHMDLQQIDALQGCLDKTTAKLDELNKEKKAVELLETIPGVGPRTAEAIVAVIDDPGRFKSCRQICNYVGFTPRRFQSGQMDRTGRISKRGNPLLRALLVQASWTALRYDWAKNIYKRVSRGSVKRRKIAIIAVARHLLMRCWAMLRDNKPWQYKNRMGA

SEQ ID NO: 93825 - protein, 529 aa, unidentified
MAAKKRNPQRKHIRSEGAYSLDEIKSLTMEDGTRVVTSADGDIKRPICAGIDVHKEILMAAVCKTDPKTLNAVFYVRRFKSMNSDIRSMAEWFKSYNVQDICMESTGKYWIPVFNILEQSDLKPILTHPKYVKQAKGQKTDFRDAVHIASMFRMDLVVPSFIPPADIRDLRELCRYRLKLTYMRTSEKNRFQNSMTVSKVRLDCVFSDPLGKSASSIMEYLIMTEPEDVSDEQILCLVDRRVKAPSQDILESIHGYEFIGIQRDKLSIINLHLGQINECIRLIDEKLDHFRQKYSSIIRHLTTMVGITEESALYILGEIGTDMSVWRDDASLASWAGLSPANNASAGKKKSTRTGDGGHYLKPLLVQCALAAIKSTKKDPYFHYKYETLKKRRGHKKAIIAIARKMLVAIYHMVRDDADFLPVDHETVTQNTKKTKGLNLSDVIAFLKKQGADDDTIHLVEQQCSTPKNAEAVPGDKAAQKKQSVSGRAAASQPIQESVNGSPVLISGFQQGRALNHYPKDPAVATATT

SEQ ID NO: 93826 - protein, 394 aa, unidentified
MTESSDYESVQVFIGVDVGKDTHHAVAINRSGKRLFDKALPNDENKLRSLISDLKQHGQILLVVDQPATIGALPVAVARSEGVLVGYLPGLAMRRIADLHAGEAKTDARDAAIIAEAARTLPHALRTLKLADEQIAELSMLCGFDDDLAAQTTQASNRIRGLLTQIHPALERVLGPRLDHPAVLDLLQRYPSPEKLASLGEKKLAAQLCKLAPRLGKRLAADIAQALAEQTVVVPGTNAAAVVLPRLALQLITLRKQRDEVALEVEQRVLAHPLYPVLTSMPGVGARLLTEVACRAFASAAHLAAYAGLAPVTRRSGSSIRGEHPSRRGNKALKRALFLSAFAALRDPLSRAYYTRKMSQGKRHNQALIALARRRCDVLFAMMRDGTFYTPQAS

SEQ ID NO: 93827 - protein, 367 aa, unidentified
MAKFLIVGADVHKEYVMTKWSIDQGEASKKSFRMTEAGQNKMIATFHKTAKKFKAGKIVFAYEACCMGFGLYDRLTDASIKCHVLAPTKIERSSKQQRTKNDEKDAQHILEILKGHLLAGNALPDIWIPDHETRQDRAIVRHRFSLSEQLSSVKTQIRMVLKKSSVKKPKGVGKNWTKAYRKWLLDICDPEAGVLQYGDILVLESLLRQLKFLEDELELQEQNIEALSRHSRYKEACDRLLRIKGVGLLTAMVFLTEMGDMSRFSNRRQIAAFFGLAPTSNETGENCDRKGHITKQGSALVRKVLSQAAWCISRNDPFFDRVVKKNPKKKKIALVGVMRRTAIKMWHIALDVQKETGCFVVYSGEST

SEQ ID NO: 93828 - protein, 346 aa, unidentified
MEHYAGIDVSLELSSVCVVDAQGKIVKEAKVASEPEAVVAFFEALGFAVKRIGLEAGPLSQWLHAGLKEAGFETVLLETRHVKAALSAMTVKTDRKDARGLAQLLRMGWFQQVHAKSMASREVRALLVGRKQLLGRLIDVELSIRGILRGFGLKVGAVTRKGFEARIRELVTGQATLERIAEAMLSARAALKAEYEKLHQAVLAIVREDAVCRRLMTVPSVGPLVAITYKSALDDPSRIAKSKAAGALFGLTPKKYQSGEKDVTGGITRTGDEMVRTALYEAANVLLSRITRFSKLKRWGMDVAKRRGSKRAKVALARKIGVILHRMWIDGTTYRWAEAKPIAAQA

SEQ ID NO: 93829 - protein, 426 aa, unidentified
MTACLLLADGREAVRRWSVPNTRPGAEALVGRVVELADQHGLGRLRIGLEATGLYWGPLACLLNDTPLLQGLQPEVYALNPNLVHGLKKVYADTGKTDPRDAFLIAERLRIGRLPAPFQLDMVYAPLQRLTRYRTHLSQTLAREKGYFLNFLFVQFSGFSQEKPFSDTFGPTSQALLEQFSTEEIAQASLEDLAAFIQEHGRGGFTDPEVVAANLRRAARESYQLNSALQPPLGLVLGMTRATIRILQAQLVTVDQTIARELRALPAHARTIDSVPGLGPVWTAGLVAEIGNIQRFTDDAAVAKYAGLVWPPHESGDFQAQDSRLSKAGNSYLRYYLVEAANSVRQHCPEYRHYYLTKFAQTPKHSHQRALVLTARKLVRLVDALLRTGSVYRSPTCDQNQEEVRTTPHAARPRPQRRARLVTSAS

SEQ ID NO: 93830 - protein, 336 aa, unidentified
MTTVDAARPVTGGVDTHLDVNMAAALDPLGGLLGVAEFPTTGVGHRELASFLASFGNVKRVGVEGTGSYGAGLARFLRSSGVEVVEVDRPNRQARRRTGKSDPADAIESARAALSGRAQGAGKSRDGNVEAIRALVVAKRSSRSTKIKTLNQIRHLSFTAPDELRGRLKGLSREHLAVEAAALRPRAGGDPVIFATKTALSILGHRVLALDVERDRLNALLTELVEKTAPELLCLHGVGVDTAATLLVTAGDNPERIRSEAAWAHLCGVAPIQASSGKVTRVRLDRGGDRQANAALWIVVVTRMGSDPRTKAYVERRLKEWVCSPVLAPLRTVVLT

SEQ ID NO: 93831 - protein, 371 aa, unidentified
MTSIIYVGMDVHTTNYTLCCYSIENDTIFAMATMEPECKNIIKYLDRVAKNHGGDCHFLCGYEAGSLGYSLYHQLVGSGVDCVIMAPSTMATPKKKKGIKTDKRDANNIAKCLAYNTYSAVYVPTDEDNAIKEYIRMRNDAKDTLKRTKLQLLAFCTRHGKRFAESKNNWTKTHVAWLKKLSFDNAILQETLHEYLALYQQATDKVELFDKRIGELARFEKYDEDVKKLSCFIGIKAHTALAIIVETGDFKRFGSARHYSSYLGLVPGEDSSGSSVQRTGITKAGNSHVRKLLIEAANCYNRSAVGVKSKTMKDKQAGNDPKVIAYADRANDRLKRKYYKIMFRSKHNIAVAAVARELSCFIWGMMTDNIT

SEQ ID NO: 93832 - protein, 391 aa, unidentified
MIYVGIDVAKDKHDCFITTSEGEALFKTFSIQNNRAGFDELYQKIQSVEKDKSKIKVGLEATGHYNYNLLGYLIDNGLAAYVINPLHTNLYRKSLSLRKTKTDKVDARTIAMMLMSDVNLKSYSDISYHNEELKSLTRYRFDKVRERAQLKQSISRLVTILFPELEKLVPTLHMASIYTLLKELPSAKAIADCHLTHLKTLLEEASKGHYSRDKAIEIRDAARTSIGSNMPAKSLELKHTIKLISELDSEIDEIETEIQKIMDEIQSPILTIPGISYRMGAMIIAEIGDFSRFDSPDKILAYAGISPSTYQSGQLESSYSHMEKRGSRYLRFALINAAKYVCHWDPTFGAYLQKKRAEGKHYNVAITHAAKKLVRLIYAMEKSQKAYSPAT

SEQ ID NO: 93833 - protein, 353 aa, unidentified
MPAIKPPIVPLKYVVGIDIAKDSFVACLGYLEVGQQLHFGKEATFDNTASGFADLLRWVAKHQAADSPRWFVVEATGVYYEELAYFLADNQQLLSVLLPNKVKHFARSTEQKSKTDQLDARLLCRLGLERALPAWQPPTPALRQLRGLARERQVLTRQGAQLKTRAHAYAHSYQPDRRTLARLTAQQQFVVQQLKALDQDLADLLTAEPELARKLAHLTSIPGIGLTTAIVVVAETSGFVLVENERQLTSYAGLDVVQRQSGLSTPATRISRRGNVRLRTALYLPAVSSLRYNPQQMAFYARLRARQPSGKPGVIAVMRKLLVLCYSLWKNDCPYDPHYHPAHVAEKEVAPTT

SEQ ID NO: 93834 - protein, 425 aa, unidentified
MKQKRSVEGEFRVYVGLDWGTEFHQACVLDASGKILRESRVDHSGQAITDFLRSLNNLANGQPASIAMAIEVPRGPVVEAFLEGGFAVFSINPKQLDRFRDRHTAAGAKDDSRDAYVAADSLRTDQHCFRRIATDHPDVVRLRELSRTEESLGEDLRRVVNQLYQLLLRYYPQLLQLNSTPDEPWIWALLEVAPVPQRGAKLTLARLNSLLAKYRIRRWAAEELQAILRTPPLPLSAGSADAISEHALLLLPQLRLLYSQRKKVRDRIEALLNHMTLLGHEHPECREHRDVGLLLSIPGLGCLIAANLFTEGSDALAQRDYDALRAHSGAAPVTRQSGKSRQVVMRRGCSERLRNAVYHLARCSVLHDPYSKRHYAQLRGVGHKHGRALRGVADRLLTVLIAMLKTGQPYDATRRGNAAPTAKAT

SEQ ID NO: 93835 - protein, 373 aa, unidentified
MRDGSTLYVGFDVHKDSIAVAYATTGGPSEPVHVGRIGPRQCDIDALVRKMQSKSAQVVFVYEAGPCGYWLYRYLTGKRLTCLVVAPSLIPRKPGDRVKTDKRDAVTLARLARSGDLTPVYIPEVADEAIRDLARAREDALHDLNAARYRLKALLLRNDLRYAGRANWGAEHLRWLARLVLPTPAQQIVFQEYVRTVTERTELLRRLEAELLEQARSWRLYPVVEALQALRGVQFTVAITTMAELGDLTRFDHPRQLMSYLGLTPSEHSSGDRRRLGGITKAGNGHARRVLIEAAKAYRHRAKVSEAIQVRQQHLPTPIQDIAWRAQIRLCGRYRKLLARGKHPNTIAAAVARELAAFMWSIARTQAAPALAS

SEQ ID NO: 93836 - protein, 363 aa, unidentified
MQTIYIGVDFHARQQTICYLTTETGELVTCELKHQDKEAVRAFYAAFRGQVIVGLEASGYSPWFERLLEELGYEVWLGHATEIRRRARWRQKNDRRDAELILDLMLHNEFPRLHRPALQSREVMRMLRYRHKLIKIRTMSKNSLQALALQAGVAKRSGLFTREGKQELEAALMSPAMQWQREHWLQLLQPLDQQVLEAMAWLKTQSKDDVCIARLRTHPGIGLLSSLCLVHTLQPVARFRNTRKVAAYAGFDPVERSSAEHKRFLGISKAGSRLLRHLMVEAANIAVRKDEELKRFYQRVAARRGRPKAKVAVARKLLIRAYIMLRDEIDYAEFRRRAVAARLARLRHRPNVPAVVIGQPAST

SEQ ID NO: 93837 - protein, 422 aa, unidentified
MSYCPVAGIDVSKRFSDMCILSPDNKIFAQEKIYHDETSINRANALLQKAERLFFSKPVIVMESTSHYHLILFQFFSEHGYDVIVVNPLQSNSMKDFSIRKRKTDRVDAFKLAMMYRTKTLRPSQIPQTATRALRQLCRHRAELLNDVSSYKNRLTALLDQTFPGYDKVFSDVGGVTSCAVLVRFPTPTILLVEEESELVEVIAAASKSGYSFAKKKAGLLISAAQKAQTLGIHSCADETLIVCTIQMLRTLSESVLQIETAIDNLLAQIKEMRNNVSLLQSIPGIGSHSAALLLGEIGDISLFKKPKQLAAYFGLDPTERQSGSFRGTKNKLSKRVSSYARAALHMGIVNSICKRGKDSAANPVLLSYYEKKCKNKPAKVAQAASMHKLVFIIFAVLRDQKPFELKTPEQHAVEQGFVKAA

SEQ ID NO: 93838 - protein, 378 aa, unidentified
MKRVRFVGLDVHAETIAVAVAEKDEEVRSLGVIPNRAESIRKLVKKLGPAEELRVCYEAGPTGYVLYWQLTALGAPCEVVAPTLVPVKSGERVKTDRRDALKLARSYRSGDLTPVWVPDAAHEALRDLVRAREAAKKDQLRARNRLSKFLLRHGKRPPAGVKSSWTGNYLLWVKQEVHFEQFAQEFTLLDYWHEVEHAAGRVERLDRAVEEAVKSAPPQMRAVIEGLQALRGIAQVSAVTIVAELGQISRFARARQLMGYSGAVSSEDSSGERVRRGAITKTGNAHLRRIVMEAAWSYRHRPAVSRALRQRQEVVSEEVKEIAWKAPHRLHTRYRKLTARGKNKGPVITAIGRELLGFIWAMGVKVEGAQKEPLPRAA

SEQ ID NO: 93839 - protein, 470 aa, unidentified
MNDNREAGRRRTKGSRQRKSPGLLERIQPDAAGIDCGAEYHYVAVPPDRDPEPVRPFRTFTADLERLADWLAACGVKTVAMESTGVYWIPLYELLEARGFQVVLVNARDVRNVPGRKSDVADSEWLRELHRVGLLRASFRPAGEIAALRAYLRHRETLVHGAATHIQRMQKALVQMNLQLHTVIADLTGVTGQRIVRDILAGVRDPHALAAHRDHRCRASADVIAASLTGHYRAEHLFALQQNFEAYEFLKRQIDACDAAIDAHLTTLAERQAPPPHTLPTPRRTRKPRDNDPRFEIRAPLFRLTGTDLTQIDAIGPSTALQLIGEIGTDMSRWRSEKHFTSWLTLAPHNKVSGGRLLSSKTPPSANRAAAILRRCAMSLGRTATALGAYYRRLAYRVGKPKAITATARKLAILVYRVLRGDLVYRDPGALAYEQLHRARTLRGLRKRANQLGFGLLNLETGEVLDAAVS

SEQ ID NO: 93840 - protein, 385 aa, unidentified
MRDKTFVPREYDVFAGLDVDKKSIAATFSSHQGFIRSLSMPYKVEDLLNHVRNHFTDQKVAFAYEAGPTGYGLYDGLTAQGYRCLIAAPSMIPRAPGQRVKTNRLDSKALSESLRGGQLKSIHVPSPLYRQLRHLTQLRDTMMSEAVGMKQRIKSLLLFEGIAFPPAPAGSQWSFIVKAKLRKLPCSNTVRFKLDQLLDSLEFAEKQVFKSTKEIRRFCQTDPELSQCIKYMMTVSGIGWIVASQLLARIGDWRELENIRQLGGFLGLVPMEHSTGDKTDRGPITHSGDGRLRSKLIQAAWSAIRKDGELREFFRSVCQRHPRKVASRVAIVAVARKLSVRISVVLRQQRPYEVREKVHSAPLTQEETSPQGTTRRLAEPGEKNS

SEQ ID NO: 93841 - protein, 311 aa, unidentified
MVERFGGIDVSMDRLDVMVMPDRSGFSVKNNAAGWAELIERLRCSSLTAIGIEPSGGYERGIVRALLAAGLSVRRINPNKLRQFARARGVLAKNDRLDARLIAEYVAIMPTRIVQSDPAAQRLAEVVIMRRQLCDEHVMVENQATHVEDAMLRRLNKRRLARLEADIRLLDKRLAEIVAADPALAHRYQLLISMPGVGPVLAFTLIALLPELGQMSRKQIAALVGLAPYDFDSGKLRGHRSIYGGRMPVRNVLYMAALSACRYNPALKTFHRRLAAADKRSKVVIVAVMRKMLTTLNAMVRDQATWQARAA

SEQ ID NO: 93842 - protein, 436 aa, unidentified
MPLSAMYCAWRCPVKPLIEPSFTALVGIDWSDRKHDFCLQAAGSPQREFGVLEHSPEVIALWAKALYRRFGGPIAVCLEIAKGPLVHALQRHEFIVLFPVNPATLAKYREAFVPSRAKDDPTDAQIALELLLRHRDKLQPLQPQGADMRTLATLVEQRRLLVGDKTRITNRLGSTLKEYFPQALDWFEDRDTVLFCDFLQRWPSLKHAKRARQATLRSFFSAHNLRRAPLIEERIHGIRSATALTDDVAVIGPHQLLVQALVAQLRVTLQAIDHFDAEITAVAKRLPDYALFAALPGAGSILAPRLLVAFGEQRERYASAAQLQQYAGVAPVLERSGNKCWVHWRLACPTFLRQTFVEWAGSTIPRSFWASTYYHCQRAKGASHQAAVRALAYKWIRILYRCWQTRTPYDESVYLLALKHRGSPLIAAMATTPQNP

SEQ ID NO: 93843 - protein, 388 aa, unidentified
MLPVINALEVQKGKPAMKKNITELENPRRRVVRKNKQRELTIGVDLGDKTSRYCVLDREGNVLFERSTATTKKGLAQAFASMGASRIAMEVGTHSPWVKRLLESWNHEVIVANAHRVRLITESTRKDDRLDARKLARLARVDPELLSPIRHRSEGAQAHLVMIRARAALVEARTKLVNSARGVTKSFGERLASCDPDQMRVKCLVGLPSSLESALQPLVTAVESLTRQIHEYDNKIAQIARSEYPETARLRQVTGVGELIALTYVLTLEDPQRFGRSRDVGGYLGLRPKRRDSGASRPQLRITKEGDVYLRMLLVQGAQYILGWHGVDTDLRRWGLKLAARGGKNAKKRAVVAVARKLAVLLHRLWITGERYEPLRHSQRASSLQLAV

SEQ ID NO: 93844 - protein, 393 aa, unidentified
MICVGIDVAKDKHDCVILNSEGKVLAGVFTIPNNADGFDTLLQKIHGCTSPDDKIKVGLEATGHYSYNILGFLLNQGLPTYVINPLHTNLFRKSMSLRKTKTDRVDAKTIAAMLMSNVDLKSYTDTAYHNEELKSLTRYRFDKVQERAQLKQSVSRLVTILFPELEKLVPTLHMSSVYALLIEFPGAKQIAEAHLTHLKSLLKDASKGRYGRDMATEIRDAAKRSIGSVMPAKSLELRHTIRLIRELDSEIKDIEAAIEAIMEELQSPITTIPGMGFRMAAMILAEIGDFSFFDSPDKILAYAGMSPSTYQSGHLSLAGTYSHMEKRGSRYLRYALYNATKYVCHWDPGFAAYLAKKRAEGKHYNVALSHAAKKLVRLIYALEKSRQPYKRIA

SEQ ID NO: 93845 - protein, 371 aa, unidentified
MKSILSVGMDVHKNSFSLCAYDGYTGEIVSESTFASDVKLVIKFIEALKSRYENDVEIKCGYEAGCLGYSLYKLLTARGVDCVILAPTTMQVSAKNKMVKNDRMDALNIAKNLASGSYKTVYIPDEEDVEIKEYIRMIHDFKKELKRVKQEICAFVLRHGYQYDGKSKWTIRYMNWIRELEMSEIQRETLNEYIAEMENLNDKIDRFMNRINEIYQSERYHEKVSKLRCFKCIDTFAAMTIQVETADFERFPSAKAYASYTGLTTGEHSSGDKNNRIGITKQGNTVIRKTLVECAQALVKGNVYAKKSQRLKSRQKGMDVNIIVYADKATERLKKKYQKLIERNVPRNKAIVAIARELACFIWGMETGNIH

SEQ ID NO: 93846 - protein, 342 aa, unidentified
MTAIGIDTHKATLAACAVDELGRVISEATFANDPTGHGAFITWAREVAPEATVGIEGSSSFGAPLARSAQAAGLVVREVPPHLSRVERQRTRRPGKSDPGDALAIARVTARETNLPPIRLADRTSELRLLLEAREDLVGEATRVRNRVHAHLLVLVPGYGETVTNLVAVRHRTAAARLLRGGNTVQAELARSLLVRLARLEREITALTRRICALVAGQPLLGLPGAGPITVARLIAEVGDIRRFRSADALAALAGVAPIPASSGQVQRMRLNRGGNRQLNRAFYVIAVTQSRFHPPAKAYVARRMEADGKTWREAIRALKRQLVRPVFRLLVEGSGVQLAVA

SEQ ID NO: 93847 - protein, 370 aa, unidentified
MERIYYVGLDVDDKSFHGCVMDKEGKERFNFKAMPTTSALVKKLEVLKQRGDEIKICYEATYLGFSLQRNLAKRGYLCDVIAPTSIPRETGKSVKTDRVDSEELADYYRMGKLKVVIPPDEEDENIRDLLRSRKFLVDQMVTVKVHVLAILRRSGIHYREAAKQNRAAYWTKNHFKWLKERLSDSKEKVRFNLSRLLEQIAFLESQIGLYNERLEAVSKSPRYKDKVQALLCFRGIGTLTSLTLITELGDINRFPHPNQITSYAGMDIREYSSGGKECRFGISRKGNPHLRSVLVESSQFSLRPPSISRSLKIRRKDANPRAIEIADNCMRRLRKKACRMLYAGKHRNKIKVACAREMIGFIWEVLKEAA

SEQ ID NO: 93848 - protein, 422 aa, unidentified
MNDAIKLAAFVGIDWADEEHAVCLRIAGSSEMETCVLSQKPEALAEWATGLKKRFGNCLVGVCLEQSRGALIYALSQYPWLVLYPINPKSLARYRESLYPSRAKSDPNDAALISEFLINHQEHLRPWHAEDVETRKLRLLLENREKLVHDRTGFCNRLRAALKLYFPQALEWSGELTKPMSWEFLLKWSTLLDVQKVSKKKFLDFFYAHHVRRGDQISGLYEQVQSAKALVTDAALVDTSVLMVRSICKQLQDLQVGIDQHDLEIEALYARHPENHLFSNLGGAGKVLGPRLVAAFGSDREKYKDAGEVQKISGIAPVVEASGKKSWTHWRWAAPAFLRQTFHEFAAHSIPSCAWAKAFYELQRKRGKSHHAAVRSLAFKWIRILFRCWKDNVPYDENRYVQQLIAHGSPLLKFLIQKPLEA

SEQ ID NO: 93849 - protein, 363 aa, unidentified
MTRKRLSGNHLLDFIGTDEKAPVWIGLDVHKRSYHVALRRADGVCQSWVSAADPIVLARQLSVILQRISFIVYEAGPTGYCLERVLKANGYKVAVVAPSRIPRPVTNVAKTDKLDCLKLAEYAAKGMIEAITTPSEQESAERSVLRRRNQLVDSTRKTKQRIKSFLLFHGIEEEYGLRYWSRSAKSKLSKLPLQSDLKFVLKSLLRQLSYEEEELAKITNRLTRIAKRRPHWEVVKNLKTVPGVGDIVACAFRTELFRPERFRRAEEVCSFLGLAPAIRQSGEKRQGGWLMRSGQTRLKSLLIEAAWMWQAKDPWARKKYRTHLSRCGIAQKAITALARRLAVILWRLSVENRAYVMLKVDIV

SEQ ID NO: 93850 - protein, 448 aa, unidentified
MKKVQKNHYFVNGRKVVKRKTRGLKRSQEKMEKKKKIINHNTLVIAMDLSLEEICTVAMSPRNKQPITSFSVPFDKDGFEGLIETAKELKEHYNFKHVVFAMEPTSHYWIILAEHLKAARQKYVLVQPISVWRERQSEHYSYAKTDYEDAQLIGYLAIDMKFTFTQLPQTPLWASMEALASEWILLNKKKSAEAMRLKAFWHRIVPEFLDIFKEQAGNTAIALSKALLPLPQIRKIKLEEFIGRIRNYLNKKRLMVFKVKVLYEIIRNDKSFGSRLYEGGLTYSISHAAKRYELYNTQQQEAEERLLKLYKQTGYDQFLDSIPSVNPVKNALTLSFIGDPCNYDCPRCLPKLAGTNACQNTSGRHSGKTPITHWGNGHLSYLTYLIGFSLKTHNPEFKMRFNYLINRAKNPLKESQAIVACGNKYLRMVHVLCTQKVCYNMAMANGIF

SEQ ID NO: 93851 - protein, 399 aa, unidentified
MLAVGIDISKSKSVAAILNQDGSMHTSPFEFHHTQPELDAFIKYILNSNQSATILMENTGHYHYPVLKAFREAGLPVCMVNAYQIKKFGDMDLRKAKTDKKDAVRIARYALEKSYSLVPYTSMEQKYEDLRFLARQYNQRMLTLKTNKVFLLNLLDETMPGITNILPLTTRTPETSLSVLFINRFKSYDRIKKMGKSRFLDAFEKIARKSRNRQTKTYGLAIYEAALRNITTRGENEYTLAAQDQCLELVCESQKAADSIILKMQTLAETLPEYAVLRSMAGVGDRLGPLILAEIGDIRRFHSGKALNAYAGNDAPPYQSGIFESHNRHISKRGNAALRKYCFEVMQALKLTRPQDDPVYLFLLKKEQEGKPYNVAKMAGVDKFLRIYYARAMETLKQQ

SEQ ID NO: 93852 - protein, 349 aa, unidentified
MKATTIGFDLAKNEFQVHGVDAAGKTVVRKKLSRAQVLPFFARLSACTIGIEACGSAHHWARKLTELGHTAKLMAPHFVKPYVKANKTDAADAEAICEAVARPNMRFVPVKSVEQQAILAVHRVRSGLVAERTAQLNRLRSLLAEFGLIAPRGRRALMERLPVLFADETLPGVARNLFERQSTRIRQLDAEIGAEEAVILDWHRNNELSKRLDAVAGVGPITATAMVASFGDGREFDNGRQMAACVGLVPRQHSSGGKTRLLGISKRGDVYLRMLLIHGARAVIRTLECRAKGGGNPTDRWLTKLLARRNPNVAAVALANKTVRVIWALLAHGRTYDRNWSGQRAAAAA

SEQ ID NO: 93853 - protein, 353 aa, unidentified
MFAIVAEKYQYVVGVDTHAQKHVATIVNNHGAVLATREIRVTSPQMNGFIAWIRKVTDNTENVLLAVEGTSSYGETLTKLALASGLAVTEVKPPKTKARGGDGKTDRIDSELAALGILRLPVDKLITPRYGTARKSLRILLGARRSIVRQQTADKNSLTALLRGCDIGIDARRALKPEHYQVISLWQKTRAGDDQEQAIARYEAKRLAVGILKSKTVLDQNETHLGALVHSLAPGLLDTPGVGPMTAAQVICSYSHKGRVRSAAAFAALAGTTPIPASSGNVTRHRLNRFGDRALNNALHTVVLTRIRSDDTTKAYVEKRTAAGQSVREIRRSLKRYIARSLYKQLETYDIRG

SEQ ID NO: 93854 - protein, 429 aa, unidentified
MQNESTPGARGPVFCGVDTHADSHWLCVLDWRGRKVLSRQFPADAAGYEALAGAIAAAGEPACVAMEGTSSYGAGLTRHLASLGMPVREALSPARTQRRRPGQGKCDEADAERAARAAMPGSRLGTPKSQDGWVDGVRCMLAARSGAVKARTSAINTARSLLTTAPEGLRSRFRGMGGPRLMEELPSVRAEGALGAALGALADLWAAARDAALDMERAIEASLEENCPALLAMYGCGPVSAAKLAVAAGDNPGRLRSEASFAAICGACPIPASSGKTVRHRLNRGGDRQANSALHEIARQRVMRDPETAEYAERARGRGKSDREVMRCLKRYVAREAYRALMHPHEIRRPEDASELVAARRAARVSQVRAASILGTSEKYISMLERGQRELKPIRRAYEAWVEAGLPLDWDRQAFEAERKMDSKKHLAK

SEQ ID NO: 93855 - protein, 457 aa, unidentified
MSHDRQSKGTRQARSLPVRHACAAGIDIGAKFHVVAVPPHLSAELVRTYQSFTTDLHRLADWVVAVGITTVAMESTGVYWIPLFEILEDRGLEVLLVNARHVKRVPGRKTDVTDAQWLQELHQHGLLRGSFRPANELVALRAYLRHRERLLEYAAGHIQHMQKALMQMNVQLHHVVSDITGATGMAIIRAIVAGQHDPGQLATYRNVRCHASGETVEAALTGHYRREHVFALRQALELYDSYQTKVEECDKEIEATLAVLPHAEHEPSKPLPPARHKTRQMNEPKFQTREALFHLLGMDLTQLHGFGPHTALKLIGECGTDMSRWPTVKHFTSWLTLAPGNKISGGRLLSTKTRRSASRSAKVLRLAAVNVGKTSTALGAFYRRLAARVGKAKAVTATARKLAVLFYNALRYGMTYCDPGVAYYEERYRQRVLKGLKKRAKDFGYELTASGTTPGVS

SEQ ID NO: 93856 - protein, 391 aa, unidentified
MPTIADRPDAPTAIQTNLAAIFISLELSRSIWLITSLSPGSGEKMSKHSLRAGDVAALLARFSASQEKALARTGKSFPIIAVQDAGLDGFWLHRVLERERIESHVVDPASIATSRRRRRAKTDRIDGETLLRALLAHKRGEPRVCAMVKAPTPEEEDRRRVCRERKVLISERVEHINRIKGLLFSQGISSYEALRRDRRQRLEELRTGDGGPLPTHLKTQISRELDRLELLLEQIGMVEAERDAMLAAQPAAAPASARRMLRNFKGVGPEFAAILWLEALFRHFDNRRQIASYAGLAPTPWQSGSVDREQGVSKAGNPRLRATLIELAWLWLRHQPQSALALWFKERVTRNGGRMKKTLIVALARKLLVALWKYVTVGVVIEGAVMKADHP

SEQ ID NO: 93857 - protein, 916 aa, unidentified
MNESTVAQPSVQETMGIDLGDRESRYCVLDAGGTAVLKGRVPTTKKALANLAAERKPMRVVLEAGTHSAWVSRIFLKAGHSVVVANPRKLAIIYKNQRKNDAEDAELLARVGRLDPVLLSPILHRAPAVQTDLAMLRSRDALVGARTKLINHVRGVVKSIGERLPSCSTGAFPHRAAEEVPEELRTALLPVVDQVDSLGKQIQDFDRQIVELASTKYPAAGKLASSVPGVASLTALAFVLTVEDPHRFPRSRSVAAYLGLVPRQDDSGKSTPQLGITKAGDSMVRKLLVGSAQYALGPFGPDSDLRRWGLALAERGGKNAKKRSVVAVARKLAVLLLRLWVTGQTFKPFRAGSPAQAAETSAVGAAEPTRASDGNETGKPDRQVAPRPVPKPRRAAPKQDATETPAGAPEVRASSARAGSRRKRAPVEYELRAVPPTLPTTEASHVDSPPPKAGPNSATASPVSCNRAQGAAAKVTTRATGLTKGDGPKVDPVDRASQKAAPLDVASSSAPSPTARSLADASSPETPPAAPTAAPLSCERAQVDASKVKTRAAGLTKGDERQVMPVDRASQEAAPVDVASTSATPPPDRFLADASSPETPPGAPTASPVQCNRAQAAAAKVKTRTAGLTKGDGRQVSPVDRAAQEAAPVDVASTSATPPPDRFLADASSPETPPGAPTAYPVHCNRAQAAAAKVKTRAAGLTKGDGCQVSPVDHASQEAALVDVASTSATPPPDRFLADASSPDTPPGAPTASPAYCNRAQAAAAKVKTRATGLTKGDGRQVSPVDRAAQEATPLDVAFTPALSSTDRFLADASSPKTPIQGPTASPVRRKSARVAAAPVQPGAAGSTTSDGHQVSPVDRRPTSATRFECDSPIPGEGGGARVPSSSAVCPLPKGVSRATRLTVSSELRDGLRGVP

SEQ ID NO: 93858 - protein, 350 aa, unidentified
MLIIGCDLHTRYQVIAMLDTETGEMVTRRMEHENGEVRTFYAGLPKPSLIGIEATGYTQWFERLLAALGHELWVGDPAEIRARAVRRQKTDTRDAEHLLDLLVANRFPRLWVPTPEERDLRQLLKHRDKLVRMRTSVKNQLHFLAMSQGVCRKKKLWSARGRAELEGLSLGPWAAQRRAELLELLDGLGPRIEALDEAVKAEADRRPEAVALMQQRGVGSVTALAFVLTVGPVGRFSNSRKLVSYLGLNPSEHSSGGHQRLGHISKQGNQMLRWLLVEAGQSAAQFDPQLRRKYLRLKFRRGANVAKVAIARQLAVRLYWTLRPAKVAPPPVRTPGSPAQTVVEKAPSIL

SEQ ID NO: 93859 - protein, 414 aa, unidentified
MDLIHRSCCGMDIHQKSIVACVRITDPHAPEPVQEEVRTFATTTREIMALGDWLEQQQVSIVAMESTGVYWKPVWNLLEGRLKQILINPREVKPRPGQKTDRRDARRIAELLSYGLLSASFVPERPQRELRDLTRTRATLLQDKARVANRLQKTLQDANIKLGSVASDVLGASGRDMIRALIDGAMSPEAMAQLARQRMRPKIPQLIEALRGHVNDHHRFMLQMQLDQIEQLEDQVEKLDARIEAVMSPLEKAALNQLDDIPGIDRRAAQNILAEVGADMSRFPTSGHLSSWAGLCPGNNQSAGRRGSGRMSQGNRWLKSTLNQCAWAASRARDSYFSAQHRRIAGRRGVKRATMAVAHTILCVCYELLSRGEAYQDLGHDYFVRRNETAQKSRHIRGLEAMGYRVTLEKLPAA

SEQ ID NO: 93860 - protein, 355 aa, unidentified
MDKIKTNFSGQTIHVGMDVHKDSWNLGIYLNDIFVRNLHQKPNPKMMVDYLHKNFPGAIYKAAYEAGKFGFWIQRQLASLGVECLVVNPADIPKSQKDSLQKTDPRDARNIGLRLQSGFLRGIHIPDEQQEADRVFFRHRKKILKDLNRCKNRIKGLLAFTGIDIPQAYDNANWSHNFINWLKALDCKQAPRRRALDYKIRNMEFLRKELLSISNDIRKMMREQRYRTNYYLLRTIPGIGPLTAASILVEIGDVKRFNTFCHLNSFIGLLPMERSSGQSENKMSLTVRKHRQLRSDLVESAWTAKRTDPAMALYFQEQAKRKDPKIVIIKIARKLLNRIRYVLINQQPYEFGVLK

SEQ ID NO: 93861 - protein, 372 aa, unidentified
MYNTTVYVGMDVHKESFTVCAYTVEADKASYFQKMEADYKKVLSYLDYLRRIYGEAVEFVCGYEAGCLGYTLYHQLTDHNVNCKILAPSTMLEQRSKKRIKTDKRDAELIAKCLASRSYSPVHIPTQQDEETKEFLRMRDDHKLALKKIKQQILGFCLRHNYRYGSRHYWTQVHIKWLRSLKSEGLYSEILTEYLLTYDALTDKIERLDRRIEELASQEVYAEKVKMLTCYIGVKTNTALSTIVEVGDFHRFATAERFASYIGLVPGEDSSGPDCTRLSITKAGNRHVRLLLVESAKCFGRGEIGFKSRELKARQAGNRSEVIAYADRANERLRRRYYKMVLGQNKKHNVATVAIARELACFMWGMMTDHIA

SEQ ID NO: 93862 - protein, 376 aa, unidentified
MQDSTFIGLDVHKATISVAVAQGERGGEVRHLGTVAHRPDHVRKLVDKLAAGRTSLHFCYEAGPCGYGLHRQLVDMGHDCIVVAPSLIPIKAGDRVKTDRRDAVMLAKLHRAGELTAVWVPDEAHEAMRDLVRARATALRVAGKARQHLQGFLLRHGRIYPGKKGWTGAYRRWLAMVRFSHPAQQIVLQDYIDAVSDAEARVERLTGQIADLLPAWSLAPVVEAIQAMRGVGFIVAVTVVAEVGDFQRFDNPRQLMAYLGLTPSEHSSGASVRRGGITKAGSGLARRALVEGAWSYRMQARVSPKLLARLEALPKVARDIAWKGQLRMCQRYRHMVATGKAKVVVITAIAREMVGFIWAIAKAVTAPLAGGTTVSA

SEQ ID NO: 93863 - protein, 346 aa, unidentified
MTYYAGLDVSLKEVSICVIDDDGEVVAQGTAPADPEGVAGWFKNRSLAPKRIVHESGQLSIWLQRGMIQLGLLAICIDARKAHKSLSSRLNKSDKADAEGLAQLARMNWFTPVHIRSEESDRLRALVGGRERMIRLRKDLEGHIRGVLKAFGIRMTGVGQAQQRQGFRDQLAAAGETDPVLRTIADGFIVAHTTLCKATVDFDRALKAKSKSNPITRRLMTIPGVGPIVSLSFVALVDDPDRFSKTSDVGAFLGLTPRRHQSGEMDWSGRVSKCGDPTMRGLLFEAGSCVIRQVKRFSTLKSWAVRLAGRRGFRKAAVATARKIAVLMLTLWKSETDYRWTQEATA

SEQ ID NO: 93864 - protein, 410 aa, unidentified
METIVERCCGLDVHQATIVACLLVGRASEKPRKQVKTFRAMTQDLLALRDWLLSEGCTHVGMESTGVYWKPVHAVLEGAFQIVVGNAHHIRNVPGRKTDVKDSEWIADLLRHGLIAKSFVPPKPIRELRDLLRYRRKLVESRSAERNRLLKLLETANIKLASVATNVFGVSGMLMLNAILKDDSSPAQMAELAKGRMRDKIPDLKLALEGSVQEHHRFLLRLQLRRLKRTDEDLAELEQRIDERLGPYREQQALLVQIPGIDRILAAVMIAELGTDMTVFHSAKHLAAWAGVCPGNNESAGKRKSDRVRNGNAHLKTALVEAANAASRKKGSYLKDKFFRIKARRGPKRAAIAIAHKILIAAYHMLSTGSAYKDLGEPYLDRVAKDRVTNQLVHRLERLGYDVQLVQKVA

SEQ ID NO: 93865 - protein, 479 aa, unidentified
MTILQDRNFPTAESSWSALQSGQHRSRQVCCVASAIPLLMLATVVVLRGGFPTPLLALGKIVGISLLVVNAVAFGSRKHWLLCGPMLSSFSDQQPRKEDPVSTTATARMNHRTATEVALFMSFELGEKEWKIAWATSLGERPRCRTLRARDTKRLLAEIRKARDAVNVRRVVTCYEAGRDGFWLHRFLHAHGIENRIVDSASIEVNRRARRQKTDRLDAEKLLSMLLREALGEADLWSVVNVPSAADEDARSLQREYRTLVKERTRSANRILGLLASQGLAPERIDARLPEWLATVPLWDGSVLPPGARQRILREFERWQFTHAQLLAIEKERRDRTQHCEEPGLEKVRRLFALKGIGLGAAWTYGLEFFSWRQFRNGKEVGALAGLAPTPYQSGDSDRELGISRAGNRWVRGLAIEIAWGWLRHQPRSALSLWYQERFARGGPRARKVGIVALARKLLVALWRYVETGVLPEGAELKA

SEQ ID NO: 93866 - protein, 451 aa, unidentified
MEQATRFVGMDVHKDTIVVAVTATGEVGKAMAYGTFPNTTAALEKLVKRLRQAGSGPIKFCYEAGPCGYGVHRALTKMGEDCMVVAPSMIPRKSGDRQKTDKRDADGLAVLHRGGLLTAVWVPDAAHEAMRDLIRARLAAIRAVRAARQQLSAFLLRHERIYPEGRTAWTKAHRGWLADQSFAHPAQQIVLEECIEAVRSGEQRRDRVDGYLHAQIPTWSLFPLVQNLCALRGLDTIASAGLAAAIGDPSRFASAPDFMAYLGLVPSEHSSGPKRHIGAITKAGDVHARTLLIEAAHSYRFPARITRHKLTAVEAVPEAVRTIAWKAQTRLCQRYRQMMAKGKPRQVVVTAIARELAGFVWSIACITSDPAATGDVVNGPCNEATTYLMGVEIDSDKVTAAREGAVKRGQQSPAEAGRFRAPRRQSRAGVPNRTGRSAQTKMAAAEASLTG

SEQ ID NO: 93867 - protein, 344 aa, unidentified
MVTTIGIDPHKATHTAVAIDDDETVLGEFTIRADRDQTNKLIDWAGSVDGDGRLWAVEAATGLGHLLSQQLVARGETVVDVPPVLASRIRVLSSGKSQKNDPNDARSVAIAALRRESLAEVRCEDDTAVLRMLAKRHRELTSLRTQAVCRLHAMLAVLRPGGMGHRLSAKQASRMLGGIRGLDTVGEQRRLMAKTHIVDIRRLDRDLEAIKAQIRRAVAAADTSVTDIYGVGPVVAAFVIGYTPPIERFETADKYAAYNGTAPIEVSSGGKVRHRLSRRGNRTVNHAIHTAAVTQISHQTPGRVYYDKKLAEGKTTKEALRALKRRISNAVYRRLVADARRHNG

SEQ ID NO: 93868 - protein, 375 aa, unidentified
MSKIRFLGLDVHADTIAASVAEPDGEVRPLGIIPNRLESVRKMVAKLGPANQLKACYEAGPTGYVLYWQLTALGVPCEVVAPSLVPVKAGDKVKTDRRDATKLARSYRSGDLTAVWVPDAAHEALRDLVRAREDAKQDQHRARHRLRKFLLRHGRRPPEDVKKSWTQKYLTWIKEQVHFDQPALEATLLDYVHEVDHMAERIERLEKAIDVAIEKAPAEMRAVIEALQALRGVAKITAVSIVAEVGSLSRFEKPRQLMGYSGLVSSEFSSGNRIRRGGITKTGNAHLRRVLVEAAWAYQHRPWVGGALLKRQQGLDPAIKEIAWKAQWRLHTRYKKLSARGKNKNQIVTAVGRELLGFIWAIAVRTEARGTARAA

SEQ ID NO: 93869 - protein, 365 aa, unidentified
MQNISTMRTSGRNIFEGKLTIGVDLGDRSSSYCVLNESGEIVLEHKLATTPEAMKQVFGSMPRCRMAMETGTHSPWVSRLLTTLGHEVIVGHAQKVRLITKSRRKDDRLDARTLARLARIDPELLSPVKHRSAQAQVHLTEIRARAVLVSARTALVNAARGLVKSYGERLRKCGTQQFRRETTSKLSAGLQEALEPLLREVESLNERIQEYDRRIARMAKETYPETALLKQVKGVGDLIATAYVLTIEDPHRFRKSRDAGCFLGLQPGRRNSGESEPQMHISKEGDEYLRTLLVQGAHYILGPFGEESDLRRWGKKLAARGGKNAKKRAVVAVARKLAVLLHRLWVSGEVYEPLHNSQKAISAVA

SEQ ID NO: 93870 - protein, 431 aa, unidentified
MNPPYDLVIGLDRSDTKADLCLIDTRSGQRRRVVIDTAPEALWEWLLELRQQYPEARVGLCLEQPAVHLIGFLESYPWITLHPINPITLQKYREAFVTSRAKDDTRDADYLADLLWNHQSKLPVWTPQDGATRAVQQLVVHRRAVVEERTALSNRLIALLKQYFPQALKLCGEDLWRPLATRFLLKWSSLQAVQKARPASLKHFYYLHGSRSAKLLEQRLALVQRAVPVTDERALIESFALRVQLICRQLQLVQRSVAEFEQKIAAAYAGHPDRQIFASLPGAGPVLGPRLLASLGSQRERFAHPTHLQHYTGIAPVTKRSGGSCHIHRRYLCPKFHRQSFHEYAQESVLWSRWAAAFYLQQRTKGCAHHTAVRALAYKWQRVIWRCWQDRQPYDERIYEAALRKSDSPVVALFERVELGKSPWKNPAKKN

SEQ ID NO: 93871 - protein, 355 aa, unidentified
MNSVKYVGLDVHTETISVAVLDAEGQLVMQSVLATRAGAILDFLHGLRGTIHLTFEEGTHSAWLYDLLARRAARVVVCDPRKNALLKAGNKSDTIDARKLAELLRAELLSPVYHGENSLRALQQLGRSYSALTEDATRVKGRLKAIYRGQAIASVGKKLYGERHRGEWLAQLAEPGLRRRAERLYQELDALRELRREARQELLVESHKQEAVKRLQTIPFLGPIRAALLLGKVQTPHRFRTKRQFWAYCGLALETRSSADYGFRGGQVVRKNKPAFIRGLNRNHNHELKNLFKSAATSASAREGPFQIFYEGLLGKGMAPAMARLTLARKIAAITLCIWKKGETFDAEHLKLQAA

SEQ ID NO: 93872 - protein, 330 aa, unidentified
MKAYKHFLGVDISKQTIDVTMLRNNQNVHQQFSNDDPGMQQLLNWLQALEIKTNETLFCMEATGLYCFTLTQFLVANEIDTWIEHAAQIKKSTALARGKNDKLDSLRIATYASKNLERLRLWKPINSALEKIKHLATLRERIVETQKKLIIPIKEFEEVGDVVMAKMLTKTIKKSIVALETDLKNIENQILRIINQDVELCTKYNNAISVVGIGFVTAINLMVHTNGFTQMNDVRKLACYCGVAPFEYSSGTSIRGKTKVHFLANKKLKSNLHMASLTAIKLDIDIKKYYERKCAEGKNKMSVLNAVRNKLLARVLSCVNNDRVYVNKAA

SEQ ID NO: 93873 - protein, 410 aa, unidentified
MTDTTIAQAEPVLVAIDIAKARHEVLIAVPGRKRRRRLTMLNQLEDFTRLIATLSDYNRPVRAAFEATGNYHRALAYQLGAAGFEVKLVSSVALARTREALNNSWDKNDPKDAQVILHMMQIGNEQFYHDPLLCGTNDLQELSKTHDIVSRSKTELWHRILTHYLPLYFPEADRFHRSSRSDWFFAFLERYPSPHFISAMDQEAFISDAWEVVGRKVSKERLLADIYQTAKTSVGLPITPDSDAARMFRLVLGEGRSLIAQRNEIESRAVELLRDNIDYQLLTSIPGIGPVNALTILAEAGDLRRFQHHRQFLKFCGMDLATIQSGTFRGQTKLSKYGNARLRRTLWMAGQVAINQRTNSFRDKFERYVSKDRHNTHLRRKAYTAIAAKMARTVLGIIKRGEPYRPFFEG

SEQ ID NO: 93874 - protein, 361 aa, unidentified
MKCVQSNKLDFRGQNIYVGIDVHLKSWSVAILSEHSVLKRFSQSPEPEALHNYLVSNYPGANYFSVYEAGFCGFWIHEKLTDLGITNIVVNPADVPTMSKEKLRKTDAVDCNKLARELRSGSLEEIYVPKADVLEMRSLIRMRNLIVKDSTRAKNRIKSLLRFHGVEIPQEFIRCSIGCWSKRFLTWLHSLELSTEYGKKTLELHLEQFVRLRKMLLQETRAIREISRKAPFEKPIRLLTSVPGIGVTTAATLMVELDDIVRFKNADHLASFIGLVPMCHSSGESNGTGDITVRRHFMLRCLLVEAAWIAIRKDPAMTVAYTEYRKRMNPQKSIIKIARRLVNRIYYVLKHEKEYVPCVVK

SEQ ID NO: 93875 - protein, 345 aa, unidentified
MTTMPQPVPTRVTVGVDTHADVHVAVAKDSFGRRLDATSVPTTPAGYAELLGWAQRLGQVDAWGIEGTGSFGAGLARFLRAEGQIVVEVNRPDRQARRRRGKSDPLDAEAAARAVQAREGSIPKAGDGQVEMIRSLRVARASAIKARTQAINALKALLVTAPAELREQLRGLSTVRLVQTTAGLEPGAVTTPLAAAMLGLRTLGRRYQALSAELAALDAELDRLTRAAAPKLLALFGVGADSAGALLVAAGDNPERLCSDAAFAMLCGASPIEASSGKTRRYRLNRGGDRQANAALYRIVVARLRHDPRTQDYVARRIRQGKSKKDAIRCLKRYVAREVFAALPR

SEQ ID NO: 93876 - protein, 403 aa, unidentified
MAATSTAGVDWAAEAHEICISEEGRVAERFSAAHDERGIADLAQRLTRAGIARVAIERPDGILVERLLAAGLEVLAIHPNQVKAARARFAVAHGKSDRFDAYVLAELARTDAHRFRALVPDTDETKALKALTRAREDLVGVRVELANQLRAQLQAFWPGALIFAEVDSPISLAFLARYPGPADAKGLGAGRMAAFLGRNSYSGRTDPAELVARIKAAPEGTAGEAECQARRTVVLGLLAALGPIVEEIAELTAQIRDALAAHPDAAIFRALFRDPKTTICPATLIAELGDARGRYPTEAAMAADAGMSPVALESGKLRVATFRRACDKRLRAAVATLADSTRHWHPWAKEVYRRARARGQDHPHAIRTLGRAWIRVLWRCWRDRVPYDPARHGNFNRLQTAEG

SEQ ID NO: 93877 - protein, 350 aa, unidentified
MKKYIGMDVHKATTVIAVINESGRIITEAVVETSPAAILDFISSQRGCLHVTFEECAQAAWLYDMLRPHVADLLVCDPRKIARASNKGDKSDARRLADLLRTNALTPVYHGEQTTTGLKELAQGYTCLVEDRTRVKNRLKALFRARGIACEGSGVYSLDERKQWLAKLDSPAVRARADRLCSELDCLEWLSTEAELDLRAEARKHPAGKILRSIPGIGFVRAAVIIGVAGTPHRFRTKRQFWSYCGLAVRTVASSEYRMLEGKVVRSSKRPLVRGLNRNYSRALKSVFKGAAKTVASGQWSSLFEAMIANGTPESLAYLTLARKIASVTLALWKRGERYSQKKMKIVHAA

SEQ ID NO: 93878 - protein, 348 aa, unidentified
MTVYIGVDFHARQQTISYLTTEDGEIQQLVLAHEEPGKVRAFYEQFAGQQVVVGFESSGYAAWFEELLEELGCEIWIGHAADIRRFARRRQKNDRRDAALILDLLVAGDFPRIHRYSAASREVLQQLRYRQKLVKMRTMVVNGLLFMAASRGVTLRSQLQSKRGQARMRQLALPPPLAQQRDELCQLLLELSSKITKVQAWLETRAEQDVRVQRLRTQHGIGPLTGLCLAATLECPNRFANGRKVTAYAGLDPTEDSSAERRRMGAISKQGSRLLRFYLVEAGQVALRKDADLARAYQRLLRRAGHAKAKVAIGRRLLVRAFIMLRDEIDYAEFQRRGVAARSSRGTA

SEQ ID NO: 93879 - protein, 354 aa, unidentified
MSETLNAAIAVIGIDIGKNSFHIVGHDERGAIVLRQKWSRGQVEARFANLPPCRIGMEACVGAHHLSRKLNSLGHDARLMPAKYVRPYSKGQKNDFRDAEAIAEAVQRPTMKFVATKTADQLDLQALHRVRERLVSQRTGIVNQIRAFLLERGIAVRQGQRFLRAELPRILATPPDVLSPRMVRVIEDLAGDWRQLDERIEGLSGEIEAIARQDAGCERLMSVPGIGPIISSAMVAAIGAGDAFTKGRDFAAWLGLVPKQMSTGDRTILGKISKRGNRYLRVLFVQAAWVVLIKPKIWERHGLKPWIEAAKKRLHHNVLAIALANKLARIAWSVLARGRAFEVRKMDEAVVQSA

SEQ ID NO: 93880 - protein, 447 aa, unidentified
MSRKKTKLQSVTGPPEIRADAAGIDISPEVIYVAVDPRKDPQPIRHYGTVTAELYRIANWLKACGVRTVAMESTGVYWIPLCQVLDERGFEVYLVNARHYKNVPGRKTDVCDSAWLQYLHAVGLLQGSFRPVDEICAFRTVMRHRASLVEAASKHVQHMQKALDQMNVQIHRVLSDITGVSGLAILDAILKGERDPRRLAELRDGRVQASEGSIMAALEGNYRTEHLFTLQQSLESYRHYQKLIGECDRKLREQLEALEGRSDGNEPPAARKNMRTRSDEELRKAFFRIVGVDLTAIPSIGVGTEVGPDLTRFRSAGAFANWLGLCPNNSITGAKIKSSRTKRIENRLATALRMAAESLCRDKSYLGQFYRRMKMQLSGGPEAITAAAHKLARIIYAMVTSCVEYDETRFAQIEQRTHDRTRLRFIKQAAKFGFRLTPIQAEAGFVS

SEQ ID NO: 93881 - protein, 413 aa, unidentified
MDVVHPRCAGIDCSKKDAKVCVRIQGQGRKRASSTVTTWGATTSQILALREYLLAEKVTCVVIESTSDYWKPFYYLLDDVLNMMLVNASRVRNVPGRKTDVSDAAWLADLGAHGLVTASLVPPSAIRALRDLTRARTHITRERSREVLRLEKLLEDAGIKLSSVATDITGVSGRAMLEALIAGQTDPAVIADLAKRTLRRKIPDLTEALVGRFTEHHAFMARLFLDRIDAHSADISRLDARIEEAMAPFRLARELLISIPGFSTKTAEVFIAETGGHMSVFPSAGHLASWAGVSPGSNESAGRIKSTKTRPGNPYLKGALGVSAMSAARAKNTFFSAKYQRIRARRGPMRALVAVEHALVIAAWNMLTDGAFYRELGADYYTVHKPAKAKARAVRQLEALGYTVTLKPLAETA

SEQ ID NO: 93882 - protein, 346 aa, unidentified
MLYAGLDLSRKRLDFHLLDRDGATVEVGAAPPDADGLLGLTRRLDRHREPIRAAIESMNGARFVHDRLELAGWQVEIADAQKVKGLAPLACKTDRIDAWVLAELTRRDLVPAIWLPDPMVRAERERARWRLHLVRHRSSLKQRVHAVLLTHGKPCPVSDLFGVRGRQLLARLGLPEPWQATIEASLRLIDELEREISDCERELRRLGADHRYVPLLLTVPGIGWVLAYTIAAEIGDIERFASPRKLAGYTGLCPRVYQSGERDLRGPLAKQGPKYLRWALVEAATHACTAPVYRDRYQQTKTRIGKQRGAKVAQIDLARRLSEAIWHMLTREQPFAPKGATDPLAA

SEQ ID NO: 93883 - protein, 289 aa, unidentified
MIIIGADYHPGFQQIAFVDTDTGELQERRLEHREEAETFYRDLATQGMRVRVGMEASGHARWFERLLAELQFELWIGDAAEIRTKRVRKQKTDRQDAQLILQLLLEERFPRIWVPSWENRDLLELLDRLTPTIAELTQAIEQEVEQCPEAQRLQTHPGVGALTALAFVLIIGRADRFQCGKQIASYLGLVPLEESSGQRRRLGHITKQGNSLMRFLLVEAAQVTVRSDQEWRSKYFHLAMRRGRKIAKVAMARRLAVRMYWMWRKGWDYEQLKKFGSHAGQPGNRDGVR

SEQ ID NO: 93884 - protein, 338 aa, unidentified
MNVTTLGIDLAKNVFQIHGVDRKGKPVMQKRLSRGRFLPFLANLPPCLVGIEACGSSNYWARRLRAVGHEVRLISPQYGKPYVKTNKNDCNDAEAICEAVARPTMRLVPIKNIAQQDIQALHRIRERLVHERTALVNQTRGILREYGVFLPEGIRPFRRKIPEVLEDAQNELTPLAREFTADQYARLGELDRRITDYDARLQTIFRGNDTCQRLMAIDGVGPMTATALVAATGDAREFQNGRHFSAWLGLVPRQRSSGERNKLLGISKRGNSYLRTLLIHGARSVLRRCKTRTDKRGRWMQAILERRGFNRACVALANKNARILWALMARGESYRHAS

SEQ ID NO: 93885 - protein, 344 aa, unidentified
MDEITTIGLDIAMSVFQVHAVSATGTVVVRRQLKRRYVVQFFAGLKPCLIGIEAYATAHHWGRELAKLVHEVRLMPPAYVKPYVKRNKNDAADAEAICEAVTRPNMRFVPIKTQDQQSILMLHRTRMLFFRQRTMTINAVRAHLAEFGIVAGIGRNGLLELLDFIRRGEKTEVPTEACLCLAALADQVDLLKLRTVAMDRQIMKWHRAHDLSRKLEGIPGVGPLVATALAASIPDPGVFRSGRDASAWIGLVPKQNSSGGKEKLGGISKAGNRYLRQLLLLGALAVIKRAKLLSQARHPWLVGLMERRPSKVAAVALANKMARVAWAMMSRNEPFRAIPVAAGS

SEQ ID NO: 93886 - protein, 532 aa, unidentified
MNRGRIQSAREASWTDTFSGVNHQRGKRPRPKVAPPELVNNSAASQTAGGPFPVARAPRPFWTSPLRVSRRSPTPVSTAVPKDERTAPFEGSCISSPGPRRSAPGRAVRTMNTEWNQHTHFAALDWASDHHDVCVVDRSGTIVAEFRFAHTAAGWNEFTEQMKSFTGCPLTLETSSGPAVDQLLQRGWPLYPVAPPASNRYRDRKAPSGTKTDRHETWALADALRTDGHAWRPLRPQDEATATLRALCRDEIALIEQRTALVNQLQAALREYYPVALEAFEDWTAPYAWAFVLAFPTPAALKAAGKRKWETFLHTHKLWRPQTTERRLAIFAQATALPASAAVTSAKSLLATSLAKVLQTLQTQLDEYRRQITAAFRAHPDHDVFGGLPGAKAVLAPRLLSELGRVREEYPDAQSLMCQAGVSPVSYQSGQIDKCRLRRACDKVLRFTVHLWANASRKKCAWAQAYYASKRREGHSHASALRCLGKRWLKILWRLWVDQKPYDETVHLASLDRRAPKWWVEFNRTGQAAPTV

SEQ ID NO: 93887 - protein, 340 aa, unidentified
MRLIGCDLHASQQSIAMLDRDTGEIVEKTLTHEGEAVRAFYASIPPPVVVGIEATGSMGWFLRLMEELAIECRVGHPTAIRKAETRRQKHDRRDAALLLQLLAEDRFPAIWMPSTEYRDLRSLLLHRHQWVRMRTRVQNALHAIAMAHGVRRGHTLWNRDGQALLASLSLPLHTADRRSELQALYQHLEAQIDRLDDRVQHVANERPRATLLMTHPGVGPVTALATEVFVGDPTRFLDGKALASYVGIIPREYSSGKRQRLGALSKQGNPFLRFLWCEAAAHAVRRDPDLQRFYRRKVVQKGFAKARVAAARKLGIRLWIMLRDQIDYTEFCRRGLARQS

SEQ ID NO: 93888 - protein, 418 aa, unidentified
MPDGPTRFIGLDIHKEYFVAVGVNAQREVVFGPQRVSNYQLDDWVARVLTTQDSVVLEMTTNAYLFYDTLLPQVHSIIAVHPPNVALVTNAQVKTDKKAALALAQLHAAGMLTGVWIPPQEVRDLRALIARREKMVRLSTMAKNRLHSILHRNHLVLPEKPFSPEQRTWWESLSLSATEQFLVRSDLDTLEFAQKQVGQAEECLKKESAQDEHIPLLVQLPGVAMLTAITILAAIGDITRFPTAKKLVGYAGLGTRVHDSGMTHNSGRITKAGRKDLRRALVNAANHAIEYHPHWKKEFERLEPHLGRSKAVVAIARKLLVAVWHVLSEKAVDRFADPGDVARSFFAHAYRVGVRNLPEEQSALAFTREQLDRLGIGKDLQEIPWGSRHHKLPLSKLLPQKSERCPNWVGAPDNRIYS

SEQ ID NO: 93889 - protein, 349 aa, unidentified
MGMVGGLDLHRRQITFDVMELESGEEWRGRVWQPDRDRFRRWLRDDVTRRANGRPVALAVEGCTGWRYVVEEIEAAGFNAHLAEPADTQAARGRKRRAKTDRSDARLLRDLLVAGELPASWIPPEPVLEWRERVRLYVSLVNQRTVWCQRIHAELYHHGVAVPEGAIRTLKTRAMLGDATLQLSPAARERIAAGYRMIDATDLEAQPLKRELQRFGARQPACRALVDAQYGIGGLIAVAVWSELGDCRRFRRSEQVVRHTGLDVTVDSSDRRRAGGFLSRQGPETLRWALYEAAKNSSHHRSPDHHYYAAVKERHDGKIAAISVARQFARRCYHVLRNLDPDVVYAMPN

SEQ ID NO: 93890 - protein, 372 aa, unidentified
MGHHTEAFVGIDTSKSRNAVAIADSGRGGEVRYLGEFPATEAAIRKLVAKLAAKCCHLTFCYEAGPTGYGLYRLLKSLGHDCLVVAPSLVPKKAGDRVKTNRRDALSLAKLLRAGELTAVWVPDERHEAMRDLSRARLAVKKDLQGKRQQISSLMLRLGRIYPGKTTWGRAHMRWLMEQKFEHREQRIAFEELLEGIRQESERMERLEDAIREVVPDWSLAEVVAALQAMRGIDLIAAVGVLAEIGDLSRFQNPRELMGYLGLVPTEDSTGDKVKRGGITKAGNGRARRMLVEAAWSYRYPPRVSRDKQPKVEAAPRRAREIAWKAQTRLCGRFRSLERKGKRRTVIVTAIARELSAFIWAINRELLPPRQA

SEQ ID NO: 93891 - protein, 309 aa, unidentified
MAMLVDVNEFGIDVAKDWLDIFDGIEVIRIDNNKRAIKAFLKQLSGSSIFAVESTNTYHELLVEMAIVAKHTVYLIDAYRLSRYRDAVGVRAKTDANDARLLLRYLHAERQQLVPFKLIPKAVKRLNRLLKARAKLAELKASMGLALSGVTELAQTRKSLLTRFKLAMALIDKRILDCIILAGYKADYKRCLAVPGIGHLNAAALVALFHRGYFAKSDSFIAFMGLDVRVRESGYYKGKRKLTKKGNPEMRRLLFNAARAGAKTKKWNAYYLAMRARGHSTTATAVALSRKIARLAFALMRDQSEYRPV

SEQ ID NO: 93892 - protein, 355 aa, unidentified
MNDAKYIGMDVHQATISVAVLDSAGKLVMEAILETKAETILQFIHGLRGSLHVTLEEGTCAAWLHDLLKPHVTQVLVCDPRKNALIKAGNKSDRIDARKLADLLYLNKLNPVYHGETGIRALKEVARSYLALTRDTTRVMNRLKALYRSWAIPCAGQRVYAPRYRSEWLVKITEAGVHRRAEIYYQQLDALRSLREQVRRDLLAEGRKHSAMKLLRQIPSIGPIRAVLLIALMQTPHRFRTKRQLWAYCGLALKTSTSGEYRIVEGRLKRSKKFLAIRGLNANHNHDLKNIFKGAATRAAAVPGPFQEFHAGLVARGMKPTMARLTLARKIAAITLIVWKKGVGFDAEHLKQQAA

SEQ ID NO: 93893 - protein, 461 aa, unidentified
MRNNRKSGDHPGSTRPIEGLPIVRAQVAGIDIGSERHWVCALGLEGSGREIADFGATTPELVRMAEWLKERKIKSVAMESTGVYWIAPHEVLEKDFEVLLVDTRQLARVPGRNKKTDPSDCEWIQRLHSCGLLNGSFRPQEQVCMLRTLIRDKAILVAESADWVRRMQKSLDQMNVRVHRAVSDLNGVTGMAIMRAIAAGERDARKLAQLRDRRCRKSKEEIAEQLSGHWREDHLFSLRQSLQMYDAIEERITAYEQEILTKLATMELEEHPGGAVPPVKNLEKAKAIKKRGQEPMRQALYRMSGVDVTQIDAIGVETVEVVLSEYGPDLSRFPTEKQFVSHATLAPRVPKSGGKPLKRKKRNSASTRVAAALRMAALALRRSPTALGAYYRRVARRIGGDVAVFSTARKLATLIYRLLRWGQPYVDEGAEAFEKRYRQQHIKGLAARAKELGYQLMPTTT

SEQ ID NO: 93894 - protein, 342 aa, unidentified
MQITTIGLDIAKNVFQVHGIDASENVVVRKQLRRSQVLAFFKALSPCLIGMEACATAHYWARELTTLGHEVRLMPAKDVKAYVKRNKNDAADAEAICEAVRRPTMRFVQAKSAEQQGRLMQHRTRDLLMRQRTQLINALRAHMAELGIVAAQGREGIKQLLTIVASERDARLPVDAHASLVVLAAGLQAVQTMIGSIERRIIIQHRSNEASKRLKSIPGIGIVGATAIAATVPDPRAFRSGRDFAAWIGLVPRQDSTGGKQKLGPISKQGDQYLRRILVVGAHAVLKRARQQPEKYPWLTRLLARKPFRVAAVALANKMARVAWALLAKGGTYRAPALAAPV

SEQ ID NO: 93895 - protein, 414 aa, unidentified
MLKIIYPICCGMDVHKSFVVACIASTNDHGVTTYKSKRFSTFTGDLRRCAAWLAENNCKDVCMESTGKYWIPIYNILEHTCRIVLAHPKYVKAIRGKKTDKRDAKWIADIFKHDLVAGSFIPPPDIRQLRDLVRYRWKLTNFTTGEKNRAQNCLTVSNFKLDDVFSDVFGKAASAITTRILENPTEKITDVSGFRTKGMKATNEQVLAAVDGEMCAEQAEKLRIIRSHMDSLELCKLNLESLILSTAEKYLPQLNLVMTVPGIQSFAAIGIISEIGVDMSVFPTSKHLCSWAGLTPQNNESAGKKKTTRIGRAGAYIKLLLVQCALNAIRAKKFPEIRNRYLTLKKRRGHKKAIIAIARMLLTAIYNILKKNELYNPELYRSADRPPKNREVSVEEAVFILQRQGYLVTAPPTA

SEQ ID NO: 93896 - protein, 379 aa, unidentified
MGKGIRHVGLDVHGETIAAAVAQEDGSELDFGVIANRPEAVRRLIKRLSPVEKLRVCYEAGPCGYVLYWQLTGLGVDCKVIAPGLMPQKPGDRVKTDRRDAKKLARMYRAGLLTAVWVPEADGEALRDLVRAREAAKKDELRARHRLGKFLLRRGCRAPQAVEAWTKRHWQWLRSLRWEHAAQEVVFTDYQHEVDHAGQRLVRLERAIDEVLERMPASKRAVIEGLQALRGVSKVTAVTVYSEVGELSRFARPKLMMGYTGMVSSEHSSASRIRRGSITKTGNAHLRRVLVQAAWAYCRRPNLSTALKKRQAGLSEEIKQISWKAQHRLYGRYRRLVSKGKMPQQAITAVARELVGFIWAIGVHVEDQITQERQDHAAA

SEQ ID NO: 93897 - protein, 341 aa, unidentified
MNSSKTVVGIDIAKRVFQLHWIDMETGEIVSLQLKREQFLEHFANRQKCLIGMEACGGAQHWARKLTAMGHQVKLLPGKAVKGFVIGNKNDRQDARAIWTAVQQPHVKAVAIKTEAQQAILALHRMRSQLVKFRTAQINGLRGLLTEYGEVMPQGKAGVRKGISDALGRLADRLPAMVIDTLREQWARIEKMDQEIATIEQRIKHWLKQDDACKRIAEIPGVGPLTATAAVAMMGDPKAFKSGREFAAFAGLVPRQVGTGGRVKLLGISKRGDTYLRTLLIHGARSVLTHAKDPGPWVTELRLRRPLNIAVVALANKMARTIWAVLAHERTYQKGFVSRPA

SEQ ID NO: 93898 - protein, 350 aa, unidentified
MKYYAGLDVSVKETSVCIVDESGNVCREKKVISHPDDLVAVLSDPAFNFERVGLEAGPLSQWLFEGLAKAGFAVLCIETRHTKAFLKAQQPNKSDRNDARGIAHMMRVGLFKDVHVKTLTSQKRRALLTARKLLQEKAIAMENDMRGLLRNFGLKVGTIRAFKFDERIRELVEAAPDLAEIIEPLLTARQKLREEFAKLDRKVRDEARLDPVCRQLMTVPGVGPIVALAYTSTIDIPSRFRHSRAVGAVLGLTPVLNQSGESSRIGHVSLCGDGMLRGLLYEAAQVLLIRVKKWSWLKAWAMNVAKRHGAKKAIVALARRLAVVLHRMWVDGSEFRWTRETRPTTTGATA

SEQ ID NO: 93899 - protein, 343 aa, unidentified
MEKIARIGMDTSKHVFQLHGVDATESVVLRRKLRRTEMLAFFAAREPTVIGIEACAGSHHWARELSALGHEVKLLAPQLVKPYVKRSKNDAADAEALCEAMSRPSMRFVPAKTTDQQAALMLVALRDRLVRTRTQLTNAIRGHAAEFGLIAAKGLDKVEPLLVRIAMDESLPALARAIFTVHAEEYAALGARLRVVEAELMAWHRANATSRRLSAIPGIGPVIASLLVMKTPDPHAFRSGRAFAAWLGLTPKDHSTAGKTRHGGITRAGDEALRSALVVGATAVINQARRRDKATAWLAGLLARKPAKLVAVALANKMARIAWKLMVSGEIYATGRMGATTAA

SEQ ID NO: 93900 - protein, 448 aa, unidentified
MSTYVGIDVGSEEHAVYGIEKEDDEPAYKTTVTNDSDGFEKLEDLLREHSSGSIHLGLEATGSYWKPVFNRLMELKDKLDITPSLINPNEIHQFKRMDLSRVKTDSADAKAIARYVLRFKPKSTPRTNERLRSLRRLCRYRSSRVEEKTRLIQQLDHVLVGVFPEYSDCFGKLSAVSSLAVLKKYPGPEEIAKQNVEELSSLRYGKINHRLGRQKAKKLIEVASNTVGEGYGSEIEITIRHLAEQITVVKREVEDLDERIEKSFREIAPNKLESVDGIGPVNAAVMTTEIWDINRFATATKLNGYVGAYPELSESGNYEDPHPDMTKKGNPRLKRAVFTSTMSAVNSNPVIKEHYEKQRKRGKDRMVAIGSCMRKLVHIIYGILTSGEEFDPNYEEKTKGDNENQKEEKRTRKPQTGSYPEDERSSELSPKSNNGKVAPNYQLAGGET

SEQ ID NO: 93901 - protein, 356 aa, unidentified
MLYIGVDLHKNRTRMVVMNQEGEILERKTIISDADSFREAFSKFPKGEAEIAMEATSNWYWASDVFEDLGLKLHLANPHRVRIVAESTVKTDTNDAYALAHLLRLKFLPKSRITPRDVRLLRERLRCRIALVRERTGVKGRIHALLGKCGIRPPEFSDLFGKAGREWMGRLKFDTEYRLNLDSHLRLIDFLTEEIKKLDDWLRRKVSKNEDVRLLMSIPGIGIFSAALILAELGDINFFRDRRRLSSFIGVVPGARNSGDVRQDGPLKADSNRYVRWVLAEGASKAKLVVPAWRDLYNRVHAGNDKRRSKARVAVMHKMACAIWRALKTREPFDPYHNCPQIENKNGELVGGPGLK

SEQ ID NO: 93902 - protein, 313 aa, unidentified
MIITLRCVGIDVSKRRLDIFDEGIGVSERVANAPHAIAELVARWRCDALVVFEATGVYDLELREALRAAGIRFARINPARARDFARASGQLAKTDPIDARMLAVFARAMRPAPEQVSSPARNALARLAKRRDQLVLMRAQEKNRRSEAGDRAMVERICRLIEVLDHEIAEIEADISALIKAEPEISHDAQLMRSLPGVGPVASMQLIAQMPELGHVGPKQAAALAGLAPFNVDSGAYRGKRKIGAGRKRVRDALYMAALNAVRRADRFKAFYARLRQAGKPAKLALIAVARKLLTILNAMMRDRKAYIPTQQT

SEQ ID NO: 93903 - protein, 390 aa, unidentified
MTNSGLDEVPTQILLTCFRGRKEEHMIKRMHGIDRHKLYSTIVVMDREGAAIKIMRRCVDLEAYIQGLNEEDAVVMESSNGAFYWADRVERQGAQAYIVDTRKFKLIKDTWKKTDKEDAKNLAWGLWVHLMSADHQLPLVAKTDYQNRELRRLFVQYRLLNEQVVRLKTITQASLSDVGIVLKSEQKDILFHEKKGKAFLQTLSATPATLLSIGMNLDMVWVLEKNKETLKIEILHCGAHLQEDVELLMSIKGVSPLVALAFLADVWDITRFSSQRKLNAYVGVVPNAKISGGKDRSGHICRASRNLTRWILSQSIPHITNSSPVMQKYYAELMQRRGVGRARIAVIRRTVGIMRRILLSRKKYTWCDEVSLASKLSDYRRRLRRIQIAS

SEQ ID NO: 93904 - protein, 360 aa, unidentified
MSEIIRIGIDTSKSVFVLHGVDGTEKPALRKKLRRRDLVGFLAKLKPTRIGIEACGAAHYWGRTFQALGHEAVLLPTQLVKPYIARNKNDGADAEGICEAMSRPRMRFVPIKTAEQQAAQMLIGLRDRLVRQRTQVSNAIRGYAAEFGLVAAKGLDKIEPLLARIADAPDLPDLAKELFALHSQEYVQLKVRLRQIEAKLMAWHRHNELSRRLAEIPAIGPIGACALAIKVTDPGAFRCGRDFAAWLGLTPKDHSTAGKQRLGAITRAGDEMLRSVLVVGATAVIQQARRGRGKATPWLIDLIKRKPPKLAAVALANKTARIAWKLMVSGERYDPHHQGRGRSNPPSPPAVSTAPGSRGA

SEQ ID NO: 93905 - protein, 333 aa, unidentified
MNTIGIDVGCKELVIVIMVNGKARKAKSFDNTPLGHQEIIHSLTKLKGEIKVCIEATGVYHFDLAVALSRVDGIEVMVINPKSAHNFAKALMTRSKTDAIDAEILAVYAERMPFEAWERPDDECISLRATARRIAALNKQKTQTKNQLHALKSTVETPALIIEKTEELIDILDAQIKTLRESALELIQQHEELKQAYTLITGIKGIAETSAVQILSELMILPKDMTARQWVAHAGLDPRIFNSGSSVSKKPRISKVGNKYIRQALYMPALVASRFEPNIKGYYHHLIDDNGLKKVQAICAVMRKLLHAIHGMLKTNKKFDGERFYTFPAEAKS

SEQ ID NO: 93906 - protein, 325 aa, unidentified
MGKPILIEEPDAQEVYYDICCGIDVHQKTVVACLLRPNRKKEIRKYGTSTRELKELAQWLLEEKSEMIAMESTGIYWRPLYNIFEEYELKAMLVNAAHMRNVPGRKSDIGDAQWIAKLLKQGLLKASYIPSREQRELRDITRYRKNLVEEKSREVNRLQKLLESANIKLGTQLSDINGKTGRWLLECKLSGTVPGEEELKQKLPTKRMKERTEEIEQSMEGELSEAQEILLRQILKRIDGIEADIKQLSEAIERLSAKDAAIKEALTEIPGVGKSSAEIILAEIGTDMEAFATSEQLTAWAGVSPTKNESAGKKKRSEQEKGTSC

SEQ ID NO: 93907 - protein, 394 aa, unidentified
MKLIGIDIGKNKHFFCVMVQQTGEIISQPVSFSNDKEGFDFLVQKIKSYPKDSILIGMEDTGHYHFALLKYLLDLQYTVALINPKTTDFNRKMQGGITKNDKLDTINICDVLDTPERKKQYRITKVNSFDLYEQKQLTRHHHNLKEEENVYKNRLQKCIDIVFPEFNKLFNSKYGIVYMNILKMFGSAENIANTDIRTIRKCFEIEGRGNRISLTPERLKECARSSIGISSSAEVIQIKHLTAQIELIEEQLTEIDKKIEEFSIQNNSPILSIPGISHFSGTSILAELGDISNYSKPSQIIKFAGVAPLHYESSQFNAQHTAITKKGSKYLRKTLYQIILPVIRHNPVFNKYYQLKISQGKGHRCAQGHCVRKLLRIIYHLLKTNQQFDPQLLR

SEQ ID NO: 93908 - protein, 341 aa, unidentified
MDEYIGLDVSMKETAVSIRRNGKRIWRGKCASDPASIGTLLRKHAPSAKRVIFETGPLSVWFYHALCAQGFPAICIDARHAKAALDMAANKTDANDADGLAHLAEVGFYREVRVKGFDSMLTRTLVAARTRLVRIMTELSNQIRGLMKTFGLVVPAGKGSRFEGHVRELLADQTSLAGIVLPVLEAWRSIRLRAAELGRQLIAGARRSEACRLLMSIPGVGTMTATAFTTAIEDPSNFRQSRSVGAWLGLTTRRYQSGQVDYDGHISRRGDRHVRGLLYEAATVILTRSSAESGLRTWGLALKERVGFKRAAVAVARKLAVTMHAMLKSGERFDRTAGAAA

SEQ ID NO: 93909 - protein, 338 aa, unidentified
MSKFSGIDLHSNNVVIVVSDEKDQVVYERRHANDLAGILAALEPYRAEMVGVVVESTYNWYWLVDGLMEAGYAVHLANTTAIKKYEGLKYSGDEADAAYLAKLLRLGLLPEGYIYPRETRGARDLCRKRMQLVQYCTAQILSIENILATQTGARLTSTKVQRLTDEQIAVLGFAPDVTLALQANAAVMRALQQQIAVLEERLAERVQLNADFALLKSVPGIGQVLATMIMLETGTVARFRKVGNFSSYCRCVQSVRLSNGKKKGEGNAKNGNHYLSWAFVEAAHFALRNCPQAKSFYERKKRQRNAVVATKALAHKLARACYHILREHKPFEVARCFA

SEQ ID NO: 93910 - protein, 319 aa, unidentified
MNTNTLQNINIGVDTGKSQLDIYIRPLDVFFTVPNNEKGIKQALTTNPQRIVIEATGRLEMPFVLACTEAKLPIVRANPVHIKRFAGAIGRRAKNDRLDAQLIAHYGEAIKPDLTVIKAKNIRLMSDLVIRRNQLLAMQTMEKNRIQILPKHLHSTITPILTAIKNQVSKIENKLVKLIEDCPEYQTKNTLLQSVPGIGNIAAASIISNVPELGYITNKQAASLIGVAPITRESGRYKGKRVIQGGRAQVRTVLYMAMMSAMQCNPVFKDTYARLLEAGKPKKVAIIACVRKMVVILNSMLRDGIMWDQNIAQNKGLTP

SEQ ID NO: 93911 - protein, 330 aa, unidentified
MTSLPDSTSTPVTIGIDVAKATLDIAIGLNAPPLSLTNDPEGFDTLLAQLAAHKVALIVMEATGGLETAAAAVLQAAGYAVAIINPRQARDFARAMGQLAKTDRIDARILAQLGEVIDRSPERDKFVKPLPTAEQQALAALVTRRRQLIAMLVAERNRLAQAPGATRKSIDTIIEALTTELERIDSDMAGHIQVHFADLSALLDSVKGVGKTTISTLIAEVPELGKLSRREISALIGVAPINRDSGRMRGKRTIFGGRGSVRQVLYMAALVAVRFNPAIKVFYDRLVAAGKPKKVALVACMRKLLTILNAMVKTGKPWDAVLHQSDSKNA

SEQ ID NO: 93912 - protein, 389 aa, unidentified
MVAMVIIGVDPHKSTHTATAIDPQTNRTVASVRIEASLVDYRRLLRWAGQFDHRRWAVENAEGLGRHLSSWLLARGEDVVDVPSAATARVRQLSRGGGRKNDQIDAAAAACAAALQGDGRPLQAEDLTDALALLDESRTNLAQSRVRLVNQLHALLRDLLAGGAPTDLSATRAAALLRLVRPSGDAERVRKQIATDLVGQIRSVDSLLKSNARQISELVAASASTLTSTVGIGAITAGRLIGRTGRAARFPSSAAFANYAGAAPVEVASADKARHRLSRSGDRQLNAALHTVAITQIRTPGSRGHTYYNAKLAEGKTPREARRCLKRRLANHIWRTMITDEQRQAASPGGHLGTTLTSSAAGSTPTTSSSDKSLPGLANHDSTTAQPAA

SEQ ID NO: 93913 - protein, 343 aa, unidentified
MKLHVLGIDLGKTVFHLVGLDSTGKVVIRKKCSRTQLLAFTANLQVQLIGMESCSGAHFLGRALREQGHEVRLMPAQYVKPYVQTNKSDFLDAEAIAEAVQRPRMRFVPIKSEEQLDLQALHRVRERWVMRRTAVVNQIRSLLLERGLTLPKGRRYVDHQLPRILEDGELRLSGCFRVLLAQLKIELDQLSARIEEMDRVIQKTAKENEDCQRLTEIPGVGPVTATALIAAVGNASAFQKGRNLAAWMGIVPREYSTGGKQKLLGISKRGNKYLRRLFIQGARSVLQQRDKQAPGLSEWLAQLLARTHQNVVVVALANKMVRMAWAVLCKNERYRAPVLAITT

SEQ ID NO: 93914 - protein, 443 aa, unidentified
MSFDRLKRTQRRKRLPGHKLKPSRATLFVQNSKPHLSMKPTYFLGIDAAKHKMRAALSNRSEHVLFEKDLSVQATGLRQLLAAIKRHVNDPEQLLVLIEATGLLHLNWSAALTKAGYAVAVINPLIARRLYTLQNSIRDNKSDPIDARGLCTIGLLHGEKLLVHYRFSLRPEQFTLQRAQSVRKALRSALTNLKKTYQSLMDLSFPELGGLLQLDGVGIRQLLIQAPTPAAIAGKRLSTLEKNWMVRTKAAALKALAADSMADPDLAAASGPALVALLQSVAAMEARLHALDQQIAKLACTSVDPQTKALIETIPGFGPVNAAKTLAWLPTEILHSGSNRKVAARLQAFMGNDPRLRQSGQWKGHTKMSKRGVEMLRTAFFQSAFSAAHNDPELRTYYQCKRAQGKTHEVALSHLMRILTRRLVAVLRSGKPYQSHYNLKNAA

SEQ ID NO: 93915 - protein, 387 aa, unidentified
MPQPNDLSRSLVALDQNSTIIAVVELSQSSWLVGGVVPGIERQPRKKLEPNPERLLGLLHRWRDEAVRAGRTITRIAVAFEAGRDGFWLARWLAARGIEAHVIHASSVAVSREHRRAKTDRLDTELLKRGFLGWLRGERGHCTMARVPTIAEEDAKRPNRERDCLVGERTRIVNRIKSTLARLGIRNFKPTLRKAAERLAAVHTPEGVPLPPNTLAELQRDMARLGFVVSQIQEIEKARQKRLEQHPETGPDAMVRRLVCIVGIGVETADMLVHEVLSRPMRDRRAVARYAGLTGSPDESGARRREQGLARAGNARVRRGMIQLAWRFLMFQNESALALWYRARTADSRSGTRKTMIVALARKLVIALWRFVTTGEPLEGVVLRPAS

SEQ ID NO: 93916 - protein, 343 aa, unidentified
MDYFAGLDVSVKDTSVCIVDDAGRIRREVKVASEPDALLAVLRNPAYHFKRIGLEAGPLSQWLFSALAEADLPVICVETRHMRAVLKARINKTDRNDARGIAQMMRVGLYRPVHVKTLRSQKLRMLLTHRKLLQAKAIAIENDLRASLRNFGLKVGVVGTVRFEARIKALVENLPDLEALVEPLLVVRRVLREQINILHRRLLAVVRDDEVCRRLMTVPGVGPVVALTYRATVDVPARFRKSKSVGAVFGLTPARDQSGERDRPGAISRCGDEMMRTTLYEAAQVMLLRSAKWSWLKAWAMKIARHRGMKKAIVALARRLAVIMHRIWTDGTEFRWTREAAAA

SEQ ID NO: 93917 - protein, 482 aa, unidentified
MKPKPQEKTKKATDHPRQQHWREMNRQQRREMMRNIQSEDISLEVVHPDAAGIDIGNESHYVAVPPSRNSQPVRRFGCTTAELKAMADWLEQCGIRTVAMQSTGVYWIAVYDVLEQAGLEVYLVNARETKNLPGRKTDVQESQWLMKLHTYGLLRNSFRPSQEIRMMRTYWRQRNDLVQSAGRHIQRMQKALTQMNIQLANVLSDVSGVTGQAIIKAILGGERDPHKLAAFRNPRVKASEEQIARSLEGNWQEDLLFVLKQEQDGYEFCEKQMAECDRQLNHYLKQRADRSHGAPLPEEKRKGRLKKKSGNKPQFDLRTGLFRMSGTDLTRVDGIDVITATTILSEAGWDMSKWVTEDHFVSWLRLCPDNRISGNKVIGKGRLPTNNRVTIALKMAASTLRLSDTYLGAQFRRFRTRLGAPVAIKAMAAKLARLVYRMLCYGMKYVDKGAALYQAQHRHLQIKQLNRKAASLGYQLIPVPAA

SEQ ID NO: 93918 - protein, 358 aa, unidentified
MQHGHIIALDTHCAFTVAAILTQAGELVRQRRLPTTIPALRQEIEQVPRPRHVVLEEGPLADWLVRELRPCADAVVACDPRRNAHIAKDGDKDDPIDAFKLGQLYRGNFVAAVHHPETLERSAFKQLVGLYHDRVRNMVRQANRVLAQLRRHGIFASKAELLSPPQRRVLLDGLQVKVLRAGVQILLADFDVGWMGVQRLKRMVTRAARQHEPIRRFVAVPGIKWIRAATFFAYVDIPWRFASKQALWRYLGIGLERRHSGSAAVQVGVPSAVTVCRPLKAMILGAAKSAIIGDNPFAERYKEWRYAGLSPRNAGRNVARRQAATLWGMFKNGGVYQPAWVGLGRAAVSEPMALKADG

SEQ ID NO: 93919 - protein, 344 aa, unidentified
MTVITIGIDLAKNVFQIHGVDENGKCQLKKRLKRSQMTTFFANMKPCLIGMEACAGAHHWARILIAQGHSVKLMPPQFVKPYVKTNKNDMADAEAICEAVSRPNMRFVSIKTSEQQSLLSVHRARTGFVKARTAQINQIRGLLAEFGIVLPQGAVAINRHVPELLEDADNGLPMSFRHLLSSLYKNIKQLSEHIETLEAAINEQFRQDELCKKIAAIPGVGVLTATAIVSTVGDGKGFKNGRQLAAWLGLVPLQHSSGGKNVLGRISKRGDVYIRTLLIHGARSVIVARKHKLLPGSWLSRLLTRRNKNVAAVALVNKNARMLWVLLTTDKEFSPDQTIGAVYM

SEQ ID NO: 93920 - protein, 416 aa, unidentified
MKTTTDYAALVALDWGDTTHSFAWQKTDDAKRHGGSLPATPEALHEWLGQLREACGGRRVALAIEAGRNGLLHALFEHAWLTVYPIHPATSARFRLAFAPSGAKDDGPDAEVLLELLRQHREKLTAFLPDTPATRELAALVEQRRGAVDQRTGFGNQLIALLKHVFPQALTLIGDDAVAPLAIAFLRRFPSLEAAQKAGAARLRDFYRRHNVRSSERIEERVARVRQARAFTRDEAILRPAVLELTRLLDVIELMTRHILAYDQEIARVFAAHPKAAIFAALPGAGAVLAPRLLTLLGERTERYPDAASLQKYAGVAPVRERSQGRLWVHWRWAAPKFLRQSLVEWAGQTVPRCAWAKDYYLRQKAAGKGHHAILRALAFKWVRILWRCWKDNVPYDDARYLAALAKRRSAPLTAA

SEQ ID NO: 93921 - protein, 409 aa, unidentified
MNQEKYIGMDVHQATISVAVMDSSGKLIMECILETKAATILEFIAGLRGTLSVTFEEGTSAAWLHDLLKPHVSRVVVCDPRRNALLKDGSKSDRIDARKLAELLHANKLHAVYHGEHGVRTLKELGRSYLTITQDLTRVMSRIKALYRSWAIPCGGATVYAPRHRDEWLAKIPHPGVRLRAELLYQQLDVLQPVRQEARRDLLVESHKHHAVKLLRQIPSIGPIRAALLVALLQTPHRFRTKRQLWAYSGFAVEVDDSGEYRFVRGKLVRNRERITVRGLNHNHNHDLKNLFKGAALSASSRPGPLRDFYVALVEKGMRPTMARLTPGTKDGRHYINHLEEGSGFRRQTIESASSLSVSRNEAFPSPTILSGGGRSGSRDARFEVSISQNDRPCVLRHRVTHYTLCPLG

SEQ ID NO: 93922 - protein, 411 aa, unidentified
MHNRQNYLYVGVDLHKEHHTAVIINCWQEKLGEIQFDNKPSAFSKFLLEVETYVSAGITVVFGLEDVGGYGRALAKYLVDHEQVVKEVNPALSFLERKSHVTTQKSDSWDAECVARILINKLNQLPDAKPNDLFWSIQQLVSRRNALVKAQSALKNQLHIQLNHHYPSYKKFFSELDGKTALAFWQQYPSPSCLEGVSIKKLTAFLLDVSNNTCSVKKASDILKLVKEDGQTMKEYQEMRNFLVRSIVREIEFKKKEMKYIERELKQLVNLLDYQLETMPGIELVTASALIAEIGDVRRFPNANKLARFAGIAPVYFGSGGKGKTHKSKQGNRALHALFYNLAVQQVQVAKGSKKPRNPVFHAYYQKKLKEGKTKGQALVCIMRRLVNIVYGMMKYKTAYELPVVEEKEVV

SEQ ID NO: 93923 - protein, 415 aa, unidentified
MHTFKELTHFAGFDWAKDHHDAVILDRQGATVESITFAHTAQGWAQWREMIKAYPALGVAIETNQGAAVDQLLQSQVTVYPMHPKAAERYRDRHVPSGSKTDQADAWCFADALRVDGQHWRPLSPEDPLTEELRLLCQDEVELITQRTALVNQIQQALCEYYPAALEAFDDWTAAFTWDFVVAFPTSEELVKAGKRKWEKFLHSHKLWRPGTAEKRLEIFARANQFCGTAAVTRAKSRLAVSTAKVLQSLQKQLEEYRSAIEKLFAQHPDHDLFGSLPGAGDKLAPRLLSEIGTHRPKYPDPQSLQCVAGTAPISYVSGQVRRAEIRWHCNRHLRHAVHLWSDCSRKFCAWAQTYYQAQREKGKSHACALRCLGQRWLKILWKMWQSRQRYDEAIHALNQQKHGSWVLQLKPKAT

SEQ ID NO: 93924 - protein, 475 aa, unidentified
MIKSVGIDFHQGKHIVRCLDEKAQLCDSFNFETTAEGLAILEERVFKDGFNPVIVFEPAGLNWLILAICLRAHHPECRLVRAKGQKMAALRRYLRGSSKSDRLDALTLAKMPFIDPEQLDEVYLPPAKIYALQRLARQRKRLESEIGGRKMRIGSIVDGYLPRVRQAFSDSWSCQARAFLRCHLNPMAVVRDGEKALYSFLAKARHGNKADVLESHQVYVACESAAVLYQLSSPAGVVNDEFFGVLQEEIARELKLMEAEEAESEAVARRMQELYRELHPSDNLRTIPGVGEITAPVFLSTVGDPGRFHNQSAFANWTGVVPRARQSSESEAKGLRMTKAGPAVMKWALFQAGDIGRRFDPQLADVYHREMVYHGKNHKQAMGAVMSHLGARVLRVLQDDRPYQIRNNEGKPISRAEARKLILLNYQVPENIRRERRRRNPAKRSLLNTGGMAVRRTNEAAVAPQPVKIAAIPEN

SEQ ID NO: 93925 - protein, 477 aa, unidentified
MQEKKHIGLDLGVKSKSKVYIVDQAGEKVRPGFYIQTNPQELDYMTKQALKGTSNEASLDLIMEPTNVAWFKVAVYIRREYPQVKIYRVKSEKVQDLRKFYRKHTKTDSLDARALAKMPVVDFDSLEEVYIRPKDILALNTRCKQRARLVEEATAKRNSISDQIELGFPHLVDCFSSKFTTPFIRFCERYANPFKVRRLGKEKLLKILIKLGFRQDVSTLAENIYQRTEEACILFGDEDSIIDYDDFQDRIRSEFRIFKALQKEIDKVTKKVQDPYKKCFPEKRLNSIPGIADVLGSVITSTIGNADRFSSGRSLVGYMGYYPKEDSSGLSSKKGLRMTKAGPNIAKGSLYLAANIGRLIDPQLGKIYYEQMVVRGNPHTKAVCRVVTALIPRILRVMKEDRDYVICDLEGNPISKKEGRKIVKEQFFVPEEVRQRLSNRKRMPLNKKGRTKPQYVRGSKAPQIRVDSSRRIVFSLN

SEQ ID NO: 93926 - protein, 358 aa, unidentified
MEMIGVDLHARQQTIAMLDTETGELVEKTLEHEGEKVREFYAALPGPVLVGIEATGSMPWFLKLMEELKIDCQVGHPAEVRKAETRQQKHDRRDARLLLKLLAENRFPSIWMPSTEQRDLRTLLRHRDQWVRMRTRVQNTLQALALSNGLQRGHGLWSQAGQQALEVLQLAPYTGQRRAALLRLYLQLQKSIDDLDQQVSEQARQRPQARRLMTHPGVGPVTALATEVFLGYTMRFADGKAVAIYIGMIPSEHSSGSRQRLGALSKQGNALLRFLWGEAAMQAVGRDPELKRFYRRKLVQKGLGKARIAAARKLGIRLWIMLRDQIDYKEFCRRGQLRQKSGAARVGMPAYNNGSALQ

SEQ ID NO: 93927 - protein, 482 aa, unidentified
MARRKLSTFERLQQGKLNRKERRELTRRLHSTDPGLQIIHPDAAGIDIGNESHFAAIPPDRDGMPIREFGSWTADLHEMANWLKEHRITTVALQSTGVYWIPVVEVLEKAGLEVYLVNARGTKNLPGRKTDVQECEWIRKLHTYGLLRNSFRPPEEIRAVRTIWRQRDRWVQESGRAVQHMQKALTKMNVQLANTITDISGWTGQAIVRAIVAGKRDPWELAELRDRRIAATKEEIAHSLQGNWQEDVIFELRQSVEAYDFFQKQMAACDHELIQYMAAIEKREITPKQDLPKEATPLPSPKKARRSKTRRKNQPCFDLATELERVMGVDLTRIDGIDVMTAQVIYSEIGSDFGAFRDENHLASWLMLAPKRDISGGKVIRNVRAFGRNRVANALRLAAASLSRSDSYLGARYRRLRSRLDGPVAVKAMARHLACLVYRMVTRGQAYVDHGAAHYEAKRQDRERRALERKAADLGLKLVPAA

SEQ ID NO: 93928 - protein, 355 aa, unidentified
MNSEKYIGLDVHQATIVVAVMDSSGKLVMESILETKAATILQFFAGLRGILAVTFEEGTWSAWLYDLLHSRVDKLVVCNPRKNALLKDGNKSDRIDARKLAELLRGNQLKPVYHGETGVRMLRELSRSYLTIVKDLSRVMNRLKAVYRSWAIPCAGRDVYYRRHRAQWLAKIREAGVRRRAERLYEQLDMLQHLRQQARRELLAESRRHTITGKLRQIPYLGPIRVALAVALIQTPHRFRTKRQLWAYSGLALETRTSAEYRFVEGQVRRSKKLLSIRGLNKDHNHDLKGLFKGAATMASVRPGPFQDFYTAALAKGIKPTMARLTLARKIAAITLTLWKKGENFDAEKLKSQAA

SEQ ID NO: 93929 - protein, 328 aa, unidentified
MIQLGIDVGKSKIDLCLRPDGPKGRKKTKILTNGPDVAVSVLEWLAKQKVAPTDVQVVMESTGTYHEHLAYGLYERAVRVVIANPARVRAFAQGMGILTKNDTVDADVLARYGAMRQPDVWQPPSPAIHELKALLSRRDALVHDVGREKSRLEKLLSTRCSLLVEASVRKMLQVLNNELQVVQALIDNHIDNHPDLKRDMEYLTSIKGIGSAVGSTMLVVLRGNHFISAEQAASWVGVVPKEKRSGSSVRGRTRLSKNGPPEVRAKLFMAAIVAVKHNPLLKQFYDRLLAAGKAKMSALGGVMRKLVHICYGVVMKQQKYDENYATAA

SEQ ID NO: 93930 - protein, 318 aa, unidentified
MGTVMNQSSSVYIGIDVSGSALDVAIHDTTEHFRVDNEPVAIEQLVQRLIALSPTLIVMEATGKLELAVLRALCEAGLPAVAVNPRQVRDFARATGSRAKTDRIDAFAIAHFAAVLKPVVRPLTDVQTGQLQALLLRRAQLIEMLVAEKARLERAHAAARDSLNDHIKWLKQQIKVADNDIDSFLRSSPAWRQKEDLLRSVPGIGPGAAATLIAFLPQLGSLNRREIAALTGVAPFNSDSGRHVGKRRIQGGRAVVRRALYMACVPALRFNPTIRAFYDRLRKAGKPFKVAITACIRKLVVTLNAMVRNATPWSSSIN

SEQ ID NO: 93931 - protein, 390 aa, unidentified
MDVLYQSCAGIDIHQANIVVCILHGPLTSTRPKREMATFDTTPKGLRACHDFLSQFHVEAVGMESTGVYWRPVWHALCDDFELILAQPAHMKAIPGQKTDKKDAHWIAKLTRIGLLPRSFVPDETIQELRELTRQRKHYVESRNRETNRIHKILQSGGIKLTTYIEDIMGLSGRNLLQLLVDRTPITPRIVHQSVYTSLKKKVPQLLEALDGYFSDHHRFMLKQSLEIYDFYQKQIELLEERINVYLSQYENHVEILDSIPGIDVITASVIISEVGVDMSQFPTAGHLASWAGLCPGNNESAGKKRSTKIRHGNSYLKKCLCQAAFAVKKQKGSPLADRFYQIQSRCGSQKATIALAHQLLKIAYILLKEQITYPEFLAQKKTTRDELVA

SEQ ID NO: 93932 - protein, 391 aa, unidentified
MSKKTAATSTIEITSSAPTLMLALELGEEKWKLGFSSAFGQLPLERNIAARGTKALLTQIERAKKKLDLPADTRVVSCYEAGREGFWLHRFLVANGVENLIVDSSNIEVPQKRRRAKTDRLDLAGLCDLLARHVAGSAKPVWSVVRVPTIEEEDRRHLHRELKTAKQDRTRVSNRIKSLLANNGLTLAGWKDLSDRLERLRLWDGNPLPSSLQARLQRYARDYDFYTERIRELEAQRRRLMREQPTGDVAVAKAAQLFRLKGVGINSAWLYSMELFSWRTFRNGKEVGSLAGLTPTPKDSGKRYREQGIGKDGSRHIRGSAIELAWGWLRFQPESDLSKWYERRFGSGSKRIRKIGIVALARKLLVALWRFVETGVVPEGAGLKTDLRIRW

SEQ ID NO: 93933 - protein, 408 aa, unidentified
MNAVGIDVSKGKSMVAALRPMGEVALLPQEFLHTEVGLEQMAYAIIALGEDTRVVMEATGRYHEPVAAALHEYGIYVSVLNPLFIKQSGGGSIRKVKTDKADAMKIAKYGLDNWVDLREYTPMDTVRQQLKLCSRQYNLYMKTVVSLQNNLISLTDKTFPGVNELFSSPERADGHQKWVDFVMTFWHCDCICRVSEKAFTERYQKWCKRKGYHFSTEKALDLYAGSCGHFTTLPKNDNIKLLITTAAQQLLAGKMTLAALRAEMTRLAMQLPEYDTVRAMYGVGQTTAAQLMAEIGDVRRFPRRSSIVGFAGVDPGVDDSGKHIAKSVPTTKRGSPHLRKTLYQIVCTYLRKAPADEPVYQFLDKKRAEGKPYFVYMTAAQNKFLRIYYARVKECLEAFDAQQDIAQS

SEQ ID NO: 93934 - protein, 335 aa, unidentified
MEGEINKSCGLDIHKRFLIATILSRSGDKQLQRFDRDDDGILNLKNWVTSEKCDVVACESTSDFWVPIYDSLINHLPVIVGNARDMKAFTHKKTDKIDSEFIAKLALNKMVQPSRVFPKNHREYRSHVRLRLTLVRKRTDIKNEAHAILSSEMFHLNDVLTDIFGKNGRAILSGISSGKNVDQIIESLSPNVRKKAVQIREVLDREISQSAANRLQICLNLIKHLDEEIETLEKEIFNYAYKKHNKEMEILMSVPGIGEIGAATLIAEINYFNDFSSGDKLASWLGLVPNVYQSADKYHNGRITKRGSKVARWILTQIAQAAARKKNSKLKEFFN

SEQ ID NO: 93935 - protein, 355 aa, unidentified
MNVYTGIHSYYCGIDLHARTMYVCVLDKDGQKVYHKNHPCTPEHFLKAIAPFREDIVVGVECIFCWYWIADLCQAEGIDFVLGHALYMKAIHGVKTKNDRIDSLKIARLIRGGNFPLAYVYPPGMRATRDLMRRRNHFVRKRAELLAHIQNTTMQYNLAPLGTLSRPHHRRDKDIVGHFPDPVVQLIVETDLQLIDHYDPIIKNLDNQILALAKGHDPRSLHLLRSIHGVGEVLSLTMLYEIHTIDRFPCRGEFCSYARLVKGQKSSAGKNYGTTGGRIGNAHLRWAFSEAAVLFLRKNKEAERYYNRLINRHGKSKALRIVAKRLGIAVYYMLRRQQPFNINMFLQSHMASEKA

SEQ ID NO: 93936 - protein, 408 aa, unidentified
MTQYYLGVDWADEFHQVWVSDPDGKKVIEKKVVENVEGLAEFGRWLDERRAQQIELWASIEKPHGRIVDFLLDHGVVVYPVNPKALDRARDRFRMSQSKSDGFDAYVLAQFLRTDHGHLRALKPNSDPAQELKLLTRDQQRLVRQKTRLLNQLTTTLKEYYPQPLEVFSDLESNIALDFLKQYPTPHDLSKLTRRQWNRFAKRDHHLGEERCKELWEKLNQPQLEVPEHVVRAKARLLEVVVVQLKTLRDAVESYNERVRSFFACMPAAELVKALPGAKTGTIVATLWAELGDAKDRWESFRHLQAEAGVVPVTKASGKSRVVQFRFSCNKVMRHAAYWLAFVSLNRTEWANHYYRDQRAKGHSHHQALRALGAKWLKIIFVMWRDHKPYDENYHLANIARQQMRQAA

SEQ ID NO: 93937 - protein, 351 aa, unidentified
MEKIGKTSKAVKVLFMGIDVHERTYSVSLFFENEELLNTTYPSEVKHLKKLLERYSGFKVCAVYEAGPFGYTLHDWLEKQGVEVMVAAPSKMPVLPGERVKTDKRDARQLARLLSGGLLRGVTVPDKQKREDRELLRTRSQMVNQRRRIYQQIQSRLRMHGMSIRCRLIVTRKNREQILNYPGLGSSLRAAFEYSLDCYDDYTEKLQRIRRAVLALSTTENYQRGVKILTGIPGVGVLTALSFLLELPDMHKFEDNEKVGSFLGLTCSEHSSGESRHQGRITRCGNAQMRWLLVQCSWKAIDGDIVMKKCYERIKRRRGGKRAIVAVARKLAGRMRTVLLKNEAYQVGLVQ

SEQ ID NO: 93938 - protein, 472 aa, unidentified
MKTKRTYQASRVQQVQVAELLPLLVAGCIVALDVAKQRFVVALATMAGEVVKLFRFDHPTETMAFVRVVEALRAGVDEGKVVAAMEPTGTYGDAVRIQLMRAGVPVQMVSPKRTHDSQELFDGVRSLHDPKSAVLVAKLCAMGLSTPWSAPPPTRVRLRALVDLRQHEQRHEEMSFGRLEGVLVRHWPEFGQWMDVREQRSALRLLSAYPSPARVAQAPEEVTLLLRRASRSQLSAQAVAGVIAGACATVGVPMVPEEEQFVRTLAMQLSAASQSTDALDEQMREMAKEDEVFARLSSWMGVYTAAVIVTRVDPRQYTSARQLEKACGLNLREKSSGEKAGRITITKRGSGLVRQVLYLFALRMLKESAAVRAWYKRRRGYTEESKQRAVVAVMRKLVRALFHVARGGVFDASKLFDLRRLELEAEQAATQGAAATPEAAATPKAPTARTTPRPIARGRKRARVSSAAHASA

SEQ ID NO: 93939 - protein, 316 aa, unidentified
MEQVKSSTLNGGVDVGKYRLDGAIEGISSQIQTSNDPKGIAELTGWMVEHGVGRVGLEATGGYERKLRAALEAAGIEVVVHQPNEVKLYGRLVRQKAKTDKTDARLIASATAAIRRQPKASDPLLTELSERLTAYEHITDMLMRLKTFKEGLSLSDLGEMVDEQIAHLTGLKRALALELVKAIKADPKLKARYDLLVSLPGVGPIVAASLVIRMPELGSMQRGQAASLIGVAPHARDSGKHTGDRFTSGGRSRPRRMLYLAALVARRYDKNLNSFADKLRTAGKPPKLIIVAIMRKLIEAANLVLKRAQPWAKQPA

SEQ ID NO: 93940 - protein, 359 aa, unidentified
MMNVGIDVHKKRCQVCLKDDRGRMVEELTVPNSTEGAFQLAKLLEGYEEARIVLESTGNLWVRIYDTLNQQPGFKVVLANPNKTRIIAEAKIKNDRMDARVLADLVRADLVAESYVPSKEIREQRALLRQRRALVEDTVTIKNRIHNLLDKYDLRSDLTDIFGKQGREWLRSLQLPSIERTILDVNLKQLESLEALIETLTVKIAKEAINQPDVKLLMGFTGIDYYSAMLLVNEIGPIDRFPSAKKLVSYAGLAPGIRQSASHTVHGRITRDGNKYIRWILIEAAQNAYRFDPKLRGFYLRVAAKRGHQKAIAAVARKMLVSIYHVLKRQEVYHGQRDDLLERKIRRLQRIVDSSLQAR

SEQ ID NO: 93941 - protein, 457 aa, unidentified
MAKRNSKARKSKINVNNLPPHLRHINLNAAGIDIGSDRHLVAVPEGSDEVSVRQFNAFTSDLHEIAGWLKKCRVTTVAMESTGVYWIPLFEVLEQRGFEVKLVDARHVKNVSGRKSDVLDCQWLQQLHTYGLLQGAFRPPDEVCVLRSYARQKEMLTQASSMHIQHMQKALQQMNLLLHNVVSDITGVTGMKIIKAILAGERDPNVLALNRQEGCRNSKETIAKSLVGNFRDEHVFALKQGVELYETYQTKIAECEQALIKHLGTQPDVTDDQPPDSGKHVRARERMRADVDVREKLFKMTGVDLFAIPGLAADTLLTMASEVGFDMTPWKSEKHFTSWLGLCPGTKTSGGKALSRRTKRNANRAAQAFRMAASSLARSQTALGAFYRRIRSRTDGRRAITATAHKIARIYYSMLTKGTSYVEAGQQAYEQMYKERRINALKKQAHSLGYQLQPSAS

SEQ ID NO: 93942 - protein, 482 aa, unidentified
MKAKPPEKIQKATNPSTRSHWNEMNRKQRREMMRQIQSEDISLEVLHPDAAGIDIGNESHYVAVPPSRDNQPVRCFGCTTAELRAMADWLKQCEIRTVAMQSTGVYWIAVYDILEQSGLEVYLVNARETKNLPGRKSDVQESQWLMKLHTYGLLRNSFRPSQEIRTMRTYWRQRNDLVQSAGRHVQRMQKALTQMNIQLANVLSDVSGVTGQAIIKAILGGQRDPHKLAEFRHPRVRASEEEIARSLEGHWQEDLLFVLQQEQDGYEFCQKQMAECDRQLNHYLGQREDRSHGAPLPEEKRKGRRKKKSGNKPQFDLRIGLFRMSGTDLSRIDSIDVMTATTILSEVGWDMSKWETEDHFVSWLRLSPDNRISGNRVIGKGRLPTNNRVTIALKMAASSLRLSDTYLGAQFRRFRTRLGAPVAIKAMAAKLARLVYRMLRYGMKYVDKGAATYQEQHRHLQIKQLKWKAATLGYQLIGVPAA

SEQ ID NO: 93943 - protein, 444 aa, unidentified
MISKAYRATRVNEVDWDRLARGKEGVDLTLGVDVGKHTLWPVCRWADGRFERPWRVQNPAEIPTLLALVQRMSVGRKLVVALESSGTYGDALRQALADAGISVQRVSNKASHDYAEVFDGVPSQHDGKDAAVIAELAALGKAQPWAYQPASPWEQELEYWVEWMVAHRQLLATWQGRWEGLLARHWPEATPVLKLSSGTLLRVLSHYGDPQALAADPEAAQRLARWGRAFLSPEKIEHLLAGAGSSVGVRLGEWQRRQIQDYAQQALAARREAERAQRHLRRLAKGHAVLQAQGKVVGVPTACVLWASVGDPRKDHAAAADRKAMGLNLVERSSGSYQGRLRISKRGSARTRQRLYFAALRLIQKSGVRPWYEAKKAHDEDDAWRVIVAVMRKLAVALYHVGVHDEEFQPRRLFGRIWGRHGSPAESRSGTRDQREAEGVAAQG

SEQ ID NO: 93944 - protein, 341 aa, unidentified
MKKALYCGIDLHSTNGMYVVTDGTDKIVLKKRIPNDLPKILSTLEPYRNQLVTVVVESTYNWYWLVDGLMEAGYPVKLANPAAIEQYNGIKQANDLTDAAFLAHLARLDILPTGYIYPKEERPVRDLLRRRTLLVRQRTALILSLQNLFTRQAALNLSWRKIRKLTRPQRMDALNDQDYLLFVTAAQVELIEQFNTHIDQFEKKVLERAKLKAAYEPLLSIPGVGVILGLTIMLETGDITRFLKVGNFTSYCRCVRAKRVSNGKSKGTNNSKNGNPHLAWAFVEVVHHAIRTCPQAKRFYDRKKSKRNGALATKALAAKWSKAAYYVMKTQRAFDLKRVFG

SEQ ID NO: 93945 - protein, 371 aa, unidentified
MEHTRFIGLDIHKERISVAVAESGRSGAVEYLGEIANEPGAISKLCDRLRRPGKPLAFCYEAGPCGYGIHRQLTRLGHQCDVVAPSLIPTKAGDRVKTNRRDATMLARLHRAGELTPVWVPDADHEAMRDLIRLRSVIRQIVTRARQHLQGFLLRHGRKHGRGTAWRMAYRRWLSTLAFEHPAQQIALQDYVDAVMDAERRLKRVEEQVFGLLPDWNLRLVVDGLQAMRGIALINAVVLVTEVGDFTRFSNPRQLMAYFGLVPGERSSGETVRRGAITKTGNAHVRRALVEGAWAYRMKARIGRHKVDRIEALPKVVRDIGWKAQVRLCTRYRRLRARGKTANVVNVAIAREMVGFIWSIACTIQSAPRAA

SEQ ID NO: 93946 - protein, 416 aa, unidentified
MNAAGIDVSSRKSTVAVLRPFGEVVKLPFDVRHSAEDLAALAAQLKSIDGETRVVMEHTGRYYESIAKVLHEAGLYVSAVNPLLIKEYGNNSLRKVKTDKADAMKIAKYALDNWTELRDYTPMDTIRYELKTLNRQFQLASKQKTATANNLIALQEQSFPGIRKPFDSPVRSDGTQKWVDFTHDFWHIDCVRSGSQNAFAERYRKWCKRNRYQFSMEKATEVYALAKSSVVLVQKTSVTKTLVQEAANQLTAISRSVETYRSEMNKLASQLPEYPVVMEMYGVGESLGPQLMAEIGDVRRFERKQSLVAFAGIDPAPSESGDYCSRSNRTTKRGSPYLRKTLFNIMKVHLQRAPADEPVFQFLDKKRAEGKPYYVYMTAAGNKFLRRYYGKVMAYFSTLEGLPPVDMDSTGLHHAE

SEQ ID NO: 93947 - protein, 370 aa, unidentified
MKKVATLFVGLDVHKDSISVAHVIGDRRADVTYVGRIGTRGADIDRLVSRLGDKAERLIVAYEAGPCGYVLHRHLTRRGVRCLVVAPSLIPRKPGDRVKTDRRDAVMLARLLRSGDLESVYVPAVEDEALRDLCRAREAAVLTLKAAKYRLQSFLLRLGLQYTGRATWNDAHLRYLARVVCPTPAQQIVFQEALSAVDEQVERLKRIEAQLAELVPAWRLAPVVRALQALRGVQQTVAVTVVAELGDITRFDNPRQLAAFLGLVPSEDSTGDSRRLGPITKAGNGHARRVLIEGAWAYQYPAKVSEHIRKRLEGLPKPVQAIAWKAQVRLCKRFRRLVAKGKHPNVVVTAIARELAAFMWAIAREVPITV

SEQ ID NO: 93948 - protein, 397 aa, unidentified
MIAVGIDISKAKSTVAVIDSDGTVLASPFTMAHTQPEMEAFVTYLKGLGEPTTILMEYTGHYHYPVLKKLQDEGFPVCIVNPYQMKKYGDVEIHKAKTDKKDALRIAAYALEKSYKLVPYSSMEQKYEDLKFLSRQYSQRITYVAKLKVQLIALLDQTMPGITRILPLNSRNPEKCALLLFIKRFKSFDEIHRIGKARFLASYDVLAKKASERSASSKGLSIYELAVDSITTRGEGPYIWLSQNQCVDLLSATQNAADEIISQMRNIAETIPEYKVLRAMRGVGDRLGPIILAEIGDIRRFHSGKALNSYAGNDAPPYQSGQFESRNRHISKRGSSALRKACYEVMQALKLTKPQDDPVYLFMLKKEQEGKPFNVAKMAGVNKFLRIYYARAMELYK

SEQ ID NO: 93949 - protein, 343 aa, unidentified
MNFKKVSNWHEFANSPAIGVDVCKKDLDLVGLCGSTSLCRRISNTAQAIGEFAKALVQQEFKGTILCEATSHYHLVLTVMFCEAGLDIRVINPLLSSKHAKSAIRKTKTDRVDAHVLATMVLTEPNLPPPLKLTRSHCLVRHTLGLIHSQEQHLQGMKRSLDSYQERLSQLNLEAGNAYKQTVEVFNQFQSCHEHLLSELESYLLETQPDRQEAIERVCAVPGITRRNAALFTFVLDPTVSSAKSWIAYAGLDVAIKESGTWRGHGKITKRGPSWLRKRLFQSAWGTTMTNPQGRLYYDALKAKGRKHKEALVIIAKKLLSIMHTLIVHQKTFDYSKAFQVTP

SEQ ID NO: 93950 - protein, 354 aa, unidentified
MRILGKEEKGSVAGKRVYVGIDVHKENWQVTVRTEGEEIFNGRIPGQYPSLKKLLERYEGSLMKVAYEAGPFGFWLSDKLSEDNIEVMVVPPSLIPVESGNRVKTDIRDSRKLAKLLESNMLKQVYVLTPEEREHRDLLRTRRQIVDHRKDVARQIKSKLLFYGIVSPFPATHYWSLGYIEWLKALRFDTYCLKESFDLLIDLYEYLTRQIARINKKVALLCRDKKYHDRIKLLCTAPGIGRLTAIEILVELQDISRFKNAEELASYIGLTPSEYSTGEKTRQGRITRCGNKRVRTYLVESTWMLITKDPAIRLKYLKLKAARGGKRATIAIARKFLIVIRRMLLDNVPYRMAA

SEQ ID NO: 93951 - protein, 351 aa, unidentified
MEFLTINADYYCGIDLHGRTMYTTVMDERGDIFFRRNMPNKFPLFFEFMKPFLPNLAVGVESTYNWYWLADGCQEHHISFYLGHALYMKAVRGNKKKMDKIDSKTIANLMRTNLFPPAYAYPREMRATRDLLRRRSYYVALRAGANTHIQSTFSQQAILDIQGGDVKRKKSRRALIERPENQDLALSIECDLDLMDVTDAIIRKLEKQILQQARYHNHQALEILITLPGVGNILALTALYEIHEIGRFKSPQNFSSYCRVVKCNRESNGKITDTGNQKIGNPYLKWVMTQIINKAQQQSPAIAKYFEKLKAKHGPRKARGIMAHKFAVTIYYMLKNNQAFDEEKFLQSKIK

SEQ ID NO: 93952 - protein, 335 aa, unidentified
MQVYGIDLSKEKFDVSFIDAKGKEKNREVKNAVVSISRFLSSVSEDSILCAEHTGVYGDILVYLCNQMNISIALVPGYTIKHSLGLLKGKSDPLDSKRIREYGERFSDKLEYAKYAEESIAELKQLYTLRNQLVKQRRALRTVDTGRGHLPMQSISVHNHIHAVFSSLDNEITSIEDEIEALIKANQDLNENYELAKSVFGIGPVIATDLLIKTGNFKTIDTHRKAASYAGVCPFPNTSGKMVGKSKTSPHADKKLKSLLYMGAKAVVKNNKEFRLYYQKKQLEGKPHYVIMNNVSNKLLRIVFSVVINKTPYTSDHVCLDPREKNNNSSTKKVA

SEQ ID NO: 93953 - protein, 355 aa, unidentified
MKIIGCDFHTRQQQIEMLDRETGEIVQLRLEHHNGEAKRFYQQLSGAVIVGIEATGYTRWFEQMLAELGHELWVGDAAKIRASVVRKQKNDERDAAHILELLVQDRFPRIWMPTPAERDLRQLVLHRVKLVQIRTKVMNQLQALAMGQGLCRRKKLWSKVGRAELEGLPLGPWASRRRKELLELLEQLDKPIAELLQAAQEQAAAHPAAARLMTHPGVGPLTSLSFVLTIGEVERFAHSRQVSSYLGLDPRLDCSASRLRMGAISKQGSSTTRWLLVEAGQTAARKDPQLRRLYQRLKFRRGSQIAKVAVARRLAVRLYWMLRSQANYQDLVAQLVRMRGSSGSAVMEAVGPSRG

SEQ ID NO: 93954 - protein, 343 aa, unidentified
MQVAIGIDTHKGSLAAAAVDALGRVLGAREFTNDPTGHRSLLRWVREQAQPRTIGIEGSLSYGSAAARMLLGHAEDVREVAPSLTHLERRRRSKGKSDPVDAVAIARVVAADETLPSARRTTLLVDLKLLVDYRDQLVHARTQVANRVHADLVIIRPGYEQVVPNLRAKRHVAKARSLLSRDRSVQAELVRRRLGEILRLEAQVAEADRRIADKLAEADTTLTQIPGVGPFIAAKILGEVGEISRIRSKASFAMLSGTAPLIASSGQTHRHRLNRRGNRQLNWALHYVALVQSRTSPEAKAYLVRQREAGKSHKEAMRCLKRHLSNVVYRHLLLDARRLEQAA

SEQ ID NO: 93955 - protein, 348 aa, unidentified
MEITTIGLDLAKRVFQVHGVDAAGGVVIRKALRRAQVLPFFAKLPPCLVGIEACGTSHHWARELIRLGHEARLMPPAYVKPYVKRGKTDAADAEAICEAVTRPTMRFVAVKSRERQAALSMHRARNLLVKQRTQLVNMMRGLLAEFGVDIPQGLERALLMARQVVDGAAPDVPAEAVRIIGMLSQQALDTRARLREIDRSLLALLRTDDVARRLATIPGIGPVGATALAAAVTDPGQFRSGRQFAAWLGLTPRQNSSGGKERLGRITKMGDKYLRKLLVVGATSLVRRARRKPESVNPRFADLLARKPVRVATVAMANKTARIVWATMTRGEVYQAFHMPILASSTEG

SEQ ID NO: 93956 - protein, 427 aa, unidentified
MNHTANSNCPSAPAQPVAPPEVWIGLDWGDAQHAYALQDRAGQTQEGTLTQSAESLHGWLRELEKRYGARPVVLAIEASRGPVIHALVQYPWLTVYPINPVTSARYRKAFTPSGAADDLPDARLLLELVRDHAAKLRPLQPQDPQTLKLTGLVETRRDLVDRKKQVLNQLCGLIKSYYPQALKLVGNLNTPMAWAFLDRWPDLLSLKVTKPGVIKAFYYTHNLRRPELLKKRLEFIGQAEALTTEEARVSVAVLHLRALLDQARALHKHIALLEKEIKTSFAAHPEAGLFRNLPGAGPHLAPRLCVAFGTQRDLYPEPASLQKLAGVAPVREKSGNSLWTHWRWLAPKFQRQTFVEWAGQTVLYSAWAKHYYERMRAKGKDHHKILRALAFKWIRILWKCWQTRVPYAEDRYLKQLRHRKSPNALAA

SEQ ID NO: 93957 - protein, 320 aa, unidentified
MRNAVGLDISQNTFDAAAIVNGQCKQALFDNSINGFESFKAWLDGFDCELHICMEATGNYFEDVADYIGQFYTVSVINPYKISEYGKSRFHRTKTDKQDARLIAEYCHTAMLKDLPARQKISIGHYRLKRLLALYEQLKTQKTAQKNRLKVAKDDFVRKIHQAQIQELDQHIQQVEAEIQAITNSNQDLKAVSDRLQTIPAIGKLTAAILTNYLLSGDFKTANQFTAFAGLNPQQKESGTSVKGRSSMTRYGNRRLKSALFMPAMVALNRSYFPDFVKRLKAKNKPKMLILGALMRKLLVVAYYVYKTQKTYNPERYKPT

SEQ ID NO: 93958 - protein, 345 aa, unidentified
MKITTVGIDLAKNLFQVHAVDERGRAVLRKQLRRDQMARFFANLLPCLIGMEACASAHHWARTLQKFGHTVRLMAPQFVKPYVKTNKNDVADAEAICEAVSRPNMRFVPIKSVEQQAVLSLHRVRQGFVRARTAQGNQIRGLLGEAGLIIPKGIVNVAKRVPALLEDAGDEVPASFRQLIQRLTEHLKELDRQVDELETQIKAWHRGSKLSCKLEKIPGIGPLGASALVASIADAKSFDNGRQLSAWLGLVPRQDSSGGKPKLLGISKRGDVYLRTLLIHGARSAILAAQRKALNTNVWLASLLNRRHPNIAAVALANKNARTVWALLAHGREFRADYAPEASAA

SEQ ID NO: 93959 - protein, 416 aa, unidentified
MYYVGIDWADENHQVFITDDSAQRLSAFSIKNSRSGVEELFERIRYFVKDQKQALFALETSKGLLIDSILDAGYTVYPINPKSVDRYRDRYKVSGHKSDDFDAMVLANILRTDRHNYRPILPDSPITRELKILTRECCSLIRLKTMLSNQLTSCLKDYYPVALELFCKLDQPITLLFLKNFPTYQQAKQVSLPQWGKFLSKHHYRVGVKKKANEIYLKLQEPQFNVEPFLANAKARYTLALVEQLQLLLAQIKSFENKIEQLLKQHTDSEIFLSLPGAGITLAARMVSEFGDNRERYKKVSSVQAEAGTAPITESSGNWKFVHFRSACRKSFRNTMHQFAFCSIKESSWAKQRYQQYVASGKKHTQSIRCLANAWLEIIFPMWKNYMPYSEQRHLLKYVKEQKPVNYSRNLNYLSV

SEQ ID NO: 93960 - protein, 428 aa, unidentified
MKWLEAKRQIYDGELRTMNNVAGVDVSKGKSMVSVLRPFGEVVAKPFPVGHTGSELKELANYLKSLAGETRVVMEHTGRYYEPVARFLHEEGIFISAVNPKLIKDYGNNTLRKVKTDKADAQKIARYGLDNWAELRQHTLMDTIRMQLKTLNRQQGLYSKTKTMMKNNLIALLDQIYPDVNDLFDSPVREDGSQKWVDFAATFWHVDCVRTMSLTAFTERYRKWCKQHGYNFSQNRAVEIHAGAKDLIAMLPKAPLTKTMVRQAIDALNAVSKSLERLKLEMRTLAAQLPEHPIVMAMYGVGDSLGPQLMAELGDVTRFTHRNAITAFAGVDPGADQSGTHEAKSTRIPKSGPPELRRALFLVMDCLLKTMPQDDPVYQFMDKKRAEGKPYLVYMTAGANKFLRIYYGRVKEYLASLPPEENSGSILP

SEQ ID NO: 93961 - protein, 341 aa, unidentified
MLYAGIDIHKSVFQAVVLDPDSGELSECRFEPSRERLGEWASEWQGKLAAVAVESTTGWRWVARVLEQRGFEVHLVDPGRASALRGRRRRPKTDKLDARWLALVLARQLLSECEAWMPPAQIQLLRDQTRLRKSLVDSRTAWAQRLHALLAHEGWPRSRGRLLTPEGRRWVIALELDPCVRAQVDVMLTLILALDQQLKVVETELRRFARSDARCRALETIFGVGPIFACHLLAEIGDARRFKRSRQVVRASGLDPAVIESADSKRRGRLAKQGSPYLRWALVEAATHSSRSTSPDHELYMSTAQRCGRGRARLTVARKIARRAYHLLAAVEAESVEPQTV

SEQ ID NO: 93962 - protein, 469 aa, unidentified
MANPHSSQLNRKQRRELTRRLRSNDPGLDVIHPNAAGIDVGNSAHYVAVRPDRDPDPVRRFDCFTADLHRLAEWLQQCGVTTVALQSTGVYWIPVYEILDARGLEVYLVNARHTKNLPGRKSDVQESQWLLKLHTYGLLRNSFYPAADIRVVRTYWRQRADHVRAVSTCIQRMQKTLTQMNIQLANVISDLSGWTGQRIVRAILAGERDPQTLAALSHPGIHASRDTMAKSLEGTWQADLLFVLQQEVTMYDAYLQRIEECDQALQQHLKVFADKPADPTDTTAATSPQARPHVKRRRKAGSHTPQFDLGRELHRISGVDLTRIDGIDVGVAQTVISEVGLDMSRWADEHHFASWLGLCPDNRITGGKVIRRGTRHVINRAATALRIAATTLLRSQSYLGAQYRRFRGKLGAPKAITAMAHKLAVLVYRMLRWGQAYVDKGMQYYEERHREQQIRQLRKRAATLGLLVV

SEQ ID NO: 93963 - protein, 360 aa, unidentified
MAKARTLVGLDVHAAKIVAVVLDGETGEVAHFRMSGEAAAAAGFCAGLLGPVRAAYEAGPTGYGLARELARRGVECVVAAPSKIPRAAGDRVKTDRRDAEHLVRLLLAGKLHPVRVPGDEEEALRDLVRAREAVRVDLMRCRHRLSKLLLRRGIRFDDGRAWTDRHRRWLATIALGWPAAQTTFQDAIGAVDALEHRRGQLESEIIALLPDSPWAVQTGRLRCLRGVDTLTAVGLCAEIGDFARFAKPAQLMHYLGLTPSEDTTGESRRLGSITKTGSGHARRLLVEAAWHYRNRPQVGKTLTNRQAGQPPEAIAIAWTAQRRLYRVWTRLEQRAKRRTIIAVAAARELAGFCWAITQIE

SEQ ID NO: 93964 - protein, 357 aa, unidentified
MPTLAERIDFVLGVDTHKQTHTAALVTPAGGLVVHLTVSADSAGYAHLLTFAREHAFGRRIWAIEGTGSFGAGLTTHLLEHDEWVVEIDRPKRPARRNGAKTDELDALRAAREALSREHLAQPRRRGDREALRVLLATRKEVVQTRTRAINHLKALVVNAPEGMRAELRPLKTGALVAHCAGLQTGPTGCAEQAATAMALRLTTRRIQALEAEAAELEAQLEPLVQQLAPAVRAEFGVGPISAAQIVCAWSHPGRLRSEAAFAALGGVAPIPASSGQVQRHRLNRSGDRQLNCALHTIVICRLARHTETQAYAARRATEGKTSREITRCLKRHLARRLFKLLEAAPQRTSAAPELAT

SEQ ID NO: 93965 - protein, 344 aa, unidentified
MKYFTGIDVSLRFVSICVVDEAGVVQYEGKVPAEVDLIVAALRRFSAEVRQVGLEAGTLTQYLTYGLQKAGYEVLCLEARQTASTLAAMRNKTDRNDARGLAQILRSGWYRTVHVKSLESHQVRALLASRKAILTKCVDLENELRGLLKIFGVRLASQVAHGSFDQTVRAAVSATPELSMSLLPLLDARTVLYKTYLKLDNAVKAVVRHDPVCKRLMTVPGVGPVTSLTFKAGVDATDRFRSSRNVAAHFGLTPRRYQSGETDNPGRISKAGDVEVRQALYTAAHAMLTRSYAWSTLKAWGLRLAKIRGLRRAVIAVARKLAVILHRMWVDGTDFRASRPQEAA

SEQ ID NO: 93966 - protein, 395 aa, unidentified
MQLYRGSGDNGRTINRGRAPHTTEEGTMSNYATAIGLDVHARSIKACALNPMTGEVERASFGYDPVSVAEWVLGFEEPRAVYESGVTGFHLCRALRALGVDCVVGAVSKMQRPAADRGRKTDRRDAEWLARLLATRNVVEVWVPDGRTEAARDLSRALADARDDLQRAKQRMSKFLLRHGHVFDERTPTGRRKGNWTRAFWRWADVISFDEPDDAAAYEHYRDCVRRCQEARDELARKVAESAGRPEWKPIVDALRCVKGIDVATAFLLACEAGDFSRFPTAPSFASWCGLTPSEHSSGESASRGGITRAGNAHVRWALVEASWHVPMSSREPKPLAPGQEASSAVRRHATKCNRRLQDRREAMEASGKRPVVANCATAREMACWVWAIARMAGA

SEQ ID NO: 93967 - protein, 313 aa, unidentified
MNEKFAGIDVSKHAFDLNVNGNGKVEHFNNDVKDIKKCSKALVKLAPALVVIEATGGYETNLAMALQQAGLAVSVINPARIRNFAKAAGVLAKTDDIDAKAISFFASALKPPTTAMITESTRKTKSLVARRGQLIRMRTAEMNRQGHAVDKFVDKSLKATIKLLDKQIESIDKEIKDCINNDPEMNTKADIAESMPGIGEVTASMLVTELPELGSLTRRQIASLAGLAPIARDSGTFKGKRMTGGGRGDVRAKLYMPTLVAIQYNPAIREFYQRLLKAGKTKMTAVTACMRKMLTILNVMVARKEYWKSELYA

SEQ ID NO: 93968 - protein, 346 aa, unidentified
MIAIGSDVHKGRCVLAMMEEEGKVKMLEPIECTREAWLKRLAELPPEAEIALEVSTSGYFVMSVLEEAGWLKRAHWVHTAGVDSLRKQKSDRLDARRLARKLAANTADPLPEAWFPPAPIRQLRLLARQRCRIARLRVLTKNRLNSLLQMHGMRPDKSPISAAGRDWIRQQPLPAPVEQCFEQLFRLYDFLHTERETSEQNLAAHAALFPEVKLLRTIPGIGHILAAIIWGEIGTLERFPCAAALVNTTGMVSSLYESGEVSIQGHITRQGSAWLRWALITAANCVTRSKSPLGQRYWSLRRAHKKPNVAKTAVACSVARCVYGVLKHGEPFQAERWGRRSGKLEP

SEQ ID NO: 93969 - protein, 360 aa, unidentified
MEKITRGAKIGEAARVGVDLAKRVIQVHAVNEGGKVQATRALKREQFIEWCAQLPPGCMVAMEASSSAHHWARKLKAMGLDARIIAAQLVSPYRLQGHTGKNDANDAAAICEAASRPHMRFIPVKSVEQQSMLCVHRLREGIKADRTACINRIRGLLAEFGLVFAQGAQELQKILSEVLEDADNELGTLARLTLQRAQAQWSELDEHLAWCDERIAVHAKTNPDVKAAAALMGIGPVGASAAVATVGDFKQFKNGAQFGAWIGLTPRQHSSGGKSSLGGITKRGDTYLRTLLIQGAKSAVMTAHRRQDRISLWALALRERSGWQKAVVALANKNARILWAVMTRGEAFDANHLSIKPSGS

SEQ ID NO: 93970 - protein, 352 aa, unidentified
MVSSRRQAQRLIAWAAPWPDRVWAVEGATGVGRLLAQQLVAAGENVLDVPAALATRVRVLSGQSGRKTDAHDAVAVATAAIHHPRLPVVQAEDHNGVLRLLSVRRTQLTASRTQAVSRLHGLLAELIPGGAPKNLAADKAAEPLRSIRPSTAVDATRKALARDLVDDVRRIDRKLDANKADIIEAVKASGTTLTEIQGIAEITAAKILGQTGHIDRFEDRAHYASYAGVAPIEASSGAISRHRLSRRGNRQLNSAMHGIAITQATHPGRGREFYLRKRDEGKTEGEARRALKRHIIGLVFATITADTERAQRSPGRQAGATRESSAAGQSPTANTSERSVPGLRKQATPRVA

SEQ ID NO: 93971 - protein, 360 aa, unidentified
MASATLTQPRPDSDFDAVIGVDTHRDFHVAVAVSPNGARLDEYRISTNPRGYQALLGWSELFGNKPVFAMEGTNSFGAGLCRELMAAGFVVVEANRPDRSTRRRLGKDDGIDAEMAARAFLAGTAMAVPKSGEDQVEMIRMLKVAKDSAIDARTKAINQMRALLVTATPALRERLNGLSRGELISTCAAFRAGALVGPLAAAKQALRTLARRVQVLDAELDELLKDLDVLTQEACPGMRQTYGIGVDGAAILLTAAGDNPERLRSEASFAALCGASPLPASSGNTRRHRLNRGGNRQAIAALHRIAVGRLRYHQATKAYAERRRGEGLSNKEILRCLKRFIAREVFHLLMGRDPMRTAAT

SEQ ID NO: 93972 - protein, 459 aa, unidentified
MLLHESLYIGVDIGKFKHVAGFVSKTLLERHKHFEHCPAFTFEASREGFRSFVERIRDYCPLEHIFVMMELTGHYHRPLQQYLLELDIPVYVMHVQRRQAGMIKTDKRDALSLANQLYTQLALGAQVTDTLQVVRRTVPPSEAAAQLKGLMRHRYELVNESTQRKNKLTAICDELFPELTQVMKDPNLVTALALREQFPTPHAIATASLTALSEVKGGRRTSDVSLVRLQQLAAQSIGTKDVARQRSLVLEQSLLIKELQLIQEHLAKLEEEVCQIVTHCREGHILTSIPPISPLFAATLIAVIGSIANFECAADLKSYLGWAPKREQTGTSYDRTRLTQGGSREAKRAIYLIVWRAIQTDTEWSKLYKRLVPRLCSYDERTQSYKGRGRAIGHVAGRLITLIYALLRYDYEVLSHLAPGADPPEPMLYDPDIHKQHRTGHYRPLKSRPRENRIVQVEA

SEQ ID NO: 93973 - protein, 348 aa, unidentified
MIHVGVDLHKRSSQLAVLMPDGEVTQQRLENDPTRLEQFFAELPRGARIAIEASGTWWWFVDLVERLGHHAVLSNPKQTKAIAAARLKNDRVDAERLALLLRGDLLPTVWIPPARLREARELVRHRVSLVWVRTEIKNRLLALLSRRNLQPTSSKRWLTVRGRRDWLTVRGRRELAELPLDAIPSTVREDCLALLRVLDEQIRRLDHELVQRWGDDPRVQRLRTIPGIGPFTAILLILELGEIQRFPSAKHLASYVGLTPRVRASANRVRLGHISKEGNRLLRWALVVAATQAARRPGPLRAWFRAVQQRKGMKIARVALARRLAEIVYQIWKHDLDFVTLVRGGVRG

SEQ ID NO: 93974 - protein, 340 aa, unidentified
MKRLSVGVDVSAKTLDVAYWDQDKDEPVFAGKFSNTLKGFQAIERKIEKRRKNIDATMIHLVMEPSGGYEQPFAHFADKQGWRVSLPNPLYPKRWAEAMGRRAKTDPQDARNLAHFGFVNDPLPWKPLPPEVEQLNHLLNRLDNLKSMLSREKNRSHSAQYHVNRHEAVCNDLKNVISFLEERIEWVQKAVKEHLKAHPHLKEQRKLLLTVSGVGEKNVLYILVLMHRWGVLTDGKGDVKGLVAYVGLDPKPHESGSSIRKRAGISRQGNRAMRSRLFMSALGGIKGKNSPLRAFYQRLVGRGKPKKLALVAAERKILIWSWMVFSTNTPFDTTRFNCAQ

SEQ ID NO: 93975 - protein, 323 aa, unidentified
MDPVMTMFLGLDVAKAKVDCALLLNGKVKSKVVPNNQEGFETLKQWLTKQGATHVHACCEATGSYSDAIALYLHDQGHTVSVVNPAQIAAYAQSQLVRAKTDALDAKLIARYCERERPMTWTPPPAAERLLLALLRDLQDLQSMHQAESNRLDTAHPDVRERIERHLEFLGREIEQLRKKIERHIDDNDQLRGRRDLLDSVPGLGEHTIPWLIAYLGDGKRFPGSKCAVAFCGLSPKPHQSGSSVRGKAHISKTGHADLRHALYMPAVVAYSRCKAFASFVQRLKAAGKPPKVIIVALMRKLVAIAQAILKSGKPFDPSLHCT

SEQ ID NO: 93976 - protein, 439 aa, unidentified
MERFGLLYPRSAGIDVGSMLMIVSYTDRQDMVQLREFNSFTDSLYQLADMLKQEGVEVVVMEATGCYWQTLFSILEDHDLKVIIINPSHYRNVAAQKTDIKDAQWLHQLLAHGLLRNSHIATELYRELRHYIHERTLCQDQKGDLLNRIQRNLTTMNIKFQHLISDIEGVAGMKLLRAIASGINDPEMLLRQIDCRLLKASPEDLFSSLKGDYREDQINILNCSLDAYDFLKRQMLKYETYIEQTLKKLLPEDVTQTNQSTKKQGVVRKNQYHFKLSDYLHAIFGVDLTEVEGLDEIGLLTILAVTGTDMRKWPTAAHFASWLNLSPRPKITGGKVIGYQKRVTHNPATQAFRMAANSLWQSKGSLGRLYRKLAATKGKAKAIKAVARRIAVIFYNMVLKKEAFDVKKVQQDTAVQEAKKIARLQKELAKYGYTVQKAA

SEQ ID NO: 93977 - protein, 348 aa, unidentified
MTMVCGLDLHRRQITFDALEVESGQVWTGRVWQPDRERFRRWLRDDVTERAHGGAVSMAVEGCTGWRYVVEEVVAAGFDAHLAEPADTQAARGRKRRAKTDRSDCRLLRELLQDGRLPASWIAPTIVLEWRERARLYKTLVDQRSTWVQRIHAELYQHGVTLPETSIRWAKTRELLEDDRLEISPAGRQRVLTAYRMIDAITVESHPLKADLQRFGRRQPGCRALVEHQYGIGGLLAVVMWSELGDCQRFARSEQVVRHSGLDVTVDQSDRRRAGGFISRQGPQALRWALYEAAKNASHQRSPDHDYYADVKEQLNGKLATISMARKLARRCFHVLRAVDPDEVYATP

SEQ ID NO: 93978 - protein, 315 aa, unidentified
MSENKAEVFVGIDVCKSRLDVRIEPSGESFQVANDDAGIKGLCTRLSELAPTLIVMEATGGLEMRAAGELAARGLCLAVVNPRQVRDFAKASGQLAKTDRIDTQVLCGFARAIRPAARPLKEALTQELDDLVSRRRQLVDMRVQETLRLQGASKVQAKSVKAHIVWLDKRIKSIESDLGTRLRSSDAWRVKDDLLLSIPGVGEITSRSVLSRCPEIGRLSRREIAKLVGIAPLNNDSGKYRGQRHIWGGRADVRSVLYMATVSAIRCNRVIKAFAERLKRAGKAPKVVIVACMRKLLTIMNAMIKSNTPWTPKIA

SEQ ID NO: 93979 - protein, 437 aa, unidentified
MRRKKSKASKRVNLQSLPVIHPDAAGIDVGAKEHVVAVPCDRDERPVRTFQAFTPELHELAAWLKRCGIRSVALESTGIYWISLYEVLEQHGFEIRVVNARHVKNVPGRTKTDVLDCQWIQKLHSFGLLNGSFRPDQQIRKLRTYMRLRDNLVVNSTQAVHHIQKALFEMNVQLSNVISDIVGETGLRIIEAIIAGERDPEQLAALCSTRIKASRQTVAKSLHGNWDEALLHCLKTALETYHFNQEQIQHCDGYIHRHLGQFESRAQLPSSPKDLQGQLHRVCGVDLTKIPAIKEQSAQIIISEVGLDMTKWNTEKQFSSFLGLCPNNSISGGKVLRRATRKVYNRAADTLRLCAQSLTHSKSALGAKYRRLRARLGAPKAIVAMAHHLARLVYRMLRYGDKYVEKGIEHYEQKFRLQRIKWLKKEADSLNLQLVAV

SEQ ID NO: 93980 - protein, 335 aa, unidentified
MKVFYLGVDASKKKLDLCLRSNGKDILYDVIPNDLSSIKSWLTRTFEKFFLSEDSLVVCAEHTGQYTYPLVCATKSIGVYLCLEDAAKIKYCHGIPRGKNDKIDACRIAMYAERYNDCLQPYTASELIIQKLKNLSTERSMLVADRAKYQSQLKDQVDYMEHSIYIAKCNRVEGIINTFTDYIAQIDLEIKELINQAPVIAHQMDLLMSVDGVGERIALKMIMETDAFTSFTDPRKFCCHAGVVPFVYVSGSSQRSKNRVSNRADKSIKHLLHMAALSVSQVKNSPLKKYYDRKVEEGKNKMSVLNAVRAKLVTIMFAVIRADAFFSRNYQNSLA

SEQ ID NO: 93981 - protein, 391 aa, unidentified
MASTLGKNKHFFCVMDQQTGEIISQPVSFSNDKEGFDFLVQKIKSYPKDSILIGMEDTGHYHFALLKYLLDLQYTVALINPKTTDFNRKMQGGITKNDKLDTINICDVLDTPERKKQYRITKVNSFDLYEQKQLTRHHHNLKEEENVYKNRIQKCIDIVFPEFNKLFNSKYGIVYMNILKMFGSAENIANTDIRTIRKCFEIEGRGNRTSLTPERLKECARSSIGISSSAEVIQIKHLSTQIELIEEQLSEIDKKIEEFSIQNNSPILSIPGISHFSGTSILAELGDISNYSKPSQIIKFAGVAPLHYESSQFNAQHTAITKKGSKYLRKTLYQIILPVIRHNPVFNKYYQLKISQGKGHRCAQGHCVRKLLRIIYHLLKTNQQFDPQLLR

SEQ ID NO: 93982 - protein, 318 aa, unidentified
MTIHTESQIQINVGVDVGKSKLDIVLHPLDLHFQIPNDEESILKVIHVLKKRNIERIVVEATGRHEHAFVFACDQANLPIVVVNPISIRRYAQAIGVLAKTDKIDASVIARFAATIQPDIKPIPDKQSRLIKDLLIRRSQLLEMQTMEKNRLQILPKALHRSIKTLLRSLQTQISTITKQIDEAVMQVKHWRTKTEILTSVPGVGKVLAYTLLSDLPELGKLNRKEIAALVGVAPMNRESGSWNGKRRIRGGRHRIRTVMFMAMLSSIQCNPVFKRFYEHLKAQGKLPKVAIIACMRKLIVVLNTMLKNETRWGENMA

SEQ ID NO: 93983 - protein, 309 aa, unidentified
MSAYAGIDVSKATLQIALYPQTDDLSVANTPEGLASAMDYFRAHDVHHVLMEATGGYEKLAVRLLAGAGFKVQRVNPVRARSYALSMNKRAKTDKIDARILARFAANLDEELCCQPDADREELTQLVNQRESLVQQRDDNRRRIKQADSAFVQQTYKTLEVQLQMLIKSCGKQIAQQTRKINAQLMGQLTAIKGIGPVTIASLFCYLPELGDLSRQQVAALVGVAPYNNDSGTKSGKRSIYGGRAKLRRAAYMSVLVMVRHNPDFKARYEQLCNRGKAKKVALVACMRVLLVRLNAMVREGTPWRDQPV

SEQ ID NO: 93984 - protein, 371 aa, unidentified
MKNHSTFIGLDVHKNSIDIAIADEGRSGRVRHYGKIDGSLSALDKVVRKLVSTGRQLHFVYEAGPCGYEICRHLTAFGLDCAVVAPSRIPRPSSDQIKNDRRDALMLARLHRAGELTAVYVPLPEDEAVRDLMRAREDAKADEKKSKQRLQSFLLRSGFRYTGRSPWSKAHMGWLSDIKMPHRGQQIVLQEYIDTVNQCKERVQRLTGQIRELLSEWQLFPIVQALQALRGVSTIVAATTIAELGDLKRFDTPSKLMSYLGLVPSVHSSEQKTKRGSITKTGNGHVRRVLTEAAWAYRLPARVSRILLKRQENLPQSIVDISWKAQLRLCSRYRRLWNKGKAKQVVVTAIARELCGFMWAIANDIEGPVTV

SEQ ID NO: 93985 - protein, 451 aa, unidentified
MNKNVSMEIINLNAAGIDVGSRSHFVAIGQGKEDVREFGVYNEDLKAVASWLKENGKTSVAMESTGTYWQSLFTVLQNEGLQVILCNGKFTKNIKGKKTDVQDCQWIQKLHTIGLLTGSFLPDSITEKLRTYCRHRSNLVEQAADTTRRMQKYLRLLNLRLDVVVNDVTGLTGMAIIKAICEGETNPEQLASLRHGNCKKSEQEIAKALQSNGKEDYLFALTYEYNTYLYIQEAIETCDIRIEILLQDQINNDENKREHTIKKKAHKRINKNTPKNFDVNLMAYQYFEGIDLMAIEGVSHSTVLSVMSEVGLEGLKKFESAKQFASWLRLVPNNKVSGGKVLSKKVPKGSNRLKIALRNAANAIGLLKDTPLASFFKRISYRKGHIAAVSATARKLAVIIWNMVIKKLPYNNDHGYEFLDQKRKRKVKEMKKQIIKFEISTDELGLNFSSL

SEQ ID NO: 93986 - protein, 338 aa, unidentified
MKLYGAIDLDSNNNVTVLIDELDQVVYEKRLPNDLAVIAQQLSAYQDSLQGIVVESTYNWYWLVDGLMDQGHKLHLANTAAIQQYQGLKYTDDKSDARWLAHILRLGVLPQGYIYPKQERAVRDLLRKRSQLVRQRTTNILSIQNLLTRNTGSSMSSNRIKTLDAKQVDDLLVNPDLALAVKANLAMMQCADQQIDRLERTIKDRIKLREEFSFLKTVPGIGQTLALTIMLETGDIGRFAGVGNYASYCRCVGSQKISNGKKKGKGNTKNGNKYLSWAYLEAANFAIRYCARIKSFYQRKKAKSHGVVALKAVAHKLCRACYYIMKNRIAFDVAKVFA

SEQ ID NO: 93987 - protein, 342 aa, unidentified
MQITTIGLDIAKNVFQVHGIDANEKVVVRKQLRRGQMIAFFAALAPCLIGMEACATAHYWARELRKLGHEVRLMPAKDVKAYVKRNKNDAADAEAICEAVRRPTMRFVQVKSAEQQGQLMQHRTRDLLIRQRTQSINAFRAHLAELGIVAAQGDAGVTELLAIVADEQDTRLPIDARASVIVLAAQLEAMRTLIGAIEKRIKTQHRSNETSQRVETIPGIGVLGATAIVATAADPKVFRSGRDFAAWIGLVPRQDSTGGKQKLGPISKQGDRYLRRILIVGAIAVLRRAQENPGKYPWLTQLLARRPFKVVAVALANKMARTAWALMVHGGTYRAPELAEAA

SEQ ID NO: 93988 - protein, 418 aa, unidentified
MKVVYPICCGVDVHKTFLVATIITSQGITPHYSKKRFSTFNNSILQFKQWLIDNNCYDVCMESTGKYWVPVYNLLEDTIHVTVANPKWVKAVKGNKDDTKDSRWIGDLFRLGLVPGSYIPDKPIRILREYTRYRSTLVSCRSSEKNRFQNAFTVCNVALDAVVSDMFGKSGSSITNYLISSDSFDPEYCSSLLQKSLKKKAHAVVESIEGYQMTKEQKERIVIVRSHLDFIQQSLIRLDEKIDNMAVPYESAITLLCTIPGVDRTSAITIISEVGTDMSQFANSKRLCCWAGLTPSNNDSAGKKKSVRITRAGVYLKPALVQVAHAAVKSNLSPHYRIKYERICKRRGKKKAIIAIARMILTAIYHMFISGEVFNPSDFYRIDMPQEMRNKQKDKAIKQAIKLLITNGLIKTDDIAIA

SEQ ID NO: 93989 - protein, 312 aa, unidentified
MTEHCYGGIDVSKDRLDVMVLPDRKSFSVDNNAAGYSELVKRLRGLSIAAIGIEPTGGYERAVIRALLAADLSVRRINPNKLRQFGRARGVLAKNDRLDARLIAEYVAIMPTRVVQRDPATEQLAEVVTMRRQLCDQHVAVENQTAHLEDAMLRRLNKRRLARLAADILLLDRRMAQIIASNANLTRRYELLTSMQGVGPTLAFTLVALLPELGQMSRKQIAALVGLAPYDFDSGRLKGHRCIYGGRLPVRNVLYMAALSACRYNPALKVFHHRLAATNKKPKVIIVAVMRKMITTLNAMLRDNVAWQPKSA

SEQ ID NO: 93990 - protein, 400 aa, unidentified
MSGPSVTWMPVPAPRGYLVNPYKQGNTMTESRDYESVQVFIGVDVGKDTHHAVAVNRSGKRLFDKALPNDENKLRALISDLKQHGQILLVVDQPATIGALPVAVARSEGVLVGYLPGLAMRRIADLHSGEAKTDARDATIIAEAARTLPHALRSLKLADEQIAELSMLIHPALERVLGPRLDHPAVLDLLQRYPSPEKLALLGEKKLATQLCKLAPRLGKRLAADITQALTQQTVIVPGTNAAVVVLPRLALQLITLRKQREEVALEVEQRVLAHPLYPVLTSMPGVGVRTAARLLTEVACRAFASAAHLAAYAGLAPVTRRSGSSIRGEHPSRRGNKRLKRALFLSAFAALRDPISRAYYTRKMSQGKRHNQALIALARRRCDVLFAMMRDGTFYTPQV

SEQ ID NO: 93991 - protein, 366 aa, unidentified
MKKSITPIGWPVGVDVHKRRCKGVEFNHGEIKVRKPMANTREEWLEMLTELPGDAEVGLEVSTAGYFAMSVLEEAGWRERAHWVHTAGIDSNRRQKNDRLDAERLARQLAAHHLEPLPEAWFPPPAMRELRLRARQRCWLALLRTKAKNPVQSLLGMHGLQAPGSDPFGAAGRQWREEQKLPLPLTESIPQIQRLLKLLEEEIKISEKYLQAVDGQFPELALLRTIPGIGPILSVIIWSELGSRERFDSAKALANNTGLVASFYDSGETQVSGPITRQGSRWLRWALVTAANVVIQYPNPFARRYHRLRRRKKPNVAKAAIAHSLARCVYGVLKHGCPYREDRWGRKVGALEQEARAGARSTKTAL

SEQ ID NO: 93992 - protein, 422 aa, unidentified
MKLEWFAGVDWGSQQHQVCVLDADGKVLGERVFEHGGAGLLQMADWLLSFAKGDASEVGVAVETPRGPVVESLMERGFVVHSINPKQLDRFRDRLSPAGAKDDRRDARVLASALRTDPHCLRRLESTDPAIVELREWSRLNEDLTRERVRLANRMRDQLWRYYPQFLDAVDDDVAAPWALDLWQSLPTPRAGQRVREVTLTRVLKQHRIRRIDAATLRAKLRTPAVKLAPGAAEAATTHVRLVAERLALVNRQLDQARRELDGLVHRLAEAAPADDPNASTEDEPSSKVLPDAAILLSLPGIGAKVLATLLGEGSDAVERRDYNALRCLCGVAPVTRRSGKSMIVTRRQAAHGRLRDAAYHWARVAAQRDPVSHDKYRSLRARGHGHARALRSVADRLLNVACAMLRDGVCFDPQRAGTGAA

SEQ ID NO: 93993 - protein, 350 aa, unidentified
MELHTIGIDLGKTVFHLVGLNQRGEVVVRKKFSRKQLLHFTANLQVKLIGMEACGGAHFLGRALKEQGHEVRLMPAQYVKPYVKTNKSDYIDAEAIAEAVERPKMRFVPIKSDDQLDLQSLHRVRERWVMRRTAVINQIRGLLLERGITLRQGRRHVDAALPGILEDACAKLSGAVRVLLAQLKLELDHLQMRIDEADAMINKAAGENEACRRLVAIPGIGPVTATAIIAAIGNGAAFKKGRGFSAWLGIVPGEYTTGGKQKLLGISKRGNSYLRRLVVQGARAVLQQSAKQSYGLRGWLAQLTARTHSNVAAVALANKLARMARAVLAKNEHYRPPMLVGATTAGLACR

SEQ ID NO: 93994 - protein, 354 aa, unidentified
MKISRIGMDIAKNVFQLHGVDSFEQTVLKKKLKRADVLAYFRTLAACKIGMEACGGAHHWARTLIAMGHSVLLIAPQFVKPYVKTNKNDAADAEAICEAMSRPGMRFVPVKTVEQQDIQALHRVRSELVKQRTAKGNQIRGLLAEYGLVVQKRIECLRVALPELLEDADNGLTGEFRALLDGLRLDLVGLDERVGQLDRQIVQMCRASVSAKRLQEIPGIGPVTASALIAAVGDGSGFKRGRDMAAFLGLVPRQHSSGGKEKLLGISKRGDSYLRTLLIHGARSVQRVSVNKTDPSSRWLNALSHRRHKNVAAVAMANKTARIAWAVLSKGQAYRVPAQHDECIGPVLPVAANG

SEQ ID NO: 93995 - protein, 452 aa, unidentified
MRKPQVIEDEEHERVFQTVAAVDVAKKDGMVCLRGPHASRPGGRQSTVWTVSATMNDVAELGDQLAEAGVQKVTLESTSDYWRIWFYVLEAAGLDVQLVSASQVKQLSGRPKTDKLDAMWLARLTEKGLLRPSFVPPAQIRVLRQYTRARTHLTQDRTRCWQRLEKLLEDALVKVSSVASKLTTVSAQDMIYALIGGERDPQALAALARGRMKAKHDALVAALDGMFASHHGEIAQMLLSQIGFLDAQIARATMLIGEQLDSIPAAWGIGPDGDTGPDAATGPGAGEDAVVLPVVARLDAIPGVSAELAAAIIAETGLDMSRFPTAGHLVSWAGLCPRAIQSGPRTRHGKGQGNTYLRGYLGQAAIGASGTATFLGERYARIARRRGKAKAQVAIARSILVIIWHLLADPAARYTDLGPGHYDTRINKNRAARNHIRQLEALGYTVTCTQAA

SEQ ID NO: 93996 - protein, 344 aa, unidentified
MNFIRFIGIDVSKKTLDVSIFQSGEVINKFPHIQVRNDKQGFKDLLRWTKEQGVKPKDALFGLEFTGYYSDELEQFLTKKQICYTMLPTTVVKHYQRGTHDKNDKTDSAKIADYLFRFNGTECIKLRVLPSKAMQELKSLKSERKFLVQHRVACENRLQVAKSKSEEKHLQKLIDLYKEEIEQVEKQIEDVVTSDEEICTTFRLLTSIPGIGFVNAANTIANTQNLTAFETARQYAKYVAVAPSEHSSGTSVHWRRRPSPHADLQAKADLSMAALHAIELSAEMRQLYERKLGNRPKDKDVQKKALNAVKFKLIREMFAVAKQARIFELRGLDKAQTETHNTEK

SEQ ID NO: 93997 - protein, 355 aa, unidentified
MTVISIGVDAHKALHVAVALDEHGRELRQWRGSNSPAGWQEFRDWLDELGEERQVGIEGAWSYGRGLAQHLIEADETVFEVNTRWTALGRRHARKQDKSDRLDAHAIALFVHREGETLHEIAADDVTAILNLLSTERDATLAEATRLRNQLHALLLQLDPQYKQRIPNLKTKTAQRQLRRYRTSDSHPLNQERAAAVRRLARRLSLALEQADELAERIRAIAGRRFSPLTEVFGVNLLTAGTLAGILGPGHRFASDAALAAYAGVAPLETSSAGGVRHRLNRGANRRLNAVIYLIALTQAHYSDEARAYIERRVSEGKTKREAMRALKRYIIRAIWRAWRRCDLAPSLLEVRTAA

SEQ ID NO: 93998 - protein, 353 aa, unidentified
MVVVGVDAHKRTHTCSAVDGIGRRLGVKTVPATTTGNATMLRWALSTFGPELTWGIEDVRNVSRRLEEELIRSGQRVVRVPTYLMARTRASARTRGKSDAIDATAVARAVLREPDLPVACHDSVSRELELLTERRETLVDQRTATVNRVQWRIHELDPIRSAELKPLIFAKHRAPGAAWLADQPGLVAELARDELDDIARLTQTINAVEKRIVQQVRAHATHLLGIPGCGELTAAKIIAETANVTRFKSEAAFARYIGVAPLPYSSGSTDGHMRFTRSGNRQLNAAVHRIAVTQIRMAGPGRQYYDKRRTKGNSSSAALRLLKRRITRAVFSRLKADEADRRSQATADSPERR

SEQ ID NO: 93999 - protein, 318 aa, unidentified
MNTNTLQNINIGVDTGKAQLDIFIRPLNLFFTVSNDDKGIKDAIKTIKKHSPERIVIEATGRLEMPFVLACAEAQLPIVRANPIHVKRFAGAIGRRAKNDRLDAELIAHYAEAIKPDISIIKAENIRLMSDLVIRRNQLLSMQTMEKNRIQVLPKSLHSTIKPMLTAMKKQISNIEDKLLKLIESCPDYQTKNDILQSVPGIGNIAAASIISNVPELGYITNKQAASLIGVAPITRESGRYKGKRVIQGGRAQVRTVLSMAMMSAMQCNPVFKATYTRLVQSGKPKKVAIIACVRKMVVILNSMLRDGVMWDENTAKN

SEQ ID NO: 94000 - protein, 350 aa, unidentified
MKIVGCDFHPSYQQIAVLDTETGEVWEKKLSHGNGEASKFYRALQGAALIGMEATGNARWFELEVEKLGHELWIGDAAKIRASYVRKQKTDKRDAAHILKLLVEKRFPRLWVPDVRQRDMRQLLTHRHKLVRVRTRLKTELQHLALNQGIQKKRQLWNEKGRALLASLPLEGWAQQRRKDLLQLLGLVEPQIEQLDKAVEQAAKADPQAVLMMSQPGVGPITALAFSVTIGDVSRFERSKQVSSYLGLIPTEHSSGSKRRLGSISKQGNVFLRALLVEAAQSVVRHDPGFRKEYQHRCHHKEKGIAKVAAARKLAVRLYWMLKSNKSYTELVLNGGSPRHPVAAKAKPLS

SEQ ID NO: 94001 - protein, 337 aa, unidentified
MGLYCGIDLHSNNHVLTVIDDADRRVYERRLPNDLAITKAALEPYRAELVAVAVESTFNWYWLVDGLMEAGYAVRLVNTAAVRQYEGLKHTDDEHDAFWLAHLMRLGILPTGYIYPKSERGLRDLARQRMRLVQHRSSLITSVQTQVWRSTAVRLRSDTIKGRGKQPWPELSDPDLALSVKVGRAAIDTLTVQIERLEKLILKRVDLSPQFRMLKTVTGIGPILAMTIALEVGDIGRFAGVGEFASYCRCVDSQRLSNGKKKGEANRKCGNRYLAWAFMEAAHFAIRILPAAKRFYERKRRQRHALLGVKALAHKLARACFYVLRDQVPFAPERLFV

SEQ ID NO: 94002 - protein, 337 aa, unidentified
MDILKQNVGIDISKDKFSVSLVVLMKNMQTKRLKYKEFDNTLEGIENFFSWSHTNKIEGFDLHYTMEATGVYYEELAYFLYDKKCAVHVMLPNRVKKFIDSFESKSKTDKIDSELIGIMGVERELPLFKPGSKKVRTMRKLTRERLHLIEEKTMIKNQLHAEKHSVDGLEVIITRMEERIKYIENQMKLVEKDLRELTKKDYRLSDKIDLLTSIPGIAFVTAATVIAETQGFTNISSIKQLSSYAGYDVQLRESGKYKGKTRISKQGNSHIRHCLYMPAIASISHSGSMRKKYDRINKNKASKLIGLTAIQRKLLGLMYTLWKNNTKYDENHMSKAA

SEQ ID NO: 94003 - protein, 392 aa, unidentified
MVYVGIDVAKDKHDCFIVNSDGEVLYDVFTIQNNMDGFEDLLFKIKTASKNPDKVKVGLEATGHYNCNLLGFLKSKGLPTIVINPLHTNAYRKSLSLRKTKTDKVDARAIASMIMSDVSLKPYSDTLYHNEDLKSLSRYRFGKVADRAKLRQSVSRLINILFPELEKLVSTIHAKAVYELLSEFPGAHQIASSNLKHLTSLLETASKGHFGRDKANEIREAARHSISTYLPAKSLELRHTIRLIRELTLEIGEIETEIKKIMDAIDSPILSVPGISYGIGSMIVSEIGDFSRFDSPDKILAYAGCSPTTYQSGQLYSSHSTMEKRGSKYLRWALMNAARYVCNWEPTFAAYLEKKRSEGKHYYVALSHAAKKLVRLLYHLETTGEKYKPISV

SEQ ID NO: 94004 - protein, 413 aa, unidentified
MTVTCGVDWASDHHDVALVDQEGTLLARARITDDLDGLHQLLDLLTTHGDTASTPVPVAIETSRSLLVACLRATGRPIYAINPMAAARYRDRHTVTRKKSDHLDAMVLANILRTDKAAHRPLPDDSELARAVAVLARAQQDAVWDRTQAGNKLRSHLREYFPGFLAAFQQKREGISGSVARALLAAAPTPEQAAKLTRVQLRSLLKKAGRERGIETEAERLRDALREPQMRQPGQVEQAMGRQTIALLRQLDAACTSVEDLTEATAESFDTHPDAEIITSFPGLGSITGARVLAEIGDDRSRFTDAKGLKAFAGAAPVTRASGRSLAVMARRVKNQRLASVGYLWAFASLTASPGARAHYDRRRADGDRHTAAQRNLFNRMLGCLHHCLTKRSRYDELTAFPTPSAPQLTTAA

SEQ ID NO: 94005 - protein, 385 aa, unidentified
MDQTSSSAISTNTLQCALELSRNSWLLAIQFPDREQPSLYPIEGGNAEKLMAKLTAARDCWAKVSGSPPAITLCYEVGYDAFWLARFLMGRGIECLVIDPGSLQVNRRGRRVKTDRVDVKMLLRTLIAWCRGERHVWSLVRIPSIDEEDLRRSHRERGRLVRERTAHINRIKGLLFGQGIRGINVKSRYKTLALDNLVTGDGHRLPPRLACEIAREIQRLAMVQEQIAKIERERDTAPTACEATERKRHLLLQLKSIGPAISALLSREVYYRQFANRRQVGSFLGLTPSPYNSGAEERCQGISRAGSGHVRAIMIETAWLWIRHQPKSALTRWFVERTAGQSTRVRKIIIVAVARKLAIALWRYVEHGMVPQGAILNPPTTRNAR

SEQ ID NO: 94006 - protein, 416 aa, unidentified
MNAVGIDVSSRKSTVAVLRPLGAVVCLPFDVTHDIAGLASLVEKLKALDGETRVVMEHTGRYYEAVEKALHEAGLFVCAVNPLLIKEYGANSLRRVKTDKADAVKIARYALDNWADLRDFTPMDAIRYDLKTLNRQFQLASKQRTASANNLIALLEQSFPGIRKCFDSPVRSDGTQKWVDFAYSFWHVDCVRKQPFAAFCERYRKWCKRHAYLFKLSNAEEVYALAKRAVVLTPKAKVVKVLVQEAANQLSSISRSVEVYRAEMDRLAAMLPEYPVVMAMYGVGKSYGPQLMAEIGDVRRFERKQALVAFAGIDPMPNQSGDKNVRSNKSSKRGSPYLRKTLFNVIRTYLQCAPQDEPVFQFLNRKRAEGKPFYVYMLAAANKFLRRYYAKLRDFFASLDTLQPVAPIPATLKASL

SEQ ID NO: 94007 - protein, 428 aa, unidentified
MKFKQSEAQNQRIERISTSYLVVGIDMAKETHVAQVTNNRGIVLTNRHLSFSNTIEGFERLQRWMEGIQQKHRLSSVIIGMEPTGHYWWNLANWLTHKGLQIVLVNPATTKRNKENRDNCQSKSDPKDALVIADVVSRGYYYEHTKQTHVFQRLRTLMSDREFWVTNSVRLQNRIIRWLDIRFPEYSSVFKDWTCKRSMATLKEFPTPQDLAGRSIPEIIAIWRKHLQRAGGSSGTQKAAELIAYAKRSVGDVTALTEAKQDFVRLITEFERITDMLVDIEKQLRALLEEIPMAAQLRSIKGLGPIFVAAILAGAGDLRQYEHGRQLLRKAGLNLAESTSGKRKGQIIISKRGDSSLRKYLYLATIQLIGINPIFQELHQHNVQVKHMKKQQSVFKLVGKVARILIGMVHRAETFSPEKASYLVSQAA

SEQ ID NO: 94008 - protein, 363 aa, unidentified
MTSISSPTTRVVVGGVDTHGQTHHVAVIDGIGRQLGDREFPASPAGYRALAVWLGGHGTLEAVGVEGTGTYGAALARHLRVIGVKVVEVDRPDRKSRRARGKSDPLDAYAAARAVLSGSAAVVPKLRDGRVEAIRALRVARSSAVKARSQATNQIKALIVTGPPELREQLRHLRTPKIIAICARLRPGQQLGDPEQAAKTALRRLARRHQLLSEEIAEADHEIAQLVGEVAPELLTLLGVGPEVAGQLLTSAGDNPDRITSEAAFAHLCGVAPVPASSGRVHRHRLNRGGDRHANKALYVVVINRLRYDPRSRAYAERRTQEGLSKPEIIRCLKRYVAREIYNVLVRLRSATEKPNLSALASA

SEQ ID NO: 94009 - protein, 315 aa, unidentified
MTKLNTSFSGFIGCDVGKAEIVIHDSRDGTTTTIANRAKPLAAYAATLNTNCLVVCEATGGYESILLNAMLKANIPAHRADARKVKAFIRSFGIRGKTDAIDARALAQYGRERADKLRLWQQIEMAQGQLQSLVLGREDLVRQRVANKNRLAAPGNAAIKPSLKTVIECLTKQIAKIEAQITQLIQTNPKLARNAKILTSIHGIGTVVANGLQALMPELGTMGRREVAALAGVAPHPNQSGGRDKYRKTIPGRPIRSILFMAALSASQSKTGLGDFYRRLLSHGKTKMVAMVAVMRKIIVIANAKLRDAEQIKLS

SEQ ID NO: 94010 - protein, 432 aa, unidentified
MSIFISPSFAVWPKGNTTLEKKNERRCCGMDVHKETVVVCVLPPDGQEGKPVKKVYGTFHADLGRMRGWLKQLKVTSIAMESTGVYWRPVWNVLEGHGFELLLANPKQVKALHGRKSDKRDSERIAQFLQDRRLDPSFVPPPEIQRLRDLLRYRLYLLEQRNETHNKIRDLFETANIKLSSVASDLLGVTGQNIIEAMIAGEASAERLSWKVKGTLRKKEKEVKRSLAGCFDEFHRGLLEWLWKQYSFLSAQIAEVETCTRRLMEPHRELVELLDQVPGVNETVAWTVIAELGIDMGVFPTAAHVASWAGMCPGTNESAGKQKSGQTRKGNRYLRRVLLQAAWAATRQKDSYLRAFFYRLQHRRGWGKAIIALGHKLLRIIYEIIKTRTPYYELGANYYDQLNPEKTIGRLVARLERLGVAVEVRPQAQANV

SEQ ID NO: 94011 - protein, 384 aa, unidentified
MNKKTTRNRQYNVINSELYMAFELGAPNWKLAFSIGLGQKPRVRTIAVRDLEALQKEIVAAKKRFHLPEDARVFSCYEAGRDGFWLHRYLTSCGVENNVVDSSSIEVNRRKRRAKTDRLDAEKLVQMLIRFQLFNDKKVWSIVRVPTPEEEDRRQMHRERKALKKEKDRTMNRIRGLLATQGIRLGSTLRLTHEQLASFRLWDKSPLPERLRNRLEREWAHVMFLKDQIAALEKERREEIRQAEEPDVDKIQTLRKLKGVGEVSSLVLVREFFGWRKFNNAKEVGSLAGLTGTPFDSGTGKREQGISKAGNRHIRGITIELAWAWTRFQPKSALTQWFLKRFAKGGKAARKVGIVAVARRLLIALWRFLELGVIPEGAELKANV

SEQ ID NO: 94012 - protein, 347 aa, unidentified
MLHAGLDLSRKKLDVCLLSDDGEHLDQLAVPPDVDSLRTLARRIEEVHGEPICAVIESMTGARIVHDTLEQEGWDVEIADAQKVKGLAPLACKTDKIDSKVLAVLSHRDLVPAIWLPDPRVREERELARFRLHLVKHKSALKCRIHSTLINFGRACPVTDLFGAEGRRLLERLEVPEPWRSNVTASVCLIDDLEHQIDLINHRLKEGHADHPYIPLLMSVPGIRWVLAFTIAAEIGEIERFASPQKLAGYTGLCPRVNQSGEKDRRGPLTKHGPTYLRWALLEATMHALRHPAYAERYQRTKRRLGKQRGAKVAQVDIARRLAHAIWHMLSRKQKFAPRGAAFRLAA

SEQ ID NO: 94013 - protein, 487 aa, unidentified
MAATLVAIDVLRRSCAGAWELARQEREVAVLEAGRLAAGVTAHTTAKLTALHTLVYDHLRRTRGPEGARLVCLRVPHGTIEGRRVQQVWNVASTTNAILELGDRLVCQGVERVVMEATGSYWRPFFYLLEARGLDCWLVNARNVKNVPGRPKTDNLDAVWLAKLAERGMFRASFVPPMAVRQLRDFTRTRSVFVQERTRHKHRVDKPLQDAQVKLSDVVSDLFGMSGRAMLNALVVGERSPRDLANLANLAKGSLIKKKAARIEALTGQFEDHHARLLRVLLGTVDHLTAQIQELDRLIACTLEEIATPHDGPGAEPCAGGVSARALAEKLDAVPGIGPATAQIILAEIGADMSRFPTPEHLVSWAKLCPRTIQSGAKNTAGPAGQGNPWLKGALGEAANAAARTDTFLGARYRRIVKRRGHAKALVAVSRSILVIVWHLINESDASYQELGSDWHQRHLNPARKARDLVRQLQALGHQVTLEPTAA

SEQ ID NO: 94014 - protein, 340 aa, unidentified
MNATTYGLDIARKVFQLYWVDGQSGEIVNRRFAREQLIDFLAQRPAGRVALEACGSAHWWARKIGALGHEVVLLHAKFIRPFVQTNKTDAADARAIWTAVHQPEMRTVAAKTEDQQAMLSVHRMRALLVKFRTMQINQLRGLLYEFGVTFRAGRLAGLNEVRARMVEIEEALPGALLGSLQDQLRRIDWLEDDIEALEKRIGAWNKQEAACRAIAEVPGIGRLTATALVATMGQARAFKSGREFAAFLGLVPRQSGTGGKVRLGSISKRGDPYVRTLLIHGARSVMCHAKEPNTWLTQVQARRPANVTAVALANKMARTAWAILAHGRAYQKNYVSERPA

SEQ ID NO: 94015 - protein, 344 aa, unidentified
MEAYAGTQFVGIDLHRRRSVIVRTTDRGDPLETVRISNDVDSLARVMARAGEHPEVVLEATYGWYWAADALADLGASVHLAHPLGVKAFAYRRVKNDVRDATDLADLLRMGRLPEAWIAPPDIRELRELVRRRAKLVALRSGCKCEVHAVLAKCGVQVLMSDLFADEGARLLERLDAPAPYLARVASLRRLIDDLDVEIDLFARLVRGRLVADPGYRAVQQIPGIGPTLGAVFVAEIGDVHRFPGPAQLASWAGLTPKHHESDTHVHRGRITKQGSKLVRWAAIESVQALGPGTGAGRLKDRVADRRGRNIGKTAAARQQLQYVYYALRDGHVRSLAHRPRAAA

SEQ ID NO: 94016 - protein, 389 aa, unidentified
MIYLGIDVSKFKHNCFLADEDNFDKGCHFEIKNSKDGFEYLIKKLSDFDKDKIRIGLESTGHYHLNLSRFLLDLNFNIHFFNPYQTSLYRKADSFRNTKTDKVDAFFIAKLLRATDSNPIHNELYHNYELKSLTRYKSSLKNDRIKLKNAIVGYLDLIFPELAKLCKDVFCKYTLEVLKEYSSADKIGQANLTRLTNLIKKASNGSHSKEKAIEIREAARKSIGINSPAVSFRLVQDIKALEFLIDQIDEVNEQIKPLLDEMDNPIMTIPGVGIEIGPSIIAEIGNIENFESPSKLLAYAGLDPSINQSGTMNSSFSCMSKRGSSYLRDALFLAAFLICQNDETFRLYYEKKKSEGKHHYVALTHVARKLTRVIFYLLKTNQKFISQKK

SEQ ID NO: 94017 - protein, 407 aa, unidentified
MYYLGIDISKKSFTVSVLDEEGEAITRFLTFPCTRKGMEKLVDKICSLKLEKDKTVIGIEATGNLWENLYSFLEGYKVIILNPYQTRKYHQVLSKKAKTDKVDSLVIAGLLRSKEALASYVPEDEVQVLRELVRLRHHLQKDKKNYLRKAYNLLNLVFPEYTDLVKSPFKKVSSMILKKYPTAVDMARARRTDLVKMARRIQGNNYSSELAEKLIEAAKESIYSGKASEVRGMALRILIDEIQFLKNKIKEIEEKIEEILSSNEPSSPQKRLLSIPGVGPKTIAAFLGEVGGDVTRFSSANKLIGFIGWHPRISESGEKKNLHPKMSKKGPSALRASLYMAAVASLKHNPYLRSLYHRKISEGKESKQALISVGKKIISIMYSILKYEADYGPQRIFFQFEKEQLLI

SEQ ID NO: 94018 - protein, 398 aa, unidentified
MTESSDYESVQVFIGVDVGKDTHHAVAINRSGKRLFDKALPNDENKLRSLISDLKQHGQILLVVDQPATIGALPVAVARSEGVLVGYLPGLAMRRIADLHAGEAKTDARDAAIIAEAARTLPHALRTLKLADEQIAELSMLCGFDDDLAAQTTQASNRIRGLLTQIHPALERVLGPRLDHPAVLDLLQRYPSPEKLASLGKKKLAAQLCKLAPRLGKRLAADIAQALAEQTVVVPGTNAAAVVLPRLALQLITLRKQRDEVALEVEQRVLAHPLYPVLTSMPGVGVRTAARLLTEVACRAFASAAHLAAYAGLAPVTRRSGSSIRGEHPSRRGNKALKRALFLSAFAALRDPISRAYYTRKMSQGKRHNQALIALARRRCDVLFAMMRDGTFYTPQAS

SEQ ID NO: 94019 - protein, 322 aa, unidentified
MSLPGPLCVGIDISKATLDIAASSAIAQFSVANDADGFDSIIAELRKHSVALVLMEATGGLEAAVACALQAEGFELAVVNPRQARDFARAMGYLAKTDRIDARALAQMAEIINRHPERDRFIRALPDAERLVLNAIVVRRRQLIAMLVAERNRLYPAHPQSRKSINIIIKALEDELARIDDDMNNHIQSHFKALSERLSSIKGVGTMTVAALLAEVPELGRLSRREISALVGVAPVNRDSGTMRGRRTIFGGRAGVRTALYMSALVATRFNPVIKEFYTRLVAAGKPKKVALVACMRKLLTILNAMLRKNEGWNESYHHVVP

SEQ ID NO: 94020 - protein, 347 aa, unidentified
MSEVTTVGLDVAKRVFQVHGVDSSGKAVIRRQLKRGQVVAFFKKLPPCVVGMEACATSHYWAREIAKLGHEVRMMPARYVKPYVKRNKNDAADAEAICEAVTRPTMRFVPVKTPEQQAVLMLHQTRQLFVRQRTQLINALRAHLAEFGIVAGVGRKGVETLLQVIDDDPDERVPASARDCLVALRAQLALVNQQILGADRRILSWHRTSEVSRRLGEIPGVGPLIATALVASIPDPHAFRSGRDLAAWTGLVPKQNSTGGKERLGHISKAGNRYLRTLLVVGALSVIRRAKQTGSTRRGWLVALMARRTTKVAAIALANKNARTAWAMMAHGTCYQEPQQDPAPRAA

SEQ ID NO: 94021 - protein, 413 aa, unidentified
MELIHERAAGIDISKRDAKVAIRTPGKRAGTFTTGVTTWGATTNQILALRDMLLAERVTTVVMEATSDYWKPFYYLFEDALPVMLVNAKAARNIPGRKTDVSDAVWLAQLGAHGLLRPCFVPPEPIRELRDLTRARTIATQDRTRETQRLEKFLESTGIKLSASVSDLLGVSARAMLDALIDGERDPAVLAELAKGTMRRRIPELVEALTGRFKEHHAFICRMHLDRIDSITTWINRLTGKIEEAMAPFQVAREFLTTIPGVSTLVADVIIAETGADMSRFETPGRLASWSGLAPGSNESAGRVKSSKTRPGNRYLKGALGTAALSIARHPQGTYIGARYKRLVVRRGKSKALVATEHSILTAVWHMLANGECYDEAGPDFFTQRNPDKAKNNAVKRLLALGYNVTLTPVEAA

SEQ ID NO: 94022 - protein, 356 aa, unidentified
MSQKLDASPAVIGIDIGKNSFHIVGQNRRGAIVLRQKWSRGQVEARLANLPPCRIGMEACVGAHHLSRTLKALGHDARLMPAKYVRPYSKGQKNDYRDAEAIAEAVQRPTMKFVATKTADQLDLQALHRVRERFVGQRTGIINQIRAFLLERGIAVRQGLRFLRAELPGILATRTDALSPRMVRMLEDLSADWRRLDARIEALSSEIEAIARQDKGCERLMTVPGIGPIISSAMVAAIGAGDAFSKGRDFGAWLGLVPKQLSTGDRTILGSISKRGNRYLRSLFVQAAWVVLVKVGPKHWDRYGLKSWIEAARRRLHHNVLAIALANKLARIAWAVLHKGRAFECAKTNEAASRPA

SEQ ID NO: 94023 - protein, 415 aa, unidentified
MALKIVYKICCGIDVHKTFVVACIASTNDKGVSSYESRRFSTYTSGLKTLLQWLLEHNCKDVCMESTGKYWIPVYNILEKDCSIVLAHPKYVKAIRGKKTDKKDAKWIADLFKHDLVAGSFMPPADIRQLRDLMRYRFKLTCFKSSEKNRLQNCLTVSNIQLGNVVSDTFGKSAQAILDKILENPEDTSFDLEPLVFRTLKKKLPELRDAIDGYITPEQAGKLKIIKAHYESLESRKAELEELILALAAPYQQELAILQTAPGISSDFTAIGIISEIGTNMEAFPSAKHLCSWAGLTPTNNESAGKKKSVRVSKAGCYIKPLLVQCANAVVKSSKHPEIRNRYLRLKKRRGHKKAIIAIARMLLTALYHMLKNGENYNAELYRKSDLPPVDREITVEQAILIVRNQGYKIKSATA

SEQ ID NO: 94024 - protein, 428 aa, unidentified
MNCNTQNAKIASITEKTLIVGIDVGSETHYARAFDWRNYEYTKRPLEFSNTEAGFQTLKAWMEELAEKHGKTAVIPGMEPTGHYWFALGKFLQDNGMKPVHVNPHHVKKSKELDDNNPNKNDRKDPKTIAALVNEGRFSYPYMPVGIYAEIRSLSNLRFQTQEELTRIKNRLARWFSVYFPEYKDVYGDLKAVSGRMVLKAAPLPEDIIKLGAEGVNRLWRDAKLRGAGMKRAKTLVSAAEHSVGSKEAPEAARMELKNLLNDMDVYASRMDELLQRIEEKLKEIPYIDNLLAIKGIGMVTVSGFIAEVGDIGRFDSPKQLQKLAGYAIVANDSGKHNGESRISYRGRKRLRYVLYEAAISLVGKNAEFRQIHEYYRTRKENPLKKMQSVVAVACKVLRIFYVILTKGVQYDSGKLLGDIRRPQVQPA

SEQ ID NO: 94025 - protein, 346 aa, unidentified
MMIIGCDFHPSWQQIAWLNTETGETGEQKLVHAAGDAKLFYQQLAAPVLIGMEATGNSQWFIELVQDLGHEIWIGDAAQIRASYVRKQKTDKRDAAHILKLVVESRFPRLWTPDREQRDLRQLVLHRHKLVEIRSRVKNELQHLSLNKGMQRKAKLWSQAGQKLLRELPLKPWAACRREDLLGLLAMLHQQIGKLDEAVQQAADEHPQAQLLMTQPGVGPNTALAFVLTIGDVGRFPRGKQVASYLGLIPREESSGGRQKLGAITKQGNRLVRSLLVEAAQIAVRFDPGMKKQYLHRCHQKPKGVAKVAAARKLAVRLYWMLRTQKPYPEIVRIESSPRVPLVGAS

SEQ ID NO: 94026 - protein, 362 aa, unidentified
MVKAMAFVGLDVHARQTHAAVLDPAMGELAVSRLRMAPLEVVSFLQTLGPGVRAVYEAGPTGFGLARAAREQGIDVRVAAPGSIPRGSGDRIKTDRRDAVRLVRLLAAGELSFAFVPSVADECFRDLVRSIEDARGDLMRARHRLSKFLLRRDERYPGPGGAWTSRHMSWLRSHLFEDTSSQATFVDYLAAVELLAGRRGTLIEALEQAIPACGHVATIARLRCFRGIDTLSAAGLAAEVGDFGRFPAPKLLSGFLGVVPSERTSDQKRRQGSITKAGPGHARRLLVEAAHHYRYPPRIGAALARRQQGQDARVVEVAWRAQRRLHQRWQHLYRARRKPAGVVAIACARELAAFLWEAATLG

SEQ ID NO: 94027 - protein, 334 aa, unidentified
MEKVTTLGIDLAKSVFSLHGVDEKGQVVLRRTVRRDQLVKVVAGIAPCLIGMEACSGAHEWGRRFQELGHTVRLMAPKFVVPYRKSGKNDGNDAEAICEAVSRPSMRFVPVKSAEQQALLAMHRVRQGFVVERTATINRLRGLMSEFGVVLPLRSIMVRRQGAAAAENLPELARRAIGDLLDQLRVLDERIHGYDREIEAQAKLCEPAQRLMKIRGIGPTTALAIVATVGNAREFKNGRQFAAWIGLVPGQYSTGGKTRLGHISKRGDAYLRNLLVQGARSVLHTAAAHRDPVSRWALELQPRRGYYRTLVAIANKNARIVWALLAKNESLRTV

SEQ ID NO: 94028 - protein, 333 aa, unidentified
MQTAKKIVGIDVGKDWLDVCLPDGRKEHIRNTRSCRTKLIKKAAKLGAIVCFEATGPYEEPLADECLARSVKAVRLDAWGTRKFAESQGRLEKTDAIDCEMIRDYAASLKDEKLHFKKPRSEAQKRLKKSVRTRKNLLKARAIIANQFEDDLDPETARHLRSALNSLDKNIAKVEAECDAAIASDERLKELDRRFRDVKGVGPCLSRTVLAQCPDIGDFNSKSIAKMCGNAPLDHESCTIKGKAKPRRGRSDLKKALYMAAVSASRNNHILREFYQRLVANGKPRKVALTAVARRVAILLNTIAKHPDFKPAQDPKAASKKVNARRGRSRKTK

SEQ ID NO: 94029 - protein, 432 aa, unidentified
MVRFLYLYHSRDEEQEVTKESNRNSKKGVLYMKYVLAIDIAKNKSMVSLINSCGEVLIEPYDVNHSWNDFQNLKEGIEKFNIYHGDLKIFMESTARYHMPVKRFFKEETLFEVQVINPLHSAMHKRNLRKTKTDKQDCFNLADLFFSGKVKNYLDHEQYYLNLNTMARDYASLLEKTTNIKNEFRNLVNLCFPEYESLFKGHLIFSDTSLAFIEKYSHPDIIISTRVDALANFMAKFNKRHENYYLKKAKLIKDKAMTSYPAVSKDDEVVSSLIRTTKLLKFHSLEVEDIKEKLIEKAKRCYLFENINSIVGFGELTTALVIAELKDINRFNNIKQLTAYCGLDPSVKQSGSSVNGKGHISKTGNKFIRKILFNAVCNIIMQASRNNPENDILVYYRKKRNEGKHHYVAVISCTTKLLRRILAECKKVQTNM

SEQ ID NO: 94030 - protein, 347 aa, unidentified
MGYFAGLDVSLEETTICVVDDAGKMVREARVASEPEALVAFFGACGMKMERVGLEACSLTAWLHAGLTEAGIPAICIEARQAKAAMGAMPNKTDRNDARGIAQIMRTGWYRAVHVKSPSCRAWRALLTARRMVLNKRRDVENGIRALLREVGLKVGTPSRKDFPARVRELAADDPVLMSLAVSLLSVIEVMTREVERLTKRAIDEVRVEPTCRQLMTVPGVGPLTALAFRATIDQPGRFRKSRDVGAHLGLTPRRYQSGETDVQGRISRCGDELARTALYEAAHSLLIRSTKWSTLRAWGMNIAKRRGMARARVAVARKLAVILHRMWVDGSEFRWGKQAAAPAVAA

SEQ ID NO: 94031 - protein, 385 aa, unidentified
MQASNVRTPIAGHIGTIFVALELSQRKWLVTMHSPDRDRISRHPLAGGDHAGLLRLIGQVRERAARVLGAAPEVVSCYEAGYDGFWLHRWLTAAGIVNLVFDPASIAVEQRARRVKTDRIDGELLLRSLMAYRRGEPRVVRIVRVPSVEQEDARRATRERDRLITEQTAHSNRIKALLRLHGIAAGNPRRPDWLAWLAAHRDERGQPVPPQLKAELKREHARLMLVREQVQELERAKPERDAPDDAVEMARRGALLRRLKSLGPAFCGTLTNEAFYKDFHNRREVAGYFGLAPSPWCSGGTDREQGISKAGNPRARQKAIELAWLWLKHQPDSALSRWFRQRTGDARGRIRRIAIVGLARKLMVALWRYLTTGLVPDGAVLKAAA

SEQ ID NO: 94032 - protein, 336 aa, unidentified
MKKIFVGIDVSKSWIDVCVTIDGKCILHHQFVNNIMGFKAMIKWIKEFSKQLNEWLICMEHTGIYALPLWNFLSEKNISYCVVSGSVITSGLEIRRGKNDKIDASDIAKFAMRYQDELKPHRLPIQVLQRLKMLFSYRERLVKAKVLISVPANEAKQFAAKESKEVRTDSSSLVQIIEARIKKAERLMLEIINSDKQTSKCYELIVSVPGFGLITACYLLIVTQCFTVVTRSRQLSNFGGTAPHPHKSGTSIKGKTRVSPIADKKLKALLSRGAGSLMQHHEETQYYAARMMAKGKHENLVRNNIKNKMLHTVCAVVKRGTPYIKNYVSPYQQNVA

SEQ ID NO: 94033 - protein, 499 aa, unidentified
MEWDWRASEVGARRKTKQKPAMVEPVEIPDAEHELVVDRGAAIDVAKAAGKVCVRLPGKSGRRFSRVWDVPARTGAITELAEQLVELGIEKVTVESTSDYWRIWYYLLEDAGLDVQLVNSRDVRNVPGRPKTDKLDAVWLAKLTEKGLLRPSFVPPAPIRVLRDYTRLREDLIRERTRYWQRLEKLLEDAAIKVSAVASKLDTLSTRDMVEALIAGERDSRRLADLARGRMKTKRSELITALDGRFDDHHAELARLLLGQIDALTAQIGALSARIERLIDAMDESDHPTGDRGRSGGGGPQVTGAPSTGGQATAPARRTTTAIGVDSDTATVVEPQRLTAVERLDEITGVGQCAAQTIIAEIGLDMARFPTPEHLVSWAKLCPRTIQSGPVIRGGKTGKGNPYLKGALGEAAAAAARTDTFLGERYRRLVKRRGRLKALVAVARSILVIVWQLLSDPTARFHDLGPDYHTSRVVTERKIRNHIAHLTAMGFHVTLQPAA

SEQ ID NO: 94034 - protein, 349 aa, unidentified
MSIIGGLDVHRRQITFDWVDRDSGEAHRGRITPATRAGMRVWLGELPGAEGAFAVEGCTGWRFVAEELQAAGLVAHLAEPAETSSLRGPKRRAKTDRSDARLLRELLEQGRLPGSWIPPAWILDLRTTVRLRKTLVDQRTAWQQRIHAALFHHGLPRPTQELLSRASRAWLERVTLPPASRQALAVALRQIDGLDAELDPIDQWLRALARRQAGCRALMSHHYGIGAITAPTILAELGDARRFVGGDQVVRYMGLDITVYASDGKRSPGHLSRQGPEVLRWALFEAAKAAARPSSPDYAYYQQVKGRQGGNRATLAVARKLARRVRHTLASLGDAALAPVEDLAVAEAA

SEQ ID NO: 94035 - protein, 317 aa, unidentified
MNSKINQNEINVGVDTGKTQLDIYIRPLDIYFTVTNDETGIKKAIKEIKKHSVTRVVIEATGRLEQAFIMACADAKIPFVIANPVKIKRFAGAIGQKAKTDKLDAWLIAYYAEAIKPQLSSLKPAEMRLMSDLLSRRAQLMEMQTMENNRSQIMPKTILMMIKPILTALKKQIEKVDSKLQKLIQDCDEYKAKNDIIQSVPGVGNVVAFNLLSDMPELGFVNNKEAASLVGVAPFNRESGTFEGKRMIRGGRPKIRTAMYMAMMSAIQCNPKFKGMFQRLVEAGKPKKVAIIACIRKLVIVLNSMVRDGVMWDPKMI

SEQ ID NO: 94036 - protein, 425 aa, unidentified
MPYRIAGIDVHKKMLAVVVADVEVEGDFHFERHKVGTSPADLRVLAGWLVERQVDEVVMESTAQYWRPVWEALELHWRPQRRHRDGASPLSGTLHLAQAQSNRGAGGRKKDFPDAERLVKRLVAQELTLSFVPDAEQRLWRTVMRRKYQITRSRVQLHNRLEALLEEAHIKVSSVVSDLLGISARRMLQALADGETDPAALAALAAPRLRATSEQLCDAFQASPTLHPVYRRLLKLTLDELRVIEDHLGQLDQQMADLLTAHHDAVQRLAEVPGLGVDSAQQIIAEVGAAAATFPSPKHLASWMGACPGTEESAGKNYSHRCPKGNRQMRRVLNQAANAAVKARGTIFAVVYRRLVPRLGHAQAIGAITHRLCRLIWKILHERVRYEERGPAVSAEAKKVRARKMIRELRSLGYQVESPPAGNPA

SEQ ID NO: 94037 - protein, 351 aa, unidentified
MSRKTDAVVARTIGIDTGKNTLHLIGLDDKGAIVLREKLTRGRIAARLANVPKCLIGIEAGMATHCVARELIALGHEVKQVPPVYARPFRQGHKNDFRDAHAVAEAVQRPSTRCVPVKTDDQLDLQALHRVRSRLISERTAVINQIRGFLLEHGIPVRQGLRFLRQQLPDILAKRIDVLSSRIIRIIEDLSGDWRRLDERIKNVTDEIEELAHGTEGCRQLMTVPGIGPIIASAMVAAIGSGTAFARGRDFAAWLGLVPKQMSTDDRTILGRISKRGNRYLRTLFMQGARVILLRPANWAKHSFGPRLAAAAKRLHHNVLATAVANKLARIAWTVLVQARSYETRVTSEMA

SEQ ID NO: 94038 - protein, 321 aa, unidentified
MLAKRSRRSFIGIDVSKQLLEIGVHKSNYRLCCPNDPKKFPALIAELIALRPARIVLEATGGLETPLLQGLHAVGLPAVRINPRQVRDFAKALGLLAKTDRLDARVLAHFAAAVQPPLRPIKATEDIELDALMGRRNQLSDMLGAEKNRRGSAATDAARADVEAHIEWLEQRLKALDKQLKDQLKCSAVWQQKDKILQSVKGIGFVTSVSLLADCPELGKLNRHQIAKLAGVAPLNRDSGKQRGARHIFAGRAQVRAKLYMATLTAIRCNPLIKAFYQRLLAKNKLKKVAIVACMRKLLTIINVMVRDNKLWNVKAQSVSA

SEQ ID NO: 94039 - protein, 355 aa, unidentified
MKRTTKYVGLDVHQATTVTTVREESGRVVARTILPTDATAIVDLFRGMRGSVCVAFEEGTQAQWLHDLLVPLVDHVIVCDRRGQSSQGNKADQTDADLLSDLLRQGALRAVYHRGHERATLKELARTYQNLVEDSTRVMQRLKALFRARGIKTPGTAVYQRPRRAQWLGQLSATGVRFRAEALYSELEVLQQLRPMAKAAMLAEARRDPAWAVLRTVPFLGPVRVALLLATLQTPWRFRTKRHLWAYAGLAVVTRASAEYELDDRRAVRRRRRRPLTRGLNRNHNRVVKDVFKGAATAAAVRAGDLQTWYQGLLARGMREELARVTLARKLAALTLRLWKRGERYDPTKLTVPAQ

SEQ ID NO: 94040 - protein, 410 aa, unidentified
MEAIVERVAGVDVGQATVVATALVGAAHERARKETRTFRTVTRDLLALREWLLAKEVTHVALEGTGIYWRPVYEVLEDAFEMILGNAHHIKNVPGRKTDVKDSEWLADLARHGLIAQSFVPPKPFRRLRELLRYRRKLLESRTAERNRLLKLLETANIKLASVASNVFGVSGRLMLQALIEGAATPSAMAALAQGRLRTKVAELEHALEGRLDEHHRFLLQLQLRRLDHGDADLASLDARIDEALLPYRAPCEVLQQIPGVSRVVAAVIVAELGTDLTVFRNAQHAAAWAGVCPGNNESAGKRMRAGARKGNVHLRTALVEAAVAASHTKGSYLRDKFYRLRARRGTKRAAMALGHKILIAAYHLLATGAPYRDLGPTYLDGLDKRHTTRTLVRRLERLGYDVTIAPKVA

SEQ ID NO: 94041 - protein, 350 aa, unidentified
MIIIGCDYHPGFQQVAFVDTETGELQERRLQHREEAEKFYRELATQGMKVRVGMEASGHARWFERLLSELQVELWIGDAAEIRTKRVRKQKTDRQDAQLILKLMLKDDFPRIWVPSWENRDLRQLLWHRHRMVQARTRIMNQLQAVALNEGLRYKKRLWREAGREPLEAFRLGPWASQRRRDLLDLLDRLNPTIAKLTQAIEQEVENCPEAQRLRTHPGVGALTALTFVLIIGRADRFQCGKQIACYLGLVPEEESSGERRRLGHITKQGNSLMRFFLVEAAQVTVRSDQEWRNKYYHLMMRRGRKIAKVAMARRLAVRMYWMMRKGWDYEQLKKFGSHAGQPGTGDGVK

SEQ ID NO: 94042 - protein, 350 aa, unidentified
MVTLGGDSHKQTHTLVAVDDNGRQLAQKTSPATKTGHLEVLQWARRWPERRWALEDCRHVSRRFEADLLVAGEVVVRVPSKLTGGARKVARTSGKSDPIDALAVARAALREPDLPVAKLEGPGRDVRLLLDHREDLVGERTRIQNRLRWHLHELEPEAAIPARMLSRYHSLAEIEQRLGRHRGVVAEIALELVVRVRDLTRRINELEADIEHRVGGLAPTLMNLSGCGALCAAKVVGEAAGVSRFRSRAAFAMNNGTAPVQASSGNQKRHRLNRGGNRQLNVAMHRIAITQLSRPGPAKDYVAKRLAAGNTKTEAIRALKRRISDEVYRRLLQDERASLTNNVSSSVAAA

SEQ ID NO: 94043 - protein, 355 aa, unidentified
MDRYIGMDVHAASCTLAIISEKGRKLRDFVVETNGQSLVEAIRMIPGHKHLAFEEGLQSAWLYETLNPHVDDIVVAGITTSRGQKSDKIDAYGLAEKRRVGSLGKQVFKAPRQFTRLRELSRIHMTLVSDTVRVQARIKSLYRSRGILVTGVNVYGLRHRKEWQSQLPSSIQTRATRLYDHLDFILEQKKQAEADLLREAKKHRIFSMLETAPGFGPIRAARLLPIVITPHRFRTRRQFWSYCGLGIVTRSSSDWVQTSDGKWIRARVPQTRGLSRQHNHVLKDIFKGAATSVIIQRNKDPIYGRYERLLDGGTKPTLAKLSLARMIAATVLRMWKDEKEYDPGRASPSMTTRES

SEQ ID NO: 94044 - protein, 301 aa, unidentified
MFPVGIDVSKNTLDLCMLYDGIKGRIKTRNIQNNRHSVENILRWLRLQHCSPEDVHVVMEATGVYHERLATELHDAGFRVSLANPHRSREFARGMGIMTKTDKVDAYMLACYAFLKKPHRWEPPAPEIRYLGALLRRRDVLLGDALREENRLEKYLSTDTPADIISSCRRMAQLLREEVSNIERQIKAHIKASPALRRDYTLLTSIKSVGPQLGMHMLVVLRSHNFVSAEQAAAFLGVVPIEKRSGTSVRRRPRMSKIGPPQLRAKLYMSACAEKSTISECVIFTMRCACGVNLKWWPLAR

SEQ ID NO: 94045 - protein, 529 aa, unidentified
MVLSSPSLNLVRTQSLEPGTVVSTLRWMNTRRNVFSSSQASFARRSKEHFVKENLRRCCGIDVHKNSVTVCVLAPAGQRHIETKKRKFRTFTRDLKQLRAWLKNCQVTEIAMESTGQDWRPLWNLLEGEFTKLILVNPQHIKGLNGYKTDPKDAQWIADLLDSGKLRGSWVPPRSIRELRDLTRHRVNILEDLNRAKNRIEQLCQSGNIKVSSVATDLFGVSGRKMLKAIVENQHDAGWMADYARGQLRNKRRELELALQGTFTDEQRWLLEKELRQVEWLEGQVEGLEEEIERRVSGFEVAIQRLRTIPGIDRKTAWTIVAEVGVDLSAFADAKHLASWAGLCPGNRESGGKRMSGRTRKANRYVKRAMCQAAWAASHSKNTYLSAFYRRMAIKKGAPKAVMALAHHMIVVIYQVLSRKEEYVEMGGDYYDQRNKPRTIARLVARLGRLGYQVDLKLLENAMPADPTEKDNESEPPSQPDAVPEEGLGAKRKRGRPCKCRQRGIICKHQAAREVNPLIQQPPSEGKFS

SEQ ID NO: 94046 - protein, 397 aa, unidentified
MYIVGIDIAKRKHEAAVIDGEGAVIIKPFSFTNNCSGYNRLLAMLTKAKLPLDEVSFAMEATGHYWLALFTRLQKEGFRVQVINPVQTNSIRSFYIRQAKTDPRDALLIAEVIRFGHFSESTLHPENIYELRELCRGRHAIVSMQADVKRKVVALLDQVFPEYETAFTNLFGDTSMAILQTCPTPKELSEMPFEELCHLIEVSSHKRFRMAKAQELQELARNSFGFAMAGDVFSTMIRLYAKHLDFLKQQVREMDRKIAEIMDTLDTPITTITGIGPTLGAYILSEIGDISRFSSAAKLAAYAGIDPTMRQSGEYNGVRNRMSKRGSPYLRHAIWLATSSAVLHDPALKLYFQKKRDEGKPYMASVGHACRKMVSIIYAVMRDNKAYVPCIPSEISA

SEQ ID NO: 94047 - protein, 407 aa, unidentified
MDIIIERACGMDVHKDNITACIMTPQGKEIQTFSTKTVFLLQLVDWIKQHGCTHVAMESTSVYWKPIVNLLEAEDIEFLVVNAQHMKAVPGRKTDVKDAEWICQLLRYGLIKASFIPDRDQRELRELVRYRRSIIEERARQHNRIQKVLEGANIKLGSVVSDIMGVSSKNMLRAIADGVDDPEELANMAQRTLKRKKDELELALQGYTSPHQRLMLRTILTHIDFLSEQIDRLDQEVARRVSSYQEDIERLDSIPGISTRMAEQILAEIGTDIKNQFPSAAHMCSWAGLVPGHNESAGKRRSSKTKKGNKYLRSGLTEAAHSVKGSKNYLGALYRRTAARKGKKRAGIVVAHAMLRISYYLLTRKEMYVDLGEDYFDKQRQQSIVRHALRRLEGLGYSVTITQSDAS

SEQ ID NO: 94048 - protein, 421 aa, unidentified
MSVTDPARAVEPPQPTAPGPTAGVDWATDDHAVAVVAPDGEQTLRFTITHDTAGLRTLVRKLLAAGVAEVGIERPDGPVVDALRAAGLVVYVIPPGQLKNLRSRYGSAGNKDDRFDAYVLADVVRTDRRRLRPLLIDQPVTTALRQTVRARRDLVAHRVAVANQLRAHLQICFPGAVGLFADIDSDISLRFLERFPTQDRANWLSVKRWAAWLSSVGYSGRTLPETLHQRLTAAPVGATGPTADTAAAVTAAFVAVLRTLTTQIEALAARIAEQLALHPDAPIFTSLPRSGCVRAARLLAEIGDARGRFPTADSLACLGGVAPSTRQSGKVEVVSFRWGADRQLRDALCDFAGDSRHANPWAADLYRRARARGHDHPHAVRVLARAWVDIIWACWTANTPYDPAKHGALQRILNQDQPTAA

SEQ ID NO: 94049 - protein, 412 aa, unidentified
MQIVYERCAGLDVHKKSVMACLITPAPNGERRKERQTFSTMTPDLLRLRDWLREQQCSHVAMESTGVFWKPIFNILEGHLEVIVVNAHHIKTVPGRKTDIKDAEWIADLLQHGLLRPSFIPPAWQRIVRELTRSRASLSQERTRVIARLQKGLEDANIKLASVASDLMGQSAQDMLHALLEGERTPEEMAAFARGKMRPKRDLLVQALTGHFQAHHRFLVAEHLKHLSALQEAIDRMSVEIAERLHAYEDLLTRLETIPGVGRRLVEIILAEIGPDMSRFPSAAHLASWAGMCPGNQESGGKRLSGKTRKGSQWLRTALVEAAHAASHCKECYLSAHYHHLAFRRGKKRAAVALGHTLLIIIYHVIADAKEYQELGADYLEQLERQGKEQRLVHQLEKLGFEVALTPLASQA

SEQ ID NO: 94050 - protein, 477 aa, unidentified
MVFPLGRLVLLWTFGHPASDTLVQLKIHCVMKALPVLNPNAAAIDVGSEKLHVSIAGDVPHVFGTFTGELERLRNWFKAQGVCSVAMEATGVYWLYVYEVLEAAGLEVIVVNGRHVQNVPGRKTDMADCQWLATLHAHGLLRGGFVPPAHIRQLQDYQRLRGDHLIGAASQVQKMQQAMERMNIKFHDVISDLTGVSGLKVVRAILKGERRPGELLALCDVQIQKKKSDRVKESLRGSWKKEQIFALRQALELWETYQQKIADCDRELAALLQELSGSQPPEGGGGHVVSVGPVALSPAKGTGKNAPVIERLQELVVRLCGGRDATQVPGFSTYLVLQLISEVGTDMARWPSEKHFVSWLGLAGGRKQSGKRKGSVKAHRNRAGRILCAAARALAQSVDKALGGFYRRLRGRLGGLAANVALARKLALLFYRLLRYGMEYVEKGLKSYESKVLETETRLLRKLAKKQGFTLTPAITS

SEQ ID NO: 94051 - protein, 507 aa, unidentified
MRITCGIDWASEHHDVALVDQDGTLVAKRRINDDAQGYQQLLDLLADAGDSPGVPIPVAIETPRGLFVACLRASGRPVHAINPLSASRHRERQRVTRAKSDDADAVMLANILRTDAHEHPPLPADTEQARAVTVLAWAQQDAVWRRTNLVNELRSHLHQYYPAALEAFAGRDDGLHHVDALGLLTAAPSPRAAARLTHARSVTALRRGGRIRYLDHRARQLQEVLRREHLHQPPLVEKAMAHQTRALVAQLRVACEAARDLEHAAAAAFDAHPDAAIYRSLPGIGDLAGPRLLAEIGDDRTRFADARALKAYAGSSPVTIASGKTHRVRHRNVKNRRLNAVGYSWAMAALHTPGPRAHDDRRRATGDRHTAALRNTYNRLLGCLYHCLRAGVAYDDGEAFSGLISGAIAVPEAAPRPSSPLDLQRQVPVAAEDLVQSDRAAGRLDAEDDALTRVDVDVDLGAACPVDPGPDRVTARRHRRRDLVTAPDLADLLPVDVNDLGAHAVSP

SEQ ID NO: 94052 - protein, 410 aa, unidentified
MHYKQNHIYVGLDLHKDTHTAVIIDCWNEKLQTIIIENKPSDFTKLLNKVKKVAGTLTPVFGLEDVHGYGRSLAVFLLEKEQIVKEVNSALSYSERMSYPTTKKSDDWDAQCIANVLVRMLEKLPDANPLDLYWTIRMLVNRRNAIVKSVTTLTNQLHGQLCNNYPSYKKFFSDVNSKTALVFWENYPSPHHLKGVTDEDLAELLRKPSHNSCSTRKAKDILELVESDGDTLREYQESRDFIIQSIVRDIGFKSEEIKKVEAEMKKLLALLEFKLETIPGIDTVTATTLVAGIGDINRFRNADKLARFAGIAPVNFSSAGKGKDKQSKQGNRQLYATIYFLAVQQIQVSKGKKTPRNPSFLEYYNRKVSEGKTKVQALICVMRRLVNIIYGMMKNKTEYVMPTVELKEAV

SEQ ID NO: 94053 - protein, 343 aa, unidentified
MDHFAGLDVSVKETSVCIVDDTGKIVREAKVASEPEALLTVLKNPGYRFKRIGLEAGPLSQWLFSALAEAGLPAICVETRHMRAVLQAQINKTDRNDARGIARMMRAGLYRPVHVKTLRSQKLRMLLTHRKLLQSKAIAIDNDLRGTLRNFGLKVGIVGKLKFEARIKELVENLPDLAVLVEPLLVVRRVLREQLGILHRRLLAIVRDDDVCRRLMTIPGVGPVVALTYRATVDVPARFRNSKAVGAVFGLTPSKYQSGEIDRTGGISRCGDEMMRVMLYEAAQILLVRSTKWSWLKAWAMQIAKRRGMKKAIVALARRLAIIMHRIWVDGTEFRWTREVVAA

SEQ ID NO: 94054 - protein, 424 aa, unidentified
MFRYLIESGEYMEAMVEKCAGLDVHQETIVACVLKGDLNSKPQSKIRTYGTYTKDLEELHDWLVEEDVEQVAMESTGVFWKCVWNIIEDERYEIKLANAREIKNMPGRKTDVKDAQWIAELLRSGLIKGSFVPNVEIREIRDLTRYRRKIIQQASTEKNRIHKILQDANIKITTDISDIFGDTGRKILEKIIEGKEITNEDLIEITSGRGKASLREKIPQIKEAIKGTTREHHKKILKLIYDHLKYLEREQKEIEKLIDEACEEYKKEIELLDSIPGIDQDSAKAIIAEIGVDMNQFPTVKNLTSWAGMSPGNNESAGVKKKGKSTKGNRNLRATLNECAWSCIRSKKNRISSTYWRFVKRMGPQKAIHAVGNLILRLCYHILVSGIKYEEREKDDYEKILQKKKEERMIKELKERGYKIEIAS

SEQ ID NO: 94055 - protein, 317 aa, unidentified
MEQVKLSTKIAGIDVSKKKLDVAGHGVEALTQVANDRAGFVELLAWLERLGVVRVGLEATGGYERAVVAFLQAKGFEVVIHQPLEVRLFARLKRRRAKNDRIDAVLIAAATAQVDTVKAAADPLLVELAEWMTAYEQATDQLAQLKTYLEQVTLPKLAARYRTQLRRAQAWKVDMLREVLKRIRSRPDLAHRYALLLSLPGTGPVVAASLVIRMPELGSMEPGQAAALIGVAPYDFDTGQYKGQRHISGGRARPRRMLYLAALAAKRYDPGLRAFAERLLAAGKPPKVVITAVMRKLIQAANLVLARGQPWVRTQTA

SEQ ID NO: 94056 - protein, 335 aa, unidentified
MQVYGIDLSKERFDVNFLDANGKEKHRTVKNGLSAISGFLSTVPTGSVLCAENTGTYGDLLVFLCNRCGVSIALVPGYTVKHSLGLVKGKSDPIDAARLREYGERFFDKLSFKAYQSENMSELRQLFALRSQLVKARKELITGAHAREQMPMQSVKANLILKASLSSLDEQIGEVEKEISLIIMDDAEMAENYTLSISVFGVGPVIATNMIIKTGNFKAIDTARKAASYAGVCPFPNTSGNMVGKSKTSPFADKELKSLLYMGAKATVKHNKEYQLYYQKKQQEGKPHYLIMNNVMNKLLRTIYSVVKNKTPYSWDYVCLDPREKNVNCSEKKVA

SEQ ID NO: 94057 - protein, 345 aa, unidentified
MRPVAIMGLDIAKIVFQVHGVDAAGQVVVRQRLTRGRVLAFFEKLAPCLVGIEACGNSHHWARELIARGHEVRLMPAQYVKPYVKRGKNDAADAEAICEAVGRPTMRFVSVKTPEQQSVMMLHRVRLMLNRQRTQLSNSIRSHLSEFGIVAAIGRRGIDQLLAIVADEKDTRVPSDARLCLQMLAAQLAVVKEQILENDRRVRAIARQNELGRRLMEIPGVGPLLASAFIATIADPAAFKTGRDLVAWIGLVPKQNSSGGKERLGSITKAGNRYLRQMLVMGAMAVIRYAERHGTRRPWLVQLMARRSAKVAAVALANKLARIIWALMTSGERYREPTLPGLVAA

SEQ ID NO: 94058 - protein, 394 aa, unidentified
MFIVGIDIAKRSHEAIVMDHSGSVVRRAFNFANTTDGLEKLLGALRAISQNPDDFTVAMESTAHYWLALYSALKRQGYSVQVLNPLQSNALRGLYIRQVKNDQRDCFIIAEVIRFGRYTQGRPPEEDLFALRELCRARLFLVNMVADTKKKVIALLDQVFPEYETIFTNVCGLTSSELLSHCATPEEILAIDTDKLVEILEGPSRKRFRRPKAEQLKEIAQNSFGIIIAADTFSLLIKQHIEHIRCVQGQIADVEVKIAEIFSRFDNCITTIPGIGPVLGATIFSEIGDISRFSSSAKLAAFAGIDPTVKQSGEFVGTHNHMSKRGSPYLRRALWQAATVAVQYDPALKAFHKKKLAEGKPYMNSIGHVTRKLTNIIFAILRDNQPYAPRAVPG

SEQ ID NO: 94059 - protein, 423 aa, unidentified
MSHDTKDVPFQQQFKLFAGFDWASDHHDVVAVDPDGQIVLELTIDDTAEGWATLREKFAKRVGQDLSAVAVAVETCNGPAVERLLEMGCGVYPLNPKAAQRYRERKSPMGAKCDRLDAWSFGDALRTDGHGWRRLQPDDPLTQELRILCRDEVQLIQQRTAFVCQLKQALHEYYPAALEAFDDWVNLSSWAFVEKFPTPQILVKAGKRRWEKFLHANRLGRPERYAQRLEIFARADQFCGKQAVTNAKSRLALALVAQLRVLEKQLHDYRKAIESLFGRHPDNGIFGSLPGAGDKLAPRLLSEFGQNRDRFAKAESIQCYAGTAPVTRQSGKSRVVCIRRGCNKFLRTAVHLWANESREKCAWAESYYQTKREQGQSHACALRCLGQRWLKILWKMWQTGTPYDEALHMRNQVQHGSWVIQLG

SEQ ID NO: 94060 - protein, 348 aa, unidentified
MKYYVGLDVSMKTTFISIVNQEKKIVFESEVITDPCTIFSTIKSTKFDIENCAIESGAISHWLVKELLKRKIPVVCVDSRKMAKILSINVNKTDKNDARLIAEALRCGFYSEVHQKNQEDAEMQILMGTRRTLIEVSTKLKNTIRGHLKIFGIRLGTASNKKFDNLVRSALQNKPEVVQLGLKSLLETFKCTNNEIEFLEKKIEEMAKEDEDVKLLTTIPGVGVITAFTFKTCLGDPSRFKRSRSVGAYFGMTPTQYSSGDIVKQGKVSKCGNSEVRSLLNEAAFSIIYSTKSWNRIKAWGLKIKKKKGHKKAMMAVGRKLSVLMYRMLISRKQFEYGVPKDNSQKTA

SEQ ID NO: 94061 - protein, 362 aa, unidentified
MSMARIIALDLGKFKTVACVMNAVDRSHVFETIEMSPTAVHDLLARHATDPAGDTHVVFETCDCCGWVYDLCAALGLSASVVAANSEAWQWRRVKRKTDRDDALKLAKLALLDQLTVVHMPSPVQRQKRRLILHRRSVVSRRTQSRNAIRSIFSQQGIALVRGSKQWTKAGLTQLKAHAKPLADCTDLLDLWRGRLQVELDLMAAADEQLKLLDHKLDTLAAVDDRIKLLQTIKGVGPRVAEAVVLHLDDPHRFASAEHVAGYAGLVPKQIESGEMSRFGHITRRGPSLLRSMLVESAWVVWRHNPWAQAWVQKISRGSRARRKIAIVALARRLLTILWAMLRDNQPFRAPGGPPLTPSLTT

SEQ ID NO: 94062 - protein, 377 aa, unidentified
MKKAYIGLDVHKASIVIAVALEGRGDPELYGKASSDLNSFLKVLRRVMDKYELTKDDFALCYEAGPTGFVLGRRLRELGFECEVVAPSLIPVKASDRVKTDRRDAGKLARLFRAGELTFVHVPDATDEIIRDVGRARTDAVEVQTRTRQQLGALLLRNGYHYAGSTWTEPHMRYLRELVLPDPAQKVVLEEYLQRIDTAVQQVTRIEHQMENLLQNWSRRDFVEALQGFRGFQLVASMVVTGELGDLLRFDHPRQLMAYVGLVPREDTSGDHRRQGPITKSGNSHVRWMLVEVAHHYRLTPKVSAPLARRQEGLSREVRDLSWRAQERLHRRFSRLSLRGVHHNKVVVAIARELTAFIWELARVVARMRAQRPLAPA

SEQ ID NO: 94063 - protein, 419 aa, unidentified
MSLVGAPSLLEAEFFVGIDWAAKTHAVCVLDPTGRPKAAFSVEHTAAGFSGLIRRLAKLGAPSGTPVAIERPDGRLVDALLAAGHPVVPVKPNAIKTWREGEVLSGAKSDPGDAHVIAEYLRLRAHRLRPATPLTEDTRALRLVSRTRSDLVAARVAAGNQLAALLDTAWPGAKEIFADVTSAISLAFLTRYPTPAHAAHLGEKRMAAFCIKHGYCGRRSPAELLTRLRSAPAGVGDTVVSDALRDAVLALVTVLAALNTAIKDLDRSNAAHLHAHPDGKVFTSFPRAGLVNAAQIRAELAEPDAYTGPDAIAALAGLVPVTRASGKHHAVSFRWACNKRLRVALTTFADNSRHQSPWAADIYRRAIAGGKDHPHAIRILARAWVRVIWRCWTDGQPYDPTRHGGATRHTTTPTATQRS

SEQ ID NO: 94064 - protein, 340 aa, unidentified
MKKILFIGIDFSKSKFDASLLKSMSDEEVVSGSFENNRGGYVLFLKWVSDHTRIKKEDWLFCGEHTGLYSRDLTEFLSKKNLTVWLENPYQIKCSCGIKRAKTDKIDALEIARYAYRFQDKCTPYQPVDKAIESLSLLLSYRGRLIKEKVLLEVSAKETRRVISRDTTSRFVFENSMRNIERIKKEIKAVEEKMHQILMDSPLKENYLLTVSVKGIGLVTAVALIVHTNNFSTFNTARQLACYCGVVPFEKSSGTSLNRGKHISHLANRELKTLLTLCARCAIEHDKELNVYYHKKLSEGKEYKVIINNVRNKLIHRIYAVVTHKMPYLENYLNPFRKCA

SEQ ID NO: 94065 - protein, 468 aa, unidentified
MADRREAEKRRALEGLPVVRADVAGMDLGSERHWVCARTADGAGREIADFGATTPELLRMAQWLKDRHVLSVALESTGVYWIAPHEVLEAAGLEILLVDTRQLARVPGRDKKTDPTDCQWIQRLHSCGLLRGSFRPREAVCMLRTLVRDKSNLVAESGDWVRRMQKSLDQMNVRVHRAVSDLDGVTGMAILRAIAEGERDARELAKLRDRRCRNSEEEIAEQLSGHWREDHLFSLQQALQMYDAIQQRIADYNREILRKLGAMQREEFGEQPAPQVKNPHKAKAIRKRGEEPIREALYRMSGVDLTSIDAIGVETVQVVLSEYGPDLSRFPTEKEFVSHVTLAPRRPMSGGKPVRRKKRNTASTRVAAALRMAALSLRNSGTALGAYYRKIARRIGGDVAVFATARKLATLIYRLLRWGQPYVDEGAEAFETRYQEMRITVLKAKAKQLGYELVQNHPAPSTEEEVTD

SEQ ID NO: 94066 - protein, 371 aa, unidentified
MRNHIMVGCDLHDKNMLIKIAHNRGKPAQKSFGNTISGRKGMIQVLKKQASEAGDATVVFAYEASYMGFGLYDELTDAGFQCHVLAPTKIARSVKHRRRKTDARDAERLLEIVRGHVLGGNEMPSVWIPDHGTRDDRELVRMRLEVGRKITAVKSQILVLLKRNSFRKPRKMGNNWTKGHRAWLEESSKPESALPVGARYALSSLVRQLRALEGEVARLEKHIEALACTERYAVPVRELKKLKGVGTLTAITYLTEMGDLSRFGNRRKVGAFLGLVPSSNESGERDDRKGHITHHGPPRVRKVLCQAVWSRVRTDPNEKKVYERIVARNPKHKKIAIVAAMRRLAVKMWHEGLKAQQSAGCFEPQPQCTTV

SEQ ID NO: 94067 - protein, 367 aa, unidentified
MCVGLDTHKAKMAVAVAEPGRSGEVRFHGEIANQPDAVRRLIERLAEKHGQLRVCYEAGPCGYGLQRQITALGHDCTVVAPSLVPVRAGNRVKTNRRDAVTLARLHRAGELTAVWVPDPTHEAMRDLVRARTAAMETARRARQQLQGFLLRHDRVFTGRKTWSPAHRRWLAGLRFAHPAQQIVLQEQIDAVAEAERRRDRLGQQIRELVPEWSLAPVVTALQAMRGVAFLSAVVLVAEVGDFRRFATPRQLMAWLGLVPSEHSSGAKVERGGITKAGNGRARRVLVEGAWSYRFPARVTSLIQARLDQAPEEVRAIAWKAQLRLCARFRRLVAAGKNVNLVTAAVAREMAAFAWAIACQVQPRGAAA

SEQ ID NO: 94068 - protein, 521 aa, unidentified
MTGFPMVPSCPYRSLVPRLSADPLAKSRKLWRACGTILFKRLQFFMPFLGRNHNHNMKSKTPKSKKQKKKISIDQGWEAVNPHAAGIDIGSREHFACVPATATPHNVRSFGTFTADLGALADWLKECGVTSVAMEATGVYWIPVFQILEARGLAVILVNARQTKHVAGRKSDVQDCQWIQRLHTYGLLQGSFRPEDSYCVLRTYLRYRDELVSARSTQCQHMHKALQQMNVQLTQVLSDVTGVSGMAIIEAILAGERAPARLAKLVDCRVRATPARIQKALEGDYRPEHLFVLQQAFSLYGIYEERINACDEQIVREAARLADKVDPQQKPLPTRKEGRPAIKDKMQGQDMRAVLYRKFGADLTAIEGVGITTALVVLTEVGPNLDSFKTEKHFCSWLGLCPDNRISGGKVLSSHTRRVINRTSDALRMAAVTLERSQSALGGFYRRMKGRLGAAEGITATAHKLARIIYRLIKHGETYVRQGMEDYERKFKERKLHALQKTAASLGFNLVMRQQVVPSVS

SEQ ID NO: 94069 - protein, 344 aa, unidentified
MIYIGMDVHQSSTTFCLFDPAQAEGGQYRIVTQPTTAEGIRKVLKPLKRQCQVAFEVGTQAQWIASIVRPLASEVQVANASLIPWLFRDGRKNDRIDARKLATLLYLRQLPQVHLPAADISAWRALINHRRTVVQRRTIMKNQLRSILRAFGYRCPHRSCWTRVGQAWIRSLTFDHARAWLVESLLEEIRLAKERLVALERELDAIVKTQADVKRLRTIPGIGPRTAEAIVAFTDDVRRFSNRKRFTSYFGMTPTEDSSGLVCRHGHISKRGPSVVRWLIGEAAHQVIARCPALRAYFKRIHRGQKDRYKKAVVATGRKVLAICYGMMRNGCSFDPHRVLPHAA

SEQ ID NO: 94070 - protein, 319 aa, unidentified
MNYLGIDVSKAKIDCCLIVDGRYFHRVLKNAPDGYAKLADWLGKYGSAPVYACLEATGVYSESLADWLHEAGHTVALANPLSIKRFAEMQLLSVKTDKQDAKTIAIYCQRNQPQPYSPPPQAERDLKALTRHLDYLKEMLVAQQNRRQVAPAKTAPYIDNVISHLQQQIAEVEAAIQAQISSDTDLERKAALLKTVRGIGKATIPHLLSLFGHKQFKTAKQVTSYLGLNPIVKQSSNSKAKFPAISKKGDKHIRTSLFMPALVCHRLPEWKDFIARLKANGKKGAQITCAIMRKLAIYCYTVLKTGRPFDISLVNTANG

SEQ ID NO: 94071 - protein, 447 aa, unidentified
MAQRNRAFSRAALNLTHPNAAGIDIGSASHFVAVPPDRDEQPVREFASFTAELERLANWLTECGVDTIAMESTGVYWIALFELLDARGFRVVLVNARHVKNVSGRKSDVLDCQWLQQLMSYGLLRGAFRPAHGVCALRALSRQRAMLLRSQSRHVQHMQKALAQMNIQLANVISDVVGETGQKILRAIVAGERDGRALAQMKNVRIHASAEQIAKSLQGSWRAEHLFALKQALDAFDFCATQLAQCDTEIEAQLRRLHAHDGELAQGKKRGRARNAPKFDLRTLLFQMCGVDLTRIDGIDVTTALVVVSEIGADMSRFPSDKHFASWLGLCPGTKITGGKLMSGKTKRCANRAAQALRLAAAALRSSQSALGAYFRRLCSRMDKPKAVTAAAHKLARLIYAMLTKGEEYTDQGQEYYEQRYRQRVLLNLSRRAQQLGMKLVAIEQPA

SEQ ID NO: 94072 - protein, 341 aa, unidentified
MSVIAPVFSFGLNGYAGSGLALQDKAEKRLMQITIGIDISKETLDAYRFPDNHHIQVANGRAGHKSLVRWIGKQNESLVVFEATGAYHRNLEAALAANGTAFAKVNPRQARRFAEATGRLAKTDRVDAIMLAKMGAILGLKAHEPRTEALHILRELITARRALMKDKVAAKTRLQTTRQTLLKNQINARLKQIKIQIQQVDAAITEKVAQDEVLSNKLDILTSIPGIAETTAFSMLIEMPELGTLEGKQAASLAGLAPMSRQSGKWQGKERIKGGRAFLRRAIYMPALVATRYNPGLKAKYDQLIRAGKSGKVALTAIMRKLVVMANALLRDGRTWSELRP

SEQ ID NO: 94073 - protein, 396 aa, unidentified
MELPMSHQDYHFDASRSLTALEQGSTIIAVIEMSQSKWLVAALVPGVERHPLKKFDAQEEGLLKLLHRWRNEAGQAGREIKRIVVAYEAGRDGFWLARWLRARDVEAYVIHPTSIAVSREHRRAKTDRLDTELLMRAFLGWLRGEKRHCSMVAIPTIEEEDARRPNRERQNLVTEQTRIVNQMKAIFVRFGIRAFRPTLRKVEGKLKDLRTAEGSPLPENTRAELCRHLARLHVVRDQIRAVEQERLRKLAAAPAVEKGSHVMVRLIARVLGVGIETADMLVNEVLSRRWRDHKAIARYAGLTGSPDESGKRRRERGLARAGSARVRCGMIQFAWRFVRFQKGSALAQWFAARTADRRASTRKTMIVALARKLLIALWRLATRGEVPPGIILRPAS

SEQ ID NO: 94074 - protein, 423 aa, unidentified
MNSVEYAALIGLDWADQKHDVCLLVPGQAAPEKLTLANTAEAIANWIGQLRQRFGGRPVALALEKTRSGLVHSLMQYDFVVLYPLNAASVARYRQAFATSRAKDDPTDAELLAELLAKHRDEFRPWNPDTPATRELAALVEARRQAVNLRTRLACRLISTLKNYYRQALELIGEDVYSPLALDFLTRWPSLPALQRARIETVRRFYYAHNSRRAHVVEDRLKLIAAAMPLTTDAAIVEPAILTVQMLVEQLRVLAVAILRYETRQAELFAAHEDAPIFASFPGAGAIFAPRLLAAFGSDRSRYDSALAIQQYSGIAPVTERSGKRCWVHWRWGCPKFLRQSFQEYANESVRHSVWARAFYASQQQAGKSHQATIRALAFKWQRIMWRCWQNREPYSEVYYLTMLQKRGSKLLKLIAEPVEKTA

SEQ ID NO: 94075 - protein, 426 aa, unidentified
MRFIGLDVHREFCEVAICEQGRVRSAGRVRTRRPELELLAQSLGSDDELALEATGGAEAIAGILRPHVARVVVVNAKKLRQISEAKAKTDRLDARRLAELLAAGFVAEVWCPDERTRALRRWVARRAQLVRQRSRAKNEIAAALQRNLLDRPGVYDLAGRKGRRFLERLELPDDERNTVAGCLRQISFLDEELALVDRALAEAAVDSEQMRRLMTVPGVNLHTAATFMACVGEIGRFPEPRKLVSYLGLDPKVRQSGEEPARYGHISKEGASEARHMLCEAAWIVVRYPSPLRAFGERIRARRGAGIATVAVARKLVVLFWQLLTKEADYAFGRPSLTQRKLRRLELLAGAEPRRSGGRPKRGAPSLKAQQEGENALARQAEIAYRRLVSDWQQSSKGADATPGRASSGRRSGKQRGRASVPDPAL

SEQ ID NO: 94076 - protein, 395 aa, unidentified
MYYLGIDIGKNHHEAGFIKENGNHVGKSLRFANTEEGFQSLISFIENRLPEEESFSIGMEATGHYWLALYSFLLDQGFTLHVINPIQSDSLRNFHIRQQKTDSVDCFLVAEVIRFGNFAETKLADEDILVLRNLARFRESLKDSCADYKRQVITVLDQVFPEYDQLFSNIFGESSKAFLKTYGTPEQVIDVNTKSLATLLRKASRGHHSTAKAREIKSLAARSVGVTLCSDAFAFHIKILIEEIEFTEKQIKEIEKKIEKQLKKLNSVILTIPGIGPATGAIILGEIGDINRFSNPKKLVAFAGIDPTAYQSGNFTGANNRLSKKGSPYLRRAVWMSAVVASRSDPVFKAFYEKKRREGKAHGTAIGAVARKLLYTIHAVLKTNKPYEIRWDTIE

SEQ ID NO: 94077 - protein, 343 aa, unidentified
MNATTVGIDLAKNVFEIALADERGHIVERQRLSRARFDRFFANRAACRIVMEACGSAHHHARRLSSQGHEVVLLPAQYARAYVRRNKTDAADAAALIEAARCPDIRPVPVKSVDQQALQQLHRLRSQWMAARTARINFLRGCLREFGVCIPIGAQRALQSVRDALANQDSAVPTLLHPSLLELLTEIDSLTQRCKHLERELARLNKHDPVVERLLQIPGVGPLTATALRASVVDVQRFPSGRHFASWLGLTSREHSSGERRRLGRISKQGDPYLRTLLIHGARAVLLAARSAQRRGSSLDRLRSWALDLQQRLGHNKAAVALANKLARIVWATWRYERDFASN

SEQ ID NO: 94078 - protein, 406 aa, unidentified
MLPNPTDSLTRTPSGTTNCRSLDSEKHARESLTLRASSTHGHKKEQSHASAVPTLLRYRYTYWKPIWNVLEGRFELLLVNAQHFKAVPGRKTDVKDCEWLAELLQHGLVRSSFVPPTLVRDLRDLNRNRAILVQQRATVSNRIEKVLEDANIKLGVVASHVLGQSGRTMLHAMSTGEEDIDKLAEMAKAKLRKKIPELRVALFGKMRDHHRFLLRQWLSQLESVEKQIAEFDLEIDRRNEPFQQTVDRLITIPGVDRITASGLVAEIGTNMAQFPTAQHLASWAGLCPGNNESAGKRLSGKTRKGNPWLRRVLCQAAWAASHTKGTYLSAQYHRLAARRGKKRAIIGIAHSILVIAYYLIARGEEYRDKGGDYFDRINCEGLKRYLIRRLEHLGHSVKLEPVPSEA

SEQ ID NO: 94079 - protein, 346 aa, unidentified
MTIVEERPAVTGGVDTHSEVHVAAALDRVGGLLGTREFPATAAGYAGLLGWLGKFGDVAVVGVEGTGSYGAGLARYLAGRGVRVVEVDRADRQDRRRNGKSDPLDAVSAARAALSGRAAGEPKGRDGAVEAIRALMVAKRSARQERTRAINQARALILTGPDELRARFAGLRAAALAAAAAALRPRPGGAAGYEVRTALRELGRRAEFLDAQIARLDGQIVPLVTARAPGLLSLRGVGPDTAALLLIAAGDRPGRLRSEAAWAHLCAVAPIPASSGKTRRHRLNRGGNREANHALWRIVITRMSTCPATRAYVQRRTAEGLSKKEIIRCLKRYVAREVYPYLRPGA

SEQ ID NO: 94080 - protein, 342 aa, unidentified
MSISYVGLDLGSSNFHQVALNHHGASTINREFPTSAANLIKAFSDLRGEIHVHLEAGELAPWASELIRPLVTRVVCSHPQQNAWIAKDADKCDGLDAAKLADLLRLNRFKEVRYPQSPQRQEFKTLVQHYDELTQQQARLKTKLKGRLRMQGVIVRGEEVFSARGRNAVMAEVKSPLVRTALKQLYAVLDQSLAAQTEAQMLMLRAAQALPEIRIMRTAPGVGPIGACRFSAYVHTPQRFSSTRKLWKYCRLSVSHRSSNGKPLRRPRLDRMGCGRLKDVSRKAFEAALRRKDNNGFKRAYQRALETTHDKTHARLTVQRKIVSTLRAMWINQTPYCDELMR

SEQ ID NO: 94081 - protein, 346 aa, unidentified
MRIIGCDLHARQQTISMLDTESGEVIEKTLAHEGETVREFYAALPQPVLVGLEATGSMFWFLRLLEELGIEYRVGHPAAIRKAETRKQKHDRRDAALIRRLLVEKRFPQIWLPTPEQRDLRTLLRHRHQLVRMRVMTQNGLQGLALSQGLRRGPKLWSQAGQQELNSLSLAGYSRTRREQLQELRQELNQRLQQLDQAVSEQAEQRAGARRLLSHPGVGPITALATEVFLGDAQRFPNAKAVASYVGMIPSEHSSGGQQRNGSLSKQGNPLLRQLWVEAARAAARKDARLKQFYRKKLVQKGLGKAVVATARKLGIRLWIMLRDQIDYTEFCRRAEQRCPHAGMPE

SEQ ID NO: 94082 - protein, 315 aa, unidentified
MENNSVRRVIGIDVSQDFLDVFASSGPAAPRVPYDTRGLRALVSSFGSTPDLVVCEATGGLERGLVAALVTAGIAVAVVNPRHVRDFAKATGRLAKTDRIDAQVIAEFGLAVQPPARLPKAELTQQLDDQLRRREQLLEMLIAERNRLARASRAVAKNIRLHVAWLERQIDQADHDIDTTIKDSPAWQAKHDLLKNFKGIGPMTRAGLFAWLPELGTLNRKQIAALAGVAPFACDSGTLRGQRHVWGGRRNVRCAVYMATLVAVRHNLTLRAHYTQLRDRGKAAKVALVACMRKLLVILNAVFRSGVPYVERTAP

SEQ ID NO: 94083 - protein, 442 aa, unidentified
MADTVVHPCEPDFVAFVGIDWGDQKHGWKLMVAGAQTIEAGELKQTPEELSSWALALHHRFGGRPIAVALEQSRGALVYQLSQYPHLWLYPVNPAAAACYRQAFYPSGSKSDPGDSKLLLELVVHHRDRLRRSAPETAETRLLRMLVEQRRQLVNEKTRWNNRLKAALKTYFPQVLEWIDIDTVLGCDLLERWPTLQLLQRAHPGTLRKFFREHNCRSASRLKERVDAIYQATPAVEDTALLEGESAIAASCVAQIRTLLASIAKLDQQIATSSSQHPEAPLFARLPGAGAALQPRLIVAFGTQRDRYASASEVQAYSGIAPVTESSGHSRWVHVRWACPTFLRQTFHEFAACSVSHSEWARAFYDAKIAAGKSHHAAVRALAYKWIRVLFRCWKDGRPYDEPTYLQALAKRNSPLRPSTVTSTKVGWKSVGGFKKLSTENS

SEQ ID NO: 94084 - protein, 368 aa, unidentified
MKKNTSKKQMASKGKKETKEGLAFYIGIDLGDKNSDVCVLDPRGEVGKEFRLRMQEEAFREYFTSIPRSRVAVEAGGQSRWVAEVIEECGHEVYVSNTRKVPYIHQSDAKNDPGDAYKLAELVHFKPRLLHPIQHRSREAQADLSWIRAREVLVESRTQLINAVRGLSKAFAGRLQKCSTESFTAKLAGQVPEAIRGAVAPLLETIDHLNEQIGYYDQMEEQIARERYPKYRLLEQVNGVGLHTALSFMLTIGDPERFEKSREVGSFLGMRPRKQDSGETQPQLGITKAGDVYLRKTLVNCAHHILGPHGKDSDLRRFGLRLCERGGKNAKKRAVIAVARKLSVLLHCLWISGEVYEPLRNSKPAKAA

SEQ ID NO: 94085 - protein, 350 aa, unidentified
MELHMIGIDLGKTVFHLVGLNLCGEVVVRKKFSRKQLLHFTANLQVKLIGMEACGGSHFLGRALREQGHEVRLMPAQYVKPYVKTNKSDYIDAEAIAEAVGRPKMRFVPIKTDDQLDLQSLHRVRERWVMRRTAVINQIRGLLLERGITLRQGRGHVDAALPGILEDASALLSGALRLLLAQLKLELDHLQMRIDEADAMIKKAAADNEACRRLVAIPGIGPVTATAIIAAIGNGAAFKKGRGFSAWLGIVPGEYTTGGKQKLLGISKRGNSYLRRLLVQGARAVLQQSAKQSSGLSAWLAQLTTRTHSNVAAVALANKLARMAWAVLAKNEPYRPPMLAGAATECLACR

SEQ ID NO: 94086 - protein, 338 aa, unidentified
MATVRVFVGLDYHDAGVQVCVLDPHGRVRANTACPNDAAALAELVARHGGPVFAAVEACTGSADLADELVGRFGWSVDLAHPGYVRRLKQTPDKTDFTDARVLADLERVGYLPRVWAAPAAVRDLREVVRYRHQLAAQRRAAKVRVRALLRQHRQTPPAGVNPWTVAWHRWLRDGASLPDSTRWVIDRHLAELADLARRTQAADAELARRTAGDPLVGYLLAIKGIGPITAVTLRAEVGRFDRFRTGKQVARFCGLSPKNASSGERQADAGLIKAGSPLLRMIVMEAAHRLARYQPRWRALKAALVARGKPAGVAVAAVANRWVRWLFHQVQPAALAA

SEQ ID NO: 94087 - protein, 408 aa, unidentified
MNAVGIDVSKGKSMVAALRPMGEVALLPQEFLHTEVGLEQMAYAIIALGEDTRVVMEATGRYHEPVAAALHEYGIYVSVLNPLFIKQSGGGSIRKVKTDKADAMKIAKYGLDNWVDLREYTPMDTVRQQLKLCSRQYNLYMKTVVSLQNNLISLTDKTFPGVNELFSSPERADGHQKWVDFVMTFWHCDCICRVSEKAFTERYQKWCKRKGYHFSTEKALDLYAGSCGHFTTLPKNDNIKLLITTAAQQLLAGKMTLAALRAEMTRLAMQLPEYDTVRAMYGVGQTTAAQLMAEIGDVRRFPRRSSIVGFAGVDPGVDDSGKHSAKSVPTTKRGSPHLRKTLYQIVCTYLRKAPADEPVYQFLDKKRAEGKPYFVYMTAAQNKFLRIYYARVKECLEAFDERQDTVQN

SEQ ID NO: 94088 - protein, 341 aa, unidentified
MSIITVGIDLAKNVFAVHGVDDNGKSALVKPKVSREHLLPLVAQLPPCVIGMEACSGAHHWARLFRGYGHTVKLMAPKFVSPYRMGGKRGKNDAADAAAICEAVTRPNMRFVPIKEEHQQIILCLHRTRQGFVEERTATYNRLRGLIAEFGIVLPQKVANLRRHIGARLEDLPGYANRCVGDLLSHADQLDVRIAEYDRLIAKAAREDARSRRLMQRPGIGPVTASALLASIGGGHDFKNGRQVAAWIGLTPGQHSSGGKDRLGRITKAGDHYLRTLLVLGARTILNTLGDKQDHFSRWARNLVVRRGYGRAAVAIAAKNARLAWAVLRYGEDFRLSASAA

SEQ ID NO: 94089 - protein, 354 aa, unidentified
MENTKISFKNIPIYIGIDVHLRCWKVCILTEEFEHKVFNSPTSAKSLSNYLRKNFPEGDYYSVYEAGYSGYWIHEELEQYGIENIIVNPADIPTKDKEKRIKTDSIDCRKLARCLINGELDPIRIRTKEQQQDRALVRMRHKMIKKQTICKNQIKSLLAFYGIYIDESEVQAYWSRKYIESVENYTRNKGSATIAFNSLLRELNDLRSNILETTKEIRILSRTERYEKNVRLLKSIPGISILSAITILTEIGDIRNFGTLDKLNGYIGLVPGEHSSGEKENKSRMLRRGNKILKHIMVESSWIAVRKDPSLMLVYKNLIQRQKKTRAIIKIAKKLINRIRYVLMNENEYKLLVA

SEQ ID NO: 94090 - protein, 493 aa, unidentified
MNGKANTQKNQAGKCGGRIGGRGKKQAKALAPVLSKEQEAILKQKTEEISSGLRSFTWRDLETSGKFSRNEKLTFISDDMLIVGCNIGSETHYVRAIDSKGRELSNGAFSFESSAEGFQKAKDWALHLAAQHEKSQIVLGLEPTGHYWFSLAAWMIANGISVVQVNPYAVKQTKELEDNSQAKNDAKDPKLIADLVKNGNYGMPYLPEDVYAALRVLCMLRDQLMEDRTRNVNRLHRELKIVFPEYMKAFGKIDGIFTMSVLATTSIPSELVALGEAGIRDIWHAKKLRGGAYNKAKEIVRLAKESIGLTHGAEARKIAVASFVSKIMELDAEIESIEAQIAQKCREIPYADNVLEIKGLGETIVSGILSEMGDIDRFDTAKEIQKLSGLSLVACSSGKHKGQTKISHRGRKRLRYWLFQGAMSVVSHNESFRQIHEYYMTRTVNPLKKMQSLTVIACKLLRIIFTILKKGVHFDPERMLRDIIYPVQQEAVA

SEQ ID NO: 94091 - protein, 411 aa, unidentified
MRLFVGDDWAEDHHDVEVMDEAGKVLAKRRLPEGVAGIAQLHELIGRHLGEDADEAEVIVGIETDHGPWVTALIAAGYTVFPVNPLQASRYRERHGVSGAKSDGGDAHMLADMVRTDSHQLRPAAGDSPEAEGIKVLARTHKTLIWERTRAVQRLRHQLREYFPAALDAFEDLDAPDTLELLGKAPDPARAAKLTRAQVSAALKRARRRNIPDKATAILAALRAGQLGQPPALSAAYAATARALIAVIATLNEQVKVLQGQVEENFGRHPDAEIYRSQPGMGAILGARVLGEFGDDPHRYADGKARRNYAATSPITRASGKKKVVAARFVHNDRLVDALNAQAFASLNASPGARAYYDELRARGIEHNDALRRLANRLVGILHGCLKTRTLYDEATAWSHRENLPQSSVAA

SEQ ID NO: 94092 - protein, 321 aa, unidentified
MTIIGFDVSKNELVGVRTNKSAAIQEKIIFENTREKIDSFLDHVQKQYPHLTISSEATADYHRILAQRCVERGIPFRLLNPILTKQFTRATIRKRKTDLTDAHVIAKLTLQGEGTLLTAGSFDPAKSLSRTAAKVNRILKMFSAISSRLERVFPDQERVIAEMKKHLTPLKETVKKLRGEARGRIDERVCALLCSITGIGPTLASMIITEIGDVMKFPSGKSLVAYAGLDPRVKQSGVSMKRNTKITKRGSPYLRHAAYMAATIAKRHDPELKVYFEKKVGEGKRYKEAVVATARKILYRVYAVWKRGTPYVKRSFPQATT

SEQ ID NO: 94093 - protein, 353 aa, unidentified
MELDKYIGIDAHSSTLVVNARDAFGKMILQSVVPTNAEAIVQCIGGLRGRLHVTFEEGTHAQWLYDVLRRRVDDVLVCDPRESRLMQDGSKGDRIDAGKMSHLLRIGALKAVYHGRHGTAVLKELVRSYDGLVEDSVRVMNRVKAIYRSRAIATPGGSVYRTTERESYMEYLKDPGAVKRVDLLYEQLDTLNALRRQAERAMVGEARRHPAYRLLRSIPQLGPIRIARLISIVDTPHRFPNKAAFWNYCGFAVVLHTSAERKFVDGQLVRSQKMVATRGLNKDHNPKMKEIFKSAATKARVCGPFAAYYAGLLARGMKQELATVTLARKISAITLAVWKKGEAFDPKKLMQMT

SEQ ID NO: 94094 - protein, 460 aa, unidentified
MNPKRSKSRNGGKMPMVHPNAAAIDVGATMHMAAVRADRAPEPVRSFGTFTVDLHRLVDWFTECGVETVVMESTSVYWIPIFELLDARGFTVFLVNARDAKHVPGRKTDVSDAQWLQRLHSFGLLRASFRPKGQIAELRAYVRQRERLLEYAASHIQHMQKALTEMNLQLHHVVTDITGATGLRIIRAILAGERDPEALACLRHYSCHSSAETIAKALTGSYRAEHLFALEQALALYDAYQEKAFACDARIEAVLKKLSIHRGHGHGSAPRASRRRNRTDQANALAFDVREALFALLGKDITTIDGLGPYLSLKLIAECGDDLSSWPSAKHFTSWLGLAPSNKVSGGKMLSSRTRRSGGRAAALLRLAAVTVGRTDTALGAFYRRLSARIGKAKAVTATARKIAVLFYNAVRYGMDYVDPGASSYETRYRTRVVNNLRRRAKAFGFVLQPSEPKVGAAVS

SEQ ID NO: 94095 - protein, 353 aa, unidentified
MQTPQLFIGIDVHKKSWSVSIRTDLFEHKTFSMPSEPDKLIGYVNEHFKGYPVQCCYEASCCGFVAYRRLTEAGWKAKVLNPADIPQSAKNKDQKSDRVDCRNLAKQLHSGHLTGIHVPDEQQEQLRSLFRQKNNLTKVMRKLKAQIKGELLYYGVKLLSAYDRSAWPSAMMTWLSDLEWKFTTGHYSMQSKLRHLAFVRQEWLASNTELRKYVDICYHQDYRLLMTIPGVGPTIAISILAELGDIRRFDKFDQLSSFVGLVPSIYSSGETMQVRGLTYRSKVLVRSYLIESAWVSVRRDPSMQDYYRSHAGKQPNKIIVKVAHKLLRRIWHVIRSGEPYQVGVGKAEVPVPE

SEQ ID NO: 94096 - protein, 329 aa, unidentified
MSVHQQGRETVAASRPCAGIDVSKAHLDAAWGERFERMSNDAVGWDALVAKFQAEGVDVVVLEASGGYENAAACALQAAGLAVVVLNPRQARDFAKAMGQLEKTDRVDACSLRDFAGVIARHPQRERYIRALPDEQRAHLAALVMRRRQLLDMRTEESNRLHTAHRAARKSVQMMLKAIDKQLATVDDDIDQRMQQHFKELRTWLESVKGVADVTSATLAALLGELGHLPRRSIAKLAGVAPLARDSGPRKGTRAIWGGRAEVRHVLYMATVSATTHNPVIREFYQRLLAKGKPKKVAIVACMRKLLTILNAMVREHAVWDQSKHIKTA

SEQ ID NO: 94097 - protein, 341 aa, unidentified
MNYVGVDLHKERSWFYVTNDQGKRIDSQSISNLPDVLRTYYETLPRPFTLAVETTYNWYYFVDIAEEYADKVYLANSYELKAFAKRNKKTDKIDARLIADILRKGYLPTVSIPAKKTRDIKELLHCRMNIVSERSRNVTRLKSLLDRHGQMSTGCFTSTKRLNSIAVDKLSEPCRIAVANLTEQIAGLEQRANHIEWQISKIAKSDNDASNLTSIPGIGYFGSLLIKSEIADISRFASFNRFCAYAGLAPKTFQSADKEYHGPLNKNRRKHLQWILFESVYHFSKSSPERTAKYEAIAKRKSPNVARVVLARDLLKIIYRVLKDKRPYYERTMAPLALDRV

SEQ ID NO: 94098 - protein, 350 aa, unidentified
MVVVGADVHKRTHTFVAVDEVGRQLGEKVVETTTAGHRKAVRWAREQLGGDLVWAIEDCRHLSARLERDLLSADQKVVRVPPKLMALTRKSARTPGKSDPIDALAVARAYLREPDLPVASHDEVSRELKLLIDRREDLVAQRTSTINRLLWRVHELDPERAPKPGSLDLAKHRRLLGDWLATQPGLVAELARDELGDITRLTESINALAKRISQRVQAIAPALLALPGCAELTAAKIIGETAGVTRFKSEAAFARHSGVAPVPVWSGNTAGRVRMTRSGNRQLNAALHRIAVTQIRLGGHGHAYYRHRLAAGDSSTEALRCLKRRLARVVFHHLHTDHANRIQPCQPAAA

SEQ ID NO: 94099 - protein, 339 aa, unidentified
MAKITIIGLDLAKNIFHVVCCDERGKVVKKRMLKRGQVLAYFAPLGRCLIGMEGCASAHYWARQLEALGHEVRLIPAQYVKAYVRGNKNDYNDALAISEAVTRPQMRFVSVKTPEQQDVQALHRLRERCVQMRTGLCNQIRGLVGEYGLVCAKGVPSLRRQIPMWLEDGENGLSDFFRRLLSLSYQQLQAIDDYIAVYTQELKRHSQENEACQRLQTIPGYGPIVASVFHSQVGNGEAYRRGRDVSASLGLVPRQHSSGGKDTLLGISKRGDRYLRSLLVHGARAVVSRAEKKDDRLSRWINRIRAKRGYNKATVALANKMARMGWAILANKTVYQQAV

SEQ ID NO: 94100 - protein, 430 aa, unidentified
MKKKNHSNEKIEAITFKTLIVGVDIAKHNQWARFVDCRGIEHNKALKFENNRNGFNTILTRIYEICKNEDFNKIIVGMEPTGHYWKAFANFLLKQAKITVVLVNPYHTKKAKELDDNSQTKSDKKDALTIARLVKDGRYFETYLPHDVYAELRGLTTSRHSMNKRKKSIVNTITAVLDEYFPEFISVFKHPFKGKASMHLLKVCPIPKFILELGEEGVLEEIKKAVKKTVGRKKAAQLVAAAQDSIGVDYGEYAARFKIQQLMEELELIISQLAALETEMEEALKKTEISEYLLSIDGMGVVSLATCLGELGNPLRFEDTRQMSRFAGYNLIEDSSGKNKSGTCISKRGRKNLRSVLYQISLTMVATNQEMRKLYDYLKTRENNPLKKMQALVVVSKKVLTLIFTLSKKKVYYEGERVFGSYRKSQLQAA

SEQ ID NO: 94101 - protein, 436 aa, unidentified
MKVKQVSALRERGLLPVGRVAEPQVVGLAPQTTNKRKTDTMKSYILLRPEPVQSQILTVPVGAKPFVLFIGLDVHNDTIAVSLAPWDSPEVRRYGIIGGEHDDVLKLVKRLQATHPGATLKFCYEAGPRGFALCRCLRTHGLDCILVCPSKVPRKPGERVKTDRRDADQLARLLRAGELTGIYVPEPVDEAMRDLIRARFQVGKAQHRARQQLKMYLLRHNIRYGGKSSWTPAHLRYLAQIKMPFPVQQIVFQEMLEVISEATARLERYDQEIERAVPGWRWEPVVRALMALRGMALLHAATLVAELGDFHRFEHPGQLMGYLGLVPSEHTTGTDRQQGGITKMGNGPARRALVEAAWQYCVPARISPHLKKRQEGLPKAITDIAWKAQLRLSHRYHHLTRVGKKKSQVAVTAVARELAGFVWAIARQVQPRPVKP

SEQ ID NO: 94102 - protein, 365 aa, unidentified
MKKSSTAATRSNKNLQGKLTIGLDLGDRSSWYCALDEAGEVVSEKKLGTTPKAMKEVFAAMPHNRIALETGMHSPWISRLLSELGHEVIVAHARNVRLIGESRRKDDRLDARTLARLARIDPQLRCPVRHRSAQAQADLTVIRARASLVRARTALVNTARGLTKSYGERLRGCNPRNMDTEKAQALSPELQAALGPLLQALESLSERIAEYNQQIEAIAQQSYPQTALLKQVKGVGTLIALTYMLTLEDPHRFRKSRDAGCYVGLQPGRRNSGQSEPQMHISKEGDPYLRTLLVQGAHHILGPFGADSDLRRWGLKLAERGGKNGKKRAIIATARKLAVLLHRLWVSGEVYEPLRNTKRTISVAA

SEQ ID NO: 94103 - protein, 412 aa, unidentified
MEVMYERCAGLDVHKKVITACLIVPGPDGKPKKETRTFGTMTRDILMLSDWLSRAGCTHVAMESTGVYWKPVYNILESNFEVVLANAAHIKNVPGRKTDISDAEWIADLLRHGLIRGSFIPPEPIRELRDLTRYRTSLTRQKASEVNRLQKILEDANIKLASVATDVTGVSARSILHELLRGEMDAESMAQLARGRMRKKIPELQRALEGFLKPHHRLIISQILAHIDYLDEAIAELDREIEERMRPFEADAGRLDGVPGLDVKAIQGIIAEIGVDMTVFPSDRHIASWAGVCPGNNESAGKRKSGKTTKGNPWLKSLLVQAAHAAGRSKGNYLSSLYHRLAARKGKKRAAVAVAHATLTIVYHILRDKTVYRDLGADYFDRLDREAVARRLTKRLEALGYKVDLQDLECAA

SEQ ID NO: 94104 - protein, 506 aa, unidentified
MVTHAWRVGSRLEECFGSPPAPDAWQDVRRGGEEMARAARRSGGSSSRKGRSSRARSAQLEQLNLHAAGIDVGADAHWVAVPKDRDEQPVRCFGAFTADLYALAEWLRQCQIETVVMESTGVYWIALFEVLEERGFDVKLVDAHYARQVPGRKTDVKDCQWLQELHTYGLLRGAFRPEDEVCVLRSYLRQRSMLVAMASRTVQHMQKALEQMNLKLTEVVSDITGKTGMTIIRAILAGERDPQLLATYRDKRCKHDHATIAKALTGHWRAEHLFALQQAVEQYDFLAQQLRACDGHIEGCLQAFVPDVEIDVPQAPSARTWRSSRSNPLSFEVQAYLNATTGVDLTQIDGIDSLTALKVISEIGLDMTCWPTSKHFASWLGLCPGNKISGGKRYRIRSKPSANRAATALRLAAQGLANSHSALGAYYRRMRGRLGAPKAITATAHKLARLVYSMLRYGTAYVDEGQQAYEQKYRDRVLTNLQRKAKAFGYQLVHVADIDGEVASTL

SEQ ID NO: 94105 - protein, 410 aa, unidentified
MTMITITQNTPVLVAIDIAKARHEVLIAVPGKKRRRRLTVLNELADFTRLITALKDYGRPVRAAFEATGNYHRALAYHLATAGFEVKLVSSVALARTREALHNSWDKNDPKDAQVILHMMEIGNEQFYHDPLVRGTNDIQELSKTHDIVSKSKTELWHRILTHYLPLYFPEADRFHRSSRSDWFFAFLERYPSPHFISAMSKDAFTADAWDVVGRKVAKERLLADIYETSKVSVGLPVALDSDAISMFRLVLGEGRSLIAQRNQIEARAVALLKDLPDYQLLTSIPGIGPINALTILAEAGDLRRFGHHRQFLKFCGMDLATIQSGTFRGQTKLSKYGNARLRRTLWMAGQVAILQRTNSFRDKFERYISKDRQNTHLRRKAYTAIAAKMARTVHGIIKNGEPYRPFFEG

SEQ ID NO: 94106 - protein, 447 aa, unidentified
MKSELSKESPRVLGRVHPNAAGIDLGAREHYVALPPEREAPVRKFGCFTHDLEEMAAWLKANGVTTVAMESTGVYWVPVYQVLEKRGLEVLLVSTRHMKAVPGRKSDVLDCQWIQHLHECGLLRSSFRPADAICVVRGYVRQRDTLRDESCRHVLRMQKALEQMNVQLHKVVTDITGETGMAIIKAILGGERDGTKLATLRNYRCQQSEEQIARALVGDFRDELLFCLRQEFDAYHFVQAQIFRCDEEILARVKSFEAKVEPGAVPSKGKKSKKQADEVCLALFRAAGADLSLIPGLGPRNLPTLFAEVGFDLSKFPTEKAFASWATLAPRNFITGGKRKRAPQAGASRVADSFRVAAQTLANSKTALGAFYRRMRARKGAPFAVAVTAHKLAKLFYRLLKHGESYVERGVDYYQERYKAQQVRSALKTLKGHGYSATLQLAPTAVP

SEQ ID NO: 94107 - protein, 343 aa, unidentified
MQAITTVGLDIAKSVFQVHCVDALGNAVLRRQLKRRYVLAFFKKLPPCLVGIEACATSHHWSRELQALGHTVRLIPPAYVKPYVKRQKNDAADAEAICEAVQRPSMRFVPTKTSEQQSCLVLHRTRHLFIRQQTAVINTIRAHLAEFGIVAPVGRNGMEELLYAVADYKDERIPEVARECLQALGALLGKLKAQILEFDGQINAWHRSNETSRRLDELPGVGPALATALVASVADPKAFRSGRDFSAWIGLVPKQNSSGGREKLGSITKQGDRYLRSLFCAGALAVIRYAKIHGTKYRPWLTKLLERRPTKVAAIALANKIARMAWAMMAKGERYREPVALAR

SEQ ID NO: 94108 - protein, 377 aa, unidentified
MRKVALDLGAKKTTYCEVQNGVVVERATVTLSDSLRSLLGPDEPPAQVAIEACRQAWYVHDLLRGWGNEVLLVDTTRSRQLGIGQHGRKTDRVDAEVLARAVENGRIPAAHVLSPHRRELRRRLGIRRALVENRAQMVTTARGLASELGERLPSCTTERFVRAVGRASLPAELKAMLEPLLATVEVLDLKLAGIEAELGKLCTAEPIVQHLCTVPGVGGIVAAAFVSVIDDARRFRRAHEVESYLGLVPSENSTGGKQRLGAITKKGNPYLRALLVEAAWSVLRNAGADDPLRRWGLAVAKRRGKTIAVVAIARRLVGILWALWRDGTVYDPASLGKKSARGLRASAQDIQTQAAALARAARKDSCRRLTREVPKPS

SEQ ID NO: 94109 - protein, 409 aa, unidentified
MDQLIERCCGLDVHRDTVAACVRVPGPNGKQRHEVRTFGTTAVELLALRDWLEAHGVTHVAMESTGVYWKPVFYVLEEAFTCLLVNAAHIKQVPGRKTDVKDCMWIAQCLEHGLLRGSFVPPAAIREIRDLTRHRKVLIQERTRAANRVHKLLEDAGIKLASVATNILGVSGRAMLEALGHGTTDAEGLADLARGKLRKKLPALRQALAGRFRPHHAFLVSQLLAHVDYLDEAIATVSEEVEGRLAPFAAQLTQLDTIPGINKRTAEVIIAELGVDMSSFPSDRHLASWAGICPGNNESAGKHKSGKTRKGNRWLRMTLIEAAAAATRTKDSALQARYRRVMRHRGHKKAVVAVAHAMLRAVYHLLAEGTTYREPGAAYYDRRHTHRVTRRAIQLLERQGYRVVLEPAA

SEQ ID NO: 94110 - protein, 340 aa, unidentified
MKFVGVDLHKHVIKLCVIEVVRGKRKILTRRHFNCRDTEKMRKFFEGLGRFEAVVEATANYEWFFLVIEDLADRLVLAHPKKLRVIAESTRKTDKIDAEVLAVFLALDMIPESHRPSPRIRQYRVLVRHRRWLSRRITSVKTKLRNKLAHYNADIAALFTRRGMRHMAELAVSSCDRFEMEALQVQLELFERQLREVSAELEKFAETAPLHEREARDILASIPLVGPVTIDVVLSELGDWTRFSNTRKVVDFAGLSPGVRESAGRRHELSITKEGSRLLRWALIQAAWRLVGKSARWNRLYQRLTKNTGSKKKAIVGVARHLLCVMFSMLKSGQPYRLAA

SEQ ID NO: 94111 - protein, 412 aa, unidentified
MEVLYACCCGIDVHAKMLVACVLKQGQKDVRTFSTMTEDLLRLLDWLTHVGCTHVAIESTGVYWRPVFNILEGAVDVMLTNARDAKGYKARKTDVIDAEWLADLLRHGLLKPSFIPPLPIRELRDLTRYRESLVREQTALANRIQKLIESANVKLGQVASDALGASGKRMLRALATGQTDAEQMSHLAQGVLKRKQPQLQQALEGRFTQAQRWILGQLLDQYDHVEAALQRVEERIGQEVASSADPFVPEAIKLLDTIPGVGETVAQIMVAEVGVDMEQFPSADHLASWAGMCPGNNESAGKRRSGKTTKGSRYLRAALVQAAWAASHQKETYLAAQYKRLVKRMGKKKALIAVGHSILVIAYHVLQNRTPYQDLGGDYFARRNVDKQRKRLVRQLESLGVKVTIAEIKEAA

SEQ ID NO: 94112 - protein, 391 aa, unidentified
MIYVGIDVAKDKHDCFITNSEGEVLFNAFTIPNNADGFHDLFQKISSLTNDFSNVKVGLEATGHYNYNLLGFLIDKGLPTFVINPLHTNLFRKSLSLRQTKTDKVDAHTIALMMMSGVNLQSYSNTSYHNEELKSLTRYRFDKVQERAKLKTSISRLVNILFPELEKLVPSLHMVSIYALLAEFPSSAQIASCHLTRLTNLLANASKGHYNKEKAIEIRNAAKHSIGSNMPAKSLELKHTIRLIQELTSEIDEIECSIKSIMDEIRSPILSIPGINYRMGAMIIAEIGDFNRFSSPDKILAYAGLSPSTYQSGQLDGCYSHMEKRGSRYLRYALFNATKFVCIWDNQFSAYLAKKRSEGKHYNVAISHAAKKLVRVIYQLEKSGQLYHRAA

SEQ ID NO: 94113 - protein, 387 aa, unidentified
MQKPHDDSKASLTAFVQDSTLTVVIEMSLRSWLVAGMVPGVNREPRKKIAPDPEVLLLLLYRWRDEAIKAGKEITRIAVAYETGRDGFWLARWLRARGIDAHVIHATSVAVSREHRRAKTDRIDTAMLQRGFLGWLRGERGHCSMAIVPTVAEEDGRCPHREREILVKQRTSTVNRMKSILMQFGVRNFNPVLRKAPEKLESVRTPEGIPLPSNAVAALQRQMERFRVVKEQIKAIERTRLQRLQRDPAEKFNAMVFLLVRIIGLGIETAEQLVHEILSRDLRDRKAVARYAGLTGSPDESGSKRREKGLSRSGNGRVRKILIQLSWRLLKFQPESDLVRWFKTRTANAQGSRKPMIVALARKLIIALWRYVSTGLVPEGFQLRSAA

SEQ ID NO: 94114 - protein, 349 aa, unidentified
MEKLSRIGMDTSKHIFQLHGVDAAERVILRRKLRRKEVLGFFAALEPTLVGLEACGGAHYWARELTRLGHTARLIAPQYVRPYVKRGKNDAADAEAICEAMSRPTMRFVAIKSAESQAALMLAGMRDRLVRNRVQLANAIRGYAAEFGVVAAKGSAKIGPLLVRLQADETVPAMARELFAEHAREYAALTAQLAAIDAQLMAFYRANELSRRLAQIPSVGPVIASLLAMKVPDARAFRSGRQFAAWLGLTPKDHSTAGKTRLGVITRAGDETLRSLLVVGATAVIWQARRGKSRSASPWLLALLRRKPPKLAAIALANKTARIAWKLMMTGESYQAHRALPGIALPVTA

SEQ ID NO: 94115 - protein, 345 aa, unidentified
MQTMYYIGLDVHKRTISYCVKDGSGTIHAEGTIPATRFDLDHWMKTLPQPWTAAMEATVFTGWIYDHLQPHAAALKVAHPLMLRAIAAAKKKNDRVDANKICDCLRCDFLPECYMASTAIRERRRTLRYRNLLVRQMVQMKNKISGLLMEAGVSYNKQRLHKAGYFRELLATTPDIDEGLVSLLRLCRETVVRLQRTESALVRSLERDSLLMDRVERLMTIPAVGPITALTWALEVGDAKRFSSIKRAISYCGLCGAEKSSANTVQRTPLSKQRNKHLQTTLIEAAKMAPRNSPALAMLYDKEKQKGNANRATLAVARKLVAYLMAVDRGQRNFQVVAVSDCAAA

SEQ ID NO: 94116 - protein, 371 aa, unidentified
MDPITGARIARVGVDLAKQVIQVHAVDASGRRLVARALKRDQFFAWCTQLPAGCVVAMEACSSAHHWARKLRAHGLDPRLIAAHFVTPYRMEGKGGKNDATDASAICEAASRPSMRFVPVKTCEQQGVMSLHRVREGLKEERTACINQIRGVLTEFGLVFSKSPKVLRAVLADIIEDASNELSTTARLVVQRAFEHWRELDEHLRWCDRQIGQHVRASPAAKRAAKVIGIGELGASALTAGVGDFSQFKSGHQFGAWLGVVPRQASSGGTIRLGRITKRGDDYLRTLLIQGAKAAVMSADKRDDPISRWLVQLTARVGWQKACVAMANKNARILWAVMTREDGFDSKHVSAKPPPRQPVVDPPSIPAACAA

SEQ ID NO: 94117 - protein, 472 aa, unidentified
MKVVYRCCAGLDIHRDTVSACVRRRVRGQAEAVIEEQVFGTFTQDLERLRAWLRKNKVKQVAMESTGVYWIPVWNVLEASRHLSLLLVNPATVRALQGHKTDRIDARRIAEYLQYGLLQGSFIPPRPMRELRELTRMRVHIQQDRNRVINRIARLLETVNVKLASVASNIVGTSGLAMLRMLAAGESNPERLAECARGHLRSKIPALVLALEGRPDAHFRWLLSDLLRKLDWLEEERARLEARLEELATPYADVLRRLATIPGVDKTSALVLLAEFGTDMTQFPTSAHLASWAGLCPGNAESAGKRLSGRTRKGDRYVRRILVQSAWAASRKNNCFLAALFFRTAQRRGMKKAAVAVAHRILVIAWHILAETGTEYFERGGDHFDRQNPERTARKLSRRLEAIGYKVTLARAPKPKPVPPPGRPSKRNAVPVGPPADRALCPKCAAWGIPCIHARNAKSAGPNSLTSESTQT

SEQ ID NO: 94118 - protein, 343 aa, unidentified
MQTVTTIGLDIAKSVFQVHGHDGAGQVVIRRQLKRRSVLAFFQKLPPCLVGIEACASAHHWSRELQALGHKVRLIPPAYVKPYVKRQKNDAADAEAICEAVTRANMRFVPTKTPEQQSGLVLHRTRHLFIRQQTAVINAIRGHLAEFGIVAPVGRHGVEELLNVLADPNDKRVPEIARACLSAFGAQLRRIKEQVLEFDRLIRAWHRSDEMSMRLDEAPGVGPVLATAVVATVADPKSFRSGRNFSAWIGIVPKQHSGGGKNRLGSISKQGDRYLRGLFVAGALAVIRYAKIHGTKHRPWLTALLARRPTKVAAIALANKIARMVWAMMAKGERYKEPVALAA

SEQ ID NO: 94119 - protein, 423 aa, unidentified
MNPQSNLSFTAFVGIDWADRHHDFCLQAAGSDQREFGTLDHSPEAIAKWAYSLRDRFGGHIAICLELAKGPIVYALQRYDFIVLYPVHPSTLAKYRQAFVPSHAKDDPTDAEMALDIMLRHPDKLKPIKLQSVAMRTLATLVEERRCLDDDVTGVTNRMTSTLKQYYPQVLDWFEKRDTVIFCDFVSRWPTLLQAKRARRATLESFFHQHNGRRAHLIEERIQSIRAATALTEDESVIRPNQMVVLALVEQLRVLLQAIDRFDAEIDSVTKNLPDYNLFAALPGAGHIQAPRLLVAFGEDRDRYANAAEIQRYSGIAPVVERSGNKCWVHWRLACPTFLRQTFVEWAGSTIPRSYWAGAYYQQQRQKGCSHRVAVRALAFKWIRIVYSCWKNRTPYDESVYLKSLKRRGSPLLNGVMESAKMT

SEQ ID NO: 94120 - protein, 382 aa, unidentified
MTGTEPQAWGTGLMDDITFVGLDVHKATVCIAVAEGGRGGDVRQLGVFENRPEILSKVVSRLSKGGRRLSFCYEAGPCGYGLHRLLTGYGHECVVVAPSLIPMKAGDRVKTDRRDALMLAKLHRAGELTAIWIPDAAHEAMRDLVRARATAVRVLVKARQHLQGFLLRHERIYRGARAWTLAYRRWLSTVHFEHPAQQIVLQDYIHAVQDAETRRDRLTQQIEELLPNWSMAPVVAALQSMRGVALIVAVTVVAEVGDFRRFANPRQLMAYLGLVPSEHSSGRSVRRGGITKAGNALARRVLIEGAWTYRMSARVSRKLYDRLEPLPAAVRDIAWKAQLRLCARYRRLAAIGKPKVVVTTAIAREMVGFIWAIARLAQPALV

SEQ ID NO: 94121 - protein, 340 aa, unidentified
MHQAQSYHFIGLDLHKCSIAYCEKTATGKVAARGTIGARASDLAALARSRSQPFVVGMEATLFSGWVYDVVLPYAVEVHVGHPTRLKALSKNKNDRIDAELLANLLRADLFPSCHMAPPEVRHLRRVLRYRNFLVGEATRMKNRAAGLLMETGVEYVKSKLHGKKYFSELLDSLEEVPGSVRELLRMTRTNIELFVSAQRRLLDALARHGALRDRVALLKTVCGVGDVTALTWALEIDDPHRFPSIKNVQSYCGLCSAQHESGGKQRRAPLSKERNPHLQTILIEAAKLAPCKHRHLACVRQAALERGYNRNRATLQVARKLAAYLLAVDKSGEPFVVPA

SEQ ID NO: 94122 - protein, 283 aa, unidentified
MNGDYAGRQVVGMDLHRRRSVLVRMTEDGQKLGTARITNSAAALRAEIARAGENPRVVLEATYGWYWAADTLACAGAEVHLAHPLGVKAYGYQRVKTDAKDATNLADLLRMGRLPEAWITPPQIRDLRELTRYRHKLVGLRTSCKDQVHAVLAKLGIPVTCSDLFGAWGSSWLDGLRLPQPYAGKVTSLRQLIGELNTEITMVGEVIADLLAGHHGYRVIQRLPGIGPVLAAVIIAEIGDVTRFKTAAQLASWAGLTPSTASPAPGSAGGTRPSRDPGCCGGR

SEQ ID NO: 94123 - protein, 344 aa, unidentified
METTAIGLDLAKNVFQVHGVDEHGQTSVRKKLQRAQVAVFFAKLTPCLVGIEACGTAHFWARKLQSLGHTVRLMAPQFVRPYVKTNKTDAADAEAICEAVNRPGMRFVPIKSIESQALLALHRARQGFVKARVAQTNQIRGLLAEFGIVVAQGARTIEHRLPSVLEDAENGLPGNFRQLLSRLFEHARYLRQQAEAIEEEIKRWHEQNEASRRLAEIPGIGPLTASALVASIGDARAFASGRQLAAWLGLVPRQHSSGGKPHLLGISKRGDGYLRTLMIHGARSVILRAQKKAGYAESWLGRLLARRHKNIVACALANHTARVAWALLAHDRRYESTYSAVQAA

SEQ ID NO: 94124 - protein, 400 aa, unidentified
MRAVFGIDVSKTSSEVAILVNGEKVHGYTILNDTIGFNRLLGDLKTVHNPEIIFEATGVYSRRLQAFLEEYSYAYTRLNPLEAKKQLDSLRVRKTDKIDAEKLAKSQLVHNRKPTYVQEEVYQHLRDLSRFYQNMTEDLVRTKNRLHKVLQVTFPELENLLSTPTGEQYWNLVMAFPCKEFVLSLSQSNLCEIIRQSTSKRISEKRIAYLTDKLIKLAKQSFCAVKKTSPMLEEVRYYAQELLRLSERRQVILNDMVALAQPLPEYDILRSIPGIAEATATSIIGELGDIRRFQSTNQINAFIGIDLRHYESGNFLAKEHITKRGNPYARKILFKCIHNIASASHTNPCHIADFYEKRKRQSTIASTKPHTIASIHRLIRTMYYLITHNKLYDYSLTQNR

SEQ ID NO: 94125 - protein, 338 aa, unidentified
MKKNYFVGIDVSKQTIDVAFIMQKDQQKTQPSWKVFGNNERGLYEMKRWLQSNHVPFNEDTLFVIENTGLYHRLLVKFCNKHQLALCIENGAQVKWSLGIARGKSDKVDSRRLAVYAVRFADRLKPASVLHEGIQAIKDLITLRNRHIVQMSSLRTHLKELKATTEPRAVKELEKIHAPLFKAMKAVVKKTEAAIIKKIEANELTKQQYKLLLSIPCIGPVTASYLIACTNAFTTCSSGKQLACYCGVVPFEFQSGISIKGKHHVHKMANKNLKALLHLCALSSIKYVDELRNYFNRKVEEGKNKMSIINAIRNKLVLRAFSVIKNNRPFVENICVAA

SEQ ID NO: 94126 - protein, 317 aa, unidentified
MEAPVAGIDVSKDKLIVYFQGKLYEFTNDRQGFEEIRKILPSGCKVGIESTGVYHVNLAKYLNNEYDVRIINPFILKKFKDFRGKKSDKNDAKKLAELVVSMGSGFTTSDARELTSQWDFVIRSIARVKNRLRRDLVLLGYRDSLSKRNLEEVLRGGGDSVVLSEVRFLLEELERLEGRKREIEKELEDFVPKDSLIFTIPGIGKTLGCIILARVGDVRRFSDKKRFVAYCGLDPVVESSGKSVVSRGISKRGDAVLRRAFYLAALTAIKVNLVIKRFYEEHKGRLKGKKLIVACARKLAVITWAVLYYNKPFDASE

SEQ ID NO: 94127 - protein, 351 aa, unidentified
MSQKTDTVVACTIGIDTGKNTLHLIGLDDRGAIVLREKLTRGRIAARLANVPQCLIGIEAGMATHCVARELIALGHDVKQVPPVYAKPFRQGHKNDFRDAHAIAEAVQRPSTRCVPVKTDDQLDLQALHRVRSRLISERTAVINQIRGFLLEHGIPVRQGLRFLRQQLPDILARRIDVLSSRIIRIIEDLSGDWRRLDERIEHVTEEIEELAHGTESCQQLMTIPGIGPIIASAMVAAVGSGTAFAKGRDFAAWLGLVPKQMSTGDRTILGRISKRGNRYLRTLFMQGARVILLRPANWAKHSFGPWLTAAAKRLHHNVLATALANKLARIAWTVLAQRRNYESRVIIDAA

SEQ ID NO: 94128 - protein, 355 aa, unidentified
MNSKNTILDFTGQPLYIGLDVHKRTWTGTFCTNHTILQTVTFKIPLVENLVLYLEKLFPNAEYYCAYEAGFSGFWAQEQLEAKGIKTIVVNAADIPTSDKDRKFKNDPRDSRKIALSLRGGELEPIYIPSKEAQKVRSIVRERSSIANSQRRVKNQIKSHLNFFGINIPEDLTNRYWSKRFVDWLSEIAEQENDDALRFKIERHNLLRQFQLSVTRKLRMLSKENKYKDLYKLLLSVPGVGLLTNMLLITEIIDMKRFKTVDHLFVYTGFIPTSFTSGDNIRIGEMTNRGNRKLRSALIESSWVAIRRDPELLLKYETYRKRMGGNKAIVRIAKILLRRIRRVWLKNEPYQIATT

SEQ ID NO: 94129 - protein, 340 aa, unidentified
MQITTIGLDLAKSAFQVHGIDATGQVVVRKSLRRSQMLPFFAKLPSCLVGMEACGTSHHWARELIKLGHDVRLMPPAYVKPYVKRGKTDAADAEAVCEAVTRPTMRFVPVKSPEQQAALSMHRTRDLLVKQRTQLINMIRGLLAEFGVDIPKGLERARQIIDGKVPEVPIDAARIVTTLSQQAIDTHIRLREIDRDLAVWLRGNDVARRLMTIPGIGPVGATALAASVTDPHQFRSGRQFAAWLGLTPLQKSSGGKERLGRITKMGDKYLRKLLVVGMTALVRRAKYNPGKIDPRLADLLARKPTRVATVAMANKTARVIWAIMARGETYHADHRPALAA

SEQ ID NO: 94130 - protein, 338 aa, unidentified
MIVIGVDVHKQSLTAVAVDEAGRMLDERTVTGANDGLVAWASSVSDERLWALEDCRQLTRALERELLAAGEELVRVPPKLMAPERRAGRARGKSDPIDALAVARAALREPRLDRPRPGEELFRELKLLVDHRDDLVDERRRGQQRLRWHLHQLDPSLLVPAGALDRTLQLDRVGRWLSRRQPEAQVRVARELVARCRSLTRTILELDRELEQRIKQTAPTLLELPGCGAITAAKLLAEIGPIERFQTDAQLARHSGVAPLEASSGRVRRHRLDRGGNRQLNCALHRIAITQARVHPPGRAYLERKQAEGKSRREALRCLKRQLARVVFNTLKASPALT

SEQ ID NO: 94131 - protein, 316 aa, unidentified
MNQKETFIGIDVSKKQLDVAVLPDAKHKVYSNNEQGIKQLTSFLKSLSPSLIVLEATGGFEMPCVGVLAAEGIPVVVVNPRQIRDFAKATGRLAKTDTIDAHTIAKFGETVRPEIREIKNPEGQELAALNARRSQVIQMITAEKNRLATATKWTREDIKKHIAWLKESLDDVNDEIDKSIRNSPVWREKDDLLQSVPGIGPVASATLLSQLPELGTLNRKQIAALVGVAPLNRDSGIMRGKRSVWGGRSSIRCALYMATLVATRFNPIISAFYRRLCNAGKAHKVALTACMRKLLTILNAMMKNRVHWSPVCPVNS

SEQ ID NO: 94132 - protein, 354 aa, unidentified
MRYVGVDYHKKSSYVTVVDERGRVVKEGQIANTREALAAVLDGCAQGASAVLEAGRNWPVMYDWLEELVEEVTLAHPAKVRVIAEAKVKTDRIDSRMLAQLLRADLIPRAYVPGKVTQEQRRQLRQRMFLVRLRTMLKNRIHILIDRHPELSAKAQSWSDLFGKAGRQWLAQLSVPGVDAQLLREDLELLEIIEARVKASDGWVSQLSRRDGRALLLGTIPGIGDFFALLLAVEIDDVHRFSRAPKLCAYAGVVPSTYASGGYVHHGRITKQGNKWIRWACIEAVYPAIRKDPALAALYERLKAAKGANVAKVAVAKRLLTIAYRLLTENRPYRPAAQRVGIRRRISPAAPVCA

SEQ ID NO: 94133 - protein, 408 aa, unidentified
MQRRENLLYVGIDLHKETHTAVMVNCWNEKLEVVVIENKPSEFKKLAEKVNKKSNHLGLEPIYGLENAYGYGRSLAVWLIENDYIVKDINPALAYDQRKSAPMYRKNDEHDAYCVATVLINQLHTLPDAKPKDNEWTLAQLVNRRDLLVKDGIRFKNGLHEQISMAYPSYSKFFSEIDGKCAMYFWKTYPSPVHLQEKIAEDLTIEFKEISPIIRGDKAELILDCVKNDGNTYREYQESRDFITTSLVRDLEHQREELAGLDKEIEKILLSFDYKLTSMPGIGTSIASKLIAEIGDIRRFPNADKLARFAGVAPVKFSSAGKGKEQSSRQGNRQLHGLFYFLAVTMVSRPKNGAPNHPVFYDYYMRKIGEGKTKSQALVCIMRRLVNIVYGMMKNKTEYQEPLPEKEQ

SEQ ID NO: 94134 - protein, 331 aa, unidentified
MKKCNRVGVDVSAKELVVAIETAGPREAPIVLANDADGHRKLIKLATKRGASEQVVLESTGTYGLDLALALHRAKRIEVMVANPRAIAHFARASLQRSKTDRLDAEMILEFAIRMPFEPWSPPAPHILELRALSRRIEAMSNTVVQEKNRLHANDQSEALSEFVKQDIREFVDLLENRITRLRKQALLVIEQSQDLAKAFAHITSIKGIADASGIAILAELAVLPPDMTTRQWVAHAGLDPRQYQSGTSVHKPARISKTGNAHIRRALFMPALVAVQWEPHIKAFYEHLLERRKTKMQANVAVMRKLLHAIHGMLEHDQDFVGEKFFAMKG

SEQ ID NO: 94135 - protein, 430 aa, unidentified
MENSTSQRIRRITATTLIVGIDAAKDVHWGRITDYRGIDLCKPVKVNNNINGFESLLQKIEKLKIKHSCDKVIIGMEPSGHYWRALGWYLMLHESKPELVGVNPYHTKQTRELDDNSPSKSDPKDALIVAHLIREGRYFDMYLPAAEYAELRILNGERQRLMKQVSRANNTIVAVMDEFFPELGKIWGRVTCPTSREIMKQYAFPDEILAADKSALTIIIKLVSNGTEGEKLANELISAAAVSVGVREGQKSAKLKLLRLIEELEFYEARVDVLEAELATIMDTLELGDVLQSIKGVGPVISAAFVGEVGDITRFSSWKQVRKLAGLNLVEQSSGQHIGKTKVSKRGRPYLRHMLFLAGEVCVRHNPEMRQYYQYLRERRNNPLGGYAAIVAVGLKVMRIMFYMAKNKEKYNSEKALGEVRRQQIASLAA

SEQ ID NO: 94136 - protein, 350 aa, unidentified
MTTIARRITGGVDTHLDVHVAAALDELGALLGVESFAATAAGYGELLRWLEGFGTLELVGVEGTGSYGAGLTRHLLHHRVAVVEVDRPNRQRRRRKGKSDAEDAVAAARSAQGGDATGSAKTRDGNIEAMRVLRVARSSARSSRTQAINQMRSLVSTAPEELRAELRGLSIYKVLTLTSAYRHTGRTDVTTLTKLTLRMLARRALSLEEEVKEIDRLLKSLVAETAPELHAINGVGTDVASALLVAAGDNPERLKNESTFAKLCGVSPLDASSGKQQRHRLNRSGDRQANSALWHIVFTRMVCDPRTQHYIERRMKEGRSKKEAIRCLKRYVAREVFAALPRSQFALDNP

SEQ ID NO: 94137 - protein, 339 aa, unidentified
MQLYAGLDLHSTNTYIGILDQEFNRIFKKRVSNNLELILQTLKPFSSQLKGLVVESTYNWYWLIDGLMDNGYQCLHLANPSAIKQYQGLKHADDQHDAFFLAHLLILGILPQGYIYPKKDRPVRDLARKRMFLVQHKTAHILSLQSLIARCCAKKVSSNEMRHLTLDDLHHLLEEEHLVLSAQANLDNIRFLTQQIKQIEKTINKKIKLNKAFQNLLTVPGIGNILAMTIMLEVGDINRFAKVGNFASYCRCVSSQRLSDGKSKGHGNRKNGNRYLSWAFVEAAHLTRRHCQQFRRYYNRKVAQANTSLATKALSNKLARICYYIMRDNVPFREELSSQ

SEQ ID NO: 94138 - protein, 338 aa, unidentified
MTSIPLSVGLDYHQDSVQVCVLNEQGSVILNRSLSNDARGIVRAVAPRGQVRSVAIEACCGAAALADELIGRSNWPVQLAHPGYVARLKQSPDKTDFSDARLLADLGRVGYLPKVWLAPEELRRLRRLVRHRQQLVKVRKNVKLRIRALLRENRLRARGCKAWTKPWLAWVASEDGLVKDDRWLMNQHLAELSHLAGLLKAVEKRLKERAASDPVIQKLLTFDSVGLVTAVTIRAEVGQFDRFNTGKQLARFCGVSPRNASSGQRQADAGLIKAGNPGLRMVLIELGQRLICRKEGRWSTLGHHLLRGGKPRNVAVAAVANRWVRWLYHEMQPTMLET

SEQ ID NO: 94139 - protein, 414 aa, unidentified
MQVVYSRCCGLDVHKKSVTACVLVFDQQGRRSVRKKQFETHRQGLHRLVLWLYASKVEQAAMESTGVYWKPVWNALEKHFPLILANPYQVKSIPSEKTDPKDAEWIADLLAHGLIRPSFVPPREIRELRDLTRHRVKLVQDRNRVHNRIHKVLEDASIKLDTVASDILGTTGRAIIEAIIAGEDRPDWLADKAQGTLRTKRNQLRLVLRGKVTEHHRWMLRRIIGELKFLDNEILSVEQHLAAAMQPHQPAIDRLCSIPGVNVITAWTLIAELGPDMSAFADAQHAASWAGLCPGNRESGGKQLSQRTRKGNRWLRRALCQSAWAISHKKDCYLTAYFYRKAGTGIRQAIVATAHKILIIVYHVLRDGISYQELGGSYFDQLHPERARNRLLRRLERLGWEVSITPRKSSVPDS

SEQ ID NO: 94140 - protein, 344 aa, unidentified
MKDITTVGVDLAKNVIQVHGVDRRGKTVLKKQLRRSRFVEFFANVPACLIGMEACSSAHHWARELEKLGHQVKLMAPQFVKPYVKTNKNDAADAEAICEAVSRPTMRFVPIKNAEQQAVLALHRARAGFVKARTAQANQIRGLLGEYGIILPQGIAHITKRLPAILEDGESELPGAFRQLLIRLGAHLKELDRQVGELEGQIETWHRADAASRRLAQIPGIGALTASALVATVGDARSFHNARQLAAWLGLVPRQHSSGGKALLLGISKRGDAYLRTLLIHGARSVVRVAERQAGDLPAWLQQLITRRHKNVAAVALANKNARTVWALLVHGRDYQANYAGAAV

SEQ ID NO: 94141 - protein, 329 aa, unidentified
MIVAGIDVAHQTLALVIRLNAKNAKVQEFTNTATGHEGLLKTLRGAGVERVCLEATGLYHLDLALMLEANGMALMVVNPKAVKRFAEALMTRTKSDAVDAAVLADFAQRMPFEAWVRPATAALELRAYARRLVALTEARTQAKNQLHAMMQTTSTPRMILDDVQLTITECDAHLERLRTGVLALIEAEGLLKDTFALLTSVKGIAAASAIQTMGEVLVLPPDLRAKQWVAMAGLDPRHASSGTSVNKKPRLSKAGNRHLRQALYMPALSAARHDEHIHGYYRHLIENRGLKKIQAICAVMRKLLHAIHGMLNTRQPFDGRRFYALPEAG

SEQ ID NO: 94142 - protein, 410 aa, unidentified
MSRTNDFSVLIGLDWASSKHDICIQYADGKRELAVVKHSAEAIEQWITKLHQQHPGQIAIALELSKGPIVYALQKYPFVTLFPINPTMLCRYRRALSPSGAKDDPTDASIALDLLVRYPDKITPLKMADDKIRKLAFLVEERRRLVDEKKRYVNRLINALKQYYPQPLEWFTHRDSQLFVEFITRWPSLDKLKRAKADTISRFLTSRGSFAKLVSPRLEAIKSATPLTYDSVVIESNKLLAITLANQMLPIITAIKIFEQEIEAIYHDMPDASLYESLPGVGKCLSPRLLVAFGEDRNRFGSAQEVQKYAGIAPVTERSGKTAWVHWRWGCSKFIRQTFTEWSAKSVLYSYWAQLYYEQQKKKGNSHHQAVRSLAFKWIRILYRCWKTNTPYNETQYLKVLTERNSPLLG

SEQ ID NO: 94143 - protein, 360 aa, unidentified
MKVTTVGIDLAKDIFRVHGCDARGRTVVGKSFTRQALRMFMAKVPPCLVGMEACHTAHYWAHELQAFGHQVKLMAPRFIRPYVKNNKNDTRDAEAICEAVTRPTMRFVPIKSRAQLDVQAVHRVRQQVVRERAALANQLRAFLAEHGVVIRKGFAAVRRALPEIIDDGDNGLSGLMRELLRDLYERFKLAEQRLGRYDELVTKVVSQDERCQRLAQLPGVGPLTATAVVASVGNAREFRSGRELAAFFGLVPRHRASGSRTVMLPIAKRCDHYLRTLMVQGARSSLRYIERRQDPRGVWANRLRLKRGSYIAAVAIANKNARVMWALLTRGESYRAEPARRSPSALRVKIDHPQKNPRRA

SEQ ID NO: 94144 - protein, 391 aa, unidentified
MGTPRARKSDGTGYKSGRNKIITHPRRKTMAGKKRPVSKQILAKAGQLHVGIDLHKKFLQVAVMNQNGTMLFEDRIDNDWDVIKKFFARFPQDSRYVVESSSVWYGLYRYMTDKLGMDVTVSNPFVNKVIATSKKKTDKVDARILADLDRGGYISECYVPDEQTVENRRLTRFRHKMVHMRTACKNGIHGILLQDGIKIHATNWTAMYMIALHRLKNYRIEGYLTEIESFNKIIHDLDYKIRAITSASEEACRLKTIPGVGDYTALVMTAEIGDKSRFLNSHQLCAYAGIVPSVRNSADTIHHGNITKRGSKMMRWALVEAVHTHVRRFPETDLSIFYKRLEKKRGRSKATVAAASKLLRIMYWMLKEGKDFAPNYSQSHKPREDVEGKPR

SEQ ID NO: 94145 - protein, 364 aa, unidentified
MENVFLCCAGLDLHKKSVEACVRRMEPSGHVHQQTHHWGTMTRDILMLADWMAAQWVTHVAMESTGVYWKPIYNILESRFTVWLVNARHLKQVPGRKSHTRDCQWIAQLLQHGLLKGSFVPPRPQRELRDLTRHRTRLVEEKTRTSNRIEKVLEDANIKLGSVASEVLGVSGRAMIQALLQGEKGPTQIADLAQRQLRGKIPEFEKALEGNLTEHHRFMLRLLWKGLTRQEALIAELEAKIEEVARPFASGIERLDAVPGVDRCVAEVVLADVGAKVDPFPTHQQVTAWAGMCPDNEESAGKRRKRRITPGNRWLKRTLVQAAWAATHTKNSELASQYRRLAGRRGEKRALIAVGHSLLVILYY

SEQ ID NO: 94146 - protein, 389 aa, unidentified
MVSRKGHDSRILGFQFMHACPSFGGPLLANRKYMTTQQKQSCLFIGIDVHKDTHTAVGISPYGEKMFEITVGNYKEDFEKLEEKVKEHSSVLSPFFGLEDVRGYGERLAVYLYEKYPVYHVPSILVDRLRQNATHPEKSDSLDALGVAKVMIQSIDTLLPYTISEENEKAKQLKEISIDREDLVLERTRLKNQVHTLLYRIYNTEYEQKFKDPFALKALKHWRNAKPKCDPFLLKTMKRKVRRLLDIHAEVADLEKDMGVLLKDNYTIQTASGCGIVLASTIVGEIGDINKFKSPASLAKYAGCSPRERSSGKKIRHVKSRSGNRRLNCAFHRMALSQISRSGNDKARTYFKRKVSEGKSKSQALVCLRRQMVNIVWMMLKHKTMYRTT

SEQ ID NO: 94147 - protein, 403 aa, unidentified
MQYTAGLDWGSVGHAACVIDEQGTVTARLDIQHTAEGLKKLLADLARIAPPQELPIAIERPSGLVVDTLVEAGHPVVPIHPNVLKACRPRYHAARCKSDPGDAYILADVLRTDGHRFRALRPASDEIKALRTMTRTRDDLVAERVVVANQLRSLLDAFWPGAVAIFADIDSPIALDFLDRYPTPASTRHLGPKRLAAFMARNAYCGRRSPEELLARLQSAPNGLAGEAEEEAKGYMVKALVAVLRTLVEQIRRVTAAVEHAVAQLPAGQVVMSLPRAGKVNAAQILAELGDDPERFQTEDQLAAEAGVAPVTHESGKHRAVVFRFACNKRLRQALVTWADNSRHPSPWANHVYALARAKGFRHPHAIRVLARAWVRVLWRCWRNNKPYEAALHGAAKPFLETA

SEQ ID NO: 94148 - protein, 381 aa, unidentified
MMTMTRDGESIAPTTCLLMAFELGQRSWKLGFSTGIGQRPRVRQIPAGAVGMIANEIVRAKVRLGLPADASVISCYEAGRDGFWLHRYLGAQGITNHVVDSSSIEVNRRARRAKTDRLDLGGLLNLLARYVLGDRRVWRVVRVPTVTDEDARHLPRTWETLTEDRTRLINRMKGLLTTQGVQIPINKDFLEQLHAAQLWDGTPIPTGLQERLAQDWAQLRQVETQLRERRARATRQPDATTPTGRAIEQLQTLRAIGVTGAWVLATEIFGWRQIKNRRQLGALVGLVPAPYQSGETQSDQGITRAGNTHVRRVMVQLAWVWLQYQPQSALAQWYQRRFGGSGKRLRRIGIVALARKLLIALWRYLETGVVPEGAQLKPMEG

SEQ ID NO: 94149 - protein, 343 aa, unidentified
MQIRSVGIDLGKTTFHLVALGDNGKVLLKKKFTQKQLIAFTANMQTCLIGMEACSGSHFLGRALRAQGHDVKLIPAQFVKPFVKSNKNDFIDAEAIAEAVDRENMRFVPIKTDDQLDLQALHRVRDRLMARRTSLINQIRAFLLERGIVFAKSPIRLREALPEVLENVNENLTPRMRNLVAMLWSEWKDLELQIVQMNDEVERIASSDAACRRLRQIPGIGPLVATAIVASIGNGAAFRKGREFAAWMGLLPKQHSTGGKARLYGISKRGNSYLRKILIHGARAVVLRSKRDRIAMGAWMTSLETRAPRNVLIVATAHKLARIAWAVLSTGQDYRAVPEALTV

SEQ ID NO: 94150 - protein, 362 aa, unidentified
MGEGIRWVGLDVHASKTAVAVIDTATGELSKRTVFGRPHEVLEFLAGLPAPVRAVYEAGPTGYGLARRGRAIGIDVQVCAPGLIPQAGPGSRVKTDAKDALKLARLHAAGQLGLVVVPTVEQEQVRDLVRAREDVRADLMRARHRLGKLLLRREIYYQGRCRPWTDEHRKWLTSVRFDDVATESTFQDYLHAHDQILHRRDLLDAHINEVARSCCYAEHVRRLRCMRGIDTLLALGLCAEFRDLTRFDKPHQVAAFVGLVPSENSTGERRRQGSITKAGSPHARRLLVEAAWHYRKPARVSGELLRRQEGVDPTSIDIAWRAQRRLHARWRELHQRRGKRATITAIAVARELSHFCWEITRT

SEQ ID NO: 94151 - protein, 347 aa, unidentified
MSGTLNHHWCVGVDLHKDTLTACVFCGCCGEVSFQKIPCKCRKLVAQYFASLPQPHIVAIESVGFYRWLWEMLEPIVEKLVLADATQARALAGRRLKTDREDAFHIAELLSAGRLPISYAPPLEVQLLRDITRHRNGFSRQHGRVLCRVKSIMNANNRPGPARLASEGLIRYLKAQGPKLPARHVEMLWQCVDQLALTERQIDQAERAIGEVLRRDSFQEVYGILTTFPGVALVTAATVIAEVGDFRRFTDPKAIGRFAGLNPRVYASGGKQRIGHIAKTGSPHLRWILQQAAWTAIRTDENVRRVFLRIAKRSGRKAAAVAVARKLLTWMWSAVTKGEVYRSRVAA

SEQ ID NO: 94152 - protein, 339 aa, unidentified
MNKIIYIGMDVHSSNFTLCSFEPGYGFEADKIFGQTQIKEDIFNSTVKYINKLKSMRPDVDVICGYEAGGLGYNLHRKLKAKEIESVILAPTTMAVARNSSKKKNDYRDAITIAKCLASSAYKAVYIPDEKDEDVRDFIRMRDDHKTALKQIKQQLNAFCLRHGHHYDKPKWTGLHLNWLRKLELSKVQRETVEEYLATYEALTSKIAALDVRIEDIASEERYSEKVNKLKCIKGIKTHIALSFVCEIGDFNRFKSADKFSGFIGLVPGECSSGNTERMLGITKAGNRHLRRLVVEISNTYRRGAVGRKSVALRERQMDMPKDVVAYADKATNRCQRKY

SEQ ID NO: 94153 - protein, 418 aa, unidentified
MNVKARRTKKQVNVENQAINLLSKEELNKKIEVVEKELRSYTWRELETNGKFAKNDKLSFITDDMLIVGCDIGSENHYIRAIDVRGRELSRGAFEFSNTSEGFENAKAWVMALAAKHDKKQIVLGLEPTGHYWFALAAWMISNGISVVQVNPYAVKQSKEIEDNSQLKDDRKDPQLIANLVKDGNYGMPYFPEKVYADMRRLSMFRDQLTEDRIRNINRLHRELKIYFPEHMDAFGKIDGAFTLEVLKVSAIPSDITALGAEGIKNIWHNEKLRGRGYSRANEIVSYAEKSVGLTDGIDAGREAVKWYAEQILKLVACSSGKHKGQTKISHRGRKRLRYWLFQAAKSAVSHADEFKQLHEYYTTRTNNPLKKMQSLVVIACKILRVIYTILKTGTTYDPQKLLEDIKRPTASQTPMAA

SEQ ID NO: 94154 - protein, 384 aa, unidentified
MDQTTSTLSANTLHCALELSKNSWLLAIQFPDREQPSLYPIEGGNTEKLMAKLTAARDCWAKVSGSPPAITVCYEVGYDAFWLARFLKARGIECLVIDPGSVQVNRRGRRVKTDRVDVKMLLRTLIAWCRGERHVWSLVRIPSIDEEDLRRSHRERSRLVRERTAHINRIKGLLFGQGIRGINVKSQYKSLAVDKLMTGDGHRLPPRLACEIAREVQRLAMVQEQIVKIERERDTAPTPCEATERKRHLLLQLKSIGPAISALLSREVYYRQFANRRQVGSFLGLTPSPYSSGEEERCQGISRAGSGHVRAIMIEAAWLWIRHQPKSALTRWFLERTAGQSTRMRKIIIVAVARKLAIALWRYVEHGLVPQGAILNPPTTGNAI

SEQ ID NO: 94155 - protein, 462 aa, unidentified
MKLYLGGDVSKGYADWVILSEMKQIVLENFQLDDTYAGHCKLYSMLEAYVEKHPGSEIYAAVESTGGYENNWLNTLESYQKVFNLKVARINPSGVTFNRKAGMKRNVTDAISALSIAEFMIDHPKNITYNQDDKWRSLCRHWNFVEMQKQQRVQTINQLETILYSANPTLMRYKKGDLPNWLLELIIQCPTADKLAKAKPEKLAKIPYLSLARATELVAEADQNIASATDRNAEILVSQIAIQIKSFDQNIKSQMQLIERDLTCPEIELLKSFKGISTTSAIGLLLEIETIERFPTVKGFSCYFGLHPKFKQSGDKVIGVRMSKQGSKNMRKILFNIAKGAITYNPLIMAVYEKKLSHGMKKMAAIGVCMHKILRIIYGMLKHKQEYNPLIDKLNCEKSKDKKQEKQQQENANIEKSRRYQEFDVKAPISRKQTKKRREHDLSQCEITSQSTGSTCSSQTKL

SEQ ID NO: 94156 - protein, 351 aa, unidentified
MAKTLETTVAVIGIDIGKNSFHIVGQDRRGAIVLRQKWSRGHVETRLANMPPCLIGMEACVGAHHLSRRLKALGHDARLMPAKYVRPYSKGQKNDFRDAEAIAEAVQRPTMKFVATKAIEQLDLQALHRVRERLVSQRTGIINQTRAFLLERGIAVRQGRLSLRMALPQILAAPPDVLSPRMLHIIEDLAGDWRRLDERIEALSDEIGAIARQDIGCERLMSVPGIGPIIASAMVAAIGSGDTFVKGRDFAAWLGLVPKQISTGDRTILGSISRRGNRYLRVLFVQAAWVVLIRPKNWERYGLKSWLEAASKRLHHNVLAIALANKLARIAWSVLARGRGFEVSRLDYAIA

SEQ ID NO: 94157 - protein, 412 aa, unidentified
MDVVYTHCCGLDIHKKTVVACLITNTEGLEPVKTTRTFRTMTADLLALADWLQQAGCTHVAMESTGVYWRPVYNLLEGQFELLVVNAQHIKAVPGRKTDVKDAAWIAELLRHGLLRGSFIPSKPQRQLRELTRYRSTLVQERAQTLNRLQAVLEDANLKLASVVTDIYGVSARAMLEAILAGERDVETLADLARGRLRTKRDQLKDALEGRVTAHHSFLLTEHLSTLEYLDEAIERVSGAMDQRLTADQEAIALLDTIPGVGQRAAEILIAEIGTDMSRFPSAKHLASWAGMCPGNHESGGKRLSGKTRKGSRWLRQILVEIAHVASKTKNTYLAAQYKRIAARRGKKRALMAVGHTLLTIVSMMLTRRQPYQDLGAAYVDQREQHRVERRLVQRLERLGYKVSLQPQALAS

SEQ ID NO: 94158 - protein, 338 aa, unidentified
MNYVGIDHHRQYSHMTLMDQEGQVLRSGRVPNLRAEIEKFFEGFESIEAVIETGRSSYTMVDVLEEMGVAIKIAHPNEVKAIARAKIKTDKRDSEVLAHLLRMNMIPEVYRRSTGNRQAQRVLRQRAFYVSAMTALKNRVHAFLAQQREEVREVVARETNIFSEKGQKVLLGLDLAPREKKLLEALLKTYRHLETRIGESKAYVEKLYEESREAQFIRTIPGFGKYLSVLVAVEIADLTRFTDAAHLHAYAGVIPSIHSSGDKTHYGKIIKAGNRWLRWAAVEAVWPGIRADFDLRCFYERLARGKGANKAKVATARRLLTIIYKVWKEGRNYIAYRR

SEQ ID NO: 94159 - protein, 349 aa, unidentified
MVILGADLHKRSHTVVAIDETGRSLAEKTVAATADGHLELRRWAARWPERRWALEDCRHLSRNLERDLVISGEAVTRVPPKLMAGARRSVREPGKSDPIDALAVARAALREPDLPVARLDGPERDVRLLVDHREDLVADRTQAMNRLRWHLHELLPGREPKPRSLGRAVVLAELERQLAPVDGTVVRIARELVARIRELTVAIDALEREIARLVERLAPTLLALQGCGHLSAAKLIGETAGIGRVGRAAQFANYNGTAPVPVWSGNAVRHRLSRGGNRQLNVVLHRIAITQMRLGGEGRAYFDHRLAAGDTKTEAIRALRRKISDEVFRRMRHDEAAQAEHPAALATAA

SEQ ID NO: 94160 - protein, 358 aa, unidentified
MAVTGGTRRIVGGVDTHKDLHVAAVVDEQDRVIGTRSFATTRQGYRQMLAWMRSFGELQRIGIESTGSYGAGLLRFMQQAKVAVLEVTTPDKQDRRRRGKNDDLDAQNAAHAAFAGQRTVTPRSRDGMIESLRILMACRKTAVSARRVALQMIHNTIVCAPDGLRDQLRSLTRMQLVRTLASWRPDLTAYRDLDSAYRIGLKSLARRYLELHDEIADLDVMIAAIVDELAANLVARNSIGHIGAAQLLLTAGDNPERLRSEASFASLCGVSPVPASSGKTVRHRLNRGGDRAANSALHIIAIGRLRTDQRTKDYVARRIAEGHSKLDAIRALKRYLAREVFTLITQRRKEINATQIAA

SEQ ID NO: 94161 - protein, 376 aa, unidentified
MLYIGIDIAKNKHDLACINENGEIMIANFKFANSYQGFVQLKLRLEQLSPLTQDIQIALESTGHYNYNIVTFLRELGYNVFTYNPLIIKEFAKSQSLRKTKTDRKDALLIARKLRSDVTPERYQTDSIVDELKELTRYQNRLIQSRSKCKNLYVRLLDIIFPELHAIVSNLHNQFIYELLTHYPSPQKIARARFSSLLKIKRLTADKAHQIQEEAKKTIGKDSPALVLELGQLIETIKHYDKQINQTQEEINRLMNDLNSPITSITGIGTRLGAIILAEIKNIHNFKNPNQLQAFAGLDPAIYQSGQMDNTGHMVKRGSSYLRYALIQAAKLISIYSPHFKAYLRLKISQGKHYNVAVTHVAKKLTRIIFHLLKTN

SEQ ID NO: 94162 - protein, 497 aa, unidentified
MTWEITIGIDLAITGSHVATGCNQKGEFLEKTPFRFGQTLEEYERLIQRLVPVKAEPEKVLFLMEATGHVWLTLTTFLISRGFKVAMVRTQKSSDLRKFFKKNTKSDFSDAQTLAKYPFMDPEHLHLFTLAEDGIFAMDRLTKQYSKLGKDIAKCKSRIHASFQLCNPKLIAAFGDHKFTEGTSYFFQTYSNPFKVKEKTKDEFKKDMLNHLHGLENPEIIDHMYEYSLSHCRLLEDIKSRLKTLPFNLDILQEEISQEFRHIQFLEQERSILKKKIDKLYDQIDPDKVLLDFKGIGRVIAPVIMAAVGQFNRFPSLNKIKAYLGLIPKKSQSSGTDRKGLKIIKTGRNLFKESFYLAAHVARQWDVQFAHKYKTLIERGLHHKQATCALANMLLARVYSVMKRRAAALAKGDVLLAKSIRYELRDLNNNIITAAQARAIILRDFPSKTKMKQKKEESPAISTRQSKDSSNSSRRIPPFKKRLILPKNQNLQELSVG

SEQ ID NO: 94163 - protein, 500 aa, unidentified
MPKIHSFSQTPDPVDLETEVSILLENGQGVEVQHLQSYGIGIDCHSRFIAVCVHVRRDRHVYKYQMDFDTDWDSLLEAKKWAVKIICDHSNPVPDMDQPIHYVIESTSTYHMPILLSWEGNPSVINPLLAGATKKKTDELDAERLSFHDLTGVWRESYVPPEPIQSLRVLIAEREHFSKLATRCSNRINNILTRFGYNIGSKGSVTKKKDIRDIIHDLISDHPHPHSGVCPKPLPLEIREIIRKEYEDYDQNINQAEKYLGKIRQQVFSINWETRDGTITGRDAVRILCSAPGIGEITSFTWLAFVGTPRRFPNAKALNAYSGLDPSLKVSAGKVTSTSKRGGCRILHSIMVKSADRIMRIHNEAFGQWGYLMAKSSGKWKKGTNAVARKLNTALYYMMLTGTEFSYEKYSLIQDAPVFDIPVTDLPSLNPDFKRYIKVLHENNIMTTTDMAYAYLSCSLGGVRGLGRKFFVTLKDFLSHQKKYENEYGQLHPEWKPIQS

SEQ ID NO: 94164 - protein, 368 aa, unidentified
MNTVKFIGMDVHKKTITIAIIDKGRNQQPRIYGTIENRLEALDKFCRKMLSTTNRLHFVYEAGPCGYGIYRHLTQKGFDCVVAAPSMIPKKSADRIKNDRRDAAMLARLHRSGELTAVYVPDAQDEAMRDLTRAREDAVIAARKAKQRLNAFLLRNGLTFAGRSKWSNAFFNWLCDMAMPYPAQQVALQEYIDTVHENLKRVERLTDQIRQLVPAWRLAPVVSALQAARGVSLIVAATVLAELGDLSRFDKACQLMAHLGLVPSEHSSGESIKKGTITKTGNGHVRKALVEAAWAYRMPARVSASLLKRQQAVPERVCQIAWKAQLRLCTRFRRLRARGKTKQKVVIAIARELSAFLWAMAKQLQPVV

SEQ ID NO: 94165 - protein, 388 aa, unidentified
MSMVVIGMDPHKRSATIEVMASDETVLGRGRYGTHASGYRAMVRAVRHWPERTWAIEGCQGIGPHIALRLVADGEQVVDVPPKLSAQTRVFATGQGRKTDATDAHCVALAATRMAGLRPVADDQQLAVLRILADRRRSLGEDHTRMISQLHRLLLELIPGGAKKDLSAAQAKALLATVRPRDAAGKACRRVAAELISDLERIHQRKKEADKELRDLLKATGTTLTSLNGIGPSGAARLLIEAADITRFPSKAHFASWNGTAPIDASSGDQVRHRLSRAGNRQINRVLHIMAVVQLRHRSSEGRAYFDRKVAAGKTPMEAMRCLKRRLSDIVYHQMILDARAPETGPGGHVGAATGSSAAGSHPAAGTSEKSLPGPATSQPTTAPHSTP

SEQ ID NO: 94166 - protein, 411 aa, unidentified
MFYLGIDVAKKSCRYLLLNEEGEKVKSFSLDNNHQAFQNLLERLQALAIPKENLLIGLEASGGFWENLYTHLKENGFSVVLLNPYHTKKFREALAKKAKTDDIDALVIAQLLRTGEYVQSQVAEELIQSLRELTNLRYELIQERKNYQRQVYALLAIIFPEFEKTPLKNPFATASTAILQKFPTAKDLAQAKPKQIEKIVRAIPGNNLHLQEIETLIKTAQTSIYSGRAKEARATSLCILLGHIQNLSASIEKLEEEIKQLLAPQGPKDSFPGENLLTIPGVGDKTMAAVLSYLGTNGASFSTSTKAIGYVGYFPKIHQSGQTYRDNTICKRGPKLLRWALYMAAVASLKHNPEMRTIYHKKISQGKTEKQALICVGKETSPNHASHAQIRRTLQPNEGLRQLLNCQRTAL

SEQ ID NO: 94167 - protein, 309 aa, unidentified
MNDAGKIQRQGKLPNTREALGIFFADVGEPARVVMEASINWYHLYDLLETLDIPVTLAHPLRTRAIAEAKVKTDKVDSATLAHLFRADLIPAAYIPPREIRDLRELLRYRGALVRLQTMVKNRIHAILLKHGYQAPVQDVFGVQGREWLTTLPLRPVYQQALQGFLAILDALRDQISAATTAIDREALTTPAALRLRTLPGVGHYTALLLLAEIGDVRRFPSPKHLVSYAGLAPTVHASGGRVRTGHISKQGSPWLRWVLIEAALHASRKPPYQALYERLKNRKGFRIARVAVARELLTTVYWMLRHAH

SEQ ID NO: 94168 - protein, 411 aa, unidentified
MDLVYPRCAGIDVHKRTAVTTIGWVDEQGQRRRKTRTFGTMTAEIEQLAAWLVEHGVTHVAMESTGVYWRPVFNLLEPQVEVVLANAAHGKAVPGRKTDVRDSEWLLDLMQHGLIRGGFIPEAPIRALRELTRYRTGVIEERTRALNRIQKVLEDTNIKLASVVSDILGVSGRAMLEALIGGETDPEVLAGLARGTLRKKHDALVQALRGRIEDHHRFLLRTLLAHVDRLTESIAQLNAEIARRVEPYAAAFDLLCTIPGIKRRVAEVVLAELGPDLGRFADARHLCSWAAICPGNHESAGKRRSGRMRHGNRWLRGILVQAAWAAIKVRGSSFGTRFRRIAKRRGDKRAAIAVAHRLLTVVYHVLTRNEPYRELGSDDVDRHTPEQQARYYARRLAELGFDVSLDPVTAA

SEQ ID NO: 94169 - protein, 406 aa, unidentified
MQEFNAAEHSIETGSALAAVRALDEAKRHAAYIGLDVHKETIAVAVAEPGRGEPIYRGEIANMPKKVEQLVAKLSEAYDGGLLLFCYEAGPCGYVLYRQLIASGHDCQVVAPSRIPKAAGERIKTDRRDALKLARLLRSGDLSAVWVPDREQERMRDLSRARDDLKGQERKARQQLNAFLLRHGVHWPKGKSRWTPAHENWLAGLKMDDPWQQVALQTYIDAERAAGERVAQLTDQLMRALPEWSLAPVVDSLVALRGIDKLAAVVLLAELGDISRFDSPKQLMAFLGLVPSEHSSGGRRRQGAITLTGNSHARRMLVESAWSYRFPARQTKHLKAKASNASPAAKQVAWKAQVRLCGRYRTLTRAGKNTKLVCVAIARELAGFLWDIVRQEMPQLPQAQAAQQGI

SEQ ID NO: 94170 - protein, 346 aa, unidentified
MISLSPPTICNSAENIALIGIDLGKNSFHIHCQDRRGKAVYRKKFTRPKLIEFLATCPATTIAMEACGGSHFMARKLEELGHSPKLISPQFVRPFVKSNKNDFVDAEAICEAASRPSMRFVQPRTESQQAMRALHRVRESLVQDKVKTTNQMHAFLLEFGISVPRGAAVISRLSTILEDNSLPLYLSQLLLKLQQHYHYLVEQIKDLESQLKRKLDEDEVGQRLLSIPCVGTLTASTISTEIGDGKQYASSRDFAAATGLVPRQYSTGGRTTLLGISKRGNKKIRTLLVQCARVFIQKLEHQSGKLADWVRDLLCRKSNFVVTCALANKLARIAWALTARQQTYVA

SEQ ID NO: 94171 - protein, 482 aa, unidentified
MKKKNIYVNQSQELLSIFEKAGNNEKIMCVPIDYAKKDHIVMFCNGYGRILRKPFSVKNSPEGIKYLTEQVTRSCSRRCIDSKHVFFGGEDVGSYAENFANTLRAGGWIVAGVNAHDAKEQRSNIQASTDRLDLMGIASMLLNRRANCSPAQSGIYRNLRTLVRHRRNLVSMSTEEKNRIHTVVDRLFPGFLDEKKTGILPFSKSSLYLMENRFSPLQIHRRKRHKLIEVLHRYGTSKPENAAAKLQEYAVRVLNTPNEYIFTLQLSLVQHVKHFRCLQDSINQLENEIALWLAQTQGAFLTTFRGIGIVLAAGVSAEIGNPYEQKPLNNLVSYSGIIPRVKQTGGPQGKTRTGKVAKRCNRILKDYVVQSALHMGLHGPEDLMADYKRREAAGQHADFGIGRRYLRKAMCLMRTSQIYMPQRLRNTEVKPEERAGYYLMSWPSLRDKWNKAGGLEAAFEKNRPLGQWRNMVQELYEIKLKL

SEQ ID NO: 94172 - protein, 326 aa, unidentified
MEHELHYIGIDTAKEKLDVDVLRPDGRHRTKKFANTTKGHDELVSWLKGHKIDHAHICIEATGTYMEPVAECLYDAGYIVSVINPALGKAFAQSEGLRNKTDTVDARMLAEFCRQKSPAAWEAPHPLERALRALVVRHQALTDMHTQELNRTETAREVQRPSIDAHLLWLEAELKRLEKQIKDLTDDDPDMKHRRKLLESIPGIGEKTSAVLLAYIGLKDRFAHARQFAAFAGLTPRRYESGSSVRGASRMSKAGHVSLRRALYMPAMVATSKTEWGRAFRDRLAANGKKGKMILGAMMRKLAQVAYGVLKSGVPFDASRHNPVAA

SEQ ID NO: 94173 - protein, 326 aa, unidentified
MKLYLGIDIGKSSFTAALCTENLERQIIHPEVMNQADGWQTLKEWVLKQSQEMQATQIQLGVESTGGYEKPLVEWFRSDTNFTITILNPVRVKRFAQSELSRTKNDLNDARLIARYLAIRKPNPTPVTAPEIEELKIMVRHLEHLTRKQADEKTYLETVVEVNIRQQTQQIIQFYQEQIEKVLNQIRKHIDSYPNLQHQSDLLQSIPGIGKITSAILLTECIPSLTPKQQVSHAGLAPRQNQSGKINGKTQLCKTGNKRLRTALYLPTLCAIRHNPIIHEFYQRLIGRGKPKMVAVGACMRKFVHIIVGVLKNQQYFNPFYAKNLS

SEQ ID NO: 94174 - protein, 347 aa, unidentified
MNFYNSSHPYYCGIDLHARLLYVCIIDLQDEILIHTKIKADKSQLFALLEPYIGNIVVGVECMHCWYWVCDWCQQQGINFVLGHALYMKAIHGGKAKNDKIDSFKIAALLRGGNFPLAYAYPHEMRATRDLLRRRTKIVRHGAMLKGHVVNTNSQYNLPATELNLKNISARQQLRSQFKDPIVQRNIDLDMALLDCYAKELAQVEWFIEQKAKQHNAVFYELLKTVSGIGRILALTILYEIGYIKRFETVQNFASYARLVKCKAESAGKTYGTQGNKIGNAHLKWAFSEAAVLYLRGNDKARNYINKLQKRMSKAKALSALAHKLGRCVFFMLKNKTVFDEEKFLKS

SEQ ID NO: 94175 - protein, 341 aa, unidentified
MNDVTLIGIDLGKHSFHVHGQDRHGKALLRMKFNRKQLIEFFAKFHACTVVMEACAGAHHLARRLASYGHEAKLISPQFVRPFVKSNKNDFIDAEAICEAACRPSMRFVTPKTESQQCLSALHRVRESLVRERVMASNQIHGFLLEFGISLPVGHAVIRRLSSVLAEQALPARLMALLERLHSHFSYLEEQIADIEKELNRQLQDDDLGQRLMTIPGIGPLTASVLTAEVGDGKQYRCGRDFAASVGLVPRQYSTGGKNNLLGISKRGDKHIRRLLVQCARAYMLRLERQTDRLAQWVRSMLTRRHSNVVACALANKLARTAWAIAAHHAEFKRQEAAQVT

SEQ ID NO: 94176 - protein, 339 aa, unidentified
MKHVAIDLGGRESQMCVRGQDGTILDEKRVFTKSLPKLLAALEASTVIVETSAEAFRVADAAKQAGHRVSVVPATLVKQLGVGARGVKTDRRDAQALSLASCRMELGSVHIPSESSRQLKSICGSREALVHTRTLLINNARGWLRTQLMRPRSGRSETFAARLREHAATHGFELPTHIERDLIVIETINAQIKAADHQLRELAGNNEVCRRLMTVPGVGAVTAVRFFAAIDQVSRFPTAHAVQSYLGLTPGERSSSERKQLTGITKAGPKAVRWTLIQAALVARRIRPNDPMVQWSHQIEQRRGRFIAVVALARKMAGILYAIWRDATTYQPSRGTTPA

SEQ ID NO: 94177 - protein, 338 aa, unidentified
MFVAGLDVHLRYVTVAVLDSNGTPQLEVEVPTCTPEVLVTHLARFRPLHVVVETCPFWPWLYDLLVPQGITFHLAHAKALRAIATAPQKTDRVDARLLARLYLSGVLPEAYPRSADQRELLRLLRHRTTLVRFRTRLAGRIHSQLHQQRIHLPREQLLRQHTRPLVTQQWAPVLTPEQLAIVTQHFALIDALTPQLQALERRIDHAAQAHPIAPLLATVPGIGPYRSLLLATELAPLTRFPTAAHVVSYAGLAPMTRSSGGHTWHGGIPRGANRWVRGALVSAIPIHVRCAPASPVTTAYAQWKSRRGWRVARVAAARKLARILYTMWRRQEPWRAAA

SEQ ID NO: 94178 - protein, 309 aa, unidentified
MLTAEADKRKTKAVVNTAAGVQALLAWCAKHGAQPAQLHAILEPTGLYHEQAATALPQVRVSLVNPAQARDFAKALALRSKNDALDSYVLARYGQTLSPALWHPAPLHARQLRALLTRREALSKDLLRELNRKEKSQFSPSAPLVDGSIDKAIAFLREQIKQIERAIDQHIDNHPDLKQDCELLNSIPAIGPQAGNAILAVMHNRHIDSAQSLAAYLGVVPVQRQSGSSLNSCARLSKAGPSQVRATLYMAALVGTRHNPHIRALYQRLLKAGKSKKAALGAAMRKQVHLCFGVLKNRIPYQPNYAMNG

SEQ ID NO: 94179 - protein, 459 aa, unidentified
MRRKGKRTKGIEQAHPFDGLGRVNPHAAGVDIGAEEIVVCVAVNENTQLVRGFGNYTVDLNAIADWLTEHKIETVAMESTGVYWIPLFEVLEKRGFECLLISSRSLRRVAGRKSDVTDAQWIQTLHSYGLLEGSFRPQSDLVALRSLLRHRRALVDHRSPHVLHMQKALLQMNIQLSQAVSDVTGVTGQAIIRAILSGVRDPQILAALREPGCKKSEEEIGKALTGTWREEHLFVLKQAVALYDFYSQQIQECDEEIERLYAATRPDWDGGELPPLPPGKRNSHSKNRHPESEKIRRHLKRVSGVDISLIDGMGVSLAQTVILECGTDMSKFPTEKHFCSWLGLAPKHEITGGKILKNSVLKTKNRAGQAFRMAAQSVKRADCAFGVLYRRQRARLGPAQATVATAHAIARVVYRMLKYKVEYDPLSVNEYQKQYEQQQVKYMKKRAAKLGYQLVPVPA

SEQ ID NO: 94180 - protein, 390 aa, unidentified
MDESGARLASRRLPEGLAGIGEFHQLLARHAEEPDQVVIGIETDRGLWVEALTAADYQVYAINPMAAARYRDRHHVSGAKSDAGDAKLLADLVRTDRHNHRRVAGDSADTEAVKVLARAHQNLIWTRNRHTNALRSALREYYPGALEAFDDLHDRDALAILGRAPTPMQAANLSLSKIRSALKAAGRQRNLDTVAQDIQTALRAEQLAAPAAVTAAFGATTRATVGIIAELNRQITDLEAELATHFETHPDADIYRSLPGLGVILGARVLGEFGDDPNRYTTAKCRKNYAGTSPLTVASGRKRAVLARHVRNRRLYDAIDQWAFCALNTSPGARLFYDRRRAAGDLHHQALRALGNRLVGILHGCLRHRTHYDEHKAWAHRQTNPDSQAA

SEQ ID NO: 94181 - protein, 323 aa, unidentified
MSVFVGVDVAKKTFDIATPLPNGKTRTKAKLSNDPGGFKQFCDWLERHAEAGAWILMEATGTYHEALAEHCHNQGYRVCILNPAVIAKFADVELRRVKTDKADAKVIAAYGQQKAASLRQWEPEPPAQRRLRALVRRLDDLKEMRQMEQNRLDVAQDAVQQSIQDVIGHITEELEKTRKAIEQTIDDDPDLRKRRDLITSIDGLGDTTATLLLAELGDPLKYQSPSAIVAFSGLNPVVQQSGEFIGQSTISRTGASRLRAGLWMSGTVSIRHNPVVKALAERLNSRHKAYKQIVCAAMRKLLHLVYGVVKSGIPFDPKIALAG

SEQ ID NO: 94182 - protein, 317 aa, unidentified
MPEHPTTVGIDVAKAHLDVATLPSGEVFRVTNDAAGQAELIERLQSLENLDRIVLEATGGYERAPALALADAGLPVAIVNPRQTRDFARASGRSAKTDRIDAIALAEFARALRPPVRDLGNERQHALEDLIHRRRQLVVMIGSERQRHTASRNPIVRKSIQTLIGTLESEQRGIERELLRAIEADPGWRERLTLLQAVPGVGLVTALTLLAELPELGRLSEKRIAALVGVAPMNRDSGRKRGVRRTIGGRSSVRKVLYMAALSASQRNPVIKAFYARLRAAGKPAKVALTACMRKLLTILNAITKTGRGWEPRPIPT

SEQ ID NO: 94183 - protein, 428 aa, unidentified
METPVEKAEVVAWAGLDWADQRHEVRLQAVGSEQIESYTVEQKPEALHAWVAELQARFPQGRIALALEQSRGAVIYALMNYTFLCLYPVPPKGLARYRQAFFSSGAKSDASDADLLLEMVRSHRNRLRAWQPDDELTRKLRLLVEHRRETVADRTRLTNRLGALLKTYFPQALEWAGELRSLAACEFLSTWPSLEAWQAAGRSTQRKFYHRHRRRPAEELEKLLDTIAQAQSLTRDRALVEASVLMSQTLVEQLRTVIAALARLDETLEELFDQHPDQGLFRSLPGAGDALAPRLAAGFGTDRQRYLKAEDMQQFSGIAPVTEASGKQRWVHWRMACPKFLRQTFHEFADASRKKSLWARAYYQQRREQGATHHGAVRALAYKWIRILFRCWQSHTPYDESVYLAALRRRHSALWLAAGSLSTSEAKA

SEQ ID NO: 94184 - protein, 418 aa, unidentified
MARVVEIVYPICCGIDVHKNFLVACIATTDERGHTTHLIRRFSTNTGDLRRLADWLTVNNCKDVCMESTGKYWIPVFNILEQICNVTLTHPKYVKAIKGKKTDKKDAKWIAELFKCDLVRSSFIPPYDIRQLRDLCRYHMRLTHMTTSEKNRSQNCLTTCNFKLDAVFSDIFGKSATRILETLIAQGNSDFEIAPLLDRRCKATVDEVAAALDGELSFAQAEKLKLIRSHMESLSELKVRLESLIYELAIPFKAEIGLLLTVPGISTPLTAIRILAEIGADMSVFETSKHLCSWAGVTPQNNESAGKKKTTRISRAGAYLKPLLVQISLATCKSNKHPELKEKYETLKKRRGHKKAVIAISRRLLTAIWHILSKREAYNAELYRKADKPPASRILTPEQAFAILRSKGYQIKSSEPAA

SEQ ID NO: 94185 - protein, 347 aa, unidentified
MAFIGVDLHQNSFTVCRLEAGGAEGFETYQLARADLDRFCATLDADDEIAVEATGNSAWFRDEVAPCVGRVVVANPRQFQVIRKSVRKTDRNDARALALFLSKDMLPETRLKSKAENELGSLVHTRDLLVKQRTRLLNKIHALFNRHGVKLKKEGLASKRRLLGLEIGRFSALEQVELRVVRDQALSLTAAIAELDAEIGTAAQALDGFDSLVSIKGIGPRAAAVFLSGIGKVDDFESADKLAAYLGIVPRVSQSNETDNRGRITKRGNKLMRTTLVQCTLIAIRYSGYLNAYYRRIKDRRGSGKAIIATARKFLGIIYNTLKNKWVFEDFTTYTFAERPLSAGQAS

SEQ ID NO: 94186 - protein, 350 aa, unidentified
MAMTIVGTNPDAVIGGVDTHAEVHVAAAVNHVGGVLGVESFPTTHSGYRRLVSWLATHGELTLVGVEGTGSYGVGLARYLAQAGIDVVEVDRPNRQTRHRKGKSDSVDAVAAARAALSGSATGLPKTRDGNVEAIRVLMIARRSAVDTRIETLNQLRHVVFTATPEIRTRFTGLTPVALTNKACGLRPRDGEDPVRYVTLVTIRALGQRVQYLREETKRLNRLLRPLIRQTAPTLLEVYGVGYNTAAKLLVAAGDNPERIRSEAAWAHLCGVAPIPASSGKTARHRLNRGGNRQANSALYRIMLSRLRHDQSTRDYVARRLAEGKTMGEIGRILKRYIAREIYKQLPRPS

SEQ ID NO: 94187 - protein, 355 aa, unidentified
MKELQFTKKEDYSNESIYVGIDVHKKSWGICILTDYYEHKVFSQPPEPLVLMNYLHRNFPKGNYYSAYEAGFCGFWIAHELERLGIRNLVVNPSDIPTTNKEKKQKSDKRDARKIARSLRNKTLKGIYVPNQKILEDRLLVRTRQKLLSDIKRCKCRIKSHLNYFGIKIPKELDKPYWSKAFRLWLTTKLFTGSAQVLIQALLEEMQQIEHQKKVLEKQIVTLASRDYKPIITLLQSIPGIGLLGAITLATEIADIKRFKTQDQLHSFVGLVPNVYASGETERVGRITKRHNAFLRPVLIQCAWRAVKADPRLGLDYINLCKTMKSNKAIVRIAKKLMNRVRFVWKNQQKHSYNL

SEQ ID NO: 94188 - protein, 469 aa, unidentified
MKNNQQRKCSGKKARRASTSLLERIQPDAAGIDCGEKHHFVAVPTDRDSQPVREYRTVTRELYRLADWLAQCGIKTVAMESTGVYWIPVYEILEERGFEVVLVNARDVHNVRGRKSDVSDCEWLQQLHSVGLLRASFRPAAAIVPLRAYMRERATLVEEVSARIQRMQKALTQMNVMLHTVVSDLTGATGLKIVRSILAGERDPEILAAHRDSRCHASREEIVAALTGNYRAEHLFSLRQNFAAYQFHLQQITECDNAIEALLDTLAAAQPLPTAVLPPARRRNYPKSHEPRFDIRTPLHRLTGGADLSQIDAIGPQAALQLVAEIGTDMSRWPTAAHFTSWLTLAPNNKVSGGRLLSSRTPPSANRAAVILRRCAMSLARTSSALGAFYRRLAARAGKPKAITATARKLAVVVYRVLSGDLIYQDPGATAYHQLNRSRELKSLRKRAKLLGLDLLDRSTGEVLLNSVS

SEQ ID NO: 94189 - protein, 370 aa, unidentified
MSESSTIFVGLDQHKESITVAYVGADRSLEPICLGPIGPRTSDVDAMVRKMQSKGKKLVFAYEAGPCGYGLYRHLTRKGHTCLVVAPAKIPRKPGDRVKNDKRDATNLCRLLRSNDLKSVYVPQIADEAIRDLCRAREDAVSDLKTAKHRIKSFLLRHDIRFNGKADWKTPHLRWLGEVKCETSAQQVVFQEYVRAMAQGFERVERLEIELTQHVKSWRLSPVVEALQALRGVRFTVAVTAIAELGDLTRFEKPRQLMAFLGLHPSEHSTGERRRLGGITKTGNTHARRALVEGAWAYRFPARVSKQIQARQEQLPEAVRDIAWRAQVRLCKRFQRMIARGKNANIVVTAIARELAAFMWAIAKQVPVAV

SEQ ID NO: 94190 - protein, 372 aa, unidentified
MNQTIIHVGLDVDDTQYHGSALDKNTGEVIHFKCRPTLKGLLGQLDKLGQYFPKCTLTLCYEATYIGFTLQRDLANKGYACEVVAPTSIPSPRGKQIKTDRIDATQLAQFYANGLLTLVSIPKREQEQDRDLLRSRQQLVQQRTELRTHVQALLRRNGLHYKEQTGNKTHWTKYHYCWLTRIVEAATGSLKANLGLLLRQLKGMNAILADYNQQIEELANTPRYQKPVQALTCYKGVKNLFALTMITEIGDIKRFPHPRQLVSWIGMDIREYSSGGKHNRFGITKQGNRYLRTAFIEANQRGYRTARITKDIKARRAHTAPELIDIADRCLRRLNKKGNRLLISGKHPNKVKVACAREMVGFVWESLNKVAA

SEQ ID NO: 94191 - protein, 414 aa, unidentified
MSDVNTTQHTAVALVAIDIAKRNHDVAILWPNGKTATMKIANSKDGFQRLMEVVQRYGDPVHVAFEPTADYHRNLAYWLQNAGATCFLVSSLMSARARELLFKTWDKNDRKDAQVILYLMRQNMMKPFYDPLVEGTIDIQELSNTYHQISLARTRCQHSLMNHYLTLYFPEMERFYHASRSEWFCCFLSKFPTPQSITRYKVATFVKRAWVIVGRKVAKQRFLEEVHETACRSIGLPVELQGQAVKTFRIQLQRIIDLNQLRQQLEKTSETILSAREDYQQLRSVPGIGPICAMMIIAESGDLNRFGHYRQYLNFCGFNLCSTQSGQRQSKHKISKRGNSRLRYAYWLAAKIAIRQRENSFREKYERHIKSSLNNPDLKRKAVVAIACKLARVCHSLVKQNTPYRGYYEFNHGT

SEQ ID NO: 94192 - protein, 349 aa, unidentified
MNFYTNTHPYYCGIDLHTRLLYVCIIDNENNILVHEKIDDSPDKLLALLKPYLGNIVVGVECMHCWYWVSDFCEEHNIDFILGHALYMKAIHAGKTKNDKIDALKIAKLMRGGNFPLAHAYSKEHRSIRDALRRRTHIMRMSAQLKAHVASTVSQYNLPALETRLDLRNSPDREKMRHFFPDEAVQKSMDLNLNIIETMVGELYKIEHYVKTQAQTHRATDLHIFKSFPGIGKILALTILYEVGDIKRFPSVQKFASYSRLVKCKAESAGKTHGTQGNKIGNAHLKWAFSEAAVLYLKGNDNAKRYLAKLQKRMSKAKALSALAHKIGRCTYFMLKNQQVFDEERFLNG

SEQ ID NO: 94193 - protein, 310 aa, unidentified
MALKIVYKICCGIDVHKTFVVACVASTNSNGVTIYKSRRFSTYTKGLKELSQWLLDNNCKDVCMESTGKYWILIFNVLELSCNITLAHPKYVKAIRGKKTDKKDAKWIADLFKHDLVAASFMPPLDIRQLRDLMRYRFKLTCFTSSEKNRFQNCLTVSNIQLGNVVSDTFGKSSQKIIDKILENPLNKSFDIESLIHSSMKKKIPELELAIDGYITPEQAEKLKIIKCHCEDLKNRKAELESIITQLAKPYQKEIDLILTTPSFKNNFTAIAIISEIGVNMDVFPTAKHLCSWAGLTPTNNESAGKKKSV

SEQ ID NO: 94194 - protein, 360 aa, unidentified
MTEQIHVSAGLDLHKKFIIATILSEDGFKEQQRFERTESGLLNLKEWTIENKCEVVACESTSDFWVPVYNMMEGHVTVIVGNARDIKMFSHKKTDKVDSELIAQLALKGMIRPSRIFDRKHQEFRSLARLRHKLVQKKTDIKNEIHHILDSELFRLSSVLTDLFGKSGLRILQGITNGSPMDEIIKKLPLNVRKKTVQLNEILQTTISPGAILRLKYCLNLLQCLDDETGNLTEAIFQYANEWFKQEMKILKSVPGIGNIAAVTLLAEIGNFSDFPSGDKLASWLGLVPNVYQSADKMRTGSITKRGSDHARWILVQIAHAASRKRNTVFKRFYDRKKPMIGAGKTIVALARKIVIIVWH

SEQ ID NO: 94195 - protein, 392 aa, unidentified
MRYVGIDIGSDSHVVAAVTADGTVAFKPTKIPEDAAGYAKLFALLGQAPVVLVTMEATGHYWRNLFAALVAHGYAVALLNPLRTRRFAGEGLERTKTDSIDALGIARFGAEKRPAVTRLPDAATDDLRELVRHRDRLVADFGDRVRQLHRLVDLGFPEFRRHVKSLDSMLACTLLAEYPNAQAFAGAPPRRLARLVYDGVHKVGPELAAALIEVAKVSVGQHHGPAYRIQVRHTCQDLDLLRRRIRELDGDIVRQLDDHEVGSLLTSIDGIGPHTAARLIAELGDLGRFHNAAALAAYIGVVPGLKQSGKRRGQRAGLCPIGHSRLPAALWMPLLAAVRRNPWLKAFYDRLISRGKLPKVALVAALRKLLGAVFAVVRDRKPFVPRLLAVVA

SEQ ID NO: 94196 - protein, 477 aa, unidentified
MSKGSGTTRGDRRRNERRARLRRVLPRDGAVIGIDLAEEKQAIAVIDHDLRVLARKTVRVKVFRLGEALDWAVAQARAKGFGPVSVACEPTGPRWLQVQQLCAERGLPLVCIQPLVSHIAREQQDFTSHKTDEADCVMIARLAVELHCYLPEQLDETWAHLRHLGRRRNQLITAATASVQRIRDFLSVAWPVAAETCVRPFESVTWLAAMQVVMSRCGADPAKLAPCGVEAFAVLVRRAVPCWGGVRPSGRVCQAVFAALTDTQGVVASHRRGLLRRCTDELDDLQRTRARLRAVEADMVTVLARLGLSRLADIPGLTAVGAAAILAETGDPRRYDSSSSLVKHAGLSPADNASGAFSGQAHISRRGRPGLRLTVWRAVWAVLIHNPVMAAKYQAMTQAADTAAAQAASASADAGSRQVSAAAAAARARRAKARVACAASLLRWIYSMVVHGTGWDPAVASGAAACQHASSSRQQAA

SEQ ID NO: 94197 - protein, 367 aa, unidentified
MKKISTATAHAIRKVESQRLTIGLDLGDRWSWYCVLDETGEVLLEQKLSTIPKTMREVFGEMPRSRIALETGMHSPWVSRLLSELGHEVIVAHARKVRLIGESRRKDDRLDARTLARLARIDPQLLAPVKHRSAKAQADLTVIRARAGLVRARTSLINTARGLTKSYGERLRGCNSRNMKPEKASGLSPELQAVLEPLLAGIESLSEQIREYNEQIEHLAQESYPQVALLKQVKGVGTLIALTYLLTLEDAHRFRKSRDVGCYLGLQPGRRNSGQSEPQLHISKEGDPYLRTLLVQGAHHILGPFGADSDLRRWGLKLAERGGKNGKKRAIVATARKLAVLLHRLWVSGEVYEPLRNSSQAMLPAAA

SEQ ID NO: 94198 - protein, 339 aa, unidentified
MEHIGIDVHKNQSQICILTPQGELIEKRIVTERGRFAAMLGSRPRARILIEALTESEWVARCLEGHGHEVIVADPNYLPMYGHRSRRVKMDRRDARALAEACHNGVYRLAHRTSDERRHMRGRLAAREALVRTRARYISLIRALLRREGLRVRSGASERFIERLREVEVPILLRQEIEPLLAVMDHLDTQIALADRQLTTLASEEGEIRRLCTVPGVGPVTATSVVATLDTAARFRGAHQVEAYLGLVPRERSSGEKQHKGRITKSGNNRTRYLLVEAAWVLLSRVKQEKAQPLQAWAERIAVRRGKRVAVVALARRLAGILYAIMRDGTEFDAGVGVR

SEQ ID NO: 94199 - protein, 402 aa, unidentified
MNAVGIDVSKGKSMVAIMRPFGEIVSAPFEIKHTASGINSLVELINSVEGESRIVMEHTGRYYEVLAHQLSEANLFVSAINPKLIKDFDNDSLRKVKSDKADAVKIARYTLDKWQNLKQYNVMDELRNQLKTMNRQFGFYIKHKTAMKNNLIGILDQTYPGVNTYFDSPARSDGSQKWVDFASTYWHVDCVRKMSLNAFIDHYQNWCKRKKYNFSQSKAEEIYGKAKVLVPVLPKDAITKLIIKQAVDQLNSASTTVESLRTLMNETASKLPEYPVVMAMKGVGTSLGPQLIAEIGDVSRFTHKSAITAFAGVDPGVNESGSYEQKSVPTSKRGSSDLRKTLFQVMDVLIKTHPQDDPVYQFLDKKRAQGKPYYVYMTAGANKFLRIYYGRVKEYLSSLPES

SEQ ID NO: 94200 - protein, 344 aa, unidentified
MEHYAGLDVSIKDTSVCVIDDSGRLVCEVKVESEPEAIVAVLADEAFSIKRIGLEAGPLSQWLFGELAEAGLPMICVETRHMRAALSAQANKSDRNDARGIAHMMRVGLYRPVHVKTLASQKRRILLTSRQLLHAKARDIENDLRGTLRNFGLKVGIVSAAKFETRIRELVANYPDLANIVEPLLVARRVLREQLGILHRQLLSVVHHDEVCRRLMTMPGVGPVVALTFRATVDVPARFTSSKAVGAALGLTPRRYQSGEIDRMGAIWKCGDAMLRMMLFEAAQSMLTRTIKWSWLKAWGMKIAQRRGMKRAIVAVARRMAVVMHRMWVSGTDFQWTRQHIAAA

SEQ ID NO: 94201 - protein, 341 aa, unidentified
MEQANTIGLDIAKHVFQAHGAGPAGGVLFRKRLTRAKVLGFFAAQAPCVVAMEACAGSHYWAREISKLGHTVRLIPPAYVKPFVKRQKNDAADAEAICEAAQRPSMRFVPIKDEGQQANGVVFRTRDLLVHQRTQCNNALRGHLFEYGYVFPQGITHTATLIAHVEDRNSTVPDNARTILKVLIGTFTALEAQIKELDAEINRRSKENAVARRLMTIPGVGPITATAIMALVPAAEGFRAGRDFAAWLGLTPLQKSTGGKQKLGAVSKRGERTIRRLLILGASAVIRQACLRGAPAGSWLAQMLPRKPKMLVTVALANKMARVVWALLVKGGVYRAPAVAA

SEQ ID NO: 94202 - protein, 327 aa, unidentified
MSDLRSPIPILGIDVSKNKLNAAFLREGKYRHKAFPNNSRGFEQLSDWLRGLGVKELHACMESTGIYGEELAEHLHDQGFKVSIVNPARIKGFAQSELIRSKTDKVDASLIARFCAAMRPSLWTPDPMEIRELRSLVRRIDALLNMRQQERNRLDVSNEILKKSIRKLIRYLNKEIEELKDEINKRIERDPELRDKRKLLESIPGVGEATIHIILSHFASTEKFRNAKSLVSFLGIAPRHYQSGSSVSRRTRMSKVGRSSLRKAFYMPAIVALRYNPVLADLKVKLTKAGKHNMLIIGAAMRKLVHLIYGVLKNKIPFDPNFSLKSS

SEQ ID NO: 94203 - protein, 409 aa, unidentified
MKLFVGLDVSSFDIKVCFLNGEGNELKSFTVTNDLPGATKLRDEILNVVQEESVSELKIGLESTSVYSFHPSMFLHNDQYIRALGGQVLVMNPKQIANFKKSYSDMDKTDEIDAFVIADYLRFGRLPMSIVKEEQYVALQQLTRARYQIVRQITQEKQRFLQYLSYKCNTFTEEVESSVFGKAMMDLFLENYSLDELSNMPLEDLADYLRTKGKNRFPDPKYVAKSIQKAVRSSYRLDKVVEDSIDTILGTSITLIRTFEKQIKELDKSIERIMKGLPQTLQTVPGMGPVFTAGIIAEIGQIERFKDETKIAKYAGLYWRKHQSGRFTADDTSLSRNGNQYLRYYLVEAANSVRRQIPEYSDYYTKKYQEVPKHQHKRALVLTARKFVRLVDALLRKNQIYTPERSVNT

SEQ ID NO: 94204 - protein, 411 aa, unidentified
MRLFVGDDWAEDHHDVEVMDEAGTVLARKRLPEGVAGIAQLHMMVGGLLGEAADDSEVLAGIETDHGPWVMALLAAGYRVFPVNPQQSARFRARHAVSGAKSDAGDAHVLADMVRTDSHQLREAAGDSPEAAGIKVLARTHKTMIWERTREVQRLRHQLLEYFPAALQAFADLDAPEVVELLAKAPDPQRARRLTRAQVSAALKRARRRNIPDRTTAILAALRGEQLAQPAALTAAYAATVRSLIAVIGALNEQVTVLEEQVREHFGRHPDAEIILSQPGMGPILGARVLAEFGDDPGRYRDGKARRNYAATSPITRASGKRKVVAARFVHNDRLVDALNAQAFTALTASPGARACYDGLRDRGISHNDALRRIANRLVGILHGCLKTRTLYDEATAWGHRQNHPQSTTAA

SEQ ID NO: 94205 - protein, 377 aa, unidentified
MKKNIRFIGLDVHGETIAVGVAEPSGEVRSLGVIPNRPESVRKLVKKLGSASSLRACYEAGPCGYVLYWQLTQMGVHCDVIAPTLVPTKSGERVKTDRRDAQKLARSYRSGDLTPVWVPDPEHEALRDLVRAREAAKKDQLRARHRLQKLLLRRGLRPAEKMKSWTMRHLAWIRSLHLQPPALEATLLDYLSEVDHEGERVKRLERAIDQAIAAAPPATRAIIEGLQALRGIARISAATIVAEVGLLSRFARAKQLMGYSGVVSREHSSGDRIRRGAITKTGNAHLRRILVEAAWSCRYRPNLGSTIRKRQANASPEVREIAWKAQHRLHYRYARLAGRGKPKQQVVTAVARELAGFIWAVGVQIEKQLAIGEVRAA

SEQ ID NO: 94206 - protein, 320 aa, unidentified
MMAQNGLVVAGIDIAKDKADVSVRALSQRQTFSSTAEGRRQLITWLRKHKVTKAVMEASGGYEREWAKALREKDIEVRVVDPKRVRHFAQSAGRLAKNDVIDADTIAWFAETFGETPSQAHDAARETLRQLVNARQGLLDIRTVLSNKGEHDVPEPVQKSHARLLKAIAVELAKLEAAIAAMIKATPHFAERAEIIESVPGIAGTTSAGLIAAMPELGQVSNEAISALLGVAPYDDDSGKRRGERQIKGGRRKVRNLFYMACLGAATRHNPVLKAFYRRLIAKGKKAKVALVACMRKLIVILNIMIARGEKWDANRYAVD

SEQ ID NO: 94207 - protein, 403 aa, unidentified
MKKVCGLDVHKDSIFCAIYNGEKYSEVKEYETTTVSICSMGDYLLSEDVTEVAPESTGIYWIVVWDLLLEMGFDLTLVNPFLIKQMPDRKSDAKDAQWIAELLYKGMIRSSFVPPPLIQELRVYSRKYSKLQQQVTRVLVGMDNILIMCGIRASSCLSRITTKSYMFIVDALIKGYTEPDYLVSLVYGNTKNKHSGKLKESLTGNVKEHHRKQLAWAKEEYDMYQKQIVDCLKSMKRICDDNFEPAVRLLKTLPGISEIAAMTIIAETGGDMGVLENSGKITGWAGLRPRNDESAGKYKSTATTKGNKYLRSILVQCAWAALRMKGSYFKEKFARLAMRKPRKKALIGIARKLLVVIWNVLNSSVEYNPKLVPVYDPVKMKARMAYHKKEYEKTSDILNIHIK

SEQ ID NO: 94208 - protein, 361 aa, unidentified
MKCVQSNKLDFSGQNIYVGIDVHLKSWSVAILSDHSVLKRFSQSPEPEALHKYLVINYPGANYFSVYEAGFCGFWIHERLTDLGITNIVVNPADVPTMSKEKLRKTDAVDCNKLARELRSGSLVGIYVPGVETLELRSLIRMRNLIVKDSTRAKNRIKSLLRFHGIEIPEEFTRCSIGCWSKRFLSWLQSLELSTEYGKKTLELHLEQFLRLRMMLLQETRAIREISRKSPFEKPIRLLTSVPGIGVTTAATLMVELDDIVRFKNADHLASFIGLIPMCHSSGESNGTGDITVRRHFMLRSLLVEAAWIAIRKDPAMTVAYTEYRKRMNPQKSIIKIARRLVNRIYYVLKHEKEYVPCVVQ

SEQ ID NO: 94209 - protein, 313 aa, unidentified
MTQSLPQTIGIDISKIHLDAHAYPCGDARQFANTAAGFAALLKWIGQWPVERIAYEATGVYHRAFEQALASLPLVRINPLRARRFAQATGTLAKTDRIDAGILARMAATLQPAVRPGKSPELAQLAELMNARDGLVRDRTALKNREKNLALPLLKRQVKARLEQIARHIEAIDKQAQALINADAALLRKREIIVSIKGLGPITAAQLIATMPELGSLENKQAASLAGLAPLTRQSGQWAGKAHIHAGRANVRQSLYMPALVAARFNPDIKAKYTQLISAGKPAKVAITAVMRKLIVTANALLKANRLWQESMS

SEQ ID NO: 94210 - protein, 423 aa, unidentified
MEVIHKCCAGLDVHKNVIVACVRLTLRRKVERECRTFDTTTTGLLALLSWLSASGCTHVAMEATGVYWKPVWNILSDGTFELIVANAAHIKNVPGRKTDMNDAMWIADLVACGLIRASFVPDERTQELRSLLRTRKQMTREQTSHIQRMQRTLEEGNIKLDSVISDIVGVSGRCMIEAMIAGETSPVRLADLAHRRIRAPREALCEALRGRVTDHHRFLLRLHLRQYDALATAIAEIDQQVEVLIEDIDEQIEAGQATFRALIMLLCSIPGVGTLAAVVILSEIGRDMSRFPTAGHLLAWAGLCPGQNESAGKRKSSRLRKGAPWLKTLLIQCAWAASRRQDSYYKAQFSRLKARRGPKKAICAVAASILTAIYHMLKDGTGHRDLGASYFDRRSIDAKAKRLVSQLTKLGFQVQLEQIAKAA

SEQ ID NO: 94211 - protein, 314 aa, unidentified
MRIVGMDVSKDKIDAAIVAASAHRSFANSAQDQQQMLSWLDEHDVEKAVMEATGGYERPWAKLLQDGGIAVQIVDPRRVRHYAQAAGQRAKNDRLDAEVIALFGETFADEPGQLHDEDGSALDQLVSGRARLKAIAWQLGNWTEHAPPQEIAEACQAVAAVLEQQLERLDKTIAGKIEQTEHFAERAAIIESVPGLGSGSAAGLIAGLPELGLVDNKAIAALLGVAPYDNDSGKHHGARSIRGGRAKLRQLLYLPTVGAATRHNPVIKAYYQRMIDNGKPPKVALIACRRKLIVILNTMIARGEKWDPTKHATP

SEQ ID NO: 94212 - protein, 341 aa, unidentified
MNHVAIDLGGRKSQVCVRDERGEIIEERAELTGRLGDYLRNQAPSVVILETCSEAFHVADLARAAGHKPIVVAATLVRSLGVGARRVKTDRRDAQILSEVSSRVDLSSVHIPSPEARRYKTVCSMREGLVCSRTLLINTVRGWLRAQGIRIRSGQAETFATRVYEKLTEVPRFLERQLRAILCLNESIEDADEELAELAQTNAVCRRLMTIPGIGPVTSLRFAAALDEVGRFESAHKVEAYLGLVPGENSSGERQRRTAITKAGAPGLRCALIQAAWCARRARGDHPMVEWSLEVERRRGKRVAITALARKLAGIMFAIWRDGSVYDPGLGAKAVASIATA

SEQ ID NO: 94213 - protein, 339 aa, unidentified
MCILYVGIDLAKNLFAVHGVDEHGKAVLVRPSVARAKLHELIAALPPCIVGMEACSGAHHWARLFLQHGHTVRLMAPKFVAPYRLSGKQGKNDAADAMAICEAVQRPNMRFVPVKSQDEQARLCVHRVRQGLVEQRTATINRIRGLLAEFGIVLPQRAATVRREATVHLEDLPGWANTAIGDSLSDVHRLDERIAEYDHHVRQMARDDQRSRALMQLSGIGNTTASALVSTIGNAHDFKNGRQLAAWLGLVPGQYSSGGKTRLGSITKAGDRYLRTLLVLGARAVLAAARTKDDRLSRWAIALEERRGYWKAVVAIAAKNARMAWAVLAKGENFKLLEA

SEQ ID NO: 94214 - protein, 454 aa, unidentified
MAQRNSGVKHKPIRTKQTALSITHPNAAGIDIGSASHFVAVPPDRDDEPVREFASFTADLNAMADWLKACGVDTVAMESTGVYWIPLFELLESRGFTVLLVNARHVKNVSGRKSDVLDCQWLQQLMTYGLLRGAFRPTEAMCVLRSMWRQRGMLLRSQGRQVQHMQKALTQMNLQLTNVISDIVGETGQKILRAIVAGERDSQVLAQMKNVRIHASVEDIVKSLQGNWRAEHIFALKQALNLFDFIGTQLAECDQEIEQQLQSLQVHDGEPVKGKKRGRSRNAPKFDLHRQLFKICGVDLTRIDGIDVTTALAVISETGTDMSRFATVGHFTSWLGLCPGTKITGGKVMSGKTKRVANRAAQALRLAAAALRTSQSALGAYFRRMCARMDKPKAVTAAAHKLARLIYTMLTRGEEYTDQGQAYYEERYRERVLRHLTQRAEKLGMKLVASEQAA

SEQ ID NO: 94215 - protein, 408 aa, unidentified
MNPLYVGIDVSSKNNVIYLMLPNGDKHSSFSLANSHDGSTQLVKRIFTAMTSNNIDSVLIGLEATSVYGDNLVYFLKEDTTLASFDRKIHVLNPKQVNKFKESYNDLPKNDYIDAFVIADCLRFGRINKEVYMDDYRYKALQNLTRARYFAVTNLTKEKQRFINVLFKKYSTMTQEKVFSDTFSTTALAVYEKFESAETLAKMDLQELTAFIMEKGKNRFPDPDAVAKALQKAARSSYRLPKTVNDSVNQVLAISITSIRALESQIKAFDKAITKQMELLPNVLISIPGIGPVLSAGIMSEIGDINRFQNQAALAKYAGLAWQQHQSGDFEAQTTRMIHSGNRFLKYYLCEAAFSLVRCDKEYSRFYHLKYKEVNRFQHKRALALTARKFVRLVFALLKDNRLYRPAE

SEQ ID NO: 94216 - protein, 333 aa, unidentified
MSKKKLDLCLRSNGKDILYDVIPNDLSSIKSWLTRTFEKFFLSEDSLVVCAEHTGQYTYPLVCATKSIGVYLCLEDAAKIKYCHGIPRGKNDKIDACRIAMYAERYNDCLQPYTASELIIQKLKNLSTERSMLVADRAKYQSQLKDQVDYMEHSIYIAKCNRVEGIINTFTDYIAQIDLEIKELINQAPVIAHQMDLLMSVDGVGERVALKMIMETDAFTSFTDPRKFCCHAGVVPFVYVSGSSQRSKNRVSNRADKSIKHLLHMAALSVSQVKNSPLKKYYDRKVEEGKNKMSVLNAVRAKLVTIMFAVIRTDAFFFEKLSKFACVIHKNRG

SEQ ID NO: 94217 - protein, 354 aa, unidentified
MNTTQNSTKSKIVKVIGVDLAKDHCDVIGYDENGKICLRLDGCSYAKLREILSNLPQAVVLMEACKGSMFHARSIADLGHEVRLVKGADVKALRNINHKNDLRDAAYIAKLYFVPGTTYVYIKSQQQQSLQFLQNEYKSLQELRIQAGNQIHAGLEEFGCPVRKSSKFIKTRMVAHLEKHAELIPEDVMASFKRRREIWLNLLQQEEEAQRRLEQVAATDANAKRIMTVPCVGPQTAVGLLVHVGVDFGRFKNSRQFAASLGLVPKQNSTGGNSRLNHITKCGPKRLRSNLVQCAQLVLMYAEKWKGNFGDWVRKMRDSGKKHGVIVCAIAAKLARIIYRLMKDKVDYTSVLSC

SEQ ID NO: 94218 - protein, 311 aa, unidentified
MTNDTIGVDISKDRLDAHRMSDGKSRRFANDKAGHRAFVGWAGRCDARIVYEPTGPYHRTFERKLAEAGFALVKVNPRQARRFAEATGRLAKTDRLDAAMLARMGALLELEARPVRSPVLSDLKDLHMAREALVKNRTAAKNRAKNLTLPILKRHNAEQLRQIKRQIAAIETEIMARIKADPDLARSFDILVSIPGVSTITAFALIIDMPELGSIENGQAASLAGLAPVARQSGQWTGRAFIRGGRADVRQALYMPALVAMRFNPNLKAKYDQLLAAGKASKVAITAIMRRLVVLANALLRDRRKWSQSLP

SEQ ID NO: 94219 - protein, 355 aa, unidentified
MEKPEITIGLDLGDRFSHYYMLNGDGEAIETGRIQSTEEALRRHFEGEPTMRFALECGTHSPWISRLLEQLGHQVIVANTRKIRAITSSESKNDKNDAEKLARFAFCDPRLLSPIRHRSPERQQDLNLIQARSTLVRARTMIVNALRGLVKSAGGRLPACSPQGFEARVEASIPPALAEAARPLLNQIVALNAGIQQMDRGIEQLANRYPEIPVLRTVPGIGPLIAAAYVLTLDRPDAVQHSRQAGAFLGLRPRQSQSGDSDPQHRISKTGNVYLRSLLVQAAHYVLGRFGPDSELRRWGLKLAGSGGKRGKKRAIVAVARKLAVILHRIWQTGKPWQAFPQSANNAASKDVCMV

SEQ ID NO: 94220 - protein, 311 aa, unidentified
MKSKTTYIGIDVSKEKLDVAWQGERKVKQYQNNAKGIAKMIAGFQGNEIDRIVVEATAGFERQSVREMLQLGLPVALINPTRVRRYAQAQGQHAKTDALDAHVLADFGKAMRPDIWQTKSDLEEQIGLRITRRRQLIGIRTEEKNRLTTAHPDNIPGIKRHLVWLNSEIANVEEEIEHLAQSDPVLQEKIACLQSVPGVGPVTALTLIAEMPELGLANRKQIAALAGVAPYNRDSGNRTGRRHTYGGRSSVRSVLYLAALSATRHNPKIKEFYQRLLANGKEKKVALTACMRKLLVILNAMARDQKTWQVA

SEQ ID NO: 94221 - protein, 425 aa, unidentified
MNSNTNHKINQVSENTLVIGIDIAKHKHYACAIDERGRVLQKSFPISQSRDGFQAFYTHLLALKSTHEKQDIIVGFEPTGHYWMNLAAFLTNYGIPFVMVNPFHVNRSKELDDNLQTKNDQKDALVIARLMRDGRFSYPRLLEGVEAELRNGATLRSKIQEDLNALQNRIVRWIDRFFPEFMKVFKNFGKMAYAVLEKTPLPVDVQGKSPEELLFLYRQVEGMKSPQLPKAKQLVEVAQHSIGLTEGLVMARIEIATLLKQHHLMQEQLDTLTGQLIELAKQMTDYEYLASVPGIGDVTIVDLLSEVGSLTQYEHPRQLIKLAGLTLRENSSGQHKGQKRISKRGRRMLRSLLFRVMMPLIRHNEAFKQLHEYYTTRTINPLRKKQSIVVLCGKLLKILHALCKKKVKFDEQHMMKDLYCLVEAA

SEQ ID NO: 94222 - protein, 321 aa, unidentified
MDFLGIDVGKSELHACLLQGDRSTAKSVSNSATGVQQLQTWLKNRKAQQVHACLEATGGWSEDVAVALSDSGHIVSLVNPARIKAFAQSEMLRTKTDKIDAATIARFCRMHEPEPWTAPDPEIRALQGLVRRYQNLVHMRTEEQNRLQEPIPTPSVKESIEAILTDLDREIKRVDREIAELFDKHPPLRRKRDLLISIPGIGNTTAARILGEMPNIAEFRNVKAVAAYTGLSPRHYESGSIRRPSSIARTGNSDLRSALYFPAITAMRYNPPLQRFADRLRQRGKPNKSIITAVMRKLLTLAYGVLKSGRSFDPAYATVPT

SEQ ID NO: 94223 - protein, 320 aa, unidentified
MEKTVLGIDVGKKFLDVFLMFDEKKVLQHKFANSPKGFKLLAGWLASLRITQVHACLEATGVYGEAVAEFLYEKGHRVSVVNPLRIKSYANSDLQRNKTDSADARTIAAFCLVKDPGDWHPMPAEVKHLQELSRRLESLADMLGSENNRLESSSPRVRPSVKRMIRTLEKEIENVRRLIKEHIDDHPDLKQQSDLLQSIPGVGEKTAQLLLSEIEFSRFDSARSVAAQAGVTPGRRQSGTSINWTRLSKIGNGRIRKALYFPAITAIKHNEIVRTFASRLSQNGKAPMQVICAAMRKLLHIAFGVLKNNQPFDPNLAFRT

SEQ ID NO: 94224 - protein, 332 aa, unidentified
MNMHPQGRVTERQVRPNAGIDVSKQHLDVCCEDQERRWVNDASGWDGLTAMLKAHNVDLVVVEASGGYERGVVCALQGAGIEVARVNPRQARDFAKSLGVLSKSDRIDARCLRDFADLLARHAKRAAYISAPTDEHRELLASLMTRRRQLMDMRVAETQRLEHAGARAVRSIKAVIKTLDRQLADIDRDVDEHMDQHFRPQRKLLESVKGVSTVTTLALLSALPELGTLGRRSISKLVGVAPLADDSGQRRGKRRIWGGRAQVRTALYMATLSAMKYNPAIAPMYTRLLAAGKPKKVAMVACMRKLLTILNAMMRDGAMWDSARHLVPRQCA

SEQ ID NO: 94225 - protein, 412 aa, unidentified
MTITCGIDWAENHHDVVLVDEAGKLVAKGRIGDDVQGYRQLLELLAGAGDSAGEPIPVAVETARGLLISCLRATGRKGYSINPMAVARYRERHTVARAKSDHADAMVLANILRTDAVAHRPLPADSDLARTIAVLARAQQDAAWNRGQLSNQLRSHLKQYFPAALAAFQVKGVGLCSREARAVLAVAPDPAAAAKLSAARLGSVLRKSGRQRNIEAWVSRLRTIFTGDYLHQPPAVEQAMGRQTLALVLQLDAACRAADDLAEAAATAFAEHPDAAILSSFPGIGPVTGARVLGEIGDDRTRFRDARGLKSYAGAAPVTIASGKSRIVRNRKVKNQRLAAAGYVWIFGALPSPEVKDLYDRRRAAGDRHAAAMRNVFNRLLGCLHHCLQTGQAFDPARAFPLPESHPEPAAA

SEQ ID NO: 94226 - protein, 364 aa, unidentified
MQEPTHIGLDVHKETIAVAVLRPGTVECDERQIPNTPEALRKLFYRFPDRAVLRTCYEAGPTGYDTQRLLASLGIDCEVIAPSLIPRRSGVRVKTDRADARNLARLHRAGELTCVRVPTPAEEALRDLVRAREDLKHDRRIARQRIRSFLLRYGKRYPAGSDRWSFRFEVWVRALHFDQPASQAAFAHLLGAYFVRDTQMAAIDRQIAELALAEPLSGDVARLRAFRGIDTLSAVTLLTETCDFRRFGSAGAFMAFTGLVPSEHSSGQSRHQGSITKTGNAHLRRVLVEAAWSYRHAPAVRDKLRERQVGQSPDVVAYSWAAQCRLHGTYRRLAAKKGPNKAVVAVARELAGFVWGAMTDNMAV

SEQ ID NO: 94227 - protein, 388 aa, unidentified
MDVLLSCVCGVDVHEKMIEACILKQKDIGIVAIRQQFSTMPRELSAFVKWLYENECYHVAMESTGVYWRPIYETIEREMPDHKSIIVGNAHHIKNVPGRKTDVKDAEWIAKLIMHGLISNSFVPEKDIRSLREATRTYKKFVGENSRYKCRIEKFLQTHGFKLSSVLKDIFCVTGRNILNSLARRGSLTIEDVASCMKGRLKSSAQEIFEAVNIPLTDTDQRILFLLLDRFDTAEKYLEEIKLLMDEIAEPYSRQLEIIDSIPGIDRLSALLILAEIGGEPQKDFQTYGHLCSWAGLVPRNDESAGKIHSKKVLPGNQYLKPTLNQVAWVAVKQRETPFHDWFWPRQKRLGQKKAITAVSRKILKLIYTLISSNTLYNKDVALSNINY

SEQ ID NO: 94228 - protein, 371 aa, unidentified
MMNTIICGMDAHDNTLSNRIGVNTEAPETMTAKNTLEGRQKLFHYLKDLAQKKDGARIIVAYEASPLGFGIYDDCVEAGIECHILAPTKMPKSPKDKKKKYDERDAQRILELLRAHVLAGNDLPDIWIPDHQTRDDREMVRSRLDVGRKLTGLKTQVQMLLKRNKVVKPEDVGNSWTLSHRRWLEGLELKPGARIALLSLLRQIERLEEDILILDKEIKALSETERYKLPAEALVIQIKGVGLLTAMVYLTEIGDMRRFDNRKQIGSYLGLVPSSNESGEGSDRKGHITREGPARVRKVLCQATWVRVAHDEEEARVYQRIVKKNPKHKKIAVVASMRRLGVLMWHIAWDAQVKAGVFKDDSIKVASFQTV

SEQ ID NO: 94229 - protein, 449 aa, unidentified
MHGAHIGGQRAGAFLELVGGVDPKRVLLVGVDVAKATWFVVVSNLLGEVVVDGVRLVADRAGLAELERVLGAASARVNAAMVVVGIEAAGHHHQTLTAHLADRDELVVRLLNPAQVAAVRKQQGNRRRKTDWLDAAAICELLARGEGALVHLDGSAAAALRPLWSGRKDLVDTRSRLRQQAGALVDCLWPGCSAKDTAAGVTPVLCDLFATKAGRVLLELLAQGWTPARVAATSVAGLRGLFAVRGCRLTRPLAARLIGRAQAALPAHPAATAGKAATLAALLSTIDTLDREIACLEAAMAPLLAHTQGAKLTQLRGVGVVAAAGFVAFVGSTDRWAEWSKVWRAAGLDPARSQSGPADARLGISREGSAWGRRAILDLAAAVCQQPGPWRDRLRTRTTQQHKPAKVALAATANAIGRTLFALMASGADFDPHFQAKRTAARKAGGQAA

SEQ ID NO: 94230 - protein, 388 aa, unidentified
MIYVGIDIAKLNHFASAISSDGEELIKPFKFTNDNDGFHLLISKLDHLDKDSLIIGLESTAHYGDNLVRYLVAKNYKVCVLNPIKTSTMRKNNIRKTKTDKVDTYIICKTLMMQESLRFVTFYDLDLMDLKALGRFRQKTIKQRTRLKIQLTSYVDEIFPELQYFFKSGLHQKSVYALLKEAPTPEAIASMHMTHLAHLLKVNSHGRFNKEMAQQLRVLAQKSVGASDSSLSIQVTHTIQQIELLDSQLERVEAEMTEIMKFNDSVIMTIPGIGYINGGMILGEIGDIHRFSSPNKLLAYAGLDPSVYQSGNFQAKKTRMSKRGSKVLRYALVNAAHNVVKNNTTFKAYYDAKMAEGRTHYNALGHCAGKLVRIIWKMMTDNLEFNLD

SEQ ID NO: 94231 - protein, 344 aa, unidentified
MKIAVLGIDLGKNVCSVVGLDLSGAVVLRRRVRRDTLIDLVAKLPSCIVGMEACCGAHHLGRLFAAQGHDIRLMSPEYVRPYIKAQKNDDRDAEGIAEAATRPTMRFVEMKTEDQLDMQTLHRSRERLIGERTALINQLRAILLDRGIIVPQGKRKLEQYLVILMNEHDGERLSARMRMLVADIRAQWQELDRRIGEFDAEFVRWAKENEDARRLVTIPGVGVTISTALIAAVGKAETFEHGRDLAAWLGLVPRQSTTGGKPRLMGISKRGNKYLRKLLIHGARAALPYVAEKDTALGRWAKSLLSRVHQNVAVVAFANKLARICWAVLRSGQRFAAKGAPLVV

SEQ ID NO: 94232 - protein, 422 aa, unidentified
MKNSTAKKLEQVPEGYLIIGVDPHKKKHAVVVMTQGAIVQTKFKFNNSRNGFEEVLQRVRVEMLKTGSRGVIFAIEAASHYWRNLAYFLDAHGVPFRLVNPFTLKRRREGEDINRRKNDFRDAEMAAELLRTGKFTSTRLLYGVYAQLRATYNTYRRLVKERTRHMNLLKGLLDGLFPEFTQVFKNPCGKTALTLLFLCAVPEFIAGMKLEDFVDSIRKEFKGRAPKVQKLHAIYLVAGTSIGIGAAAESVSIEVSLLVQRIRLNAEQIEKTEDILVSLVSSIGDSRYLLSIRGLSYITVAGLLAELGPLSYYQNAKQLIKMAGTNPTESESAGKRGSRTPMSKKGRPGLRWCIWTAALSLLRHNPDFRYWAEQRQERPVQSHPLKKREVIGATANRLLRVAYALVRKQILYQVPQMVEIAA

SEQ ID NO: 94233 - protein, 344 aa, unidentified
MDNHTQYLGFAGVDLAKKVMQIHFVTEDGEITDKSAKRAEFLDFFRNREKCLIGMEACGSSQDWARKLEAMGHEVHLMSPKAVKPFVSGQKNDHNDAIGIYKAMFNGVRRVPVKSTEIRDLQTLRRIRSQVTKDKVKEINHVRGLLAEYGIVMGKSITAFNKGISSALESLKERGDVSPLVAEELQTTVESIKTKIERQKRLDREIEQLARGCKNYENFLKTPGVGLFTAAMLCVLLCDPAIFANGRQFAAYIGLAPRSRGSGGKNFIIGIPSKFNCDSESRAVFVECAQALARYKNKSPWVDGILRRKPKKVAVIAIANKLARQVWAMANKGESFKQMTILTA

SEQ ID NO: 94234 - protein, 322 aa, unidentified
MNPKNYGGIDVAKKNFVIGIYGQDKTKTEANTPKGHAKAVEYLQKHNVDLVVLESTGGLEVPLANALHAADIRVVIANPQRTHQYAASFSLGKTDHLDAKMLADYAQALDSRKMADDMCYAPPSEEALALEALVKRRSQLVEMRKMEKNRLEQTHASQKASVVAMIKHLGELIAALDKEIDQSNRGGFNGKGEILSEMKGVGRITCATLLSMLPELGKVPHKRAALLVGVVPPPRQSGEKERKSGCVGGRMVVRNALYMAALAATRSEPKIKAFYEKLMSRGKAFKVALNACMHKLLRILNARMRDYLASLKETEESELQGA

SEQ ID NO: 94235 - protein, 356 aa, unidentified
MINHNRLDFTGQPIYIGLDVHKKSWSVSIFSKYGEYKTFNQPPEADKLVHYLSRHFPGALCYAVYEAGYCGFWIHDQLREKGIQCLVVNPADIPTKNKERRTKRDRIDCRKLARSLRNGEIEGIYVPCRSKLEDRTLIRTRQSMVRKQTRCKNQIKGMLLFYGVVIPEEREMGHWSRRFIQWIERIRMERASGDIALKAHLEELNHLRQLIASLNRAILRLARTEEYRPLVRLLKTVPGISTLTAMIVLAELGEITRFPSLDELSCYVGLIPDTEESGEKEYVGSITQRRHSQLRWLLIEASWVAVRKDPALLMAFQEYCKRMRKTKAIVKIARKLLNRIRYVLKNQAEYVPCVIQ

SEQ ID NO: 94236 - protein, 348 aa, unidentified
MLHAGLDLSRRKLDVCLLSDAGEIVDEFAVAPDADGLAGLVRRVGPRAPQAVIESMTGARFVHDRLEELGWDVRIADAAKVKGIGSLAAKTDKIDARVLAILSQRDLVPEIWLPSLEIRQERELARFRLHLVKHRSMLKHRVHATLVSFGKPCPVTDLFGVAGRRMLADLNVPEPWHSTLQASVVAIDQLEAQIDQCNRQLRAMRPDHQYLPLLMSAPGIGWVLGYTIAAEIGEIERFATADKLVGYTGLCPRVIQSGDSDRRGPLTKSGPKFLRWAMLEATMHALRHPAYAERYQRTKRRLGKQRGAKVAQIDIARRLTKSLWHMLTYQTPFSPQTAAGGAAFRLAA

SEQ ID NO: 94237 - protein, 341 aa, unidentified
MTRAITGGVDTHADVHVAAALDPIGGLLGVQEFPATAAGYARLLDWLGGFGTVCLAGIEGTGSYGAGLTRHVTAAGVRVVEVDRSDRQDRRRQGKSDPLDAVSAARAAQSGRARGAPKGRDGTVEAIRALMVAKRSARSERIQTINQARALILTGPADLRARFAKHTVTALVAETASLRPRPGDVVGYATRIALRELGRRAEFPGSQLERPGELIVPLVTARAPGLLDLYGIGAHTAALLLIAAGDHPERLRSEAAWAHLGAAAPIPASSGKTVRHRLNPGGDRQANHALWRIVFTRMGSDPATRAYAERRTAEGKSKAEIMRCLKRYVAREVYPHLRPAG

SEQ ID NO: 94238 - protein, 522 aa, unidentified
MARFSKRSMHRLSKEGRYTCSELRSAILDDGTKVVTAPVNDIKRPVCGSVDVHKSILMACSCVTDTATLSAVFYVRQFTTANSDIRRMAEWFAGYGVNDVCLESTGKYWIPVYDILEQSGMKPVLTHPKYVKQARGRKTDFRDAIHIANMFRMDMVVPSFIPPADIRDLRELCRYRLKLTCIKTSEKNRYQNSMTISKVRLDSVFTDPFGRSASRIMDYLIHTPKDAVRDEKILSFVHGHTKASPDEILDSIHGYEFIGVQRDKLEIISMHLDDIKKYIALIDSKLAFFREKYAGIIGHLCTIPGVSTESALYILGEIGADMSVWNDSRSLSCWAGLSPANNESARKKKSTKIGKGGHYLKPLLVQCALASLKSTRKQPYFYYKYQTLKKRRGHKKAIIAIARKMLVSIYHMIRDDSDFLPVDHEQTVVQRQKNNELDLEKVIAFLGEQGVDGDIIRQVESQCSREESSVGTGSKDDMPEKTAQKKQPEPNTVSKPTKRGVSRKSSRTKKESPSTQPEAATA

SEQ ID NO: 94239 - protein, 384 aa, unidentified
MYYAIDLHSNNFIVSHRSEKGNIKTKKYWFKDAGLKEFKSILNKDDTIAIESTCNSYYFYDEISPLVKEVKIINPARFKVISESSSKTDKNDTLAILKFLEKEMLPEIKIPGIAIRDLRGIFSTYLILVKQKSAIKNRIHGLLKSNGIIIEKKDCFSKSGREEIRKQKYRDIEYFQIEVLLNQIEILEEKIKEIRKEILKYSKEFKEELELLITIPGISIFIGLATLSDIGDINYFKNAKKLCSYLGVIPKVRSSNDKTRTGKITKRGRKLARSFLSQVIFHFINSSKLYKEFYQKKKKEKGSGKAIVAMMRKLIVVIYHILKKKKLYYYMIEKQYKNKLQEWLKTISDFRKIDKEYLDKWERKIRIKYDINYYQKDNNIINSA

SEQ ID NO: 94240 - protein, 410 aa, unidentified
MAERFVGIDVALREHRIAVLDRDGEAVGQSFTIAASTDGVATLLRTLHARDATAAQTLIGLEASGHLWENLEAALVSTGYRVVVLNPLQTRRYRDVVRRKAKTDDIDAHVIAGLLRSGAAQASYVPDDQIQSLRELARLRARLMADRQDYQRQLIAQLDVVLPEHRAVLGDLLTARARGILAQFPTAQHLANANPRAIRRAAEDAGARGFSLNDATGVRDSARRSLYSGKAAAARAHVVRTLVSQLERLTSAMDEVDRAATALLPPSEPGTGPSDAELLQTIPGIGPQTAATLLGELGALTRFTDARALVAYVGFYPVIHESGDRAATPRLSRVGSRIARQSLYLAAVNAVRRSGEWRTIYLRKKAQGKTAKQALVVVAVKLLHALYAMLKHRQPYNPSRLLVAAATIGS

SEQ ID NO: 94241 - protein, 343 aa, unidentified
MQTVTTIGLDIAKSVFQVHGVDAAGQVVVRRQLKRRYVLAFFEKLPPCLIGVEACASSHHWSRELRALGHKVRLMPPAYVRPYVKRQKNDAADAEAICEAVTRANMRFVETKTPEQQSCLMLHRTRHLFIRQQTAVINAIRAHLAEFGIVAPVGRNGVEELLGVVADASDKRLPEIARACLVALGAQLRMLKAQILEFDRMINAWHRSNETSKRLDEIPGVGPALATALVASVADPRAFRSGRDFSAWIGLVPKQHSSGGKDRLGGISKQGDRYLRSLFTAGALAVIRYAKIHGAKHRPWLTALLARRPTKVAAVALANKIARMAWAMMARGERYKEPVALAA

SEQ ID NO: 94242 - protein, 412 aa, unidentified
MFKIFRKNCCGLDVHKTWIYACIGITDTIGLTEYKQARFSSFSKGLGELAEWLATYSCTEVCMESSGKYWIPVFNILEKTCFVTLAHPKYTKPQKGNKTDRKDAKWICDLFMCDMIKPSFIPSPEIRQLRDLIRYRAKLTNMKTGEKNRAQNCLTVSNLKLDDVFSDVFGKSSTSITNYILDHPGESFDVSPFVDGRCKTPIPEIQAAVDGAISPEQAVKLRQCLTHINEIEAHRSEIEQEILLLAEPFSAVLDLLYTLPGFVKNPMTAIALLSEIGPDMSVFPSSKNLVSWAGCCPRNDQSAVKVKSTRISRAGCYLKPLLVQVANALIKSKKHPEFKERYHRIKSHRGHKKAIIAVCKMLLTAIWNMLSKLEPYNPQGFLEHRPVNEKKVLTKSQALELLRLRGYTITND

SEQ ID NO: 94243 - protein, 345 aa, unidentified
MPVATIGLDLAKAVFQAHGVDDAGQTVLRRRLGRSELLAFFAKLSPCKVAMEACSSAHHWARELVRLGHEVRLIPPQYVKPYVKRNKTDAADAEAICEAATRPNMRFVPIKTRDQQAVLALHRSRSLLVRQRTASINAVRGLVGEFGLVAAKGRYRMSELRQRMNSMSPDDLPGIACQTINTLFDHIDMLEEKIAAVERQIVEWHKNNEDSRRLATAPGVGPITASAIVAAVGDGRQFQSARHFAAWLGLTPRIHASGKKERIGRISKGGDRYLRALLIHGARAIVGTLFRKSVTPRPWLLALAARRPTNVTAVAVAHKTARALWAMLTRDEAYRKPMAATRSAA

SEQ ID NO: 94244 - protein, 343 aa, unidentified
MTLYIGVDIHARQQTVSYLDTEDGTMGQQELHHERDDVRAFYSQFRGEVIVGIEACGYTNWFEELVEGLGHKLLVGDAAEIRRLARRRQKNDRRDADLLLDLLLHHEFPALYRYPPESREVLRQLRYRHKLVKLRTMVANTLHALAINCGLSLRAQLLTRNGRKQLAGLRLSAIGQQQREELVSLADELTNRILKVEQWLKEQAKSDARVQRLQTHPGVGLLTSLCLVHTLGDLGRFPSTRKVAAYVGFDPVEHSSAERKVYGGISKAGSRLLRYLLVEAGQTACKHDEQLQQFYRRLVPRRGKARAKVAVARKLLIRCFIMGRAEIDYAEFLRRGQNHKETE

SEQ ID NO: 94245 - protein, 418 aa, unidentified
MSRLHIGIDPAQKTCVASLVDESGRTVGNALQFAPNRSGVAGLVRRVQERVPGAQCHYFVESSGFAWYAPSALLRDAGQAVSLINPSYTKAQRKVSSRHAKSDAKDADAIARAPLNMGEKAYHPADIPEGPRLNLRMLCRHRHTLQGDATAIKLRLLAWLGLTTPGITAILGNDLSAMDRDFIRRYPVVARIVRLGRARVQEFLQRRSEGEFDDATVDELFALAQEAYQPKEFDDRLMGRQIGMELDRLALLEKQIAELDKAIEQLYPDCDPGGLARSLPGFGKVVAPILVSEAGTDMTRFATVDRFASWTGLVARASGSAGKQQEGLPMTKAGRSIVKWGLHMAATAAIHCDPELRAFYDNLRARDKHHNAAITAVAHKLARRYWALMREQRPFEKRTPLTDAQAPTASADDTPPCA

SEQ ID NO: 94246 - protein, 340 aa, unidentified
MSTINILGIDIGKFTFHLVGHDSSGREVCRKKLSRPKLIQFISTIELTTIAMEACGGCHWLARKCQEFGHKVLLIPPQYVKPYVKTNKNDFIDADAIAEAATRPSMRFVTVKPESSQVISVIQRIRSSYIKDRTACMSRIGSTLLEFGMSFPKSHAKMKTLFQWLAEHGEPIPPMLLLELRDHHDYYLKLNQLILTQDKKLKEIVNNDERAQLLKTIPGVGDLTASRCISDISNAADFKNGRHLAAWIGLVPRQFSTGGKPTLLGISKRGNKGLRELFIHGARAVLVRPEKAVAVFGNWILSLLSRKPFNVVVIALANKLARIAWSVLSTKQAFEVRVQA

SEQ ID NO: 94247 - protein, 329 aa, unidentified
MKKTNIIGADLSKKTIDLHCHDTKTHFVISNNLIGFKSMVKWIVQRSILLNDVVIVMEHTGLYSYCFEEFLHANDVKFTKVTALEIKLSMGVVRGKSDKIDAKKIAHFGNEKITKLKLSQPVEKDVKRLQMLMSSKNLLVKQRAALLCSTKEYQNIGLSDKDLILKAQLVVIKELTKQIDLLEAEIDLIIKTNLSLNNSYQLLTSIKGVGPVIAITTIIKTHNFQRFENARKFACFCGTAPFPNESGSSIKKKTKISHLADKQMKSLLDQGAKSALLYDKELKNYYESRLAKGKSKMSTINIIRNKIIARMFAVIKRQKPFVENYLAAA

SEQ ID NO: 94248 - protein, 423 aa, unidentified
MEEVDLWVYAGVDWATEEHAVCVVSHDGTVLGERLIPNDATGLSKMCDWLLEFSHGSPERIAVGIEVPHGVVVETLLDRTIPVYSINPKQMDRFRDRFSPSGAKDDARDALVIADSLRTDRHCYRRIAVDLPEVIELREWSRIHEDLNSEGVRLANRIRAQLHRYYPQILTVADKVARPWFLDLWELAPTPAQARRIRRPRLLRFLNEHHIRTVSAEDLWELFRQPTVTVSQGTTDAASAHIRLAIERLRVVNRQQTECQTRLDALCSALVPEPTSEDIPENRCPEHHDVEILRSLPGIGRIVLAMVLGEAWWAIQARDYDALRTLSGIAPVTRASGKSRKVIMRRACNTRLREAMYHWTRIAVQKDAVSRQRYTALRSRGHSHGRALRTVGDRLLGVACAMLRNGTLYDSEHRGLPAVAEAC

SEQ ID NO: 94249 - protein, 356 aa, unidentified
MTKVTANFQNQTIYVGLDVHKRSWNAGIFLGDLFIKNVHQQPSPEMLYQYLAKQFPGAQYLCAYESGKFGYWIQRRLANLGIACLVVNPADIPSSHKDEVYKTDTRDSRGIGLALSKGQLKGIYIPDLKQEADRNLVRQRKKLWRDLVRCKNRVKGFLDYQGIPLPEKFDNPNWSRNFIHWLYELKFLHDSSRMTLHYQLRQVELLRKELLNISNDIRKLLRSAEYKSIYYLLRTVTGIGPLTAAQLITEIGDIRRFPNFYHLNSFVGLMPMEHSSGEKQLRFGLTVRKHRQLRSDMIECAWAAKRNDPALALYYSEQIKRGVNGKKAIVKVARKLLSRIRYVWINQQPYQSSIVK

SEQ ID NO: 94250 - protein, 397 aa, unidentified
MIAVGIDVSKSKSTVAILNSDGSLRIKPYDMKHNHPEMNALINYLNELDEPIIILMEYTGHYHYPVLKKLTDDHFPVCLVNPYQMKKYGDTELRRSKTDKKDAIRIATYALEKSYQLVPYSVDDQKYVDLKMLSRQYSQRMSTLTINKVYLANLLDQTMPGITSILPLRSRDPETSLSMMFIKKYKSFDYICKMGKSRFLDSYSRLVKKSRNRNASHLGLAIYELATSSITTNGENEYTVLAQTQCIDLVAEAQRSADCIIAQMQTIAETLPEYKILRNMPGVGERLGPLILAEIGNVRRFHSGKALNAYAGNDAPPYQSGNFESHNRHISKRGNAALRKYCFEVMQALKLIKPQDDPVYLFLLKKEQEGKHFNVAKMAAVNKFLRIYYARVMELEQ

SEQ ID NO: 94251 - protein, 449 aa, unidentified
MNKKMELDIINLHCAGIDVGSRSHFVAIGQDLSDVKEFGVYAEDLQDICNWLLENGINSVAMESTGSYWQNLYAELAKNGFEIILANGKFTKNAKGKKTDVKDARWIQKLHALGLLSSSFLPDETTEILRTYCRQRTNWLQLAAEASNKMQKYLKLLNMRLDVVVKDVCGLTGLKIIEDICKGNLDPNSLAKHRHYNCRKSEEEIAKALKGNNRQDFLFGLKQEFESYQFYQNKIADCDKQIDRFLKKQISLDPIKKKLKTKAKPYKRINKNAPKIELNQMAFQYFGGIDLMEIEGLSHATILTIISEIGPEGFTKFPTAKHFTSWMRLAPNNKISGGKVLSHRTPKGSNRIKTALRQAANAIGNLKDTHLSNFFKKIAFKKGRQVAVSATARKLAVIIWNMVTKKQAYKQPTEYLFLDQKRKMGLVKRIKKQIDKFDIKPEDLDFSTS

SEQ ID NO: 94252 - protein, 389 aa, unidentified
MKIYVVIDIAKLNHFAAAISSDGEIIIEPFKFTNDADGFQLLVSKLESFDKNSLIIGLESTAHYGDNLVRYLVTELYQVCVLNPIKTCQMRKNNVRKTKTDKVDTYVIAKTLMMQDNLRFVSFFDLDMMDLKALGRFRQKTIKQRTRLKIQLTTYVDQVFPEIQYFFKSGLHQNAVYALLKEAPSPKEIASMHMTHLANLLKVNSHGHFTKEQAKELRVLAQKSVGANDSAISIQITQTIQQIELLDSQLEKIEAEMTDIMKFNDSVIMTIPGIGYINGGMILGEIGDIHRFSNPNKLLAFAGLDPSVYQSGNFQAKTTRMSKRGSRVLRYALVNAAWNVVRNNATFKAYYDAKRAEGRSHYNALGHCAGKLVRVIWKMLTDEVEFNLE

SEQ ID NO: 94253 - protein, 320 aa, unidentified
MNKEQTYAGVDVSKGNLDVVVVGSDMKWRFGNNPAGIGKAVETFKGLFPVLVVFEATGGLELSFWEALTEACIPAAPVNPRQVRDFAKAKGRLAKTDEIDAEVIAHYGQAIQPRAQVFPETQSLKELMARRSQLIEMLTAEKNRLYAMRNPQIKLDIKAHIDWLESKLNDVNKDLKKAIDASPAWREKDRLLQSTPGVGPTLSATLLTQLPELGSLNRHEIAALVGVAPLNRDSGLMRGKRTVWGGRAPVRTVLYMATLAATRHNPVIKAFYNRLCGEGKARKLALTACMRKLLIILNSMLKNNTPWNNSKSLCVIGARD

SEQ ID NO: 94254 - protein, 359 aa, unidentified
MRYAPNVRRALGTKKETDLGDRWSFYCVLDEAGKIILEQKVATTPEAMKQTFGKIPRSLIALETGTHSPWVSRLLTELGHEVIVAHAQKVELITKSNRKDDRHDARTLARLARIDPELLGPVRHRSAKAQIHLTVIRARAELVSARTALVNAARGLVKSFGERLPKCGTYQVNEKLAEGVSAELRDVLAPLLREVESLNERIKEYDERMEKIAKEVYPEVSLLQQVKGVGTQIALTYILTIEDPYRFPKSRQVGCFLGLRPGRRNSGESEPQKKISKEGDRYLRTMMVQGAHYILGPFGEDSDLRRWGMKLAERGGKNAKKRAVVAVARKLAVLLHRLWVSGEVYEPLRNSQKAIRAVA

SEQ ID NO: 94255 - protein, 401 aa, unidentified
MDPHLCVGIDVGCRSHRVGIAHPDGSIIEEFDISHCDAGFQEFFRRVEAHRCDLSLPVAVAMEGYNGYARPLDRLVQGKGYRLYNVNNLKLARFKEVFSGAAKTDPIDARKILELFRLKDQLPLAKDAIQEVLSTPVVNEKLKRLSRRRRHLVIEKMRVLNRMQADLQAVCPELLAATNDADNLWFLRLLTFRDDLRQLARLRRSTIFQIPGVGQKYARLIRDWQAKARFSGEVEYVGPMIIQDARRILELRVQIHALDEAMADLADQSEIARRLSSIPGFGKTSIAELAGEIGTLERFASEASLALYLGMCPLTRQSGQMCTARAPRQVNTRCKAAMMTTVARHIGCVPQSRAYYDRKRAEGKSHNQAIRSLGRHLVRVIWAMLRDGRDYQVREDFHPAS

SEQ ID NO: 94256 - protein, 371 aa, unidentified
MKKNNTMKQSPKRALARETGPIVIGMDLGDKTSRYCALDKRGEVVQEGSVATTKKGLEQIFGSRKRCRIALEVGTHSPWVSRLLSGLGHEVIVANARQVQLIGASTRKNDRMDARLLARLARVDPGLLRPIRHRGEQAQADLMRIRIRATLVEARTGLVNAARGFAKAMGERLPACDTDTLGVAKLEGLPVELQESLQPLLEQIEALTERIKKLESNIEQIARTRYPETQLLRQVSGVGTLIALTFVLTVEDRERFQKSRDVGCYVGLRPKQSESGESQPQLRISKEGDRYLRTLLVQGAHVILKRRGPDTDLKRWGLKLAERGGKNAKKRAIVAVARKLAVLLHRLWVTGEVYEPLRNSQAQPARKKKVA

SEQ ID NO: 94257 - protein, 366 aa, unidentified
MEGPLISLDVSKGKSNYRFFENGTDRKGKKGVIRHDIQGFDSIRDEAEKMEERLRIKPSVIFESTGVYSDVVEKYFTDKGFDVYVISPLLSASMRKEGVRPAKNDSLDTLSIAKVFYSKDDLRKCSENDKKAERLREMSYELDMMNRRIRPMKCQFLRLLDKVWPCLDEVSDYSSRFMLDFIIAFGHPENIKTVKGVLSVIRKSEMGTAGRKDKIAQDLFDYCHTHLSAVSKDSSYVELLKRMAIELKAMAKKKSELIDRMAEEARNKDEFARLLTIPAVAKTTALKIMARVGDISRFRNAEALVAYCGLDPRVYQSGKMTGEHRTITKKGDCILRSTLFLAVKLMVMLYPDTKVARFVAAKSSRE

SEQ ID NO: 94258 - protein, 424 aa, unidentified
MNNTQNQKIAQVTDKTLIVGVDIGSENHYARAILARGFEVSKKPFPFTNTEEGFESFATWIYNLAATHKLTKIMVAMEPTGHYWFAFMAFLKKYDVQVVLVAPQHVKHSKEMDDNTQEKDDRKDPIVIARLVPEGRYLIPYIPEDVFAELRVAFNRRCELVEEQVRIANRMVRWFDIYFPEYRKVYGRIDAKTGIMILKRAPLPADILGIGVDGICEIWKDAKVRGYGPKKAKQLFSAAEHSVGMKGGASVRWKLWQLLEEYELIERQLHDILQLIEGLLYQIPGADKLLKIPGAGLVTVAGFLSEVGDIKRFSDPKQIQKLAGLAVVENSSGKRKGLPGISKRGRSRLRWVLFQLARSMVMFNPEMKAYHQYYTTRKENPLKKLQSLVAISARIARIFYGILKNGTEYDPTMVMKDFNKTVAA

SEQ ID NO: 94259 - protein, 352 aa, unidentified
MVVLGVDPHKKTHTVVAADDAGRQLASITVATTTAGQLKLVRWAAERYPDRRWAVEDGRHVAGRLLRELMAAGEQVTPVPTKLMAAARAGARTRGKSDPIDALAVARAALREPDLPAAHLDAEALDLRLLVDHREHLVAERTRHINRLRWHLIDLDPDLEPPVKTMTRYKTLRRLLEQLDQIPASVRRDLAIEITRRVLADTVQINQLQRDITALVTPLAPTLMTIIGISGLSAAKILGEVAGIQRFPTSAKLANHAGTACIPVWSGNHEKHRLNRGANRQLNCAVHRVAITQVQHHPGAKALYARRRATGDTKAGAYRVVKRHLIDVIYRAMNTDTQTQQTTTHPPISQAA

SEQ ID NO: 94260 - protein, 362 aa, unidentified
MYMAMELSNSSWKLGLSNGSKTRRKSIEARHQDRMLEEVRLSKRKLGLPAAAPVVCCFEAGRDGHWIHRWLSSAGFEVLEIDSSSIETARGRKHVKTDRVDVEKLLDLLLRYCSGFRKAFQVVRVPSAEAEAGQRLHREDEYLIRQRTRISNRIKGLLVAQGIAEISLKGDFAGRLEGVRCWNGQGLSPELQAELIRMHAQYRLFEEQLSAVARAYAAELESETPMGIKRRRLETLKSMGPKTSRVLSAEVFAWRKFDNTKQVGGMSGLTPTPSQSGDERREQGISKAGNRRVRWVMIEFAWLWLRWQPGSELSLWYRRRFAHSPRLRRIGIVALARKLLIALWRYVEFGELPAGAVLKARA

SEQ ID NO: 94261 - protein, 436 aa, unidentified
MPKRIYRAVPVQQIEPGIMIEQLSGVKKVVFGCDAAKESWRGAFVAPSSGLVSIVSWDLKEVPEVVALLVALRHAGIEVDVVAEPTGTYADAFACQVRKAGLEMFMVSPKHTHDYAEIYDGVPSQHDCKDAVLVAMIHLQRREPAKWPTPSEQQRELRARCAHVDWLKQEYQRDQGRTEALLARHWPELTRELDLDSATLPELLARFGSAQAVTAQPESARQLLRKISRDLLAKDKIGRVVVSAQHSLGLPPTASEQQLLQELGRRMLESRRQLREAERAVLQVACEVPAMKPLSDSIGPMTAAIFLAFIGDPKQFTSGRTLLKMLGLNLRERSSGKFKGQLKISKRGNSVVRRWIYLAALRLMKQDRVVRAWVDHKAQRSGGMKMKAIIALMRKIVSSLRHVTDGNPFDSTKLFDVQRLKRMHALPANFHATPSV

SEQ ID NO: 94262 - protein, 405 aa, unidentified
MCPSGESGVGLAPVCWPDQKPVRAVGRVTRHSCAARGFHPQTDTGSCPPTLGLEVSQGMLADQLDYIVGVDPHRDSHALVVLHVISGAVVFEAAVSANSEGYAQALELVDQHAAGLRAFAVEGTGSFGAGLTRFLTGQGERVLEVSRLRRERRSGGKTDALDAIRAARSVLAQERPATPRAGGERQALQALVAAREGAVNAKRAGLCQLRDLLITTPEPLRSELRPLTRARLLQRLAATRPDARRDPELRGSMLALRSIARRVLQLTAEERELAREIETLTRKLAPQLLEQPGIGPHAAAQLVLSWSHQGRITSEAAFARLAGAAPIPASSGQTIRYRLDRSGDRKLNRALHMILVTRKRSHPATIAYIARRVEEGKTRREANRCLKRYLARNLYRLLEHPPMTT

SEQ ID NO: 94263 - protein, 338 aa, unidentified
MENYVGIDLHSTNCYIGMVDENGNRIFNKRVINDLNMIINTLKPFKEKIKGIAIESTFNWYWLVDGLMDAGYKLHLANVCAMKQYEGIKHTDDQSDAFWLAEMLRLKILPTGHIYPKEQRPIRDLLRRRLQLVHHRTALSMSMTSMIQNCTSINLSRYDKKNLTHHEITGLLDSPYQVMSANSINNVILEINENISKIEKEINMKVKLTQRYKKLNSVWGIGEILATTIMLETGDVRRFKDVGNYASYCRCVPTIKLSNGKTKGRGNKKCGNQYLAWAYLEAAYCMQRAYPEAKKWFLRKLNKKGRFVAIKALASKIARACYLIMKNNIEFDPSKLFA

SEQ ID NO: 94264 - protein, 338 aa, unidentified
MKLYGAIDLHSNNNVTVLIDEQDQVVYQKRLANDLSLIGEQLSPYASSLEGIVVESTYNWYWLVDGLMGKGHRVHLANTAAIQQYNGLKYTDDDSDARWLAHMLRLGVLPQGYIYPQQERAVRDLLRKRSQLVRQKTANLLSIQNLYTRNTGLSLSANRIKKLRSEEVDDLFTLGDVALAVKANLSVMRCLEAEIKTLEQVVKERVKLKPAFRYLLSVSGIGQTLALTIMLETGDIRRFPSVGNFASYCRCVGSEKISNGKRKGKGNTKNGNKYLSWAFVEAANFAIRFEPLIGRFYQRKKAKTHGVVAIKAVAHKLSRACYYVMRDQVPFDVARAFS

SEQ ID NO: 94265 - protein, 422 aa, unidentified
MLAESVDEDQIIARVAAVDIGKAELVCCVRVPGGEGAKRRLQEVSTHSTMTRSLAELANHLVDLRIERVVMEATSDYWRPVFYLLEAHGLEPWLVNARDVKHLPGRPKTDVLDAVWLCKVAERQMLRPSFVPPRLIRQLRDFTRYRIDLVGARGAEKNRVEKLLEDACIKLSVVASDIFGVSGRQMMAAMIAGERDPKVLAGMARTRMRAKIPQLVEAFTGHFDDHHRFLLAQMLARIDGIDADIAVLDAQIETLLAPFAQAAVRLDEIPGIGPVAAAIIIAEIGVDMTRFPTAGHLCSWAKFSPGIKTSAGKSKGSGSTGHGNRYLARVLGEAAVIAGRSDTFLGERYRRIARRRGKKKAIVAVGRSILVIIWHLLSDPDVGFNDLGADHFARNVNTETKKRNHIRQFEALGYTVTVEPAA

SEQ ID NO: 94266 - protein, 412 aa, unidentified
MLKIVYPVCCGMDVHKSFVVACVASTNDHGVTTYRSGRFSTFTGDLRRLAAWLHAHSCTDVCMESTGKYWIPIYNILESSCRITLAHPKYVKAIRGKKTDKKDAKWIADIFKHGLVCGSFIPPADIRQLRDLMRYRAKLTGFSTGEKNRAQNCLTVSNIKLDDVFSDVFGKTASAITQRLLENDAPFDVTPFLNKKLKASADRIQAAVDGHICAHQAGKLRVIRSHMENLAACKKSLEVLIFGLAEKYLPTLDLILTVPGIQVFAAIGILSEIGADMSVFQSSKHLCSWAGLTPQNNESAGKKKTTRISRAGAYIKPLLVQCALCAIRKKSNPEIRSRYLNLKKRRGHKKAIIAIARMLLTAIYNIIKRNEKYNPALYRKADTPPRNREVSVNEAIYILQRQGYLVTAPQSA

SEQ ID NO: 94267 - protein, 354 aa, unidentified
MKRTTKYVAFDVHQATTVASVREEGGRVIARSVVPTDPSALTEFVRGMRGARHVTFEEGTQAQWLYELLAPLVDRVVVCDRRGAPRQGNKGDQVDADQLSELLRCGALRAVYHGSADRATLKELTRTYRNLVEDATRVMLRLKALFRARGIPTAGTAVYHSRHRTHWLAQLPEGGARFRAEALYAELDVLRKLRPRAKTAMVTEARRDPAWPVLRTIPYLGSVRVALLLATMQTPWRFRTKRNLWAYAGLAVVTRSSADFTVVAGQPVRRRRAPMTRGLNRNHNRILKDVFKGAATAATARPGPLQDFYHGVIARGTREELARLTLARKLAALTLRLWKKGERYDPTKLTTPAR

SEQ ID NO: 94268 - protein, 361 aa, unidentified
MPSTKVSGNSFSGQTLYVGLDVHKKNWSVSILSDYHELKTMSTNPNPESLAKFLFRNYPGADFRAVYEAGFSGFGSCRQLKELGIDCLVIHPADVPTTHKEKIQKTDSIDSRKLARMLRNKEISSVHIPDQDLETHRSLIRQRFNLSKDLTRQKARVRSLLLQYGIDIPQHFGKSQYRSWSKPYMNWMRSLPDVPVQLQQVVNNYLDTGETLKKQLLEVTRQIRALSKTDRYKENCELLISIPGISTLVAMNLLVQLGDIHRFENFPMLCNYVGIAPTMYSSGEKSVTGKLTARGRKSIKIMLIEASWIAVRRDPALTLCFNELAKRMNKNKAIVKIAKKLLNRIRHILINQTPYEFGVIK

SEQ ID NO: 94269 - protein, 474 aa, unidentified
MAKSTVNRIPQHIGGNKGNILISQLKAKNLENVMIVPLEIGKSHHKALIANYFGSLLKSPFEFHNSQEGIRFLHKNINEISRHQPVESVFIGMEATGHYFKKPAAMLHEMGYNNLFILNAVSTSYCRKAGLTWSKTDDIDLGAIGQALISGYGNPYRAESPFWGDLKETCRYRRYLVRQQTSLKNKIHSFLDLLFPGVNEVKMFSNNYLWSSASLEFFIKYPDAGLIKQLTPKSIIAFFRCRGRRISPDMAYQLIEWSKDALSPYSPINNCRQFIFKELIDQLKQTSQNIHQMEVKLIGYLVQIPAVLLLSIDYIGPVRAAEFAGEIAPFEQYPKSSALIKGAGLDSTRYQSSTSESSKRPISKKGSGRLRYITIEIANALMKHNQYFAYFAKNLMNKGKSKDCACVATAARFMRVAFWMIKDQKCFQPSNGLGISKDPLAKITAFLQNHRALELNKEYISYAKKYFEKEKASM

SEQ ID NO: 94270 - protein, 355 aa, unidentified
MSQEKYIGMDVHQATISVAVMDAGGKLIMECLLETKAATIVEFIEGLHGTLWLTFEEGTLAAWLHDLLKPHVSRLVVCDPRKNALLKDGNKSDRIDARKLAELLRTNQVKPVYHGEHGVRTLKELGRSYLTITKDVTRVMNRVKALYRSWAIPCAGTTVYAPRHRAEWLAKIAEPGVRVRAERLYQQLDLLQPVRLEARRELLVESHKHSAVKLLRQIPSIGPIRAALLVALLQTPHRFRTKRQLWAYIGFAVETHDSGEYRYVRGKLQRNRERITVRGLNDNHNNDLKNLFKGAAISASTRPGPLRDFYVARVEKGMRPTMARLTLARKIAAISLTIWKKGVEFDPQQLHRQAA

SEQ ID NO: 94271 - protein, 316 aa, unidentified
MDPQERFIGIDISKTQLEVATYPSLPARTYPHEPVGLTDLIEFLQSLRPSLVVLEASGGLEVPVAGALWEAGFAVGVVNPRQVRDFAKATGKLAKTDRIDAGVLAHFGAAIRPQPTPMPSKQERILQGLMGRRRQIIEMLVAEKNRLQGTSGGLRDDVKAHLRFLERHLKTLEEELEKLIRSIPVWAEQDARLQTVPGIAKRTTAALLAGLPELGKLDRKQIAALVGLAPFNCDSGKSQGKRRIWGGRADVRCALYMATLAATRHNPVIRTFYQRLCQAGKPKKVALTACMRKLLTILNAMVRDNTPWQPNYALSS

SEQ ID NO: 94272 - protein, 336 aa, unidentified
MNEITTLGIDLAKNVFQLHGVDARGVCQQRRRLRRAQLLSFMAQMPPCLVAMEACASAHYWGREFGKLGHRVKLIPPQYVKPFVRGNKTDGNDAEGICEAALRPRMPSVAVKTEEQQAVLTEHRIRQLLENQRKQLGNHLRGLLAEFGIVIPKGSGSLSKGLAEAIERAPARLGPAFNEAHQRLVALQRQCQEQTRRIEQLAAAAPLCRRFMKERGVGPIIASAYAATLGSPTHYHNGRQVSASLGLVPKQYSSGDEPQLLGISKRGDPYLRTQLIHGARSVVSRIDGRSDPLSVWLQGLVARRGKNKAAVALANKTARRLWAIWRAEAAELVTLA

SEQ ID NO: 94273 - protein, 360 aa, unidentified
MAKARSLVGLDVHASKIVAAVLDGETGQLQSFAMGGESAGAAAFCAGLPGPVRVSYEAGPTGYGLARELAKRGVECVIAAPSKIPRASGDRVKTDRRDAESLARLLLAGKLHPVRVPGDEEEALRDLVRAREAVRVDLMRARHRLSKLLLRHGIRFEAGRSWTEHHQRWLATIALDWPAAQTTLLDCRGAIDALTHRRDQLEREIIALLPSSPWAVQVGRLRCLRGVDTLTAVGLCAEIGDFERFARAEQLMSYVGLVPSESTTGQQRRLGSITKTGSTHARRLLVEAAWHYRPRPNLSKGLSDRQQDQPPQAIAVAWSAQRRLHQTWARLEARAKRRTIIAVAVARELAGFAWAITRIE

SEQ ID NO: 94274 - protein, 394 aa, unidentified
MKLVGIDVGKNSHHFCVMDKETGEFNVAPSSFSNNKEGFDFLINSLKPYSKKSILIGMEDTGHYHVALLKFLLSNGYTVALINPKTTDLTRKMEGGITKNDKLDTITICDVLDTPERKKQYRITKVDRFDLYEQRQLTRHHHNLKEELNVYCNRLQKSIDLVFPEFNTLFSSKYSIVYMNLLKTFGSAEAIASTDIRTIRKCFEIKGRGNRISLTPEKLKECAKNSIGISSEVETIQIKHLVSQITLIKEQIAEIDKKIEEFSITNNSPILSIPGISHFSGTSILAELGDIGNYSKPSQIIKFAGVAPLHYESSQFNAQHTAITKKGSKYLRKTLYQIILPVIRHNPVFNKYYQLKISQGKGHRCAQGHCVRKLLRIIYHLLKTNQQFDPQLLR

SEQ ID NO: 94275 - protein, 462 aa, unidentified
MRVSLGIDVACRAAHQASLADERGTILWSGRKFRTTLTDLERLWAMLPAGASTITVIMEPTRNAWVPLAAWFRRHGATVVMVPPEQSADLRTYYAKHTKSDRLDSKILARLPLLHPDGLHAAEGLGPGEPLRRAVKLRSNLVKRRTSVLARLDALLEILSPAWHAALGADLANKTPLRFLAHYADPHHVIRLGRARLGRFLYRHSRGSWDEDQADRLIAAARETFALWTDDGLEFSDLAEDIAIEARLALHLTDEIKELDDRIAVLLAKADPSGILRSVPGVGPVLAAQILGRLGDPSRFASLAAVRSYSGLIPDLDSSGQSSRHGGPTKSGDACLREALFMAANTARRTDPSLAAKYHRLMTTAGKHHNSALCHIATALLTRIAACWRRGEHYQLTGPDGRPITVTAARQLVAEQYTVPAELRAARRAVHQQQRTGRRFKESHSAPANGPSTTHPTTQLTA

SEQ ID NO: 94276 - protein, 402 aa, unidentified
MIFINCLGIDIGKSESVVAHYKDEVLVKEMVIQNNQNGYRYLKNYIKHLDSLFILFESTGIYSRGMKRFCEIHKIDYLEMNPLEAKFKTSSLRSWKTDKSDAHKLALLAFRMKDSKVQRHPEEIYFELRERARFHLEMEINQNRLKVELVETLHQTFPGLEKLFTNRYSKIALNIAQAFPHPDFVSTLTHDELVEKVLHSTDKGLSVNKAHKYVQKLIEIQINSFPNVDKSSFLLQKVQYLCDKLLIGIEEMKEFDQEMIDLAKNTTEFENIISIPGIGELTAALLIGELGNIREFKTNKQLNAFVGIDIKRYQSGTSKSRDTINKRGNKKARRLLYLIIMNIIRGRNHYQSHIVDYYYKLREQPHGKTHKTAVIASINRLLKTIHYLIVNNKLYDYQKAPH

SEQ ID NO: 94277 - protein, 413 aa, unidentified
MDVVVARCAGLDVHRDTVVVTVRIAEGGRAGTRRETRTFSTMGADLLDLGDWLVAQKVTLVGMESTGVYWKAPYYLLEDRIEGCWLLNPQHMRNVPGRKTDVGDSVWIADLLAHGLVRPSAVPARPIRDLRDLTRYRRRLVEARTREVQRLDKVMQDAGIKLTSVASRLLSKSGLAMIEAMAAGVSDPDELAELAQGRLRAKIPELRQALAGRFRVGHHGLLARRILAHIRFLEASIDDLDTQIDRLIAPFAPMLELVMTIPGVARTVGICLIAEVGVDMSIFPSAGHLASWAGICPGNNASGGRQRSGRTRRGPVWLRTALTEAAHAAARTKGTYLAAHHAQVRGRRGTAKAVGATRHDILCAYWHILATGVPYQDLGPDWNRSPQSVDAHARRLVAQLEALGKKVTLHDAA

SEQ ID NO: 94278 - protein, 344 aa, unidentified
MTIVETRSIIGGVDTHLDVHVAAALDAIGGVLGVESFPTTPVGFAELHTWLVGFGPVERVGVEGTGAYGAGLARFLRTAGVVVIEVDRPNRQARRRHGKSDAIDAVEAARAALSGRARAVAKTADGNVEAMRVLMVAFRSGRETRTRCLNQLRHLGFCGPDDLRERFRDVRVEALAQNAAGLRPNAGRDAVMFATTLAMRTLARRVLDIDADCARLHDELAQLVKATAPTLLALPGVGVHTAALLLIAAGDNAERITSEAAFAHFCGVAPIHASSGKTIRHRLNRGGDRQANHALWRIVFTRMGSDQRTRVYVDRRLTEGRSKPEIMRILKRYVAREIYRHLPR

SEQ ID NO: 94279 - protein, 430 aa, unidentified
MTNMQPIPNDPVLVAIDVAKARNEVLIEAANHQRRRRLTVLNNRTEHDRFVGTLAGYIRPVICAFEATGNYHRPLAWRLIEAGFEARLVSSMALARTREALHNGWDKNDPKDAQVILHMLRIGATQRYYDPLVAGINDVQELSKTHEAISRAKTEIQHRILTHYLPLYFPEIDRFRGNSRSDWFFAFLEQFPTPASITTLSKEAFVEAAWSVVGRKVSKERLLTDIYETAKASIGLPLAPDAPAIRMFRMVIAEARSLIRQRGEIEVMAGELLGDSADFRLLRRIPGIGPINALTILAETGDLRRFSHHRQFLKFCGLDLATMQSGVFRSQTKLSKYGNGRLRRTLWLAGQVAIRQRDNSFRDKFERYIARDRDNPDLKRKALTAITAKMARVVHAVIKSGSDYRPFIEGPAPGGRTSLSRSREGASATL

SEQ ID NO: 94280 - protein, 349 aa, unidentified
MLADQLDYVVGVDTHRDEHVLAVVAAPAGAVVAGKAVRANRRGYREALRFGERYAAGRRAWAIEGTGSYGAGLARYLAEQGETVLELSRTPRAERRLQGKDDALDAARTARAALASETLALPRAGQRREALRLLLVARRSAVDVRREALAQLRGVIVTAPDHIRQELRGLSAGKLLGRCSRLRRSSSADADELAARLVLRSLARRIEAATREADQLERELLGHVRALAPSLLDEPGVGPIVAAQLIVAWSHRGRLRSEACFARLAGVAPVPASSGQTRRQRLSRGGDRQLNRALHTVVLHRRQHDPATRDYIARRIAEGKSRRDATRLLKRYLARHLYRLLQAQEPLMA

SEQ ID NO: 94281 - protein, 342 aa, unidentified
MNEVHTIGLDIAKNVFQAHGADAAGRQLFSVRITRRKILAFLAKQPRCLVAMKACGGAHHWARELARTGHEVRLIPPAYVKPFVKRHKNDAADAEAICEAAQRSNMRFVAVKSEEQQASAMVFRTRDLMVRQRTQTINAIRGHMAEYGWVAPKGTFWMIELSKIFEEQTSSLPEAARRMFQTMYAHLKELDRQIDELDLEIKQRAQADPISRRLMTILGIGPIAATAIAALAPPVETFRRGRDFAAWLGLTPLQKSTGGKQKLGRTSKMGERTLRRLLIIGSSAVVRHACKRGDKEGSWLNALLARKPRMLAIVALANKTARIVWALLAKQENYRAPEVSAA

SEQ ID NO: 94282 - protein, 426 aa, unidentified
MKKSQRIVGFDCGEDGHSVVLLDTTGEFEEQFGVVNERGQIQELLAKLILAIKAEAQLVVVVESKRSHGRIVADEALELGCDLRQVNTVALNHFRDLEGQPRKDDEWDAYLAARMVFLKMKGSREAIETTEEERSLSRLTRTHSRLVEDRKRHVARLRAVLLEVAPEVLHSSWEGPQPGSKAMLYLLERWPGFEGLERAQLRSIEKILRRCRYGSRTTPVAKLIRKMARGVSIAREERSAVTLELDLLAQQIRFCNESAGQVYAKIANRVEHHPLGKKLLEMHGNGPVITGVLVSELLPVARTSTEPKSATFAGVTPLSRKSGKSLDNDRLTQGANKRVLHALYTSSVVAINNSAVDRAYYNKKLRDYAGHPKPHVAAFIALSRQRHKLIHKLMTTDAQYDKEILIATHLARLEQGRIAEARGSRL

SEQ ID NO: 94283 - protein, 346 aa, unidentified
MDHFAGLDVSVKETSICIVDDAGKIVREVKVASEPEALLAVLKNLAYHFKRIGLEAGPLSQWLFSALAEAGLPVICVETRHMQAVLKAQINKTDRNDARGIAQMMRAGLYRPVHVKTIRSQKLRMLLTHRKLLQSKAIAIENDLRGTLRNFGLKVGVVGKVKFEARIRELVENLPDLAVLVEPMLIVRRTLREQIVILHRRLLAIVRDDEVCRRLMTTPGVGPVVALSYRATVDVPARFRKSKAVGAVFGLTCAKYQSGEVDRNGRISRCGDEMMRVMLYEAAQSMLRSKKWSWLKAWAMQIARRRGMKKAIVALARRLAVIMHRIWVDGTEFRWTREQATAAAAA

SEQ ID NO: 94284 - protein, 402 aa, unidentified
MFFLGIDIGKRMHEAAVIDQTGKPIGKSLRFTNTKAGSETLLSFINQHQLSPQNTHIGLEATGHYWLSVFSFLKKLDFPVTAFNPLQSDSLRIFYLRKTKTDKTDAVLIAQVIRMDLPEETAFPQEDILQLKQLERMRYSVVDNTSDLKRKIIALLDQVFPEYEKLFSNVFGKTSTQVLLESPLPEDLLMIDSKQLAELMITASNGRLSSTRAEQKTKELHTYAHDSFGISIASDVFKFQIQLLLEQIQLMEKQIHQIEVEMNSIVAEKQSYLTTITGISDVTAAVLIAEIGDIHRFDKPSQLLAFAGLDASVHQSGDFNGTRMRLSKRGSPYLRRAIWQAAFVASNRDPALSLYYQSLRKRGKSHGTAIGAVCRKLVNIIFVIMKEQRPYEVRLPVSESED

SEQ ID NO: 94285 - protein, 343 aa, unidentified
MNVFIGLDVSLASTAICVLGPQGKVVEELEAASEPEALVRAMASLPYAVEAIGLEAGPLSQWLSKGMEEAGFDVVLMETRLVKAALKAMPIKTDRRDAQGIARLLQMGWYRPVHRKSVSSQEIRALLTARKSVQQVIINLELSMRGVLRNFGLKLGHVTRIRYEARVRELVEQNEILSASTEALLRARAQLRAELAELDATIADLAKQDDVCRLMMTMPGVGRIVALTVKSAIDDPTRFVRSKDVGPWVGLTPRRTQSGEMDIVGQITRAGDRALRTALYQAAMILMHRGSPNWLQAWALRVAHRRGSKRALIALARRIGIVLHRMWRDGTPFRHAQSSTATV

SEQ ID NO: 94286 - protein, 347 aa, unidentified
MRFYTNQHRYYCGIDLHARSMYVCVLDPQGQILLHRNMPCAPESFLKAIAPYREDMAVAVECILTWYWLADLCSQQNIPFVLGHALYMKAIHGGKAKNDKIDAHKIAVLLRGGMLPMAYVYPPEMRATRDLLRRRMYLMRKRAELLAHVQNTNSQYNLPEIGKKIAYKANRERVAERFSDPSVQRSIEVDLKLMDHYDQLLTDLELYIVRTAKEHDANAFYRLRSVPGIGKILALVILYEIHDINRFPTVQDFVSYSRLVKCTKESAGKRHGTSGKKIGNVHLKWAFSEASVLFLRANPKGQRFVEKLSSKHGKAKALSILAHKLGRAVYYMLKRKQAFDMNKFFNS

SEQ ID NO: 94287 - protein, 342 aa, unidentified
MYYIGLDVHKKTISYCVKDASGQVHQEGKVGATRWELDDWMKTLPQPWTVAMEATIFTGWIYDHLLPHAQQVKVAHPLMLRAIAAAKKKNDRIDAGKIADCLRCDFLPECHMASTAIRDRRRTLRYRHLLVRQMVQMKNRISGLLMETGVSHNKQRLHKVGYFRELLASNEEVNESIRPLLRVSRDSIVRLQKTEYALVSSLQRDPLLAERIKRLRTVPGVGPITALTWALEMGEVSRFPSIRQALSYCGLCGDEKSSADKVTRTPLSKQRNKHIQRVLVEAAKLAPRQDHNLALVYEREKQKGNANRATLAVARKMVAYLLAVDRGQRDFVPFADSQSAAA

SEQ ID NO: 94288 - protein, 347 aa, unidentified
MTIMVDTQRALTGGVDTHADVHVAAVIDPQGGLLGVESFATDLAGYKQLSGWMCAFGKIGLVGVEGTGSYGAGLSRHLHQVGLVVVEVDRPNRQERARQGKSDSLDAIEAARAAQSGRAFGVAKTRDGNVEAIRALMVARRSARESRTKAMNQIRQLVYTAPDELRERFVGVPSWRLAEGVAILRVHADRDPVRMATKSALGTLGRRAVALGEEGKRLDVLIARLVDKVAPELVELVGVGPDTAALLLIAAGDNPSRLRSEATWAKLCGVAPLEASSGKVTRHRLNRGGDRQANSALWRIVLPRMSCHEPTKVYVARRTAEGKSKREIMRILKRYVAREVYHYLPRE

SEQ ID NO: 94289 - protein, 375 aa, unidentified
MINNTIFVGLDVHKDSITVAMAKSGRQDVETVGVISNDSISVRRMVKRLEEKGRELSFCYEAGPCGYGLYRQIASMGHSCRVAASSLVPQRPGDKVKNDRRDARKLARHLRNGDLSPVWVPDEDNEALRDLSRARQSAKEDLHRNRQKLLKFLLRLGIRSPQRIRNWGSKHWQWLKALKLDNSIQQMILSEHIYAIEECDSRVSRFEKEIEAQGQDGPHQNTMAALQGLKGVALITSATIISEVGDLTRFKNPRQLMAYAGLVPSESSSGNSIKRGSITKSGNSHLRKVIVEAAWHYRHRPTLSIGLKKRQEELPEEIKQISWKAQHRLNLKFRRMTATGKPSQKAVVGVARELLGFVWAVGQAVGKENEFLKAV

SEQ ID NO: 94290 - protein, 367 aa, unidentified
MKKISTRAAAQSRNISQQKLTIGLDLGDRNSWYCVVDEAGQIQLEQRVRTNAKALQEVFGAMPRSRIALEIGTHSPWISRLLSELGHEVIVANARKVRLIGESRKKDDRMDAQTLARLARIDPELLYPVKHRSAQAQADLMMIRARAGLVRARTGLVNTARGLAKSYGERLRGCNVRNMNPEKAEGLSPELQRALEPLLSAIEELSERICQYNERIEQLAQQSYPQTALLKQIKGVGTLIALTYMLTLEDPHRFRKSRDVGCYLGLQPGRRNSGQSEPQMHISKEGDPYLRTLLVQGAEHILGPFEMDCDLRRWGLKLAERGGNSGKKRAIVATARKVAVLLHHLWVSGEVYEPLHNSSRATVAAAA

SEQ ID NO: 94291 - protein, 316 aa, unidentified
MVPPPLFVGIDVAKETLDVAVRPTAETWSVANDEAGITALVAQVGALAPTLVVLEATGSFHGPLTAAVAAAGLPVVVVNPRQVRAFAQATGLLAKTDRLDARVLAHFADAVRPTPRPLPDTATQELRAVLLRRRQLVEMLTAERTRLAMAPRRIHDAIQHHLTWLARHLTALDHELTQLIQASPLWRAKDDVLRSIPGVGPVLAHTMLAQVPELGTLGHKQIAALIGVAPFNRESGTLRGRRMVYGGRAEVRAVLYMGTLVATRYNPVIKAFYDRLCAAGKTKKVALTACMRKLLTIMNAMVRDLKPWQPREVSIA

SEQ ID NO: 94292 - protein, 437 aa, unidentified
MLPTSHTIQSAGRARHTKNAMNTENYGALVTLDWGETEHAFATEVAESPANTGKIPATPESLHGWLEQIHERAGGRPVAIALEGGKSAVVHALLEHPWLVIFPVHPATSDRFRKAFTPSGAKDDIPDALVLLTILKQHRDLLRPLKIESPQTRKVEGLVAARRQAVDRRTRIACELGSTLKTYYPQALELCGREPATDLMLDFLTRWPELKSLKAARPASLRTFYAAHNSRHADVIAERLALIAQARALTEDRAVIEPAMLEVKMLVDLLRPLQKNIALIEERIAEAFEAHPEADLFRGLPGAGPATAPRLLAAFGTDRSRYPDACSLQKYAGIAPVTQKSGRSLWIHWRWNAPRFLRQTFVEWAGQSIPKCAWAKAYYQQQRAAGKHHQATLRSLAFKWIRILWRCWQDRIPYDEARYLASLRQQKSPLAARLVIT

SEQ ID NO: 94293 - protein, 408 aa, unidentified
MLEVKVERCAGIDVHKKFLAVCVMIGLADQKPETEVRRFGTSVPELEKLRAWLVERGCTDAVMESTGSYWKPVFNVLEASVKLILANPEQVKALRGKKTDPKDCRWLASLLRHGLVQASFIPSRDIRELRDLTRRRRTLMQEGARERNRVQKLLEDANVKIGNILTNVFGMSGQAMLEALLENKLNAEQIANLAQGRLRPKIPQIAETLEGHQMSDHHRVLLRQILKHMAFIEDMVTELDREISIKLQPYEKQVKLACTIPGIGLDAAASILAETGTDMGEDGPFPTCHHLASWAAICPGNNESGGRRKSGKTRKGNRWLRATLAQTAWAGAAKKNSAFRTRYYRLKARRGPQRAATAVSHAQLIALYWVLRNGKPYQEQIHQLEERQRDSLIHHHLRRLAELGYKTA

SEQ ID NO: 94294 - protein, 415 aa, unidentified
MEPAYNIAGIDVHKKMLAVVIANARDAELHFECRRFGTTASELRHLSAWLKEHLVQEAAMESTAQYWRPVWVALEGQCRLHLAQARSNRGPRGRKTDFRDAKRIVSRLLSGDLILSYVPEPEQRCWRTLTRTRYQLREDRVRLQNQLENLLEEVQIKLSSMISDLLGKSGRRILRALADGETDPVQLANLGNWRLHASKEELRDALTGQVGPLHRKLLSLYLERLDLIESQMASLEKSIAEALQSHQEAVTRLVEIPGIGVDSAQQIIAEIGPAAVAFPSAAQLASWVGVCPGRQESAGESSSNRSAKGNRTMRRLLDQLAHAAVKKDGCRLQIIFRRWLPRLGYKKAIWAVAHRLCRLIWKVLHDGVRYIEKGSELNPKAQKERKRRLVADLQRLGYKVELTALEPASGPTPAA

SEQ ID NO: 94295 - protein, 309 aa, unidentified
MEVHVGIDVSQERLDVHLLPSGEALAFARDGSGIEALAERLSSLAPALVVMEATGGFETVVAAGLAAAGLPLVVVNPRQIRAFAQALGLKAKTDALDAQVIARFAEAVRPAPRPLADEAARALGEMVARRRQLVEMMVAERNRRRMLARPKLIRGVERVLAMLQKELSALERDLDETIRGTPAWREAEGLLTSVPGVGDTTARTLIAELPELGRLDRRKIAALAGLAPFNRDSGRFQGQRRIGGGRAPVRAALYMAALVAMRWNPILKPVAERLRAAGKRPKLIVVAIARKLLVILNAIIRERKPWQNA

SEQ ID NO: 94296 - protein, 331 aa, unidentified
MTTMTMTTSGVTGGVDTHGRTHHAAVLDHLGRQLGDREFPTTPSGYRSLLGWVASHGRLERVGIEGTGTYGAALARQLRAAGVQVVEVDRPDRKARRVQGKSDPLYAYSAARFALAGTATGMPKARDGRVEAIRALRVARNSAVKARSQTTNQLKSLLVTAPEQLREQLRDLTTTALIATCARLWPTGDIASPEHATKTALRRLARRYQYLSKEISEADAELRVLVTAAAPRLIALPGVGPEVAGQLLITLGDNPDRLHSEAAFAHLCGVAPVPASCGRTHRHRLNRGGDRAANKALYVVALGRLRYDPRTRAYATDAPPKGCPSPRSSAA

SEQ ID NO: 94297 - protein, 378 aa, unidentified
MKRILKIGMDVHTTNYTLCAMEPIIGEDDRVFATIKVTPDYKNILLFIENLKTKLGLNDEYDIQCGYEAGCLGYSLYKQLTAAGVKCVILAPTTMLTPQGVRIKTDMRDAYMIAQCLSYGGYHAVYIPTEDDDSVKEYLRMRNDHKLALKKIKQQINAFCIRHGFCYDGTKWTQAHLKWLKKLEITNQLYRETLDEYMASYEEQEAKIERYDKRIEEIAEQTRYHDKVKKLECFLGIKTHTALSLIVETGDFERFAKGNQYASYLGLAPGENSSSDSIHRLGITKAGNSHLRQLLIEASGGICKGTVGHKSKDLRARQNGNTAEVIAYADKANTRLRSRYYKFIRHGKKRNVAVAAIARELACFVWGMMTDNIEMKAV

SEQ ID NO: 94298 - protein, 480 aa, unidentified
MNVKTKEQKKQVITQNSAKNFLSNQEIEKRVSEIEQELKAYTWHDLETNGKFIKNDKISFITTEMLIVGCDIGSEMHFIRAIDNRGIEISKAPLGFTNDKVGFEKAKQWMLELAAQCGKTQIVLGLEPTGHYWFALATWLISHGVSVVQVNPYAVKQSKEIEDNSQLKDDRKDPKIIANLVKDGNYGMPYLPEKLYADLRRFSMFHDQLTEDRIRYINRLHRELKIYFPEYVNAFGKPEGTFALELLKVAQIPKDIVMLGEEGIRDVWHNAKLRGRGYNRAKEIVEYAKTSVGVKEGMEAGKSAIKWNVTMILEIEQELAKVEAELHEKCKKIPNAENLLEIKGVGENILAGIIAEMGDIERFDDAKEIQKLSGLSLVASSSGKHNGQTRISYRGRKRLRYWLFQAAKSAVAHADEYKQLHEYYTTRPDNPLKKKQSLIVIACKILRVIYAIIKTGAKYNPEKMLSDIKRPKVKQEQMAA

SEQ ID NO: 94299 - protein, 344 aa, unidentified
MKDTIYDHYIAIDWSIKNMAIARMTKKSNKITAIDVPSDIEDLQAYLKNLRGTKILTIEETTTSQWLYTELKEYVDRLFICDPNRNKLLNEGPKTDKIDATKLVRLLKAGLMKEVYHSTDKFLYLRRIVSGYEDLVKAGVRLKNQRYALLRACGKSGNEKIGSTLDSQGEQFVLECLDRQIEAYEEEKVGYEKEFERLDRKNLEIKHQKSLPGIGTINAVKIVARVVTPHRFPDKGHYLSYTGLIKLEKTSGGKSYGKKNPRYSRQLKSVYKSGVLAAIGGNNPINDYYEHLIQEAGYPEHNARQKACRRLAILSLGVFKSGKKYQPFRRNDVLKRSKEGTSGL

SEQ ID NO: 94300 - protein, 337 aa, unidentified
MIIVGCDFHPSFQQIAMLDTETGATEEHKLMHTSGEAEGFYRKLASPAIVGIETVGNDQWFVQLLQKLGHEVSVGDAAQIRASYVRKQKTDRRDAKHILQLLVEGRFPRIWIPDSEMRDHRQLLMHRHKLVQIRTRVKNELQHLMLNQGMQKKQKLWSTEGRAALASLPLEPWTDRRRKDLLNLLAMLDAQLESLNDAVTRVAKEYPGVHLLMSQPGVGAVTALAFVLTLGDVHRFPRGKQVASYVGLIPREHSSGGKQRMSGISKQGNRLLRFLLVEAANIAVRFDPELRKEYLHRCHQKHFTVAKVATARKLAIRMYWMLRTQTPYPQVLSSRVA

SEQ ID NO: 94301 - protein, 407 aa, unidentified
MIAGIDVHKKMLAVVIRRQSEQVQYEQRRFGTTRAEIQHLEAWLRARAVEEVVMESTAQYWRPVWYGLESHFRLHLTHPLKTRAPRGRKSDFRDAQRLADRWSAGDLEASFIPGAEQRAWRWLTRTRVQLKKKLGVIHSHVEGLLEQGGIKLSAVVSDLFGVSGWAMLERIAEGVTDVEVLAAEARGVLRNKDAELKEALAGRLEPVYRLLLKQHLEQVRLLRRQVEEINAALAEAMSEHVAALHRLTRMPGVDLYAAEELVAEIGPRAAAFPSAEQFASWVGVCPGSQESAGVNYSRRSAKGNRYLRRLLCQIAWAAIHTKGTFFASLFARLKPRVEGKGAAWAVAHRIAKVVWRVLHEGVEYQEKGSAPTNERTLVRKFKRMLKEFGRLGLDVRALVDQQLPAPA

SEQ ID NO: 94302 - protein, 395 aa, unidentified
MNKIVHYIGLDVHKETIAVSIAPQNSTEVRRYGIIGGTLDAVDKLVKKLAKEHTELRLVYEAGPCGFVLCRHLRNKGLHCEVIAPSLIPKKASDRVKTDRRDADQLARLYRAGELTAIHVPDQQDEAIRDLVRARTSAMTDQRQARNRLKGFLLRLGFRYTGKSSWNDAHKRYLSGLVLPQGPQQIAFQEYIHAINDATDRLERLAQAVQDALPGWKWEPVVRALMSLRGVQVLTAMTLVAEVGDFSRFDDPRSLMHFFGLTPSEHSSSDKRVQGGITRCGNAHCRRVLTEAAWHYRLKPKVSETIQKRQEGQSKQVRLIAWKAQERLHKRFHQLSAKKKSVVAATAVARELVGFVWAIACQVKPAEQPAAPEIIRTCRGKVYRLDPEKKFQKNK

SEQ ID NO: 94303 - protein, 339 aa, unidentified
MQITVVGLDIAKHVFQAHAADANGRAVAQVKLRRAQVLDYFRGLPPCLVGLEACATAHHWARELIALGHTVRLMPPAYVKAYVKRNKTDAADAEAIAEALTRPTMRFVPVKSVDQQSMLMLHRVRELLVRQRTMLATALRAHLAEFGIIAPQGIHRIQKLAAQVHDPAVPPPAREALKLLVAQLASTWRQIDEIEKKLVALHRTEAVSRRLASIPGVGPITAMAIASTVPDPTMFRSGREFAAWLGLTPKSHSSGGKDKLGRISKRGDRYIRHLLYIGAGNAIRFAKARAATGEAWIRALQARRPPKVVIIALANKMARIAWALMMRGESFRSPAAAAG

SEQ ID NO: 94304 - protein, 367 aa, unidentified
MEVYIGMDVHCKKTVYVIQEGSGKVVAQGSVPTSVESFSGMLDELAVPSGTKIGLETGSQSWWVSSVLSGLGMQPVVIDAREVRAKARRIKQKSDLRDAFEICDGLRRGIYTALVYVPDARTQRLRQVLSRRRHFVKLCTSQVNAAKFLLRSVGLRTEAASLKSEGAWQRLIRRPAVRPLRQYLAMHRDLWKLAQEKVIALEKELDKALEPFRETAVLLQSVPGIGPITSASYIAVLGRPDRFPDSSHLVSYIGLAVSTYNSGERERHGHITKRGSGELRMLLCEAAHHSAKPQHPLNPYFRRISARHGYKKAVVAVAQRLARILFQMWRTGQGFDVNRLNVIRARQSRARRVYWQIKQTKEEVVSV

SEQ ID NO: 94305 - protein, 294 aa, unidentified
MHPSGATRQVTNDKAGHKALLRWFSRLRVERIVFEATGPYHRLFERALTAAGLTFAKINPRQARRFAEATGRLAKTDRVDAAMLARLGALLQPEASVPKSDVLDELTELVAARRALVKDRTACLNRAKVLRIQLLKSQTSQRLRQIEAQMAAVDRLCLELVTSDQTLAERLVILPSIAGLGEARAVAILADMPELGEIEPKQAASLAGLAPMARQSGQWRGTSFIRGGRAHVRQALYMPALVAMRFNEPLKTRYEALIQAGKPPKIAITAIMRKLIVLANALLRDARPWTPTAP

SEQ ID NO: 94306 - protein, 384 aa, unidentified
MEAKRTKVDPLEPGRHRCARVEMFSNHSRDRGSAMNVTTYGLDLAKRVFQVHWVEPRTGEVKRKTLARADVSAFFARREPGLVAMEACGSAHHWGRILHGLGHEVRLIAAQFVRPFVKTNKTDAADAEAIWEAAQRPQMRFVAIKTAEQQSVLSLHRIRQQCVKIRTMQANQVRGLLYEFGVAVPKSWRALLSQAGPILADETRCLVPELVRRELMIQLDGLRALTVRIADLERQIGSWQRRESECQRIAAVPGVGKLTATAVVATIGDARTFRSGREFAAFLGLVPRQSGTGGRVKLLGISKRGDPYLRTLLIHGARTVLNHQSRADRTLDPWMQGLLSRRPKNVATVALANKMARTVWALLAHGRAFDRSWSGSAMTAPVMP

SEQ ID NO: 94307 - protein, 400 aa, unidentified
MISIGIDISKGKSTVCILKPYGEIVASPFEVRYTESELKNLIQMIQRLDGEIRIVMEATGIYHLPMLSSLQDQNLFVAVINPFEMKGYASRGLRRVKTDKQDSITIANYGIDNWYRLENHQGSDAVYSELKLLGRQYCHYMELHVKALLELTHMLDYTMPGVKKEFHSWSESNGKDKLSDFVERYWHFDNITAMTKEDFIEDYISWAAEKKYHQNRSKAATLYDLASDGIPTLPANTPSTKMLVLEAVRVLREIDSTLLKIITRMKELAKTLPEYETVRAMGGVGDVLAPKLIAEIGDIRRFHSGKALIAFAGIDAPPYESGQFVGTNRKISKRGSKVLRKIGYETMRVLKTHKAPEDDAVYRFILKKEAEGKSKRQAKIAGLNKFLRIYYARVSEVYKA

SEQ ID NO: 94308 - protein, 326 aa, unidentified
MEHELHYIGIDTAKEKLDVDVLRPDGRHRTKKFANTTKGHDELVSWLKGHKIDHAHICIEATGTYMEPVAECLYDAGYIVSVINPALGKAFAQSEGLRNKTDTVDARMLAEFCRQKRPATWEAPHPLERALRALVVRHQALTDMHTQELNRTETAREVQRPSIDAHLLWLEAELKRLEKQIKDLTDDDPDMKHRRKLLESIPGIGEKTSAVLLAYIGLKDRFAHARQFAAFAGLTPRRYESGSSVRGASRLSKAGHVSLRRALYMPAMVATSKTEWGRAFRDRLAANGKKGKVILGAMMRKLAQVAYGVLKSGVPFDVSRHNPVAA

SEQ ID NO: 94309 - protein, 356 aa, unidentified
MLNDKKYIGMDVHKESISIAVRNGVGKIVMECVIETKASMILQFINGLRGDLQVTFEEGTSAAWLYDLLKPHVTELVVCDPRKNASMREGNQNDKIDARRLAELLRLDHLSPVYHGEHGLRSLKELGCSYLTITKDLGRVMSRVKAIYRSWAIPCTGKQVYAPRHRVEWLGKICELGVRRRAEFYYQQLDALRSLRREVRRELLQECKKHQAWKRLCQIPSVGPIRAAVLLGILQTPHRFRTKRQLWTYSGFGIETQSSADHRNVDGQLERVKKASSIRGLNRNCNHDLKNLFKGAAIVASSKPGPLREFYTALRSKGMRPEMARLTLARKIATIALMVWKRGVNFDAQHLKPQTA

SEQ ID NO: 94310 - protein, 416 aa, unidentified
MSVALPEALFFTGIDWACAEHAVCVLDAAGKITARFTIKHSAEGIASLVRRLARYGDPADLPVAIERPSGRLVDLLLEAGHPVVPVSPNAIKTWREGEVLSGAKSDAGDAAVIAGYLRLRYHRLAPAAPYCDETRALRAAVRTREDLVQMRVAATNQLSALLEAHWPGARAVFADVESPISLEFLTRYPTPAAARHLGHKRMAAFLVKHGYSGRRPAAQLLARLHGAPAGTAGRALTEALQDAVLAVVAVLRALNGAVKDLDRSVAAHLGEHPDGPVFTSLPRSGQINAAQMLAEWGDCRPAYDGPDCVAALAGVTPVTKQSGKYRGVEFRWACNKRFRRAVTTFAGNSRHASPWAAQIYAEARAAGKDHPHATRILARAWIRVIWPCWVNGVPYDPARHRAAAALAGQTPSQPAA

SEQ ID NO: 94311 - protein, 418 aa, unidentified
MKKHSKSSQRSEPTLKRTKARGPVQRDAKEVLAEVLGKLTGKLDGPAVSTSAKENRRGNTVGPNRDRLTVGVDLGDRWSQYCILGLEGETLAEGQLRTTQEDVREFFQALTVARVVIEVGTHSAGVQDVITEWGHEVLVANPRLMEGSKRRKRKSDRIDANKLARLGRVDPQSLYPIRHRSREVRQDLVVLRARDALVSVRTELINTARGLVKSMGTRLPRCSSPSFADKVKDAIPVEVREALLPLVQLVETVKDCIARYDQKIEELGREKYGHTTLLRQVKGVGPITSLAYVLTLEDPQRFASSREVGPYLGLVPKQEDSGDSQPQLGISKAGDRMLRRLLVGSSQYMLGAFGPDTDLRRYGLRLCERGGKNAKKRAVVAVARKLAVLLHHLWVTGDVYEPLHHPGAETRTAQATAA

SEQ ID NO: 94312 - protein, 311 aa, unidentified
MQSEWVGIDVGKSGLEANRHGSTEVLHFGNDLAGHRKLVTWLQGLGGVQVVVEATGGYERPVVQALWDVGIMVSVVNPMRVREFAKSQGILAKTDKIDARLIAHFGEVTRPAGTPPQTEAEVYLSACVERRRQLVIMVTTEKNRLSTCPESMRSHIEEHIVFMEAKIQALEEEAHALIQQDEEQRVLAAQVDSMPGVGPVTATTIVAELPELGKLSRQKIAALVGVAPFNKDSGKKRGKRKTKGGRAGLRRVLYMAALSASKCNSVIRGFYQSLLKRGKEKKVALVACMRKMLGILNAMVRKGESWCILPT

SEQ ID NO: 94313 - protein, 412 aa, unidentified
MLKIVYPICCGMDVHKSFVVACIATTNDHGVTNYKSKRFSTFTGDLRRCADWLSENNCKDVCMESTGKYWIPIYNILEHTCNIVLAHPKYVKAIRGKKTDKRDAKWIADIFKHDLVSGSFIPPADIRQLRDLVRYHWKLTNFNVGEKNRAQNCLTVSNIKLDDVFSDVFGKAASAITTRLLESNEPFDVKPYLTKNIKKPIEQIQAAVDGEMCAEQAEKLRIIRSHMDSLELCKLNLESLILSTAEKYIPQLNLVMTAPGIQSFAAIGIISEIGVDMSVFPTSKHLCSWAGLTPQNNESAGKKKTTRISRAGAYIKPLLVQCALCAIRTKQFPEVRNRYLALKKRRGHKKAIIAIARMLLTAIYNILKWNEVYNSELYRKADRPPAHREVSVEEAVFILQRQGYLVTASAVS

SEQ ID NO: 94314 - protein, 355 aa, unidentified
MNDAKYIGMDVHQATISVAVRDSRGNLVMEAILETKADTIVEFIHGLRGSLSVTFEEGTWAAWLHDLLQPHVTRVVACDPRKNALLKVGNHNDRMDARKLSELLYLNKLSPVYHGEQGIRTLKELARSYITITRDLTRVMSRLKAIYRSWGIPCAGQQVYAPRYRAEWLAKISEAGVRRRAELYYQQFDALAALRQGTRRELLAEARKHPAMRLLRQIPAIGPIRAALLIALIQTPNRFRTKRQLWAYCGLALRTYTSGEYRFVAGQLKRSKKVLAVRGLNINHNHDLKNIFKGAATRAAATAGPFQGFYQACVARGVKPHLARLTLARKIAATTLLVWKKGVRFDAEHLKQQAA

SEQ ID NO: 94315 - protein, 258 aa, unidentified
MRNLYMGIDVGKKFCWICVLNEEYECVYFERVATLQEAAWREMLGLFEGHEVHAAFEIGAHYEWMFDLLSACCAKVEVVNTARFALISQSQKKTDKVDAEKLAQGLWRGDLPLVYVPEKWVRKDRRLVAHIHALTQSLTSVSAIGTITRFATPDELSSYFGLCGKVEQSGDRLRLGQITKRGNKHVRWLLGQAITHLIRRDPKARRKYLKWRRKKKAKVARVALMRWVTTVLWRMLTHKEKYRLSGVPGCHFKRKNAA

SEQ ID NO: 94316 - protein, 355 aa, unidentified
MTSTKYIGMDVHKESISIAVMNSVGKVVMECVIETKASTIVQFLDGLRGDLRVTLEEGTWAAWLYDLLKPHVTEVVVCNPRKAALLKDGSKSDRIDAHKLAELLYLNRIKSVYHGEHGLRTLKELARSYLTITKDLTRVMNRLKALYRSWGIPCAGNEVYAPRYRAEWLGKISEAGVRRRAEHYYQQLDVLRLLRQEVRRDLLAEAKKHQPWKLLRLIPGIGPIRATLLMALMQTPHRFRTKRQLWKYSGLGLETHDSAQYDVAEGQLQRSKKPATVRGLNKDHNHDLKDIFKGAATRVSGSGGPLRDFYENLLAKGRKPTMARLTLARKIAAITLIVWKKEVRFDANYLKPQAA

SEQ ID NO: 94317 - protein, 345 aa, unidentified
MNATTVAVDLAKNAFELAGADGNWKVIEKARLTRSQFARWFDNRAVQLVVMEACGSAHHWARTLRARGIEVRLLPAQYVRAYVKRNKTDAVDAVALLEAARATDIKPVAVKSIEQQALQALHRMRSAWMATRTGRINMLRGFCREFGLDVPVGAVRGIAQIARFIADDRSAIPAILRTPMRLALEEIRLMEARIEQVERELAEIARRSPACAALTSVPGIGLLTSTAMLAAVGDPKSFNAGRRYSSFLGLTPREYSSGGTRHLGRISKRGDRYIRMLLTHGARSVLRAASVARRAGRNVDRLRSWALAVQDRTNHNKATCALANKLARIAWAVWVKHERYQAAPA

SEQ ID NO: 94318 - protein, 345 aa, unidentified
MKYFAGLDVSLEETAICVVDESGRIVKEGRAASEPRALYEALRKIDLPLERIGLEAGSLTAWLYDGIRAEGLPAIYIETRQANAAMKTMPNKTDRNDARALAQIMRTGWYRQVHVKSQQCRLWRSLLVARRTVLNEMRTIENVVRAILREAGIKLGTPSRAAFADRVRELIGADTVIMALVEPLLAIVATMLREFGRLTKQVLNIARKEQVCRRLMSVPGVGPITALAFRATVDQPDRFRRSRDVGAHLGLTPARYQSGETDIQGKVSRCGDELARTALYEAAHSLLVLSKRWSSLRAWGMNVAKRRGMARARVAVARKLAVILHRMWSDGTEFRFGKTPGPVSA

SEQ ID NO: 94319 - protein, 402 aa, unidentified
MSDSLPSVTTEREWAAFAAIDWADQKHFWRLVPAGSQHAEQGELDNTPEAVEVWATALERRFGGCPIAVCLEQKRGALVYMLAEYARLVLSPVHPTTAARYRETFCTSGAKSDPSDTASLLDLLVRHRERLSPLQPDTTETRLLQFLVERRREVVDEKTAQSNRLTDCLKLYFPQILRWFDDVASPLVGTLLERWPSLQDLRRAHPGTLSKFFHEQNCRGEERIHERIAAIYQAVPATQDEAALEAGAMTARGLVAVLATLRDDIAKLDQRIAQLVADHPEAPLFDSLPGAGKALVPRLIVAFGTRRERYESAYQMQCYSGIAPVRVASGKTQTIHFRRACPKFLRQTFHEYALALAPEIGVGQGVLPDPARSPQVTPCGGQSLGLQMDSHHFPVLEGRQTL

SEQ ID NO: 94320 - protein, 355 aa, unidentified
MTSTKYIGMDVHKESISIAVMNSAGKIVMECVIETKASTILQFIDGLHGDLRVTFEEGTWAAWLYDLLKPHVTEVVVCNPRKNALLKDGSKSDRIDARKLAEQLYMNKIKSVYHGEHGLRTLKELARSYLTITKDVTRVMNRLKALYRSWAIPCAGNEVYAPRHRSEWLGKITEAGVRRRAEHAYQQLDVLRLLRQEVRRDLLLEAKKHKARKLLRQIPGIGPIRAALLVALIQTPHRFRTKRQLWTYSGLGLETHDSAQYRVVEGQLKRSKKSVTLRGLNKDHNHDLKDIFKGAATRVSSSSGPLHDFYERLLAKGRKPTMARLTLARKIAAITLIVWKKEVRFDANYLKLQAA

SEQ ID NO: 94321 - protein, 346 aa, unidentified
MRFYDQQHEYYCGVDLHTRKMYLCLLDREGNKRLHRNFQAKPDGFLRAIKPFREDLVVGVECMFTWYWLADLCLDEGIDFVLGHALYMKAIHGGKHKDDRIDSEKIARLMRGGTFPLSYVYPREMRATRDLLRRRTFLMRRRSELLGHVQLVNHQYNLDPFEKRLQYAANRDVLERFTEVSARHNVEADLEMIGHYDTLLQRLELNVLRQAKVHDPQAQFLLQTIPGVGKILSHVLLYEIHTINRFASVGHFLSSARLVTPQHTSDGKRTGGGGAKIGNAHLKWAFSEAVPLMLRECPEAKQFVERKEKKHGKSRAMTMLARKIGRVVYQMLKRKEAFDKVKFFAN

SEQ ID NO: 94322 - protein, 366 aa, unidentified
MLQVAELSAQADSDFNLGGSSKTMYYIGLDVHKKTISYCVKDAAGQVHGEGKIRSTRQELKAWVNALPEPRMIAMEATIFTGWIYDCLLPHAEKVKVAHPLMLRAIAAAKRKNDRIDAAKIADCLRCDFLPECHMASTAIRDRRRVLRYRNLVVKQSVQMKNRISGLLMETGVSYNKSRLHQRGYFKDLMWMHPEVSDSIRPLLKFCRERIEHSQELDHRLVGSLERDPLLKVRLERLKTVPGVGSITALTWALEIGDYTRFTSTKEAVSYCGLCGDEKSSAEKVMRMPISKQRNKHIQRVLIEAAKLAVRRNHELALVYDKELQRGNPNRATLAVARKLVAYLLAVDRRQQNFMPAEEFRSSSAA

SEQ ID NO: 94323 - protein, 344 aa, unidentified
MDNHTQYSGFAGVDLAKKVMQIHFVTGDGEITDKQVKRAEFLDFLRNRTKCLIGMEACGASQDWARKLEAMGHEVHLMSPKAVKPFVSGQKNDYNDAIGIYKAMFNGVRRVPVKSTEIRDLQTLRRIRSQVTKDKVKEINHVRGLLAEYGIVMGKSITAFNKGISSALESLKERGDVSPLVAEELQTTVESIKTKIERQKRLDREIEQLARGCKNYENFLKTPGVGPFTAAMLCVLLCDPAIFANGRQFAAYIGLAPRSRGSGGKNFIIGIPSKFNCDSESRAVFVECAQALARYKNKSPWVDGILRRKPKKVAVIAIANKLARQVWAMANKGESFKQMTILTA

SEQ ID NO: 94324 - protein, 330 aa, unidentified
MYLGIDTHTRYAQVAVVDGDGNLHEEIRVPTDRLDDLAEQYAGGEAAIEASGHYRPAYEMLDEHLDVTLVNPSKNRVIADATVKTDRIDAKRLAHMLRTDMLAESYVPSDEIRTLRDLVRTRKSLVEERTAEKNRVRAVLKRTNNAYDSELFGPTGREFLAELSLSDADRTIVEAHLSVIDEYDEQIDRLEEKIEQKTLESPAAQRLLSIPGVGQSTAALIVAEVGEIDRFDRHEELVSYAGLDPMVHQSGDTEVHGRISKEGSAPLRWALVQCAHVSVRYDEYLGNFYTRLKDRKNHQIAIVATARKLLVSIFYMLTRQETYDPPEVSA

SEQ ID NO: 94325 - protein, 324 aa, unidentified
MQDIIGIDVAKATFDIALPLGPGKYRTRAKVANTAAGWEQLLAWRDKHAPEAAVGMEATGIYHEALAERLVAAGVTVYVVNPAQIKAYGQSELLRTKTDRTDAKLIARFFQSRQLDPERLRAYVPPTPSERRLRALVRRLDDLKQMRQMELNRLESANETVAQGITEVVATLDGQIDQVERAITEHVDDDPDLRTRRDLLNSIPGLSDTTSTFLLACLGQLERYEHVGQLVAHAGLNPAQRQSGKHQGKVRISRIGDALVRAKLYMPALVAKRHNPILAAFAQRLADRGKPPKVILCALMRKLLHLVWGVLRSGKPFDPRHALA

SEQ ID NO: 94326 - protein, 344 aa, unidentified
MKEVITIGLDLAKNVFQVHGVDGSGDTVMRRQLRRSQLLPFFKKQRPCLVGMEACATSHHWARQLIELGHGVKLMPARYVKPYVKRNKNDAVDAAAICEAVTRPTMRFVAVKSAQQQSVLMLHRTRELLVRQRTMLVNAIRSHMAEFGIVAPVGVPRVKELFAVIADADDDRLPAIARACLEGLANQFLSLHEEIATAERRIHAWHRSNEASRRLETIPGIGPITATALAATITDPSVFTSGRELAAWIGLVPRQSSTGGKERLGRISKQGDQYLRWLLVAGAMSVIRQAKRRGTTSLPWLANLITNKPTKVAAVALANKMARIAWAVLRQGGTYQKPATAAAA

SEQ ID NO: 94327 - protein, 406 aa, unidentified
MELTALHKRVIGLDVHQAQITACAIIEDADGTVRIEQRQFGGFKRDRRALADWAAALSPDEVVMESTGIYWKSPYAALEAVGIRAQVVNARHVKNVPGRKTDVGDAQWLATLARAGLLRGSFVPPAKLRELRLISRQRQKLVGQLASEKNRLHKVLTDGGVRLGVVVSDLHGQSARAMVKAIIDGQSPHEVLQLASRRLKASREEIFDALQGELTDSHRFVLDELMRHIEEIEARIARFDARLLDALTDERNALALLQTLPGVDLIGAAMLLVEIGTDMDVFGSADRLASWVGICPGNNESAGKRKSGRVRKGNPYVRRLLCEFAHAASRTQSVFQSKFQSLIVRRGHKRAIVALAHKLLRTIFFMLNRGQHYRDSATDYEALSVQRNAPRWIKALTKFGFIPRHA

SEQ ID NO: 94328 - protein, 400 aa, unidentified
MISVGIDVSKGKSTVCILKPYGEIVSKPFNITHTHKDLSELSSMLFRLNDEVKIVMEATGIYHLPVLTYLQEKGFFVSVINPYLMKSYRNESLRKAKTDKIDSRIIANYGIDHWFKMKEFQTSGEIYEELKLLGQQYRHYMKLHLLSLAELTHLLDLTMPGIKNLLASWNETNRKDKRSDFVERFWHYDVITSMSEQEFTEEYILWAKEKKYVPSQEKAKVIYTLAQESIPTLPSETSSVKILVTEAVRVLKEVDATLGLILSRMQEIAKTLPEYPVVREMGGVGNTLAPKLIAEIGDVRRFRNGKALVAFAGIDPPPYESGQFVGCNRKISKRGSASLRKAGYETMRSLKMRSRPEDPVYRYVVKKESEGKSKKSAKIAGLNKFLRIYYARVTELYKNI

SEQ ID NO: 94329 - protein, 321 aa, unidentified
MTYVGIDVSKATFVVAYSSAKSSKTKTFKNTTKGVHEFIQPLSADDYHCVLEATGNYSSLLVYLLSQAGITVSLENPLKIKNFARVMLSVTKTDETDARLIALYGEKMHPAPYKLRSDAILILKQKRTVIRQLKKQLIATRNLKGSMEALPFFDSKCKKTIEKTIAFLERQVKDLEEELANLAQGEYRKQMGLLTSVKGIGVTLAAALIMATGGFAYFDNAKQLTRYLGLSPTYQQSGTSVNVKGHINQNGDSNLRSQLYVAAFSSLRCNAECKACFDRLRSNGKPGKVAVVAVANKLIRQAFAVVTQGKPYVDGFKSEKP

SEQ ID NO: 94330 - protein, 354 aa, unidentified
MPEIATIGLDIAKNVFQLHAVDRSGKIVLRKALRRSQVQGFFSRLPPCLIGMEACATAHHWARTLMAFGHDVRLIPPAYVKPYLRRQKNDAADAAAICEAVTRPSMRFVPVKSPQQQSTLMLHRARDLLIGQRTALINALRGHFAELGIVVAQGARNTRQLLAFLHEEANLDFPTAARIALQPLATMLLGIETQIARLDKAILAAHRSDPISVRLAAIPGIGPIVASCLSASVPDASLFQGSREFAASLGLVPRQHSTGGKARLGSISKMGNRHLRKLLVVGAHAALYSMKSGKTRTDLADWARSLLAKKPFKVVAVALANKIARIAWAVMARNTAYEPGNKGAAAPTASYTAA

SEQ ID NO: 94331 - protein, 429 aa, unidentified
MNTPSDLNNYVALIGLDWADQKHDVALRAAGSARVERSSFKHDPQAIADWVSGLRQRFGEGKIAIVLEQSRGALIHALMGYENLLLYPINPKTLAKLRAALYPSGKKDDPVDAGLLLELLEKFGDRLSPWKPDDVLTRHLSFLVEARRGLVDHRTSLVNQLASVLKSYFPQALELLGEDLSSPLATDFLKRWPTISAVQKAKASSVRAFYYGHNSRSEQCLQRRLQLIQSTVALTHDLAVVQAQSLAAQSLAQVLACLRPLIARYDRQIAELFAKHDDSAIFASLDGAGPALAPRLLVAFGTDRSRFAHPDAMPCYSGTAPVTEKSGKHKWVHRRWARPVFVHQSFVEFAGQSIRFSQWAKCCYDELISKGHGHWAALRVLARKWQRILWSCWQNRTVYDEAIYLRSLQRKGIQIYAGLWQQSTPSHGE

SEQ ID NO: 94332 - protein, 404 aa, unidentified
MKGPIVSIDVSKGKSDYQAFKNLNVKYTGSRSIKHTKEGFDEIVNLVREMEKKLETEVCVVYEATGVYHRVLKKVLEDNNIKQFIINPLLSAKTRKNDSLRCPKTDKLDPKSIAKTYYSHSLHNSHKQETIYHELRELSRYYEDILVHIRKDKVAFRAQLDIVFPGYDALYDDLYGPVALAVIEKYPHPEMLQKKKINTVSKVIQNKTCHRQATSDTMADKAIEYSKTIYSGCDKDDIEVLILQRFIKKLKEDMAEAERTIGEMIKLAQELPDFSIIKSIPGIGDNLAARIIAELGDMTRFKKKNELVAFAGLDPRISESGQDDGDHMHITKKGNKRLRCLLYLAVTCSIRLKRDDNSIKDFYIKKKQQSNPMCSKAAKTACASKLVRIIYSMCKTGELYQYNK

SEQ ID NO: 94333 - protein, 326 aa, unidentified
MEHELHYIGIDTAKEKLDVDVLRPDGRHRTKKFANTTNGHDELVSWLKGHKIDHAHICIEATGTYMEPVAECLYDAGYIVSVINPALGKAFAQSEGLRNKTDTVDACMLAEFCRQKRPAAWEAPHPLERALRALVVRHQALTDMHTQELNRTETAREVQRPSIDAHLLWLEAELKRLEKQIKDLTDDDPDMKHRRKLLESIPGIGEKTSAVLLAYIGLKDRFAHARQFAAFAGLTPRRYESGSSVRGASRMSKAGHVSLRRALYMPAMVATSKTEWGRAFRDRLAANGKKGKVILGAMMRKLAQVAYGVLKSGVPFDASRHNPVAA

SEQ ID NO: 94334 - protein, 308 aa, unidentified
MQDTIGIDISKDTLDIHRQSDGRHARFGNDKAGLAALRRWIGKTPVRVVFEATGRYHRDMEAALDAAGHALVKVNPGRARRFAQAAGYGAKTDRVDAAMLVRMGAVLELEATPVRSESMHEIRELHIARLGLIKDRTACRNRLQAARNKVVLAQLRARLRQVERQIEQIDAELARLVAELLAHRFVILMSIPGIGPVAAIAMLVEMPELGSMDGKEAASLAGLAPITRESGRWKGQSRIGGGRRGLRRALYMPALVATRHNRQLGQTYQALCSAGKPAKVALTAVMRKLLILANALIRDDRKWAETAP

SEQ ID NO: 94335 - protein, 380 aa, unidentified
MSQAYIGLDVHKRTISIAVAFLGNDEPVSYGTCSSDINRFLKILRRLMKKYSFEKKDIKLCYEAGPCGFVLARHLLRLGFDTVVIAPSLIPRQSGDKFKTDKRDARKLARHFRSGNLTTVHIPDESDEVIRDLCRARTDAVDDCRRSRQRLLSFLLRNGHRYTGKSNWTEAHMRYLRELVLQDPSQKVILEEYLQTIDRNMQRVSDLEENMRTLQVDWTRGKFAEALQGFRGFQLIASMIITSELGDVTRFDHPRKLMAYLGLVPTEDSSGDKRRQGAITKCGNSHARWILVEVAECYRYDPKISRALSCRQEGLSKAVKELSWRAQKRLNHRYVRLAMRRLHKNKIKVAIARELAAFIWELGQILRKESCVPDSQRYVA

SEQ ID NO: 94336 - protein, 382 aa, unidentified
MEQSTTAYVAIDTHKKTISVAIAEAGRREETRFIGEIPSRPEAVAKMVDRLAKKHGTLAFCYEAGPCGYGLYRQITALGHECVVVAPSLVPTRPGDRVKTDRRDALTQASLFRSGELTPVWVPEDAHKVMRDLCRARQVAVESLRRARQQVSGFLLRQGRVYSNGAHWTRKHRFWLAAQRFEHPARQIAFEELVQAMDEAQARRDRLAKQMQELLPSWSLAKIVAAIQALPGIALIAAITLVAEVGDFKRFANPRQIMAYLGLTPSERSSGAKTARGAITKAGNTRARRMLVESAWTYRLPARMGAQILKRNEAPSRRSKRSPGRRRRGFAPDIAGSFGPANQPMSFASPSRVNSSPLSGRLRRMTPSPRRPDQQGKTKHSA

SEQ ID NO: 94337 - protein, 351 aa, unidentified
MMIIGCDFHPRFQQISFLLEETGECGQRRLMHTAEAEQYYRSLCGTPVRVGVEATGSYGWFRRLLSELGHELLVGDATQIRASNPRRQKTDKRDAEHILGLLVEDRFPAIWQPPAENEQLRQLLLHRSRLVRLRTRVTNQLEGMAKNEGLLLPGGWSNKRRKAIEALPLPGWYGERRKDLLALLDRLEERIAPLDKAVSQAAANNAEACLLMTHPGVGPIVSLAYVLTIGNWQRFPRGKQVGSYLGLIPSEESSGDKRRLGHISKQGNTLVRWLLVEAATTAQRYDASWHRQYLRLSMTKHHGVAKVAIAHKLAVRLYWMLRSGEDYQHVRERGSTARQSECPGGRSRAAD

SEQ ID NO: 94338 - protein, 438 aa, unidentified
MSNKVIFNLDEPFISVGIDVGADFSWMSIALPNQQFVGKPFKILHNSIDSLTTAVSKIKEAEKLYSLESRIFLEATGIYHYPLFCYLRDKGFNCSVINPIITKNSTNINIRKVHNDRFDSKKAALVGLKPDLKVSLMPSDLALNCRNLCREYYDLMDNRSAYVNKLQGELRMAFPQYLGIFSKVTINTSLTLLETYTSPSAFLEADKQEIIDIIKSTARFGLTYAQNKYNAIIQAATDANQFGYIIDSNIKRIRLYISFIRKYDEEINSILESLHELVDANEDTDFVKQIHLIKTFKGAGFLSAVSIMGEIGDFSAFSKPKQLFAYFGLDPAVKQSGKFEGTKVQMSKRGSSIARRVIHTLSLQSISISRNGKAKNPVLREYYLKKCDSKPKLVAMGAVSHKVCNMIFAILRDNKPFKIIAPQEHIKQYNAAKCDMTA

SEQ ID NO: 94339 - protein, 320 aa, unidentified
MMSKIVLGIDVSKRTLDVALIFEARTLCKQFKNSTDGFKSLADWLDSLEIKQIHACLEATGIYGEAVALFLHECGHQVSVVNPLRIKGYAQSNMQRNKTDRLDARLIADFCLTQKPDPWQPPSAAVKHLQSLVRRVEVLEEMRQAEDNRLANASAEIKPSVERMVTLIKEEISELERQIKQHIDRHPDLKEQSELLQTIPGIGAKTAHLLLSEIEFERYNSGRAIAAQAGVVPRQKQSGTSLKQTGLSKLGNARLRKALYFPAITAKRHNEIIKEFAERLHKRGKTPMQIVCAAMRKLLHIAFGVLKHKRAFDPSLAFSA

SEQ ID NO: 94340 - protein, 344 aa, unidentified
MNEVITIGVDLAKNVFQVHGVDAEGAMIVGRQLRRSQVLPFFNKQPPCLVGMEACATSHHWARQLIELGHEVKLMPPHYVKPYVKRSKNDAADAAAICEAVTRPTMRFVSVKSIEQQGVLMLHRTRDLLVRQRTMLINAIRAHMAEFGVVAPVGVPRVKELLAVIADTDDARLPPVARTCLESLVRQFLSLHEEIAIAERRIHAWHRSSAVSRRLETIPSIGPIIASALAASITDPEVFKNGRELAAWIGLTPRQNSTGGKQRLGKISKQGDQYLRWLLVAGAMSVVLHAKRRGTTNLPWLADIIARKPTKVAAVALANKTARIVWALLRHGGTYQKPATVLAA

SEQ ID NO: 94341 - protein, 362 aa, unidentified
MRIIGCDLHARQQAVAMLDTETGEVVSMTLKHEGNNVREFYSKLPHPVRVGIEATGSMQWFVNLMEELGMECLVGHPAQIRAAEPRKQKHDRRDADLILKVLVENRFPAIWLPSKELQDLRSLLRHRHQWVRMRTRIQNALQSIALANGLRRGTSLWSHDGQNTIASLPLAPHTAYRRSELQALYQKFEAEIEKLNQRVEEQACGRAGARLLMTHPGVGPVTALATEVFLGDPARFADSKALASYVGIIPREYSSGGRQRLGGLTKQGNPLLRFLWGEAGAHAVRRDPELQRFYRRKLIQKGFGKASVAVARKLGIRLWIMLRDQIEYNEFCRRGQKQQKSSEACAGMPETRNGAKSHRPVD

SEQ ID NO: 94342 - protein, 468 aa, unidentified
MKRKSRGAKKQKVSPFDGELKLIEPDAAAIDIGSRSHWVAVNPQRDREAEREFGAFTTDLMRLADWLEQCEAKSVVMEATGVYWVPLYELLESRGFKVYVVDAHTVRHLPGRSKSDVKDCQWLRRLHSYGLLRGSFRPPAQIRQLRNYQRSCAKIVEAAAQQQLRMQKALTLMNIQLHHVISDISGLTGLGIVRAIVGGERDPKQLVKLRDPRIRASKETIQKSLEGNWQEELLFDLKIALESYDHFQGQIAAYNEQICRELREVPSKVDVVREPLPAGRPKVCHKRPGMSQQDQLDLRQELYRISGVDLTRIDGISLQTAQKVFFEIGTDVSAWDDEKQFSSWLGLSPNHRISGGKVLKRSSRKVVNPLSVGLRLAARPLRNSHSALGANFRRLIAKIGMPKAITAMARKLAVLIYRMLKYGTQYVDKGMEHYEAKYRETKLQYLRSQAAKLGMALVPNLEAVSAAL

SEQ ID NO: 94343 - protein, 460 aa, unidentified
MPIIRSNAIRIKRFRELKADLRTRRDRLLVGIDIAKAQHVAQLRLAHTRVLDKQLVIPNTQAGFDAFWAHVQRRQAETGCPELVCAVEPTGTYHEALAQCLEAHGADVVLVSNTVAHANRRTLDGTWGKSDPKDAHNLCDLLERGLVLFYSLPDSRVATLRRLVRLLRQARVELGACKARFQNTLLPRLGPAGEPLPPALVARLPAPLRRLCPPADATPRRRGRPRGRAAVPAEPAGGLPAPLACELPDLVARLAAVQGRIAQLETALVQVAQPLPAYGWLHSLPGVGPTLAAILLAEIGDIAWYTRFSQLRKLAGLDIQRVQTGQWAGTARISKAGRPLLRWALYQAALGAARTPTWRARREGLIAKRRGDRYAFFKATVELAAKLLRLVWGVWRSGCAYDPARVGPGPAARPRPERGRRRAPPSPQGQAAIGEPRGNQAARSSGTPAGYRGNGTSRRS

SEQ ID NO: 94344 - protein, 369 aa, unidentified
MDHCSAVIGLDVHKQAIVAAVLPPGADLATEVLTIENDPRAVERLVKRVTTHGQATFVYEAGPYGYQVQRQIAALGQQAVVVAPALTPVRPGDRVKTDRRDAEKLARFYRAGVLTEIRVPTRAEEAARDLVRTREDILGERLRARHRLGKFLLRQGRVYRETKAWGVKHRVWLKAQRFEWAPLQQTFDAYLRALEEAEARLATVDQQVYDLAQSDSYRVPVQYLRCLKGIETLSALTLIVETQDFRRFATAPAYMGATGLVSAERSSGEKVRRGGITKTGNAHLRRVLVEAAWCYRQRNVVSRPVAERRRGCSLPVIRIAQKAQDRLHRKFGRMISRNKPHQVAVIAVARELAGFVWAIAHRFPVEAPA

SEQ ID NO: 94345 - protein, 399 aa, unidentified
MRQLWARIGAGKAHHHCVVIDSEGTRLLSRRVANDEADLTTLVDEVLELSGGGVVKWAVDLNSGGAGLLIALLADRDQMLLYLPGRIVYHAAAGYRGDSKTDAKDAAIIADQARMRRDLHPMRVDDEISVELKILTSRRTDLMRDRTRAINRLRALLTGYFPALERALDVRNSAGGLILLTGYQTPDGLRKLGRTKLEGWLRKRKAYNASRLADVAIEAANMQLVRVAGQDVAAASVGKLARQVLSLNVELRELDSSIEERFRRHRHAEVIESMPGFGPLLGAEFLAATGGDVSAFGTADRLAGISGLAPVPRDSGRVSGNLRRPRRYDRRLLRAFYLSAQLSIRHSAQSQVFYDRKRAEGKRHTQAVLALARRRLNVLWAMLRDQSPYRPPAIEAVAA

SEQ ID NO: 94346 - protein, 394 aa, unidentified
MFLVGIDVGKLSHMFCIMDSSNGEILVSPVSFKNNKQGFDFLMGNIKLYPKDKLLIGMEDTGHYHFNLLKFLLDSGYTVALINPITTDLTRKMQLNPTKDDNLDTMTICDVLASSPRKKGYRISKINNFEFYEQKRLTREHHDLKEQLNVYANKLQKCIDIVFPEYNSLFRSKYGTVYMKVLKAFGCANAIAHADIRNIRKCFETNRNGRTISLTPEKLKEAAKHSIGFPSKAEVIEIRHLIDLIELIKEQINDVDIKIEEFSTQLNSPILTIPGISHFSGTSILAELGDLRNYSKASQIIKFAGVSPYKHQSSQYEAQHTAITKKGSRYLRKTLYQVILPVIRYNPVFNEYYHLKLSQGKGHRCAQGHCVRKLLRIIYHLVITNQPFDSTLLK

SEQ ID NO: 94347 - protein, 408 aa, unidentified
MLFIGVDLSDKTFDSCISNSSGDVLAVNKFNFDDDGFSDFVYKINQHESDNKNCIIGLENPHSRLVDFLIQREYNVIPTHPNSIAKYRESRIPSRAKSDPMDARLIADYIREHHKSLRLINMPDDTIRELSILLEDRDKLVEQKVRFSNQLTSTLKEYFPQALDAFGSVTNKSALEFLARFDTHQEVKALSSQKLDDVLAECGFFRTDSKEKFHSAMSKNPSAISQAVIKAKIRLKNALVGHLLLLVQQIEDYDKQVQKIVDETPNGSIFRTLPGADYILGARLFVLYSSREFVSASEAQAFWGTCPYTSRSGSMVTVGFRRGCNHFGRNTFHQLAFCSLKSSQWSKKQNAKKRKEGKHSNHALRCIANTWVKITYAMWRSKTPYDESKHLASIANHIINQPAFILGG

SEQ ID NO: 94348 - protein, 361 aa, unidentified
MTQTMTWAGLDVHARSTQAVAVDARSGELARARFGGGIESVVEWLASLTGPVHAVYEAGPTGYGLARAGGELGLRIDVIAPGKTPRAAADRIKTDRRDAELLVRQLMAGTLHPIHVPSPALEAARDLVRAREDVRCDLSRARHRVSKLLLRHGEVYPKDRSTWTREHRRWLSSRRFDEPNTQLAYIDALAAVDGLTHRRDALAERLSHVAADSELWPVVSRLRAFRGIDTLTALALVCEVGDWHRFQRPDQLAAWIGLVPSLSQSGESRTSGGITKTGSRHARRLLVEAAWHYQRPPRIGATLRNRQHGQPDHILQIAWRAQHRLYRVHQRLRQRGKHPNLATAAAARELACFCWAAVTAP

SEQ ID NO: 94349 - protein, 332 aa, unidentified
MNYCGIDIGCKTLDVVIRKKGKSLKCQSFTNTCEGHSKLLSYLRKHKVGRVGLEATGYYHLDIAIELDDATDIEVMIINPRASKNFSHALMTKHKNDAVDADVLAKFVERMDFIPWSSPDHEVFALRSCGRRLISLTKEKTKAKNQLHAFGMTKRTPKFIIDDIKLTIEQLEKQIDNLTGHALLLIKQNDTLTLRYQWITSLKGVADKTAIKLLGELGVLELDMSGKQWVSHAGLFPREFQSGTSVNKKTRIGKVGNRYIREALYMGALSATRHDPNIRAFYLHLINDNGLTKLQAVCAVMRKMVLAIHAMFKYQKPFNGQCFYALDKAGVN

SEQ ID NO: 94350 - protein, 322 aa, unidentified
MKMAETTIVTAGIDTSKDKLDIAIHGQAGGLTVENNAAGWKRLAVWLKQAGVGRAGIEATGGYKRGALRHLQKTGFTVVLLQPLQIKAFARVMLRRAKSDRLDAALIATCTHQIDACNKMTPDPRFDALGDHLTYIEQIEEDIARFKTRLEHIGEARLRKNVDADIKRLEIRRLREMSRLRDALWQHDDLATRYTLVLSIPSIGERTALSLIVRMPGLGQVSREEAASLAGLAPFVHESGKFKGKTHIGGGRARLRRSLYIAALPGAFFWNPQLQALYQRLISRGKSPKSALVACARKLLIFANAIVARGTPWEKNRTAFAA

SEQ ID NO: 94351 - protein, 407 aa, unidentified
MDWMQQPGAFAGIDWGGHEHQLCVVDGAGSKELELRVTHDVSGLDELVRALALHGEHVPVAIERAEGLLVEHLQAHGHPVFPVSPRISARARERYRVAPVKDDRFDAFVLADTLRHEHAHWRALAVPSSLLAELRALTRDRGRLLETQQATEAQLRAILECYHPAPARLFSSLDRQIALAFVADYPTPAVASRVRTTRMAGFLRRNAYTGRVPAQVLAERMRANLLSGAEGTIAGKSLSAKTFAHLLGVMNDALAEFDDAIASVLAEHPDAHIFASFPGVGPILTGVLLAEIGEDRTRYPSPEALLAEAGLAPVTRSSGRSRSVRFRYAANTRLREAAMWWAFNSIKTSPWAAVAFRQARDERGQRYHRALRGLAARWMRVAWRCWQDGATYEPARHTAAANAEAAA

SEQ ID NO: 94352 - protein, 413 aa, unidentified
MAAVEFTQVVSRGCGMDIHKEVVVATVRGEGIQKEARSFDTFTSSLTELREWLVSLGITHVAMESTGVYWKPIYNVFEGHIPHVWIVNARHIKNVPGHKTDKNDSEWICQLLMAGLLKPSFIPPREQRELRDLTRYRRKLIQMVSANKNRIIRTLEDGNVKLSSVLSDTSGKTGATLIEMLCDGKELTLQDIEDVRHGRCHHTSEEMLEACTGYMNDHKRYMLQRIRECNRKLTVEIVELDHRIKEIVTPYAEVMDRLDEIPGLHDRTLEDLIAEIGLDMTVYPSAESLCKWAAMCPGNNESAGKKKSGKTNHGDKYVKATLVEAAWAASRTKGTFYKERFERLSKRKGGKKALIAVGHSILKAVHYVISTGGRYHELGEQYVPSKIEKKRRDYLKSELQKLGYEVSIIKKKD

SEQ ID NO: 94353 - protein, 437 aa, unidentified
MITQTVIHPDAAGIDLASEVHYVAVPADRDPQPVRNFGPTTDQLNVMADWLQKCGIRTVAMEATGVYWIPLFELLEARGLEVCLVNAQHVRHVPGRKSDVQDCQWLQFLHSVGLLHASFRPALEVCAVRTLLRHRDSLVQVASAHLMRLQKALDQMNVLLHRAVTDITGTTGLAILDAIVAGERDPQKLAAHRDHRCKKSEAEIAAALKGDWKVEQLFTLRQSLAAWRFHHQLADECLQEVHRLAAKLESRTEAAPPPPTKRGRQPDAAVRTLLFQKFGVDVTAVDGVNTHVGYTFLTEVGPNLSRFASPENFSSWLGLCPNNKVSGNHKLSVSTRPVSNRLATALRMAAQSLNRVESPLGDWFRRMRAKLGPAGAVTAAAHKLARILYTMIKTRTAFDPAKLGNPALIHQRKERSLRKQAALLGFSLQPANAGAVS

SEQ ID NO: 94354 - protein, 342 aa, unidentified
MKDSIYDHYIAIDWSIKNMAIARMTKKSNKITVIDVDSDIEDLQAYLKNLRGTKILTIEETTTSQWLYTELREYVDRIIICDPNRNKLLNEGAKTDKIDASKLVQLLKAGLIKEVYHSTDKFLYLRRIVSGYEDLIKAGVRLKNQRYSLLRVCGKSGNEKIGSRFGGQGEQFVLECLDRQIEAYEKDKQGYEMQFTKLARSYSEIKHQKSLPGIGVINAVKIVARVVTPYRFPDKGHYLSYTGLIKLAKISGGRSYGKRNPRYSRQLKSVYKSGVLAAIGGNNPINDYYNSLIQDGYAQHNARQKACRRLAILSLGVFKSGKRYQPYRSHHVKGAKEGTSSL

SEQ ID NO: 94355 - protein, 394 aa, unidentified
MIYAGVDIAKTDHVIGAVDERGAEMCRPMPFKNTEAGLERAVAWLEGLAGSPSDVVVGMEATGHYWMACYSFLIARGYSVAVINPMQVKAVRKLKKLDKVKNDRIDAWLIAETLRIGQYDETRLATDEVASLRSLSRYLQSLRGMAAELKTQCVCLMDAHFPEYAGIFSDMFGAGSRAVLSKSPLPFELARRRADSLARDIAEASRRGGKSAGYAARIKAAARSSIGVRLGQEAASFQVKSLIRQIEFADSECAKVEARVRALLDEVEPLVLTIPGVSYATGAQIVSEIGDVSRFRNASALVSYAGLNSSVSQSGQFDSGGGPITKHGSPYLRRALWLAANRARQYDPGLRAFYDKKRAEGKPHRVAVTAVARKLCHIVFAVMRDQVPYDPGRE

SEQ ID NO: 94356 - protein, 433 aa, unidentified
MNTTTATATATATTNLTPAPASLPAPGAWIGLDWGHKEHAFALHAAPGTPEEGTLPTTAEALHAWLHTLEQRFGGRPVAVGLETSRGAVIHALLQYPWITIYPINPVTSARYRQAFTPSGASDDLPDARGLLELVRDHTAKLRPLELEDPPTIKLAGLVEARRDLVDRRTQVLNQLTSLLRSYYPQALELVGDLDTELAVDFLDRWPDLITLKTAQPGVLNRFYYAHQLRRPELLEQRLQRIRQAVALTTDEARVSVAVLQLRCLLDQLRACRRHVARFDEEIKTVFAAHPDAVIFRALPGAGPALAPRLCVAFGTLRTLYPDPASFQKHGGVAPVREKSGQTVWTHWRWQAPVFLRQTLVEWAGQTVVYCAWAKVYYERMKAKGKRHHVILRALAFKWIRVVWKCWQTRTPYDEAAYLRQLAHRKSPNAVTA

SEQ ID NO: 94357 - protein, 341 aa, unidentified
MKKFIRIGVDLAKNCFQVHALESEGGRIVSRKLTRAGMFKFFGEVAPCLVGMEACGSAHYWARELTAMGHQVKLMPPSYVKPYVKRGKNDAVDAEACCEGVSRPTMRFVAIKSAEQQATLTLHKTRELLTKQRTMNVNALRGHLSEFGLVAAKGIENVKELVATARDDARLPKAAKACVALLAGQIAALDAAILAIEKEIKGVHAQDEMSRLLDTIPGVGPIIASAISASAPDPNVFKSGRDFAAWLGLAPRQNSSGGKDKLGAISKRGNRYLRKQLVVGATSLLRVAARRRGALADWIVAMQAKKPARHVSVALANKLARIAWAVAKTGELFRKESFARA

SEQ ID NO: 94358 - protein, 316 aa, unidentified
MKSSQSFVGIDVSATRLDVAVLPAGTHFTVPYTDDGIAALVHTLRDLAPQTVVLEATGGYEIPVVYAMSGANLPVVIMNPKTLRHFAKSTGKLAKTDKLDARVLAHYAQSIQPPVRPLKDPEQLELGTLMSRRRQLRDRIVMEGNRRRTSTPKIRHNIDQHLTYLRQLLKDLDREIHDFIRRTPLWHEKSAILQGVVGIGPKVSASLIADLPELGTVPRPQISALAGLAPMNRDSGKWRGKRTIQGGRPTVRQALYMAALVASRHNPVIRVFYQRLLAAGKPKKLALTACMRKLLVILNAMLKNRLHWNQQMPLAA

SEQ ID NO: 94359 - protein, 352 aa, unidentified
MSSLFVGCDAHKHFSQLEVQDSSAHVIRRCRVDHARGSLHSFFSTLPNGTPVALESVGNWYWIADEIEAAGCRPLLTNPAKAKLLMGHVNKTDKLDASGLTTLLRLGSLPSVWLPPAELRDQRELPRTRMVLCAERTRLKNRIHSLLAKYNLSPSEGSLFSQQGRAWLDSTISQLPPETARCMTDQLQLLDFLSLQISELEDRIHQLIALTPAMQLLKSLPGVGDMLAIVIDREVGSIERFPSAQQFSSYCGTTPRVTSSGGKTHYGKMRTESNQYLKWAFIEAANAVSAHHAQRGWTDRHCSKLYLRIRSRKGASIAIGAVARHLAESAFWVLKKNEPYKDPEMKVSPRQG

SEQ ID NO: 94360 - protein, 420 aa, unidentified
MFAKDFPRRPMRRCYGASGERGIFSAGHKPMERPMPKPNDCSRSVTAFEQNSTLIAVIEMSLSSWLVAGVVPGIERHPLKKLETDEDALLKLLLRWRDEAVKAGHKIERIAIAFEAGRDGFWLARWLRARGIEAYVIHPASVAVSREHRRAKTDRLDMELLKRVFLGWLRGEPDHCSMSAIPTLEQEDAKRPNRERENLVGQRTRIVNRMKACLIRFGIRNFKPTLRKAPEGLEALRTPEGAPLPPNTRAEMRRDMARLRFVQDQIKEIEATRLQQLEQAPAEGPHAMIRLLACVTGVGIETADMLVNEILARNLRDQKAVARYAGLTGSPDESGKRSREKGLSRAGNARVRRGMIQLAWRFLIFQKESALAQWYRVATKDARGAIRKTMIVALARKLLIALWRMVTIGEMPDGVAMRAT

SEQ ID NO: 94361 - protein, 351 aa, unidentified
MMIIGTDYHPSFQVIAFLIEETGEYGERELNHSDGEAERFYRDLHARGIHVRVGMEATGFSRWFERLLAELGMELWIGDPAEIKAKRVKKQKYDREDARLLLRLMRGNNFPQIWVPSPENRDLRQLLWHRHRLVQMRTRIMNQLQALAMNEGKRWKKKLWSAQGRTELEKLPLAPWASRRRRELLELLDRLDPSIEELSKAVDREARKRPEVLRLMTHPGVGALTALAFVLIIGTTERFQRGKQIGTYVGMIPSEDSSAGKQRLGHISKQGNSLLRFLLVEAAQAAARINPHWRRRSMHLAIRRHKSIAKVAMGRRMAVRLYWMWRNGCEYSSSLEFGSYVGQLETGHGVQ

SEQ ID NO: 94362 - protein, 406 aa, unidentified
MNLMTLYKRVLGLDVHQAQITAYAIIEDENGEIRVEQRQFGTFKRDRRALAEWASALRIELVVMESTGIYWKSPYAALEAAGIKTLVVNAKHVKNVPGRKTDIGDAQWLATLARAGLLRGSFIPPACLRELRLLSRQRQKLVGQLAAEKNRLHKVLTDGGIRLGVVVSDVHGTAARKMVKALIADAAIQDILALASKRFKASREELFDALQGDLTPSHRFVLDELMHHIEEIEARIARFDGQLLAGMAEQRHALALLQTIPGVDLIGAAMLLVEIGTDMDAFATPDRLASWVGVCPGNNESAGKRKSGRAGKGNPYVRRLLCEFAHAASRTTSVFKSKFQALLVRRGHKRSIIAIAHKLLRTIFFMLKRGQHYRDSATDYEAMSVKKNAPRWIKALTKFGFIPQPA

SEQ ID NO: 94363 - protein, 331 aa, unidentified
MKILETVGIDMSKLNFDVRIYSTQAYAQFENSNNGFKELLSWTYKNSSFSKENIFFVFEHTGLYSHKISVYLTEKQVPFALVPGLEIKRSLGLVRGKNDKVDATNIAKYAYRLRDEIKAYKLPSVQIQTLKSLLSLRDRIVKQRAGFKASLKEQKQVLSVKENNLLFKSQEKLIHYLSKQIEIIEKEMMGIVKSNELLNRQLMLIISIKGIGTQTALFLIVYTEGFTKFKNWRKFAAYCGTAPFPNSSGTSIRGRTKVSNLANKKIKSLLDLCAKTAIQFSPEMKTYYNKKVKEGKNKMSTINVIRNKLLSRIFAVVNRNTPYVDVMKYAA

SEQ ID NO: 94364 - protein, 426 aa, unidentified
MKRTQNEKISQIKNETLVVGIDIGKETHYARAFDYRGLELAKLLKFSNTAEGYKLLDRWMQDTSKQHAKTEIIAGFEPTGHYWFTLGDHLNRQGHKLAIVNPFHVKRTKELDDNSPTKNDRKDPKTIAMLVKDGRYREVYIPENIYQELREAVTERERLQGQLTAIHNRVIRWLDIRFPEFTEIFKKWTGKTALLTLRTFPTPAKVLEAGEDKILATWRTEVKRAIGIKKARALIKAAASSIGRTNGHLASEAGLQNLLAEYELYRTQIEQLEQLMRELLLQVPNALKLLNIKGIGLVTAATFVGETGDISRFEHPRQIQKLAGYNLVENSSGKHKGKTTISRRGRKRLRHGLFMAMIAILGKNPEFKELHHRNLTREKNPLNKMQSIVALCGKLIRVFYAILSKGVDYNPEKMMGDIQQSLKTAA

SEQ ID NO: 94365 - protein, 453 aa, unidentified
MKKETPKLGILKMGSGLPVFNPYAAGIDIGDTLHCVAINDGNGGHEVKTTSAFTCDLYDIVDYCKSNGVTTVAMESTGVYWLALYLLLEEAGIEPYLVNAKHAKNVTGRKKDDTDAIWLQKLHTCGLLQKSFQPDNETRLLRSYTRQRKNLILLATDSIRRMQKALELMNVKIHTVISDILGKTGMAMVKAIMAGERNPEILCKLCDPRIKASREDIIKSLEGIWKDEYLFMLEQAVENYEFHQKQVKSCEEKIQQQLLKQVALIKDGDITGLEETPQKKSKANSKKNQFDFSLLPYLIALAGADLCKIPGISQVTALEFIAEVGLDMSKWKSPKHFAAWLNLTPNTKISGGKIISSKMMKKNNKAGQLLRQAASCLVTNKTPIGDYYRSMRARMGGKGAALATAHKLSRIIYTMLLKQTEYNPGMIIENHEKSREEKIKKLEKQINKLKQVA

SEQ ID NO: 94366 - protein, 244 aa, unidentified
MAKAQLDIALRPSGERWAVANDASGVATLVDRVQTLHPTLIVREATGGLERAVTSALAAAGLPVVVVHPRQARDCARATGQLAKTEAVEARALAHCADVIRPTPRPLPDAQTQELRALLGRRQPLIVMRTAEQNRLVGTSERLTKAMVAHMTWLNADIATLDNDLETTLRASPLWRENDDLLQSAKGIGPVCARTLLLELPELGTLTRQQIAALVGVAPLNCDSGTLRGRRTIWGGRAHVRTVL

SEQ ID NO: 94367 - protein, 347 aa, unidentified
MNLVAIDLGKFKSVACLYRSDDDVTYRTIETGPQAVHDLLVEWSPERLVVEVGTVTGWVHDIAVGLGIEVQVANPNTEGWRWKRVKRKTDRDDALKLARLSVLNQLPTVWMPVRRVRQWRSLINYRHELVSRRTAIRNSIRSILDMQGYRMAMGARAWTEAGIAALRSLARPAAECEPEELWKGQLETELTLLEVLRQQIDLIESKLDSLAAAEPRTSRLRTIPGVGPRLSEAVVAWIDDPHRFRNARAVGSYVGLVPRRRQSGTYDRSGRVTKHGPGLLRKLLVEVAWIMRQHNPHAAALYNKLNKGEKTRRKQATVALGRRLLTWCWAMLRDETTWDAQKVGLAI

SEQ ID NO: 94368 - protein, 389 aa, unidentified
MKIFVGIDIAKLNHFAAAISSDGEIIIEPFKFTNDADGFQLLVSKLESFDKNSIIIGLESTAHYGDNLVRYLVTEFYQVCVLNPIKTCQMRKNNVRKTKTDKVDTFVIAKTLMMQDNLRFVSFFDLDMMDLKALGRFRQKTIKQRTRLKIQLTTYVDQVFPEIQYFFKSGLHQHAVYALLKEAPSPKEIASMHMTHLANLLKVNSHGHFTKEQAKELRVLAQKSVGANDSAISIQITQTIQQIELLDSQLEKIEAEMTDIMKFNDSVIMTIPGIGYINGGMILGEIGDIHRFSNPNKLLAFAGLDPSVYQSGNFQAKTTRMSKRGSRVLRYALVNAAWNVVRNNATFKAYYDAKRAEGRSHYNALGHCAGKLVRVIWKMLTDEVEFNLE

SEQ ID NO: 94369 - protein, 402 aa, unidentified
MRNSVFVGLDWAYRSHAVCVIDAQGSVLKHLTISHDAQGLGELRHALAAFGKALSVAIERPSGLIVDALVEAGHQVFAIHPNAVKASRPRYRSTNAKSDAGDAFMLADLLRTDGHRWHALQPQSAAIRGLRALVRTRDDLVATRIRLANQLTALLDAYWPGATCIFAAVDSPIALAFIEQWPTARNLTARQIAAFCKRQGYSGRRSPGVLLERLQAAAPSLCEPALAQAQATAALALVALLKPLSAQIKALDGHIALAMAALPQAVSVMSLPRAGCICAAQILAELGDVPERFATAEQLCSEAGVVPVTYESGKSRAVTFRWACNRRLRQALTCLADNSRHASPWAASVYHAARKRGCDHPHAVRILARAWTRVLWRIWTDATVYDPAIHSSACRIEISQEG

SEQ ID NO: 94370 - protein, 341 aa, unidentified
MEHIAIDLGRRESQICVRDETGQILEEARHSTSELRSYLGRRPRGSRVLVESSAEAFTVADWAAELGHEPMVVPSILVPALGIGERGLKNDVRDARKLSEMDCRMAVPSVHIPSAERRAHQARLTARDALVRVRTKLINTVRSFVRMRAIAPIRATPPTLPRAVRATLLQTPEGVPEYLEALLQSLEHLNAQIQQADHALREVAHSEPVCRLLMTMPGVGPVTALSFVSAIDDVTRFEDASRLTSYLGLVPGERTTGFKTRRTAMTKAGPSRVRWTLTQAAWTLVRVQPDSPLGQWYQQVSKRRGKKIAISGLSRRMAAILYAMWREQRPYDATRAASRHG

SEQ ID NO: 94371 - protein, 387 aa, unidentified
MPQVDDLSRSLVAFDQDASLIVVVEMSEASWLVAGMAPGLDRQPLKKLGPDPDALLRLVERWRDEAVKAGKMIKRIALAFEAGRDGFWLARWLQARGIEVHVIHSTSVAVSREHRRAKTDRLDTAMLRRVFLGWLRSERGHCGMVAIPTLEDEDARRPSRERESLVGERTRIINRMKAILAWLGVRGFNPKLRKAPQRLDDLRTPEDLPLPPNTVDELRRDMARLAMVCEQIKALEQARLANLEQAPGTGPHAMVRLIANVIGVGIETADMLVQEVLSRNLRDRRAVARFAGLTGAPNESGSRRRERGLAKSGNARVRRGLIQLAWRFLRFQKDSALAQWYRVRTDGPAGARRTKMIVALARELLIAFWRMVTVGEIPAGFALRQPA

SEQ ID NO: 94372 - protein, 343 aa, unidentified
MSIVGGLDIHRKQITFDYVDTETGEARRGQVCPADREHLAKWLARFTGQDAHFAMEGCTGWRYVAGEIIAAGLTPHLADPAETAHLRGPKRRAKTDRADARHQRMLLEQGRLPECWIPPPHVLECRALLETYLDLREQRTGWVQRIHATLFHHGAPHIARQRLGTAEGAAALQAAAARCSPAGQLQLAIAVQMLAVYDERLHQVRRQLLDQARHLRGAAELTARLYGVGPITGLAITCWLGGAGRFSSARKAVRFAGLDITVYSSDGKRAPGRLSRQGPPVLRWCLYEAGKAHARKGAPDHAYYAQVKERIDGKRAALSEARKIIRQAARILTGLGDDALAAC

SEQ ID NO: 94373 - protein, 400 aa, unidentified
MLSIGIDVSKGKSTVCGMKPGGEIVYTPFEVQHTREGMSELVSLLRGSGEEVRVVLESTGSYHCPVVAALLESGIFVSVVNSLRMKRFCSQSIRKVKTDRIDAMQIALYGLAYWQELQPTRLPENTYRELQLLARQYYQMTSMLIKAKVDFNALCDQVLPGMQELMNDHAGRHKLSDFVLRYRHTTHILEMGETRFRKDYCKWAEKKGYRNCERMAALIFATAQNGIPVLPNAPSTQIVITEAIRVLHTVEASRDAILTQMQALAKTLPEYSLVREMPCIGDTLAPRLIAEIGDVRRFHSKRALIAYAGIDAPPYQSGKFCANNRHISKRGNRYLRKTGYEVMQSYVMHKPANDPIFTFIEKKRGEGKSGKLAMVAGLNKFLRVYYGKVTELYRSLPAIE

SEQ ID NO: 94374 - protein, 355 aa, unidentified
MKQDKYIGMDVHQATIAVAVMDSMGKLMMECILETKAATILEFIRGLKGSLSVTFEEGTSAAWLHDLLKPHVSHLIVCDPRKNALLKDGSKSDRIDARKLAELLRGNQLSAVYHGEQGVRTLKELARSYLTISQDLVRVMTRVKALYRSWAIPCSGKQVYSVRHRSLWLDKIGEAGVRRRAEFYYQQLDGLRSLHQQVRRDLLLESARHQATKRLRQIPSIGPIRAALLVALLQTPHRFRTKRQLWAYSGFGIETHDSGEHRYVEGELRRSKKKATVRGLNQNYNRDLKNLFKGAATQAAAKPGPLQEFYSALLAKGIRPDMARLTLARKIVAISLTIWKKGVDFDPKHLQRQAA

SEQ ID NO: 94375 - protein, 495 aa, unidentified
MAVDLEREKRDKARTPLERLQVFLQTGPDLAINSSRENYMSKRRGKAKRVQKASNQEPENLPVLNRDAAAIDIGSEQHCVAVPPGRDTESVRSFGAFTIDLHAMAHWLKQCGIKSVVMESTGVYWIAPFQVLEQYGLEVLLIDARLAKNLPGRKSDVLDCQWHQQLHTFGLLRGCFLPVAEIMPLRSYLRLRDELVKASTQAVQHIQKALFEMNVQLANVISDITGETGLAIIEAILAGECDGKKLAELKHRRIVASKETIAKSLEGNWRPELLFALQTALDRYKFYQQQLAQCDDQIAQALAQLPTRELKVQTEPEKKTETSVRGQKLTPLEAELKRIAGVDLTSIDGIGEQIAQIILSELGPDLERSFQSEKHFSSYLGLCPGTKISGGKVLKRRSRKVKHRVATALRLAARSLPSSDRALGANFRRLKARLGAPKAITAMANKLAKLVYRLLVYGKDYFDRGSQMYEQKFRLQQIRRLQKQAKMLNLKLVPA

SEQ ID NO: 94376 - protein, 344 aa, unidentified
MEYYAGIDVSLESSSVCVVDAKGQVLREAKIASEPEALVGWFNQLGVELARVGLEAGPLSQWLYAGMRDAGLAAELLETRHVRDAFKAMPVKTDRKDARGIAQLMRLGWFRSVHCKSLPAQETRALLTARKLVQSKHHDTEMSLRGILRGFGLKVGQTSQRAFASRVRELVAGHPTLQLVAEALLATRAALGEQLSKLEKRVRMLARSDPQVRRLMSTPGVGVIVALTYAAAIDEPTRFRSSKAVGAHFGLTPKKYQSGETDVTGRISKIGDASVRTALYEAANVILTRPVKGSSLKSWAMRLAARAGMRKAKVALARKLAVVLHRMLVDGTTFSAERAAATRA

SEQ ID NO: 94377 - protein, 362 aa, unidentified
MNESTLIVAFDQHAASVVAAVLLPHQRTPALQELASDLPTIGRFVGRLVQRGSVRCCYEAGPCGFELQRFLQARQVACDVIAPALIPRRPGDRIKTDRRDAAQLAMLYRAGALTAIHVPTEQEEAARDLLRCREDIKADLLRARHRLSKFLLRHGRRFTGTKKAWSKRHDAWLRAQHWPIPALDQTHRAYLRGVDETHARLRSVEEDLRTLLTLEPLRPRVERLRCFRGVDDLTALTIAAELGDPRRFASAPRAMAFVGLVPSEHSSGTKQARGAITKTGNAHLRRVLVEAAWHYRHRPFVGATLRRRQQGAAAPIVAHAWTAQERLYRRYHRLRGRGKPNQQVITAVARELTGFVWAALVQ

SEQ ID NO: 94378 - protein, 352 aa, unidentified
MIIIGVDFHPEFQQIASVDTDTGEFQEKRLGHGEDAEAFYRALAGQEVRVGMEASGHAGWFERLVAELQFELWIGDAAENRTKRVRKQKTDRQDAQLILRLLLEDRIPQIWVPSWENRDLRQLLWHRHRKVQARTRIMNQLQAVALNEGLRCKKRLWREHGRQQLESFRLAPWASRRRRDLLELLDRLNPTIAELSQAIEQEVEKCPEAERLSTHPGVGALTALAFVLIIGRTERFHCGKPVASYLGLVPLEESSGNRRRRGHITKQGSSMLRFLLVEAAQVTVRSVPEWRSKYLHLMMRRGRKTAKVAMARKLAVRLYWMWRKGWDYEQVKKFGSHAGQPGNRDGVPSNTE

SEQ ID NO: 94379 - protein, 380 aa, unidentified
MTCISAGVDVSKNRSTVCIMDQDGKVIMRPFLVWHSTEELDFLADTLKRLNGEVRVIMESTSVYQYPIALQLKERGLFISIVNAYEMKQFANIDFRGGKTDKKDSRTIASYGISYWYKLVEWQIPKDTYFNLDLLNRTYMNAKKHRQIILQELQHYIDCAMPGMDKELHSLNLSTKKDFMLDFVEKFWHRDEIVNMTEAEFTEVFTAWAKKKGYRPVEGKAAKIYAIAKSCIPYYPANPTVKTILQCIVDKLSGVNRTLVTIVTQMIEEAKKLPEYQIVREMPGVGDPLAARFFGSAGDIRRFKNSKALVAYAGIDSPPDESGDFSSTHRHITKKGSKVFRDTGYEIMMALRAQKRTWEKVRKNPEVYDYMLRKEAEEKP

SEQ ID NO: 94380 - protein, 348 aa, unidentified
MDTIGLDLHKRESQLCVGHADGTITERRIVTSRERFTALFAAQPPARVLLEASTESEWVASHLESLGHTVIVADPNYAPMYATRSRRVKTDKRDARTLMEACGAGTYRPAHRLSAPRRHVRAELAVRDAVVRTRTRYVALAKALVRRDGLRVPSSAAERVGVHIQALPTSAALAAELAPLLTLLSPLNATIAAADQRLAALEQTDPSVARLMTAPGIGAVTASALVATIDDITRFASAHQFEAYLGLVPGERSSGEQRRVGPITKAGNRRVRWLLVEAAWRILRSKDPDSAALRAWARTIAARRGNRIAVVALARRLAGVLYAMWRDGVPYEAGKIRGPRRALVPRAG

SEQ ID NO: 94381 - protein, 364 aa, unidentified
MVVTSTTNNRSREVPKLQVTTLGIDLAKNVFCLHGCDVNGKAVVRKQLLRGQLLNFVANLPPCLVAMEACASAHYWAREIEKLGHQVRLIAPKFVRPYVKANKNDASDAEAICEAATRPSMRFVAIKSVAQQDVQAVHRVRQQLVKTRTGLANQVRGLLAEHGIVIGRGFAPLRRALPLLLEDRGNGLSAVMRELLGEIGERLRFVDDRLRKYDLTIHRLFRQDERCQRVAAVEGVGPVTATALVAAVGNATEFRSGRELAAYLGLVPRHRASGGRTVLLGISKRGDRYLRTLLIHGARAALFRIERHRGARAIWAARLKLRRGANVAAVALANKNARLLWALLSRGQSYRPAPFPARVPQAGG

SEQ ID NO: 94382 - protein, 342 aa, unidentified
MESTRHIGIDLHRNCFTACVRLENGRNYLTEWRLEQLPKFVAKLRPNDEVAVEVTGNTRLFHDAVAPHVKRVVAVNPNQFQVITHSVKKTDPNDARNLALYLAKDLLPEVRMKDKTRAQIASLTQTRDTMVKLRTALKNKINNICSAHGVNLSKESLASEKGLKAVLEMPFDPLVELELKILVEQIRSLNKSIAELEETISRESQKLEGHKHLTSIKGIGGLSAGILLSIIGDIGDFADEGKLAAYFGIVPRISHSNETEHSGRITKRGTKLGRTTLVQCALIAQRYSPYLKNYYERKKNRGTGKAIIALARKFLGIIYRTLKNKWLFEDFPNFVLAEEATA

SEQ ID NO: 94383 - protein, 406 aa, unidentified
MTDRERIVYGGVDTHLDVHVAAVVDSTGALLGTRAFPTTPLGLRALQRWLRSHGHLAKVGVEGTGSYGAGLARVLADAGCPLVEVDRPNRQLRRSRGKSDTVDAEAAARAALSGTASGVPKSRDGIVEAIRVTRLAARATRRQMTRLEGQVRHLVLTAPEQLRVQLQPLGTGARMGRAAALRPGPDPADVATATRTVLRTMARQWQGLRADHKALTGQLAELTAQANPALLELPGVGPDTAAALLIAAGDNPERLRSSAAFAALCGASPVEASSGKTQGRRLNRGGDRQANAALYRIVIVRMSHGDPATMAYLARRTAAGHSQRDAIRCLKRYAAREVFQRLQHPEPAADQTALRPRRQALTLPMRAAAEHLHRPINAVARLELGSVHDPDLARRYQDWLTMQEAG

SEQ ID NO: 94384 - protein, 393 aa, unidentified
MFYLGIDIAKNTHVASLMDEKGKTIFKGFSFSNTTEGGKSLLEIIKKHSEFTDVTVGMEATGHYWLSIYSFLYDYDFHCIHVINPIQTDGWRKGTEIRKRKNDTIDSVLIADWIRYGDFVETTLSNEDLYSLRNICRMRNYLIQTAGDLKRKVICVLDQVFPEYQTIFSNTFGTTSKQLLLDFSSPSDFEELSVESLTETLENLSRKKIGQSTAEKLINSAKNSFGVTFSKESFTFQLKLLIEQIKFIDNQVKECETKIKELMEKINSPITTIPGIGSVLGAVIISEFGDISRFDKPSKLVAYAGIDATISQSGEFEGTHNVMSKRGSPYLRKALFQAALVASNTDPVLKDYYQKERAEGKHHKTCIGAVARKMCNIIYAVLKNNTPYEVPKQ

SEQ ID NO: 94385 - protein, 367 aa, unidentified
MREITTTFVGLDTHKVSISLAMLIPGEDKPVEWQCTNDRASVRRMVKKVLRQAPSGVRFCYEAGPCGYALQRWIRDEGAACVVVAPSLIPRKRGERIKTDRRDARKLAELDRAGLLTEVHPPTEEDEAARDLCRAREAAHEDMVRSRHRVSKLLLRRGWQWMGGKRAWSQGYRLWLRSLRFEHRADQWMFEDYLLALDQVETRLKALEAQILEVSHDPRYAEAVGALRCFRGIDTITAMFLVAELHDVMRFESPRGLMSYLGVVPSEHSSGEKERRGEITKAGNKHVRRLLIEAAWHYRLRPGVATLAKRRQGQPTRVIAIADRAMHRLHRRFTRMVERGKPRPKVVVAVARELSGFVWTALRKDLA

SEQ ID NO: 94386 - protein, 385 aa, unidentified
MQRNDMSRSLVAFDQNSTVVAVVELSLSTWLVAGVVPGLKRQPLKKLSADADKLVALLERWRAEAIKAGQVINRMVVAFEAGRDGFWLARLLRGRGIEAYVIHASSIAVSREHRRAKSDRIDTQRLMRSLLGWLRGEAEHCRMAAIPTLAQEDAKRPNREHECLVADRTRLVNRMKAALIRLGIRNFNIKLRKAAEGLAALRTPEGEPLPPNTLAELGRDLERLALIRAQIRAIEQARLQRLEAAPHQATHPMILMLAKVMGVGVETADMLVHEVLSRPLRDHRAVGRYAGLTGSPDESGSSRREQGLAKAGNARVRRGMLQLAWRWLMHQKDSALTQWYRSRTADGRKDTRKTMIVALARKLLIALWRYVTTGEVPQGVVLKAV

SEQ ID NO: 94387 - protein, 351 aa, unidentified
MSIMGCDLHTRYQVVAWIDERTGEIQVRQLEHEGEEVRKFYGQWPGGTVVGIEATFPALWFERLLAELGHELWVGDAARIRASEVRQQKTDTRDAEHLLDLLRTGRFPRIWVPSVEERDLRQLLVHRMKLVRARTTVKNQLQALAISQGVCRRRKLWSAKGRAELEKLTLLPWAARRRKELLEGLDHLDAAVRELDRAVEETARSRPEVMLLRTHPGVGMVVGLAFALTVGPVERFANSRKLVSYLGLNPREHSSGGRQRLGAISKQGNTMMRWLLVEAAQTAARLDPQLRRTYQRLKNKRVSGVAKVAIARRLAIRLYWMLRTRHNYAQLVCMSGSPSSAVVPPQAGSNV

SEQ ID NO: 94388 - protein, 510 aa, unidentified
MPGEVGPPRSSAEKGQHPGSNTGYRLIRGLRCPKLHCPPRLKMSLGWQEMTLNDDVLIAVDPHKASNTAAVLDPVTKTVIEAARFANTVGGYAELIAFAARWAQRRWAVEGCHGAGRSLAQRLVADGELVLDVPAKLAARVRVYSRGHGRKTDKDDAVSVGLAALDGTGVTLVACDDATVSLRLLCDRREELTAQRTQAACRLHRLLAELTPGGMRRELSANKAQALLARIRPAGDVATVRVHIARDHLADIRALDARIKYLGGQIAALVTASGTGLTGLFGIGPVIAGRLLAEVGDVARFATKDTFASYNGTAPIDVSSGEQVRHRLSRAGNRRINHALHMMAVTQIRYPATPGRLYYERKRREGKTPKEALRCLSGGCLTRSTISSSPTGGAQSERADHLRPRRRRGLHPPHQRPAHTRPHHPPGPYTARHHRVHRAGLERRPPRRHRDPRRQHPPPPRPPRPGRNRQLKRQPLDREEPIWSVFGIGGTRSAGVTRCRCGAIQPVQHA

SEQ ID NO: 94389 - protein, 343 aa, unidentified
MVNYYIGADVHCNNVELAIERNQQIVQRHSLPMSIRALREVLDALGGRKHLTFEEGPLAGWLCRQLKDHVDTLIVCDPRRNRLVSVDGDKDDRIDAAKLAALLRGQFLRPVHHSDDLQRLWLKRWVALYHDRVRVATQAINKLRALARLEGRRIPGAALRDKRIRQSWLDGLETNLAEALRLLWASYDRQRAEADQAKRQMIRRSRAFPIIGYWQALPGVGPVRSATLFAYLDTPWRFKKKSKLCKYCGVGLERAGSGKDRRGRERPARLELFWKVNRRLKNAVMGMTMSAIRSRANVFRDYYEERIGHGTLISHARHDTARKMLTVMWGMWKSQRPFEAAWC

SEQ ID NO: 94390 - protein, 318 aa, unidentified
MNTQNNQSEISVGVDTGKHQLDIYIRPLDIYFTVPNNQKDISQAIEEIRKHQPTRIVIEATGRLEYNFVCACSKAKLPFVVANPAHIRKFAGATGQLAKTDKLDAKIIAHYGEAIKPPLSRLKPDAMRQMSDLLARRRQLISIQTMEKNRLQIMPKALSSLIKPVLTAIKNQLDKLDQKLLKCIEHCDEYKTKSGLLQSMPGVGKVVAISLISNMPELGYITNKEAAALVGVAPVNRESGIYQGQRRIRGGRPQIRTVMFMAMLSAIQCNTVFKNLYQRLVAAGKPKKIAIIACVRKMIVILNSMLRDGVPWNPNMAS

SEQ ID NO: 94391 - protein, 346 aa, unidentified
MNYIGIDVHKSICTAVVMNDDEKVIDQIIDFGTNDEGYSFIIDHYSPEDSYILFENLTTAHRVYHFFKSRGYRVEGLHTGHGCVTEISKTDFKTDLEDATKLARMCKDHFTGRREYSLAHFADIDSMKAKELCRVMNDCSEQRDKLNLRIQAYMDMFDIHLPKGLKTVYSDKAMKYLRSLDHLALTIMIEDMASAMKHIDMAREGLESLFKDNEDVRNLMSIKGIAIQTAATIYTVIDGIERFGTPESLVSYFGLKITRHESGGDRDLHGHINKRGDPLVRKYLANVVAKHPIYYPDSDLARFYKRKKEVMPHWKAVTAAMRKLVCIIWAMLTKHQVYRFSSSVKA

SEQ ID NO: 94392 - protein, 298 aa, unidentified
MVSVGCGIDVHKSLIVASIRKGGDEVETRDFEAYTSSLTSLREWCKSEGVTHVAMESTGVYWKPVFNVLEEDFEVILVNARHVKNVPGHKTDKKDSRWLSKLLLSGLLKGSFIPPRDIRELRDLVRYRKKVVGQIASEKNRIIKILEDANIKLSSVLSNVDGAVGTKIVNDLIEGETSVDKLLRHYHGKQKVSRVEFCKALEGRVSEHHRLMLRIHKDSISDKEVQLKSLDEAIDNATKAYSVEIDLLQTIPGVGKDSAISIISEVGVDMSRFPDETHLSSWAGMSPGNCETGGKKKV

SEQ ID NO: 94393 - protein, 401 aa, unidentified
MKTVLSVDVAKNKSMIMLMNSDGEIFIDTKEINHNLEDFEKVKEEIKEINPQNLTVFMESTGTYHLPVERYFKENGFNTLVINSLTTKNNYDTIRKTKTDKKDCYRLAKLFFVNEVEYHDLSKKDLYANLKAMTRQYFYLLQNNVSCKNRYKRLINICFPELEKIFKSTRIYDDTALNFIKEFPHAEIVKEKRIDALYNNLYKTNGRNLNFYKKLATTIKTASINSYPGVDKEHEDVKNLSYMAKIVQNNNNIINELREKMIETAKQSPYYKIINSFYGIGETLTAEILGELGDITRFDSPKEIIAFCGLDPTIKQSGKSINVKGAISKRGNKYARYILFNCSQMVVKLGASNYPEHPVYIYYQNKKAEGKHYYESLTACSTKILRMLYSMCKNNKQFLEN

SEQ ID NO: 94394 - protein, 411 aa, unidentified
MERVNPRSCGLDVHKASVTACIRVAQGEQMVQDVRTFATNGAGLSALRDWLESQRIDQVAMEATGVYWKPVYYALEECAEVMLVNAAHVKQVPGRKTDVADCVWLAQLLEHGLLRASFIPPQPIRDLRDLTRYRKSLQEEHSRVANRLEKVLQDAGIKLSSVATDILGVTGRQILAALAGGNSTPEVLAELARGRLRQKKQELREALRGRFREHHAFFIGRLLVDLDNLEESMTEVVARIEELLRPFAAELELVCSIPGVKETVGPVLLAEIGVNMQCFPTPGHLASWARLCPPNNQSAGKRRRGKWSGHNRWLRTALIQAANAASRKRNCALAALYYRLRARSGHNHAIFVLARHILELAWLLLSRRTRYHELGATYFETRRREQAKRRSLHQLKRLGYNVTLTPIPQAA

SEQ ID NO: 94395 - protein, 321 aa, unidentified
MKIKNLVGVDTHKDSLACFCNGKFKEFKTNKVGFKQAINWAKSSHWAIEGAYCFGQAFSNFLIKNGCEVYEINPLLTKSWRTALKVASPKNDFGDAKVISIFANMDNMNKVSFETIKLKEKLTTRKALIKQKTQITNHLKMLFYTRGEELPFKALDTQKAINWMLEQDDVIVKTNGKILESTMAGIKSLEEEIEKEMPEPAKALTKMEGISTITACTIYAETKGKLTSKEQFASYCGVAPVDCSSGQTTRMRNNKGGNRVLNSIFYSLSIAQKRYNKKAKAYYEKKLSEGKSPRHARKCLARQLTNIVFKMLKDATEKRKP

SEQ ID NO: 94396 - protein, 364 aa, unidentified
MNNIITHYDDIVIGVDTHKDIHVGVALDGLGRRLSDITVKANPEGYGELLLWAQKLGVIKGFGVEGCGSYGHGLSQYLKREGQVVREVSRPPRRGERRLVGKSDLIDAEHGARELLAGRASAIPKDADGKIEAIRIIKIAKDTAVKSKSQVMIALKTLIVTSEDDLRRILEPMSDHKLIKAITSLDDSDQLAISTASKAMIQVLNLMGQRWLYLHEEIKIHVKALEQLTKDIAPDLVDAVGIGADSAAALLCAFGDNINRIKSEEAFAKMCGVCPIPASSGRTDKHRLNRGGNRAANSTLYRIAIVRMAWHKPTIEYVKRRTNEGLSKKDIIRCLKRYIAREAYKIITSSLVENMDETTLKKVS

SEQ ID NO: 94397 - protein, 437 aa, unidentified
MLLCLNPNAAGVDIGATEIYIAVPEDRDPQPVRCFSTFTEDLQAAADWLKVCHIETVAMESTGVYWIPLFQILEARGFTVFLVNAHHVKNVPGRKSDVSDCQWLQYLHAVGLLRGSFRPEQAVCTVRSILRHRDSLVQMASSHVQHMQKALDQMNLQLHHVISDITGVTGVAIVEAILAGERNPHTLAALRDRRIKASADTIAKSLVGDYRREHLFTLGQSLEAFRHYQELIAACDREIAQYLEGFESKVDPPPAPTSPSKDGPQPKDSEPRFDLQTHLHRIFGVDLTKIPGINVLTTQTILAELGPDFSRFANGPALTSWLGLCPDNRISGGRVLSVKTRKVKNRAATALRMAAQSLYRSQSYLGHYFRRMRAKLGAPKAITATAHKLARIVYHMVTTRQAYDETICAHNELQNRQRLEARLRKQARELGLQVVAM

SEQ ID NO: 94398 - protein, 492 aa, unidentified
MNNSAASQNRAGGRPASARSRSSIGYPKRITGRLPEEPEASAPTSNRKTPLEGRHISSVDGRAKRRKSQKQHNQSMNDPQQWQQHRAFGALDWAREKHSVIVLNPTGKVIEEFEIEHSALGWKKFREKLQAYGSIPFAIETSQGAAVEQLVEAGMMVYPLNPKSAQAYRDRKAPSGVKDDWLDAWSFADALRVDGQGWKALRPEEALIKELRLLCRDEVSLIEQRTAFIQQLRDALAQYYPAALEAFDDWTRVSAWMFLQRFPTPDALAQAGKRKWQNFLHSRRLWAGQEGTRRMEIFARATEFAGSPPTVKAKSLLALSLVQMLFAIEKQLSLYRQRIEELFARHPDHDLFGSLPGAGPKIAPRLLSEIGDDRERFGGDAQNLQCLGGTAPVTKRSGKRRYCYIRWACNKHLRYAIHLFAEQSLSRCVWAERYYQHHRQKGQSHANALRRLGHRWLKILHKMWIDRNPYDAELHHRNQLNHGSWIFQLKAL

SEQ ID NO: 94399 - protein, 377 aa, unidentified
MHSENIAAYVGLDVHKETLAVAIAAPERLGEVRYYGTINNEAQAVRRLFQKLQGLYGNILSCYEAGPCGFGLYHQLTAMNIKCQVIAPSRIPKSPTDRIKNDHRDAISLARLLRAGELTPVWIPDLTHEAMRDLIRARAAAKRDSRVARQRILSMLLRTDKHYTGKHWTGKHRTWLANQSFSQPSQQIAFQHYCQSLEQIEDRILQLDQEISRLLPEWSLCNLVCQLQALKGVGQLIAITLVAELGDFSRFSNPKQLMAFLGLVPGEYSSGNSIRPRGITKVGNSELRRLLYEAAWSYRTPAKVGAWLIYYRPDSVTQYSKDIAWKAQQRLCSHYRSLTAKGKKSQVAITAVARELTGFMWDIALAAQSSFSQQKQN

SEQ ID NO: 94400 - protein, 347 aa, unidentified
MRFYKHSHAFYCGVDLHARSMFTHILDNEGNTVFEADLPASPDAFRKAIAPYRAGLVVGCECMFSWYWLADLCEDDEIPFTLGHALYMRAIHGGKAKNDRIDAGKIAGLLRGGMFPMAYVYPRAKRDTRDLLRRRCFFVNQRAQLTAHIVNTNSQYNHPPLTKKLCYAGNRSDDLAERFTQASTQASIRADLALIDAYDTQIDEVERTVLKNAKITDPTTLKLLRTIPGIGKILSLVLLYEIDQITRFPEVGNFLSYSRLVRCEHESAGKKKGSGGKKIGNAHLKWAFSEAACLMLRAEADAKKWLDRQARKRGKKKALSVLEAKLGRAVYHVWSKQRAFDLRRFFA

SEQ ID NO: 94401 - protein, 406 aa, unidentified
MLRVGIDQASQHHDVCLAPEGQAPSYLRVPNDADGLEALLTAIRRLEPNPAQVHVAIEGSGQGLFVAALLAAGFRVYPVNPKAVDRYRDRLSPAGSKDDRRDALVLAEILRTDRHRLQPLRLESDTLRQLRVVYSHHQTLVEERTRLLNQLTACLRAYYPRALELFADLGRPVAWTFLRTFPTPAHFARARRSRIEKLLRQHRYPGVAAKTAELLELARKPQLPADPATVALWARRMLFLVDQLEAVCRELEACHEQLETLVQAHPDGDLFRSMKGIGTVLAAGVITVFGEDRQAVPNVRPIQCRSGTAPVTVRSGKTVRVRFRHACNKQARHTLQLLAQQLVQHHDWARQIYQTHRQRGRHYHEALRIVAHHALRVLFAMWRDRQPYDPTRFEAARRQRQEPKAA

SEQ ID NO: 94402 - protein, 366 aa, unidentified
MRKPSTAALWRSRKLRDGQLTVGLDLGDRSSFYCVLNRAGEVILEERVATNPEAMKKTFEKMPASRIALETGTHSPWVSRLLTELGHEAIVAHSRNVRLIGESRRKDDRLDAQALARLARIDPKLLSPIQHRSVQAQADLAVIRARYALVRARTALVCSARGLTKSFGERIRGRNPKGFSSATSEALSPQLQVALAPLLSALEAITARIREYDAQIEQLAEESYPEVALLKQVTGVGTLIALTYILTLEDPRRFRKSRDAGCYVGLQPGRRNSGQSEPQLHITKEGDSYLRMVLVQGAQHILGPFGEDSDLRRWGLKLAERGGKRGKRRAIIAVARKLAVLLHHLWISCEAYEPLYNARKRRKAAA

SEQ ID NO: 94403 - protein, 377 aa, unidentified
MKRIKFVGLDVHAETIAVAVAEQDGEVRSIGVIPNRCESVRKLVQKLGPVEELRFCYEAGPTGYVLYWQLAALDAKCEVVAPTLVPVRAGDRVKTDRRDALKLARSYRAGELTAVWVPDAAHEALRDLVRAREAAKRDQLRARNRLTKFLLRPGKRPPEGVNPWTLNYMNWVRKDVHFEPLAQQATLLDYLHEVEHMAARVTRLEQAIEEAVQLAPQQMREVIEALQALRGIAKVSAVTIVAELGELSRFGEARQLMAYSGTVSREHSSGESCKRGGITKTGNVHLRRIVVEAAWAYRHAPAVTACLRQRQERVSEEVKEIAWKAQHRLHGRYRKLTARGKNTGKVITAVGRELLGFIWAIGVKVEAEQRKALGQAA

SEQ ID NO: 94404 - protein, 351 aa, unidentified
MIIVGVDYHPSVQQVAFLDTETGETGERRLNHSDGEAERFYRDLQRRQVKVRVGIEATGHARWFERLLAELKFELWIGDPARIKAARVRKQKTDRQDAQLLLRLLIEGRFPQIWVPSPENRDLRQLIWHRHRLVQMRTRAMNQIQAAAMNEGVRRKKTLWSKTGRRQLEALPLAPWATRRRQDLLELVDRLNTTIDELTAAAEQEARKRPEVLRLMTHPGVGPITALAFVLVLGSPDRFGCGHQIGSYLGLIPCEDSSADRQRLGHITKQGSSLLRFLLVEAAQAAVRWDPDWRRRFVHLAMRRDRRIAKVAMARRLAVSLYWMWRKGFDYPQTLQFGSHAGEPGYVHGVK

SEQ ID NO: 94405 - protein, 347 aa, unidentified
MDLAKNVIQVHAVDAAEKVVTNKALQRDKFMLWCAQLPPGCLIAMEASSSAHHWARKLVALGLDARIIAAHLVEPYRLQGKSGKNDANDAAAICEAASRPTMRFVAIKTIAQQGMLSVHRLREGLKEERTACTNRIRGILAEFGLVFSQSSKVLREHLSAVIEDASNEIAGIARLVIERAQSQWDELDAHIEWCDERIAAHIKQDEHAKQATELLGVGPITASAVVATVGDFKQFKNGAQFGAWLGLVPKQNSSGGKSNLGSITKRGDMYVRMLLIQGARASVLTAHRRDDPISKWAHQLREKSGWQKAAVALANKNARILWAIFVRGRAFDARHVSVKPSMAVAPA

SEQ ID NO: 94406 - protein, 347 aa, unidentified
MTIVEDACVITGGVDTHADMHVAAALDPLGGLLGVREFPATAAGYADLLGWLSGFGDLALVGVEGTGSYGAGLARYLAAARIRVVEVDRADRQDRHRQGKSDPLDAVSAARAAQSGRAAGTPKGRDGAVEAIRALMVAKRSAMGERTQTINQARALILTGPDDLRARFAKHTAAALVTGVASLRPRPGDVPGYATRVALRELGRRAVFLDGQLERLDELIVPLVTARAPGLLALFGIGPNTAALLLIAAGDHPGRLHSEAAWAHLCAAAPIPASSGKVTRHRLNPGGDRQANHALWRIVFTRMGSDPATRAYVERRTKEGKSKAEIIRCLKRYVARQVYPHLRADAG

SEQ ID NO: 94407 - protein, 526 aa, unidentified
MGKRKVGGRRPTAHLSRPRASLREQVHSVPPERLGILAVDPAKDHSTVCLGNVRAEVLVAPFDVAHRKSALEGLVETMRTACQVHGLDDLVVAIERTGTYYHPIRDVLKRQWKVLMVHPSVTKQLRAASDPGNKTDATDLFAAVRATVVGYARPEAELPEPYGAGRIESRERESLVGHRAAFRVYIHEQARRLLPGLAELWASLWDSPVARWFVRAFPTAAALRAVGHEGLRERLRAAGHLVHEKTLARVLLWAADAPDPAPHAELCHARLCTQLDLLEGLESAILAQERPLAGFLVQTPAVLLLSAKGLGVVSAAHYAAELGPIDGYANPKQITGRAGLFPSRYQSSDTDHADGPLVTRRNARLRDALIAIAHDLLLCNPYVQAWAERRVEEKGWRTKQTYVAVANKFARISFAMLHEHRLFSHPLLGGPDAVLRKLLAFAKSHALSPEATGDLLRRAQAHLPHDGLFGEARALQACRPRRLPRGGPPRLLGDILRDLVVGIVAQLPPDQQRSFGPLDNSGRAPD

SEQ ID NO: 94408 - protein, 341 aa, unidentified
MGQASTIGLDIAKPVFQAHGADAGGRVVFRKRLARAKVLEFFAGQAPCVVALEACGGAHHWAREIGKLGHTVRLIPPAYVKPFIKRQKSDVADAEAICEAVQRPSMRFVLVKTEAQQANALVFRTRDLLVRQRTQCINALRGHLTEYGHVVPKGTDHVDRLIALVEDAGSALPQTGRIILQVLIKTLEALGKQIDDLDAEISRRAKADPVARRLMTIPGIGPIAATAITALVPAPEGFRAGRDFAAWLGLTPLQKSTGGQQKLGAISKMGERTIRRLLILGASSVVRWAVHRGAAAGSWLAQMLARKPRMLVTTALANKTARIVWALLVKGGTYKAPAVAA

SEQ ID NO: 94409 - protein, 402 aa, unidentified
MNAVGIDVSKGKSMVAIMRPFGEIVSSPFEIKHTTSDINSLVELINSIEGESRIVMEHTGRYYEVLAHQLSEANLFVSAINPKLIKDFDNNSLRKVKSDKADAVKIARYALDKWQNLKQYSVMDELRNQLKTMNRQFGFYMKHKTAMKNNFIGILDQTYPGVNTYFDSPARSDGSQKWVDFASTYWHVDCVRKMSLNAFIDHYQNWCKRKKYNFSQSKAEEIYGKAKELVPVLPKDDITKLIIKQAVDQLNSASATVESLRTLMNETASKLPEYPIVMAMKGVGASLGPQLMAEIGDVSRFTHKGAITAFAGVDPGVNESKKYEQKSVPTSKRGSSDLRKTLFQVMDVLIKTHPQDDPVYQFLDKKRAQGKPYYVYMTAGANKFLRIYYGRVKEYLSSLPES

SEQ ID NO: 94410 - protein, 320 aa, unidentified
MSNITLGIDVGKFELAIALRKDGKFTDKLVENNPKGFQKILKFLKNNAPEAEVYLESTGRYDEKVTDFLSEEGFDVKVINPTQIRDFARTKLARHKTDKVDARIIAEYGSIFGGRTYTKIEDNIRELRELYRMSLSLKDELVATKNHLENQDTFPKFVADLWKKRAKDLENDIKLVEKRMKEIILADPDLKLKFELLIKVPGIGECTATAVLAEVTRLENFRTARELAAFIGLTPKHRTSGSSIRGKPRISKMGLKILRKALYLPALTAMKHHPSLKNFAEKLRERGKKFKQIICAIMRKLVHIIFGVLKYDVPKFRSEG

SEQ ID NO: 94411 - protein, 321 aa, unidentified
MKKHTTAKKKHQALTKVTKTKKKQVVEMAASQRLTIGLDLGDRTSRYCILNEAGEVVSEGQLLTTQTGLNALFEKMPSSRVALEVGTHSPWVSRQIGGLGHEVIVANPHKVKRITQSVRQNDRIDAQKLARLARVDPQLLAPIRHRGAEAPADLAVIRARAELVAARTGLINCARGLAKPMGERLQKCAADQVEEALAQPLSAAAQVVIGPLLKSVEAIREQMGVYDRKIEEIAQRYPEAELLTQVYGVGTLIALTYILTIEDAQRFPHSRDVGAFLGIQPQAAGQRRQPARAGDQQNRRSFVAELFGAGSALQLAEGSAG

SEQ ID NO: 94412 - protein, 421 aa, unidentified
MKDSGVKKTNTVKEGTLIVTVDIGMSSNHGYCTAGDGRSTKTFKFDNTREGLDTFWSMVLSSKARFRCTEVIVGYESTGPYGEPLIHYLKQKPVKIVQVNPMHTKKMKEINDNSPLKTDSKDPRVIADIIRLGHALSVVVPEGDVAYLRRLNNARERHVKERTGLLNQLQQFVFITFPEFARILKTIDSKTALYILKKYTTPARIGSANHEELGKEMRRQSMGKFSTEHAAALINFAKTTIGIQEGLQGLVMDIQHVLIQLDLLNGFIAAILDEMEITLNRIPYSRKLLSIKGFGIVTVAGLIGEIADFTKFTTQSEITKLAGLNLYEVSSGKKRGQLKISKRGRSLLRKILYYAAIQTVRKNGIMHDYYQKLIGRGMKSIKALVAVSRKLLRITFAMVRDDSEFIVNYEAQKKEVMKEAA

SEQ ID NO: 94413 - protein, 329 aa, unidentified
MDEVVVGLDVHLKNTQVTVMRMNGEILRTERVKTNKIELRRALESVPKGSKVALESVGFCWPWVDFLDQLEFEPLLANPVKVKYRAEDVKTDRVDSKLLADLTRMNWLPTCYVPPEDLRWLRNLLRHRAYRTKLCTGMKNRTKSEFRKRDVDLEANLGTLKGRKAASNLGIFEVNQNVELLDLMDRQTKEIEVMLRRKYGQVKPVELLMTIPGIGFLSALTLYAEICDIERFSNPEKLAHYAGLVPCVHQSGEHAFTGKETKGDAWLKWILIEASWSHIHFCPEGHLAQVFKDASRRKGNSKDAIKIVARKLVNVVWAVWTYEKEFMVK

SEQ ID NO: 94414 - protein, 422 aa, unidentified
MNINTDSKRRQVPDDYLVAGIDPHKKSHTMVLMTREEKVLTSLKFDNSKTGFEHAVKRVDDQISKSGSKGVVFAMEAGGHYWRNLAYFLNKRGMWFCLVNPFTAKRLREGKDINRAKSDMRDARVMAELVISNGVPQTNLPQGIYAELRAVYNAYQRLIKERSRIKSRMKSLLDQLFPEFCMVFSNVCSKTAMQVLGCCLAPTDIARMQEAQFIARIREGFTGRALKIHSLQELYQLGKTSIGAEAGARGLALELNLMTQQLLLLSEQIEKTKHILQGLLLSIPESRCILSIQGVGHIAAAGILAETGPLQAYRNSGQLIKLAGANPISWESAGKRHSITHMSKKGRPKLRSCLWIAAIALLRSNPDFKEWARVRRERELHMHPLKPRETVGAVANRLLRIVYALVKNGSMYCLPKANEVLV

SEQ ID NO: 94415 - protein, 428 aa, unidentified
MLRVIHERCAGLDVHKKTVVACALVTKQDGQVHKEVRTFGTTTGEILAMAEWLKGQGVNSVAMESTGVYWIPIYNLLEGSFELLVVNAQHMKAVPGRKTDVSDAEWIAQLHRHGLLKGSFVPPKPQRQLRELVRHRTNVVERRSQSVNELQKVLETGNIKLASVVSEITGVSAMEMVHGLIGGEQGPEVLAELARGRLRDKKPQLAAALTGRLEKHHRFILSQLLADISFCEEQILELDLEIRIQMKDYEEVIQRLDEIPGVNRRIAEVLVAEVGTDTSRFGDAAHVVSWAGMCPGNNQSGNKRRTARVRQGNKSLKRVLVEAAHAAGRKKDSYFSAQYKRLSARRGKKRAKVAVGRSILETAFHMIERKTSYEDLGSDYFDRRNPEKLAKRLAERIVRLGYKVTCEPTGKTAVGYKLNYEPLEEKVA

SEQ ID NO: 94416 - protein, 362 aa, unidentified
MNDIHYIGFDVHKKSVSFCVKTASGEIMQEGQLVARREVLRAWAAAQPQPWRGAMEATLFSAWIYDTLKPYAQQLDMGHPARMKAITAGKKKSDRLDARTLADLLRCNLLPTCYVLSPEMRDLRRLLRYRQLVVGQSVRMQNKMAGLLMETGAPFVKAKLHGRKYFTQLLETLQEVPESVQDLLRMSRGAMEMFEASQKRLVQRLLTEPILQARVERLASIPGVGPITALTWALEIADPQRFPSIGDAVSYCGLTTAFRASAGQEQRGPLSKQRNAWLQTALIEAAKLAPRWNPQLAAVHQQEIQHGHRNRATLEVARKLVAYLMAVDKSGRPFQLRSTPQVAAARPTRKKEKARRPALQLT

SEQ ID NO: 94417 - protein, 338 aa, unidentified
MEVSIKPRWFGIDVSKDTFDVSMFPGEARKAPHIKLPRSRQGCQECLHWVDRQVPQGEESALVMEATGGYGKEMANWLLSLRAGVRVAIAQPWRVRQYAKGLGMVNKTDAQDAIMLARYGDTYNPRSYQPMSPAYEQLRALSRERAAMVKEAIRLGNRNEIPSNSKVAQTIREQTLAQVKKAVADLDQAIKAQIAKDPGLKKDFRRLQTVPGVGPVVAGTLMGECGDLRDFVHHKALQAFAGVAPGLVESGTSLHATAHMTKHGSGRLRQVLYMGAMAAARGQSPVAQSYDHLLKEGKPAMVALGALMRKILVTCRAVLLEEQDYDPKYVRKAPSEPI

SEQ ID NO: 94418 - protein, 310 aa, unidentified
MEKIVVGIDVSKDRLDIAIRPGGARFAVGRTAAGVDDIIVQFKGQDVKLIALEATGGFETVVAAALGAAGLPVVIVNPAQIRAFAKALGIKAKTDPIDAAVIAHFAEATAPEPRPLADEATQLLADLIARRRQIIAMIVAERQREKRATAKRLKKSIARLIKALEKELTSVDTDIDAAMRASPAWREKEDLLASVPGIGPVTARTLIAELPELGRLGRRQMAALAGLAPWTRQSGQWRGKSFIGGGRASVRTALFMAAMVARRCNPGLKAFFDRLVATGKAKMTALIAVARKLLTILNAILRDQKPWQPA

SEQ ID NO: 94419 - protein, 338 aa, unidentified
MTIYAGLDVSDKTTHVCVVDAEGGIVWRGVCATDPEVIAKTLGRHAGGLVRVVLETGSLSAFLYHGLIERDVPVTCICARHAKGALSARVNKSDPHDAEGLAQMARTGWFKAVRIKQEATHLDRAQLKIREQLTGARLAMTNQLRGMLKLFGLRMGKVTTPAKRAERLAALFAQKPEIKEIMMPLIESIEALDAQLKRSGKLLAARAAADPVAARLMTVPSVGPIAALAFKSSIEDPGRFARGEDVGAFAGLVPKRNQSGERDYKGRISKAGDAMLRSALYEAANVLLVRVTRPCALQTWGRKLAETKGPKRVRVAVARKLAILLHRLWQSETEFCWN

SEQ ID NO: 94420 - protein, 328 aa, unidentified
MVAKVSDAIVGIDVSKETLDAYCAKGQRKQGRTFANSSDGWKLVRTWLKVMGSKQAHVCMEATGRHSLGVALALHDAGHVVSVVNPAQIRDFARTKLGRNKTDKVDAALIREYTELFKPEPWTPPSPAMRRLCELQTVRAGIIRSRAEWKNRIGSGLGDTTATKLAAATIEHFTTQLEAIDRAISETIDQDAELHARCDLLVSVIGVGDTLAALLMAKMPEPGVLRRSGEIVAYAGLNPSHHRSGTSIDRPTRISKIGNAELRSALYMPALSAMRFNPAVAALVARLKSAGRLKPRQIVVAAMRKLLVLCFGVLKTGKRFDPAIAMPA

SEQ ID NO: 94421 - protein, 320 aa, unidentified
MQSVCGIDVSKDRLDVMVVPEQQYFSVRNDAAGWAELVERLRGLSISAIGLEASGGYERGAMRALLAAGMPARQVNPFKLRQFARASGVLAKNDPLDTRMIASFVAIMPTLPAQRRAPAIERLTELLAVRRQLNAEKVAAENASRLLEDPMLQRLSRRRIRRLAADIDMLDRHLTQIVGTDAALAHRYRLLTSMPGVGLVLACTLIALLPELGHMGRKQVAALVGVAPYAFESGKFKGRRCIWGGRAPVRNVLYMAAMSASNWNPVFKAFHDRLKAAGKLPKVVIVAIMRKMITALNAMVRDDVVWADHLSGRHSVPTAR

SEQ ID NO: 94422 - protein, 398 aa, unidentified
MRAVWIAIGIDAAKEVHWATAVNQDGQILLDRKLDNAGPEIAAFIAELAGLDGERLIGIDMLGGVASLLAAMRIAAGERVVHVPGLAVNRARQGSVGGQGKSDPKDARIIADQLRLRAADFRPITLADDTVAELRLLVSRRGDLVVDQTRRISRMRYLLATIHPSLERVLDLTNQGPLILLTRFVAAAELRRLTPRRLARQLVRAGLRQTQAESLAAAAWQAAASHPEVALPAEAATAELIREMATEALETKRRIAKLDQRLEALLSHHPDGALIRSLPGMGVVLAAQFLAEVGEIRRFRSASALAAAAGIAPVLRQSGKTKRLQRPAYANTALKRVFYQSAFCALGDPVSRAFYERKRRDGKRHHQALIALARRRVDVLWAMLAQRRSFDPHHRKAP

SEQ ID NO: 94423 - protein, 362 aa, unidentified
MIGQRTSVGLDVHARSIVGRGLDVQTGEVLRARLTPAHEDVIGWLRSLPGPVKASYEAGPTGFGLARALQAAGIDCVVAAPSRLLRPSGERVKTDAKDALHLAQLLAVGQVTAVAVPDEETEAARDLVRARDDVRGDLMSARHRVTHLLLRQGIVYSGGTPWTREHENWLRTQRFTRPALQAAFDAALEALAATEGRRDRLDEAIAKLAAASRFTPVIDRLACLRGISTLTGFGLAVEIGDWARLSPTTIGAYLGLVPAEHSTGESRSQHGGTKTGNSHVRRLLVEAAWHHRPPYRPSTKLQRRWERAPGPVVAHAGKGNRRLHARWQSFDARRKRPVVANLAIARELAGWCHALAVMAPGG

SEQ ID NO: 94424 - protein, 354 aa, unidentified
MGLKHQKEKRSMDHFAGLDVSVKETSLCIVDDAGRIVREVRVASEPEALLEVLADPAWQFKRIGLEAGPLSQWLFNALAEAGLPVICVETRHMRAVLKAQINKTDRNDARGIAQMMRAGLYRLVHVKTLRSQKLRMLLTHRKLLQSKAIAIENDLRATLRNFGLKVGVVGTVKFEARIKELVENLPDLVILVEPLLVVRRALREQIGVLHRRLLAIVRDDEVCRRLMTVPGVGPVVALTYRATVDVPSRFRNSKAVGAVFGLTPSQHQSGESNRTGGISRCGDEMMRAMLYEAAHIMLVRSTRWSWLKAWAMQIARRRGMKKAIVALARRLAVIMHRIWVDGTEFRWTREAVAP

SEQ ID NO: 94425 - protein, 317 aa, unidentified
MESFIGIDISKASVDVAVHESKEHWTFTNDENGLKKLANLMRKLSPSLIVMESTGSYEVAATYELNARGFPVAVVNPRHIRDFARSTGLLAKTDVLDARVIARFAATIKPAPRVLPDEDTRHLAAIMSRRRQVVTMLTAEKNRLGQANHIVKERIQQHISWLEQELDDLNKESGSMIETNAEWKEKSDIMQSVPGVGPNLALTLLSDLPELGNLNRKQIAALCGLAPFNRDSGQMRGKRSIWGGRSSVRTAVYMAAFSAVRWNPLLKEFYQRLVDAGKRRKVALVACMRKLLCILNAMLKNRTIWNAQIIHPPVSCP

SEQ ID NO: 94426 - protein, 358 aa, unidentified
MRIIGCDLHAGQQTLAMLDSTTGEIVNLTLTHEGNNVREFYSKLPRPVRVGIEASGAMQWFLNLMDQLGIECQVGHPASVRAAEPRKQKHDRRDADLILKLMVENRFPSIWLPSKELLDLRALLLHRHQWVRMRTRVQNALQAIALANGLRRGPSLWNQAGQDQLASLPLAPHTAHRRSELQALYAKFAMEIEKLNQRVEKQAGERPTAVRLMTHPGVGPITALATDVFLGDATRFADGKALASYVGIIPREYSSGGRQRLGGLTKQGNPLLRFLWCEAAIHAVRKDPELKRFYCRKLFQKGLGKARVAAARKLGIRLWILLRDQIDYNEFCRRGQRRQKYGGACAGMPERVMAQNSR

SEQ ID NO: 94427 - protein, 445 aa, unidentified
MLLFYFKGVVIMKIIHPICCGVDVHKKTIVATIASTAPAGITQYITESFSTFNHDLFRFRTWLTDHNCFDVCMESTGKYWIPVFNILEAANIRVLLTHPMYVRAIKGKKTDKKDSKWIADLFKHDLVRSSFIPPPDIRALRELARYRYKLVCMRTSEKNRYQDCMTMSNIGLASVLSDPFGKTSMGIMDYVLSSKVFDEEKVKSLIHKTAKRKTDLILDSIRNCQISSDQRFKMDAVAKHLDYLDQFILSTEIELYTRLLPHMEIVDHLAAQLPGISKLSAALIIAEIGVDMSVFESAKHLASWAGLAPTNNQSAGKKKSVRISKAGQFLKPLLVNCVLAAVKSKKQPYFADKYQLIKKRRGHKKAIIAIARMMMTCIYHILLTGENFIPSDLQKNFNPVAKKQALNEENAIAFLVAQGYDVSSLVKREIVEQKSVICSSLINAV

SEQ ID NO: 94428 - protein, 343 aa, unidentified
MKHYAGLDVSVEETSVCILDETGRICREVKVTSHPEDLRRILQDPIWHFERIGLEAGQLSQWLFDALADAGLPVVCIETRHAKAFLKAQVNKSDRNDARGIAQMMRVNLFRPVHVKTLTSQKRRVLLTARKLLQEKAIAIENDIRGLLLNFGLKVGVVGAAKFEERIHELIRDMPDLAEIVERLLDARRRLREHFAGLHRKLLDLARGDAVCRRLMTIPGLGPVVSLAFVATIDTPARFRKSKAVGPVLGLTPVRSQSGNTDRVGRISLCGDGMMRTLLFEAAQTMLPQTTRWSWLKAWAMRVAQRRGSRKAVVALARRLAVIMHRMWCDGTEFRWTREAPVA

SEQ ID NO: 94429 - protein, 387 aa, unidentified
MARKRTLSTLDTSIAYEAVGLDLAKEDTAIAAFGPDHEGPYLIDRMPYDKLYELLADMAPPLVAMEPCSGAHQIAEQIQELGHEVMMISGRHVQAWVKDHCNGQKTDLNDAFAILNLAYDRWLTPIRGKTREECRLLALQASYRQLKGQRTKTMVHVKATLHAWGFPIRAGSFNQKVLHELIDANREAFGDEVVETLHLMINRVRDLDHDIATVLKLLTEATKRDPRASLLRSIPGFGILTMSRWCAVIGDIARFDSPKQTMAFVGLVPNNRITGHHTETSSGREARGQGRMLKRGDKMLRSLCILGAASLCLMVRNDRLPDCPFVASIKERLASPRPWFKVLVYVAAKLVRIATALLKYGETFSYEKAGISKAVLKQWELEQAKAA

SEQ ID NO: 94430 - protein, 419 aa, unidentified
MSDDFLSTLFVGIDVSSKSNTVCALDFKGNKLLNLNVVNNRPGAESILVNILDCLEIHRLEFVVIALESTSFYSVHIANFLSSDNRLFPFHPFVYCLNPKTISNHRKSFVDMDKTDPLDAYVIADFARCGKISSSPWRGSQFLALKRLTRHRFHLVQLISREKVYMVSNVFLKFSELAVLNKKDLPFSNKYGATSKAVLTDFFSPDDIVYSSVDDLVEFIKKKGKNRFSDPVSVANILKQAANNSYRLDEVLYEPLNIAISSSLNVIKALENEIKLVDKAIEKTIKGLNPNEYICLISIPGIGPVIAAGILAEIGSVSFFNSNNSLAKFAGLTWRQKQSGNYTSKITRLTKTGNCYLRYYLFEAANSVIRYIPEYKKYYEKKFKEPANYPHKRALVFTTRKLVRLIFGLLTKNQIYVNY

SEQ ID NO: 94431 - protein, 347 aa, unidentified
MKHYAGIDVSLNSSSVCVVDESGKIVREVKVASEPVALIHCIQSFGVRVERIGLEAGPLSQWLYGALRECELPVELLETRHVKAALSAMPVKTDRNDARGLAQLMRLGWFRPVHCKSMAAQEVRALLTARKLVQSKLYDIEMSLRGILRGFGLKVGPTTSRSFAARINHLASGHPSLKMVAEALLSTHAAALCAFKNLEKNVRQISRADTRVRLLMSTPGVGPVVALTYVSAIDDPKRFTSSKPVGAHFGLTPKKYQSGETDINGRISKVGDSSVRAVLYEAAHIILTRPIHGGALKSWAMRLAKRAGMKKAKVALARKLAVVLHRMWVSASTFDFEKANSCTRAAA

SEQ ID NO: 94432 - protein, 348 aa, unidentified
MTEAYDGRQVVGMDLHRRRSVLVRMTEDGRKLGTVRITNSPAALRAEIAKAGEHPRVVLEATYGWYWAADVLEEAGAEVHLAHPLGVKAYSYRRVKNDQRDAADLADLLRMGRLPEAWIAPPEIRELREITRYRHKLVKARTSVKDQVHGVLAKLGIPVTCTDIFGAWGNTWLDGLDLPQPYAGKVASLRQLAGALTGEITLLDKVTADLLAGHEGYAAIQALPGIGPVLAAVIVAEIGDIRRFPGPGQLGSWAGLTPRHYESDTKVIRGHVTKQGSRVLRWAVTEAIQRQPAGSRPRQVKDAIIARRGKEAKNIAKVAAARELLTLVFYGLRDGRVRRLDKPRQETA

SEQ ID NO: 94433 - protein, 452 aa, unidentified
MKKRPPSGTRKKHSRVLEQINEHAAGIDAGAEHHWVAVPEESATPSVRKFRTNTPGLYELADWLAECGVTSVAVEATGVYCIPLLEVLDARGIAVVLAKPSSLKSVNDRRKTDMLDCQWIQLLHTFGLLRGSLRPTAEVAVYRTYNRQRQTLIVQAATAIEHMKKALTEMNVRLDQAVSDVTGQTGMRIIRAIVDGERDPGVLATMRDERCAKNEAAIADDLTGKWADHHLFTLSQAVATWDHLQLLIKECSLRIEEQAKQIPKKVNRATLPKPRRVEHVRKNVLPFEARELFYEVLGQDLTQIDGISVATISAFIAEVGTDVSAFMTDKQFGSWLRACPGSNMSGGKNRSGRNRATTNRFWTALRIAAQTLSKSKSALGAFYRRLRARLGPEKAINAAAHKLARMIYFTLKFQRPYVDPGPDAYTQHHQDKILRSMEKRARQLGYTLIKAA

SEQ ID NO: 94434 - protein, 358 aa, unidentified
MKNNKLNFNGQKIFVGIDVHKKSWVVKILINGIIVKGMRINPDPQLLYDYLTREYPGGEYYSAYEAGFSGFRAHRKLIELGINNIVVNPSEVPTRGKERQRKSDVIDAGKLARELSNGSLEGIYIPSKQQEALRALVRLRKQLSKDQARQKNRIKSLLNFIGKNAAAGEQGDTRSWTKRYIISLRALEIKQPEIKRTLDELLNGLEYTREQIKAVLEDIRNYVYKSDESREIIELLLSVPGVGFITAVVLYTEIMDIRRFKDIDALASYVGLSPAVYSSGEREKTLGISRQRNGHLRNILIESAWTAIRKDKALLVAYGKMSSKLGTKRAIIKISRKLLNRIRHVWMYRERYVLEVVD

SEQ ID NO: 94435 - protein, 349 aa, unidentified
MRLYSRTHDVSCGIDLHARTMYLCVLDRAGQTLLHRNLPTRPEALLGALAPFRSEDLVVGCECLFAWYWLADLCERDGIPFALGHALGMRSIHGLKTKSDKLDSWKIAQLLRGGNFPCAYVYPRRFRATRDLLRRRLHFVRFRSELLTHLKMSEAQANLEPLKQRLDHGPNRAGFAERFPLGSSRSSITADCRLLDSIDDLVGDLERELVACAKGDDLAAFYRLRSVPGIGEILAMTIFYEVPDFDRFDTVQQFASYARLVAPRAESAGKLGGASGRKQGNVHLKWAFSEAAVLLLRNNPRAQKLHSRLVSRFGKAKALSVLAHKLGRAIFHMQKRQQPFDAERFYRDA

SEQ ID NO: 94436 - protein, 362 aa, unidentified
MNATTAAIDLAKNVFQVALADSNGRVLEQHRLTRAQFERFFDNRSVSRMIMEACGSAHHWARVFGARGIEVSLLPAMYVRAYVRRSKTDAADALALLEAARCADIVAVKVKSVEQQSLQALHRTRSLWMATRTSRINALRGFCRELGLHVPVGARAGLDAMARAVADDQSPISALLRPIMQQLLEEIRVLEVRIAQLERQLAQLARESSPCRLLMSIPGVGLLTATAILAATSGSVAHFKSARHFASWFGLTPKESSSGGTRRLGRISKMGDKYLRMLLTHGARSVMRAAAVARLRGQELLGLRHWALQLQARSNHNKAACALANKMARICYAVLRDQTAFGQPAVARLSKKMRRQSFELAH

SEQ ID NO: 94437 - protein, 407 aa, unidentified
MNISTDVFAGLDWAVHTHAVCIIDASGAVRDRFEIAHDRQGLAELMRRLARFGASVRIAIERPSGLIVDALLEAGHQVFPIHPNAVKASRPRYRSHGAKSDASDAYLLADLLRTDGHRWAALSPQSDSIRALRALVRSRDDLVTTRVALGNQLHSTLEAFWPGAACIFADITSPIGLAFLRRYPSPASATRLSEAQLLRFCRAQHYSGRRSPAELLARLRAAAQALPGKLTNESMAHVVRSLVAVLNPLVAQISGLTRRIEHFVESLPDGQIIMSFPRAGRVCAAQILAELGDVRERFSTLDQLAAEAGTVPVTYQSGKTRSVTFRWACNHRLRQAITCLADNSRHANTWAHTIYAAARARGCDHPHAIRILARAWLRVIWRAWTDRKLYDPKLHLGALKLASDTGG

SEQ ID NO: 94438 - protein, 362 aa, unidentified
MPMVADEYTHVIGVDTHARTHTYVVLDTRTGGIVDTATFPTSPAGVSRALAWIDRRTSASRLAAVEGTSSHGASLTEALQQTEIPVVEARPPRRADRGARGKSDPIDAEAAARAVLRTDTALLSWPRSGKIRSALRVLLAARRSMDGQRTASRNALTALLRTIDLGIDARRPLTDKQIAAIAAWRHHPSDDIDKLIARGEAVRLARDVADLTDKLEANHDALRLHVSALAPSVLDIAGVGPVSAAVFLTAYSHVGRVRSEAAFASLAGAAPIPASSGNTSRHRLNRHGDRRLNSALETVARVRLSYDPDTRAYKQRRLAEGKTGKEIKRMLKRYIARQIYRHLTATMTAGQLQRAAIGAGPG

SEQ ID NO: 94439 - protein, 332 aa, unidentified
MTSPSHQQIHYVGIDDVSKRTLDVCILPSEGEGTSHGESFVVANDQEGIGELLSRLAEPGSSPKLAVLEATGRYERLCAAAIASAGIAVAVINPRQARDFAKAIGKLAKTDKIDAFVLARFAGAVEPGTSAIPDEDAVALQHILARRRQLIEMLVSESNRLKMAPTALAKRIRAHTEWLKKEIGRTDKDLDDAIEDNAAFKANEKLLRSVPGVGRVLSRTLLAELPELGKLTHRRLLCALVGVAPFNRDSSGQRSGKREAWGGRAPVRAVLYMGALVATRFNPVIKEFYERLLAAGKPKKVALVACMRKLLSILNALMRDRAIWRCPHALTP

SEQ ID NO: 94440 - protein, 344 aa, unidentified
MLKSTIFGIDLAKNIIQVCEISKHGELVSNKAVSRQKLKELLAKAKPAVVAIEGCGSSHYWGRYAQSFDHDVRIISPKKVKGFLQGHKTDANDALAIANASLQIGMKSSKPKSEEQQTIQTLETSRFHLSRSITSLSNHLRAMLYEYGIVSARGVKALTTVVQDTLNNADSIPECLRSTVNQLWLTYLRLREELAQLIKTKNALIRQLQPCKKLMDLEGVAEVCAGLLYSSIGDGKQFKNGREASAFVGLTPKQHSSGGKVFMTGIDRTGGIRELRSALYQGALSYICNLPDEPKTAKQAWLIKLVQRAGLKRSCIALANKTVRTAWAMLRYENKYEQQQLLTI

SEQ ID NO: 94441 - protein, 317 aa, unidentified
MAQNDGVVVGIDVAKDKGDACIRKLSLRQTFPSPEQGHRKLIAWLRKHKVTKAVMEASGGYERAWARALRDAAIDVRIVDPKRVRAFALSAGRLAKNDTIDAEMIAWFAETFDEIPGQPRDAAREELQALVKARKALQDQQMRLQSQREHDAPAVVQKAYARVLKSLASEMARLEAAIAAKVKATPDFAERAEIIESVPGLAGTTSANLIAGMPELGQVCNKIAPALLGVAPYDDDSGRRRGERHIKGGRRWVRNAFYMPCLGAATQNNPVLKAFYQRLIAKGKNPKVALVACMRKLIVILNTMLARRQKWDPSCYA

SEQ ID NO: 94442 - protein, 343 aa, unidentified
MQTVATVGLDIAKSVFQVHCVDAAGQVVFRRQLKRRYVLAFFQKLPRCLIGIEACASSHYWSRELQALGHNVRLMPAAYVKPYVKRQKNDATDAEAICEAVTRANMRFVETKTPEQQSCLMLHRTRHLLIRQQTAVINAIRAHLAEFGIVAPLGRLGVEELLGVVADPKDERVPDVARACLAALGSQLRVLKKQILEFDRMINAWHRSNETSKRLDEIPGVGPALATALVASVANPRVFRSGRDFSAWIGLVPRQHSSGGKDKLGSISKQGDRYLRGLFTAGALAVIRYAKIHGTKHRPWLAALLARRPTKVAAIALANKIARMAWAMMAKGERYKEPVALAA

SEQ ID NO: 94443 - protein, 407 aa, unidentified
MDLQHPKCAGLDVHQHTVVACARVVAGSTVTHERRTFGTTTAELLALSDWLTAHDCTHVAMESTGVYWKPIWQVLEGQFALVLANARHIRNIPGRKSDVNDATWIADLLAHGLIRGSFVPPAPVQELRDLTRTRKQLVREITQHTLRIQKTLETANLKLTGLLSNILGVSGRAILHALVAGETDPERLADLVQGRLKASRAALVAALHGRLTAHHRFLLQLHLTQVDALEQAVHDVEERLGHALVPFRTALDRLITMPGVSETVARVVVAEIGFDMARFPTAGHLVSWAGLCPRLDESAGKRLSTRTRPSNPWLKTTLVQAAWAAARTKNTYLRAQFLRLKSRRGPKKTILAVASSMLIAAYHMLKHDLDYRDLGADHFDRRDKTKLAHRLLQRLQELGLTVEVRAA

SEQ ID NO: 94444 - protein, 424 aa, unidentified
MNFKMQDKQNQLIERISDTHLIVGVDIAQHLHVARAVNFRGIVVGDPFKFENNEEGYVKLLNWIQDLKRLKNLDAAIVGMEPTGHYWINLSKWLNNQNIEVVTVNPHLVKRNKENRDNTQSKSDKKDALVIADMVKNGYYSFIRPSSESFEKLRVLMSKRDVIVKRLVMSINQINRWVDVVFPELRQVFNDVSCKGSIATLRLFPTPDEISLMDSIDVQRGWKSLMKRQPGPKKAQLLINLAKTSIGTGQALDAYKFHLEQLLEEYDLAEKQLERVEQLVKEVLDKIPFAKKLLTIKGISEISLAGILGESGDLSGFSHGNSLLRHAGLHLVEASSGKWKDQIVISKRGRSRLRRFLYLATMSLVMNNPEFKALHSHNVKVKKLKKMRSIMKLIGKLARIFVGIARRNESYCPNKVQVLAPIAA

SEQ ID NO: 94445 - protein, 353 aa, unidentified
MKQYIGCDAHARYSVFVSVDETGRVGAPVRIEHGGRDLRDYLEKLEKETPVAVEASGGWYWFMDELEAAGLDARLVNPLEAKRRIGGRHKTDKLDARGLAILLRNGTLPEVWIPPAELRDLRGLMRGRLGLRSHTTVLKNRIHAALKRYGTLGGEAVSDLFAKKQRLTLSVAIGRLPEETRRATLHEWELLDEVERHIGELEVRIRERVGCLGWVRLLKSLPGVGEILGATVHLEIGDVNRFPTPAHLASYAGLVPTVHASGGKSYAGPTSKQANHYLRWAFVEAADCILMHRHRFTGHHALQLYDRVKAKKCHGKAAVAVARHLAESSWWILRKREKYRQPHAAAVSSSKNG

SEQ ID NO: 94446 - protein, 402 aa, unidentified
MNCVGIDVSKGKSMIAVMRPFGEVVISPFEVQHTASELSELAKLLKSLDGETRVVMESTGNYHTPVAWLLHDAGLYVSVVNAMLVHDYGNNSLRRAKTDKKDAVKLANYGLDHWITLPRYVPEEDTRLLLKNCYRQYQQYSKVQTMLKNNLISLLDAVFPEVNRLFNSSPRADGSEKWVDFVSTFWHCQCVSTLPLKSFSARYLKWCRKHGYYFSQEKAFEIHSKAQSCIGVMPRNETTKLLVQQAIAQLKATSAALAALKQEMQSLAASLPEYPVVMEMFGVGSTLGPQLMAEIGDVRRFHSKKALVAFAGIDAPPCQSGQMDIHSRSISKRGSAALRRTLFLVMGIYLQSAPLDEPVYQFMDKKRSEGKPYKVYMMASANKFLRIYYASVTAYLNTLARI

SEQ ID NO: 94447 - protein, 349 aa, unidentified
MRFFTGQHQYYCGVDLHARTLYLCVLDAHGKKRVHKRVRSEPTAFLEAIEPYREGLVVGVECIFCWYWLADLCASEQIPFVLGHALYMKAIHGAKAKNDQIDSHKLAVMLRGGSFPEAYVYPRGMRATRDLLRRRLFFVRKRGELFAHIRNTFYQYNLPRPAGQLLYKKNREGLVEAFSDPMIRSTLEADLALADRYDTVIRGLERRIGAEVQVHDPETFARLQTTPGVGKVLALTLLYELHDITRFGTVQRFSSYCRLVKSQHTSDGKRTGSAGGSKIGNAHLKWAFSEAAVLFLKDNPRGQAHLHRLQRRHGKGKALSVLAARIGRAVYFMLNNNQDFDDERFYART

SEQ ID NO: 94448 - protein, 403 aa, unidentified
MNSVGIDISKGRSTIAVMRPFGEVVISPFEVRHTGSELSKLARQLKSLDGETRVVMEATGNYHASVAKLLHDAGQYVSVVNAKLVHDYGNNELRRVKTDRKDAVKLANYGLDRWLTLPRYIPEEDTRLLLKNCYRQYRQYSKVQTVLKNNLISLLDTVCPNVNRLFSSPIRGDGSEKWVDFVAEFWHCRCVSEKSERAFTSKYLRWCRKHGYNFREAKAHTIYAEASGHIGVMPKSETTKLLVEQAVAQLRATSTALAALKHEMQSLASMLPEYPVVMDLFGVGPTLGPQLIAEIGDVRRFYSKKALVAYAGLDAPPNDSGDVTGRHKSMSKIGASSLRRTLFLVMSVYLQTAPLDEPVYPFMDRKRAEGKLYRVYMMASANKFLRIYYATVKAYLESLEHTA

SEQ ID NO: 94449 - protein, 345 aa, unidentified
MEIHTIGIDLGKTVFHLVGLDARGEVVVRKKCSRNQILRFTANLHVSLIGMEACGGAHFLARALREQGHDARLMPAKYVKPYVKTNKNDYIDAEAIAEAVGRPRMRFVPIKTDDQLDLQSLHRVRERWVSGRTAVINQIRGLLLERGITIRKGRHHIEESLPGILEDADNKLSGALRVLLTELRLEMQYLQGQIDESDKLIRRIAGELEDCRRMVSVPGIGPLTATATIAAIGNGSAFKKGRGFAAWLGVVPGEHSTGGKQTLTDTSRRGNRYLRKLFVQGAHAVLQQRMKQSNGLNTWLAQLTSRKRIQVAAVALANKMARMVWAVLSKGEAYRPPLWIETAAV

SEQ ID NO: 94450 - protein, 380 aa, unidentified
MSKKLLYVGLDVHAQTVAIALAEPGGEVRPYGTVSSCVETLERVMRKIRKAHDDAELKVCYEAGPTGFVIARRFAQLGIDCAVVAPSLIPNRSGDRVKTDPRDAVKLARLHRAGELTAVNVPDASDEAMRDLCRARTDAVQDLRRSRAQLKAFLLRNGVRYAGKTAWTEAHRRYLRELVMPHGAQRVVLEDSLRAITTAQERIQRLEDQMAALLESWHMKPVVEALMALRGFQTVSAMVMVSELGGAWRFDHPRQLMCYLGLVPTENSSGSRRRQGAISKAGNSHARWLLIEAAHHYRLPPKISKELSKRQEHQSQAIKDCAWKAQTRLHSRMMKLYARGKRPNKVIVAVARELAGFVWAIFRLMEPQMKQTRSQETVVK

SEQ ID NO: 94451 - protein, 398 aa, unidentified
MLYSRNNLTLLYLFEFEQNVRNLAWLGIQNIQPGDKTKGDFSLFHFKLISMKKIVKQVAGIDVAQKELVVCLGRMYDDWTPELHASKTFLNTAKGIASFVEWAEKLTDASMPIRFVMEATGVYHESLAYYLDDHGLEVSIITPNKISNYARTLDVKTVTDKTASEAITLFGLERNLEKWKRPNSLFKRLRQLTRERDQLVQLRTIAKNQLHAELVEAEPNSSSVARMKKQIAFFNKQELEISSEIVELSKQDEKVSGAIKIICSLPGVGMLTAVTVLAETNGFELIRNKRQLTSYAGLDVKEKQSGTSVKGKPRISKQGNKYLRKAMHLPALTAIRLDERHKAIFARLVSRHGIKMKAVVAVERKLLEMIYTLYKTNKQYDKEYLKKTEVNFKEEVTV

SEQ ID NO: 94452 - protein, 356 aa, unidentified
MNNRKYIGMDVHQASISIAVSDAAGKVLMECIIETKAATVLEFIQGLRGSLWVTFEEGTSAAWLYDLLKPHVTKVVVCDPRKNALLKAGNKNDRVDARKLSDLLRAGLLTPVYHGESGVRTLRELSRGYLAVSKDLTRVMNRLKAIYRSWAIPCAGQQVYSPRHRAAWLEKLREAGVRRRAEQTYQQLDFLMGIRKETRKELLAESRKHPARKLLEQIPRLGPIRVALLIALIQTPHRFRTKRQLWNYCGLGLRTRSSGEYRYTGGQLQHARKPPALRGLNINHNHELKNLFKSAATQAGTSKDDPLGEFYQNLLASGMEPPMARLTLARKIAAIALKIWKKGERFDPAKLKQQAA

SEQ ID NO: 94453 - protein, 343 aa, unidentified
MQIRSVGIDLGKTTFHLVALGDGGKVLFKKKFTQKQLITFTANLQVSLIGMEACSGAHFLGRALGAQGHDVRLIPAQFVKPFVKSNKNDFLDAEAIAEAVDRKNMRFVPIKTDDQLDLQALHRVRDRLMARRTSVINQIRAFLLERGVVFAKSPIRLREQMPDVLENADENLTPRMRNLLSLLWDEWKGLEQQLTALNLEVEQIASSEAACRRLQQIPGIGPLIATAIVAAIGNGAAFHKGREFAAWMGLVPSQHSTGGKAKLLGISKRGNHYLRKILIHGARSVVLHCKRDRVSMGPWMTALEARAPRNVLVVAVANKLARIAWAVLSSGNDYRALPVQMAA

SEQ ID NO: 94454 - protein, 530 aa, unidentified
MTARISKNRRRRRKSNSKSKQCKTWNLQKPSGVIGPRVAKVGGDKFAIVCVDPAKHRSDWMMADYFGNLLIEQQTLEHNAAFFRLAVAQIREAQQKHDIQDMIVVVERTGNYHLAPKRAFAKAGFETRVVHPFATKQYRTPADPGIKTDGTDLNAQHRAAAAGFGLCDLELESPYRELQLRARHRRNLVEKAASMSCQIREHLHLALPGFSTLFDHLLDHKSAMAIARRCASPAVALELGSSGLGQHLRENMVRCQQRTIDKVLAWASQAAGDTVQDSTLHHAIWTDLEELYQRFQRQIRFQERELAGDLVQTPYIRLLAIPGINVVSAAELAGEMGPITRYANANSITGRCGLYPSRYQSDQTDNAHGPTIRQANRRIRCALMRVADNLVCHCAYYRGLADVDRARKVDERALRVKIAKKFSRLAYACVAGDEPMKHPAMRQPDSIMEKLREFHRVHETPMNRVLADLKASVQQLPYHTRNREAAVVAEVLRQNATRRRGSVAVGMLLPAVLARLEIKTTEETETRGRS

SEQ ID NO: 94455 - protein, 346 aa, unidentified
MKQVNTIGLDLAKNVFQIHGADAEGAPIFNRKLRRAELLVFFEKLPRCLVGLEACGGSHYWAREIAALGHDVRLIPPIYVKPFVKRGKTDAADAEAISEAVTRKTMRFVPIKSADQQAAAMVLRTRALLIRQQTQAINALRGHLSELGVVAALGTAKVAALIEIVRDEEDVCLPKAARLALAEIADQIEALTRQIDKLERGIVGEAKRDEDMRRLTTIPGVGAITAATVKALIPDPDGFKSARHFAAWLGLTPKPHSSGGKERLGGISKMGNPTLRSLLVCGATSVLRRVKGNDKAPRWLVALLARRPFKVVAIALANKMARIIWALLTRGGTYRNTGAASGAAHA

SEQ ID NO: 94456 - protein, 315 aa, unidentified
MSETSINVGIDVSKDTLDAALSTGEGFSRANDEKGILALVEQLKGFQPERIVLEATGGYEQALVAELAVNALPVTVVNPRQVRDFAKALGRLAKTDSMDAEVLMLFAQAVKPESRALPDEKTRELQALVVRRRQLLGIVLAERQRLAKAPAVVRRDIRAHVAWLIKRLKDIDQQLGAALRASPLWREREQLFKPVKGVGRVLLSTLCASLPELGRLNRRQIASLVGVAPFNCDSGKFKGKRHCWGGRADVRAVLYMAALSAKRFNPAIRVFYERLVVAGKPKKVALTACMRKLLSILNAIARDHTPWNPNLHLST

SEQ ID NO: 94457 - protein, 408 aa, unidentified
MNAVGIDVSKGKSMVAALRPMGEVALLPQEFLHTEVGLEQMAYAIIALGEDTRVVMEATGRYHEPVAAALHEYGIYVSVLNPLFIKQSGGGSIRKVKTDKADAMKIAKYGLDNWVDLREYTPMDTVRQQLKLCSRQYNLYMKTVVSLQNNLISLTDKTFPGVNELFSSPERADGHQKWVDFVMTFWHCDCICRVSEKAFTERYQKWCKRKGYHFSTEKALDLYAGSCGHFTTLPKNDNIKLLITTAAQQLLAGKMTLAALRAEMTRLAMQLPEYDTVRAMYGVGQTTAAQLMAEIGDVRRFPRRSSIVGFAGVDPGVDDSGKHIAKSVPTTKRGSPHLRKTLYQIICTYLKKSPEDEPVYQLLNKKRTEGKPYFVYMTAAQNKFLRIYYARVKECLETFDAQQDIVQN

SEQ ID NO: 94458 - protein, 442 aa, unidentified
MATKLVNPNAAGIDVASNEHVVAVPEDKSKDSVRTFKGFTRDLHQLAKWLLSCKVETIAMESTGVYWFDLYTILLDYGFEVYLVNAHHVKNVPGRKSDVSDARWLQQLHTFGLLRASFQPDNLTRSLRNHVRQRKSIVQQMSRQTQHMQKAFDQMNIKLNNVIRDLNGATGTKIITAILEGERDPKKLAQHRDRRIKASEQTLIKSLEGNWREEQVFNLQLAYDHYIFLQQQLKQCDAESEKIIQKMTSGNSPKSRTKKIQKSKNNPDFDVAQYLHAALGVDVTQIYGIKEVTALTIFSETGANLKEKFPTEKQFLSWVNVVPNNKITGGKVISSKVKKKKNVAGQAFRDGASALWRAKNPIGDYLRRKKAKSGAKKAVVATARKIAAIYYKMVTEKVEFNPLELTKGKEQYLQKRLKQLEMAKEQTQMQLSDFQQQNSLVI

SEQ ID NO: 94459 - protein, 392 aa, unidentified
MELLYSRCAGLDVHKKSVSACVRISIAGRTQKETAVFGTFTAELEHLRAWLEKHKVTHVALESTGVFWIPVWNVLERSEAKMELVLINPQHAHALPGRKTDQKDCERIAELMQYGLLKGSFIPPAPVRELRDLTRRRTHLQGERNRVLNRIRRLLETVNVKLGSVASDIGGKTARLILSQISKGNYVPEELAKLAQASLKNKKAELMASLQGFYTEHFRWLLAESMEELVHLDRKLETADKRLAVHLQPHTDLIRRLCTIPGVEFTTAAVIVAEIGFDMNRFPDASHLASWAGLCPGNNESAGKRYSGSTRNGNRYLRRVLTQSAWSIKRKKDCCLTSMFWRVSGRGGQKKAALAVAHRMLTIAWHIIAEGGIRRLEPTSMKGNIRIGAPDG

SEQ ID NO: 94460 - protein, 343 aa, unidentified
MNEVITIGVDLAKNVFQVHGVDAEGDVIFRRQLRRGQVLPFFKKQPACLVGMEACATSHHWGREIEALGHQVRLMPPSYVKPYVKRNKNDMADAEAICEAVSRPTMRFVEIKTPDQQSVLMLHRTRHLFVRQRTMLINALRAHLAEFGIVAGVGRNGLERLLKVIEDGDDDRVPSAARDCLLALRDQLEMVKHQILYGDRRILAWHRSSEVSQRLDDIPGIGPLIATALVASVPDPHIFKSGRDLAAWIGLVPRQNSTGGKERLGRISKAGNRYLRMQLVVGALSVIRRAQQVGYTRRPWLTKLLERRSTKVAAIALANKNARTAWAMMAHGTYYQEPVSQAA

SEQ ID NO: 94461 - protein, 339 aa, unidentified
MKNLFIGIDVSKEKLNFCFRTSSAIVREDEIPNVSTDIKKLIKNELKRLKVEKEEVLICAEYTGRYIYPLVCACRDLEVFLWMEDPTRIKNSFGLTRGKNDTVDAQRIAEYAYRFNDKSVAYNMKDKTIASLKELLSDRDMLLSDKVKYQAQLNDQKNYMDKSDYKHKCKRWNTVIETLQSQIDDLEKEMEAIIDSDETIKHQMDLLISIDGVGKRLAMNMIAITEGFSRFQNARQFNCYAGLAPFQYTSGKSIYSKSKVSQRANKHIKALLHLCAVCAATHMLSGEYKEYYERRKDEGKHTMCILNVIRAKIVARMFSVIKRNSAYSKEYNSLLVESK

SEQ ID NO: 94462 - protein, 337 aa, unidentified
MNATTYGMDIAKNVFQLHWVDPGSGEIHRKKLGRGKVVEFFAQREPGVVAMEACAGAHHWARQLLSLGHRVELLPAHQVRAFVSRNKDDACDARGIWLATQHHDVRRVPVKSVEQQAQLSAHRVRSHWVSVRTASVNMLRGLLYEFGIALPKGRPAGLRWIADNRAHIEAQLPPAMVRLLDDQLQALRELEQHAQAMEQQIRLDRNSNETARRLGAVPGIGLLGATALAATLGDGSGWRNAREFACCLGLTPRHTGTGGKVRMGPISKRGDAYLRTLLIHGARNLVRLANPPDWIAKLLQRRPHNVVATAVAHKLARIAWAMSAHGTPYQSRWAKAN

SEQ ID NO: 94463 - protein, 332 aa, unidentified
MNEITLLAIDLAKQVFQLHGVDARGVCVLRRQVRRAQLLRLIAQLPPCTVAMEACGGAHHWGRRIRELGHQVKLIAPQFVKPFVKGNKTDRNDAQAICEAAQRPDMRFVALKTVDQQQVLALHRMRSSVVKARTALANQVRGLLAEFGVVVAQGLQRLRRQLPELLEDAENGLPPLLREELNFQTQRLRELDAEVQRLTRRIEEQAQVDERSGALMQRRGVGPLIASAFAAEIGDAHAFKNGRQVAAWLGLVPRQHSSGGKPILLGISKRGDAYLRTLLIHGARAALRTADRHEDAVSQWACTLKARRGVHKATVALANKMARQLWAQLAYG

SEQ ID NO: 94464 - protein, 410 aa, unidentified
MENCKVIVGIDVSSKDSTVCVLMDKVRQGKTFKISNDMVGFQQLYKRLRLYSVIPLIVFESTGVYSLSLQAFLEKKHIQYLKLNPLKAKKLMDNNLRHNKTDQVDAYRLALIQFNAPQKLLKPQSRAYHEMQNASRYYEELNKAMVVAKNQLHRNLQTTFPQIENLMCHPTGKIYWSVVALFPHAQAVLDSNKEHILGELETISGLSQKKAEYLTQRLISLARLTCAYDNKDSIVIRAIQRNIASLFSLDQEKKEALAYLYKLASKNQADTRILTIYQSIPGIAKTTALRLLAELGDLRRFDSPNQIDAFIGIDPGIYQSGELDSHLSITKHGNSIARKVMYLSIGQMESVKTTQPCHITDYYDRKKSSQSRGFKKIAIASVHKLIRTMYALVTKNQLYDYNVATRNQRL

SEQ ID NO: 94465 - protein, 371 aa, unidentified
MKKTITFVGLDVHKATIDVALADAGHTGDVRFYGPIGGDLDALHKVVRKLQSNGTELRFVYEAGPCGYDIYRSLTKQGFDCMVTAPSLIPRKSGDRIKNDRRDALNLARLYRAGELTAVYVPTEEDEAMRDLSRAREDAVKALRVARQGLLAFLLRHGFRYNGKKNWTKAHNNWIAGIKMPHRGQQIALQEYVNTAQEQLERVDRLTGQIRDLLPHWSQAPLVTALQALRGVSLIVAVTTVAELGDLTRFRSAKQLMAYLGLVPSEHSSGGTVRRGGITKTGNGHVRKALTEAAHTYCHPARESRVLLERLEGLPPEVRQIAWKAQVRLCGRFRRLLGYGKNRKTVVTATARELSAFMWAIANAVAPKPTA

SEQ ID NO: 94466 - protein, 304 aa, unidentified
MFGIGIDVSKATLDVAVHGEQFRQFSNDKRGFVRLIRWLKTWPIKQVVLEASGGYERAALDALHAAGLPMVRINPARARRFAQGTGRAAKTDRLDATVLAQMAHLLPLTRYVPPAPWQQRLAEFAQCRRHLVQMRVSEMQRLRRLVDPDLIAMKQRYIAQLSDDLKQLDKAIAEQLEGQPGWKNIGALKGVGPILISTLACELPELGSLGSKAIASLVGLAPMNRESGTWQGQRRISGGRAVVREALYMAALTAIRYEPRLRAFYAGLKAKGKASKVALVAVMRKMLVILNARKRDAEVALGCP

SEQ ID NO: 94467 - protein, 451 aa, unidentified
MEKKKLAMDIINPHCAGIDIGSRSHYVAVGQSLEDVKEFGVYAEDLTAICLHLKQYGITSVAMESTGNYWQNLYVELCKYGFEVTLANGKFTKNIKGKKTDVKDARWIQKLHSIGLLTSSFLPDETTEKLRTYCRQRQNMLDLAAEASHKMQKYLKILNFRLDVVVNDICGLTGMAIITDICNGNLDPEKLSEHRHGNCRKSKEEIAKALKGNNRQDYLFGLKQELESYQFYQKKIAECDKQITIFLKNQINTDPNKKKLKTTDKNHKRINKNAIKGIDLNQASFQYFGGVDLMSIEGISHATILSIISEIGPEGFHKFETAKYFTSWLRLAPNNKVSGGKVLSSKTPKGSNRLKIALRNAANAIGNLKDTHLSNFFNRIAYKKGRTIAVSATARKLAVILWNMVVKNMPYKPPTEYLFLDEKRKLKIVARVKKQIAKFDLTKEDFGFVNA

SEQ ID NO: 94468 - protein, 458 aa, unidentified
MKAKTPQAKSARKKVDWKALAIVHPDAAGIDVGGSEHWVAVSPDRDDDPVRCFGCFTEDLRQMAEWLVEKKVRSVAMQSTGVYWMPVLEILEQHGLEVFLVNARDTKNLPGRKSDIQECQWLLKLHTFGLLNNSFQPTGEIRVARTLWRQRGDLTAAAASMIQRMQKALTEMNIQLSTVLSDLSGVSGMKIMRAILVGERDPWKLAMLVDRGVKAKPAEIAKSLEGNWREELLFILRQQLELYEFYQQKIADCDRQLRQHLESFASRVDPLVQPLGRKPRNKRSSKNAPQFDLRSELYRITGIDWAQINGIDVLTAQTVVSEVGADLNSFPTEKHFASWLGLCPSNETSGGKVLNRRSRKVVNRAATALRNAASTLLRSQSYLGAQYRRLRTRLGAPKAITAMARKLACLFYRLIKHGQPYVDKGTEYYEARYREQQIRSLTKRAQKLALQVVTPKAA

SEQ ID NO: 94469 - protein, 339 aa, unidentified
MGLHCAVDLHGNNGYYAIVDEKGRRLLGKRLPNSLDTALRTLEPYKDRLDHGVVVESTFNWYWLVDGLNGNGYRARLANPAAIQQYDGLKQADDKTDAFFLTELSRLDILPEGYIYPREERPVRDLLRRRLLLVRHRTAHILSFKNLYARERGQDIGSNDVQKLRPENVKDIFGDARLELMGRTNIEAIRFLTGQIRAIEKAVLAEAELKLEYEKLLTVPGIGKILALTIMLETGDIGRFKEAGNYSSYCRCVKSSRTSNDKKKGENNRKNGNRYLSWAYVEAANFIRRYCPEAKRWHQRKSARSKQVVATKALASKVCRACYYIIRDQKEFDVKKLFG

SEQ ID NO: 94470 - protein, 453 aa, unidentified
MAQRNRSLRLKPGQSRVALTITHPNAAGIDIGSAAHFVAVPPDRDDEPVREFPSFTVDLNAIADWLQACRVDTVAMESTGVYWIPLFELLESRGFTVLLVNARHVKNVSGRKSDVLDCQWIQQLMTYGLLSGAFRPADQVCVLRSLWRQRGMLLRSQAREVQHMQKALTQMNVQLANVISDVVGETGQKILRAIVAGERNGQVLGAMKNVRIHASVDEIAKSLQGHWRVEHLFTLKQALAAFDFIGTQLAECDQEIEAQLKRLEVHEGDPAKGKKRSRPRNAPKFDLRTQLFKMCGVDLTRIDGIDVTTALAVISETGADMSRFPTEGHFASWLGLCPGTKITGGKVMSGKTKRCANRAAQALRLAAAALRTSQSALGAYFRRLCSRMDKPKAVTAAAHKLARLIYTLLTKGQEYTDQGQDYYEQRYHQRVLRQLAQRAQKLGMKLVPTEQPA

SEQ ID NO: 94471 - protein, 378 aa, unidentified
MCPVEPHTEVADHVRLYDSTTTVTVGLDVHARSIRLAAVRAEELLEERTLPYDEEAVERALRRWPVVRCCYEAGPTGFGLHRFLVERGIDCQVVAPGLVPQRPGDKVKTDSRDARKLARLLAGGLLEPIHVPAPTLEAARDLVRAREDARLDRMRDRHRLSKFCLRHGRRLPGLSWGVVRRKWLSEQRFEFAAQQQTFDTYLHAVDLVDARIEQLERAIRETADEQPWSGLVARLRCLRGVETLTALALVAEIGDFGRFKRAEEFMAFVGLVPSERSSGEQRRRGSITKVGNAHVRRLLVESAWHARRRPSVGYRLARRQRGQDAVVIERAWRCQGRLHARWQRMAGRGKPQQKIVVACARELAGFVWAIANDQPLRS

SEQ ID NO: 94472 - protein, 386 aa, unidentified
MSLPSPSINVGIDVSKETLDIAVHETAAHWTSKHEFTEFPQLLKSLRAVAPTRIILEASGGVENLLVSYLATAGLPVIVINPRQVRDFARATGQLAKTDRLDAFVLARFGATLEPAVRQLKSAETQELEALVARRAQLVNMLTAERIRLQQAQQQRRQSIVSDLKAHISWLQKRLDKCERDLSQLLRSSPIWRATDERLQSVPGVGPVTSLVLIAELPELGQLPDKQIVALCGLAPHARDSGKWHGKRTTRGGRARVRTALYMAALVATKHNLVIKSFYRRLLSAGKQKKVALTACMRKLLVILNAMFRNQTSWQPPRPAIEFLFRNRLFSGAWKMPSLDRLHKPVLVLNASYEPLNVTSILACRSAPGRSSRLSPWMKERFLLPS

SEQ ID NO: 94473 - protein, 401 aa, unidentified
MVSDFRKGRYNLMKIYVGIDIAKLNHFAAAISSDGEIIIEPFKFTNDADGFQLLVSKLESFDKNSLIIGLESTAHYGDNLVRYLVTELYQVCVLNPIKTCQMRKNNIRKTKTDKVDTYIIAKTLMMQDDLRFVSFYDLDMMDLKALERFRQKTIKQRTRLKIQLTTYVDQVFPEIQYFFKSGLHQNAVYALLKEAPSPKEIASMHMTHLANLLKVNSHGHFTKELAKELRVLAQKSVGANDSTISIQITQTIQQIELLDSQLEKIEAEMTDIMKFNDSVIMTIPGIGYINGGMILGEIGDIHRFSNPNKLLAFAGLDPSVYQSGNFQAKTTRMSKRGSRILRYAIVNATWNVVRNNATFKAYYDAKRAEGRSHYNALGHCSGKLVRVIWKMLTDNVEFNLK

SEQ ID NO: 94474 - protein, 382 aa, unidentified
MLADPMNSCWLMEWSASLPKRLQMSHDVIFSENIKTEVRQTMKNNTAKGPITVLGIDLAKQSFQLHGVNAEGKVVLKKKLSRKQISAFVANLPVCLIGLEACGGSHHWVRIFTEMGHTVRMMAPQFVKPYVKSNKNDAVDAEAICEAVQRPNMRFVPAKSIEQQDIQSIHRIRSQLVARRTAQANQIRGLLMEYGIIIPQGIKCIRKNLPDILEDGENRLTDIFREHLSALYDEMVHLDERVETLEKSLKTICNQNEDCKRLLTIPGIGLMTATAMIAAIGDIGAFKSARELAAWLGLVPRQHSTGGKPTLLGISKRGDSYIRTLLIHGGRSVVRCAHKHQWIGEVEQRRGKNITAVAVANKNARIAWALLTKKEDYQAKAA

SEQ ID NO: 94475 - protein, 392 aa, unidentified
MRFVGIDIGAERHSVAIVDDGGRVVSKSVSFEEGAAGYRRLGELLGSPADCLIAMEATGHYWKNLFVSLAAEGFQIVLLNPLRTRRFAEEELQRTKTDKVDAVSIARFAAQKRPTATTLHGPAIEELKQLVRLREQSVQHLGDRVRHLHKAIDLTFAEFTRHVRGLDTELATAILLRYPTAKALRTISVRKLAGLCYDGRRGIGDDLARALIEAAKISVGHFSSEPYQLQVRYACEDIVSLRTRVRGLETDIELRLNTHEVGKLLTTIPGVSTLTAARIIAETGDPARFRSAAAFASYIGAVPRLHQSGKKRYSGKPAIPLGNARLRRALWMPVLVGIRLNPWLRTYYLRLRAAGKRPKVAIIAAMHKLLIAIYSVAKHRTPFVLQLPATLT

SEQ ID NO: 94476 - protein, 337 aa, unidentified
MIIVGCDFHPSFQQIAMLDTETGATEEHKLMHTSGEAEGFYRKLASPAIVGIETVGNDQWFVQLLQKLGHEVCVGDAAQIRSSYVRKRKTDRRDAKHILQLLVEGRFPRIWIPDAEMRDHRQLLMHRHKLVQIRTRVKNELQHLMLNQGVQKKQKLWSTEGRAVLASLPLEPWTDRRRNDLLNLLAMLDAQLESLSDAVTRVAKEYPGVHLLMSQPGVGAVTALAFVLTLGDVHRFPRGKQVASYLGLIPREHSSGGKQRMGGISKQGNRLLRFLLVEAANIAVRFDPELRKEYLHRCHQKHFTVAKMATARKLAIRMYWMLRTQTPYPQVLSSRVA

SEQ ID NO: 94477 - protein, 426 aa, unidentified
MKRTQNEKILQIKNETLVVGIDIGKETHYARAFDYRGIELAKLLKFSNTAEGFENLNRWLRDTCTQQGKTEAIVGFEPTGHYWFALGDYLKRQGHKLAIVNPFHVKRTKELDDNSPTKNDRKDPKTIAMLVKDGRYREVYIPDNNYQELREAVAERDRLQKQLIAIHNMVVRWLDIRFPEFTTVFKKWTGKAALLTLQTYPTPAKVLEAGQDEILATWRTAVKRSVGIKRARALVKAASNSIGRTNGHITSEASLQNLLAEYELFRAQLERVEQLMWELLQQVPNAIKLLEIKGVGLVTATTFVSETGDIHRFEHPRQIQKLAGFNLVENSSGKHKGKVTISHRGRKRLRHGLFMAMIAILGKNPEFRELHHRNLTREKNPLNKMQSIVALCGKLIRVFYTILSKGVDYNPEKMMGDIQQSLKMAA

SEQ ID NO: 94478 - protein, 346 aa, unidentified
MKQITTIGLDLAKHVFQIHGADAEGSPVINRKLRRAEVLRFFAKQPACLVGLEACGSSHYWAREIAALGHEVRVIPPAYVKPFVKRGKTDAADAEAISEAVTRKTMRFVPIKSAEQQAAAMVLKTRSLLVRQQTQVINALRAHLSELGIIASTGTTKVARLIDIVRDATDARLPKAARFALTTLADQIEALFAQIIKLEREIVAGAKRDEDMRRLATIPGVGPITAASIKALVPDPGGFKSARHFAAWLGLTPRSHSSGGKERLGGISKMGNPELRSLLVLGASSVLRRVRGNDKAPKWLSALLMRRPYKVVAVALANKTARVIWVLLTKGGTYRGMAPVNGVASI

SEQ ID NO: 94479 - protein, 412 aa, unidentified
MEIVYERCCGLDVHKRTVVACLLVPGPAGAPSREIQTFGTMTRDLLALSDWLAAAGCTHVAMESTGVFWKPIYNLLEGNFELVVVNAQHIKAVPGRKTAVRDAEWIADLLRHGLLRASFIPDRSQRELRELTRYRTTLIHDRANEVNRLQKVLEGANIKLASVATDILGKSGRDMLEALVGGASDSALLAQLARGRLREKLPQLEQALAGQFGAHHRFLLAQQLAHIDFLDASLERVSTEIAERVGPFEAEVARLQSIPGVGQRTAEVLVAEIGVDLTRFPTARHLASWAGLCPGNDESAGKRRSGRTRKGSPWLRTALVEAGQAAARTKETYLAAQYRRLAARRGAKRAAVAVAHSLLVMVYALLTQPTGYHELGGHYFDERDRQAVERRLVHRLEALGYTVSLAPTSPAA

SEQ ID NO: 94480 - protein, 344 aa, unidentified
MEYGAIDLHTRRSQIRILREDGAVVLDRRIDTTRGDLSRVFSGRPPMRILIESSTESEWVAQHVEILGHQVIVADPNYALMYGARSRKVKTDKRDVAALAEACRTGIYRRAHRVSATSRDLRRTMRVRQHLVQMRSGTISLLRAGLRHEGLRLASGAAETVLRRLDRLELPAAVAASVAPLRAVLTELNTILAEADAGVEARASTDATTQQLMTAPGVGPVVALTFQAVMDDPARFGGSAARASAFLGLVPSEDSSAERHHKGSITKTGPRDLRALLVQASWVIWRSRSAPGAALRAWAQALAARRGRRIAIIALARRLARVLYAMWRDQTDFMPRLQAPAAAA

SEQ ID NO: 94481 - protein, 368 aa, unidentified
MRMKTHPQYFISKPRRSSKVGVTIGIDLGDIWSHYCTLSEDGEVVDRGRFRTNPSGVGKRFRDLGPARVAMEAGTHSIWVSEQIRELGHEVIVANVRELRAISHSDRKSDKVDAEKIARYARLDPEILRPIAHRSVAQQETLTLIRARDALVRLRTGAVNSVRGLAKPCGYRLPASSTLTFAKRCLAVLPPGLAQALGPLLHQIADMTVKIKQYDREIQRLTETKYPETQALVKVYGVGHLTALTFVLTLGKKERFQRSRDVGCYLGLRPRRSQSGDSDPQLGITKAGNGYLRQLLVECANHVIGPHGKDSALRRWGLSLGARGGSHARRRAVLAVARKLAGSRAISIRSFGWSQCALGSHELTLELY

SEQ ID NO: 94482 - protein, 343 aa, unidentified
MERYVGLDVSLKQTSICVVSQTGSVMREGVVNSDPEVIAAFVRSKAPGAVRIGLETGPTATWLWTELKRLGLPVICIDARHARAVLKMQINKSDRNDAAGIARIMQTGWFKEVRVKDIDSHSVRALLASRALLVKIKRDLENQVRGLLKNLGLVIGRAKFNVFAARAEELVEDRPELVAAVRPLLEARKAVEQQVCNLDRKVLKLARRDAQVRRFMTTPGVGPITALCFKATIDDPTRFKRSRSVGAYVGLTSRCHASGEVEWSGRISKSGDAMLRSYLFEAAGVLLTRVPKWSALKAWGTRLAKRNGLCKAKVAVARKLAVILHRMWIDETEFNWSKKEVAV

SEQ ID NO: 94483 - protein, 367 aa, unidentified
MKKISTVAAKQTKDFSDQELTIGLDLGDRSSWYCVLEETGEVLLEQKLGTTPKAMKEVFGGMPRSRIALETGTHSPWVSRVLSELGHEVIVAHARNVRLIGESRRKDDRFDARTLARLARIDPQLLAPVKHRSAQAQSHLMVIRARAGLVRARTSLINTARGLTKSYGERLRGCSPRNLNAEKARQLSPELQVALEPLLAAVESLSEQIYEYNQQIGKIARESYPQVARLEQVKGVGTLIALTYMLTLEDPQRFRKSRDVGCYVGLQPGRRNSGQSEPQLHISKEGDPYLRTLLVQGAHHILGPFGADSDLRRWGLKLAERGGKNGKKRAVIATARKLAVLLHRLWVSGEAYEPLRNSRQTLLPAAA

SEQ ID NO: 94484 - protein, 450 aa, unidentified
MGNASGVSRGDRNRNARLARLRELVPTENAIVGIDLADRKQMVVVCDHDSRVLARRTFRCRAWDLGIALDWAAQRAAAKEFAGMTVACEPTGHRWRVLGQLAADRDMPFVCVQPMQTSWARRSEDLTVDKTDDKDAVLIARLTGQLRCYVPEPVDETWGRLRHLGARREQLIVEAVGHIQQIRALLECVWPASLDTARQPFRSQTWVAAMTVVAGRDGGELARTRRLGLARFERAVRREISRRGGQKPSLRILRALFTALADPAGVIAHRRGALERVQLLLADWRDTQRKLTDTEQRLTAVLDELELTELVTSIPGLSAVGAAAILAETGDPTRFTTARAMVKHAGLAPRENTSGKFTGRTKLTGQGRPGLRLAAWRTVWGAQKANPVYAARYRHLTSREQNKLTPTQAQTVIAAAILRHLHAVITSGRAWDPDIATHGTRHREVHAVAA

SEQ ID NO: 94485 - protein, 349 aa, unidentified
MDNITRIFIDTSKSVFQLHGVNAAEEVVLRRQFPRGRLIAFFSKLPPTVIGLEACGGSHHWARELSALGHEVKLIAPQHVKRYVKRGKNDANDAAGGCEAMSRPTMGFVPVKTAEQQAALMLAGVRDTIARERTQLTNTIRGYAAEFGLVTPKGLCKIEPLLARIAEDQTLPTLARDLFAVLSANYAEVQARFKEVDAKLLAWHRAHTVSVALAEIPGVGPIGASLLVMKTPVPKAFRSGRHFAAWLGLTPKDHSTAGKVRLGVITRAGDEALRSVLVVGATSIIKSAVRGKGAGVSPWLIALVKRKPPKLAAVALANKIARIAWTMMANGEAYDPKRLTLSAMELATA

SEQ ID NO: 94486 - protein, 309 aa, unidentified
MRFYPPEAGKHREAYVLRRNRHPCPIHARSMYICIFGDEEKPVLHRNCKASPEAFLKAVESYRNDVVVGVECMFVWYWLADLCAKEKVPFVLGHDLSMKAIHGGKSKNDRIDSHKIAALLRGGTFPVAYVYPKKMRSTRDLLRRRHHLMRKRSELLAHIQNTNSQYNLPEFEKKIAYKADREGVTDHFPDPSVRKSIEVGLQLLDFYDQLLTDLELYIVKKVKAHDVHTWYLLRSIPGVGKILSLVALYEIHDIRRFPRVQGFASYCRLVKCLRESGAKKFGAKNSKIGNVHLKWAFCPPGRALPRSPR

SEQ ID NO: 94487 - protein, 457 aa, unidentified
MRQRGRRTKGIEEAHPFAGMSQVNPNAAGVDIGAEEIVVCVPGAGNTQIVKAFGNYTVDLQNIGKWLQAHHVKTVAMESTGVYWIPLFEELEREGFECLLISSRSLRRVSGRKSDIQDAQWIQTLHSYGLLESSFRPQGELVVLRTLLRHRAQLLEHRSPHIQHMQKALLQMNVQLSQALSDVTGETGLRIIRAIVAGEREPEQLAALRDRNCKKSAAEIGKALTGTWRSEQLFIIQQSLELYDFYTQQVTACDEEIERTYMLTRPDWGGDAVKPLPQRKRNSHSKNAPEHQEEVRQHLQRLSGVDLSVVDGFGVSLAQTVIMEVGTDMSKFPSEKHFCSWLGLAPKHEISGAKVLKNRTLKTKNRAGQAFRMAAQSVKRADCVFGSLYRRLKGRLDKAQATVATAHAIARVVYRMLKYKVEYEKIDVEEYEKKYKDQQLKYIKKKAEKFGFQLVPV

SEQ ID NO: 94488 - protein, 436 aa, unidentified
MAKLVSFDQANSHAAAIDIGSREIFVSPDGIHVRSYATFTAGYRQCIEDLKSDHIERVCMEATGIYWIALYQMLEEAGFEVCLVNPKEVKQVKGRKTDVADACWIQKMFAAGLVRQSYIPKGKFKELRMMIREREDVIIMGSAYVNKMQKALELMNIKLTEVLSQIHGASGIRIIEAIIKGERDKEVLLSLCHQKITENKSEEVKQALEGNYNETWLFLLEQNLKLWKVHQVQLNIIDKKIEDILDTLNENKPEIEAIHKAKPIRHHKPQIEDLNQKLLNIYGVDTNCLPGVTNYSVLKLLGEVGADMSRFPTVKNFVSWCGLAPGHNQSGLRSHRSRMKNQSRAGQIFREIAQSLITSKYIAIGSYMRRLRARKNSKVAIKAGARKIAAAFYNLLTNGSAYIEQGIEKYQEQIMLKEKKTLERLINKYNVKVLDY

SEQ ID NO: 94489 - protein, 327 aa, unidentified
MRQHKSLTDKVKTTVAFDVCKAALDVHIRVDNKAFRVPNTHEGFDQIALMLADYDVSLILMESTGGYEDVAACQFQSLGYDVAVINPRHARNFAKAMGKFAKTDRLDAAILADFADVINSRPDRSRYIKPTTDSERKYLSQMVARRRQVVDLVATEKQRLAHADEYAQLSIHKILKFLELELKGINSDISAYVKKNFADLSKLLSAIPGIGDLSVGLLVGDVPELGIIGNRQLSAVIGVAPFNHDSGNMRGKRCISGGRQNVRNVLYMGIMSATRFNPVIKAFFERLIAKGKPKKLAYIACIHKLLRIINAMVRDGTSFNPDLHTAI

SEQ ID NO: 94490 - protein, 463 aa, unidentified
MRIIGIDLAVKAEHRAVVVDARGQFLTPVLKVTTRAEELDRLLARARDGAPRCKLCAVMEPTGMAWFPIAVYLIRHGVTVYLVNSQEVIDLRRVYHRHAKSDRIDTRVLAQLPLHDPETLHELQLAGAVALACQRGCTQLDRWGHQIAAIKNRFKATLRFAWPGIEMVFADLYAVEARWFAEHWLDPHAVLRAGVSQLQLAWHESGLKPEDSGAWVPALMTLAEGVLALYGPDPLYLDFELLQAEVQRELALLAYLEAQEQTLRLKTVRPLYRQLQPDRWLETIPGVGQDGAAVYASFVGCADRFDSARLFRGWSGMVPKSRESAEVESKGLQINHAGPRLIKKYAFLDAEVARQWDPQVAAIYHDQMVRKGKHHNQAVCACATHLLDRVFVVLRDRKPYEVRDAEGQPVTAEKARTIIAEKYAVPEEVRRRTTKRYRQTRRDQRAEKKQKREEARTGVRSKP

SEQ ID NO: 94491 - protein, 359 aa, unidentified
MSEVTRGFIARVGVDLAKRVIQVHAVDATGQVVVAKALPRDGFMPWCAQLPPGTLIAMEACSGAHHWTCKLRALGLDARMMAAHFVTPYRMQGKGGKNDANDAAAVCEAASRPSMRFVPLKTPAQQAMLAIHRLREVYKEERTACINRIRGLLTEFGLVFAQRPEVLRRDLSDVLEDATNELPALLRMALRQARLHWLELECHMAWCDERIEAHVRTDEQAKAAAQLCGVGPVTASALVAMVGDFKQFRSGNQFGAWLGLVPRQNSSGGKATLGQITKRGDDYLRTLLIQGAKAAMVHAKKRSDRISLWLVSLIDRIGRQKAVVAMANKNARILWAVLTKGTAYDPNHVSINPGLPTTV

SEQ ID NO: 94492 - protein, 341 aa, unidentified
MYRTKVGVDLAKHIIQVSILNGKKVVSNVEMSTDEFLCWLVKTKPVTIAFEACSTSNYWYQQAIKAGHDARLVNAKLVKAVRQNQKTDKNDALAIVQTLFLPEMSFITGKNIEQQQLQSIQRLRELALKHQGAAQKQIVSLLLELNIRVPNAQASLLSKLEDMLEDAENDLPVIFRATLGVAKNQLENMINTIREYDKYLEKTIHSLPDCKKLLKLEGVGPINAVNLYIALSGEQSQPFKKGKDASACIGLTPIQYSSGGKTNIGTIGKHCKNTFLRSQLIAGAMAVVIKVLRYGAKTKKELWLKGLMERRGNKCAAVALANKTVRTAYAMLSQNTEYHAA

SEQ ID NO: 94493 - protein, 367 aa, unidentified
MISVGIDVSKGKSTVCILKPYGEIVSKPFNITHTQKDLSELSSMLFRLNDEVKIVMEATGIYHLPVLTYLQEKGFFVSVINPYLMKSYRNESLRKAKTDKIDSRIIANYGIDHWFKMKEFQISGVIYEELKLLGQQYRHYMKLHLLSLAELTHLLDLTMPGIKNLLASWNETNRKDKRSDFVERFWHYDVITSMSEQEFTEKYILWAKEKKYVPSQEKAKVIYTLAQESIPTLPSETSSVKMLVTEAVRVLKEVDATLGLILSRMQEIAKTLPEYSVVREMGGVGNTLAPKLIAEIGDVRRFRNGKALVAFAGIDPPPYESGQFVGCNRKISKRGSASLRKVGYETMRSLKMRSRPEDPVYRYVVKK

SEQ ID NO: 94494 - protein, 344 aa, unidentified
MSTIKVLGIDLGKSSFHVIGRDYSDNQIIRKKFSRTALIQFLHQVQPCTIAFEACGGAHWLGRQCESMGHKVRLIPPQYVKPFVKSNKNDFIDAEAICEASTRPNMRFVSVKSEEAQVISAIHKARHGYIKDRTACMSRIGALLLEFGVALPTGHSVMKQLFNWLAQQKQTIPGLVMQELMELHEYYLFLNENIDRQDKKLKQLVETNPIGQLLKTIPGIGDMTASLCIANIGSATDFKSGRNMAAWLGLVPAQYSTGGKPKLLGISKRGNKELRTLFIHAARAVMSRPDKTGKVYGDWLINLRATKPFNVVTVALANKLVRIAWAVMKTKQAFNSKALAPGLQ

SEQ ID NO: 94495 - protein, 400 aa, unidentified
MRVIGMDIHRSFAQVAVLENGEITRQLRVDLLHTAVTEFAQTLSREDDVVLEATGNSAAVERLIRPHVRRVVVANSRLVRAIAYARVKTDKIDAAILAKLHAAGFLPEVWVADDTTLARRRLIAERMGVLEQVVRTKGRIQSILHSNLIPKYKGHLFGKAGRKWLDGLPLPNEERALLERLVQELERVSAQLAELDRVLAAKALDDPQAKRLMTIPGVSYVVASTVLASIGDVSRFETPQKLSSYFGLTPKVRQSGDGPARHGRISKQGNSAARTMLVEAAWSAKTAPGPLRAFFTRVQKKSGSGAAAVATARKLAVMIWHVLTSGQEYAFARPAFTAMKLRKVALKAGAPREYGKAGPGRDYWIAEIRHREMDYVERAERAYERMVDAWRDKPPKPAPA

SEQ ID NO: 94496 - protein, 419 aa, unidentified
MFKIFYKNCCGLDVHKTWIYACIGITGADGKTQYHESRFSSFSKGLRKLAEWLQKYDCKLVCMESTGKYWIPVFNILEKTCDVTLAHPKYTKPQKGNKTDRKDAKWICDLFMCGMIKPSFIPPAAIRQLRDLVRYRTKLTNMLSSEKNRAQNCLTVSNLKLDDVFSDVFGKSSRSITEYILDHPGETFDVTPFVDGRCKTPIEEIQAAVDGSVSKEQAAKLRQCLAHIDELTAHKQKIEEEILQIAEPFGAYLDLLRTVPGCNSDKMTAVTILSEIGCDMSVFPSSKNLTSWAGCCPRNDRSAKHTKSTRISRAGAWIKPLLVQISNALIRSKKHPEFSERYRRIKARRGHKKAVIAICRMLLTAIWNILSKLEPYTPDGFINDQPADKKKTMSTAEAIKLLKSRGYIIKDSPDDLVTA

SEQ ID NO: 94497 - protein, 447 aa, unidentified
MEILYTNCAGLDVHKKTVKVCLLTRTSDGQLHKEFRTYLTTTEELLQLGDWLKEQGCTHIAFEATGVYWKPVFNLLEGSFQVLVVNAQHIKAVPGRKTDVKDAEWIADLLAHGLLKASFIPSVPQRELRDLTRYRVRLTEEKAREVNRVQKTLEDTNLKLGDVVSDIMGKASRMILQAIVEGETDPGRLAALAVGRVHASQEQLEAALRGHVTDHHRFLLAEHLTQIRHLEQAIERVTAEIVRRFTPPSSPEEEPSSRKKQEADPEVMPDSESPSAPQAALSWSAAVVLLCSIPGISERTAIGILAEIGINMQQFPSAAQLASWAGVCPGNHESAGKRLSGKTRKGNPWLRCLLVQAAHSASHQKQCYLAEQYRRIAKRRGSKRAAVAVAHSILVMIYHLLKDQTTYREKGEAYFEEQERQGAEKRLVRQLARLGYHVELQPITLAG

SEQ ID NO: 94498 - protein, 463 aa, unidentified
MAKKNTTSRKSKSKARKSVLERINPNAAGIDIGANFHFVAIPEDRAEENIRKFGPFTSDLHRLADWLTEHHIETVVMESTGVYWIPVFQILEQRGFEVKLVNAAHVKNLPGRKSDVSDCQWLQQLHTFGLLNGSFRPKDEVCVLRTFLRLRDTLVKDCSSHVLRLQKALTEMNVQIHRVLSDITGYTGRAIIRAILAGERNSLTLAQMKHPQVKASTEQIVKALEGDYRPEHLFALQTAVELYDVYQLKITECENKIEQQLEQFETKLDFKQVLEQSGALKVRSAKVRLELQRQAYLTSVCGVDLTRLPGLSTLAVEVIISETGLDMSCWKSEKHFCSWLKVCPDNRISGGKVLNSKSRKTKNRAAGMFRLAAQGAMQSKTAIGAFIRRIRARLGAPTAINAGANKLARLFYRMLKFGAAYVEQGQTYYEQRYKDRLLHNLSKRAKELGFQLTPYEPATVSVS

SEQ ID NO: 94499 - protein, 339 aa, unidentified
MTANILAVGVDVAEADMAVAVHTPVGTVGSPRVFVNRKAGFASLVKWLRRLATEQGCDGIHVGLEATGVYGDRLAYYLHRAEGVTVSVINPAQIKAFGQVRLTRTKTDGVAAAVIAVFVATQHPRPWVPEDPVLLHLRALATRIDQLQTMRTQERNRLKALKTTEDPSAELMTSLEESQTWLDTQIDALKERLHQHIQAHPDLKQQAAFLRTIPGIAEWSAACVIAHGGSALTDRTCKQLVAHAGLAPSHRQSGRSVRGKSHIAKTGRVALRRALYMPAMGTATQNRNPVLADLYQRLLANGKPKKVAIVACMRKLLHLIHGVLKNQTAFNPALHGLNA

SEQ ID NO: 94500 - protein, 374 aa, unidentified
MATIARLGIDTSKSLFQLHGVDEREAVLRKQVRRGQFLGFVAKLAPTKIGVEACGASHYWARQLQALGHEVVLLPPQHVKPYVGRNKNDKIDAAAICEAMSRPRVRERFVAVKSAEQSAAQMLLGTRDGLLHRRTQLSNTIRGHAAEFGLVTPKGLAHIKPLLERIAADDTVPALAKELFATLDEEFAELAPRIARLDKKLKAFQRSDELCRRLVEVPTIGPVIASSMVVKIGNPAAFRSGRRCAAWLGLTPKDHSTAGKMRHGGITRAGDEGLRAALVSGATAYIQQVKRGRTRPSPWLAQLLKRKPEKLAAVALANKTARIAWKLMVSGERYDRARAEAREGLGATQHQGSTPSPSLHPHTADQGASTMTVA

SEQ ID NO: 94501 - protein, 324 aa, unidentified
MYNYIGIDVSKKVIHTFNGKKYLQFKNEPLLEEFGLWVFENFKDLNKLVIIFEPTGPYSEYLKHFCASNKINACIINPKKSSNFAKVLGNRNKTDKVDAKMLYKYHKIINNDDISVPFVNKYIIKLNSYITSFEFAVKTRVATSNHLEAMQKLCPENKTLIKMIEKQLKQAIDMENNIIESLENYINKHEELKADYKILLTIPGIGKKSAIYLLTFFKTYPNANRQQITALAGLDVIERSSGTSVSGRKKISKSGNKRIRTILYFPTMNAIRYNELLKKQYERLLSNNKKKKVAIIACMRKLILVSYAMFKNKTEFSLDFNHSI

SEQ ID NO: 94502 - protein, 341 aa, unidentified
MEYFAAIDVSLEQSSVCVVDGTGKIVREGKVASEPEVLAAWFTASGLAFTRIGLEAGPLSQWLHAGLTAAGLPAILIETRHVKAALKAMTVKTDRNDARGMAQLMRMGWFRPVHVKTLPAQEVRALLTARKLLQGKLQDIELGIRGLLRGFGLKVGQVSKGKYEARIRELAMGHPMLEPVTAAMLQARTSLRTEYAKLHRMLLRIVRDDTVCRRFMTVPGVAAVVAVTYKTAVDDPTRFGKSKELGPYFGLTPSKYQSGEVDWTGRISKVGDAMVRTALYEAANVILNRVTRFSTLKAWALRVVQLRGVKRAKVALARKLAVVLHRMWVDGTDFRWRKAAA

SEQ ID NO: 94503 - protein, 405 aa, unidentified
MNDSGKRYIGLDVHKHYLIALGVDADLNVVLPARRVELSHLEAWVKKSLTRADEVVLEMTTNTWQLYDELVEYAGSVTVVHPPHVALITRSQVMNDKIAASILARLLAKGLLVGIWIPPQEIRELRGLVAQRQKMVRLATQAKNRLQAVIQRHHLVPPAGNPFGASHKAWWQSVSIGKLEKLNLQSDLETLQFAEKQEKQLTEIMEGMAAEEEEIGRLLHLAGFGVVTAVTVWAAIGDIRRFAEPQKLVGYAGLGTRVHDSGMTMRSGKITKAGRRDLRTVLIEAANVVANSHPHWKAELARLEPRLGRNKAIVAIARKLLVAVWYVLQGKTDKYAEPEAVAQKMLKFAYQVGKTKRPKGQTAAQFARIRLDALGLGSELTSIPWGSKKPIPLPPSNLLEKKAMP

SEQ ID NO: 94504 - protein, 358 aa, unidentified
MESILYAGLDVHKNSIEVALAEGGYEGEVRRYGRIGGDLDSLDKVVRKLVSTGKELRFVYEAGPCGYEIYRHLISRGYECVVVAPSQVLRRSSDRIKNDRRDAMALARLYRAGELTPVYVPSPEDEAMRDLVRGREDAKRNERKAKQRLGAFLLRHGHRYSGRKNWSQAHMRWISDIRMPHPAQQITMHEYITTINECSDRVARLTDQIRELLATWRMAPVVMALQSLRGVSLIVASTMVSELGDLGRFANPSELMAYLGLVPSENSSGERNRRGKITKTGNNHARRALVEAAWAYRLPARVSRVLLKRQEGLPQQICDISWKAQLRLCGRYKSMMAMGKIKQLVITAIAREVTIPAK

SEQ ID NO: 94505 - protein, 377 aa, unidentified
MQKPSTIDIDPVIYLAIELSASTWLVASKIPTSEKTGLHRMEAGDSQALLALIADLRKKVAAKLGVEASVMSCFEAGRDGFWLHRLLSEHGVINHVVEPTSILVNRRARRAKTDRLDAQGLLRILAAHAKGDHDVCSVVRVPTIEEEDAKRQHREREHLVQERVRIENRIAALLTTQGIRKRPSLRSWEKDMEEMRTGDGRPIPSLLRAEVNRLRRRLVMTLEMIRELEAEREQALQTQDDMASRMIRALCRIRGIGDNFAAVLTREVFYRPFQNRRQIASYLGLTPTPFQSGGMDRDRRISRAGNARARKTLIQLAWLWLRYQPDSSLACWFRERVGNLQGRTRRIAIVAMARKLLIAIWRYATDGIVPEGAQISI

SEQ ID NO: 94506 - protein, 345 aa, unidentified
MEPMYYIGLDVHKRKISYCVKDSGGKVYSEGSLSATRLDLDVWMKTLPQPWSAAMEATMFTGWIYDHLQPHAAALKVAHPLMLRAIAAAKKKNDRIDAGKICDCLRCDFLPECYMASTAIRERRRTLRYRNLLVRQMVQMKIKISALLMEAGVSYNKQRLHKAGYFRELLATNPDIDEGLCSLLRLCRETVVRLGKTESALVRSLERDSLLVERVERLMTIPAVGPITALTWALEVGDVQRFSSIKKAISYCGLCGAEKSSGNTVQRTPLSKQRNKHLQTTLIEAAKMAPRNSPELAMLYDKEKQKGNANRATLAVARKLVAYLMAVDRGQRNFQIAETSSNIAA

SEQ ID NO: 94507 - protein, 342 aa, unidentified
MFYIGSDVSEKSSYIYVTDAKGKKIEGHEIPTDKDGYQQYFKKWVGKPVKVAVEAGGHSRWIHDTLKKLRISVYIVNPNKVKLIAKNKKKTDKVDATFLAKLLRIDELPERVYVAEGDSRELRDLLRSRHQLLKSSTGLKNHLRGMLRQEGIKLKAKAFDDESIFTKLQKNKSVPKHLSSIVESYGKTIAELQKQKEALNDLIATYENEDVDLLKSVPGVGEVSSKTYYAAISTIKRFKRAKQLTSYCGLVPSVFSSGERAAYGHITREGRSEVRHVAVQSAYAVLRSTNSESKPLRKWYERIAERRGGKTAVVALARKLTEIIFYVLRDRRPFDARLLQTS

SEQ ID NO: 94508 - protein, 458 aa, unidentified
MRRNKSTDRDRRTMAVVHPNAAAIDVGATMHMAAVNADRTPEPVRSFGTFTTDLRRLVDWLSECGVDTVVMESTSVYWIPIFELLDARGFAVFLVNARDAKHVPGRKTDVSDAQWLQRLHSFGLLRASFRPKGQIAELRAYLRQRERLLEYGASHIQHMQKALTEMNVQLHHVVTDITGATGLRIIRAILGGERNPAVLARMRDSRCHASVETIEKALAGNYRAEHLFALEQALALYDTYQQKASACDTRIEAVLKELSIRRGRQAGPLPSPRWYRSRQQNSLLFDVRAALFALLGKDLTQINGLGPYLALKLIAECGDDLSAWPSAKHFTSWLCLAPSNKISGGKVLSSRTRPSGSRAAALLRLAAATVGRTDTALGAFYIRLSARIGKAKAVTATARKIAVLFYNAVQHGMEYVDPGASAYETRYRARVIDNLHRRAKAFGFVLQPIDQTPSIAVS

SEQ ID NO: 94509 - protein, 389 aa, unidentified
MAEITRVLFALIVRVGVDLAKNVIQVHAVDRTGRRVVSRAIKREQFLAWCAQLPAGCLVAMEACSGAHHWARHLRVMGLDARLIAANFVSPYRMEGRSGKNDMTDAAAICEAASRPTMRFVPNKSCEQQAVMSLHREREGFKEERTACINRIRAVLTEHGLTFGKSPKVLRAVLADVIEDASNEMTGLARLVVQRAFEHWRELDEHMKWCDQQIGAHVRGSEDAKRAAKIIGIGEIGASALIAGVGDFKQFKGGHQFGAWLGLVPSQNSSGGKASLGRITKRGDDYLRTLLIQGAKSAVMSAGKRDDATSKWLQQLTARVGWQKACVAMANKNARILWAVMTREAGFDAKHVAVKPPGKCKAPAAPGKPPTLAAQVAALKLTQAAACIA

SEQ ID NO: 94510 - protein, 344 aa, unidentified
MEPMYYIGLDVPKRKISYCVKDSSGKVCAEGSLPATRLDLDHWMKTLPQPWSAAMEATMFTGWIYDHLQPHAAALKVAHPLMLRAIAAAKKKNDRIDASKICDCLRCDFLPECYMASTAIRERRRTLRYRHLLVRQMVQMKIKTSSLLMEAGVSYNKQRLHKAGYFRELLASNPDIDEGLGSLLRLCRETVVRLGKTESALVRSLERDPLLVERVERLMTIPAVGPITALTWALEVGDVQRFSSIKKAISYCGLCGAEKSSGNTVQRTPLSKQRNKHLQTTLIEAAKMAPRYSPELAMLYDKEKQKGNANRATLAVARKLVAYLMAVDRGQRNFQVVETNCIAA

SEQ ID NO: 94511 - protein, 430 aa, unidentified
MHNKNYISVGIDVGSAFSFMTILAPDETVILKPFKITHNNKDSLERAVSEIKKAEELYSLESRIFLESTGIYHFPLFCYLVDCGFNASIINPIITHSTKNGNIRKVKNDKIDSKGIAKLGLSKDIPVSQFPAKLVLELRSLTRKYYDLTDERSAHINKLKGDLHTVFPQYLDVFCDVTGKTSTMILRQYGTPDKILRGHKKTMIEKISKASRKGLAKASERYEKLCAAANAAKTFGCQIDSIYFNIFLTLDLVEKLDSALDSILNRIRQLITFNKNEKFIQQIKLLNTIPGVGLLTAVTIMCEIGDFSAFRNPKQLFAYFGLDPEVNESGKFVGTQLHMSKRGSRIARRAIFAVALASIRTKRNGEGINPYLRKYYELKSGQKPKMVAIGAVMHKVCNIVFAVLRDEKAFELRSPEEHCKQYQRPALAAA

SEQ ID NO: 94512 - protein, 306 aa, unidentified
MSKNTFHAAFDETEVVIFKNTVRGIEEFINLLTKRGCMKNNTEIGTETTGVYHLLLCEQLRSRGWNMKVVNPLITYRMFKSTLRHAKTDHNDALAIRKTMMTGAGYTYTDTSEILALKTLVQEREALCRMRAETKQRIHAHKIRAKAAGLEFHDSFSGSIKLLSYEMKEIEKQMSKYASPTQTLLRSIPGVGKVTAATLVAYIGDIHRFSSPEKLVAYIGLDCRVHESGTSIHGKGYLTKRGNRYLRYILFNAAFIAKRKNRVMKEYLEKKMSEGKHYFSALCAVERKLVHLIYAVWKRGTPFETH

SEQ ID NO: 94513 - protein, 422 aa, unidentified
MLEETHDNDQIIQRVAALDVGKAELTCCIRVSGPGGSGRRLQEVRTYQTMTRSLLVLADRLAELGVTRVVMEATSDYWRGAFYLLEAHGFETWLVNARDVKHLPGRPKTDTLDAVWLCKVAERQMLRPSFVPPRPIRQLRQVTRYRADLVAARTAEKQRVEKLLEDAQIKLSVVASDIFGVSGRAMLAALVAGERDPKRLAQLARARMRAKLSLLEEAFTGFFTDQHAFLLGKMLGRVDALDADLAELDAKLQELIAPLAHAVERLDEIPGVGQTAAHLLIAEIGADMTRFPTAGHLVSWAKFAPGVKESAGKRKGRGSTGHGNPYLARVLGEVAVAAGKTDTFLGERYRRIARRRGKKRAIVAVGRSILVIAWHLLADPEAHFHDLGVGFYDTRIDPDRAKRNHIRQLEALGYKVTLEPAA

SEQ ID NO: 94514 - protein, 339 aa, unidentified
MQTHIGVDLHQRFCYLTAVDASGKTLKQSQVVNEGAALRAWLQQVPGPRHVVVEASGFWPAFARAVAPEADKLVMVHPQRVKAIASARLKNDKVDSATLAHLSRADLLPEAWMANQRTQQVRLLTRLRITLGQQRAKARNQLQAVLHQEGFLKPVTDVFGKKGRAWLAGLALSPAARVVVEVWLQVIDQMDGAILEQETALKKMAEADARARWLQTVPGIGAYSAMVILGEVGEIERFGTKRALASYAGLTPSVRESAGKRKRGGIGHHGSGTLRWIMLQVAQVACRHSPAAKAWYVRLKQRKPAQVALIALARKLLTAVWALLRHGVCFDESLFAGQS

SEQ ID NO: 94515 - protein, 332 aa, unidentified
MKYKVFIGIDVSKLTIDVHLHGIGASKTFSNEEKGFALFLSWVKKHSKQSEPAEMIICFEHTGMYSIKLATYLNDIGIPFAMLPALQIKQSIGIRRGKNDQIDAQRIAEYAWLHRETIQATLLPAKSILKLQSLLTLRNRLVCDRGGYEATWKEQKKALEGKEHKEIFQVYKSLIMNLTVQVKKIEEQIKAVIESDEAVKLNYQLLTSIKCVGPVLAANMIAYTHNFTRFATWRKFACYVGTAPFEHQSGTSIKGRTRVSSLSNKQLKKLIHMVAICACAYNPEMKSYYKRRVSEGKNKMSTLNVIRNKMISRMFAVINRGSGYIDLMKYAA

SEQ ID NO: 94516 - protein, 411 aa, unidentified
MEVVHERCAGLDISKRDAKVCVRLAGSGRRKTTETVTTWGSTTTQVLALRDHLVAARVTCAVMEATGDYWKPFYYLLEDAGFEVQLVNARHVKNLPGRKTDVSDATWLAQLGAHGLVRGSFVPPEPIRQLRDLTRARTAITRERGREAQRLEKLLEDAGIKLSSVASDILGVSGQAMLEAMIAGQSDPAVLADLAKRRLRSKIPALTEALTGRFTAHHGFLARVHLDLIDQHTAAIAEITARIEVVIEPFRGFRDLIATIPGIGPLTADVVVAETGADMTRFPTAGHLASWAGTCPGSNESAGRVKSTKTRPGNPYLQGALGAAAMACSQNPNTYLGARYRRIASRRGPQKANVAIQHSMLIAIWHMGRTGTLYEDPGADFFTRLHPDRAKTRALHQLEAMGYHVTLDRVG

SEQ ID NO: 94517 - protein, 341 aa, unidentified
MNDSKTVVGVDIAKRVFQLHWLDEESGEIVSVQLKRERFVEHFAKRAPCVIGMEACGGAQHWARKLTVMGHQVKLMPAKVVRPFVGGNKSDAHDARAIWTAVRQPGSKTVAVKTEQQQAILALHRMRQQLVKFRTAQINGLRGLLTEYGEVMPRGKAGVKTGIAAALQRLADRLPAIVIDTLREQWERIGQLDVQIGEIERRLKAWHKEDTACRRIADIPGVGLLSATAAVATMGDAKAFKSGREFAAWLGLVPRQTGTGGRIRLLGISKRGDTYLRTLLIHGARSVLTHTKEPEPWVIELRQRRPMNVVVVALANKMARTIWALLAHERTYQKKFVSQPV

SEQ ID NO: 94518 - protein, 325 aa, unidentified
MAQKSVTVGIDISKRKADACIRTLGASFSKPSTPAGQAEMVEWLLENGVGLAVMEASGGYEREWAAALRESGLEVSIVDPKRVRYFAKSAGRLAKSDPIDAEMIAWYAEIFAAKTRKQAHDADRELLDQLMTARALLKRVETQIGQLCEHKQPVVVVKVQQALAKTIKAQLAKLEAPIAALVQANAAFAERDKIIQSVPGVGSVFAAGAIAWLPELGHVSNKEIAALVGTAPYVDDSGERKGERHIKGGRREIRDLLYMVTLGAATQHNPVFKAYYSRLLAKGKLKKVALVACMRKLIVILNVMLARHQKWNPPALGEAVTGSSP

SEQ ID NO: 94519 - protein, 411 aa, unidentified
MRRVIGIDVHRTFGEVVFWENGRLRHAGRIDMTRTALQGFGKTLLASDEVVVEATANSMAVSRVLAPFVARVIIANPLQVKAIAQAHVKTDKIDAGTLASLQAAGYLPQIWTPDAATERKRRLVARRYQVVRHRTRIKNEVHSILHAHLIPKCPHADLFNARGRTWLTNQQLPDDERAAIDRHVRELDRLAEDLALLDREIAQDAIDDPAINRLMTITGVNLAVAAGIVAAIGDIGRFNSPQKLVSYFGLNPRVRQSGLGVAHHGRISKIGRSHARAMLVEAAWAAAKAPGPLHAFFVRIRARRGHQIAAVALARKLTVLCWHLLTKGEDYLWARPALVANKTRAMQLQAGHPQQKGSRRGPAYAYNIKALRDREMLIAAQAEQSYERFVSQWKARRPKPGARAPQSGRTK

SEQ ID NO: 94520 - protein, 346 aa, unidentified
MCSLPVFVGLDYHDSSVRVVVQDTDGSEMGNADRTNHWKAIADFGDRFGRPVRAAIESCCGAADLAEELVSCAGWSVALAHPGYVQRMKQNPDKTDCQDAQLLADLERVGYLPRVWLAPRYIRELRHVVRYRLQLTEQRRATKLRLRALLREQRCHAPDGLNAWTKAWQHWVRHTAELSAQGRWLVKQHLRELARLAIRIHEVEKRLEHLTTNDVEVQRLQQQPGIGPVTAWTMRAEIGHFDRFRTGKQLARFCGLSPRNASSGQRQADAGLIRAANPALRTVLIEAAHRLVQYDPSWQKFAQRLRARGKPGSVVAAAVANRWMRRLYHEMKTPSGELAVAVGPAQ

SEQ ID NO: 94521 - protein, 372 aa, unidentified
MNYNTVYVGMDVHKESFTLCAYTIEAEKGSHFQKTEADYKNVLKYLEFLRTVYGNDANFICGYEAGCLGYTLYHQLTANNVNCVILAPTTMLEQRSKRRIKTDKRDAEIIGKCLAQHNYSPVHIPTTTDEETKEFLRMRDDHKLALKKVKQQILAFCLRHNYRYDGNSHWTAAHIKWLKSLNPEALYKEILDEYLLTYTTLSDKLERLDKRIEELASKDEYKESVKKLCCFIGIKTHTALSVLVEVGDFQRFASAQNFASYLGLVPGEDSSGDGQTRLGITKAGNRHVRMLLTEASQCYARGQIGYKSKELKSRQAGNSPQVIAYADKANERLRRRYYKMVLGKSKKHNVAKTAIARELACFMWGMMTDHIA

SEQ ID NO: 94522 - protein, 422 aa, unidentified
MEVIHPRCCGMDVSKRDAKVCVRIQQGSRVSTTVTSWSSVSSAILELADHLLEQRVSLVVMEATGDYWKPFYFLLGEAGLEVMLVNARQARQIPGRKTDVADAVWLADLAAHGLLHGSFVPPKPIRELKDLVRTRTILVRLRGEEAQRLEKLLESAAIKLSSALSDLVGVTGRRMLQAMIDGEDDATVLAGLAHSNVKASAEELREALTGRFSDHHRFLAKVHLDLIDSYTAQISVVADRIEACFTEGNDPGAGDLAVKRALLTTIPGVSILTAERILAEIGADMSMFPTAAHLTSWAGIAPGANESAGKVKSSRCRPGNTYLKGTLGIAALSASRTKNTFLSARYKRIASRRGHQRALVAVQRTILTSVWHILTTGQPYTELGGDYYAKRRPGAVISKALQQLRTAGLTITFTGPTQAVVT

SEQ ID NO: 94523 - protein, 365 aa, unidentified
MKEHSIFVGMDVHKNSIDIAIAEKGRQGQLRHFGTIESSLAALDKVVRKLVSNGKRPCFVYEAGPCGYQIYRHLSAKGFDCAVVAPSLVPRQSGNRIKNDRRDSLMLARLHRAGELTAVCVPHDEDEALRDLTRAREDAKIDEKKAKQRLLAFLLRSGHRYSGRASWSQAHRRWLADLKMPHRCQQIVLQEYIEALSHCSQRLQRLTDQIRQLVPQWRLFPVVQALQSLRGVSLIVSATTVAEIGDFKRFQNPQQLMSYLGLVPSEHSSGEKTRRGPITKAGNTHVRRMLVEAAWAYRFRARISRVLLQRQEGLPQAIRDMAWKAQVRLCARYRRLWAKGKIKAVVTTAIARELCGFIWAIATAV

SEQ ID NO: 94524 - protein, 400 aa, unidentified
MLSIGIDVSKGKSTVCGMKPGGEIVYTPFEIQHTREGMSELLSLLRGSGEEVRVVLESTGSYHCPVVAALLENGIFVSVVNSLRMKRFCSQSIRRVKTDQIDAMQIALYGLAYWQELQPTRLPENTYRELQLLARQYYQMTSLLIKAKVDFNALCDQVLPGMQELMNDHAGRHKLSDFVLRYRHTTHILEMGETRFRKDYCKWAEKKGYRNRERMAALIFATAQNGIPVLPNAPSTQIVITEAIRVLHTVEASRDAILTQMQALAKTLPEYSLVREMPCIGDTLAPRLIAEIGDVRRFHSKRALIAYAGIDAPPYQSGKFCANNRHISKRGNRYLRKTGYEVMQSYVMHKPANDPIFTFIEKKRGEGKSGKLAMVAGLNKFLRVYYGKVTELYRSLPAIE

SEQ ID NO: 94525 - protein, 338 aa, unidentified
MNSLPVFVGLDYHQDSVQVCVLDQAGKRLLNRSVANDAAEIERLATRYGQPRRIAIEACCGAANLAEELATVRGLPIELAHPGYVNRMKRSADKTDFGDAHLLADLTRINYLPKVWLAPESIRQLRRLVRHRAQLVSRRKDVKLRVRALLRENRLRCSEANAWTQAWQQWLLQEAALMSHDRWIMTDHLEEIRSLSARVVAVEKQILAATQDDPVVKRLLALPGVGMVTAVTLRACIGRFDRFDTGKQLARFCGLSPRNASSGARQADAGLVKAGAPELRLVLIELGHRLAWWMPGRWQELARELQRRGKPRNVIVAAVANRWVRWLHHELKRDPTSY

SEQ ID NO: 94526 - protein, 341 aa, unidentified
MNSTVIAVDLAKSVFEIAVSDRPGVVSERHRLSRGQFATFFANRPASTVLLEASGSSHDWARRIGRFGHQVLLIPPHLVRRYVNGNKTDRADAKALLEAYRNAEIHFVPIKSEAHQAVTSLHRIRSGWMGTRTARMNETRGLLREFGHTLPIGAARFIERASAVIGDLENNLPQPLRSTLELILAEVLELETRIDKVEKLIGAVARETPVVASLRTILGVGLLTSTYAWASIVDAKRFPSGRHLAKSLGLTPTEHSSGNRRWLGHITKRGDRYLRTLLVHGGRSVLRAAKLKKNPSRLEAWALDREKAIGHNRAAVAVANKLARFIWGVWTKGVDYQPQAA

SEQ ID NO: 94527 - protein, 449 aa, unidentified
MHGAHIGGQRAAAFFKLVADLDPRRVLLVGIDVAKATWFVVVSDLTGAVVADGVRLVADRAGLAELERVIAELRCQLAAELVVVGIEAAGHQHQGLTAHLADRDGLHVRLLNPGAVAAIRKQQGNRRRKTDWLDAAAVCELLARGEGTLVHLDASMAASLRPLWSGRKDLVDTRSRLRQQAGALVDCLWPGFSAADKQAGVSPVLCDLFKTKAGRVIAGLLAEGWTPARFTAAPTTQLQAIFAARGCRLTRPLASRLRARAAGALPAHPAATAGKAAALAGMLGVLDGIDAEVERLEAQMAPLLAATEGAKLTQIRGVGVVTASGFVAFVGRTDRWVEWSKVWRAAGLDPARSQSGAKDARLGISREGSAWGRRALLDLAAAVCRQPGRWGDGFRARTTQGRKPAKVALVATGNSIGRTCFALMRSGADFDPAWETKRTRSSKVGDQAA

SEQ ID NO: 94528 - protein, 363 aa, unidentified
MNEDNAVAAGAANTIVSIDLGKFRSVACLFDPLTGGHRFETIPTTPSAVHDLLVACSPATLVIEACSVSGWVSDLAGALGIAVEVANTNGEAWKWKRVKRKTDRDDALKLAKLSAGDQLPTVHAPKLDVRQHRALIKYRHGLIDRRTGIKNTIRSLLDAQGLSLPGRSKGWTLEAIAELAKLSKPLSECAISELWRGQLAMELAMLQQLQALIREADRKLDALAAQDDRVRRLKTIPQVGARLAELVVTTLDDAKRFKSAAQVSAYAGLVPKQYQSGQMNRLGRITGQGPGLLRRVLVQVAWGLQRREGTRGRAVFERLCHGSRTRRKQAAVALARKILVWCWALLRDGSVWDESQNTPPQLT

SEQ ID NO: 94529 - protein, 358 aa, unidentified
MQRNKISFKGQKIFVGIDVHAKNWEVAIAPEVGIVKRHSQKPSAKELFDFLKKNYPDGEYQAVYESGFSGYSTYYALKEVGIECMVIHAADVPTTQYEEVMKTDRVDAVKLVRSLKAGLLKGNYIMEKQYIDDRSVVRIRRTIQKQLSGYKSRVKHLLHCHGVEFPERFSKKQTHWSRAFITWLMKDVCLMSDTRASLDLLIRQVEVLRGTLLEATRQLRKMSQTERYKRRHDLLRSIPGIGLIVTMCILTEVCDVKRFHNENQFAAYLGLIPTSHSSGEKIVHGEKTFRGNKQLGPMIVEAAWITIGRDAGLGAQYYQYKKRMEPQEAIVRIARKLSNIIFSVLKNEKEYVPYQTGN

SEQ ID NO: 94530 - protein, 422 aa, unidentified
MMDKERRWFVGIDWGSEEHVVSLCDDAGKKIGQRKFSHGGIGLTDMIAWLLKASGGKPGEIHVAIETPHGPIVEVLIERGFNVYSINPKQLDRFRDRFTVAGAKDDSRDAEVLADSLRTDTRAFRKLSIAEPVIVELREWSRIDEELKVEHGRLTNRLRHQLWRYYPQMLELADDVGANWFLDLFEAVPTPEKAASVREKTIARILKSHRIRRFDAAHVLSELRKPALTVAAGTIEATTARIRGLIERIRIINGQLADAQRQLDRLCKKLSDPVADEDGETAPGQKNEPRDAAILDSLPGVARTVLATLLAEASDTVQRRDYHALRALCGSAPVTRRSGKSCMVVRRYACNQRLRNATYHWAQNAIQHDATSRAKYDALRAKGHGHARALRSVIDRLLNVACAMLNSGTLFDPEFASKRATG

SEQ ID NO: 94531 - protein, 397 aa, unidentified
MKRTTKYVAFDVHQATTVASVREEGGQVIARSVLPTDSGALTEFVCGMRGARHVTFEEGTQAQWLYELLAPLVDRVIVCDRRGAPRQGNKGDQVDADQLSELLRRGALRAVYHGSADRATLKELTRTYRNLVEDATRVMLRLKALFRARGIATAGTAVYHPRSRARWLAQLLEGGARFRAEALYAELDLLRQLRPKAKAVMVTEARRDPAWRVLRSIPFLGPVRVALLLATMQTPWRFRTKRHLWAYAGLAVVTRSSADYTLHAGAPVRRRRAPMTRGLNRNHNRVLKDVFKGAATAATARPGPLQDFYHGVIARGTREELARLTLTRKLAALTLRLWKKRRALRSDQTDHTSALAPVPRGGGGRPLGDRSQYRDTGAEGSLAILVRPVGSRAEVLA

SEQ ID NO: 94532 - protein, 376 aa, unidentified
MEHDSTVYVGLDVHKESITIAYAVGMGDVELLGRIGTTKGDIDRLCKRLRSKGRRVHVVYEAGPCGYGLHRQLVAEGFECMVCAPSLIPKKPGERVKTDRRDSIKLVRSLRAGDLSAVHVPGIEDEAFRDLARAWVSAKDDLKQARQRLKSFLLSHGVRYPGKADWGPSYRRWVSQHSFSNDWQQLAFEEHRRTLGDRMAQCERLEAALRDSVVNWRFYPAVLGLQAMRGVQFTTAVGMLAEVGDLSRFEHPRQLMAWLGVTPSEHSSGDKRRQGSITKTGNSYARKLLIEAAWSYRHQARVSENIGRRHQGLPKPIIDRAWDAQVRLCRRYRKLAARGKNANTAVVAVARELAGFIWDITRLSMSLAIPRTGPTA

SEQ ID NO: 94533 - protein, 376 aa, unidentified
MKRLSGGIDVGSESHHIIILDEEDNFLYNQKVTHKLNEFTENIKLFRKIEKKEGGKISFALEGKNGYSNPLDKILLDQGFTLYNVDNLKLKRFREAFAGEWRDDERDSLMLSKMLKLKDYINSEKEKVFVKIEKPSLVTESLKLLSRHQQTLINEKVRLTNRLRKKLLEVCPQILELGKVKNKKIIAILVKYPDFSKYKRITLKSLLKIKGIGKIGAPFLLKRLNNIEYMPGLTDIYKTIILSYAKRILELQKEIKDIDKKLDGTGEKSKEVNHLKTIPGVATKLASRLIGEIGDINRFPSEKQLAIYCGIACLDNNSGKVTKAKAVYKANKICKQTLITMAGGSIRLSFQCRAYYLKNGRKGKAIIMPFAAWPGK

SEQ ID NO: 94534 - protein, 416 aa, unidentified
MLRIVYPICCGLDVHKSFVFACIAATDENGVTTYKDRKFSTFTGELRELAEWLAQHNCKDVCMESTGKYWIPVWNILETTCNLVIAHPKYVKAIRGKKTDKKDAKWIADIFKHDLVSGSFIPPADIRQLRDLTRYYRKLVGFNTGEKNRAQNCLTISNIKLDDVFTNVFGKSATAITNRLLEHPGETFDVAPYVHGRCKTPIPEIRAAIDGSICAEQAEKMKIIRSHMGNLELCKAELESVVLGLAKQYLPQIELVLTVPGISDPFMAISVIAEIGVDMSVFPSAKHLCSWAGLTPQNNESAGKKKTTRISHAGAYIKPLLVQFAVAVSKSEKHPEIRNRYLSLKKRRGHKKAVIAISRMLLTAIYHILKKNEPYNAELYRKADKPPEHRQVSVDEAVYILQRQGYLITAPQAVTE

SEQ ID NO: 94535 - protein, 333 aa, unidentified
MKIIGCDFHPSFQQIAMVDTETGEHTEKQLTPSEAVQFYGQLKGQVVVGMEGCGNTLWFERLLAELGHELWLGDASKIRALEVRKQKTDRRDAELLLRLIVEGRFPRLWVPSLEQRDLRQLLLHRHKLVGMKRQVKNQLQHLALNQGVQRKSKLWSRTGRTLLEELPLSGWTARRREELLLLLDDLEQKIGELDVAVERAAEKDTVAPLLKTHPGVGPVTALAFSLTLGQIDRFAHSRQVVSYLGLNPSEHSSGGRQRLGSISKQGNPMLRSLLVEAGQTAARLEPELKRAYQRLKRRKHSAVAKVMVARKLAVRLYWMWRMEQPYKRHSHAG

SEQ ID NO: 94536 - protein, 344 aa, unidentified
MQHYVGLDLSVKETSVCIIDKAGKVIREVKVATKPVPILAVLTEEALAIERIGLEAGPLSQWLYSALAEAGLPVICVETRHMKAALSAQINKSDRNDARGIAQMMRVGLYRPVHVKTLASQKRRMLLTSRQLLQAKALDIENDLRGTLRNFGLKVGMVGTVKFEARIRELVADHPDLAAIVEPLLIARKVLREQLGVLHRQLLEIVRHDEVCRRLMTTPGVGPVVALTFRATVDVPSRFTSSKAVGAAFGLTPRRQQSGEIDRMGGISKCGDAMMRGMLFEAALVLMTHSRKWSWLKAWGVKIARHRGMKRAIVAVARRLAVIMHRMWVDGTEFRWTRKEAPAT

SEQ ID NO: 94537 - protein, 399 aa, unidentified
MLAVGIDISKSKSVAAILNQDGSMHTSPFEFHHTQPELDAFIKYILNSNQSATILMENTGHYHYPVLKAFREAGLPVCMVNAYQIKKFGDTDLRKAKTDKKDAVRIARYALEKSYSLVPYTSMEQKYEDLRFLARQYNQRMLTLKTNKVFLLNLLDETMPGITNILPLTTRTPETSLSVLFINRFKSYDRIKKMGKSRFLDAFEKIARKSRNRQTKTYGLAIYEAALRNITTRGENEYTLAAQDQCLELVCESQKAADSIILKMQTLAETLPEYAVLRSMAGVGDRLGPLILAEIGDIRRFHSGKALNAYAGNDAPPYQSGIFESHNRHISKRGNAALRKYCFEVMQALKLTRPQDDPVYLFLLKKEQEGKPYNVAKMAGVNKFLRIYYARAMETLKQQ

SEQ ID NO: 94538 - protein, 456 aa, unidentified
MKIPQSTIRLLTWRLVKILLNREVSTMKSNTQNAKIEAITEKTLVLGIDVGSETHYARAFDYRGIEYSKKPFKFSNTEAGFVTFKEWILDLKEKHEKDKVVPGMEPTGHYWFNLGKFLQDNEMKPVLVNPHHVKKSKELDDNNPTKNDRKDPKVIAGLVREGRYMIPYLPDGVYADLRTASNIRFQLQAELTRIQNRISRWFNIYFPEYKTVYGKPDAKSGMLILKQAPLPEDILTLGIEGVNQIWRDAKMRAVGKARAKTLIEAAEHSVGSKEGAVSARMEIRMLLEDYESRNIRLQEVMTLIAELVNQIPMAEKLLEIKGVGIKTVSGFLAEVGDISRFNNPKELQKLAGLALVENSSGKHKGRTTISRRGRKRLRYLLFEVAMSLVAKNPEFRELHTYYTTRRLNPLKKMQSLMAVAAKLIRVFYVMLTKGVDYDPKKMVGDIKRPAVYLQAA

SEQ ID NO: 94539 - protein, 344 aa, unidentified
MTYYAGIDVSLRTVNICVVDDKGEQVAETKLSSDVQEIITYFDELEYNLEVVGLEAGTLAQYLTYGLQAADFDVVCMEAQQVKAALSAMRNKTDKHDARGIAQLLRSGWYSQVHVKSMQSHHIRMLLTSRRTVLDKCIDLENEIRGLFKIFGIKLPPKLGHGSFDKTVRAVIEADEKLSHALLPMLDARLVLYETFRVLDNRTRHLAWGDEICERLMTAPGVGYVTALTFKSGVDDPTRFKRSRTVAAHFGLTPRRSQSGEFDFDGHISKAGDAEVRRTLYVAANSVLTRSSRWSSLKAWGMKLKKNRGHKKAVVAVARKLAVILHRLWIDETQFQWGMERVRS

SEQ ID NO: 94540 - protein, 347 aa, unidentified
MKKIAYLGLDVHARNSVLGNMDDNGTFLGNRSFTTSEANIINALNAINAKVKYLALEESTLAHWAAQVASPYVNQVIICDPKENALIYKSSNKKDGIDTRKLCRLLRLGELKHVYHPEDDQRAIFKAAVQHYHDLSDQLARFKQKIKAMYRHWGVIDVFGDSVYTAKGRDRHLQQIKHRPIREQLQRLYHLVDHSTAMKKSAKKSMKDLGRKYPEICQFEKIPGIGCVGAHTFDAYIQTPDRFAKVSQLWRYCRLGITDRSSDGKPLGFKRLDRSGIAELKSLSYRAFMAAMKGNSEVKRFYRQSLQATHSRKHARLNTQRKILSVMLAIWKKGDAYRPDLFLAPSK

SEQ ID NO: 94541 - protein, 370 aa, unidentified
MAEPSTLYVGLDVHKDHIAVAHARAPRDADVVYVGPIGTREADLDKLLRRLHGHAARVVVAYEAGPCGYGLYRQLTARGVACQVVAPSLIPKKPGDRIKTDRRDAVQLARLLRAGELTAVYVPTIEDEAVRDVARARAATIRTQKAAKLRLKSFLLRHGLQYTGRATWNAAHLRYLAKVVCPTPAQQIVFQEALRAVTEQTDRLTRLDDHLRDVAATWRLRPRVDAYQALRGIQPHTAITVAAELGDLTRFDTPRQLAAFVGLIPSEYSTGLSRRLGPITKAGNSYARRALVEAAWAYRYPAKVSVHLQRRLEGCPKSVQDIAWKAQVRLCRRYRRLIAAGKHPNVAVTAIARELLAFVWAIAREVPLRA

SEQ ID NO: 94542 - protein, 337 aa, unidentified
MDYFAGLDISMDETHICVVDRDGAVAYEGKSASTAEAIADKLSDAPSCHRIVFETGRMAPILFHGLSQLGLPAVCVESRQAYQALKSLATHKTDRNDARGLAHLARTGFFKPVHVKSLSAHAVRSLILARKKLVGQRVTLENQIRGLAVVFGIRLPRALTAAFIDQALKASEGVAGLSAAMRGLIGARTAVMSAVAAIDADMRRMTRASEACRRLMTIPGVGQLTALAFVAAIDDPSRIRRSRDVGAYLGLVPKRYQSGEVDYVGGISKCGDRRVRTLLYEAANVMLTRYNGQLKLKEWAFAIARRSSMRKARIALARRLAIIMHAMLRNGTEFVVA

SEQ ID NO: 94543 - protein, 408 aa, unidentified
MELKPMHRRVIALDVHQAKITACAVIEHDDGRVEVTKRDFGAFRRDRRALAEWALQIGPEVVVMESTGVYWKSPFAALEAVGIIAWVVNARHVKAVPGRKTDMADAQWLATLARAGLLRASFIPPARMRELRLVARQRQKLVGMCSAEKNRLHKVLVDAGIRINVLVNDIHGQSARAMVKALLQDRPLHEVLDLKGRLRASRAELFEALSTEQLSATHRFVANEILQHIEQIEQRIALMDQYLLQGLQPWQAQLKLLQTIPGIDEQGAAMLLVEIGADMDAFGSAERLASWVGICPGNNESAGKRKSGRIRRGNAWVRRLLCEFAQAAARTRCAFKDKFQALAIRKGHKKSIVALAHKILRTVYAMLANGAHYQDRAVDYEALNVQRNAPRWIKMLRKHGFIATPAAA

SEQ ID NO: 94544 - protein, 341 aa, unidentified
MDYFAAIDVSLEESSVCVVDDTGKIVREAKVASEPEALAAWFAGSGLKFTRIGLEAGPLSQWLHAGLTAAGLTVILIETRHLKAALGAMKVKTDRNDARGMAQLIRMGWFRPVHVKAVPAQEVRALLSARDLLQRKLHDVELGIRGLLRGFGLKVGKVSKSKYEARIRELAAGHPMLEPVTAAMLQARASLRAEYAKLHRLLLRIVRADAVCRRFMTAPGIGAVVAVTYRNAVDDPTRFHKSRDLGPYFGLTPSKYQSGEVDRTGRITKVGDVMVRTALFEAANVILTRVTRFSTLKAWALRIAKQRGMKRAKVALARKLAVVLHRMWVDGTDFRWRKAAA

SEQ ID NO: 94545 - protein, 344 aa, unidentified
MQAIRTHVAGVDVHRDLLAITVIRGEADKTPEVIQFECKTFTEDLIACGVKLLDLGIHEVALESTGVYWKPIHNVWSTMNINIAVAQAAHVKNVPGRKTDMNDSHWLAELHRFGLIRSSFIPDEIFQQMRSVSRHRTNLVEDLSRVKNRIQRTLEDGNVKLATIVSNVFGKSGLQILDLMATGVTDPTRLAMRITTKIKRKEEARKALTNCLNREHIFLIKELMDQYHYLDKKIIDTENRLIDLSMPYRHLINKLKEIPGFHDILAIGVLAEATDQMDKFPDERKFAAWSGVAAGNNESAGKKKDQNAEKAILICGKYLYKQHMLQNRQRRHFTATNTTGLNLA

SEQ ID NO: 94546 - protein, 318 aa, unidentified
MSAAEVFIGIDVAAAHLDVAVRPSGETWQEANDAAGIAALVARLRALTPTLIVLEATGGLEGPAVGEVAAAGLPVAVVNPRQARDFARATGKLAKTDRLDAAVLAHFAEGVRPPVRPLPDAATQELQALVTRRRQLVEMLTAEQHRARTAVAKVRPQIEVHVAWLRAEIKSLDRALRDAIRASPLWRAQDDLLRSVPGVGPGLATAMLVELPELGTLDRKRIAALVGVAPLNRDSGTKRGKRAIWGGRATVRAVLYMATLTATRCNPVIHPFYERLRGAGKPTKVALTACMRKLLTILNAMMRDQTGWEATHHVLLAA

SEQ ID NO: 94547 - protein, 343 aa, unidentified
MQVVTTIGLDIAKSVFQVHGVDAVGQVLIRRQLKRRAVLAFFQKLPVCLVGIEACASSHYWSRELQALGHSVRLMPPAYVKPYVKRQKNDMADAEAICEAVARANMRFVPTKTPEQQSCLMLHRTRHLFIRQQTAVINSIRAHLAEFGIVAPVGRKGVTELLHIVADPSDKRVPEVARVCLAALGNQLLGLKEQIVEFDRLIMAWYRSNETSKRLHYIPGVGPLLATALAASVADPQTFRSGRNFSAWIGLVPKQHSSGGKDRLGSISKQGDRYLRSLFVAGALSVIRYAKIHGTKHRPWLTALLARRPTKVAAIALANKLARMAWAMMARGERYRNPVALAA

SEQ ID NO: 94548 - protein, 347 aa, unidentified
MGHYAGIDVSLECSSVCVVDASGKIVREGKVASEPVTLITWLGSLGVSLERIGLEAGPLSQWLYGALRETGLAVELLETRHVKTALSTMPVKTDRNDARGIAQLMRLGWFRPVHCKSMAAQEVRALLTARKLVQSKLYDIEMSLRGILRGFGLKVGPTTSQSFAARINHLVDGQTSLEAVAAALLSLHAVALREFKSLEKSVRQISRADARVRLLMSTPGVGPLVALTYVAAIDDPARFTSSKSVGAYFGLTPKKYQSGETDVSGRISKMGDGSVRTALYEAAHVILTRPIKGGALKSWAMKLARRAGMMKAKVALARKLAVVMHRMWIDAIKFDTDKASGCVRVAA

SEQ ID NO: 94549 - protein, 316 aa, unidentified
MTSLCVAGIDVSKARLDVFVLPQRIGLAVTNGAEAIAVLSRRLKTLKVERVVLEASGGLEYPVARTLTDAGFEVARVQPGRVRGFRAFLGRRAKTDALDAELIARFALVMPDEDIRALPSERAEAIRSLAARRRQIVDLATQEKTRLRMARDRFIIESLRGVIAQLAAERIRVEAALTEALEADAETKRKYALLCSVPGIGNAVATTLLTDLPELGTLNRHQTASLAGLAPHPEQSGSSKASAHIRGGRACVRTALYMAAVSAIRCNPPFKAFYKRLVDSGKPRKLAIVAVARKLAILANAILRTNQPWNVNRALD

SEQ ID NO: 94550 - protein, 345 aa, unidentified
MPNLIIGLDIAKHVFQVHGVGEAGQVVFQRKLKRAEVLPFFSEQPAALVGIEACGTAHHWAREIGQLGHEVRLMPPAYVKPYIKRGKSDVADAEAIAEAVSRPTMRFVAVKSAEQQAVLMLHRTRDLFIRQRTMLVNALRGHLAEFGATAAQGIYAASKLIEAAADACRSGLPDIARRCVATLAASLDELGQGIAAVDRQIHEWHRNNETSRRLETIAGVGVITASALAATVVDPHRFSSGRQLAAWIGLVPRQNGTGGKMQLGKISKQGDRYLRRLLVLGATALVRYTRNKPGALGQWITALLGRRPTRLVTVAIANKLARIAWAVIARGEGYRHSGAATAATA

SEQ ID NO: 94551 - protein, 414 aa, unidentified
MFAVGVDVSNGRSTVAVLQTKNKVILKPFEVPHTPEALGRLVDKLNSLDEETKVIMEHTGRYYESIAMFLNSKGFFVSALNPLLFKDYPDGISVHAVKTDKADAVMIAKFGLDKWDELRQYEPMDTTRYQLKTLNTQFQLASKSKTAFTNNLIALLEQNYPGIRKHLTSPARSDGSEKWVDYVGTFWHIDCIRKLSLNAFTERYLKFCQKHGYNFSEEKVAELYRHAHSTIALVPKSDISKLMVKEAVNQLNSVSRTVETYRAEMNRLASQLPEYKTVMGMYGVGPSVGPQLMAEIGDIRRFPQRNSIIAFAGIDPKKDDSGDKVSKTGKSSKRGSPYLRKTLFVIMDVLLRNKPADDPVYQFLDKKRSEGKPYYVYMTAGGTKFLRIYYGKVRDCLKEQGLWDQPMIESGNSD

SEQ ID NO: 94552 - protein, 343 aa, unidentified
MDKISMIGLDLAKNVFQVHGVEASGRVVLRRQLRRGAVEKFFAQLPPCTVGMEACGSAHHWARVIGRHGHQMRLMPPAYVKPYVKRNKNDGRDAEAICEAVGRPTMRFVPVKSVEQQATLAVHGTRALLVKQRTMAANALRAALSEFGIVAAQGFAGLHELMAKLEAPSEEIPEMLRGALLVLARHWQALDADERAIERQIAKAARADREARRLMEVPSVGPMIASTVLAKVPDARVFGSGRDFAAWIGLTGRDHGTGGKHRPGRISKQGDRVLRALLISGASAHLRQQKRRGISDPWLRDLLARRPYKVVMVAFAAKTARILWAMLVKGEPYYDRASASAAA

SEQ ID NO: 94553 - protein, 418 aa, unidentified
MNEEGNTRGSRRYVALDIHKHYCVMAAVDREGRVVLNPVRVEHVDLEGWLKKNLCSTDHVVIESTTNAWHVYDLLEPLVERVVVANPIKVKQIAQARVKTDIRDTLILARLLAANLVPEVWVPPAHVREMRQLLSQRRQLVETHTQIVNRMHSVAHRHHLKHERGKRFNEKNTLWQKDKQLSKTEQFQLELEMENRAYTEKQIGRIGKAVAKMSHQKPWAESMTYLMQLPGFGVITAMTVLAAIGDVQRFGSAKHLASYSGLTGGVDQSGTHLVQKGITKEGRKELRWAMVEVAQRAVKSDPRWTRKFQELHQRMHRNQAIVAVARQLLELVWYVLTRRQPYRHFSQERIAYKYLTWSWQMDDEARDGLTRQQFARYYMMRLGIGHDLTRIALNPKYPRRLASETELLALRPELNQTE

SEQ ID NO: 94554 - protein, 317 aa, unidentified
MSQPDLFVGIDVAKDELVIHLHPTGTLWRVANSKTGLAMLGRKLTRLAGTACLRIGFEASGGYERKLAILLDRLGLTAYLLDPARVRSFARAERQLAKTDPLDAAVIARCLAALHAELTPHVHDPEAIRLAEHVRLRDLAVAQAVQLGNQLESIADTAMRRLIVAQVARLKALALRIEKAIALVIAASPDLAVREALLRTTPGVGPIVAACLLARMPELGRLSSRQVAALAGLAPFDRQSGKTSRPGRCSGGRPSVRRSLYLAALTIARSGKGHLAATTSRLREAGKPFKLAIVATMRKLLITLNAMVKNNTEYRSA

SEQ ID NO: 94555 - protein, 326 aa, unidentified
MNLPAAVLGVDIAKLKFDVCLIKENQKLKHKVFANARHGFEQLVAWLVSHQVGSFHVCLEATGSYGEALALHLHEAGYRVSVVNPAAVKAFAASRLTRTKTDKVDAELIARFGLAQEPPAWTPPAPEVQRLQALVRRLESLMEMRVAEENRLSSGISIDAVRRSLEEHIAYLVEQIKQTEQMIREHINNHPDLKRQSDLLDSIPGIGNTTAALLLAEIVNIKQYKSARQVAAYAGLVPRERRSGSSVRGRVQLSKIGNARLRKALYFPAMTALRCSSFFQQWASGMRERGKCKMAVIGAAMRKLIHLAFGVLKTGKPFDPNWAKTA

SEQ ID NO: 94556 - protein, 320 aa, unidentified
MRNAVGLDISKLTFDAFAMVGNAEYSAKFDNNSKGLNRFSDWLKSLGCQNLHICMEATGNYYEDVADYFAQYYSVHVVNPLKISKYAESRFKRTKTDKQDAKLIAEYCRSAQESELVKRQKPTDEQYRLSRLTAAYAQIKSECAAMKNRYQVAKDEEVAKAYAEIIKSMNEQLEVLKAKIKEQTEKPDCKEGVKRLETIPAIGRITAAVLFQYLTSSKFETSNKFAAFAGLSPQQKESGTSVRGKGKLTKFGNRKLRTALFMPAMVAYRIRAFPDFIKRLEAKKKPKKVIIAALMRKLAVIAYHVHKKGENYDPSRYKLA

SEQ ID NO: 94557 - protein, 408 aa, unidentified
MKTLHRRCAGLDVHSDTVVACARLTARTKASHEVRRFSTATHDLLELADWLAGQGITHVAMEATGIYWKPIWHMLEGRFELVLANAAHIRNVPGRKSDVNDAVWISDLLAHGLIRASFVPPAPIQELRDLTRTRTQLTRELARHVQRIQKTLEDANIKLVSAISDIVGMSGRRILKAMIAGETNATRLSELGSPRLKCSRSDLAVALDGRVTAHHRFLIDHHLGLIEELERRIAAFDARIEEVLAPFRDTVERLITTPGVGRGAAEVILAEIGPDMSPFPTAGHLLSWAGVVPRLDESAGKRRSTRVRHGAPWLKPVLVQCAWGAARAKRTYLQAQFFRLKARRGPKKAAIAVAASILTAVYHMLKDGTFYQDLGADYLVKRDAARTVAKLARRIKDLGFDVQYRPTA

SEQ ID NO: 94558 - protein, 397 aa, unidentified
MYIVGIDIAKRKHEAAVIDGEGTVIIKPFSFTNNCSGYNRLLAMLAKAKLPLDEVSFAMEATGHYWLALFTRLQKEGFRVQVINPVQTNSIRSFYIRQAKTDPRDALLIAEVIRFGHFSESTLHPENIYELRELCRGRHAIVSMQADVKRKVVALLDQVFPEYETAFTNMFGDTSMAILQTCPTPKELSKMPLEELCHLIEVSSHKRFRMAKARELQELARNSFGFAMAGDVFSTMIRLYAKHLDFLKQQVREMDRKIAEIMDTLDTPITTITGIGPTLGAYILSEIGDISRFSSAAKLAAYAGIDPTMRQSGEYNGVRNRMSKRGSPYLRHAIWLAASSAVLHDPALKLYFQKKRDEGKPYMASVGHACRKMVSIIYAVMRDNKTYTPHIPNEISA

SEQ ID NO: 94559 - protein, 361 aa, unidentified
MQSTTIIAFDQHAATTMAAVLLPGQRTPALHPLTSDVPTILRFVAQLARQGAVQCCYEAGPCGFELQRALAAKAIPCDVIAPALIPRRVGDRVKTDRRDAGQLAVLYRAGALTAIHIPTEQEEAARDLLRCREDIRAELLRARHRLSKFLLRHGRRFTGTKKAWSKRHDVWLRAQTWPIPALDHTHRAYLRGVDEALARLRDVETDLRARLTLEPLQARVERLRCFRGIDDLTALTIAAELGDPRRFASAPRTMAFVGLVPSEHSSGRKRAQGGITKTGNAHLRRVLVEAAWHYRHRPFVGAALRARQRNAPEATKARAWAAQQRLYRRYARLAARGKPKPQIVTAVARELTGFVWAALTQ

SEQ ID NO: 94560 - protein, 349 aa, unidentified
MLADELDYVVGVDTHLEEHVLAVVAAATGAVLARQVLPANKRGYQAALRFAGEAAHGARAWAVEGTGSYGAGLARYLAGRGETVLESSRTPRTERRLRGKDDALDAARTARAALASEALALPRNGERREALRLLLVARRSAVDVRREALGQLRGVIVTAPDRLREELRVLPTGRLLERCSRLRHSSTAGADELATRLVLRSLARRIDAATAEAAELEREILAHVRALAPALLDEPGIGPIVAAQLLVAWSHRGRLRSEAAFARLAGVAPLPASSGQTVRHRLSRGGDRQLNRALHTVVLHRRQHDPATKDYIARRIAEGKSRRDASRLLKRYLARHLYRLLQNQEPLLA

SEQ ID NO: 94561 - protein, 354 aa, unidentified
MATTSKQNTFALSSIGIDIGKDVFHLVGFNPEGKVVLRKKIKRLALVSVFENLAPCIVGMEACLSAHFVSRTLRKLGHEPRIIPAIYVKPFVKGQKNDYNDAEAIAEAALRPNLKFVTEKTQDQLDLQALHRVRSRLVSRRTATINQIRAFLIEQGITVRTGAHALRNSLFAILENRADEISPRMNDLIVGLYEDWLWLDERIESITGEIEMISKAEANCQRLMSVPGIGPIISTAVVAAIGTGEAFGRGRDFGAWLGLVPRQYSTGGRPILGRISKRGSKYLRTLFIQAAHVILMRPHNWQKFSFGPWLTEAATRLHRNKLATALANKLARIAWSVLANRKAFDTDRKEVVAI

SEQ ID NO: 94562 - protein, 410 aa, unidentified
MEVLYPHCAGLDVHKDMVVACLRHVVDGTIKREVRTVKTTTKALLDLSQWLASEGCTHIVMEATGVYWKPVWHILEDGDFDLALANAAHVKTVPGRKTDVNDATWLADLLAHGLVRGSFVPNAQTQEMRGLLRTRKQLVRERTSHVQRLQKTLEDANIKLDSVISDVMGLSGRTMIEALIAGETDPNTLAALAHRRIRAPAEELCEALRGRVTKHHRFLLRLHLQQIDIFDAAIVAIDQEVDANVEPFRAAITILTTIPGVSDLSARTIVAEIGTDMSRFPTDGHLISWAGLCPRNDESAGKRRSNRMRKGAPWLKTTLIQCAWSATRKKASYLQAQFHRLRARRGAKKAIAAVAASILTAIYHMLTNGTLYQDLGADHFDRRGKTAQTKRLVAKLQNLGYAVQIIPLAA

SEQ ID NO: 94563 - protein, 345 aa, unidentified
MGLYVGLDVSKQDTAICVRDDLGRIVWLGKTATDPDRIVGVLAKLGQSPDRVVLETGRTSNWLHNALRIRGLPVVCVDARQAHAVLSQMHNKTDANDAALLSELARTGFYRQVTVKRLEAQEQRTLLKARELVIQQRVDLDNTIRGFLASFGVLLPKEPRRFADRVRLAIEGVASLKQIIDPLLALRASVRAAIGELDGRLRRVARDLADCRRLMTVPGVGAVTAFAFLATIDDPARFARSRSVGAYFGLTSRRYQSGERDSSGRISRRGDQTMRTLLYEAASALITRTNPASGAHLQAWARALRSRVGHKKAAVALARKLAVLLHRIWMDGTFFMPRSDAEAGA

SEQ ID NO: 94564 - protein, 407 aa, unidentified
MVVFVGVDWGCGSHAACVIDARGQVLDQFEAGHDREGLATLIKRLMRHGRPGDTRIAIERPSGLLVDALAEAGFIVTPIHPNVVKACRPRYRAVSAKSDPGDAYILADVLRTDGHRLRSLQPQSDAIKALRGLVRGRDDLVGSRVVLANQLTALLDSFWPGAAAIFADVASPIALAFIERYPAPEAAVRLGPKRLAGFLAQHQYCGRRTPEALLERLHAAPQGRAGEAESEAKGELVRALARALQALVGEIAKITSRIEHMVGQLPEGKIVMSFPRAGRICAAQILAELGDVRERFQTEDQLAAEAGLAPVTYQSGKSRGVGWRWACNRRLRAAITCFADNSRHQSPWAADVYRRARSRGCDHPHAIRILGRAWARVLWRAWTSGEPYDPAKHKGAKPFLAPASTRG

SEQ ID NO: 94565 - protein, 436 aa, unidentified
MICAAIERCAGIDVGKKFLSVCVLTGALEGEARQQKRRYGTTVADLTKLREWLQSEAVTHVVMESTGSYWKPVFNVLEDVVKVYVANPQEVKARKGHKTDDKDGWWLAHLLRHAMIHPSFIPPRAIRELRDFTRRRKRLLGAATSERNRVQKVLEDANVKLGNELTDVFGASGQLMLDALLKGKATAEEIAQFAKGRAKKKIPQIITALEGHQMSDHHRKMIRYSLEHLRFLEEQITQMDEDIRAKIREANLEPQWELVQTVPGIAETSGATILAETGGDMKVFPSVRNISSWSGVCPGNNRSAGKSKSSHTTDGNPWLRSALVECSWAATVKRDCFLKEKFWRIVSKTREHKKGPAIIAVAHTLLRLVYQVLGSGKPYVEKGSAPPDERQRERIIRHHVRRLGKLGIAVYSTRPAAAGGIGRPPQHLILEPAPQA

SEQ ID NO: 94566 - protein, 390 aa, unidentified
MDVMHPVCCGIDVHQKSIVCCILDGPLTSNEPKKYQTTFGTTTKELKAALDWLLEHQVTHVFFESTGQYWIPLFNIFSDSDLELVLANPQHIKNVPGRKTDVKDAEWIAQLGRCGLINQSYIPSQEVLQLRYLTRYRLSVKQRLTQIKNHIHVILQRGNIKITSYLSDIFSKTGQALLTLFIDGEVINEDNVESCIHGRIKASTRQLIEAMEGKLSTVDRFLIKECMEEYQLQKKISDELNKEINEYILEHFPEEYQLLLTIPGISDNCCATILAEIGPNVDAFKTDKKLASWAGMCPGSNESAGVKKSSHTTQGNKYLKQALVMSVLSVQRAKEESFSLFYQRISSRGSKMKAIVACGHKILRIIYKILQSHQPYNSQKALGLRQQTNA

SEQ ID NO: 94567 - protein, 329 aa, unidentified
MKEELKFIGIDVSKDVLDICILSHQTESLVIKNQEKVIAKFFKSILKEAVIKHHICIENTGKYAWVLISVLAELDCYFYVVNPLHLKRSLGLTRGKNDKIDAIRIARFIKKNHDETDLFIPRRNIIEQLQILLSERKFRINHKKQLATKNKELKVLRDKKIAKQIKKENDKLIKEITLQVKRLEDQIKKLIKNDKTLKALQKQLKSVPGIGDILCWNLIVKTNEFKSIKDPRKLACYSGVAPFRNTSGTSVFGKNRVSNLADKSLKKLLHLGALSAIRLNNDLAVYYHRKVEEGKNKMSVLNAVRNKIIHIVFAIIKNQTLYQNRLVTS

SEQ ID NO: 94568 - protein, 319 aa, unidentified
MTANAVVVGVDVAKDRLDVAVRPTGETWSAANDEAGITALVTRLRPLGPALIVCEATGGFERAAIAALAAAGFPVVVANPRQVRDFARATGQLAKTDQLDAAILALFAERVRPTPRPLPDAAAQLLDAVLTRRRQLLEMLVAEKNRLGFAPKPLHRGIQAHIRWLERQLDDVTKELAGLIEASPVWRAKDDLLQSVPGVGPIVSSTLLGELPELGTLSHKQIAALVGVAPLARDSGTLRGKRLVWGGRASVRTALFMAALCGRRWNPQLKVFYERLKAAGKPTKVALIACARKLLTILNAMVRDHKRWAVPAPSVQYSC

SEQ ID NO: 94569 - protein, 402 aa, unidentified
MITCGIDIGKGKHAVAIIDELGRQLVRTRFYDNTRAGAEKLMEELARHAEPAQVHVGMESTGNYWRAYYDFLSKKGCVVDVINPIVTSASSAGDIRGRKTDKRDAESIAEVVMRGKYVRRRDEGLQERKLRALTRQRGFIVEERSAAKLHLSSMVAEAFAEFESLFEDPYGPLALAVLSKYPTACHMARARKPSLAKIVRAHTRGRDADAEAQRLVDAAKDSISLACEITDALARCIVSSIQTITALDERVKDIEKTIMDFDPPDLAAKLMAIKGSGKVMPMVVASEFGDISRFRTNPKNGSETGMHKRLLAFAGCEPRIRESGKWRGRKFISKRGSRQLRTALYLIANNIRQWDPYFKAVYDRKVEAGKHHNVAVFYVVAKLLEVLCALYKSGRSYAATQP

SEQ ID NO: 94570 - protein, 394 aa, unidentified
MMRYYWVGFDVGKAFHWVCVLDDEGEEVLSRKVEADEEDLEAACKEIERLDGERTVGIDLLSGPATLLEAVLLGRGERVFHVPGIAVNRAPDAYPGEAKSDSKDAHVIADQLRLRRGSLHEVCPKDEITAQMRLLVAHRRDLLQDQTRRAARLREVLLGVFPGLEAALDLKREGALLAVTRVATPAAARKLGVAHLCRWLKARDVRKAPDLAERIVEAAKAQRRELPAAEAKAALVAELASEILRTRERIADLDRRLEELLTENPAAHIVRTLPGMGVVFTAEFIAEVGNLGRFVSADALAAAAGVAPVLRASGATSYRRRARRGNKVLKRVLYRSAFSCISHHERSEAFYRKKRAEGKGHHQAVIALARRRVDVLWAMLRDGQMYSERPSQVA

SEQ ID NO: 94571 - protein, 456 aa, unidentified
MKIPQSTIRLLTGRLVKILLYREVSTMKSNTQNAKIEAITEKTLVLGIDVGSETHYARAFDYRGIEYSRKPFKFSNTEAGFVTLKEWILDLKERHEKDKVVPGMEPTGHYWFNLGKFLQDNEMKPVLVNPHHVKKSKELDDNNPTKNDRKDPKVIAGLVREGRYMIPYLPDGVYADLRTASNIRFQLQAELTRIQNRISRWFNVYFPEYKTVYGKPDAKSGMLILKAAPLPEDILTLGIDGVNQIWRDAKLRAVGKARAKTLIEAAEHSVGSKEGAVSARMEIRMLLEDYESRNIRLQEVMTLIEGLVKQIPMAEKLLEIKGVGIRTVSGFLAEVGDISRFSNPKELQKLAGLALVENSSGKHKGETTISRRGRKRLRYLLFEVAMSLVAKNPEFRELHNYYTTRRLNPLKKMQSLMAIAAKLIRVFYAMLTKGVDYDPKKMASDIKRPAVYLQAA

SEQ ID NO: 94572 - protein, 388 aa, unidentified
MTGNRRCIGLDVHREFAQVAIWQGGTVTQAGTFATTPEGVREFAAGLGPADEVALEATGNTWAIATVLASRAGRVVVSNPARTRAIAEAKVKTDKVDAAILAQLLAADFLPPVWMPDAATSALRRQVLRRAHIVRQRTRLKNQVHAILHRNLVPRCPAADLFGIKGRTWLAQHDLPPDEQAAACALLRQLDFHAQELTLIDRDPGQAALGRPEVLRLMTIPGVDATVALSIVAAVGDFTRFRTPEKLVSYLGLNPRVRQSSGQPASHGRITKAGPAHARGMLVGAAWSASKAPGPLRAFYQRVRARRGMQVAAVATARKLAVLCWHLTIKGEDYAFALPSLIARKQRKLELRAGAPPARGRKGDAAPYSLAAVRAACFRWSDGQSDRR

SEQ ID NO: 94573 - protein, 379 aa, unidentified
MTSTAAAAGSRETVYAAIELSKKTWVLGIAHPDRDRPSIHRVCGGNFAELVGRLRVAARNNRRILVCYEAGYDGFWLARALAKIGIECRVLDPASIQVNRRARRVKTDRIDVLALLRALIATDRGERHVCAIVRVPSVEEEDARRSHRERQRLVRERTGHINRIKGLLFAQGIRDIKPKLRRTRIDFAGLETAEGHQLPDRLRRELEREYARLALIETQLREVEKERDTADAQHPVVERKRQMLVALQGVGSTSAAILAREVFARSFASRRQLGSYLGLTPSAYDSGSTTRCQGISKAGNSWARRVLIEVAWLWRKYQPASPLSNWYLQKTTGQSGRIRRIMLIALARKLAICLWRYVETGLVPEGVVIVRAEPRCTPA

SEQ ID NO: 94574 - protein, 347 aa, unidentified
MRFYKKQHKYYCGIDLHARKMYVCILDHKGETKVHQNIKTDPEQFFELIFPYLDDVIVGVECVFCWYWLADLCAEHHIPFVLGHALYMKAIHGGKTKNDKLDSYKIASLLKGGNFPLAYAYPAQWRATRDLLRRRMYISRRCSELVTHIQTTNTQYNLPAFSKKLSRKYNHDGMPERFDDPQVRKSVQCDLAMIQALNQVLKPLEWHIEKTARHHDYHTLFLLRSIPGVGQILALVILYEVHDIRRFPRVQNFSSYARLIRPFKESNGKWAGYSNKKIGNHHLKWAIKEAAILMLRNCQQAKDYVARLERKYNKGKALGIFTHKLGRAIYFMLKNKEAFDMKRFFAC

SEQ ID NO: 94575 - protein, 342 aa, unidentified
MSKVAIAAIDLGKHIFHLHVQDDRGHELYRKKFNRVALIQHLMNLEPCTVVMEACGGAHFMAQEVAKLGHTPKLIAPHLVRPYVKSNKNDFADAEAICEAATRPTMRFVHPKTQAQQALAMLNSVRDSFIKDRTATVNRIHAALLEVGISLAPGFKSIKELPALLEMSSFSGSIKKILMGLHEHFNYLDGKVKALDKDVECQAAEDDLAARLMTMPCVGPITSSALAAELGDGKQFKCGRGYAASIGLVPKQHGTGDKIVLLGISKRGDRNQRRLLIQCARVYLIQLERQKGALADWVRQLLASRHHSNLVVCALANKLARIAWAIAAHHTEFDAGPAAMNA

SEQ ID NO: 94576 - protein, 351 aa, unidentified
MPRTSTVHAVTVVGIDMGKNTLHVIGLDSRGAIVLREKVSRGRIALRFANLPPCLVGIEAGMATHYVARELAALGHDVKQVPPTYAKPFRQGHKNDFRDAHAVAEAVQRPTTRFVPAKTNEQLDLQALHRVRSRLVSERTAVINQIRGFLLERGIIVRQGLRFLRQQLPDILAKRTDVLSPRMVRIVSDLAGDWRQLDERIEAVTDEIEMLAKSDDNCRRAMTVPGIGPIISSAMVAAIGNGAAFAKGRDYAAWLGLVPKQMSTGDRTILGRISKRGNGYLRMLFIQAARVILVRPANWPKHGFGAWLVRAAQRLHPNVLAVALANKLARIAWTVLAQERSYEARVTKAAA

SEQ ID NO: 94577 - protein, 377 aa, unidentified
MGKDTAFVGLDVHKETIAVAVAEDRRGGEVRYLGEIANTRETIRKLVAKLSKAHDALHFCYEAGPCGYGIHRQLTDMGHDCELVAPSMTPSRPGDRVKTDRRDAVLLARLHRAGELTRVWVPDEGHEAMRDLVRARTAAMENLRRARQQLSGFLLRHDRVFRAGCNWTKKHRVWLSGLRFQHPAHQIVLQEYIHAVDDAATRLARIEDQIRTLVPTWSLAPVVEAIQAMRGVSFISAVTVMAETGDLGRFDNPRQLMSWLGLVPSEYSSGPRTARGGITKAGSKDARRVLVEGAWTYRCHAAVGKEHMARLEGLPQEIRDIAWKAQIRLCARYRRLSARGKPATLVVTAIARELAAFIWAIARKVTPNTRPEPAAAC

SEQ ID NO: 94578 - protein, 318 aa, unidentified
MHLTANISVPQKNFIAINLHSDNAVICVRRNALNKAGELVGKNIWCGRVSIRDGLDNFIKALLPYCQDFDHVAVVESTYNWYCLADVFEERGWLLRIADPSTVSQANLKVSDDRTDAQYLAERLRVGSLKHYLPLNYSSRALRDLCRYRMAMVQDCASLKIKLINLYRNQLSKNLRVADLLDRCRNHMQSNYRFNPDILEEFKDPNIRLRVAFEVSRIAMLEEMIEECNAEIQKQCKDQELVKLCKTIPGCGPVLSAVICTEIGTMQRFKSAGDFVSYCRLCSTSKLSNGKSKGLGNAKNGNAYLSWAFTEIENAHPE

SEQ ID NO: 94579 - protein, 363 aa, unidentified
MSNEKYIGLDVHQATISVAVTDSQGKVVMESILETKASTLLEFFAGLRGSLFVTFEEGTWAAWLYDLLKPHVTEVLVCNPRKIPLLKQGNKSDKIDARKLAERLRLHDLKPVYHGENGIRMLRELARSYLTIVKDLSRVMNRLKALYRSWAIPCAGRDVYYTRHRSQWLEKIPEAGTRRRAEQLYQQLDMLKHLRQQARRELLAESRKHAITAKLRQIPSLGPIRSALAVALIQTPHRFRSKRQLWTYSGLGLETRDSGEYQFVQGQPRRRKKQATIRGLNKDYNHDLKGLFKGAATRASVKPGPFQEFYQRSLAKGIKPTMVRLTLARKIAAITLTLWKKGARATPLGWLYHSETVGEQIVW

SEQ ID NO: 94580 - protein, 321 aa, unidentified
MADHSMKVAGIDTGKAELHVCLLPDGTRFKVGNDAGGIAELVAKCVEAGIRRAGIEATSIYHRAAVKALRQAGIEVAELQPRQARGYAQALLQWSKSDTIDAAVIARLTRALDEVRPAPDPKIEAFAEVLTYVEQLEERIAWLKTSRERYANARFKARIAADIKALEKRRRTELKRLEAAMRKDQILATRLDLLLSIPGVAERTAIGLLIRMPELGTLTREAAARLAGLAPCDDDSGQHKGERHIHGGRSRLRRTAFMAAFAAALNWNHDLNIFYKRLRQRGKAHTAAVVACARKLIILANAIIARGTPWEKQRGMPCPAT

SEQ ID NO: 94581 - protein, 360 aa, unidentified
MPNVKKHFVGIDVAKDWFDVAVLGEKRTKQFANTKRGMAEVIKWMRAHQPQLIVVEATGGYEEALVLALFEASLPVALVSPQRVRQYARAKGHLAKTDQLDAQLLAEYGRAIQPRLFVGKSEERKRLSALVARRNQLNDMLQAEKNRLRTSSLEVKNSLKRVLACLKAEMKEVEQEIRQVLKAHDELGEQEKLLRTAKSIGPVTAATLLADLPELGQLDRQEIAALVGIAPMNSDTGRKRGYRKTKGRRPDVRRTLYMATLTGVCHNPILKPHYEQLVKRGKESRYYRLYAQAAHHSQRHDARPATLSLPGDRLSLLHSHPKNTTTALTSKTVAARCVGRIHYRSNKAIPKAISQADHKI

SEQ ID NO: 94582 - protein, 344 aa, unidentified
MDYHPRMQEVALVETETGEYDERQLSHDHGEAEKFYCDQRGVNVRVGMEATGHARWFERLMAELGFALWIGDPAEINATRVRKQKRDREDARLLLKLLRENRFPRVWVPPPENRDLRQLLWHRHRLVQMRTRIMNQLQAIAMGEGVRLRKSLWSRSGRAKLESLQLAPWAAKRRKDLLELLDHLTPKIEELNVAFEQEAWNRPEVRHLMTHPGVGPVTGLAFVLIIGTPQRFGCGKQIGSYLGLIPCEDSSGGRQRLGHISKQGSSLLRFLLVEAAQQAVRFDADWKRQYLHLAMRREKRIAKVAMARRLGVRLYWMWRTGWDGKQALQFGSHAGQLVRSHGLT

SEQ ID NO: 94583 - protein, 409 aa, unidentified
MRLFVGLDVSSFDIKVCILNGEGEKLDSFSVNNDLPGATALKERLLKHIANQEVGTFKIGLESTSVYSFHPSMFLHYDEDLQSFGAKVFLMNPKQIANFKKSYSDMDKTDEIDAFVIADYLRFGRNQMSIVKESQYVALQQLTRSRYQLVRMLTKEKQHFLQHLSYKCNTFSQEVDSSIFGNAMMELFLEKFTLEELANMPLEELAEFLQVKGKNRFGDPKCVASTVQKAVRSSYRLDKVVEDSIDVLLGTSIAVIRTYQQQIKELEKSIKRIMAGLPQTLESIPGVGPVFAAGILAEIGQIERFDDETKVAKYAGLYWRTHQSGRFTAENTSLSRNGNHYLRYYLVEAANSVRRHVSDYQEYYVKKYNEVPKHQHKRALVLTARKLVRLVDALLRSHQLFTPERCVKV

SEQ ID NO: 94584 - protein, 409 aa, unidentified
MELLHARCAGLDVHATNVVACVRIADSRAVTYEYRTVPTTTRGLLELADWLTAHACTHVVLESTGVYWKPVWHILEGQFSLTLANAMHVRNVPGRKSDKNDATWLADLLAMGLIRGSFVPPASVQALRDLTRTRKQFVRELARHTQRIQKTLEDANVKLTEAISDVLGVSGRAMLNAFIAGETDPERLADLAKGRLKASRTQLVDVLHGRVTPHHRFMLTLHLTQIEALEIALTKLEGHIHDALEPFRAAVSLLTTMPGLRDTAVAVIIAEIGTDMATFPSAGHLVSWAGLCPRLDESAGKRRSTRTRASAPWLKTTLVQTAWAATRKKDSYFHAQFLRLKTRRGPKKAILAVAASMLTDVYYMLRDGVEFHDAGDQYFVQHEKDHVTKRLLRRLKDLGVEVEVKTHAA

SEQ ID NO: 94585 - protein, 343 aa, unidentified
MQAVTTIGLDIAKSVFQVHGVDAEGNVIIRRKLKRRYIVAFFQKLPPCLVGIEACASSHHWSRELHALGHTVRLMPPAYVKPYVKRHKNDAADAEAICEAVTRANMRFVETKTPEQQSCLMLHRTRHLFIRQQTAVINAIRAHLAEFGIVAPVGRNGVEALLNVVADSSDNRVPEIPRACLAALGAQLRMLKTQVLEFDRLIMAWHRSNETSKRLDEIPGVGPALATALVASVGDPRAFRSGRDFSAWIGLVPKQNSSGGKEKLGNISKRGDRYLRSLFTIGALAVIRYAKLHGAKHRPWLTALLARRPTKVAAIALANKMARMAWAMMAKGERYKEPIALAR

SEQ ID NO: 94586 - protein, 308 aa, unidentified
MVNVGVNVGKTNLDIFIYEKNIHFQVSNDMSGIKQILKRLAYYQVKRLVMAATGRYEFNLAEAAFRKGLPGCIVQPLAVRRYAGAIGQLAKTDRIDAQLIAEFAAIIQPRVTPQKSPSLIRIKDLLARRRQIMGMRTQDLNRFKIMGKSFEVSCNRMIRCFDQEIDRIEHQLDRLVSKQAVWAEKRSLLLSAPGVGNTLTYTLLADLPEIGSLNHKQISSLVGVAPINRDSGAYRGKRRIKGGRAGVRTTLYMATLSATQYNPVIKHFDRKLVDQGKHKKVAITACMRKFITILNAMVRDNVAWSYEA

SEQ ID NO: 94587 - protein, 414 aa, unidentified
MKTLFVGIDVSMKDFKAQFMDNLGETVSKRQRFSNDNPGLEALINLVLEICHSDSFERVVIGLESTSVYSWHLQMGLASNYQLASYHCQVYSFNPKVVANFKKAYVDLPKNDWTDAWVIADRLRFGRLPENSQVDFRYLPLQRLTRFRFHLTQTLTREKNYFLTNLFLKFNTLQQDEVFSNLFGATSEAILTEFLSPDEIAARPLDDLIDFLVEKGNKHFADPKATAEKLKIAARNAHRLRGNLLEPVNLILATSLETIRTLEKQIKNIDKAIAKEIAHFKHTLDSVPGLGPVICAGIIAEIGDIHRFPNDSALAKFAGLTWREHQSGEFEADTTPLTKTGNAYLRYYLIQAANSVRQYEPEYREFYSRKFRESKTHHHRRALVLTARKLVRMVDALLRSNQLYLPKGQRRNLA

SEQ ID NO: 94588 - protein, 354 aa, unidentified
MVIVGTDVHKRTHTFVAVDEVGRKLGEMVVPATTAGHQKALGWAREQFGSDLLWGIEDCRNLSARLERDLLTAGQKVVRVAPKLMFQTRASARTRGKSDPIDALAVAQAVLRYPDLPVASHDEVSRELKLLTDRREDLVAQRTSTINRLRQRVHELDPAAEPKPASLHRAKPCAVLADWLDTQSGILAELARDELADIIHLTEAIDELAARIGERVREVAAALLALPGCGELTAAKIIGETATISRFRSEAAFARHSGTAPIPVWSGNTAGRVRLNRSGNRQLNAALHRIAITQIRLTDSAGQRYYRKRLADGKATKEALRCLKRHLARSVYRRLHTDDHTRRAHQNSDMRTAA

SEQ ID NO: 94589 - protein, 341 aa, unidentified
MRIIGMDIHRSFAQVAFLVDGQVTKETRVDLAHDRFLKFAKTLEKADEVVIEATGNSMAVERVLRPFVKRVAVANPRLVRAIAFARVKTDKIDAAILARLHAAGFLPEVWVPDDETIRRRRAVTERMGIVEHMVRVKSRIHAILHGNLIPKYDGRLFTKAGRAWLAGLPLSPEEKALVSRLVAELERVSAQLAELDKGIAQQALDDPQARRLMTIPGVGTVVALTVLASIGTIARFPTPEKLSSYFGLTPTTHQSGDHPARHGHISRQGNAAARAMLVEAAWSAKMAPGPLRAFFNRVQKKAGAGAAAVATARKLTVLIWHVLTEEKDYAYARPAFTAMKL

SEQ ID NO: 94590 - protein, 401 aa, unidentified
METVRDNVTRVKRFRELKATLRTDRSRLLVGLDIAQAEHVVHLRHAHTRVVVPTLTIPNTIRGFTQLWTRIQQAQRATGCREVVCGLEPTGTYHQAVAAFLEAQGADVVLLSSSVAYWNRRTQDGTWDKHDQKDAVNCADLLEQGKVLFYSQPTGPLAELRHLVRCLRRARGELAACKARWRTTLRPALAPMGEPLPSRLWAELPAVLQAWERVAPGRPAVPKGRLPLGLATACADLGAQVTAVQARIVALEQALTPLAERVPAYALLRTIPGIGPTVGAILLAEIGDIAWFTTFSQLRKLAGLDIVRVQSGQFAGQARISKCGRGLLRWALYHAAMGLARTTGGRARLAALKAKRQGDRYAGFKAIVELAAKQLRVVWGVWRSGTPYDPLRTGGLRRQAR

SEQ ID NO: 94591 - protein, 461 aa, unidentified
MPAMVPSAVGVKEGAGHGGGDDRRGPHKGSHTAVAVSGDEQPLGQVRVRASAIQAQRLLEWAAAWPERTWAVEGAGGLGHLLSQQLLAAGEQVLDVQPKLAARVRLLGAGAVNKNDPNDARSVAIAALRSRTQHEVRPDDHATVLKVWAKRYRDLGRSRTQTACRLHSALCELVPGGIGKEITAAHAARVLEQVSPLDAVQQARWELAADLLDDLRRFDARLGEAKKKLAAAVQATGTTLTEIFGVGPVIAATVIGEVRDICRFASRDRFAAYNGIAPIEVSSGKRKVHRLSRRGNRRLNHAIHMAAVTQVRYPHSDGRPCYDKKLAEGKTAKEALRALKRQVSDAFYKHLKADAARAAGTGSPGGQPGSDSVASAADSHPERQLFGQATPGPALTLRSAPCDDHARTPAGPGAARAGGAGPGLPALPAPRGRRGSGVKAGRQAVAAGDAQQPNGHMAGHR

SEQ ID NO: 94592 - protein, 373 aa, unidentified
MKYTTFVGLDVHKDSIAVAVAGRDEKDAEGLGVIPNTPQAIAKLVRKLGEPGGLRFCYEAGPCGYGIYRQLIAMGCSCMVVAPSLVPRKPGERVKTDRRDAKKLARLLRSGDLTPVWVPDERQETLRDLLRAREDACQDLLRKRHQLSKFLLRLKLRAPEGIRAWTDKHRRWLEGIRFEQAAQQVVLAEYIHAVDEARSRIERFEQEIAAYVEAFADQRVIKALQALRGVDLITAATLVAELGDITRFENAKQLMSYAGVMPSEYSSGAKERRGSITKSGNAHVRRVIVQSAWNYRHTPKVGVVLKKRQEGLSQEIRAISWKAQMRLNRKYRKMLGRGKTKQVVVVAVARELLGFVWAIAHEVVIESVKREVA

SEQ ID NO: 94593 - protein, 474 aa, unidentified
MAARRLLTRGPNPLEPPEAQPQTVPVGKRTALKVQEKVAPRRAGIRATCRSCSAAARARSEGGERVRYYLGVDWADQTHAVWVVDERGTKLTARAVPHTAEGLSEWGRELDEWRAQGIELWAAIERPEGRVVDFLLDHGVVVYPVNPKALDRARDRFRQSGAKDDPFDARVLADFLRTDHAHLHALQPSSEAAQELKLLTEDYHRQVRQQTRLVNQLTITLKAYYPRALEVAESTTALAREFLKAYPTPEAVTALTKRQWQRWARAHHLSETRTRALWEVLQQPQLPVPAHVVRPKARLMRTLVAELAAVVAAVGEYREAIEDFFASMPTAQWVRTLPIGDHGITAPTLWARLGDAPERWESFRHLQAQAGAVPLTKRSGKQRVVQFRFACDKALRYVVDHVAFLSLRSCEWARAYYDQQRARGHSHRQALRALGAKWLKIIFVMWQRQASYDDQYHLASMARQQLRQPQKKIA

SEQ ID NO: 94594 - protein, 407 aa, unidentified
MNAVGIDVSKGKSMVAALRPMGEVAFLPQEFLHTEVGLEQMAYAIIALGEDTRVIMEATGRYHEPVAAALHEYGIYVCVLNPLFIKQSGGGSIRKVKTDKADAMKIAKYGLDNWVDLREYIPMDTIRQQLKLCSRQYNLYMKTVVSLQNNLISLTDKTFPGVNELFTSPERADGHQKWVDFVMTFWHCDCICRVSEKAFTERYQKWCKRKGYHFRAEKALDIYASSCGHFTTLPKNDNTKLLITTAAQQLLTGKMTLAALRAEMTRIASQLPEYETVCAMYGVGETTAAQLMAEIGDVRRFPRRNSIVGFAGVDPGIDESGKHSAKSVPTTKRGSPHLRKTLYQIVCTYLKKSPADEPVYQFLDKKRAEGKPYFVYMTAAQNKFLRIYYARVKECLEAFDSQTAEQK

SEQ ID NO: 94595 - protein, 458 aa, unidentified
MMTRATEALEPPPVTALAASRSIATRLEGKRRAGRPKKRVADLSPSGLPGGTPARSEAQIGLGAQERSAMRNVALDLGVRKICLCEVRAGVVTVRRTVRSLEELKDVIGPGTPEACVAIEACREAWVVHATLQQWGHHPVLVDTTRIRQIGVGEHGRKNDRIDAEKLARALERGGLPLAHVLSPSRQMLRHELCVRGALVHTRAQYITTVRGIVRAMGSKLPSCEAPHFHQKVKASALPAATRTVVQPLLAVIATIDAQLVEVEQRLEVACDQEPVIQQLATTPGVAKIVAATFVSVIDDAGRFRKAHQVQSYLGLVPSEDTTGGRRRLGCITKSGNTYARAALVEAAWCIYRLRAEDPLKLWAQSVARRRGSRIAVTGLARRLAGVLWAMWRDRTVYEPARVALACAGGLRAAAQSTEMQAAALERAARKIHRLARSAKAAARKTTPRPTKEQITTA

SEQ ID NO: 94596 - protein, 424 aa, unidentified
MVHPKMKFTYVGIDSHKDTHTAFFLDCFFEKLGSITLGNLPADFAAFLRETPRFKMDGTALLFGMEDVSQYGRALAQFLMANNQPVKHVNAYLIARERKNLNLEKSDFVDAECAARILISRFGNLPDAEDDERYHVLRTLVVRRDFLTRCNLMIKTYLHSLLTVDFPNYHKFFAGIGGKTSIAFFSKYTFPGMLIGISAEELSQFLREHSGGLLGMVRAKEILAALDPAATLEISEKQQVRSTIIRSTIQQLQYNIDDLEAVEIELARVFKSFNTTLTSMSGLDIVSASQLLSCIGDIRKFPTPAKLARYAGIAPISHSSGKRDMQFASQRGDRELNSLFYQLAVRLLLTFGPKHKAHNPYFYEYYKKKVSEGKTKRQAIKCVQRRLVNIVWGMLTHGEDYVNPPMVPVDRPAVEAEVRKLKAK

SEQ ID NO: 94597 - protein, 313 aa, unidentified
MLYVGIDIAKNKHDVTALNVPGKTVLKPLTFSNNKAGFELLDLSLRQLNQDCLIALENTGHYAFNLLNFLHEQGYKVYTYTPLLIKEFAKSLSLRKTKTNKKDAHGIALKLLSDPNREQFQHDNRQVELKILARHIHRLKKKQSDWKVQYTRCLDIIFPELDKIVEKHSEYTYQLLTCYPNPQKRLEAGFDKLIEIKRLTASKIQDILSVAPRSIGTTSPAREFEIIKHYKRLIDKAETCVNDLMAEFNSIITTVTGIGNRLGAVILAEIQNIHAFDNPAQLQAFAGLDSSIYQSGQIDLAGRMVKRGSPHLR

SEQ ID NO: 94598 - protein, 382 aa, unidentified
MQTIAPVNPTILLAIELSTSTWLVAARLPGLDKPRLSRIDGGDTAALLALISSLRARAACGLDATMGVVCCFEAGRDGFWLHRLLTAHGVVSYVLEPTSILVNRRARRAKTDRLDAEGMLRVLAAYLRGDRQACSMVRVPTPDQEDAKRTHREREHLVQERLRIENRIEALLFTQGIRKRPFLRSWERDLTVLRTGDGRKIPRHLRAELDRLRRRLVLTLELIREVEVERDQVTKTKPQDQAHHKMTALCRIRGIGENFAAVLTREVFYRSFDNRRQIASYVGITPMPYQSGAMDRDRRIGRAGNPRARTTMIQLAWLWLRYQPDSELAAWFRERVGTLAGRTRRIAIVAMARKLLIALWRYVETGVIPTGAEIRAETTVAA

SEQ ID NO: 94599 - protein, 327 aa, unidentified
MKSISVGIDVSKRTLDVCLKAPDQEQHFKIENKIKSIKKLFKELSKINNCAVIAMENTGHYNHQLYRVLPNFDFTVYVIDPKHIKRSIGLVRGKNDKVDAKRIATFIERNHEDLDPWEPLSESVYSLKVLLTERKAEVDRIKSLKQRIEGLNQQKSISSVPKLITRNKKEIQRIQKRVKEIEKMIRGEIAKETALKKEIDRIKTVPGIGDITAWMIAAKTHGFKRLLDPRKLACFAGVVPFEQQSGSSLKTKPRVSKMADRSLKSVLQMAAMRAVRLNNELQEFYHRKIEEGKNKMSVLNAVRNKLIHIAMALIKNKTYYKNRLVLS

SEQ ID NO: 94600 - protein, 442 aa, unidentified
MTNLSSSVAPTEWAAFVAIDWADQKHCWALTRTVSDKVERGELDATPEAVEAWAAELNVRFSGRPIAVCLEQKRGALVYRLAKYAHLVIFPVHPNTAAQYRETFCPSGAKSDAADAGWLLDLLLRHRHQLRELRPDTPETRLLQHLTEYRRRLVDEATRQKNRLTSCLKIYFPQLLRWFDDIGSPVAGALLERWPTLPELQRAHPGTLRRFFHQHNCRSEERIQERISGITVAVPAIRDEAVVEAESLRARSLVALLTTLRGQIALFDQRIQEVVAKHPEQNLFASFPSAGPVLVPRLIAAFGTQRDRYGTAGDVQSLSGIAPVTERSGKQEWVHFRWACSHFLRQTFHEYAAHSIVKSAWARAYYESQIEAKKTHHAAVRALAFKWIRIMFRCWKDGKTYDEQAYVAALQKRNSPVAGLFRATGIGWQSSAGFQRLSANPS

SEQ ID NO: 94601 - protein, 449 aa, unidentified
MMEPQEIEDEGHERIVERVAAIDVAKASGMVCVRVPHESRPGRRVSRVWEVAATTGAVTGLGDQLVSQGIEKVTVESTSDYWRIWFYLPEAAGLQVQLVNAREARNMPGRPKTDKLDSVWLAKCTERGVLRPSFVPPAEIRVLRDYTRLRTDLTRERTRHYARLEKLLEDALIKVSAVASTMTTKSVRDMIEALIAGERSPRALADLARGRMRAKRAALIEALTGRFDDHHAELAQMLLDQIDALSAQIGTLTGRIEELTGAIPAARGVSADGTTGPGAGTGPDAAVLPAAVRLDEIPGISPAGAQAILAEIGLDMTRFPTAGHLVSWAKLSPRTIQSGASNRSGKTGKGNPYLKGALGEAAAAAARTDTFLGERYRRLVKRIGKLKALVAVARSILVIIWHLLADPAARFCELGSAYHASRTDTQRKARGHIRQLEALGYTVTLTQAA

SEQ ID NO: 94602 - protein, 357 aa, unidentified
MVQVKKLDFSGTTIFCGIDVHKKSWRVNIQDSEFELEDFTQNADAVLLHKHLNRKYPGANFQLCYEAGFSGFTTQRWLNSQGMNCRVVNAADVATTDKEKRQKSDKIDARKLCDHLQTKKMKGIYVPQLHWEHSRSLVRTRGRIVSNQTRCKNRIWQLLHFSGLALPKGYEAGQYWSKHFITALQAIDCGSEVLKSTLELHIKDYQQTKNLLLEATLAIRNLCKQALYKDEIALVRSIGGIGVINSAWIVFELQDVRRFKHFDNLCNYVGLVPNTSDSGDKKITKGITNRSNNFLRTALVESSWSVLRKDPALLMKYKDYCKRMEKNKAIIRIAKHLLSRISYVLKNKKEYVIGVVG

SEQ ID NO: 94603 - protein, 339 aa, unidentified
MDSHKDTLAVSDVDQAGRQQQTQTFPNTRHGHRRLLVWLQGQPGVVRVGIEGAGGYGRAVAMCLVQAGLVVVEVTPSLTVRERRRLRQRGKADPTDALAIARVVAREQDLPPVRRQDLSEDLRLLVDYREQLLGERTRIANRVHADLVALRPGYQRQLPELRSQRAAGLVRGLLRGQVSVRAELVRRRLDQLDRLDAEIRALKARIGDLVQATGTSLVQVHGVGPLVAARILGEVGDVRRFANRHKFAAANGTAPIPASSGRTQRHRLNRGGNRRLNRALYTVAITQARSDHPGRAYLAGKQRQGKTRREALRCLKRRISDAIYRQLLADLQPDPSPAP

SEQ ID NO: 94604 - protein, 393 aa, unidentified
MEVLYQRCCRLDVHKDVVVACLHLVVEGKVVKEVRTFSTTTASLMSLSEWLTENNCTHVAMEATGVYWKRVWHILSDGESELVLANAAHVKNVPGRKTDVKDADWVSDLLAHGLIRPSFVPDSPTQEMRTLLRTRKQMVREKSGHIQRIQKTLEDANIKLDSLIIDIVGLSGRKMIESVIAGRTDPAKLAHLADPRVKASQKTLREALRGRVTKHHRFLLRLHLQQIDALDAAIAEIDREVEAGIAPFRTAILSEIGIDMSRFPSEAHLISWACICPRNDESAGKRRSTRIRKGSPWLKSTLVQCAWAAARTKGSYLQAQFHRIRSRRGPKKAIIAVAASILTAIYHMLKDGTMYQDLGPNHFDARTKERQKNRLIKRLTDLGYTVELVPLAH

SEQ ID NO: 94605 - protein, 350 aa, unidentified
MKKVARYFIGVDLHQKALQYCVVDDRGDIVHEQKVPIPFAPASDAVFDHFTPWRSDCRVAVEAVGMNRWFVNGLQERGYNVVVADPLKLNLKILGKKTDKRDAREIARRLWLGDIDRDAKTYYPDDQTYGDRKLARTRQALMVQRQQLNNQIRSLLRAYNIAPPARTLYSNRGVKRLLAMKLVNEPLTLCLHQATLALAAVAAAIAAVKKGIEKRVAEEPGMQLAVTHLPSIGAVSALTIVSELGDATRFRHAKAAASGSGLVPRVYQSSDTAHHGRITKRGNRVLRFILSQWAVRLMTKHPLVSAWARQRRKRLHVNKVRMALARKLLIGVWIMLTRGEVFDLRRCLSA

SEQ ID NO: 94606 - protein, 369 aa, unidentified
MGKHRLAYVAFDSAKNKHAVAIADSGRGAEVRYLGEIDNSPDAVRKLVAKLTRQYERLHFCYEAGPTGYGLHRQLTELGHVCDVVAPTMIPKRSGDRVKTNRRDSVALVKLLRAGELRAIWVPDSVHEAVRDLTRARETAMVDLKTKRQQLLSFLLRHGRSLPDGRNWTKTYERWLAKQTFAHPAQQIVFQDQLEAITSAQARLAGLEQQLREIVPTWTMAPVVAAYQALRGVSFLVAITFVAEVGDVRRFATKLMAFLGLVPSERTTGDTVRRGSITKTGNHRARRVLIEGAWTYRFSARVGETLRTRLKDLPSSVRAIAWKAQVRLCGRYRRLIARGKKTPVVTTAIARELSAFLWAIGQQVAPKTG

SEQ ID NO: 94607 - protein, 420 aa, unidentified
MLKTVRYNCSGMDIDKNSIVATIGITNKKNNVTEYVQETFSTLNSDLFRLKNWLISYNCKDVCMESTGEYWIPIFNILEDDFNVCLTHPKYVKAIKGKKTDKKDSLWICDLFKHDLVKSSFIPPKEIRALRELCRYRYKLICMRSSERNRYQNSMTVSNIGLASVVTDPFGKTASRIMDEVLSCNILDDDKIRKLIHGSCKNKDKILESIKDCNIESDQHFKMTEAKVHMQELDQHIEACTIEIVKRASPLLDQFIHITELPGIQLTSAIIILSEIGLDMTQFENDKQLMSWAGLAPANNESANKKKSVRISKAGQYLKPVLVQCALAAIKNPDNYFVIKYNRIKKRRGHKKAIIAIARMILTSIYHMILTGETFNLSDYESFKNPTTKPKQQPEMTVESALEFLKQSGIGVSTIQNNLM

SEQ ID NO: 94608 - protein, 355 aa, unidentified
MNSVRYVGLDVHRDTISAAVLSESGRMIQQSILATRAAAILDFIGGMRGTLYVTFEEGTHSAWLYDLLVRRVARLVVCNPRMNALMKSGNKSDAIDARKLAELLRADMLSPVYHGEKSAMEVQHLARSYALLTEDTTRLMARIKAVFRGQAISCAGQKLYGHKHRDEYLAQLGACALRRRAELLYQELEAVQQLRRQAKREMIVECRKYPETKLLCSVPFLGPVRAAVLIGRVQTPHRFRTKRQFWAYCGLALEMRDSGEYRMVDGQVERRKRPAQIRGLNWNHNHELKNLFKAAATTASFSNGVFREFYLGLLKKNMQPEMARLTLARKIAAIALKIWKKGEAFDAEQVKLQAA

SEQ ID NO: 94609 - protein, 475 aa, unidentified
MAAKGLLTRGPKRSEPPEAHPQSVPVGKRTALKVQEKVAPRRAGIRATCRSRSAAASAVPEGGGPVRYYLGVDWADQTHAVWVVDERGTKITARTVPHTAEGLSEWGRELDEWRAHGIELWAAIERPEGRVVDFLLDHGIVVYPVNPKALDRARDRFRQSGAKDDPFDARVLADFLRTDHAHLRPLRPSSEAAQELKLLTEDYQRQVRQQTRLVNQLTITLKAYYPRALEVAELTTGLAQAFLQAYPTPAAVAALTERQWQRWARAHRLSATRTRELWEVLQRPQLPVPAHVVRAKARLMRSLVAQLTPVVAAVGEYREAIEDFFARMSTAQWIRTLPIGDHGITAPTLWARLGDAPGRWEAFRHLQAQAGAVPVTKRSGKQQRVVHFRVACDKALRYVVDQVAFLSLRSCEWARAYYDQQRGRGHSHRRALRALGAKWLKIIFVMWQRHASYDEPYHLATMARQQLRQPQTKIA

SEQ ID NO: 94610 - protein, 325 aa, unidentified
MPIIVGIDIAKDKFDVCLLNEAGKAQPATFANSKQGINQLHHWLKKQGAKQAQVCLEATGIYGDLVAETLYSRKYQVSVVNPARIKAYADSQMRRNKTDALDAALIADFCRTQQPDPWTPPPPELKELRALIRHLDDLKQEKQRAANRLEAQNSSQAVIQHLQAQMRLLEEQIQHTLRLIHDHIDHYPDLKRQRDLLDSIPGIGDLTASYLIAELGDITRFQNVGEVVAFVGLNPCQHQSGKRKATHGISRMGRAALRAALYMPAIVAKRCNPRLEAWANQLAQRGLTGKQVIVALMRKLIHLAYGILKSGRAFDPHFGDLRLTA

SEQ ID NO: 94611 - protein, 347 aa, unidentified
MNFYTQQHKHYCGIDLHAKARYVCILDQHGTKLVHKNLPTTPEAFLRVIAPYREDVVVAVECMFTWYWLADLCAKEGIAFILGHALYMKAIHGGKVKNDKIDAQKIAVLLRGGMLPQAYVYPAEMRATRDLLRRRCHLVHKRAELLAHIQNTNRQYNLPEIGKKLAYKANRAGVEEHFPDPSVRKTVEVDVSLINHYDQLLGEVELYITRTAKTHDVQTFARLQSVPGIGQILALVLLAEIQDITRFPRVQDFVSYCRLVKCAKESGGKRLGTSGKKIGNVHLRWAFAEAAVLFLGQNQPGKEYFAKLEHKHGKAKALTVLAHKLARAVYYLLTREQAFDLKRFVTA

SEQ ID NO: 94612 - protein, 320 aa, unidentified
MQIPTQVLNIGADVAKDEIVVACSEGSFPVRKFENQRTALLAFLKGLPPCSRIGMESTGIYHELFANLARKLGFIVFVLNPKDARHYAKGVGQRGKTDRVDAELLARMVAHEHADLHAWVPPTPEQREIAQLIKRRAKLSSLRQALGMSLKGVDGFTAELKALRKRFDQIIARIDQRVKELVEANPDRKEHVTHLRTITGVGPVVSAALVNTLERVPLKSADAFVAFTGLDPRPDDSGQHQGKRRLSKRGPSELRRLLYVAALSAIKTKTWRPIYEHYREKGLSSTAVLVILARRIARTAWSMYTYKTEFDPGRLTKGLT

SEQ ID NO: 94613 - protein, 392 aa, unidentified
MHNCLAVDVAKGKSMVTLVSSSGEVLIDPYEVNHSINDFSNLLNRINQFKLDDISVIMESTGVYHRPIERFFLENNFKVFVINPIYGKMKKRNLRKTKTDKEDCFNLVNLFMSNTFKEYIKPNQLYLDLNALSRQYFALDEVCVNIKNRYRNLVYLCFPEYENIFKDSLIYSNIALEFIENYPHADIISNTRIDKLQNFFKKHEFRYWKAKANLIKETAIKSYPSVNMNDELVSNLSQIARLVNEYQKTIDIKYKITFLAKKSKYFESINSIYGIGEFTTSIIIAELGDINRFNNIKELTAYCGLDPSIKQSGKSINIRGPISKSGNKYMRKILYIACSNIIRLAAISKQENDIEIYYRKKRNEGKHHYAAIVACTTKLLRKILALCKQLDN

SEQ ID NO: 94614 - protein, 340 aa, unidentified
MNIKRIGIDLAKNSFSICAVDTDDKIVLERTLKRKDLLAFLSNVKPCVMAMESGSGAHHWSRELIKMGHDARIIDPKFVIPYRIGGKSRKNDRNDARAICEAAGRPQMNFVPVKSETQQSILIIHRRRRQIVAEHTRTANQIRSFLAEFGVVIAKGVNTLKRAWLQCRMDNANKLPLMAWEELDDLYSQLLALHQQILKYERKINHLNKEDERTERLMKIGGVGPITASAIVATVGNATVFKNGRQFAAWLGLTPREYSTGGKPRLGRISKRGDVYLRTLLVHGARSELMLTHKRHDAKSRWAEYLKLNKSWNKAAVALANKHARIIWALLAKNETYHLV

SEQ ID NO: 94615 - protein, 338 aa, unidentified
MALYCGIDLHSRNCWLAILDTRLKVVEEAKVGNDLEELLQVLEPYREDLVGVAVESTFNWYWLVDGLEDAGHRVHLTNTWAVKQYEGLKYTDDRHDARWLAHLLSLGILPEGYIYPKEERPARDLLRRRSFLVRKRTSFMLAMRGAFECRTGLRVNSNDLKNWTTKDVEAHVDDPAAAFGVTCLLEPMRALSSQIKKIESEVLARGRVRPEFAPLETVWGIGKILGLTIMYEVGDISRFRRVGNFTSYCRLVNTARLSAGKRKGSGNRKNGNPYLSWAYSEAAHHAVRHHPEAQKYFQRKRAKTNGIIAIRALAHKLARASYHVMRDQVDFDPERLFA

SEQ ID NO: 94616 - protein, 335 aa, unidentified
MVDINDCEFSFVGVDIAKDDFQVTLLAAGSERSRKFNNNKSGIEQFNSWLNKFATGKPWLCMEHTNKYWQMLAMFARAHGCLVSVVNAYTFSSYASGQRRSKNDKIDAKLLATYCRDWTPRLWEAPSKEQRRLTEVSRVRYLLKRQYAALCNHLGTVEFDESKSTVQNVMTELETQIKKLAKVEDEIIENSAAMKAERDRWTQICGIGEETPKAILAEIGFLSKFKTYPPLRRFVGLDSVCNQSGTSLNGKPHISKRGNSRIRGYLDLCAKTAKLHNPRFIAFAERLRKRGKPERIITTAIANKLLLTLWAISRDQADFDAEHVPRKHQLVSTSA

SEQ ID NO: 94617 - protein, 346 aa, unidentified
MERLTASPSFVGIDVSKDRLDVNVRPSGQAFAVVRDGQGLDQLVTDLRSLAPALIVLEATGGFEITVAAALASAGLRLAVVNPRQIRDFARATGRLAKTDVLDAQVIALFAERIRPEPRPLADADSQSLTELIARRRQVVEMIGMETNRAHQARNSRVQRMLRTTLKTLKAQLAELDRDIDDTIKRSPIWRAADDLLTSVPGVGDVTAHTLIADLPELGQLDRRRVAALVGVAPVNRDSGQMRGKRTIAGGRTDVRNALYMATLSAIRWNPIIGKHYQCLVDRGRPKKVALVACMRRLLGILNAIMRTHCCPVKSQVDSIGYPPLVVRNRRAASKLQIGSAFFQIL

SEQ ID NO: 94618 - protein, 455 aa, unidentified
MAKVRSWVGLDVHAAKVIACVVDAESGEMSVHRLCGETAEVVAFCAGLPGPTRAAYEAGPTGYGLARALAAAGIGCVVAAPGKIERPAQDKIKTDARDAERLVRLLMIDALHPVRVPTAEQEALRDLVRAREDVRVDLMRARQRLSKLLLRRDVRYEDTTSRWGERHRRWLAQVDLGQPGAQATLTDYVGAVEALELRRGTLEAAITQLVPDTPCAQAVARLRCLRGIDTLSAVGLAVEIGDFDRFERPGQLMAYVGLVPSEYSTGQTRRQGHITKSGSQHARRLLIEAAWHYRRPPRLGTTLQRRQQDQSPIVVAIAWKAQQRLHHLWRRLDSQRHMRRTIVAVAVARHLAGFCWAIVNAHDQELPDQPPVQSEPLRSRGRRRLADAGLPSSASRSTCGRPTGDSSAGHPLCGSEVGPGGPTTGKAVASSDARHAGDRPARTRRSHPKPDTAAR

SEQ ID NO: 94619 - protein, 405 aa, unidentified
MRVIHERCAGMDVHKKTVVVCAITPEGRQVRTFATMTESLLALTEWLEGLECRVVAMESTGVYWKPVYNLLEAANFEPMVVNAQHIKAVPGRKTDVRDAEWIADLLRHGLLRASFIPDRGQRELRELVRYRRSSVQERGREANRLQKVLEGANVKLSSVATDVLGRSGRDMLRAIVQGTEDPAALASLARGRLKQKSEQLEQALRGLVGSHQRFLLREQLSHIEEIEARIARLNTEIEGRLHPFEPILQRLETIPGVGRRVAEEVLAEIGTDMSRFATARHLASWAKVCPGNRRSAGQSKPEHVGRGNPWIRSPLLEAAWAASRSKDTFLAAQYHRLARRLGSKRAAMAVAHAILVIIYNLIRDEKTYQELGATYHDQRSQNIVVRRLTKRLEDLGFQVTRKEAA

SEQ ID NO: 94620 - protein, 369 aa, unidentified
MKKLSTVRGRESKIFNEHNLTIGLDLGDRSSYYCVLDEAGKVIQEANVGTNKKAMAMVFGSMGRCRIGMEVGTHSPWVSRLLLALGHEVVVANPRQVKLISTSSRKDDRVDAQTLARLARVDPQLLRPIQHRSAKAQGDLMVIRVRAALVEARTGLINTARGLAKSLGERLPICDSDQMGVEQTESLPTQLQQVLEPLLKEVVSLTEKIKEMDRRVEQIAREDYPETELLQQVKGVGPLIALTFVLTLEDKTRFAKSRDVGCYVGLRPRRGDSGESQPQLRITKEGDAYLRKMLVQGAHYILGYRGPDTDLRRWGLKLAARGGKRAKKAAVVAVARKLGVLLHRLWVTGEVYEPLRNAHTQQEMKEAAA

SEQ ID NO: 94621 - protein, 458 aa, unidentified
MKLFYLGCDVSKGYADFVIINDKKECVEENFQLDDTAEGHQQLIVRLDRFFENHPNSTLCAAVESTGGYEKNWYHKLLVLQDRFSLKAARINPIGIAHDSKAGMQRNLTDKISALNIAEYMIRHPEKIRYGQEDPTSSLKKMWGFIKMLKKQQGELGNQLESLLYAGNPEILRYCRDRVPQWVLKLLKKYPTAQKLSKARPSTVSSIPFISLERAKELVKQAKLSTACDSDPISAHLTASTVDQLIHLEKTLKVQEKEFEKMCDWPEVDLLMSINGIGKVTAIVLMLYIQDIGRFDSAKKLASFFGVHPEYKISGDGTKKGSFRMSKKGQKDPRALLYMGAMSSLKTNPVINDLYTAKKASGMNGKAAICVCIHKLIRIAYGVLKSGTPFDPTIDERNRLNSLKPDEKVATDKSRRFQGYDTKAPVSKRQMKKRMEQLQPKSANLRKHVEGAVILESS

SEQ ID NO: 94622 - protein, 347 aa, unidentified
MMIIGCDFHTRMQQIAMMDTETGELTERTLEHDNGEARSFYVGLTEPARVGIESTGYTRWFAEMLSELGHELVVGDAAKIRATETRKQKHDRRDAEHILNLRVKGDFPRLWLPSAEERDVRVRIEHRHQLVQLRTRAMNGLQAVALNYGVRLRRRLWTKAGEQKLQKLPLREGPARRRADLLKLIAQLNAWVKELDQRIAEEVVRRSQAQLLLTHPGVGDLTALTTVLVLGPVERFPGTGQVTSYVGMIPEEESSARRQRFGHLTKQGNRLLRFLLVEAAQTACRYDAGLQRTYRRLVFRKGMAIAKVAVARKLLIHLYIMLRDKIDYAEFCRRGSHAGMLGDLALV

SEQ ID NO: 94623 - protein, 453 aa, unidentified
MPMQRKTTIQARPIQRKHAAGIDIGATSIYVAVPLDRDPQPVRSFQTFTEDLHRLADWLQRCRIKTVAMESTGVFWVPLFQILELRGFEVCLVNAHHVKNVPGRKTDVSDCQWLQYLHSVGLLQASFRPAQQVCALRSLLRHRDSLVQTASTYAQRMQKALDQMNLQLHHVISDITGVSGIAILEGVLNGERDPRKLAGLRDYRIKASEETVAKSLVGDYRPEHLFTLRQSLEAWRYHRKLIADCDDEVQRHLAQFASKADPKDKPLPRARKVSSSKVYSSQPDYDLRTEHYRILGVDLTEVPGINTLLVQTLLAEIGPDLSKFRSAAAFASWLGLCPDNRVSGGKILSVRTRHVQNRAALALRIAAHTLHRNQSALGHYYRRMRAKLGAPKAITATAHKLARVLYHLLTAGQPYQESVFAERETQHQKRNLFKLHARARALGYQLIPMAASA

SEQ ID NO: 94624 - protein, 370 aa, unidentified
MLDTTTFVGLDVHARSIKAVSLDVMTGEVRCATFGYDAGAVAEWVRSVDPKARCVYESGVTGFDLQKRLSGLGVDCVVGAVSKMIKPSADRRRKNDRNDAEFLARMLSVGNVVEVWVPDDECEAARDLTRALEDARDDLSRSKQRLSKFLLRHGLAFDERTPTGRRKGNWTRAHWSWIESIRFAEGADNDVLAYYVDAVRRAAEEKARLEGLVEAEARKPRWRKRVDSLRCLKGVDTASAADLVFEAGEFSRFRNARSFAAWVGLTPSEHSSGESDRRGAITKAGNKHLRKALVEAAWHYLTCSGRPKGLAKGQAPDRGARRHAAKGVRRLVERRGTLLARGVHNNKANVATARELACWVWAVGLMAEEA

SEQ ID NO: 94625 - protein, 394 aa, unidentified
MKLVGIDVGKNSHHFCVMDKETGEFNVAPSSFSNNKEGFDFLINSLKPYSKKSILIGMEDTGHYHVALLKFLLSNGYTVALINPKTTDLTRKMEGGITKNDKLDTITICDVLDTPERKKQYRITKVDRFDLYEQRQLTRHHHNLKEELNVYCNRLQKSIDLVFPEFNTLFSSKYSIVYMNLLKTFGSAEAIASTDIRTIRKCFEVKGRGGRISLTPEKLKECAKNSIGISSEVETIQIKHLVSQITLIKEQIAEIDKKIEEFSIPNNSPILSIPGISHFSGTSILAELGDIGNYSKPSQIIKFAGVAPYHYESSQYNAQHTGITKKGSKYLRKTLYQIILTVINNNPVFKKYYLLKISQGKGHRCAQGHCIRKLLRIIYHLLETGQSFDPALLR

SEQ ID NO: 94626 - protein, 410 aa, unidentified
MNPQQYIYVGVDLHKQHHTAVIIDCWNQKLGEIKFDNKPTAFPTLIKEVKKHLSKEMKAVYGLEDIGGYGRALAVYLSESGCWVKEVNAKLANARRKSHVTVHKSDSWDAENVARVLRDELPFLPDAKPIDLYWAISQLVNQRRWVARNLSGTLKKLHQQLGYHYPSYKKFFSQVDGKTALAFWWRFPSPHHLEEITEEQLAKFLRVLSHNGLSTKKAVQIKELVESDGDTKRDFQDKRDFIVRSLVRDIRSSESNLSRVESEIKEMMVQLGFRLETMTGIDLVTAADLVAEIGDIHRFATPDKLARFAGVAPIMVGSGGKSRNYKSKQGNRELHDIIKALAIRQIAVTRTKKEPRNPYFHQYYEQKLKAGKTKQQAIVCIMRKLVNIIHYLMRTKAAYIIPDVSSHNVG

SEQ ID NO: 94627 - protein, 335 aa, unidentified
MEVIYPCCGGIDVHDEFVVVCLSRVQQGQRHKELRRFATYSADLRALCHWLAEAGCTHVAMESTGIYWRPVYDRLVGQFEVLVVNAQHMKAVPGRKTDVQDAEWIADLLQHGLLTASFVPPAEQQQLRDLTRLRISLVQERARLVNRVHKLLQEANIKVGNVLSDVMGVSGKAILQALAQGETDPKRLANRAHASVQRKHEQLVRALDGDMGAHEQFLLQELLSLITAMERAIVHVEQQIEERLRPFEDCLGRLEQITGVSRKVLYVVFAEVGTDMSRFPDAAHLASWAGMCPGQHESAGKRRSGRLRKGNRYLRAALVQAAHASGRTQTYLGEQ

SEQ ID NO: 94628 - protein, 399 aa, unidentified
MNRNRTVAGLDVHKDSIYLCIMGHDEAIIFEKTYGVLTPELRQMCNDMVDRGVTEAAMESTAVYWVPVWNELCESMELKLVNPYFIRQLPGRKSDVRDAQWIAECLLKNLIKGSFVPEPIVQDMRKLNRRIFDLQEDLTYYSNKPDAALQRCGFRLSNYVARITGKSYRKAVEAIASGVTDPDELIKCVHGRIINKHGRETMLAAMTGSFSTTDITVIRQYWDLLAIYTRQSEECQSKLTALCEAHFPTEYKRLQTIPGVKERAATAIIAETGVDMKMFATAASLEGWCGLKPRNDVSNGRYKSRKITHGNRYLRQILIEISWTASRTRNCFFSNFSYIQVTQKHKSKMKIQVAIARKILVAVWHMLSKQEDFIDLYLKRLEEQILMEEKIRQLESKMA

SEQ ID NO: 94629 - protein, 316 aa, unidentified
MSVPLLFVGIDVAKAECVVAVRPTGPTWTVPQTETGWTALAARLQALAPTLVLCEATGGLELPLASVLAAGGLPLAIVNPRQVRDFARAKGLLAKTDALDAAVLAHFAEAIRPLPRAVPDATTQALAALVTRRRQLVEMATAEENRLGSAPPRLRGRLQAHLRWLRRELVALDADLDTTIRTHPGWRVQDELLQSTPGVGPILARTLLGGLPELGTLSRGAIAALVGVAPWARDSGRHRGARRCWGGRADVRAVLYMATLAAVRCNPVLRAFYQRLLAAGKLKKVALVACMRKLLTILNAMVKTQTPWAPRLAGDC

SEQ ID NO: 94630 - protein, 358 aa, unidentified
MKKNTTLKQSLSSIDLSACTTVAIDLAKQVFQVAGEDALGRVLYEERIKSREAFHTFLRQLSPSIVVLVETGPGAQAWARQLQAQGNLARVLPAQLVANHRSGAKNDRNDALAILRAGRDSKIAAVPIKSTAALAMQALHRARQGYVRRRTATSNQMRGLLMEHGFALAQGDVAISQTLPRVLEDATQPLPDMLRELIDELLGEWRQLGERINILTGRLEIAANQDQTARRLMTVRGVGPIIATAMLAKQTEPERFADARQFAAYFGMVPDQNSSGQKVHLGRMSKRGDGYIRSLMVQGAHAVLRHLRPDSEQPDDRRLHRWLSRLGRKEAAVRLANRNLRIIWVLLQNDQTYRSQPA

SEQ ID NO: 94631 - protein, 341 aa, unidentified
MTKHSLIGIDLAKNVFQICAMTPHGKISFNRALKRADLKAFMVKQEATIVAMEACYSSHYWAREFVAMGHTVQLIPAQHVKPFVRGNKSDRNDAVAICEASKRPEINTVPIKTLEQSDIQCLHRIRERHIKQRTSLINQARGLLAEYGIIAPLGLKAFKLLLHEVCSSEYSVISPSLKTQFMFVTDEYCFHTDRIDDITVELNVIAKANPLCHYLLSIPGIGPINATAIISAIGNGQQFKNGREFAVWLGLTPKQSSSGERGFSGGITKRGNRYLRKQLVHGARAMTIRCRNKKDNLSQWVNQLLARRGVHKTYVAVAARLARTAWVLLNKQETYREMSSN

SEQ ID NO: 94632 - protein, 343 aa, unidentified
MKLHVIGIDLGKTVFHLVGLDSTGKAVIRKKCSRKQLLAFTANLEVQLIGMESCSGSHFLGRALREQGHEVRMMPAQYVKPYVQTNKSDYLDAEAIAEAVQRPRMRFVPIKTEEQLDLQALHRVRERWVMRRTAVVNQIRSLLLERGLTLPQGRRYVDQQLPRILEDAELKLSGCFRVLLAQLQLELEQLGARLEEMDGVIQKTAKENEDCQRLTEIPGVGPVTATALIAAVGNASAFPKGRKLAAWMGIVPGEYTTGGKQKLLGISKRGNKYLRTLFIQGARSVLQQRDKQAPGLSLWLAQLLARAHQNVVIVALANKLVRMAWAVLCKNERYRTSVLAVTA

SEQ ID NO: 94633 - protein, 292 aa, unidentified
MSQKLNSAVAVTGIDIGKNSFHIVGHDQRGAIVLRQKWSRRQVEARLANLPPCLIGMEACVGAHHLSRKLQMLGHDARLMPAKYVRPYSKGQKNDFRDAEAIAEAVQRPTMKFVATKTAEQLDLQALHRVRERLVGQRTGIINQIRAFLLERGVAVRQGLRYLRAELPGILATRTDVLSPRMLRIIEDLAGDWHRLDERIAGLSGEIEALARQDQACTRLMTVPGIGPIISSAMVAAIGSGDVFSKGRDFGAWLGLVPKQISTGDARSSAAYRGAAIATCVFCSCRPRGSCW

SEQ ID NO: 94634 - protein, 398 aa, unidentified
MGVQGRVWVGVDAGKEHHHVVAVDSDGRVVWSRKVANDEAALRSVITEVSALAGSVRWGIDLRDGGAALLLALLAAAGAEIVYVPGRVVNRMADAYSGEGKTDAKDARVIADQARMRADLAPLVLGDELIIELRMLTARRTDLVTDKTRAINRLRATMTGICPALERVLDFTRAGPLILVSGYQTPEAIRQAGPQQLAAWLRERGARNAAALARTAVAAAQSQTVRLPGQDIAAQLAAGLAREVMTLGERIREIDQLIGERFRRHPAASLITSLPGIGILLGAEFLVATGGDMRAFASADHLAGYAGLAPAPRDSGKITGNRHRPRRYNRMLNRVFYTSALISIHCSPDSRAFYDRKRAEGKKHTQAVLALARRRVNVIWALLRDQRPYTSQTPAKAA

SEQ ID NO: 94635 - protein, 312 aa, unidentified
MGGVNVAIEVGKYKLQVALGSAGERWELDNQPRAVKKLAQRLAELTCARVLIEGGSYQNVLVAALRAEQLPVVIINPRRAREFAKSIGQLAKTDLLDARMLALYGERIEPPIRELRDEQNQALRALWVRREQLIEMVVMEKNRLEHAPTALDPDLRSHIDYLRKRIKSAEDDIDRAVRNSPLWEKYEILTSVPGIGRVLSAALLSDLPELGRVNRGEIAALQGVAPFNHDSGTLHGQRSIAGGRKRSRRALFVVAMVTTRCNPVLKAFYERLRAAGKPRKVALVAVMRKLLVILNTMLKNHTKWSPTCLPAN

SEQ ID NO: 94636 - protein, 392 aa, unidentified
MKTPAAGTLQTGGEQVAVGVDPSRDALQLAILAPHGAPHGTVSKRFPLAPTSLRSIDALLGQGQEVRIGVEGAATCGAIVLLHWLRQGYDIREVNPQISKRLRECFTEAHTDASDAQGLAWSVRFHPDLPQVRLTVTTAAWKRLSRLRTRLVKAQTGLYNRLHSLLAESYGAVYKRLFPKLKSKRALEFFQVFPTLDDALNDLPQVRSLLGEEKAALLEEAGRWGEDVYLETLRLEIPLTIQLLFAHRAAIKGLEAKMAELSRADPQVERLRAVLGMGTPLALTILGHSGDFSRFESHDVYAAYCGLAPAVWQSGQSRVYAKRRRRYSRPLRQAFLQLALTQLRLNPESRAYYERKRGEGKPHWVALTALARQLCKKVYKLMSEEAPVMSAY

SEQ ID NO: 94637 - protein, 339 aa, unidentified
MSKLSNPTQATVFCGVDVSAATLAVAVLQQDQPLEQCEFANSASGHKALVAWLRKRKAAVRVSLEATGIYSLDLALALDAADGIEVAVLNPKVVNRFAQTLRRSKTDSADAQALAEYSRRMPFVAWRAPEREGLRLRTISRHIAGLTVEHTRESNRLHAVRGSAATPRCVVADLKRSLASLERRMVRLRREAVTLVQADDAMRQRFELLTGIPGIAEISALQLLGELAPLSPEMSVRQWVAHSGLDPAHEVSGSSVHKRSRISRAGNRHLRRALYMPALVAVRRDPHLKAFYSALVSRHKAKMQALIAVARKLLHAIYGIFKSQTPYDGQKLFPTLLPV

SEQ ID NO: 94638 - protein, 480 aa, unidentified
MSQQKKHSKPLGEEKTAAGTGKRSRKRKGMCLEDRPILEANAAGIDIGAREVFVAVPPDRDEHPVRVFSTFTEDLEKLAQWLVSCGITTVAMESTGVYWIPLYDIVEKYGVKACLVDARGMKNVPGRRTDWHECQWLQFLHSVGLLRAAFRPEGDVCAVRSMMRYRTELVEMTSQHILHMHKALTQMNVQIHHVISDLTGVTGLAIVDAIIAGQRDPVVLAKLRDPRIKASEETIRKSLVGNWRAEHLFTLEQSRTSYQHYQWQIRECDEAIEKLLVAFVPRVDPTERPLPPDRKRKQRGRKKKNANPNTFDLRTESYKLFGVDLTQIPGLMAMVLMLFSEVGRDMSRWKTAGHFVSWLALCPDNDISGGRVLWRGMRRVHNRAGDLFRMAAYSLHHDATPLGDYLRRMKSKLGPAGATTATAHKIAIIFYTMVKKQVEYDATLWADRDAEREKRFEAKLKRQAQQLGYKLVPIEERPAA

SEQ ID NO: 94639 - protein, 352 aa, unidentified
MIGGVDTHGATHHCAALDARTGKLLGDSEFPATAKGYAQALKWLQRYGRVEAVGVEGTGSYGAGLTRYLTSRDVVVIEVVRANRQARYLQGKSDPLDAINAARAVLAGMATTVPKTRNGNVEAIRMIQTTRRSASKARKAAINQMHGLIYSAPEPLREQLRGLNRAALVARCLRLRPTTSTQSGELTVIAKTMLRRLARRVQALDEEIEEANQQLTELVQHAAPALLQVFGAGPEAAAQLLTTAGENRDRISTEASLARLCGVAPIPASSGNTTRHRLHRGGDRRANSAIHMIIINRLRWHEPTKAYVTRRTAEGKTKSEIIRCLKRAAVRELYRALLTDLNKPAAEHEPAA

SEQ ID NO: 94640 - protein, 355 aa, unidentified
MSSEKYIGLDVHQATISVAVMDSQGKVVMESILETKASTLLEFFAGLRGSLFVTFEEGTWAAWLYDLLKPHVTEVLVCNPRKIPLLKQGNKSDKIDARKLAERLRLHDLKPVYHGESGVRMLRELARSYLTVVKDLSRVMNRLKALYRSWAIPCAGRDVYYTRHRSQWLEKIPEAGTRRRAEQLYQQLDMLQHLRQQARRELLAESRKHTITAKLRKIPSLGPIRSALAVALIQTPHRFRSKRQLWTYSGLGLETRDSGEYHYLRGQVQRRKKQATIRGLNKDYNHDLKSLFKGAATRASVKPGPFQEFYQRSLAKGIKPTMVRLTLARKIAAITLTLWKKGEDFDINKLYWQAA

SEQ ID NO: 94641 - protein, 412 aa, unidentified
MKDLLEISCGLDVHKEKIVACILTGPLGKPTRSEIREFSTLIPDMIALRNWIVSKNCHHVAMESTGIYWMPIYEILEDAFSGDITLLVVNARHMKNVPGKKTDMRDSEWISTLLRAGLLNGSFIPEKRIREFRDLNRYRKSVIRDITSQKNRIEKFLQSSGFRLSSFISDIFGASGRNIILHLMEHGQIDKTALDSCLKTKTRNRIDEILMSVNGTLSEHQKTFLKILMTHYDSLKEHLTEVETSLEEDMAPFTLQVEQLNSIYGISTTASCAIIAEIGIDMEPFKTAEHICSWAGLCPGNNESAGKRKSASVTKGNPYIKSMLCEIAWVIAGKRNTYLSAWYWRIKQKKGAKKAIVALARKLLVIIYTMLKQGTLFDESCFETRRKNCEQKQLSRYIRELEKHGYHVEAQS

SEQ ID NO: 94642 - protein, 370 aa, unidentified
MKDHSEVFVALDVAKLKNAVAIAEGGRGGEVRFVGEIANTAAATRKLATKLAARYGHLTFCYEAGPTGYGLYRLIKSLGHDCLVVAPSLIPSRPGDRVKTNRRDAVGMAKLLRAGELTAVWVPDERHEAMRELTRTREAVRRDLRIKRQQISGFLLRLGLHYPGKKRWGPAHLNWLATRKLDYPERRIAFEELMFAMRQAKERSDRLEQAIRDSVPDWSLAPIVVALQAMRGVDLITAAGFLAEIGDLSRFESPRQLMAYLGLVPCEHSTGDRVRRGSITKAGNVRARRLLVESAWSYRHPARVSKEKQTKVEAAPRSVREIAWKAQTRLCGRFRNLTRNGKRSTIIATAVARELSAFIWAINREVADIS

SEQ ID NO: 94643 - protein, 285 aa, unidentified
MQTITTVGLDIAKSVFQVHCVDADGEVVLRRQLKRRYVLAFFQKLPPCLVGIEACASSHHWSRELQALGHTVRLMPPAYVKPYVKRHKNDAADAEAICEAVTRPNMRFVPTKTPEQQSCLTLHRTRHLFIRQQTAIINSIRAHLAEFGIVAPVGRNGVEQLLEVVANVEDKRLPEVARACVAALGTQLVALKAQILAFDRRIMAWHRSNETSKRLDAIPGVGPALATALVASIADPKAFRSGRDFSAWIGLVPKQNSSGAKTSSAASANRATAICAACSRRARLP

SEQ ID NO: 94644 - protein, 337 aa, unidentified
MIHVGADLHERFCYMTAVDATGRSIKAGPVNNRCEELRQWLRGLPGPVQVAVEACSFWPAFQEAIGSEVEKIRLVHPQRVKAIASAKLKNDRVDSATLAHLLRCDLLPEAWMADRSTRDQRQQVRLRISLGQHRAAMKNQVHAILHQHGKRAPVSDTFGKKGRAWLGKIALPPNAREAVNTYSGLIEQVGEQIHRQEKRLKEMASKDERAQWLTTIPGVGPYSAMIILSEIGEIGRFGTAKALYSYAGLVPWIRESAGHVKRGGISRCGSPRLRWVMVEVAHTALRCSPAAKRYFQRLRQRKHGNVACVALARKLLGAVFAMLRDGECFDETIFAAM

SEQ ID NO: 94645 - protein, 345 aa, unidentified
MKITTIGIDLAKNVFQVHGVDERGKAVLRKQLKRKDVVKFFANLEPCLIGMEACGSAHYWARKLSEFGHTVRLMAPQFVKPYVKTNKSDRNDAEAICEAVGRPNMCFVPVKTAEAQAVLALHRARQGFVKARTAQANQIRGLLAEFGIVIPKGIGHIAKRVPEILEDAENGLPGMMRQLVRGLDEQLKVVDKQVEEMERQIKLWHRDSEPSRTLEAIGGIGPITASAFVASVGDAKSFKNARQVPAWLGMVPRHEGTGGKVKMGRISKRGDVYLRTLLIHGARAVIRQVERKPDQADGWLKKLLARRNKNVAAVALAAKNARIAWALLAHERTYQSDYVAKRTAA

SEQ ID NO: 94646 - protein, 347 aa, unidentified
MVTLGGDCHKRTHTLVAVDDNGRELGTKTVAAVAAGHLEALRWASQWKERRWALENCRHLSRRLEADLLLAGESVLQVSPKLMAGARWSAREWGKSDPIDGLAVARAALREKELPVARLEGESREVKLLLDHRDDLVGERTRVQNRLRWHIHELEPNFDVPVRSLDRKVVLNRVAKVLAGHRGIAADIAVELLVRVRQLTVRINELERQIRDLVTKLAPNLLELDGCAALGAAKLIGETAGIARFRTPAQYAMHNGSAPIPVSSGSHECHRLNRGGNRQLNAALHRIAITQIRVGGRGQEYVQRRRAAGDTKREAIRALRRRLSDEVFRRMWQDHLAAAKVPARAAA

SEQ ID NO: 94647 - protein, 382 aa, unidentified
MNRIIKIGMDVHSTNYTLCAMEPVLDGEDRIFTNIQVTPDYENVIQFIDNLKERLGSSDSYSIECGYEAGCLGYSLYHQLTKAGVKCTILAPTTMLTQQGKRVKTDKRDAVMIAQCLSYGGYHAVHVPTDQDASVKEYLRMRDDHKLALKKIKQQINAFCLRHGYIYGGHKWSIKHLEWLKKLDLSELNRETLNEYMTSYEEQTAKIERFDKRIEELAADSDYHENVRKLSCLLGIQTYTALSLIVETGDFKRFRKGNTYAAFLGLAPGESSSGEKISRTGITKAGNSRLRTLLIEAATGICKGQVGHKSKALCARQAGNPAEVITYADRGNIRMRSKYKRMIRHEKKRNVAVAAVARELACYVWGIMTNHIEPREEGKKAA

SEQ ID NO: 94648 - protein, 442 aa, unidentified
MRIVYKRCCGMDVHKNSVTACVLLIDEDGEFRKETRYFSTMTRDLKEMATWLANLGVEAIAMEATGVYWKPVWNILEAENKYQLLLVNAHHVKHVPGRKTDQKDSEWIAELLEHGLLKASFVPPQTIRRLRDLTRTRAKIGQNVATFANRIQKVLEDANVKLGSVATDALGVSGRQMLKALIQGQRDPKQLAQLARGRLRKKLSELQLALEGHFTEHHGFQIKALLELVEFGEKQLGQLETKIQRLLLLQEPESRRPKGSAIAQVEPPSTPPTSPLQRAVELLDTIPGVDKVTAWTMVAEMGANMDQFGSASQLAKWAGICPGNNESAGKRLSGKTPKGNIWLRRALCEAAWAASRTKDTYLAAQYKHFIVRKGKKKTIVAVAHSMLRIAYYLLTRQCPYAELGGDFFDRLNQEAVRSRLVKKLASLGYQVTLTPVSSEATA

SEQ ID NO: 94649 - protein, 443 aa, unidentified
MSFDRLKRTQRRKRLPGHKLKPSRATLFVQNSKPHLSMKPTYFLGIDAAKHKMRAALSNRSEHVLFEKDLSVHATGLRQLLAAIKRQVNDPEQLLVLIEATGLLHLNWSAALTKAGYAVAVINPLIARRLYTLQNSIRDNKSDPIDARGLCTIGWLHGEKLLVHYRFSLRPEQFTLQRAQSVRKALRSALSNLKKTYQSLMDLSFPELGGLLQLDGVGIRQLLIQAPTPAAIAGKRLSTLEKNWMVRPKAAALKALAADSMADPDLAAASGPALVALLQSVAAMEARLHALDQQIAKLACTSVDPQTKALIETIPGFGPVNAAKTLAWLPTEILHSGSNRKVAARLQAFMGNDPRLRQSGQWKGHTKMSKRGVEMLRTAFFQSAFSAAHNDPELRAYYQCKRAQGKTHEVALSHLMRILTRRLVAVLRSGKPYQSHYNLKNAA

SEQ ID NO: 94650 - protein, 389 aa, unidentified
MKIFVGIDIAKLNHFAAAISSDGEILIEPFKFTNDADGFQLLVSKLESFDKNSIIIGLESTAHYGDNLVRYLVAEFYQVCVLNPIKTCQMRKNNVRKTKTDKVDTFVIAKTLMMQDDLRFITFFDLDMMDLKALGRFRQKTIKQRTRLKIQLTTYVDQVFPEIQYFFKSGLHQNAVYALLKEAPSPKEIASMHMTHLANLLKVNSHGHFTKEQAKELRVLAQKSVGANDSAISIQITQTIQQIELLDSQLEKIEAEMTDIMKFNDSVIMTIPGIGYINGGMILGEIGDIHRFSNPNKLLAFAGLDPSVYQSGNFQAKTTRMSKRGSRVLRYALVNAAWNVVRNNATFKAYYDAKRSEGRSHYNAPGHCAGKLVRVIWKMLTDEVEFNLE

SEQ ID NO: 94651 - protein, 379 aa, unidentified
MRKPTRFVGLDVHAEKIAVAVAEPDGEVRSLGNIPNEPEPIRKLIKKLGPAQSLRACYEAGPCGYGLYWQLTALGVACEVIAPTLVPIKTGDRVKTDRRDALKLARCYRAGDLTPVWVPDAAHEALRDLVRAREAAKKDQLRARHRLQKYLLRQGRRPPVKMKAWTLQHLAWVREQRWELAAAQTTFDDYLAEVDHLQARVARLERAISEQVATAPPHLQAVVAALQTLRGVAELTAVTIALEVGEVSRFERPTQLMAYAGLVSREDSSGERTRRGAITKTGNAHLRRVVVEAAWAYGKRPSLRGRLRRSNEGQSATIRETAWKAQLRLHKRYVHLLAKGKMRQKVITAVARELLGFIWAVGVEAEREVQRAQSQRRAA

SEQ ID NO: 94652 - protein, 451 aa, unidentified
MSRSRAYKRTDVKRVDLEALRERTLEFGNAGVTVGLDIGKSEIVACLRWPQGEFERPWSIRNPGQIAVCLDVLKLVKSVADSLTVGLESTGTYGEAIRRGLTEAGFEVHRISGKATYDYHEIFDGVPSQHDGKDAAVIAELTAYGKGTAWPWQADSELLASVKHQVFKAEAYRGQQTQWSGRLEGLLARHWPELTRLLKLESVTLLRMIGHYGSPARVAADAEAAGRLAGWGGAKLTESKIRQVLESARSTRGVPPSEPESAWLAEVASSSLSAYRQVQAAKHELEALLAAEPTWSRYTMIGAPTLAAIWAHAGDPRDYDSGGAFLKALGLNLKERSSGHRQGELAIAKRGSSRARAWIFFWALRAVQRKELSGWYADFTQVGRKSSNHGKREARRMKGVVAVMRKLARGLRYAMLHEEDFDYSKLFEDQPVKGKRRHPRRGRRGSSASVL

SEQ ID NO: 94653 - protein, 339 aa, unidentified
MLIIGCDYHPSFQQIAWLNTATGECGNRRLEHHDEAEAFYRGLRGQAVVVGMEATGGTGWFRQLLRECGHGLQVADAARVRARATRRQKTDERDAELLLELLLDPKFVWLTMPTAEQRDRRQLLLHRHRLVQMRTRVKNQLQSLAMDQGVRQQKKLWSSKGRTQLQALSLPPWTAVRRGDLLQLLDDLDQRLVGLDREVRQQAYGSAEVRRLMTHPGVGPVVGLAFQLIILDPARFAGSRQLTSYLGLIPSEHSSGGKQRLGHITKQGNALLRGWLVEAAQVAVRRDPQWGRQFRRLAMRKNRSIAIVATARKLAVRLWWMWKRGLDYRQMVQSGSHVE

SEQ ID NO: 94654 - protein, 347 aa, unidentified
MTIVSQEFDHVIGVDTHAKTHTLVVLDCHGARQAGDTFPTSPAGLKRAQAWILRNAPGRVLVAMEGTASYGAQFSDLLTREGIAVAETRPPKRGVRRVGKTDQIDAELAARHALALPVERVITPRTHTGDHAALSVLLTARNAISATRTATLNQLTALLRGYGLGIDARKALTQSQILVVSQWRAHPSDDAGTATIRGEAIREAQEIIRRDSELTHNEAGLVQHVKTIAAWLLDEPGVGPFVAAQLIVAWSHKGRIHGEAAFARFAGVAPIPASSGNTTRYRLHRGGDRQLNRALWVTAFNRSYNDPKTLEYVAKKTAEGKTRKEILRCLKRYISRSLFRKLDSQTA

SEQ ID NO: 94655 - protein, 413 aa, unidentified
MEVIVERGAGLDVGKDEVVACVRTPRSSGKGRQAELRVFPTFTSSLEELADWLARNGVAEVVMEATGPYWKPIWYVLEDRGFDLKLVNAKHVKMVPGRKTDMADAAWLAELLEHGLLRSSFVPPPAIRELRDLTRYRKRLIQTHSAEQQRVQKTLEDAGIKLDSVASDVFGVSGRQMLGALIAGERDPDVLAELAKGTLRKKIPQLREALRGRFRDHHATILKITMDHVAHLEAAIASLDAEVDRVMAPFSAARDHLDTITGVGKRAAECIIAETGVDMTRFPTAAHLASWAGMCPGNNITGGKRRSGKSNNGNRWLGEILNQCAVAASHTRDTYLAAQYWRLTRRIGKRKAAVAVGHSILVITWHLLADNCDYQDLGGDWFARRTDTNKRRDHLIRQLHNLGYAVTLTNLAA

SEQ ID NO: 94656 - protein, 370 aa, unidentified
MLDTTTFVGLDVHARSIKAVSLDVMTGEVRCATFGYDAGAVAEWVRSVDPRARCVYESGVTGFDLQKRLSGLGVDCVVGAVSKMIKPSADRRRKNDRNDAEFLARMLSVGNVVEVWVPDDECEAARDLTRALEDARDDLSRSKQRLSKFLLRHGLAFDERTPTGRRKGNWTRAHWSWIESIRFAEGADNDVLAYYVDAVRRAAEDKARLEGLVEAEARKPRWRKRVDSLRCLKGVDTASAADLVFEAGEFSRFRNARSFAAWVGLTPSEHSSGESDRRGAITKAGNKHLRKTLVEAAWHYLTCSGRPKDLAKGQAPDRGARRHAAKGVRRLVERREALLARGVHGNKANVATARELACWVWAVGLMAEEA

SEQ ID NO: 94657 - protein, 365 aa, unidentified
MSKDIKEPAGETRRYVGIDLGDKKSRVCILDERGEIVLQEWVVTTPEAFLKRFHGEAKMDIAMEVGAHSRWASDLLGRCGHKVVVADPRQLALITKNDAKSDKRDARTLAQLLRADPRLLSPIEHRAEKLQTDLTVIRMRDNLIETRTRLVTSVRGVVKATGGRLPSGETSSFPQQVSDLIPEPLRPALAPVLEVIDRLNEATYEYDCLLEHWARTRYQESSRLTQVKGVGTLTALTYMLTVGDKARFSRTRDIGPYLGLRPRLGQSGDNEPQLRITKAGDGLLRKTLVECAQYMVGPFGQDSDLRRWGLKMIEAGNGSKRARQRAVVGVARRLAVLLMSLWKSGQSYDPLRHSRAQESSAEVAA

SEQ ID NO: 94658 - protein, 341 aa, unidentified
MTTVSTIGLDIAKHVFQAHGADASGQAVFRKKITRTKLIDFLASQPRCLVALEACGGAHYWGREISKLGHTVRLIPPSYVKPFVKRQKNDAADAEAICEASQRPSMRFVAIKDEEQQANGVVFRARDVLVRQRTQCINALRGHLTEYGRVVPKGTSHMATLIDQIEDPNCSLPKSACAVLAVLVTTLKSLEENIAILDAEISRRSREDAIARRLMTIPGVGPISATAIAALAPPVETFRTSRDFAAWLGLTPLQRSTGGKQRLGATSKMGERTIRRLLIIGASAVVSQARRRGAPAGSWLARMLVRKPRMLVMVALANKTARIIWALLAKGEVYRAPAAVA

SEQ ID NO: 94659 - protein, 341 aa, unidentified
MKIHSIGIDLGKTTFHLVALGEHGKILLKKKLSRKQLLALTANLPASRIGLEACSGSHFLARALRDQGHDARLIPAQFVKPFLKSNKNDFLDAEAIAEAVERENMRFVPIKTDDQLDLQALHRVRERLVSRRTAVINQTRAFLLERGITFRKGASSLRRQMPEILENGDAPLSPRIRSLLAMMWGEWKQLDEQVESFNTQIEAICGGDAACQRLREIPGVGPLIASAVVASIGNGAAFRKGREFAAWLGLIPKQYSTGGKVKLLGISKRGNRYLRTMFIHGARSLVLRVNRERSPLGGWISSLEARAHRNVVIVAMAHKLARITWAVLASGERYCPTLMAA

SEQ ID NO: 94660 - protein, 347 aa, unidentified
MRFYTGQHRYYCGIDLHARTMYLCILDHETGKTLLHRNLRSEPERFLEAIEPYRDGLVVGVECVFCWYWLADLCADEDIPFILGHALYMKAIHGGKAKNDKIDAHKIATLLKGGAFPFAYVYPRGMRATRDLLRRRLLFVRRRSELFTHIRIVFHQFNLPAPAAAFHHPRNRLGLTEAIPDPIVRANVEADLAMAERLDEIIRSLVGTIRDRAKVDAPDTLELLQTIPGVGPILSLTLLYELHTIERFPRVGNFLSYARLVKSQKSSGGKVMGTSGAKIGNAHLKWAYSEAAVLFLQKNPPGQRLINRLRSKHGRGKALSILAARIGRASYFMLRRSTPFDMDRFLN

SEQ ID NO: 94661 - protein, 416 aa, unidentified
MEPIVERCCGLDVHQATVVACLLVGRADQKPRKEIRTFSAVTRGLLELRDWLLAEGCTHVGMESTGIYWKPVYAVLEGSLELIVGNAHHIKNVPGRKTDVKDAEWLGHLLRHGLIAKSFVPPQPIRDLRELVRYRRKLVESRTAERNRLSKLLETANIKLSSVISDIFGASGIEMLHALLEGTATAPQMAQLAKQRMRVKIPELELALEGRVEEHHRFLLKMQLRRLEQVDADLMHLEEHIEQLLIPYQEQRRRLMKIPGVDRIVAAILIAEIGVDMSVFKSASHLAAWAGVSPGNNESAGKKKSTETRKGNIHLKTALVEAASAASRKKGSYFKDKFFRLKARRGYKRAAMAIAHKILKTAHRLLSGEGEYQDLGETYLDHLDERRIVSNLVRRLERLGHDVQLTARKVPAPAPM

SEQ ID NO: 94662 - protein, 464 aa, unidentified
MSKIVPVARKTAAESQDRPRGKGQQFAMAYPDACGIDIGSSSHFVAVPADRDGESVREFRAFTADLQALVAWLRQCQITAVAMESTGVYWIPLYEMLDEAGFEVHLVNARHVKSVPGRKSDVLDCQWLQQLMTFGLLRGAFRPADEVCALRAVWRHRDMLLSYQARHVQHLQKALTQMNVQLHHVITDLMGVTGQAIVRAIVAGERNAEVLAALRDRRIKADEAEIARSLQGSWRDEHLFSSKQALALYDAYAEQIAECDVELERLLGALKAHELPDDGLGRPKRRTPAKNAVRHFDTRSALFEASGVDLTRIPGIDTSTALKVISEVGTDLRRFPTVKHFTSWMGLCPGTKISGGKVLSSATKRCSNRAAQALRMAAQALRRSQSALGAYHRRLCARMDRPKAITATAHKLARLIYFMLTKGQPYVDVGQQYYEDRYRERVFQNLTKRAHTLGFQLIPVAAAV

SEQ ID NO: 94663 - protein, 418 aa, unidentified
MKIVFPTCCGVDVHKSFLVATIIKTPKESLQPSYQKKRFSTFNSDLNRFADWLHENDCLDVCMESTGKYWVPVFNILEKRGIRVTIANPKWVKAVKGNKDDTKDSKWIGDLFRIGLVKSSFIPAKDIRILRELTRYRYKLTSMKSSEKNRFQNAFTVCNVALDSVVSDMFGKSATAITDYLTSDEDFDPQHCVSLLHRSLKKKAEDVLSSIEGYEITLEQKCRIGIVRDHLHYIEKLIERVDICINTMVEKYDGAISLLRTIPGIDRSSAITVISEIGVDMTQFGSSKRLCCWAGLTPGNNESAGKKKSVRISRAGVYLKPVLVQAAHAAVKDKLNPYYALKYERIAKRRGKKRAIVAIARMILTAIYSMLSTGEIWNPVDLFKVDMPEHLKEQQLQKAMKQAVRFLEAQGLTVLDSA

SEQ ID NO: 94664 - protein, 373 aa, unidentified
MTISTKFIGLDVHRDTISIAVADGGGDREIRFFGTVANDCEVLRKALASIGKDGATLKVCYEAGPCGFVIYRFLKRLGIDCVVISPSSMPRRPNDRVKTDRRDAQTLARLLRAGELTAVWVPDEAHEAIRDVVRARRQAKQDLVSAKNTLKSFLLRHDRRYPGKAIWGRMHWRWLSDQRFAFAHQQFVYEEYKRRIHELEERCVRLEQVLEEAVLDWPLAPVVTALQALRGIRFIAAVTLVAEIGDLHRFDRPKQLMAWLGLVPAEHSSGARTRRGELTRTGNAAARAMLIESAWQYRYPAREGRALRERNAGLPDHIRAIAWKAQTRLCAKFRRLAGTGKHAAKIVAAVARELAGFIWDIARYTPAPASRLA

SEQ ID NO: 94665 - protein, 348 aa, unidentified
MRIIGCDLHARQQTLAMLETTTGETANLILLHEGNQVREFYSSLPRPVLVGIEAGGSMPWFLNLMEELGIECRVGHPAQIRAAEPRKQKHDRRDAELILKLLAENRFPAIWLPSRELLDLRALLLHRHQWVRMRTRIQNTLQAIALANGLRRGPSLWSKDGQEKIAFLPLMPHTACRRSALQVMYRNIESQIEKLTQQVAEQAENRSAAHRLMTHPGVGPVTALATEVFLGDPKRFADAKALASYVGIIPREYSSGGQQRLGGITKQGSPLLRFLWGEAGAHAVRRDPELKRFYRRKLVQKGLGKARVAVARKLGIRLWIMLRDEIDYLEFCRRGQMQVSGAACGGDA

SEQ ID NO: 94666 - protein, 436 aa, unidentified
MMRIVVKRGAGLDIHKKTVVATRMRVGEDERLVWETKTFGTMTTELLGLYDWLQEWECSQVAMESTADYWKPVFNILEDAFEVLLVNAQHVKHVPGRKTDAKDSEWLAELLIHGLLKPSFIPPKPQRQLRDLTRYRATLVQERARIVNRVQKLLEGMNIKLSSVATDVLGVSGRAMLEALVGDRLSPAEMAQLARGRLRNKLPKLEKALTGIVASHQRKLLALQLEHVDFLDEQVEELNADIRQHIEEMDHLPSSENQPPESGTTDETSTGAPLPPMSYGQALIVLDTAPGVNQNIAERILAELGADMRRFATPEQAAAWTGLAPGNNESGGKRYSGRIQKGNFALRTALVQAAWAAVRDKDTYLRALYNRVVVRRGKKRAIIAVAHSLLKSIWHMLAHHEPYRDLGADYFDQRNKESKVKYHLRQLEKLGCPVQI

SEQ ID NO: 94667 - protein, 382 aa, unidentified
MNEQDNQHDPDRIFVGLDVHKDTISACVLDSSTGEILLEQQLKNQPAAVARLIKRVRSRFGEPRCCYEASSCGFVLFRQLRDLRVECDVIAPSSIPRRSGDRIKTDRRDAEKLASMHAAGLLTGIEVPDPELESTRAMLRCRQSLVEELTRTKHRTTQFLLTRGLSYRDGTNWSQRFWLWMAKVEINEVDQTVLDTYVHLVHYLEAQISALEANLKEEAEKERYREAVAVLSAFRGIAYLTALTLVCELGDIRRFAHPRQLMAYLGLVPSEHSSGNTTKRGSITKSGNTHARKAIVSAAWKYAARPTRGHPLKRRQLGVNPTVIATSWRAQQRLYKRFHALAFRKPRSVAAVAVARELAGFLWEAMQTLTPERALSVTNAPR

SEQ ID NO: 94668 - protein, 456 aa, unidentified
MSKQRKSTMPSVHAKPTQRKHAAGIDIGATSIYVAVPVDRDPQPVRSFQTFTEDLHRLADWLQRCRIKTVAMESTGVFWVPLFQILEQRGFEVCLVNAHHVKNVPGRKTDVADCQWLQYLHSVGLLQASFRPAQQVCALRSLLRHRDSLVQTASTYAQRIQKALDQMNLQLHHVISDITGVSGVTILDAIVDGERDPLKLASLRDYRIKATTETVAKSLVGDYRPEHLFTLRQSLDAWRYHRKLIAECDDEIQRHLVQFASKADPKQNPLPRPRKVSSSKVYSSALGYDLRTEHYRILGVDLTEVPGINTLLVHTLLAEVGPDLSKFRSAAAFASWLGLCPDNRISGGKILSVRTRHVQNRAALALRIAAHTLHHNQSVLGHYYRRMRAKLGAPKAITATAHKLARILYHLLTTGQPYQESIFEERETQHQQRTLFSLHARARALGYQLIPLAQAT

SEQ ID NO: 94669 - protein, 358 aa, unidentified
MRIIGVDLHARQQTIAMLDTETGELVEKRLEHEGEKVREFYSALPGPVLVGIEATGSMPWFLKLMEELKIACQVGHPAKIRAAEPRKQKHDRRDANLLLELLAEKRFPSIWMPSTEQRDLRTLLRHRHQWVRMRTRVQNTLQSLALSNGLRRGSSLWSQAGQQALQALPLAPYTDQRRAALLRLYPRLQKSIDDLDEQVGKQARQRPQARWLMTHPGVGPITALATEVFLGDPRRFADGKAVASYIGMIPSEHSSGRRQRLGALTKQGNTLLRYLWVEAAMHAVRRDPELKRFYRRKLVQKGLGKARVAAARKLGIRLWIMLRDQIDYKEFCRRGQMRQKSSGACAGMPDFNSGPALQ

SEQ ID NO: 94670 - protein, 328 aa, unidentified
MSKERFYVGIDVGCSEVWVVAGKSKARKFSHNDQGVKQLYRWAKEKSGELLLHFCMEATGVYSQSVAVRLLGRGRCEVSIVNPAQIAAFAKAQMRRSKTDQIDAQVIWDYAQSQQPHPWQPERQAIQHLAALVTQADALQKTLRSWQNRCHAHQYHSDLPRTVQQTTAKVEQMLRRQLEKVQQEIHRLCQADEELKRDVGLLCTIPGVAELTATRLLAYGKSALTERSPKELTAHAGLAPRHRQSGTSLNGKSRLCKQGDARLRFLLYMPTIVAVTFNPIIRYHYLRHLANHKPKMVAIMACMKKLLLMAQAILISQKPFNPNLKPLT

SEQ ID NO: 94671 - protein, 382 aa, unidentified
MAGTEPHAWGTGLMDDITYVGLDVHKATVCVAVAESGRGGEIRQVGVFENRPEILCKMAARLGKGGRRLSFCYEGGPCGYGLHRLLTGCGHSCIVVAPSLIPIKSGDRIKTDRRDAMMLAKLHRAGELTAIWIPDAAHEAIRDLVRARATAGQVLSKARQHLQGFLLRHDRIYRGVRAWTLAYRRWLTTVRFEHPAQQIVLQDYIHAVEDAEARRDRLTRQIEEMLPSWSMAPVVTALQAMRGVALVVAVTVVAEVGDFRRFANARQLMAYLGLVPSEHSSGSTIRRGGITKAGNALARRVLIEGAWTYRMTARVSRKLHDRLEPLSAAIRDIAWKAQVRLCARYRRLAAAGKPKVVVTTAIAREMVGFIWAIARIAQPALA

SEQ ID NO: 94672 - protein, 456 aa, unidentified
MNFSNFSAPNNIVDDTFQKREARPGDVVMLNDLAADAIGKNPVVPDWADAANYAISQPLAGSLVRLGTLNAGGADEAWQIVRAARCSEDCSYIGMDLHSTNVVVSIVCNVRDGHGRIVRRKLLNRRVDTRDGGVVLAQVLEPFCDEGRPHIAVVESTYNIYFIADLFELKGWTLLIADPCAVSQARLKATNDYTDAEYLAEKLCSDSLHVSLLLPHEDRATRDLVRLRMNVVQERARAKIIFINMTSNQLGFTVDGSLDKLARIAFEKGTDCQELVDIYPDSKVREKAAFFLRHIHYLNSEVEHLNEIIHPDIRKLDDAKLLKAIPGCGDVIASTIVSEIWDINRFPSAKDFVSYCRLAPTSRLSNGKSKGMGNAKNGNAYLSWAVTELANLIVRFNKTAAKMYARLFKKYGKLRVKAIRSLAARLARAIYHVLKTKEPFDEEKCFGFRVVEAESC

SEQ ID NO: 94673 - protein, 429 aa, unidentified
MSYRIAGIDVHKKMLAVVVSNVEVESEFQFERRMFGGNPEQLRLLGAWLLEQEAEEVVMESTAQYWKPVWGALERYWKPIREKREGAKRRSGTLHLAQAQSNRGQRGRKKDFVDAERLVKRLVARELTLSFVPDVEQRLWRAVTRKKYQLRRDLVRLNNQLESLLEETHIKLSSLVSDLLGVSARRMLNALADGETNPAALAALAHQRLRATPDQLCDALGACTELKPVYRRLVKMALEQLQILEQQIGQLDQELATLLHPHQDAVQRLAEVPGFGVDSAQQIIAEVGPAAATFPSEKCLSSWVGACPGDEESAGVNYSHRSPKGNRHMRRLLNQAANAAVKVKGSIFEVIYRRCVPRLGHNQAIGVIAHRQCRLIWLILHNGALYEERGPAVTTLSKYKRTWRMIRQLRQLGYRIESPNPQPSQAPAQ

SEQ ID NO: 94674 - protein, 414 aa, unidentified
MEIVHSRCAGMDVSKRDAKVCIRVAGRGRRKTVETVRTWGSTTNAILALREHLINEQVSLVVMEATGDYWKPFYYLLEDADFEVLLVNARQVKNLPGRKSDVSDAAWLAQLGAHGLVRGSFVPPAPIRELRDLTRARTAMTRERGREIQRLEKLLEDAGIKLSSVASDITCVSGRLMLQALIEGQHDPRVLADLSKRRLRAKIPELTEALTGRFSDHHAFLAGMYLDAIDQRSRQIAELTDRIEVVIEPFRSFCDLIGTIPGIGQRSAEVIVAETGPDMSIFPTAAHLASWAGCCPGSNESAGRIKSTATRPGNPYLKAALGAAALSIANTRETYLAAKYRRIAARRGPKKALVAIEHTILVAIWNMAHTGALYDDPGADYYTRRNPERARRNAVNQLQRLGYQVTLTPTAASA

SEQ ID NO: 94675 - protein, 333 aa, unidentified
MNNYAVYVGVDISKHSFTTTLLFEEIRKTFNVSSKPEEFENKFRPHLNEIGVDKSNVLILMESTGNYHLHLAEYLAERQYNVGLVNPFSMKRFMDAKMSRAKTDKVDSYFIAEYGRQIFEGPLFRPKTEAQKQIEAKVKILEDFYKELTRVKNQREALSLRPMKGLKKNLAYYDRVIEFLKEQIKELEKEIRRLCKEHFPEEYRLLKSMPGIGDRAIAVVVSILRNFKGFKRAKEIASFVGICPSPVESGSSVKGKGSIKKRGNAYVRQVFYMCALSAVRCNRYCKDLYERLLGKGKSKTEALVAVAHKLLRQCYGVLKSRTPFKVVEKEITP

SEQ ID NO: 94676 - protein, 342 aa, unidentified
MKVMMIGVDLAKNVFQVHGALHTGEVQFRKKLTRTQFPVFMAKQEPCLVIFEACGSAHYWAREMAALGHEVKLIAPQYARPFVKRQKNDAADAEAIVIAARQPEMRFVEPKTVQQQSRAAIFRGRERLVHQRTADVNALRALLYEHGHVFPQGIRRLNRITALLEDKTADLQPLIREECLDLLAQIEEKTARIIERTAKLKTLAGKSDSARRLQTMPGVGPLTAIAVEAFGPDMAQFKTGRDFAAWLGLVPKQHSSGGKERLGRMTKAGQADIRRLLIIGAMSRLGWLGQRTITEGSWLSRMLARKPKMLVAIALANKMARQIWAMLTKNEDYKDPALAVAA

SEQ ID NO: 94677 - protein, 423 aa, unidentified
MSVKNCLYVGVDVSLKSLMTCILDIGGEKILKSTSFSNTPDGVNEILNNILEHSIKLDITHILIGIEATSVFGNHLFYTISDSEILSNYAVQMYCFEPKIIKNFRETLGDLPKNDKMDAWVIASRLRLGNLPNEYYINFKQLGLQRLTRFRYHIVQNITREKTYLLSCLFLRFSTLTQQKIFSDNYGATAEALLTDLCSADEIASKSIEELIDIIAIASRNGFSDIHKTAISIKAAATESFKLEKNLNSSINLVIKSCFDNISALEKTQKTIEKSIQLQIKEWFKNEYTILTSIDGIGTVIAAGIIAEIGDIRRFPTDDALAKFAGLVWSQYQSGEFEAEDTKLRKTGNVYLRSYLCQAANCMRLHNPDFNMFYSRKFKEVKSHQHKRAIVLTARKAVRVIFTLLHKNRLYTLPKKGGVPIET

SEQ ID NO: 94678 - protein, 389 aa, unidentified
MRLFVGLDVSSFDMKVCFLNGDGEKLDSFSVSNDLPGATTLKEKLLQCIAGKEVDILKIGLESTSVYSFHPSMFLHHDIDLQRFGAKVFLLNPKQVANFKKSYSDMNKTDEIDAFVIADYLRFGRNQMSIVKESQYVALQQLTRSRYQLVKMLTKEKQHFLQHLSFKCNTFSQEVDTSVFGSAMTELFLEKFSLEELANMPLEELAEFLQEKSRNRFGDPKCVAASIQKAVKASYRLDKVVEDSIDVILGTSIAVIRTFQQQIKELEKSIKKIMAGLTQTLESIPGVGPVFAAGIIAEIGQIERFDDETKIAKYAGLYWRKHQSGRFTAEDTSLSRTGNHYLRYYLVEAANSVRKHVSDYQEYYVKKYNEVPKHQHKRALVLTARKFVL

SEQ ID NO: 94679 - protein, 341 aa, unidentified
MNVKTIGIDLAKNVFQIHGVDEHGKRLFNKQLRRAQMASFFANIPPCLIGMEACASAHFWANKLISMGHNVKLMAPQFVKPYVKTNKHDAADAEAICEAVTRPNMRFVPVKTSEQQAVLALHRSRQSFIKQRTAQANQIRGLLAEFGIVVPRGIQQLQRRLPELVEDADNPLPVLFRTQLSLLQHHMAYLFDVIATLDKQIEQCYRQNALCQRIGKIPGIGPVTASALIATIGKANNFEKGRQLAAWLGLVPRQHSSGGKQVLLGISKRGDTYLRTLLIHGARAVLQSAKHKQDAVSSWANQLMARRNNNIASVALANKNARTVWALLAKEREYCAPIISA

SEQ ID NO: 94680 - protein, 333 aa, unidentified
MVEGTKGSHHKEGTTKMAKHSMVCAGIDTGKHKLDVALDQGPEQLQVDNSPDGHTSLAAWLRQRRVRRIGIEASGGYEQAVVAALRRDGFSVILFQPAQVRAYARFILQLAKNDKIDAALIAACTAATKTIREPPDPRLTALAGHLTMVEQITEDIARLKTRCESCRDERIRQCWKEEITRLRTMARSEFKLLLAAIREHRDLAERLDLMVSVEGVGLKTAVDVLIRMPEIGSLSREEATALAGLAPYDDDSGTRTGQRHISGGRERLRTSLYAAALPAAFKWNPQLIAFYRRLIAKGKSHKQALVACARKLLIFLNTVVARRTPWASNPAEV

SEQ ID NO: 94681 - protein, 392 aa, unidentified
MFFVGIDIGKNNHVASMMDDSGKVVFKAFSFPNTSDGGHALFSKLTSYSSNTDDFEIGMEATGHYWLSVYSFLFEKEFLLHVVNPIQTDGWRRGTEIRKRKNDIIDSVLIADLIRYGQFVETRLADEDLFSLRTLTRFRTYLVESISDLKRKVVCVLDQVFPEYQSIFSDIFGKTSKEILLQFSSPIDFETVSSQTLAELLAKLSRKQVGSAKAAQLKAAASCSFGVTFAKSSFTFQLKALIEQIAFIEKQVKETETEIAGIMEKLESPITTITGIGNVTGAAIISEIGDISKFDSPRKLVAFAGLDATVTQSGEFEAAHNVMSKRGSPYLRKAIFQAALVAAFKDPVLSAYYQKKRAEGKHHLTCIGAVARKMCNIIYAVVKNNQPYVPKA

SEQ ID NO: 94682 - protein, 751 aa, unidentified
MTKSRTGDQPDLQMVNPNAAAIDIGSTMHMAAVNPDTDAMPVRAFGTFTQDLHDLADWFRSCGVTSVAMESTGVYWIPAFEVLEAHGFEVILVNARYAKNVPGRKTDVSDAGWLRQLHSYGLLRGSFRPEAEIATLRAYMRQRERLTEYAAAHIQHMQKALMEMNLQLHHVVSDITGATGMRIIRAIVGGERDPEVLAAFRDVRYKCSMDTIKAALVGNDRDEHVFALTQSLELYDFYKVQIEAFDRKLEAAVGALTVRADNDLAPLPKARVKGKQHNSPSFDVRAALYGVLGTDLTQIHGLGSSLALKLVAECGTDLRAWKSAKHFTSWLCLAPGNKISGGKLLASRTRRSSCRAAALLRLAAVTIGRSDTALGAFYRRLSSRIGKQKAVTATARKIAVLFYNAIRHGMTYQDQGAAAYDERHSATSALQPSTARQDTGLRLGAHARGTGCFLGRLRLTSRGKRHDVRVRRETSAYLAGQLDVRRAGRLPVWLPCLAQTTDQRPGELRREARRGDRQELQGQRSHLWRPPGLARRARGRAGLRAAPDERLMRQNAMRARPKRRGTPKDDGARSVIADNILDRDLQADRPNQKWPADFTYIWTAEGWLYVSVVLDLFPRRVVGWSMKADRDASLVMDALMMAVWRRGKTDALLHHSDQGSQYTSEQFQRLLLDNGITCSMSRAGNVWDNSAMESFFSSLKTERTARKVYRTRDAARADVFDYIERFYNPRRRHSTLGYLSPMAFEDRAMQT

SEQ ID NO: 94683 - protein, 433 aa, unidentified
MKYKQKDKKNQRIQQITENTLIVGADIAKKKHYARAIDFRGIELGNRCIFENHRNGLMSLVLWMKELQKVHQKSNILFGIEPTGHYWFPLAEFLRKEGIKVVLVNPHHVSKSKELEDNSPTKNDLKDAKVIANLLKNGDYTEPKLPTELFADLRVLMNLREKVSNNLNQAKLRVQNTLDRYFPEYLQVFKDWSGKASLITLRNFPFPQDIITLGAMEVLRTWKTEVKRGVGIKRAQKLVDYASSSIGLTEGCAGARMELVILLEQFDLYNRQLEDIMNKVRNLIEQIPGTSEMLTTPGVGEVTLAGFLAEVGNLKDYDHPQQIIRLAGLNLKENSSGKHKGKSTISKRGRSRLRALLFRCVLPMVSKNKEFQYLHQYYTTRQQNPLKKKQSIIALCGKLIRTLYYLGTREIPYSPIDVLGPMHSQSIEIGLAA

SEQ ID NO: 94684 - protein, 350 aa, unidentified
MPRKVGTAIVTIGIDPGKNILHLVGLDARGEIVLREKVARTKIVSRLANMPPCLIGIEAGMGTHYMTRDLLALDHDVRQVPPAYAKPFRQTHKNDFRDAHAVAEAVQRPTTRCVPPKTDEQLDLQALHRVRYRLVGQRTAIINQIRCFLLEHGITVRQRLHWLRHALPNILAQTTDVLSPRMVRILEDLAQDWRHLDDRIETVSGEIEALSKNTEPCRHLMTIPGIGPIISSAVVAAIGNGIAFTRGRDFAAWLGLVPKQISTGDRTILGRITKRGNRYLRMLFMQAARVVLLRPRNWMKHGFGPWLAAAAQRLHHNVLATALANKLARIAWSVLAQHRVYEARLRVVAI

SEQ ID NO: 94685 - protein, 344 aa, unidentified
MENYAGIDVSLELSSVCVVDAHGKILKEAKVASEPDAFVEFFEKLGFAVKRIGLEAGPLSQWLHARLKRAGFETVLLETRHVKAALSAMTVKTDRKDARGIAQLIRMGWFRPVHAKSIGAQEIRALLVARKQLLGRLIDVELSIRGILRGFGLKVGPVTRKNFEARIRELVAGQATLERIATSMLSARSALKAEYGRLHKAVLAIVRDDAVCRRLMTVPGVGPLVAITYKSAIDDPHRIVKSKAAGALFGLTPKKYQSGEKDVTGGITLAGDEIVRTALYEAANVLLSRITRFSKLKRWGMDVAKRRGSKRAKVALARKLAVILHRIWVDGTTYRWAEAGSIAA

SEQ ID NO: 94686 - protein, 343 aa, unidentified
MQTVTTIGLDIAKSVFQVHGVDAAGQVVIRRKLKRRYVLAFFRKLPPCLVGIEACASSHYWARELQALGHTVRLMPPAYVKPYVKRQKNDMADAEAICEAVTRANMRFVPIKTPEQQSGLVLHRTRHLLIRQQTAVINAIRAHLAEFGIVAPVGRKGVEELLRVVANGNDKRVPDVVRACLGALGTQLLSLKKQILELDRMIMAWHRSNETSRRLHYIPGVGPLLATALVANVADPGAFRSGRNFSAWIGLVPKQHSSGGKDRLGGISKQGDRYLRSLFVAGALSVIRYAKAHGSKHRPWLTALLARRPAKVAAIALANKLARTAWAMMARGERYRNPVALAA

SEQ ID NO: 94687 - protein, 376 aa, unidentified
MGLERTSVGLDVHARSVSAAAIDGTTGELIRQRLVPDQRVVIDWVRGLPGPAAVTYEAGPTGFGLARALAGAGIRCEVAAPSKIVRPSGDRVKTDARDAVLLARLLRLDEIVAVRVPTVAQEAARDLVRAREDTRGDLMRVRHRISKLLLRHGHVYYGGTAWTGRHEQWLTQIRFDGPERAGTRAAYDADREALTLAVLRRRRLDEQIDQLAADSEFTAITRRLCCLRGISTLTGFALAVEIGDWDRFTGASIGAYLGLVPGEHSSGGSRHQQGITKTGNAHVRRLLVEAAWHHRPIYRIGATMRARWAQAPAAAQARGHAGNQRLHARWTQLSTRKKTHTVTCVAIARELAGWCWSLATLPDTATPDTATPDTAT

SEQ ID NO: 94688 - protein, 358 aa, unidentified
MQIIGVDLHTRQQTVAMLNVETGEIVEKTLRHEGDAVREFYSTLAGPTRVGIEATGSMQWFLELMEELGIDCQVGHPAKIRAAEPRKQKHDRRDAALVLQLLIENRFPSIWMPSREQRDVRSLILYRHQWVRIRTRVQNALQAIALSHGLRRGSSLWSEAGQQAIASLPLTRYTAERRTALQSLYGHLEKRIDDLDRKVEELAWQRPQARRLMTHPGVGPITALATDTFLGEPKRFVDGKAVASYVGLIPSEHSSGGRQRLGGLSKQGNPLLRFLWCEAVGHAVRKDAELQRFYQHKLVQKGLGKAKVAAARKLGIRLWILLRDQIDYQEFCRRGQLRQKHGGAHAGMPACEHDPAQQ

SEQ ID NO: 94689 - protein, 319 aa, unidentified
MAKNPEGLYVGIDVAKAQLDIAVHSTGLRWRVVNDQEGIGTLVERLRDLAPALIVLEATGGLQAAVVAALGTAKLPVVVVNPRQVRDFAKASGRLAKTDAIDAEVLAHFAEAFKPDPRPLPDAQAQALEALLARRRQVVGMLVAEKNRLGTALPTVHEDIRAHIAWLEERLAKLDGELKDTIRQSPLWREQDDLLRSVPGVGQVLSITLLAELPELGNLNRREIASLVGVAPLNRDSGTLRGKRTIWGGRARLRAALYMATLVATRCNAAISSFYQRLLAAGKAKKVALTACMRKLLIIINAMMKHNRPWNPKIASQNP

SEQ ID NO: 94690 - protein, 321 aa, unidentified
MKRYAGIDLQANNSVVVGIDEEDRIRYQKRWRNELTELLQALTPYQETLQGIVVESTDNWYWLVDGLMAAGYRVHLANTTAIEQDKGLKHTEDESDARWLAHLLRLGILPEGYSYPKEERAVRDLLRKRSQLVRQRTSNLLSIQNLLTRNTGSSLSGNRIKQLTVEEVEQILPQAELALAVKSNLAVLQCLEEQSEQIEEVVLAHLKLREGFRPLLTVSGIGQILGMTIRLETGEIGRFATVGDFASYCRCVSSQKLSNGKRKGQGNPKNGNKYLAWAFVEAANFAVRYTAQLKRFYQRKHAKTNGVVAIKAVAHKLARAC

SEQ ID NO: 94691 - protein, 412 aa, unidentified
MDVLHACCCGLDVHKEGVTACVLWAEEKGKKRKEKREFGTMTRDLLALSDWLQACGVTHVAMESTGVYWKPVWNILEGQFEVLLVNAQHIKAVPGRKTDQNDAEWIADLLQHGLVRGSFVPPTPIRELRDLTRYRVSLVQECNRIANRIQKVLEDGNIKLASVATDALGASGRAMLKAMTEGEEDVEKLAEMSRGLLRNKIPELQRALEGRLRSHHRFLLKELMEHLEFVESKIARLEREIGEHLRPFEEMVERLCTIPGVEWVTASGLVAEIGINMKQFADAEHLASWAGLCPGSYESAGKRKSGKTRKGSAWLRRCLCQAAWAVSTKKNNYLSALYRRLAARRGKKRAIIAVAHALLQIAYCILRDGKCYRELGADYFDRLHPNRVKRYLVKRLERLGFQVSLAPAPEPA

SEQ ID NO: 94692 - protein, 445 aa, unidentified
MPRGESAPDLCPAFRAPVQGSAEVTVARRLELGKDMTDQRQWYVGVDWASESHHVFLTDADGRKIAERVFKHGGEGLAEMAAWLVAASGAEASQIQVAIEVPHGPVVETLVERAFKVHAINPKQMDRFRDRYTLAGAKDDSRDAQVMASALRTDPRCFRLLAAADPVVIELREWSRIAEDLSAERNRLTNRMREQLWRYFPAMLELDGDLGAEWLLDLWEVVPTPAKALRIRDKTIATLLKRNRIRRFDATHVLDVMRKPPVRVAAGTTEAASAHISALVARIRLVNRQLVQAHRQIDALTARLIPPEPEPGQRKQHDVEILASLPGVGRIVLATLLAEAFDALQRRDYAALRSLTGVAPVTKRSGKSCIVVRRQACHDRLANAMYHWARVAVQHDPRSRAKYAALRSRGHSHGRALRSVADRLLNVACAMLKTGTTFNPSPVAP

SEQ ID NO: 94693 - protein, 361 aa, unidentified
MSSVSHLGPIHLGLDVHKDTISVAILAPDRDGPDVERIPHDEASVRRLVGRLGDPRWLRACYEAGPTGYELARLLHSMGVRCQVIAPSLIPKAPGDKVKTDRRDCRRLARLHRAGELVAIRVPTVQEEAVRDLCRARADMVEDRTRARHRLSKFLLRHGRPWRGGNAWTLTHERWLLAQRFHEPALTATYGHYRAVLAGRDAQLEAIQADLTGWYDTAPFADAVHRLSAYRGVTRLGALTLASEVCDWRRFGRAAAFAGFCGLVPSEYSSGTSTWRGHITKCGNAHLRAQLVESAWAYQHRPAVGLELHARQQGLDPQVVARAWAAQLRLCGRFRRLAARKNSKNVVATAIARELAGFLWA

SEQ ID NO: 94694 - protein, 341 aa, unidentified
MDHYVGIDLHADNNYIAIIDHDNKRVFKKKTKNDLRLVRQALKPYRDQIQGIVVESTYNWYWLVDGLIEEGYTMHLANPTAIKQYSGLKHSDDVTDAFHLANLLRLGILRTGYIYPKEERPIRDLLRKRMQLVRQRTLQIQSFQNLVSRNLGKGMNGNAVKKLSEDDVEHLFQDKHLVVAGKASIATIVFLSDRVRELEKTIHKVAKLKDEYRLLMTVPGIQKILALTIMYETGPIERFEKVGNYASYCRCVGSRRLSNDKVKGKGNRKNGNKYLCWAYVEAAHHAQRHYECVKRYYQRKMAKTNLIVARKTIAHKLARACYYIMRNQTKFKPSRVFGMWQ

SEQ ID NO: 94695 - protein, 405 aa, unidentified
MPYILALDVSMGHSYSVLYKDDTCLFEDEIEHTQRGFHALLEEIQHLPERPLIVFEATGIYSRPVEKFFQDHHFSYCLLNPLEAKKQMEESTLRSWKTDKSDAHRLAQTHLKNQRQPKEVQSNFYLEMRDLARFYQEIEKKITRLRMDLHNCLQLTFPELEQFFSNRLTPYALTLIRLFPHPDFVLASTRTKIKNKLINETRKKISANRAEQKADQIIHYAQCAYPAVEKDSIHCQKTIYYAELLQDLLEQKKALATQMIKKAEGSPCFLLYQTFPGIGALTAALLLGELGDITRFKTHKQLNAFVGIDIRRYHSGKYTGQDRINKRGNPKARKIIFFIIRNMIRQQRAAPNHIVDYYYKLKKQPIPKKEKVATVACMNKLLKCMHAMVRAHTEYDYAYAVSVDH

SEQ ID NO: 94696 - protein, 353 aa, unidentified
MSNDKYVAMDVHKASVSIGVRDAAGKMISRAVVETKAQTLKDYIRGLSGTIHLTFEEGTQAAWLYDLLRPLVAECIVCDPRRNKLLESGNKSDEIDVDKLSELLYLGGLRAVYHGAQGTRALKELAHNYDALVKDNTRIKNRLKAIFRGRGISYEGGEIYDNEQREQWLVQLPERGVRERASQLYEQLAQLDEWVNKARQQMLRESRKQKARKILEQIPTLGEISVAQLIATIDTPFRFRSKRQFWTYCGLAVVRHTSADYRFEQGEIRRRTKPGPTRGLNRNYNRRLKRIFKTAALAGSLKGPFKPYYERLVARGLDSELAQVTLARKIAAITLTLWKRGASFDREKLITTE

SEQ ID NO: 94697 - protein, 338 aa, unidentified
MQVARIGLDIAKSVFQIHGGDEHGKVVVRKQLTRSKVLPYFAQLPACRIGMEACGSAHYWGRELQELGHDVRLMAVQFIKPYRTKQKNDRNDAEAICEAVSRPQMRFVPIKTVEQQAILTVHRARELLVSERTAVANQIRGLLLEYGIAIAAGLQRLRRELPAVLTTTEEVLPTLARNVVSELHERLQELDERIAGHDRQIAQVAKQSEAAKRVMAVEGVGPITATAVVATVGDAKAFAHGRQFAAWLGLVPKQFSSGGKAVLGRITKHGNVYLRTLLIHGARAVLQSTAKRTDAKSVWVEALRQRRGDNIAAVALAAKHARIVWALLARGQEYQLAV

SEQ ID NO: 94698 - protein, 322 aa, unidentified
MSSPSPVNVGIDVSKETLDIAVHETETHWISKHEFSEFPQLLRSLQALNPTRIITEASGGVENLLVSYLAAAGLPVIVVNPRQIRDFARATGQLAKTDRLDAFVLARFGATIEPNVRQLKPAETQELGALVARRAQLVSMLTAERVRLQQAQQQHRQAIVADLKAHISWLEKRLGKCEGDLSQLLRSSSIWRAREERLRSVPGVGPVTTLVLIADLPELGQVPDKQIVALCGLAPHARDSGKWHGKRMTRGGRARVRTALYMAALVATRHNLVIKTFYRRLLRAGKDKKVALTACMRKLLVILNAMFRNQTSWQPPRLQDLI

SEQ ID NO: 94699 - protein, 403 aa, unidentified
MIFVGIDWAEAHHDVCLVDESGQVLAKRRVDEGLEGVGKLHALVAEYAQEPASVVIGIETDRGLLVGSLLAAGYQVFAINPLAASRYRDRHATSGAKSDPGDARVLADLVRTDRHQHRAVAGDSELAEAVKVLARAHQSLIWSRQRQVNQLRNTLREFYPGALAAFEDLDSPDAIAILELAPTPNRGRALSQAKIASALRRGGRARNLETKVTSIQSHLRQPQLEAPALVAQAYGHSVAANVAVIKQLNQQIAALEQELAASFETHPDAEIYLSLPGLGRVLGARALAEFGDDRTRFAHPKARKNYAGTAPITRASGTRKVVLARVARNRRLGDACYRWAFSAITTSEGTRRRYDLLRARGQTHHQALRALGNRLVGILHGCLANRDIYREDVAWHSALEVAA

SEQ ID NO: 94700 - protein, 341 aa, unidentified
MDEVTTIGLDIAKQVFHAHGADASGRRVFSRRITRAKLIEFFAAQPRCTVALEACAGAHHWGRELQRLGPEVRLIPPVYVKPFVKRQKNDAADAEAICEAAQRPTMRFVPVKSEEQQASAAVFRARDLLVRQRTQLLNALRGLLAEHGWVAPKGLFHAGAMMAKIEDPGCALPPSARDVFLVMIGSAKALDERIGLLDREITKRAREDETARRLMTIPGIGPITATALVALAPPPESFRKGCDFAAWVGLTPLQRSTGGKARLGSISRMGERTLRRLLILGSAAVVLQASRRGAPKGSWLEQMMARKPRMLVTVALANKTARIVWAVLANGGVYRAPAVAA

SEQ ID NO: 94701 - protein, 411 aa, unidentified
MDVVNARCAGLDVHKATVVAGVRVPGPQPGARRGETKTFATTTRGLRDLTNWLLTHGVTVVTMESTGVYWRPVYEALEGLVQLVVVNARHVKMVPGRKTDVKDCEWLAQLLECGLLRGSFVPPRAVRDLRDLTRLRKALIRERGHHVNRIAKTLELAHLKLSCVVTDLMGKTGRAILQALSAGIDDPARLAACAQGLLRKKQAALREALGGRLTPHYAFLLQQHLSLIDGLDAHIATLDTRIEAAMAPFAEAAALVQTMPGVAARAAQAILAETGVDMDLFPTPAHFASWARLCPGNHESAGKRQNTTTGKGAPWLRATLQETAWAAVRSKKSYYRALYHRLKGRRGAKRAIVAVQHAMIVALWHMLKHRVAHHDLGADYFERRNIARIRRHHVRRLEQLGYDVTLRGKAA

SEQ ID NO: 94702 - protein, 408 aa, unidentified
MEVLYPRCAGLDVHKDAVVAAVRCVSPPVHHEVRSFATTTQGLLALAEWLGSHRCTHVAMEATGVYWKPVWHLLDEAFELVLANAQHVRNVPGRKTDVGDATWIADLLAHGLIRSSFVPPAAIQELRDLTRTRKPLVREISQHSLRIQKVLEDANLKLGSVLSDVLGQSGRAMLTAIIAGEQDPERLAGLALGTARRKHAALVEALRGRVTAHHRAMLQLHLGLVDALDGALREIDGRVGKSLEPIRASARLLTTMPGVSDLVANVIVAEIGMDMTRFPTRGHLISWAGLCPRNDESAGKRRSVRVRKSANWLKTTLVTAAWAAVRVKDSYLHAQFLRLRARRGAKKAILAVAASMLTAAYFMLRDGVEYQDLGPDHFDRRDRTRVIHRLLRRLSDLGCQVTLAPEAA

SEQ ID NO: 94703 - protein, 350 aa, unidentified
MLIIGCDFHPAWQQVAWLDTETGETGERKLVNGEGEAERFYRSLSEPALVGVEACGNSQWFVEMLQRLGHEVWVGDAAQIRASYVRKQKTDKRDAAHILKLLVEGRFPRLWMPSTEQRDVRQLLVHRHKLVEIRTRVKNGLQHLAMNRGMQKKSKLWSEAGQKALRELPLQGWAARRRQDLLGLLKSLDEQVRLLDQAVEETAQRDKMAQLLRTHPGVGPLTALAFVVTIGDASRFRRGKQVASYLGLIPREHSSGGRQRLGAISKQGNRFLRFLLGEAVHNVIRLDEGFRKQYRQRCHRMAKGVAQVAAARKLAVRLYWMLRTQTAYPEIVRIESSPAVALVSRKTARP

SEQ ID NO: 94704 - protein, 386 aa, unidentified
MQKLNDLSRSLTALEPNGTLIAVIEMSLSSWLVAGIVPGVERQPLKKLAVDESALLKLLHRWREEAEKAGRRIERIAVAFEAGRDGFWLARWLKARGIEAYVIHASSVAVSREHRRAKTDRLDIELLKRSFLGWLRGERDHCKMVEIPTMQDEDAKRPNREHDSLIGERSRIVNRMKAALVRLGIRGFNPKLKRATTRLDGLHTPEGEPIPPNALAELRRDMERRRLVNNQIRQIEEERLERIEQAPCDGAHVMVRLLARVMGVGIETADMLVHEVLSRNMRDRRAVARYAGLTGSPDESGRKRREKGLARSGNARVRRGMIQLAWRFLLHQKNSALTKWFRSRTENARGTRKPMIVALARKLLIALWRLMREGIVPDGVVLRPAQ

SEQ ID NO: 94705 - protein, 320 aa, unidentified
MRNAVGLDISKLTFDASAMVGNAEYSAKFDNDSKGLNQFSDRLKSLGCQNLHICMEATGNYYEEVADYFAQYYSVYVVNPLKISKYAESRFKRTKTDKQDAKLIAQYCRSAQESELVKRQKPTDEQYRLLRMTAAYAQIKSECAAMKNRHHAAKDEEAAKAYAEIIKAMNEQLEVLKEKIKEQTEKPNCKEGVKRLETIPAIGRMTAAVLFHHLTSSKFETSNKFAAFAGLSPQQKESGTSVRGKGKLTKFGNRKLRAVLFMPAMVAYRIRAFPDFIKRLEEKKKPKKVIIAALMRKLAVIAYHVHKKGGDYDPSRYKSA

SEQ ID NO: 94706 - protein, 391 aa, unidentified
MSLYFVGIDISKYKHDCCILSAADQKVVSKFTFKNDLQGFEQFLSALSSLSSPEDIRIGFESTAHYALNLELFLENAHHSFMEINPVLIKEYKKSTSLRRTKTDSVDCASIAHWLMTVEYKPHSKGFYHAYSLKSLTRLRDKLVRQRSFYLVKITNVLDHTFPEFKPFFHERLSKTALYLLETYGSAERMSRMDSASYDKLRSLSRGKFSPQQFLRLKELAANTVGVNNSIFDTELNSLLTLYKSLVKEICILEEEINRLIREVHPHYMSVPGIGTISAAVIYSEYGDISNFSSPAQMLAFAGIEPGINDSGTESHKGRMVKHGSSQLRYVLINCCLPLIRFDMTFAAYYAKKRAEGKPHRVAITHVAKKLVRVIYALEKQGIDFNAQKLR

SEQ ID NO: 94707 - protein, 345 aa, unidentified
MKKVFIGIDFSKLKFDATVIKADGIAESSARVHSSFTNDVKGYREFLRWVKSSAPGTGVPEWLFCGEDTGIYSVPLSKHLYGKGYDIWIEDAYRIKHSVGIQRSKSDKADSANIAEYAMRQQDKAKLYTPLSPSLESLREVFLFRYKLVQEKCSLQTRTNEKREVLGKSQALSFMARKARHLIAELEKAIGECDNEMRRLIMEDEELKENFEIITSIKGVALQNATGLIVYTDNFRKFDYDARKIACYYGVAPFGKTSGTSVKQQPHVSKLANRMLKALLSEAAKCAIRFCDGIRNYYCRMVAVGKKHGVAINNVRNKMLHIIVAMVRNKRKYDPCYRLQTINAG

SEQ ID NO: 94708 - protein, 468 aa, unidentified
MGTCHVKKAAARGQAKDGLFEVINPNAAGIDVGASEMWVCVPGENDRERVRSFGTDTVELEAIAAWLLQRGVRTVAMESTGVYWIPLYQVLENHGLEACLVNARHAKNVPGRRKTDRLDCQWLQKLHACGLLSASFRPPPEICRLRTCMRHRATLVQEQAAQIQRMQKAMREMNVQLDAAVSDVTGVTGMRIMDAIVAGEHDPATLAAMADPRVRRSPEQIARCLRGDYRPEHLFVLRQALAAYRFFLEQIRACDEEVERYTVELEQAAGRADATLPAAADDRRKRKRGNVPEYDVRTHLYRLTGVDLTSVPGIGELSALGLISETGVDMTCWATGRRFASWLDLCSSPKVSGGRVIGQGRRHAANRAAQIFRQSASSLKNSQCWLGSFYRRMRVRIGAAAAVKATAHKLSLIYWHVLSTRTEYRDIDVSQYEERLRERTIRNLKRRARQLGMDLVPAEDPSEAVPMT

SEQ ID NO: 94709 - protein, 341 aa, unidentified
MQITTIGLDIAKNVFQVHGIDGDEKVVVRKQLRRSQVIRFFQALAPCLVGLEACATAHYWARELMKLGHKVRLMPAKDVKAYVKRNKNDAADAAAICEAVSRPTMRFVPAKSAEQQAELMQHRARDLLMRQRTQLINAIRAHMAELGISAPQGREGIKQLLAITAADEDTRLPADARASLIVLAAQLQAIQTTIGSLERRIVARHRSNQDSKRLQTIPGIGVIGATAIAATVTDPTVFRSGRDFAAWVGLVPRGDSTGGKHKLGPISKQGDRYLRRILVGGAVSILRRAKLNPQRYPWVTRLLARRPFKVVAIALANKMARVAWALVAKGGIYRIPRLAAV

SEQ ID NO: 94710 - protein, 477 aa, unidentified
MAAKKDGKTGTDPEGAGAAPEHGGDGAEVAEDRVQVVEYAAAIDVAKGSGMVCTRVPGSRPDRRRQKVWRVEATYAQVIALMDHLRCEGIQRLVLESTSDYWRIWYYLAEAAGLEAWLVNARDVKHLPGRGKSDKADCVWHCKLNERGMLRRSFVPPEPVRDLRALTRTRARLAQDQARHQARVEKILEDALLKISVVISDLFGASGRRFLDALVAGERSPKALAALGDPRLKATRRELEDALTGRFRDIHAFEISTHLRIIDAINEEITRLDDKIEEQLALVPRTAPACTACGLAGGGHAPGCADEQVPLLGLAARLDEITGVGECNARAIIAELGTDPSQFPTPGHAAAWARLTPRTRQSGETARPGRTGKGNRYIRGALGQAAMTAAKTDTRLGAMYRRIARKRGKQKAIVAVSRVICEIAWILICDPGARYQELGPDYHTPRSRARQTRDKIREIERLNPGKKVILADADTAA

SEQ ID NO: 94711 - protein, 455 aa, unidentified
MTGAKSGGMDAMAMINPGAAAIDIGSTMHMAAVNPRADDNPVRAFGTFTGDLHELARWFKACRVTSVAMESTGVYWIPAFEILEQHGFHVILVNARYAKNVPGRKTDVSDAAWLQRLHSYGLLRGSFRPEAGVATLRAYLRQRERLIEYCASHIQHMQKALMEMNVQLHHVVSDITGVTGMRIIRAIVTGERSPGTLAVMRDVRCHASAEKICAALSGNWRDEHIFALCQSLALYDFYQTKILECDRKLEVALQGLRTGKGHDTSSLPKVRTKTRQVNAPDFEVRSALFRVLGVDLTQIHGIGPSLALKLVGECGTDLAAWPSSKHFTSWLCLAPGNKISGGKLLSSKTRRSSSRTAAHLRLAAITIGRSDTALGAFYRRLSARAGKAKAVTATARKIAVLFYNSLRYGMAYHDPGATRYEEQYRSRVIGNLQRRAKTFGFTLQEMPAEPDMSVS

SEQ ID NO: 94712 - protein, 365 aa, unidentified
MITEHYTTIGMDVSDRKIQVCVMSKKDGSPKIISETVIPTTRDGLTKFLAKQDKSSPVTFETGMHSRWMKNVVEGLGFKVYVANPCHLRMITESKTKNDVNDARMLVRITLADSGLLHPVKLRDAEHQKMLNLHEMRNLLIKQRTGIIVQMRAIAKSMGFRIPKTSTGHFHKLDTKSWPEELRDITWPMIKNLEQLSVTIKTYEKQIRELAATPIFKAQVERLMEIHYVGLNVATGFVAVTGGDMDRFEKARDVGPWLGTTPKQDQSGDIDKQCHITKAGSSFMRRLLVESAQMILRDGSIDTDLKVKGLRICARGAKIAKRKAITAVARSLAVLMVAMLKKPNAPYIPLSEKNEKELLSMREAM

SEQ ID NO: 94713 - protein, 438 aa, unidentified
MSNKVFFNLDDLFISVGIDVGADFSWMSIALPNQQFVGKPYKILHNSIDSLTTAVSKIKEAEELYSLESRIFLESTGIYHYPLFCYLRDKGFNCSVINPIITKNSTNINIRKVHNDRFDSKKAALVGLNPDLKVSLMPSDLALNCRNLCREYYDLMDNRSAYVNKLQGELRMAFPQYLGIFSKVTINTSLTLLETYTSPSAFLEADKQEIIDIIRSTARFGLTYAQNKYNAIIQAATDANQFGYIIESNIKRIRLYISFIRKYDEEINSILESLHELVDANEDADFVKQIHLIETFKGAGFLSAVSIMGEIGDFSAFSKPKQLFAYFGLDPAVKQSGKFEGTKVQMSKRGSAIARRVIHTLTLQSISISRNGEAKNPVLREYYLNKCGSKPKLVAMGAVSHKVCNMIFAILRDNKPFKIIAPQEHIKQYNAAKCDIAA

SEQ ID NO: 94714 - protein, 488 aa, unidentified
MAHSADTEFSSPVEAPARKAGWVHAHCARLRSPYAAQDKPFASGSTNPDRKGSDIMLKINYMSTLFVGIDVSSKSNVVYAMDFEENKYISSSFGNNQPGADELASMIAECMQNHKNLDTVIVCLESTSVYSVHIANFLSTCETLMPYKPYVFVVNPKTTANYRKSYIGMEKTDPADAFLIADFARVGRTKKLEPWRGSQFIALKRLTRHRMHLSECIAREKTYMVSNLYLKFSELQLLDGDDRPFGNIYGATSSAVLTEFLSPQEIIDLSEEELLAFLAEKSRNRISDISRTSELLRKAARDSYRLDKCMYEPLNVSLASSFNCIQAYQKEIKLIEQAIEKCINGMNPNAFLILKSIPGIGPIWASGMLSEIGDISAFHSSDALAKYAGLYWLKNDSGDFTSEDNQVSKAGNLYLRYYLGEAANSVRRYVPEYADYYAKKYAEVSKHQHKRALALTSRKFVRLVFGLLVKNQLYTGEKLDTELHTGQN

SEQ ID NO: 94715 - protein, 343 aa, unidentified
MQATTIGLDLAKHVFQIHGVDAGGNVVIRRRLRRGELAKLFAWLPPCRIGMEACSTAHHWARELTALGHDVRLMPPTYVKPYVKRGKNDAADAEAICEAVTRPTMRFVPVKSAEQQSVLMLHRTRDLLIRQRTMLANSLRAHCAECGIVVAQGMARLAELLVIIADETDTRIPPLARTCLVVLARQLQDLQLNIGEIERELHSWHRGNATSRRLETIPGIGPITASALTVTVSDATLFRSGRHLAAWLGLVPKQNSSGGKERLGGISKQGDRYIRRLLISGAHAVLRYAKQSRPGTPGWAAGLLQRRPFKLVAVALANKTARIAWAVLARGETYRSTPEAVAG

SEQ ID NO: 94716 - protein, 445 aa, unidentified
MSNGSGLSRGDRNRNARLARLRELVPLGNAIVGIDLADDKQAAVVTDHDSRVIARRRVSARAWELGGLLDWAVVAAAGAGFASVTVACEPTGHRWRVLDQLAVERGLALVCVQPLLVYRAREGEDLTWDKSDPKDAVIIARLAAGLRCYEPERADAVWARLRHLGARRSALIADATAEVNQVRDLLECAWPAVLAAAGVPFRSATWRAALAVTLDRCAGDLARVRRLGPARFESAVRRELPRWGARRPCLRIIRAVFAALADPAGVRVHRPGALERARLVLGDWRETRARLADVEARMVAVLDDLGLTGLVTTIAGLTPAGAAAILAETGDPARFTSPRALVKHAGLCPRDNASGGYQGKTSISGRGRPALRVAAWRAVWAALPNNPVMAARFAYLTTRDHNRLARQQARTACAAALLRWIHVVITRRIAWDPAIAGRTPPCRAA

SEQ ID NO: 94717 - protein, 454 aa, unidentified
MSKVRKAATAKSNVQLPTLHPHAAGIDVGATQLQVAVPCDADPQPVRTFTTFTDDLLKLRDWLKACGVQTVVMESTGVYWIPLYQILEAAGIEVCLANARHCKNLPGRKTDVSDCQWLQYLHSVGLLRASFRPPEQICVVRSFLRQRANLVRYASQQVMQLHKALTQMNVQIHNVISDIVGVTGLAILDAVLAGERDGNKLAQLKDHRIKASGDVIARSLVGDWRVEHLFALRQALATWRHYQILLTECDAATARALAGFESRVDVNANPPPPSTLRHKKPHANEPRFEARTELYRITGVELTQVPGLQVSTALVLFGELGPDFVQRFPTAKCFTSWLGLCPDNRITGGRVISVKTRDVKSRAAEALRLAAQALWQSKTYLGDCFRRWKARLGTPKAITAMAHKLARVLWHLLKYREAYDPKVWAVAEEKLRAKKLKRLHQNAIALGYKLVTAV

SEQ ID NO: 94718 - protein, 311 aa, unidentified
MDNIIGIDVSKDTLDVHRLRDGRHNNFTNDKTGHTQLLKWISLQPDMLIIFEATGAYHRRLEQFLNAKTIAFVKVNPKQARRFAQACGKLAKTDRVDCEMLAKMGAALQLTPKPVSAENLYDLRELLSARRALIKDRTAAKARSATATHSLVKQQLARRLRQIESDIAKIDAAMLQSSQQDQQMSERLDILSSIPGIGTTTALMILVDMPEIGTLDSKQVASLAGLAPMSQSSGKWQGKARIQGGRPNLRNAIFMPALVAIRHNTDFKDKYEQLVAAGKEKKVAITAVMRKMLVLANALLRDHRKWVEKAA

SEQ ID NO: 94719 - protein, 392 aa, unidentified
MICVGIDVAKDKHDCFILSSEGEVLADVFTIANNRDGYESLMQRIRSCARPADIIRVGLEATGHYSYNILGFLLGKGLPTFVINPLHTNLYRKSLSLRQTKTDRIDARTIAAMLMSDVDLKSYTDTAYHNEELKSLTRYRFDKVRERAKLKQSVSRLVNILFPELETMVPSLHMASVYAVLSEFPGARQIADAHLTHFKAVLADASKGRYGREKAVEIRDAARRSIGSAMPAKSLELQHTIRLIRELDKEIVEIEAAIKVIIDETAPPILSIPGISYRMGAMILAEIGDFSRFDSPDKLLAYAGLSPSTYESGKLKATGTYAHMEKRGSRYLRYALFNAAKFVCNWEPSFAAYLAKKRAEGKHYNVAVSHAAKKLVRLIYALQTSGRTFQPA

SEQ ID NO: 94720 - protein, 334 aa, unidentified
MSLELLAIDLGKRSFHLYGIDTDGVILSRKVSRAKLAEVIGDLGPRAIAMEACASAHYWARCWLNAGREVRLINPRFVKPFVKGSKNDAVDAEAIFEAAMRPTMRFVPVKSTDQQDLQSLHRARDRLICQRTAVINHTRGLLAEYGVVPPQGRWRFMAQAPIAIAGADLSDLARAIFGELMGQLDDLDRRIQKLDAMIVTLCRTNETCRRLAKLPGVGPIIATAIVGSVNDGRQFRSGREMAAWIGLVPRQYTTGGKPRLGGIGRRANHYLRRQLIHGARATVSRSAKHDDRQSTWLKALVARRGFNRAIVALANKTARVAWVLLTRKEEYAAP

SEQ ID NO: 94721 - protein, 349 aa, unidentified
MMVVGVDPHKQSHTAVAVDELGRKQAHKTVRARKDGHLQLLAWARGLAREGLVWAVEDVRHVAGNLIRDLLGAGETVVFVPPKLMAGERRGGRERGKSDPIDALAIARAALREGQQLQVACLDERTRPIRLLTDHRDALVAERTRMINRLRWHLHDLAPHLAPRARALSQHTARARLATALAAAPPGTARRVAAAQLTHIQALSAEIDALKAELTPLVRELAPALLAIRGVGVITAAKLLGETGDITRFRSPAAYARHNGTAPIPASSGTGTTGPHRLNQAGNRQLNAALHRIAITQARCHPPAQALLQRRKQTTRDTAKASLRVLKRHLSDVIYHAMTTDRTRLHQAP

SEQ ID NO: 94722 - protein, 362 aa, unidentified
MTSMTSPSTRIVIGGVDTHGHTHHAAVIDNIGRQLGDREFPATPAGYRALAAWLGQHGTLEMIGVEGTGTYGAALARYLRTVGRTVVEVDRPDRKSRRAHGKSDPLDAYAAAKAVLSGSAAGVPKLRDGRVEAIRALRVARSSAVKARSQATNQIKALIISGPPELREQLRHLPTAKIIASCARLRPGHQLGDPAQATKTALRRLAPRHQQLSEEIADADLEIAQLVGEVAPDLLTLAGVGPEVAGQLLTSAGDNPDRITSEAAFAHLCGVAPVPASSGRTHRHRLNRSGDRHANNALYIVVLNRLRYDPRSRAYAERRTQEGLSKPEIIRCLKRYVAREIYRVLLPAPAAETRSAQPVDNA

SEQ ID NO: 94723 - protein, 368 aa, unidentified
MLKQSHYKVGCDAHKHYSLFAVFDGQGKPVERTRVNHEPGAIRAFLSRFPEGTPVALETVGNWYWIVDEIEAAGCLPQMAHAAKAKMMMGNVHKTDKLDADGLATLLHNGTLPSIWIAPGSLRDERELPRTRMAFSKMRTALKNRMHSTLAKYALSLDTQSDIYAPKWRPQLMQLIRSLPDETRRCMEQELELLGLIQDQIDQLEARILERVRLTRTIQLIQSVPGPAEILSIVIDREVGSIDRFPSPACFASYAGLVPRVRASGGKVHYGRMIKQANNYLKWAFIEAANVVVRQRHHPAWQSKHVVQIYERTRQRKGHSVAVGAVARYLAEATYWILKKDEPYREPISRQPAGSKSAASSKQGQAPA

SEQ ID NO: 94724 - protein, 457 aa, unidentified
MTRRKHSRPARDIAPVHPHAAAVDIGATLHVAAVRPGSDPEPVRTFGTFTTDLHRLADWFEQCGVETVAMESTGVYWIPLYEILDQRGFEVVIVNARDAKNVPGRKTDVSDAAWLQRLHEYGLLRASFRPKGEIATLRSYLRQRERLLDQAAAHIQHMQKALTEMNLQLHHVVADVTGVTGLRILRALVAGERDPDTLAAYSDPRCKAPAETLRAALVGNDREEHVFALAQALELYDIYQAKVAACDQRIEAVLERLKAANPPPAAALPPARPRRRQANEPGFAVREALHAILGADPTQIDGIGPSLALTLVGECGTDLSAWPSAKHFTSWLSLAPHNKISGGKVLSARTRRSGSRAAALLRLAAVAVGRTATALGAFYRRLAARVGKAKAVTATARKIGVLFYNMLRHGMDYADPGASAYEARYRQRVLSNLRRRAKSLGYVLQKADPASAAIAVS

SEQ ID NO: 94725 - protein, 454 aa, unidentified
MCLEDRPILEQNAAGADIGAREIFVAVPPDRDENPVRMFATFTEDLQELAGWLVRCGVTTVAMECTGVYWIPLYDILERHQIRPCLVNARHMKNVPGRRTDWHECQWLQFLHSVGLLRPAFRPQAEICAVRTLIRHRDELVGAASQHTQHMHKALTQMNLQIHHVISDLTGVTGLAIVDAILAGERDPVTLAQHRDSRIKASEETIRKSLVGNWCREHLFTLRQSLELYRIYQQQIVSCDQEIESLLRQFAPRVDPIEKPLPPDRKRNRAAKKRRKKTGNPDATFDLRTEAYKLFGVDVTQIPGVETAALPLFSEVGRDFSKWPTAAHFASWLALCPDNDISGGQVLWRGMRKVNNRAGRLFRLAAYSLHHSQTPMGNYLRRMKSKIGPAAATTATAHKIAVVFYTMVKHQVEYDETIWAARDAERQKRFEAKLKRQAKQLGYELVPIVEKPAA

SEQ ID NO: 94726 - protein, 309 aa, unidentified
MMITTVGIDLAKNVFQVHGVNEHGKPVLKKQLKREQMLTFFVNLPPCLVGMEACGGAHHWARKLQTMGHTVKLMAPQFVKPYVKSNKNDAADAEAICEAVSRPNMRFVPLKDVEQQAVLAVHRARQGFVIARTAQANQIRGLLAEFGIVFAQGIANVHRCTRELIEDASNELPSNFRLLIDRLLNNLDQLDKQVGELEAQIKAAHRANEMSKKLERIPGIGPITASALIATVGDAKSFANGRQLAAWMGLVPAQSSSGGKTNLLGISKRGDVYLRTLLIHGARAALRAFQNKVDRSGDIWLQKLLGRRR

SEQ ID NO: 94727 - protein, 386 aa, unidentified
MHEHQSQDQTAIRTDLGAIFVSLELSRSTWLITSLSPGTGEKLSKHSVSAGDISGLLARFAQLQQKATDRLDRVFPIIAIQEAGLDGFWIHRVLDSEGVESHVVDAASILTSRRRRQAKTDRIDGETLVRTLLAYKRGEPRVCSMVRPPSPEEEDRRRLCRERKTLLAERIKHTNRIKGLLCAQGIFDYDPLLRSRRARLDDLQTGDGRPLPAQLKAQISRELDRIELLMTQLKVVEVERDALLEPGSEPAPTPAVMLAQLKGIGSQIATMLWSEALYRHFDNRRQVAAYAGLAPTPWKSGSIDHEQGVSKAGNPRLRTTMIQVAWLWTRHQPTSALSQWFFERVQRNGGRMRKTTVVALARKLLVAFWKYVTSGVVIEGAVMQAS

SEQ ID NO: 94728 - protein, 388 aa, unidentified
MSCRSALGPVGQRASDHSRATLYVSLELSPSKWLVTSLVSGTDKLSKHLVPGGDCGALLQLLAALKAKAEKQSGMTVILATIQEAGLDGFSLHRLLEANGAESYIVDPSSVAAPRRARRAKSDTIDGETLLRTLLAYRRGEPRVCSMVHPTSPHDEDRRRLTRERRTLMRERIEHTNRIKGLLMSQGISGYDPLRKNCLVRLDELTTRDGHHLPPRLRAEIGREIDRLELLARQLKQVEAERDALISQVAGVADSPAVQLMRLKGIGVETATLLWLEGLFRTFANRRQLAAYAGLAPTPWLSGRIRREQGISKSGNPRLRTGMIELAWLWLRNQPDSALSRWFADRVRQEGGRKRRITIVALARKLLVALWKYVNRGEVPEGAALKSV

SEQ ID NO: 94729 - protein, 373 aa, unidentified
MKEIITHVAMDTHKKQHRVAVVYPDSGEIREFSVKNIDKDIAKMVRQIKKRSGGQINFCYEAGVCGFTLKRQIDKLGCKCSVIAPSLVPTKPGDRIKTDRRDAKKLLGQFVAGQLTEVYPPDQQQEAARELTRCRQAAQENLKRIRHQLIKFLIRHGYIYSQGRHWTKRHLDWLRSLKFDLPDLETAFELNYTEFQHCMQRLSSLDKQVQQLAERVQYREIVGLLRCFRGIDTLTAITTITEIFEFARFESPRALMAYLGLVPSEHSSGDRRRPGSITKAGNKRVRRLLVESSWHYRHRASVSRELKRRRDGQPQWAIDIADRAMARLHKRYRQLFERGKPPNKVVVAVARELAGFIWAVLAEYEDRRTRQTA

SEQ ID NO: 94730 - protein, 343 aa, unidentified
MNEVEGNRNDVLYIGADVHERETQLAIFEPGGTLLQEKRIPTKDLQSYIHCLPAKEKHLALESVGFIYPLYDKLKQVPGCDVAVANPKRIRQTSDSKQKHDRADAKLLGNLLRTNFLKKSYMPDQETREKRFLINDRVKYGLRRSELRGSIRWLLKRRGIEIEQDPFSREGRRKLREEVQLQEIDIRLQELELIESIVEKLDRQIYYAVSLDEKAKLLDTLPGIAPYTALFLSSAFDNVDRFPDSKHACAYLGLVPSLHQSGNVSFTGHITRDGNKFLRRNLVECARSAVRKDPRLKEFYLKLKHKRGERKALIAVARKMVSYAFWMLKRNQTYEELTPWDGS

SEQ ID NO: 94731 - protein, 352 aa, unidentified
MAKNDFDELMSVGVDIGKDVFHLVGFDKEGRLVLRKKIKRMALVATFEALPHCIVGMEACLSAHFVSRTLRKMGFEPRIIPAIYVKPFNKGQKNDYNDAEAIAEAALRPNLKTVSEKTQEQLDLQALHRVRSRLVSRRTAAMNQIRAFLIEQGITVRRSVAALRASLEAILSNRGDEMSLRMRRLILGLQQDWIWLDKRIDMTTSEIKEVSETEESCQRLMTIPGIGPIISTAVVAAVGTGEAYDRGRDFAAWLGLVPRQHSTGGRTILGRITKRGSRYLRMLFVQAAQVIMMRPKNWHKFSFGAWLEAAATRMQHNKLGVALANKLARIAWSVLNSGKDFDWMEKELATAI

SEQ ID NO: 94732 - protein, 337 aa, unidentified
MIIVGCDFHPSFQQIAMLDTETGATEEHKLMHTSGEAEGFYRKLASPAIVGIETVGNDQWFVQLLQKLGHEAWVGDAAQIRASYVRKQKTDRRDAKHILKLLVEGRFPRIWIPDTEMRDHRQLLMHRHKLVQIRTRVKNELQHLMLNQGVQKKQKLWSTEGRAALASLPLEPWTDRRRNDLLNLLAMLDAQLESLNDAVTRVAKEYPGVPLLMSQPGVGAVTALAFVLTLGDVHRFPRGKQVASYLGLIPREHSSGGKQRMGGISKQGNRLLRFLLVEAANIAVRFDPELRKEYLHRCHQKHFTVAKVATARKLAIRMYWMLRTQTPYPQVLSSRVA

SEQ ID NO: 94733 - protein, 401 aa, unidentified
MEGPIVSIDVSNGNSHYMCFIKNNKRFGKVKKIDHDIEGFKRLLEDIQKLEAETNEKVCAVFEATGVYTKPLERFLSKNSIKTYMINPLESARKRKEEIHNKKTDKLDPISISKVYYDKEEMMELKKKDETYNWLRKKNRLYEDQLNHLRKYKVTFQNQLSICFPGYLDLFKDGYSDIPMTILKKYPHPDLLKNKKAETVARYLEKNTCHTHKVSLEYALKIIEFAKKTYPGCEKDDVEVEIFKILLDKVIETQRECEKTLNEMITVASTLEEYRYILSIDGIGTNLAARIIAEIGDIEEFESREALVAYAGLDPHIYQSGDQDGKHLKISKKGNKYLRCLLFLAVGCSIRGAKDNPVNRFYQKKKQQSNPLNSKAAKTACTAKLLKIIYGICKNKTTYER

SEQ ID NO: 94734 - protein, 353 aa, unidentified
MITIGVDAHKHAHMAVALDERGRVAGQWRGENSAAGWDEVTRWARALGDERRWGIEGGGGYGRGLAQHLVGGGEVVYDINPRLTATERRRSRRMDKSDAFDAQAIAQVMQREEDKLPHVVAEDETVALDLLTAEREDAQAEATRLRNRLHHLLLQLDPEYHLHLPALTSLAGVQAAETYTTTSGNLVQQERAAVVRRLAGRLRLAMEQVAELGGRIEALAQARYAPLTRLCGVSLLTAGSLAGILGPGHRFASEAQLAAYAGVAPLETSSAGRVRHRLNRGGNRRLNAIVYRIALVQARWSPEAKAYLARRVAEGKTKREAFRALKRYLVRAIWRLWGACLPPAAVESGRRAA

SEQ ID NO: 94735 - protein, 474 aa, unidentified
MVHIFLHEEVREKGMRKAIGIDPDSKGYICCLVETGEEQTARKGYVTTCKDLESLLRWVKGEGEVIVAIEGSNGFSRPVEQAFRKEQVVFYSLRPSDVSKFRKVVLGHNKNNEKDAESVARYALALQSQGKLEKFRRVWFPDESMRLLTRGYERKSKELTAEVNRMWKVLRVASPDLYLALGGFNPEVEISENVLQQQGILLLLEQKPDLYEWRSLSMEAFRATMGGGNYRGREKLIGELKNLSATFSPILPAVSLLIKNSAQTILQIKRQLKEMKKMMGEITAENPAVKALEQKKGISVITSSTLVAEIIDIRRFANDDRLASYSGLGRSEYSSGDRNRMIPNPQFNHRLKDIFMTAAKNFVRYNPDSHLSGYFRNLVKKRGMKSNEAYKRVARALVRVIFRILRSLIEETLEEQKWSESDMASGSDFRSDNSHESNISLSSPTEYDKEREGKIKRERKASSRKRRKVLVEKM

SEQ ID NO: 94736 - protein, 320 aa, unidentified
MRNAVGLDISKLTFDATAMVGKTEHSAKFDNDSKGLDQFSDRLKSLGCQNLHICMEATGNYYEEVADYFAQYYSVYVVNPLKISKYAESRFKRTKTGKQDAKLIAQYCRSAQESELVKRQKPTDEQYRLLRMTAAYAQIKSECAAMKNRHHAAKDEEAAKAYAQIIKAMNEQLEVLKEKIKEQTEKPNCKEGVKRLETIPAIGRMTAAVLFHHLTSSKFETSNKFAAFAGLSPQQKESGTSVRGKGKLTKFGNRKLRAVLFMPAMVAYRIRAFPDFIKRLEEKKKPKKVIIAALMRKLAVIAYHVHKKGGDYDPSRYKSA

SEQ ID NO: 94737 - protein, 409 aa, unidentified
MLVGKFVGIDWAAESHAICVLDDAGHPQATFTIAHTADGFDQLITRLRHMGTPAELPVAIERPDGRLVDRLLEAGHPVVPVSPNAIKAWRAGEVLSGAKSDAGDAQVIADYLRLRHHRLRTLTPFSPQTRALRAVVRTRTDLVDQRVAATNQLAACLEAFWPGARCVFADLASEIALAFLTRYPTPESAARLGEARMRAFLVKHGYCGRRPAAELLARLRAAPAGVTDPVEADARRDAVTAMVVVLRALNAAIKDLDRSIVAHLGEHPDSPIFTSLPRSGRINAAQVLAEWGDCRQAYTDPDAVAALAGAAPVTKQSGKHHAVVFRWACNKRFRVAITTFADNSRHASPWAATVYADARARGHDHPHAIRILARAWIRVIWRCWVDQTPYDPTRHGGARKLAETAAPAA

SEQ ID NO: 94738 - protein, 349 aa, unidentified
MAVAEAGRDEPRFLGTVSPQGAALHKALAKLGKPASVMIVYEAGPSGYGVWRDLRALGYRCEVAAPSKIARAPGDRVKTDRRDALMLARLARSGGLVSVTVPDERDEALRDLSRARSDAVRARLKARQQLKALLLRHGHRYSGKSSWTLAHERYLAEVKFIHPAQNIAFTEYRSAVRDAHERVERFNDSLRAELETWRMRPVVEALMSLRGIDVVAAVTLAAELGDIRRFSHPRELMSFLGLVSSEHSSGNSRRLGAITKCGNGHARRVLVEAAWNYRFPARISRILQTRQESQPKSVRDIAWRAQLRLSKRYHRLLARQLPKNKVCVAIARELSGFVWDIARQVEPIA

SEQ ID NO: 94739 - protein, 344 aa, unidentified
MQHHVGLDVSVKETSVCIVDKAGKVIREVKVATKPAEILAVLTEEALAIERIGLEAGPLSQWLYGALAEAGLPVICVETRHMKAALSAQINKSDRNDARGIAQMMRVGLYRPVHVKTLASQKRRMLLTSRQLLQAKALDIENDLRGTLRNFGLKVGMVGTVKFEARIRELVADHPDLAAIVEPLLIARRVLREQLGVLHRQLLEIVRQDEVCRRLMTTPGVGPVVALTFRATVDVPSRFNNSKAVGAALGLTPRRQQSGEIDRMGGISKSGDAMMREMLFEAALVLMTHSRKWSWLKAWGMKIARHRGMKRAIVAVARRLAVIMHRMWVDGTEFRWSRKEAAAA

SEQ ID NO: 94740 - protein, 314 aa, unidentified
MTMMTDNSVGIDISKDFLDAHRLSDGAAARFHNSPAGFCSLSTWLGDSRPTRVVFEATGAYHRSFERTFSGKIPLVKVNPLQARRFAQACGTRVKTDAVDARMLASFGNALTLEPDHPVDGKQFELKELFSSRGALIKDRTRLTNRLNTQSLALVKRQTKARIDQITRQLKALQQDINTRLQDCPGRTRTNTILRSIPGIGEVAAATILIEMPEIGTLQKKKAASLTGLAPMTRQSGKWRGKATIQGGRKQLRDALYMPALVASRYNPDLRDKYQAMIKNGKPQKVALTAIMRKLIELANTLVKADREWAPIST

SEQ ID NO: 94741 - protein, 474 aa, unidentified
MFGKADNRMQISGEKTTQPDNEVEVEGLPVVRPNVAGIDLGSTQHWVCAPKKEGTGRDVAHFGATTPELEKMAEWLKQRNVESVAMESTGVYWIPPHEILEKHGLEVVLVNTRELARVPGRKKTDRVDCKWIQRLHSCGLLTGSFRPNEPVCMLRTLVRDKGKLVAEAGDWLRRMQKSLDQMNVRVHRAVSDIDGVTGLAIMRAIISGERDARKLAQLRDPRCRKSEEEIAQQLSGHWRADHLFSLRQALKMYDAIQERIGEYEQEILRKLAEMEREECRGQQAPKPKSRQKAAAIKKRGQEPMRQALFRISGVDLTRIDGIGVETVQTVISEYGPDLSRFPTEHQFVQHITLAPHRPTSAGKPVKTKKRGSASTRVAGVLRMAALSLRHSETALGAYYRQIARRAGGDVAVFASARKLATLIYRLLRWGQPYVDEGAAAYEKRYQEARIKSLTAAAKSLGFQLTPKASDLDPA

SEQ ID NO: 94742 - protein, 346 aa, unidentified
MYDRKDIILAVDYHAENIEIRWFNCASGEERRLNIPTTRSGVLRLIEQAIVEAATIGGKVIWIMESTTGWARVKELIGSRVQFVMANVLQMPLPPKAYRRKSDKIDTGRILREFLNTSLPTSYQPPAWWREVRRLVDSRQDLVQQQTAVKNWISHFLHHETWEDRDGLWTQQGLRRLRKLKLSAGDRLVLDFKLQELQELAERRKQMESAMQAVYEQWPPAQWVDEVRGIGMVTAVSILAHIGPIERFPTPEDLISYAGLAPGHRQSDGTKHNGKIGGEGTDSHLRYLLIESMQWVCQIPRYRDAFERAAARRGKNIARIIVARILLRSLFKMLKDKVRFNQVAVA

SEQ ID NO: 94743 - protein, 400 aa, unidentified
MNAVGIDVSKGKSTVAVLRPFGEVVASPFDVIHNDNDLKRLVKLIRSLPGESKVVMEYTGTYFEPIAQFLHNNGIFVSVVNALLVHDYGGNSLRKVKTDKKDALKLASYALDRWTELDEYVPADEQRKILKLLNRQYNQSIKIQTTMKNNLISLTDSVFPGINRLFTSLERQSDGHEKWVDFLHAFPHKDCVAKLYLSAFKAKYKSWCNRNKYRYSESKAEKIHSYAKSVIAVLPLNESVKLIVTQVVSQLNTILETAFSIRTEMNRIASSLPEYDTVMSMFGVGKVYGPQLIAEIGDTRRFRNRRAITAFAGLDAPPYQSGQFDVSSRHISKRGSAALRKVLFQITEVFILSKPENEPVYQFIIKKRSEGKHYYSYRIAAANKFLRIYYAKVNQILNAT

SEQ ID NO: 94744 - protein, 320 aa, unidentified
MRNAVGLDISKLTFDASAMVGKTEHSAKFDNDSKGLDQFSDRLKSLGCQNLHICMEATGSYYEEVADYFAQYYSVYVVNPLKISKYAESRFKRTKTDKQDAKLIAQYCRSAKESELVKRQKLTDEQYRLLRMTAAYAQIKSECAAMKNRHHAAKDEEAAKAYAQIIKAMNEQLEVLKEKIKEQTEKPNCKEGVKRLETIPAIGRMTAAVLFHHLTSSKFETSNKFAAFAGLSPQQKESGTSVRGKGKLTKFGNRKLRAVLFMLTMVAYRIRAFPGFIKRLEEKKKPKKVIIAALMRKLAVIAYHVHKKGGDYDPSRYKSA

SEQ ID NO: 94745 - protein, 345 aa, unidentified
MKIATVGIDLAKNVFQVHGVNEHGKCVLKKQLKRSQMIEFFANPEVSLVGMEACGGAHYWARRLQTLGHTVRLMAPQFVKPYVKTNKNDAADAEAICEAVARPNMRFVPVKNVEQQAMLSVHRARQGFVIARTAQANQIRGLLTEFGIVLPQGLANVRSCARELIEDGRNELPGSFRLLIERLLDHLAELDRQVEELEAQIRSVHSTNEMSRKLEKIPGIGPITASALVATIGDARDFTNGRQLAAWMGLVPGQSSSGGKTTLLGISKRGDVYLRTLLIHGARAALRAFQNKADQSGDNWLRKLLERRHFNVVAVALANRNARVIWALLARNRQYQANYKMNPAV

SEQ ID NO: 94746 - protein, 341 aa, unidentified
MKQEMSVLGIDIAKRVFHAIGMDNTGKIVFRKRLSRHDLLPFLVKLPPVLIGMEACGGAHDWARRFRAYGHEVKLMAPQFVKPYVKSNKNDSRDAEAIAEAVTRPTMRFVPIKNVDQQDIQALHRVRERLIGARTALVNEVHGLMHEYGIVMPKGVAKFRQAVVSKLEAEKDKLTALSQEMFWKLVEEFAALEKQLAYYQEKLDTLATTHPACQRLMTIPGIGPLTATALVAAVSDASAFKNGRQFAAWLGLVPRQHSTGGKERLLGISKRGDSYLRKLLVHGARTTIRWVGRKTDRRSQWMRQLVERRGTNRTAVAVANKNARIVWALLTSHQDYQLTTG

SEQ ID NO: 94747 - protein, 347 aa, unidentified
MRFYTQSHRYYCGIDLHARWMYLCILDPQGEVLLHRNLRACPEAFLKAVEPYRQDLVVAVECIFSWYWLADLCAQEGIEFILGHALYMKAIHGGKAKNDRIDSQKIAVLLRGGMIPVAYVYPPEMRSTRDLLRRRTYLMRKRAELLVHVQNTNSQYNLPEIGKKIDYRANRSGVAERFSDPAVQTSITADLSLIDFYDTLLNRLELFITSQAKQQDHHSFYLLRSVPGIGKILALTILYEIHDISRFPRVQEFISYCRLVQCSRQSAGKNYGFAGKKIGNVHLKWAFSEAAVLFLRHNPEGQKLLARLERKHGKAKALTILAHKLARAVYFILRREKAFDLTQFLAA

SEQ ID NO: 94748 - protein, 407 aa, unidentified
MICVGIDVSKRKSTVCFMAPGDKIIRRPFDVKYTKEELQPLVDEIRVQAKYDEIKVVMESTGVYHLSIAYFLQQNGIFVSVVNALKVANFNKAENFRHTKTDSIDSTNIARYGIAYWAKLPQFDLNGDKYFLLKRLCDAYLNFSEERSRILLQLQSQLEQTMPGIFDLFGGFDINSGKDKLPDFLEKYCHIEDIIAKSEAEFVASYREWAKEKGYRSNESKAATIYAQAKNGIPSIPNNPIVRETIMWYVGLLRRADEALMASLTRMEDIAKDLPEYELVGEIGGVGRVTRVALIAQIGDVRRFKNKHSLICFAGLTPSIHESGKFRASQNHIVKKGPARLRKVLYQVMMSLVMHKIPKDDAVYRFIKKKEAEGKYKKVAKVAGMAKFLRIYYGRVMHLYRDLGLAA

SEQ ID NO: 94749 - protein, 400 aa, unidentified
MAVMIGIDPHKGSHTAVAVGAAEEPLGRLRVRACPDQAGKLVAWAQAWPERTWAVEGARGLGRLLAQQLIAAGERVLDVQPKLAARVRLPEAGDTNKTDPNDARSVAVAALRSKGRQEVTADGHAVVLKVWAKRHRDLSRTRNQVVCRLHAMLCELIPGGVPDEITAGQAARILERVAPAGAVAQARCELAAELLADIRHLDAQRREVKKKLAAAVTASGTSLTEVFGVGPVIAATVIGGVITVARFPSRDHFAACNGTAPVEVSSGQRKIHRLSLRGNRRLNHAIHMAAITQIRHEHSDGHAYYQRKLAEGKTHKEALRCLKRRISDAIYAQLRADARKAGPGGQPGNDTGSSVTGSHPGHRLFGQATSGPEPSLRAPATFTQAKPAPETSAKKIQRAT

SEQ ID NO: 94750 - protein, 350 aa, unidentified
MQYVGIDWGTRRAAWCSFDERGEMVEGTVSADADGLARLVYTLGPDAYGCVEMMSGAVWVREQLQACGWRFAVADARKVKAIAPLACKTDRVDARVLAQLAARDLVPELWVPSLSDRELRERLRRREHLVHLRTSARNRMFGLLTQWGLRGSLTTLRKPDALERLSERGVPAVWIQSIATLLEVVDDLDRQIAQIELELRPIARTDPRARLLMTIPGLGELLALTITAEIGDISRFPSARKLIGYAGLAPTIKQSGQSSWIGPISKAGSPALRWAAVEAAQHAWRPTNPWHRLYTQTKSRHGKANPAKSAVARKVLIATWHVLARQQPFKPAAPVLVPTCPGKLPDDLAA

SEQ ID NO: 94751 - protein, 427 aa, unidentified
MPEKPVAGIDVSKDFSDMCIITPDNKVFQTVHIFHDATSLRRSLAALEAAAREFREKPVIVMESTAHYHRVIAQFLQSAGYEVMVINPMQSGALKNINIRKVKSDKSDAHRLALLYRLKTLHTTNQPNELLSNIRDYCRQRADIMNSHTAYVNRLTSLLDQAFPGYARVFSRVACKSSLGILKTYPSPAAILAADPEQLAETISKYARRGVTTDYVIKKVAALRRAAENAEEINLKREAYSVLIVTVAELLEGLQRHIETLKKRIIELATEDPSVKFEVSLLQTIPGIGLYSAVLLRAEIGDFSLFQKPKQLVAFFGMDPSTRQSGKFVGTKTKISKRGSPYARAILDIFAQSAVHPVKGKEPANPVLANYYAEKVKTKEPKVVKCIIMRKLVNIIFAVLRDKKPFELRTPEEHIELLKHPNISRAA

SEQ ID NO: 94752 - protein, 349 aa, unidentified
MSHNLNDAVAVVGIDIGKNSFHVVGLDSRGAIVLRQKWSRGQVEARFANMPPCLIGMEACVGAHHLSRKLRTLGHDARLMPAKYVRPYSKGQKNDFRDAEAIAEAVQRPTMKFVATKTAEQLDLQALHRVRERLVSQRTGIINQIRAFLLERGIAVRQGLRFLRVELPRLLATPPDVLSPRMVGVIEGLAEDWRRLDQRIEQLSGEITALAHQDAGCKRLVSVPGIGPIISSAMVAAIGTGDAFSKGRDFAAWLGLVPKQISTGDRTILGKISKRGNRYLRVLFVQAAWVVLIKPQSWERHGLKRWLDAAKQRLHRNVLAIALANKLARIAWGVLARGRAFEASKLQAA

SEQ ID NO: 94753 - protein, 321 aa, unidentified
MTIIGIDVSKDWLDVAQLGTTVPSSPTTSRVANTAAAIATLVSHLRRLTITRIGLESTGAYHLPLLTALLAANLPVSLINPVQIKAYRQVRAVRQKTDRQDALLIAHFTRTYVQDLRQVHPATPVQAQLRELVGYREGRVKERTRLLNQREAACWADSPTVQTLLATDVDHVEQQLAAVDRAIAALLATVPEAAIIQQIIGVGPRVAAIVLAYLPAELWGQVKPAVGYAGMHPRLEQSGRSQQSRLSKAGPAPVRRALYLAALVAVRHDPDIQQRYLRYRARGKPPKEALCIMAHALLRHMMGAVNAYYRQQDDTTEPLAA

SEQ ID NO: 94754 - protein, 370 aa, unidentified
MPKPTMLFVGLDVHKNSIAVAYAADVSSEPPTYIGQIGTRQADIDKLVRRLQSKAQKLFFGYEAGPCGYVLYRYLTSKGLQCVVVAPSLIPKKPGDRVKTDRRDAVQLARLLRSGDLTSVYVPSVQDEAIRDLCRSREDSVSALISAKFRLKSFLLRLGLHYTGRANWSEAHRRYLAKVVCPTPAQQIVFQESIHAVDQLTERVARLEAELEELLPSWRLYPVLRAVQALRGVQLTVAVTVLAELGDLTRFDNPRQLGAFVGLNPSEYSSGDKRRQGSITKAGNGHARRALVEAAWAYQHPAKVSAIIQKRLEGIPKPIQQTAWKAQVRLCKRFGRLVARGKNSNVVVVAIARELVAFMWAIARQTPIQA

SEQ ID NO: 94755 - protein, 342 aa, unidentified
MTNFNTKYQSVCGIDIAKNVIQIYQVNQDGECKNFQVKRKEFLQIFENREPSLIGMEACGGSQYWARELQKLGHTVNLMAPSAVKPYVSGFKSDRKDAIGIFNAMLAGVRKVAIKTEAVTDLATLLGIRARRVRARTAKVNMVRGYLMEYGIVMARGLRQFKNSIADSLLQLERAQASNMVKEEFKFLVDEVDKETEAILRLDREINSLAKQCKNFDHFLTAPGVGPITAATMCVKLADPQVFKNGRQFAAYIGLVPQHYGSGGKNVNTTIPIKCNKELRGLLVQCAQSIRRTKNKSSWVTQIEDRKPNSVATIAVANRLARRLWAIAPKGEDWKRMDINFG

SEQ ID NO: 94756 - protein, 312 aa, unidentified
MDAIYVGIDVSKDRLDVAVRPSGESFVVSRTGAGIDELIERLKPLSIKLVAIEATGGFETVVAAGLAGAGLPVVVVNPAQVRAFAQALGKRAKTDPIDAAVIAHFAEATKPQLRQLPDATTQLLADLVARRRQIVEMIAAESQRARHVTLPRLKKSIARLRKALEKELSELDNDISDHVRGSPVWAEKDQLLESVPGIGPTIARTLIAELPELGSLDRRQIAALAGLAPWTRQSGKWRGKSFIGGGRSSVRRALFMGAMVAARHNPTLKLFRDRLVAAGKNKLVAIVAVARKLLTILNAILRDKTPWQPKTA

SEQ ID NO: 94757 - protein, 413 aa, unidentified
MKQMRDKVAGLDVHRDTVVACCRVEQPDRSVEVTKQSFSTTAKGLSELATWLGDAGVDTVAMEATGVYWKPVYYSLEGLFDELWLCNAQHVKNVPGRKTDLTDAEWLADVAAHGMVRPSFVPPSEIRELRELTRYRKTQVDARTKEIQRLEKVLQDAGIKLSSVASRVWSVSSRLMIEAMINGERDPKVLAQMAKARLRAKIPQLEEAFSGTFGTHHATVCRQVIEHIDFLDGSIATLTADITTRLCPFESAVTILCSITGVSRTTAEVMVAEMGVDMTPFKTAGHLCAWAGVAPASHESAGKRRPAGTRHGSTWLQRALIEAARAAARTKGSYFSAQYARIARRRGPNKAAVAVAHSILDAAWHLLSDGSLYSDPGARYFERLHDPAIEAKRLQRRIESLGYDVTISQFAAA

SEQ ID NO: 94758 - protein, 430 aa, unidentified
MGLIVPSTIHPAREDQPLPYEWFVGIDWGSQRHQVCVLDRDRRQVGERVVDHDGASLAQLADWLWTLSGGQPQRVAVAIEVPRGAIVEGLVERGFHVFAINPKQLDRFRDRHSVAGAKDDRRDAFVLADSIRTDQPSFRRLQLDDPQLLRLRELSRAEETLLEDFRRSANRLQDQLHRYYPQMLKLCSAADASWLWELIDLAPTPAHAALLSEEQVQRVLKAHRIRRVKAQEVLTCLQAPALPVAPGAAEAAQAHCAFLLPCLRVLAEQLQACSQQVSALLRALAQEPGEGEGPSDVAIVLSLPGVGRKITAWLFAEAAQPLAERDYQVLRTHGGVAPVTKQSGKRRLVVMRHGCNPRVRHALYHMARVAMQHDAHFSSVYAALRAKGQRHGQALRNLGDRLLRILMAMLRERTCYDATRIRREPVVQMG

SEQ ID NO: 94759 - protein, 335 aa, unidentified
MHQATVVARLLMVRKDGRVQKQMRSFGTTTRELLCLREWLLSQSCTHVAMESTGVYWKPVYAILEGGLEIVVANAQHVKKVPGRKTDVKDAEWIADLLCHGLLRSSFVPPKPIRELRDLTRYRRKLVESQAAERNRLLKLLESANIKLASVATDVFGMSGRLMLRALIEGKATPQEMAELAKGLLRKKIPQLELALEGKLEEHHRFLLKLQLHRLEAVEQDLTILEQRIQHKLEPYATQLALLDEIPGVDWTLAAVIIAELGVDMSVFQSVSQMASWAGVCPGNNESAGKRKSSRITKGNMYLKTALVEASHAAAHTKGTYLRDKFFRLKARRGY

SEQ ID NO: 94760 - protein, 442 aa, unidentified
MVCRNGPGHHKQEVTPMSKRKPYRIVRLVGLDLERLLEDVREQRLVLGIDVGKQRMVMSVMNECEAIVATLGWTHPEQTPAFLSAVESLRAGAAGVQVAMEPSGMYGDALRSQLLARGIEVSRVSPKRSSDAKEVYDGVPSSHDAKSAAIVAWLHLHGKSEPWPLKSEHERQLKAALQMLAVHSKQFAANRNRLEALMARHWPELPKLLTLGSPTFLELVKEFGGPAAVASRWTEALQLMVAASRGMLSDDKVAQVLASAETTMGMPQLDEEVELVQELAAETRRNQLAERRARRRVCELAASEITTARMQPLLGKSTAAVVVAATGSPLAYDSPGAFLKSLGLNLRERSSGEKQNRGLHLTKRGSSTARKYLYLAALRLLMADPVVHAWYLAKVKRDGGRSKVRAVVAVMRKMVAASWHVARGAPFDASKLFDTRRLAVVT

SEQ ID NO: 94761 - protein, 465 aa, unidentified
MRTDKKLWRNRKARKELARRLQSENPSLEVVHPHAAGIDVGNSAHYVAVRPDRDPQPVRRFECFTADLYRLADWLQSCGVQTVALQSTGVYWIPLYDILEERGFKVYLVNARHTKNLPGRKSDVQESQWLLKLHTYGLLNNSFQPPSQIRILRTYWRQRLQHVTGAATCVQRMQKALTQMNIQLANVISDLSGVTGQLIVRAVVAGERDPWKLAELSHPRIQASRAEIAKSLEGNWRQELIFVLQQEIEMYDTYQRRVAECDQELQKHLRAFVDTVPPPVKEALSPKKKKKQNKNNPRFHLADELQRITGVDLTRIDGVDVMVAQTVISEVGLDMSPWKTEAHFASWLGLCPDNRISGDKVLARGTRHVLNRAANALRLGASTLLKSQTYLGAQYRRLRSKLGAPKAITAMAHRLARLVYRMLKYGQDYVDKGAEYYERRNRQQQIEFLTRKAARLGLQLTPALA

SEQ ID NO: 94762 - protein, 438 aa, unidentified
MSMTFARLLDPCFEDDDDPFRHYDYRGEPLEDRLYLPCGIDPHKKVCHAAFVHPLPHRQEILSHREIQNQHLSEALWLVEEGQRLAEPFQATPIYVFESSGPYWRPYRLFLHQLGLPTATVSGRQTKRAGGTGTRKTRNDLQSAFLVAKVFKQGESHASRIPPEPLATLREYTRLHLFFVAQSVAIQNRMFDLRYQIHPDFDDLFSKSIMPTTLALAQEELVHPLKLLQADPETLTEVIYQASNGKLGAPRAEAILRSARQTFYMPYAPQAQSFNLKLMAQAHEYITNHLLPPLQDRIQECLEKIPFPQHLIEIPYFGPIVTSTFLAELGWPFWFRTVDSVVAWFGLDPTVSESADHTTGISRLTKRGTKYGRRIMWLVARNWSRYVSQGNRLFRKERDENKLSYDAAICVIAAKLVRIAFAMARDGSHFDMSKAFPS

SEQ ID NO: 94763 - protein, 374 aa, unidentified
MSKLVLKAVGKQSLPETGQRVIVGVDLSRAKWVYVCRWGGQEQRRFASAGELKHLQALVQEYHARGCEVHVVYEACGFGYEIAWWLEEKNVCVNVVAPSTVERAPGAQVKSDRLDAGSLALKYEHGQLKSIFIPSRVQHEYRQLSRTYGQLLTDRRRQQSRLRLLLQEHGYTAPARHAGWNTLERWVQAQPLPAPVAVCVAELLSVRAAAVASTRRVVTELRRVGRLPQYAPLIKALAQQSGVGPFTALRFVLEIGSVRRFATADSLPNYLGLTPREYSSGELVHRGPIRKCGPGALRAWLVQCAWAAIRYRRDQALVSCFERVAVRSGRKRAIVAVARKLALRLRARWLEFDQQNIASAACALATAGSPGPRC

SEQ ID NO: 94764 - protein, 426 aa, unidentified
MTHNTTRTDIVHSSRALYIAMDLGRDSWQLAISDGGKTIREVKVVRKDVEAGKAEFLTEVAKARVKFGLDAEAPVHALYEAGRDGFWIARWLESAGIPCLVIDPCSILVDRKAKQRKNDAIDARALLDLLVRHVTGDREVSIVAVPPAEIDDQRELGRVLRKLGRTRRSLANRVRSVLWRYGIDEGYHADLAKKFPEMRTGDGQPLGPVTRMELETLCAQILGLDADLQRLEDERVAQLKKPVTRAQEQARDLERLIGIGPIGAWTLAHEVFSWRTFANGKKLGAYAGLAPTPFCSGQMQRDQGISKAGPRDLRALMVQLAWLWIYHQPESALAKWYKERFGPTAKRSRRVGIIAVARKLLIALWKYAMTGEVPEGAALKPLAHPIVAPLQNGARRVRLSVQRGEAPVTETAKPTRARGPRLKQAA

SEQ ID NO: 94765 - protein, 349 aa, unidentified
MVADQVDYVVGVDTHRDEHVLAVVAAPTGALVAQLSVRATARGYAEAVRFAAEHAPSARVWAVEGAGHYGAGLVRHLSECGETALEAGRGPRNERRLQGKDDQLDAIRAARAVLASETPALPRAGQQREALRLLLIARRSAVDVRREALVQLRSVIVTAPDQLRNELRGLPAGRLIQRCSRFRRSGTRSPDETATTLVLRTLARRASAASGEAAELEAEILSHVQALAPELLAEPGVGPIVAAQVIVTWSHRGRVRSEAAFARLAGVAPIPATSGQTTRHRLSRGGDRQLNRALHTVILHRRHHDPATKAYIARRLAEGGTSRDAVRLLKRYLVRHLYRVLNNQVPLTA

SEQ ID NO: 94766 - protein, 340 aa, unidentified
MRLIGCDLHASQQSIAMLDRDTGVVVEKTLRHEGETVRTFYASIPPPVVVGIEATGSMGWFLRLMEELAIECRVGHPTAIRKAETRRQKHDRRDAALLLQLLAEDRFPAIWMPSTECRDLRSLLLHRHQWVRMRTRVQNALHAIVLAHGVRRGHTLWNRDGQALLASLPLPPHTADRRSELQALYQHLEAHIDRLDDRVQHVANERARATLLMTHPGVGPVTALATEVFVGDPTRFLDGKALASYVGMIPREYSSGTRQRLGALSKQGNPFLRFLWCEAAAHAVRRGPDLQRFYRRKVVQKGFAKARVAAARKLGIRLWIMLRDQIDYAEFCRRGLARQS

SEQ ID NO: 94767 - protein, 412 aa, unidentified
MDTMYRCCAGLDVHKETVAACVRRVDASGRVAKEVRTFGTTTGALLQLLDWLTAQGVEAAAMESTGVFWKPIWNILEGSVKVILVNARHIKNVPGRKTDVKDCDWIAQLLQHGLLRASFVPERPQRDLRDLTRQRSQLTAEQSRVSNRIHKTLEDANIKLGSVATDILGVSGREMIRALIGGQEDPNQLAELARRRLRSKLPELREALRGHLTDHHRFMLRQLMEHLDYLDRQIAAFDQRIEELMRPFQEAIARLMTMPGVGELTARNVLAEIGTDMSRFPTDQHLASWAAMCPGNRESAGKRKSGHTNHGNRWLRTALVQAAWAASHSKKTYLSAQYRRLAGRRGKKRAIVAVGHTMLVMMYHMLREGVDYHELGADYLDKLQPMRLTHYLVKRLESLGHQVTLTPVDQAA

SEQ ID NO: 94768 - protein, 355 aa, unidentified
MQSNKISFKGQNIYVGIDVHLKTWHVTTLTESGCKYSFAQHADAKELFDRLNKKFPGAHFKSAYEAGFCGFSAHYALTELGFENIVVHAADIPTTGKEKALKTDAVDSEKIARSLKRDELAGIYIKDKDYMDDTNLMRLRQRLIKDLSRQKNRTKHLLYTQGVTYPERFSKNGTHWSRNFMKWLRKEVVLLSGEKRTLMLLCDQVEHVRRDILAVTREIRRLSTSDKYQENFSLLSSVPGFGLITSMSMLTEFDNNPMRFPNERKFVAMLGLIPTCHDSGQKKVNGEKINRGNKQLGPLIVEASWVAIHRDYQLGCYYTNCCQGMKPQKAIIKVARKLACKAYAVMKTKKPYVLS

SEQ ID NO: 94769 - protein, 332 aa, unidentified
MNMHSQGRVADGIERPNAGIDVSKQHLDVCCGEHEQRWNNDATGWSELAAALKAWQVDLVVVEATAGLERGLVCALQAAGVQVARVNPRQARDFAKSLGVLAKTDRIDARCLRDFASVLARHPQRERYITPVADQHREALQALMVRRRQLLDMHVAETQRLASASARAARSIGVVIKTLQRQLESIDRDIDDLMDQHFKPQRKLLEGVKGVGTGTALALLAALPELGTLGRRAISKLVGVAPLADDSGQRKGKRRIWGGRAHVRSALYMATLSAMRYNPAIAPVYQRLIAAGKPKKVAMVACMRKLLVILNAMLRDGAAWDSTKSLAQAIHL

SEQ ID NO: 94770 - protein, 350 aa, unidentified
MTTIAEPRPVVTGGVDTHLDMHVAAVVTAVGGVLGTGEFPTTAAGYRRLLAWMRTFGELGQVGVEGTGTYGVSLARHLRSEQVKVVEVMRPNRQCRRRHGKTDVIDAIAAARAVLSGEANAIPKTHDGPVEALRTLKVLQRSATKAKTQALNQLRALLVTASDELRARLRDLTQRELLTTCAGFRVAADDDSLAAITRFALRELGQRVLYLNDQLAQVKLRLQRITEQVAPALTALKGVGPDVASTLLLAAGDNPERLSNERSFASLCGVSPVQASSGKTRRHRLNRGGDRQANAALWRITLVRLNCDPRTKDYLAKRVTDGKSKTEAIRCLKRYIAREVFAALPIPTAA

SEQ ID NO: 94771 - protein, 417 aa, unidentified
MDAYCGIDWAEDHHDIAVVDRDGTLLDRKRISDDAAGLAALLELLARHGDTADDLIPVAIETPRGLLVACLRATGRKVYPVNPMSVARYRDRHSVAGRKSDHGDAVVLANVLRTDMHAHRPLPADTELAQAIAVLARAQQDAVWARTTAHNKLRSHLREYYPGFLAAFAGKADGILRPEARIILAAAPAPADAARLTLAQLRALLKKAGRSRGIDAEAARLREAFRAPQMHQLPLVEHAMGRQALALLRQLDAACASAGDLEAAAIESFNQHPDAGIITSFPGLGPLTGARVLAEIGDDRSRFTDAKGLKAYAGAAPITRASGKSTSVTCRKVKNNRLAAAGYLWAFSALTASPGARGHYDKRRDTGDGHAAAQRNLFGRLLGCLHHCLLTGQHYDENTAFSTPPATATATATATAA

SEQ ID NO: 94772 - protein, 325 aa, unidentified
MSQNNINKVNTNTIHAGIDVAKATLELDLGGTIYNLANEAKDHTRILKLLAAVEKAQPGSKVHVIIEATGGYEAALVRVLHEAAQPLSVIQPSRVRHFAYAKNQRAKTDPIDARVLTDFGQAIRPAPTPPPSAAQIHLAELVNRRAQLVETRSAQLNRAAHYTDKLLCRQSRQLLALLDRQIAACDKAIAKQIAANEIMKGRAERVQQVAGVGPVVAAVLQAEMPELGTLTEGEAAALAGLAPYNCDSGPRKGTRRIWGGRAPVRCALYMAAMNAVRHDPILRAFYIKLCAAGKKPIVALTAVMRKLVVLLNRLLKNPQFKLTAG

SEQ ID NO: 94773 - protein, 397 aa, unidentified
MYIVGIDIAKRKHEAAVIDGEGTVIIKPFSFTNNCSGYNRLLAMLAKAKLPLDEVSFAMEATGHYWLALFTRLQKEGFRVQVINPVQTNSIRSFYIRQAKTDPRDALLIAEVIRFGHFSESTLHPENIYELRELCRGRHAIVAMQADVKRKVVALLDQVFPEYETAFTNMFGDTSMAILQTCPTPKELSEMPFEELCHLIEVSSRKRFRMAKAQELQALARNSFGFAMAGDVFSTMIRLYAKHLDFLKQQVREMDRKIAEIMDTLDTPITTITGIGPTLGAYILSEIGDISRFSSAAKLAAYAGIDPTMRQSGEYNGVRNRMSKRGSPYLRHAIWLATSSAVLHDPALKLYFQKKRDEGKPYMASVGHACRKMVSIIYAVMRDNKAYTPCIPNEISA

SEQ ID NO: 94774 - protein, 338 aa, unidentified
MAIVTVGIDLAKNVFAVHGVDAAGKPALVRPEVPRAKLLELIANLAPCLIGMEACSGAHYWAREFAKFGHTVRMMAPKFVAPYRMSGQRSKNDAADAAAICEAVTRPNMRFVPVKSIEQQSRLFVHRARQGYVEHRTAVINRIRGLLSELGIVLPLRASVIRGEAHKHLEDLPDWCNTVIGDALSELTQLDARISEYDKHIAHLAQEDEQAKQLMRLRGIGPTTASAIAATIGKGHDFTSGRQFCAWLGLVPSQYSSGGKQRLGRITKAGDSYLRTLLIMGGKSVLAAAKNKTDPLSRWAISVQERRGYGKAMVAIAAKNARMCWAMLQRGEEFKIPV

SEQ ID NO: 94775 - protein, 472 aa, unidentified
MEIPDAEHELVIERAAAIDVAKSAGKVCVRLPGKSGRRFSRVWDVSARTGAITELADQLVQLEIEKVTVESTSDYWRIWYYLLEDRGLDVQLVNARDVKNVPGRPKTDKLDAVWLAKLTEKGLLRPSFVPPAPIRRLRDYTRLREDLTRERSRYWQRLEKLLEDAAIKVSAVASTLDTLSARDMIDALIAGERDPGQLAKLARGRMKTKHSELVAALDGRFDDHHAELARLLLGQIDSLTAQIGALTTRIEQLVAAMSESDHDGDDHHGSGTDVLPATTPAGTGDQTAVPCPGGSAEIGVETDTATVERRLTAVERLDEITGVGERAAQTIIAEVGLDMTRFLTPEHLVSWAKLCPRTIQSGPISRAGKTGKGNPYLKGALGEAAAAAARTDTFMGDRYRRLVKRRGKLKALVAVARSILVIVWQLLSDPTARFHDLGRDYHTSRVATERKVRNHIAQLTAMGFHVTVQPAA

SEQ ID NO: 94776 - protein, 359 aa, unidentified
MSLQVDNSSTVVGGVDTHKELHVAAIVDHHDRLLGSASFPTTRHGYKTMLAWMRSYGTLSRVGVECTGTYGAGLLRYLQQAGITVLEVTAPDKSVRRKRGKDDTIDAENAAHAAYAGRRTVTPKTRDGMIESLRVLKVCRKTAIAARRIALQMIQMQIISTPDELREPLRKMTRMQLIRTLAAWRPDLSGYRDVTTAYRIAFKSLARRYLELHDEIADLDVMIKAIVDDLAPELVARQGVGYESASQLLITAGDNPARLRSEASFAALCGVSPIPASSGMTQRHRLNRGGDRAANSALHIIAIGRLRLDPRTQEYVVKRTGQGLSKLEALRCLKRYIAREVFYILRSRNQAINQVQIAA

SEQ ID NO: 94777 - protein, 411 aa, unidentified
MHNRQNYLYVGVDLHKEHHTAVMINCWQEKLGEIQFENKPSAFSKFLLEVETYVSAGVIVVFGLEDVGGYGRALAKYLVDHEQVVKEVNPALSFLERKSQVMIQKNDSWDAECVARILVNKFNQLPDAKPNDLFWSIQQLVSRRNALVKAQSALKNQLHIQLNHHYPSYKKFFSELDGKTALAFWQQYPSSSCLEGANIKKLTAFLLDVSNNTCSVKKASDILKLVKEDGHTMKEYQETRDFLVRSIVRDIEFKKKEMKYIERELKRLVNLLDYQLETMPGIELVTASALIAEIGDVRRFPNANKLARFAGIAPVYFGSGGKGKTHKSKQGNRALHALFYNLAVQQVQVAKGSKLPRNPVFHAYYQKKLKEGKTKGQALVCIMRRLVNIVYGMMKYKTAYELPVVEEKEVV

SEQ ID NO: 94778 - protein, 323 aa, unidentified
MSLYCGIDLHSNNSVICVINDNDKRLKEVKIDNNIDLVIKALSRYKKRLKAIAVESTFNWYWLVDGLHDAGFKVLLVNTAKVVQYEGLKRTDDRYDAFHLAHLLRLGILPTGYIYPKQERSLRDLLRKRMQIVQDRSRDIIRLKSFYQLHTGETLRADKIKAKKYTIPTIGDDNTQLNIQVTTQLIRSATEQIKVLEKNIACQLVGSADLINLKTVPGIGDILGETILLETGDIKRFGKPGNYSSYARCVDSRRLSNGKIKGRNNRKNGNRYLAWAFIEAANFAIRRSDKAKAFYTRKAKEASSIVARKALAQKLATAKPLIH

SEQ ID NO: 94779 - protein, 322 aa, unidentified
MISNERDEVIKKKRLANDLGEVDQFFSAYKPRLSEIVIESTYNGYWLMDGLRELGYGVKLANPSAMQPYVGLKHSDDESDALWLNQMHRLGILPEGYIYPKPQRAVRDLLRRRMLLVHSRTGLINSLKQHYQSWKAMDLGASQIKKLTEEQIAEEFKNTSIQYCAQVLHASIQSLSEQIERCESWVDGDLKEDTLVERLRVLPGIGKLLGWMIRLEIGELERFPAVENYLSYCGLVESRRISNEKTKGHGNAKNRNKYLRWAYGEAAIHALRHSRIKKYHDRLIKKKGRIKAKAIIASKLARISFMLMKNPELVYNENKLFV

SEQ ID NO: 94780 - protein, 420 aa, unidentified
MKNSHLNYSYFLGIDIGKRVHFATLTDKHGKEIDSFKFKNTKAGFTSLLKHLDKWVNDKARKCLLIGFEATGHYWLPLYQFLSSLGLKIVLLNPLQTKSFRNTGIRGTKTDKVDGKLIADIIRFSSFDTLTFFPQKPDEKVLALKRLTRFRSGLVNRIGNTKKRVVSILDLLFPEFEKVFSNIFSKTSMAILEKHVLAYNSKNGLEGLKEIKTKALANLIEKASKKRLKGDKAIEKAAKVKKAAENTIGFTIGLDAFFLELRLLIEQLKHLESQVEKVDKMIKELFLSFETSLTTIPGISETTGAVILAEIGNILRFEKAKNPAKALTAFAGIDPKLKESGKSKGQTVMSKRGSKHLRTALFQASLVASVWDPMFKSVYKKHKDKGKHHHVALSHVARKMTHVIYSLLKSNKTYKPVLAN

SEQ ID NO: 94781 - protein, 389 aa, unidentified
MLPNGDKHSNFSVANSHEGSTLLVKKIYSALTSHSLDTVLIGLEATSVYGDNLVYFLREDATLAPFNRKIHVLNPKQVKKFHDTYNDLPKNDYVDSFVIADCLRFGRINKEVYMGDYRYKALQNLTRARFFAVQNLVKEKQRFMNVLFKKYSTMTQEKVFSDAFSTTALAVYDEFESAEALANMDLHELTDFIIEKGKNRFPDPDAVAKAIQKAARSSYRLPKTVNDSVNQVLSISITSMKALESQIKEFDKAIKALMELLPNVLISIPGIGPVYSAGIMAEIGDINRFDNQASLAKYAGLAWKQHQSGGFEAEVTRLIPSGNRFLKYYLCEAAFSLVRCDKKYSDFYHLKYKEINRCQHKRALALTARKFVRLVFRLLKDNRLYCPAK

SEQ ID NO: 94782 - protein, 462 aa, unidentified
MKRKAKSEATRSGMAMIHQNAAAIDIGATMHMAAVGADRASDPVRSFGTFTADLNRLVDWFVECGVKTVVMESTSVYWIPIFELLDERGFEVFLVNARDAKHVPGRKTDVSDAQWLQRLHSHGLLRASFRPKGEIVELRAYLRQRERLLDTAASHIQHMQKAMTEMNLQLHHVVSDITGATGLRIIRAIIAGERDPAVLASMRDTRCHSSAEVIEKALTGHYRTEHLFVLEQALALYDVYQEKVAACDIRIESVLKKLSSVRGNKKDAKADGSGKPRRRGRQSNGPAFDVGAALYSLLGKDLTRIDGIGPYLALKLVSECGDDLSAWPSAKHFTSWLCLAPSNKISGGKILSSRTRRSGNRAAALLRLAAVTVGRSDTALGAFYRRLSARIGKAKAVTATARKIAVLFYNALRHGMDYVDPGASYYESRYRERVVKNLLRRAKAFGFVLQSAEILPAKEAVS

SEQ ID NO: 94783 - protein, 345 aa, unidentified
MSSQVFVGIDVAKAQWDMALRPAGERWAVTNEDAGLAALGTRLPEIAPPLMVLAATGSYQRAVAVVHPRQARDVAQATGPLAKTDALDARALAHVAEAVRPPPRPLPDAQTAALRALLARRRPLVAMRTAEPHRLGNAPPRRQTDIQAHLTGLHTRLAALDDDLDTTRRTSPVWRAREELLRRVPGMGPVWTRTRRLDLPEWGTLSRQQLAALVGVAPVNRDRGPLRGSRTIWGGRASGRATLYMSTRVAVRSHPVLKAFYERLRAAGQAAKVALTACRRTLLTMLNAIVKPHTPWQPQEGPRVSQVPLTNKTVAPLLRRCGFRARVTGSVRHAGHLKRGDSTRW

SEQ ID NO: 94784 - protein, 412 aa, unidentified
MLFVGDDWAKDHHDVELVDETGRRLAKRRLPEGIDGIALLHALIAEHVPEDWIDPRTGEVAGRVLVGIETDRGPWVQALVAAGYRVYAINPVQAARYRERHSTSGAKSDPGDAHVLAEIVRLDRDHHRLVAGDTPDVEALKLVARAHQTLIWERTRHTLRLQAALLEFFPAALQAFEDLTAPEALELLGRAPDPARAGSLSRAKITAAVRRARRRDVEGNTERIYTLLHADGLRQPPAVERAYATIVASQIRLLTALVDDIKELQAVVGEGFGQHPDAELYLSQPGLGPVLGARVLAEFGDDPHRYADAKARKNYAGTSPITRASGKKTVVLARYALNDRLADAVHQWAFASLKGSPGAHAYYQTLRARNIGHHAALRQLGNRLVGILHGCLKTDTLYDEHTAWAHHQTTAA

SEQ ID NO: 94785 - protein, 356 aa, unidentified
MTKVKTNFTEQTIYVGLDVHKRSWNAALYLNDQYLRNVHQPPSPQALYKFLQTNYPGADYVCAYEGGKFGYWIQRQLSRRGVECIVVNPADIPATHKDEVSKTDVRDARGIAMALQCGQLRGIFIPTVHQDSDRSLVRHRKKIWRDLVRCKNRIKGFLDYTGVELPDKFSNSNWSKNFLQWLSAIKFEYASSRTTLDYMIREAELLRKELLSISNDIRKLMRSKEYKKLYYLLRTITGIGPLTAALLITEIGDMKRFSSFYELNSFIGLLPSEHSSGERELKGRLTIRRHRQLRSDLIECAWTAKRTDPALSLFYSEQLKRGKEPKLIIVKIARKLLSRIRYVWQTEKAYEKGIVK

SEQ ID NO: 94786 - protein, 363 aa, unidentified
MNYVGVDVHKKYSVLCALDERGRKLREARVEGNASCGFAQFFRSLDGPSKAVVEACWNWGLIHDELERLDQVEEVMLAHPAKTRLIADAQIKTDRLDAHALGTLLRGNLVARAHVPRRETRARKNLLRQRLYWARLRTMLRNRIHALLDRQRGLELPQCSDIFGQRGLFFLRQLQLPEPDGTLLREQLALHDLIAQQMKAQEKRIAAEFKSEVIHRQLLSVPGIGTTLAAVIACEIDQIERFSTSEKLCAYAGVVPSTHASGGKVAHGRLLPFCNKWLRWALIEASWVAIGCSPYFGALYRQHRARGKKANTAITIVARRMCRSLWQLLSEKRDFEKRPFSHRIRTFPGCSAVRLTARSVERP

SEQ ID NO: 94787 - protein, 428 aa, unidentified
MNTTNTTEFAATIGLDWADRKHDLWICPARPAKAEHRRLDQTPEALHEWVAKLRERFPSRRVAIAVETSRGPVISALMAYDFLVLFPVNPKALKDYRAAFCVSGAKDDHTDAMLLEELVRLHRDKLNALQPDTELTRKLAGLVENRRHLVDERTRLVNQQHSTLKTYFPLALDLLEDQMNTLLAAEFLARWPSLETLQKEKPKILRTFFYQHNSRNAQRIEERIQALAAARPLTTDGAIIEPACALVRARAGMLRPLLQAIQRLDKAIAEAMDQHPDAAIFRSFPGAGPALGPRILVAFGTNRERFGSAAEVAQFYGIAPVVQQSGNSKTVRVRYRCPKFGRQSFHENAACALKKEPWARAYYDQHKKKHDDKHHPACRALAFKLIRIYFACWRDKTTYQPDLYLLALQKNGSPLHKALKTQSTPSCE

SEQ ID NO: 94788 - protein, 468 aa, unidentified
MSKGSGMTRGDRRRNARRERLRAMLPRDGAVTGIDLAEDKQAIAVVDHDVRVLARKTVRVKAFRLGEALDWAVAQARAKGFSRVTVACEPTGPRWLQVQRLCAERGLPLACIQPLVSHIARQQQDYTTHKTDEADCVMIAWLAIELHCYIPEEMDEAWAELRHLGRRRAQLITAATASVQRVRDFLPVAWPVVPEACAGPFESVTWLAAVQVVAARRGGQPEELAAAGLEAFTAAVRGTLGGWGGRRVSGRVCRAVFATLASTEGVVITHRRGLLRRCAQEPGDLQRVRAQLQETEAQMAAALAGLGLSRLAGIPGLTAVGAAAILAETGDPRRYDGSCSLVKHAGLSPSDNASGAFTGQAHISRRGRPGLRLAVWRATWPLLMHNPVMAAKYAAMTAAADAAAQAAQAQPGAGSRQASAAAAARAQRAKARVACAASLLRWIYSLVVHGTSWDPAAAGAATSPAEAA

SEQ ID NO: 94789 - protein, 329 aa, unidentified
MTTNPPQIVFNHIVAFEVSKEKLVVHTLPDDGQWTIDNKPQAVRRLIKSEIKRNRKKQLGRMLVICEATGGYERHVLDVALEMNLSVHRAHGTRVRHFGHYCGLLAKTDPIDARLIGQYGLKTENIRLYSPPPPDTTALRALHARRTEIQQMLIAETSRLDHAQHKSVLKSLKAHIASLKAALAAIEADIAQLVEGSEMLRKKVALMQTVIGIGPISAMVVLAYLPDIGQLTKGQAARLAGLAPINNDSGKKRGARHVEAGRTAIRRALYMAAGVAMRANPILKAFSDRLRGKGYPFKYVVTAVMRKLIVILNAVLRDGESWKGAQMVA

SEQ ID NO: 94790 - protein, 419 aa, unidentified
MGNTKTEKLKTVNEKTMIVAIDIGKTIHYGYFRGPDGHDVKPFPFYNTQKSFKEFLEKVIRFKQQRSLEEVVVGFESTGPYAEPLMNFLAKKSVRLVQVNPMHTKRLKEMTGNSPNKTDSKDPRVIADVISLGHALTVIVPEGAAAELRRLTQARERACKSRTATMNQLHHLIFVVFPEFMQVIKKITSRSALYLLKNYPFPKDVVDLGLKPLQDILRKVSKGKFGQTQAARLFEAAESSIGIAEGKRGLLLEIKYLVSGIERESEFIDQIEKQMSHYLKQIPYSQSILSIKGIGEVTVAGLIGEVGDFRQFKTIPEIMKLAGLDLYEISSGKHKGQRHISKRGRAHLRKLLFFVTINTIRTNGIMHNKYLEMVNRGEPKVKAIVAISRKLLRIVFSLACNNTTYVENYDQLNTIKEAA

SEQ ID NO: 94791 - protein, 359 aa, unidentified
MLVERTCVGLDVHARSVVAAAIDGVTGELSQARLTPSHDHIRSWIEQFDGPVAVVYEAGPTGFGLYRALNPVGVRCVVAAPSKLQRPPGDRVKTDAKDAVHLARLLRLGEITAVTVPTVDQEAARDLVRARDDCRGDLMRARHRLSKLLLRHGFVYSGGQAWTGVHDQWLRRQRFDHRATTMAFESGYEAVTAITARRGRLEKAIAELAAGSEFTPIVHRLGCLRGIATLTAFALAVEIGDWNRFTGSSIASFVGLVPSEHSSGASRVQGSITKTGNTHVRRLLVEAAWQHRPAYRPGKVMRDRWDLADPAARARGDAGNRRLHQRWVQFNLRRKRPVIANIAIARELAGWCWSLAVMG

SEQ ID NO: 94792 - protein, 352 aa, unidentified
MQRTTRKEISYVGKEVYVGMDVHKKTYSVTVICEENIVKRDTMRADPEVVVRYLLNHFEGAKIHSVYEAGFCGFGLHRKLVAAGIDNIVVNPASIEVAANDKVKTDKRDSRKQAEQMFRGSLSGIYIPTEAEESARVLTRTREQIVEQRARVATQIKSKLNYFGLIPFDDKRTVTESYLKELEEKEFSEELSYGLKLFSAQWRFLTEQLKEIGTKLEVQAKRDSSVEKIYRSVPGIGPISSRVLSNELGNLQRFSNERRLFSFTGLTPSEHSSGESVHKGRISRQGSSRIRKYLVEIAWRAIEKDPALKEIFERIAKTRGKKRAIVAIARKLIGRIRACFHQGSLYQLGVMA

SEQ ID NO: 94793 - protein, 370 aa, unidentified
MKPNFEPGKWFMQCVGIDIAKGTFTACLCMYEFDQGCSTAPVVFNNDKTGFNKFIKWSRKEALRGYPLRYVMEPTGVYYEQLAAHLSKLGLDVCVVLPNKAREFAKYEGILTKTDDMDAYTLGMLGCLDKRLKPWTPPSPIYRELRQMTRFVADINKVKTELRNHLEALAHSETAEKSIVKHYNKLIDEIDKQLVSNQKAIREKIKQEPGLPERIDRITTINGVGFMTVVTVVAETNGFALITNRKQLTRYAGLDVPAHQSGPVDPKRHISKQGNVHIRTALYFPAIVSTQCNPQMKDFYGRLCARNTQSKMIGVTATMRKLLLLIYSLWKSGEKYDPTRDKPACNRQKKEAETTEGQPHGIDVGTLAEE

SEQ ID NO: 94794 - protein, 391 aa, unidentified
MVCVGIDVAKDKHDCCILDSDGTVRADCFTIPNNSDGFKRLLQTIQDCTQKSDKIKVGLEATGHYSYNILGFLLDNGLPTYVINPLHTNLYRKSLSLRKTKTDRVDARTIATMLLSDVDLKSYTDAAYHNEELKSLTRYRFEKVQERAKLKQSVSRLVTILFPELEQLVPILHIASVYSLLSEYPGAKQVSEVHLTKLTNLLATVSKGRYGKDKAIQIRDAAKTSIGSVMPAKSLELKHTIKLIRELTSEIDEIEDSIQQIMDELHPPLLSIPGMGIHSAAMILGEIGDFSNFESPDKILAYAGCSPSTYQSGKLTNCYAHMEKRGSRYLRYALYNATKYVCHWNPVFAEYLAKKRAEGKHYNVALSHATKKLVRLIYALQKSGKTYLTAA

SEQ ID NO: 94795 - protein, 439 aa, unidentified
MLNPNAAGIDVGAREHYVAVPIDRDAQPVRHFGAFTKDLHSLAQWLKQCGIKTVAMESTGVYWIPLYQILESYGFKVKLVNARHVKHVPGRKTDVQDCQWLQQLESFGLLTSSFRPEAKICVLRSYMRQREMLIRDASRYIQQMQKALTQMNLKLQHVISDLSGHTGLRIVRAIVAGEREPGKLAALKDRRIKSDVATIAKALSGDYRAEHLFALKQTLELYDYYQQKIAECDAEILKEMQTLETRGSAGVVLKRKPRSRHNAVSFDSQAELYRIMGVDLTCIDGINESTAQLILSELGLDICQKWPTEAQFTSWLGLCPNNEISGGKLLKRGTRKVVNRVANALRMCAQSLLKSKSALGAYARRMRSRKDTPVAITATAHKLARLIYRTLKYGQEYVDAGSDLYEARYTATLVKSLQRKAKSLGYQLVSYQTLEAVVP

SEQ ID NO: 94796 - protein, 327 aa, unidentified
MFQYVLGIDVSKDTLDVVLWDGERGNHQVFSNSPVGYARLGHWLISQKTGPVHACLEATGQYGEGVAEFLFSTGNPVSVVNPLRIKRYGDSKLHRNKTDKADAALIAEFCFKENPPVWKPLPFCFKQLRQMVRRLEDLQSNYQQESNRLKSGVNNEWVVEDLKDHLQELHKRIQTLKVTIQQFISETPELKQQADLLISIPGIGKLTAARLLAEIGDITSFEDAPQLAAYAGLNPKGARSGSSVQKKTHISKEGRSFLRYILYMPAIVARRYNPIIQAFCVRLANRNLPEMAIVAAAMRKLLHLVFGVLKNKQVFDPNYLYKPVFAS

SEQ ID NO: 94797 - protein, 362 aa, unidentified
MEFFSGLDVGMDETAICVVDDKGKVELQTTVVSDPDAIKLALKPYLGRLRRVGHEAGSWSPWLHPELEKLGLPVICLETQHVRAALKAQRNKTDKTDALGLAHLMRTGWFRQAHIKSEACYRLRLLLTHRRNLKRKFVDLENAIRHSLKAFGMRFKGCGRGGFAQAVREAVAGDPLVTELIEAMLNARAALWKEYLKLHDMVVKFVAGHELCRRLMQIPGVGPVAALSFVTAIDDPSRFKRSRDVAAYFGLTSRRWQSGSSIDVQGRISKAGDGDVRRALYEAASALLTRFKRKDKVKTWGLAIAKRTSHRKATVAVARKLAVIMHAMWVDGTFYCGDPDAPKADVSARAAAKRRKLLGAYA

SEQ ID NO: 94798 - protein, 343 aa, unidentified
MSETPVTPESIVSVGLDVHQYVVQVCVLNRAGHVLSHRRVANDVTAIVAAVRGHGRVTGVALECSTGTAALADALIQHTGWDVHLCHPGYVRRLRQNPDKTDLSDAQPLADLVRVGYLPRVWLAPPAIRDLRTLVRYRQQVVDFVRNTKLRIRALLRDHRVADVPQYLWTDRGLAWLQNLKTLPPWAGWVLENHLAELASALARLARVSARLREVAGQDRLIRALLTQPGIGLVTACVLRAEIGHFRRFRTAKQLSRFCGVSPCNASSGARQADAGLIRGCSRLLRDTLIEAAHRLARCDPHWRAFKMQLQARGKAGSVIAAAVANRWTRRLFHELGALEAAA

SEQ ID NO: 94799 - protein, 334 aa, unidentified
MENIALIGIDLGKNSFHIHCQDHRGKAVYRKKFTRPKLIEFLATCPATTIAMEACGGSHFMARKLEELGHFPKLISPQFVRPFVKSNKNDFVDAEAICEAASRPSMRFVQPRTESQQAMRALHRVRESLVQDKVKTTNQMHAFLLEFGISVPRGAAVISRLSTLLEDSSLPLYLSQLLLKLQQHYHYLVEQIKDLESQLKRKLDEDEVGQRLLSIPCVGTLTASTISTEIGDGKQYASSRDFAAATGLVPRQYSTGGRTTLLGISKRGNKKIRTLLVQCARVFIQKLEHQSGKLADWVRELLCRKSNFVVTCALANKLVRIAWALTARQQTYEA

SEQ ID NO: 94800 - protein, 343 aa, unidentified
MSKNTMIGVDLAKQVFQVHGASMAGRVQFREKLSRRSFPKFMAEQPPAVVVMEACGSAHYWAREMIRLGHEVKLIAPQYVRPFVKRQKNDAADAEAIVIAAQRPEMRFVELKSEEQQSRAVLFRSRERLVHQRTELVNALRACLYEYGHVVPQGIGQLERIGEIIDDPNSDLPKLAREECRDMLEQIGEQTVRINAKTGKVKALAAKADIARRLQTMPGIGPLTALAVEAFAPPMAHFQSGRDFSAWLGLVPRQFSSGGKERLGRVSKAGQADIRRLLIIGAMSRLNWMGRKAIPEGSWLARMQARKPRMLVAIALANKMARAIWAMLTKQEDYRVPAQAVAA

SEQ ID NO: 94801 - protein, 366 aa, unidentified
MKPNFEPGKWFMQCVGVDIAKSTFTACLCMYEFDMGCSTNPVVFNNNKTGFNQFVKWSRKEALKGYPLRFLMEPTGVYYEPLAFHLNKLGLDVCMVLPNKAREFAKYEGILTKTDDMDAYTLGMLGCLDKRLKSWTPPSPVYRKLRQMTRFVADINKVRTELQNHLEALVHSETMERSIVKHYNKLIDEIDRQLAANQKAIREKIKQEPGLSERIDRIVTIKGVGFMTVVTILAETNGFALITNRKQLTRYAGLDVPAHQSGPVDPKRHISKQGNVHIRTALYFPAIVSTQYNPQMKDFYGRLCARKTQSKMIGVTAVMRKLLLLIYSLWKSGEEYDPERDMPVSSKKKKEAETPEGQPHGIDVGT

SEQ ID NO: 94802 - protein, 417 aa, unidentified
MKLMSEKSFTAFIGIDWADSKHDICIQAADNPRREFGRLPHQVDDIEQWAQSLHQRFPGPIAVAIELSKGPIVYALQKYDYFVIFPINPSTLAKYREAFQPSRAKDDPRDAELALELLLTHPEQFEPLQPQSAEIRALTTLVEHRRSLVNERVRITNRLRNTLKQYYPQALEWFDRIDTLLFCDFVERWPTLTQVKRARRSTMEDFFNKRNMRRNDLLETRLEAIKSARPLTFDEAVIAPNKLQAVVLIEMLRLLLGSIKKYDQEIAELASAHADYNLFSSLPGAGPSLAPRLLVAFGEQRNRFSSAAALQKYSGVAPVTERSGKKHWVHWRWQCPTFIRQTFVEWAAQTINKSYWAGEYYQQQRDKGCTHQAAVRSLAYKWIRILYRCWQTSTPYNEAVYLKALERRGSTLLKKAA

SEQ ID NO: 94803 - protein, 429 aa, unidentified
MTPSIKTPITSEPDFAAFVGIDWADQKHAFCLQAAGQKAKESGELEQKPELIGPWVAKLRERFDGRPVAVAVEQSRGALIHALFSYDFLVIYPLHPKTVAKFREAFKSSGCKDDPLDTEQILEILTKHRDLLRPLNPDTPETRLLSRLVEDRRKLVNLRSSHMEALSASLKEYFPQALELVSNNLKSRLAHDLILKWPSFQALQKAKPSQIKTFYYGHNVRSPELIQKVLQIAKSPHALTADAAIVESGSRLSQAYARSIQTLNAEINKYDQRIEQVFQAHPEAKLYTDLPGAGPVMAPRLCAFFGTDRSRYETARNVNSFTGVAPVTKKSGKSRVVYFRVACPKFDRQTFHEFARLSLPECQWARNYVEYYTKKGKKFHTIIRALAYKWVRILFKCWQTRAPYNETAYMETLKKRGSIFATLHLEENS

SEQ ID NO: 94804 - protein, 319 aa, unidentified
MTPTPVFVGLDVAKATLDVALRPTGEQWSVPNDEAGAGALVERLRPLHPTLVVCEATGGFERAAIAMLAAAGFPVVVANPRQVRDFARATGRLAKTDRLDADTLALFAERVRPTPRPLADEAAQLLDALLTRRRQLLEMLVAEKNRLGFAPRPLHHGIQQHIRWLERQLDDVTKDLADQIERSPVWRTKDDLLQSVPGVGPIVSAVLLAELPELGALSHKQLATLAGVAPLARDSGMLRGKRLVWGGRAGVRTALYLAALCGRRWNPQLRVFYERLVAAGKPKKVALIACARKLLTILNAMLRDSTRWVAPAPALQHSC

SEQ ID NO: 94805 - protein, 349 aa, unidentified
MKVLKQVLGVDVAQKELVVTLGRMHEDFSIEFYSYRIFSNKETGFVALLKWLKKNTLTEIPLRVVLEATGVYHQKFAHFLVDNCIDVSIVLPNKISNYFRTLEIKTITDKSCSEAITRFGLERKLENWKKPSKVYKTLQQLTRERDQIVHERTMIKNQLHAETSEAEPNERSLKRLEERLLFMNKQEKEIKQDITEIIQEEKTVEEQIGYMTSIPGVSVLTAATILGETNGFELIRNKRQLTSYAGFDVREKLSGTSVHGKPKISKRGNKYLRKSLHLPSLCSVKYILEYKELYTRIVSKNGIKLKALIAVQRKMLELTYVLVKNQSVYNPNYEIQKRVPLKEENTLTS

SEQ ID NO: 94806 - protein, 436 aa, unidentified
MTLINFVAANQKYYAFNLLSVFIMVFWSVQYLLQHLLVQTQVSHQLLQPLILILQLPQTPQFRHARPGKFFLPVNGMDYFLPLRLTVRNVLTRRITMNIVFLGIDLAKNVFQLCGLNQAGKPVYTKRTGRKELLQTLANIPACLIGIEASTGAFYWQRELEKLGHKVKVISPQYVRPFVRGQKNDGNDAQAIAVALMQPTMQFVPPKSPEQQDIQALHRARQRIVNHRTATVCQIRGLLLDRGIPIGSAVSRARRAIPLILEDAENGLSSRMRRTIAELYDLFNDLGRRIHFFDKEIETVFRQSEACPRIAKVKGIGPKTATAVVAAIGKGTEFKNGRHFAAWLGLVPRQHSSGDRQVLMNMTIKGDKHLRTLFIHGARAVVRVATNNNDGHMNQWVNQLKERRGFNKTTVAVANKNARIIWSMLRNDTGYQVVCN

SEQ ID NO: 94807 - protein, 407 aa, unidentified
MELTALFKRVIGLDIHQAQITACALIEQTDGSVHIEQRQFGAFKKDRCELASWAASLQPDEVVMESTGIYWKSPYAALEQVGIRAKVVNARHVKNVPGRKTDVNDAHWLATLARAGLLSGSFVPPANLRELRLLARQRQKLVGQLASEKNRLHKVLTDSGIRLGVVVSDLHGKSARAMVKALIDGQAPHEVLQLASQRLKASRQVLLDALQGELTASHRFVLDELMHHIEEIEARITRFDKRLLDSLKGEQESLALLQTLPGVDLMGAAMLLVEIGSDMSVFGSADRLASWVGICPGNNESAGKRKSGRVRKGNAYVRRLLCEFAHAASRTTSVFKSKFQSLMIRRGYKRAIIAIGHKLLRTIFFMLQRREHYRDSATDYEAISVQRNASRWMKALRKFGFIGQANA

SEQ ID NO: 94808 - protein, 421 aa, unidentified
MTETTRPYAVLIGLDWADQKHDLQCLFVAEAKQEHVVLASAPESIQEWVSTLRSRFPDGRIAVCLEQSRGPVAYELACYDFVDLYPVNPVSLKRYRETFYPSGAKDDPGDAALLLDLLNKHRDSLARLAPEDEKTRELRLLCEYRRKAVNTRAALTTALGAALKQYYPQALVLSGEDLHAELACALLMKWPRFPDIAKANRQTVRKFYYAHGSRSETAITERLQVIGSSCALTTDRAVVEPCVLRVQQLVAEIRALNKAIGSFDKNLAEVFHEHPDAFIFRSLPGAGPQLAPRLLAAFGADRSRYQNATEINTYSGVAPVIERSGKQKWVHWRWHCPKFLRQTFVEYAGKSIGQCEWAKRYYQEQRTRGKEHHAALRALAFKWNRILFRCWQDRAVYDERRYLSALAKHGSWVVTQSKNVA

SEQ ID NO: 94809 - protein, 438 aa, unidentified
MSNKVIFNLDELFISVGIDVGADFSWMSIALPNQQFVGKPYKILHNSIDSLTTAVSKIKEAEELYSLESRIFLESTGIYHYPLFCYLRDKGFNCSVINPIITKNSTNINIRKVHNDRFDSKKAALVGLKPDLKVSLMPSDLALNCRNLCREYYDLIDNRSAYVNKLQGELRMAFPQYLGIFSKVTINTSLTLLETYTSPSAFLKADKQEIIYIIKSTARFGLTYAKNKYNAIIQAATDANQFGYIIDSNIKRIRLYISFIRKYDEEINSILESLHELVDANEDSDFVKQIHLIETFKGAGFLSAVSIMGEIGDFSAFSKPKQLFAYFGLDPAVKQSGKFEGTKVQMSKRGSAIARRVIHTLTLQSISISRNREAKNPVLREYYLKKCDSKPKLVAMGAVSHKVCNMIFAILRDNKPFKIIAPQEHIKQYNSAKCDIAA

SEQ ID NO: 94810 - protein, 300 aa, unidentified
MDIFIYPSSKEYHIANTKAGHKQLAVKLKKLSVSLIVMEATGKYSRAPHRALHQNGFSVSVINPYRSRKFSDVLGQLAKTDQIDARMLALFAQKITPDTTIPPSEELEELRELSSGRRGIVVEKQALNNRLRTCNSKTVSRCLRSEIKMMERHIEKLEDKMLELINTVPTLMRRYEILCSIPGIGELTATSLLSDLPELGKCSAEQIAALAGLAPMNWDSGDMRGKRMIKAGRKTVRNSLYMSAMAAKRWNPDMVIFFDRLVQNGKKKMVALVAVMRKQVVLANALIRDDRLWTETRPAS

SEQ ID NO: 94811 - protein, 402 aa, unidentified
MNAVGIDVSKGKSMVAIMRPFGEIVSAPFEIKHTASDIHSLVELINSVEGESRIVMEHTGRYYEVLAHQLSKANLFVSAINPKLIKDFDNDSLRKVKSDKADAVKIARYALDKWQNLKQYNVMDELRNQLKTMNRQFGFYMKHKTAMKNNLIGILDQTYPGVNTYFDSPARSDGSQKWVDFASTYWHVDCVRKMSLNAFIDHYQNWCKRKKYNFSQSKAEEIYGKAKELVPVLPKDDITKLIIKQAVDQLNSASITVESLRTLMNETASKLPEYPVVMAMKGVGTSLGPQLMAEIGDVSRFTHKGAITAFAGVDPGVNESGSYEQKSVPTSKRGSSDLRKTLFQVMDVLIKTHPQDDPVYQFLDKKRAQKKPYYVYMTAGANKFLRIYYGRVKEYLASLPES

SEQ ID NO: 94812 - protein, 344 aa, unidentified
MGLYMINNFLGIDVSKDRFDVFLSFISKKGKRETRKRSFKNDDHGFQGLLSFLQKHNVEQVKACMEATGCYSEALAEFLHNTGHFVSVVNPYCIKSYARSKLTRQKNDQTDAEIIADCCQRQEPTRWTPPSPELKKLKHLYRCSVALKDELILVNNHLEKKERLPKEVANAWEDLAMNIAQKIETIKNSVRELLKQHKELLENFQLLLTIPGIGEESAVAILAEVPDIEVFRNARQLAAYAGVIPRNITSGSSVYAKPRLSKSGSQPLRKALFFPAIVAKNHNPIIMSFCQRLKEKGKHNMAIVGSAMRKLLHIVFGILRSKKAFDPDHIKNYRARRLTEGLVL

SEQ ID NO: 94813 - protein, 405 aa, unidentified
MTTEVFVGLDWAVHTHAVCVIDTAGAVLDRFEIAHDRDGLAELMRRLARFGPRVRIAIERPSGLIVDALVEAGHHVFPIHPNAVKASRPRYRSHGAKSDASDAYLLADLLRTDGHRWRELSPQSDSIRALRALVRSRDDLVATRVALGNQLQSTLEAFWPGAACIFADITSPIGLAFLKRYPSPASAARLSEATLGRFCRSQHYSGRRSPAELMARLHSAAVGLAGPLTNEAAAQLVRSMVAVLQPLVEQIAHLTRRIERFVESLPDGQIIMSFPRAGHVCAAQILAELGDVRERFPSLDQLASEAGAVPVTYQSGKTRSVAFRWACNHRLRKAVTCLADNSRHANAWARAIYTAARGRGCDHTHAIRILARAWLRVIWRAWTDRKPYDPSLHGNAVALVSGQGG

SEQ ID NO: 94814 - protein, 339 aa, unidentified
MKNTMPVFVGLDYHQDSIQVCVLNQQGDLLLNRSARNDAMELGRLVNPLGKVQQVGIEACCGAADLGQELVEKLSWNVSLGHAGYIARMKGSPDKSDFSDGRLLADLTRVGYLPRVWLAPAYIRGLRQLVNHRQRLVDRSRSIKLQIGAILREQRVKIDPERGGRWSKTWTASLRDNDQLCQQERWIVNDLLDDLIYHQRKIAAVGSRLREATAHDPVVAKLMRQEGIGEVTAWVLRACIGDFSRFRRAKQLSRYCGLSPANASSGQRIADAGLIDGCNKLLRMTIVQAAHRLRRTSDRWKRLGDALAQRGKAPCVIIGAIGNRWMRSLHHAMKEEIRN

SEQ ID NO: 94815 - protein, 375 aa, unidentified
MEHHSEAFVALDTAKLRNAVAIADAGRNGEIRYLGEIDNTEAETRKLVAKLASKHARLTFCYEAGPTGYGLYRLIKSIGHDCIVVAPSLIPSKPGDRVKTNRRDAVNLVKLLRAGELTAVWVPDERHEAMRDLVRARDAAVKDYRIKRQNVSSLLLRLGRHYPGKKTWGRAHINWLTGLKLEHREQRIAFEEMLLAVRQVRERIERLEQAMREAVADWTLAPVIEAVQAMRGIDMIGAIAFLAELGDLSRFENPRQLMAYLGLTPSERSTGESVKRGGITKAGNTRARRLLIEAAWSYRFPPRVSKDMQIRIGAAPRTAREIAWKAQMRLCGRFRTLTRKGKRPTIVVTAIARELAAFIWAINREVVGSHATANQ

SEQ ID NO: 94816 - protein, 402 aa, unidentified
MDIHKSFLVACIATTDSNGFTNYVTKRFSTFTGDLRRLADWLAGYNCRDVCMESTGKYWIPVFNLLEKSCNVILAHPKYVRAIRGQKTDKKDAQWIADIFKHDLVSPSFIPPFEIRQLRDLTRYYTKLTGFTTGEKNRAQNCLTVSNIQIDQVFSDVFGKSASAITEQLLEHPNGDFDVAPFVDPRVKAPLSDIKAAIEGYICFQQAEKLRLIRKHLDSLRTCKASLEALIDKCSSQFQPQIELVMTVPGIQRFSAITIISEIGSDMSVFPTAKHLCSWAGLVPQNDQSAGKKKTTRISRAGAYIKPLLVQCSLAAIKSKKHPEIKERYTALKKRRGHKKAIIAICRMILTAIYAMLKKAEPYDSSHYRSLDVAPANRTITPAQAISLARRLGYSVVEEQAS

SEQ ID NO: 94817 - protein, 362 aa, unidentified
MAQPKSVVGLDVHATQTHACVLYPETGELRSKRLGGPPRRSLDYLEGLQSPVLAVYEAGPTGYGLARGAAERGLDVRVCAPGSIPRAPSDRVKTDRRDAERLARLCLAGELSFVRVPSPEEERFRDLARCREAIRADLMRARHRVGKFLLRRELRWEGPGSSWTQAHWRWLGGIEFPDGASSAVLADYLCAVTALEQRRGTAGRAIEEGWPASPWAETIARLRCLRGIDTLTALGLCAEAGDLHRFEHPASLMAYFGIVPSEHSSGGKRRRGPITKAGSAHARRLLVEAAHHYRHAPRVAGSLERRQRGVDPRACEIGWRAQVRLHHRWQRLRVERGKPANVVRIALARELGRFVWEVGQLR

SEQ ID NO: 94818 - protein, 395 aa, unidentified
MVIWDAGILKHAGRVDMTRTALEGFGKGLRPTDEVVIEATGNCMAVSRVLSPFVARVIIANPLQVKAIAQAHVKTDKIDAGTLASLHAAGYLPEIWTPDVGTERRRRLTARRFQVVRHRTRIKNEVHAILHSHLIPRCPHADLFSGVGRAWLLRQPIPEDELMAIERHVRELDRLGEDLAIIDREIATDALDDPAVARLLTITGINLTVAAGIIAAIGDIGRFSSPQKLVSYFGLNPRVRQSGLGPAHHGRISKVGRSHARAMLVEAAWAAAKTPGPLHAFFVRIRAKRGHQIAAVALARKLTVLCWHLLTNQADYRWARPALIANKRRAMELKAGKPQAKGNKPGPAYAYNIKVLRDQEMEVARRAEQAYEQFVAQWETRPKEKVRGRSKPAGL

SEQ ID NO: 94819 - protein, 347 aa, unidentified
MSLSMIGLDTAKTVFQIHGVDEAGKVEIRRKLQRNDLIAFFEQQAPCTVVMEACGAAHHWARMLTGLGHSVKLIAPDAVKPFVKKGKKNDAADAAAICEAASRPDAKFVPAKTVQQQGILALHAARSLLVKQQTMLANAMRGLATEFGITVPKGIRKLDELLALVDADEIIPKQAKQAITGLHDYCNDYCNDLSEGIETFEAEIVAHARGDETARHLATIPGIGPITASLIAATVADITLFKTARQFAAWLGLVPRQNSTGGKTRLGRTTKTGNREIRKLLVLGATSMVYRADGWNSAVGAWLRSVLERRPVRLVTVALANKMARIALAVMTRKQVYRANGVVAAAP

SEQ ID NO: 94820 - protein, 419 aa, unidentified
MSFKIFKFNCCGLDVHKTWIYACIGITDSNNRTEYKQARFSSFSKGLHQLCVWLAKYNCNDVCMESTGKYWIPVFNILEQHKIRVTLSHPKYTKPMKGNKTDRKDAKWICDLYMCGMVKPSFIPPADIRELRDLVRYRFKLTCMITGEKNRAQNCLTVSNLKLDDVFSDVFGKSSRSITEQILQHPGEKFDVSPFVDSRCKTPIEEIQAAVDGNISKEQAVKLRQCLDHIDELQKHISEVEQEILRFSDKYEAALNLIRTVPGFDKNPMTAIQVLSEIGGDMSVFPTAKHLVSWAGCCPRNDKSDRKIKSTRISCAGSYFKPVLVQIANALIKSKKHFEFTTRYKRIKTRRGHKKAIIALCRMILTAIWHILTDLKPYTSDGFLESRPVKKEKVLTTSQALNLLRQRGYLIKDEPSPVS

SEQ ID NO: 94821 - protein, 426 aa, unidentified
MWDARRRVLKIKSLKHGIIQDKRGNIMRTVFGIDVSKASSEVAILVNGEKSHGYTMLNDAIGFNRLLNDLKTVHNPEIIFEATGVYSRRLRAFLEEYGYAYTQLNPLEAKKQLDSLRVRKTDKIDAEKLAHSQFILNRKPTYAQEEVYQHLRDLSRFYQNLTEDIVRAKNRLHKVLQVTFPELENLLSTPTGEQYWNLVMAFPCKEFVLNLSQNELCKIIRQSTSKRISEKRIAYLTDKLIKLAKQSFCAVKKISPILEEVRYYAQELLHLSEHRQVVLDDMVALAQPLPEYDILRSIPGIAETTATSIIGELGDIRRFQSTNQINAFIGIDLRHYESGNFLAKEHITKRGNPYARKILFKCIHNIASASHTNPCHIADFYEKRKRQSTIASTKPHAIASIHRLIRTMYYLITHNKLYDYSLTQNR

SEQ ID NO: 94822 - protein, 453 aa, unidentified
MEQPTRFIGMDVHKETIVVAVTAAGDVGKATPYGTFPNSATALEKLVRRLRQASSGSLKFCYEAGPCGYGVHRTLTRLGEECMVVAPSMIPRKSGERQKTDKRDADGLAVLHRGGLLTAVWVPDVAHEAMRDLIRTRLAAVRAVRTARQQLSAFLLRHERIYRNGGKAWTKAHRGWLADQSFAQPAQQIVLEESIEAVRRGEQRRDRVDGFLHAQIPTWSLFPLVQNLAALRGLDTIASAGLAAAIGDPSRFASAPDFMTYLGLVPSEHASGPKRPMGGITKSGDIHARTLLIEAAHSYRLPARITRRKLAGVDAVPEAVRAIAWKAQTRLCQRYRHMMAKGKPTPVIVTAIARELAGFVWSIACITSDPPAKASAITTMSDEVSPAKSTSQSRSLPCQPLKTTTHRAARPKQARAPVELRYVTHAQANNPKMSTRASRTRRTVAASAEASPG

SEQ ID NO: 94823 - protein, 405 aa, unidentified
MDIQPIFRCAVGMDVHLAIIHVCVILQIPDGEPQVHRRQFSTFQRDLRAMAEWIAGFSPETVVMESTGIYWKSPYAYLEKVGLRALVVNAQHVKKVPGRKTDTSDAEWLAMLARAGLLRGSFIPPEDIRTLRQISRYHHRTTAMLAAEKNRLVRVLSDAGIRITAVVSDAHGVAARAMIDCLLDGGTPEQALAYAGRLKAPREELLASLQGELSEDHRFVAAMIRRHITTLESQLADLEHRLFNALKPHEAALQLLLTIPGIDRLAAAKLVVEIGFDMSAFGTAGRLAKWAGVCPGNDESAGKRRSGKTTPGNRYVRTVLCEIAWAAIRTTSQFKSRYHSLVIRRGTKKAIIAIGHHVLKTVFVLLSRQVPYHDSTVDYEALRVQRNAPRWIRELKKFGYLPKAA

SEQ ID NO: 94824 - protein, 348 aa, unidentified
MELIRVGVDLAKNVFQVHGVDQSEKPVWQRRLTRQRWLETIVKTVEPGCKIGMEACTGAHHWARRLQTLGYTVKLIAPQFVKPYVKSNKNDARDAEAICEAMSRPSMRFVDIKTVKQQDIQAVHRIRSELIRHRNAKANQIRGLVAEYGLVAPRQLIALRRAVPDWLEDAQNGLSVLFRRLLNGLWEDLKQLESRLGELDQEINVIAKTDPDAKRLQQLRGVGPMVATALVATVGNADQFSNGRQMAASLGLTPRQHSSGDKDRLLGISKRGDAHLRTLLIHGARAVIQMAKNKDDRLSRWINELLQRRHPNVVAVALANKTARMAWAMLRNGTDYEPNKHGLLKRAA

SEQ ID NO: 94825 - protein, 413 aa, unidentified
MRSYTLELLHRLLDSLPSTPISLPAENNYEEVYEYPGLLYSSESRIFLESTGIYHYPLFCYLRDKGFNCSVINPIITKNSTNINIRKVHNDRFDSKKAALVGLKPDLKVSLMPSDLALNCRNLCREYYDLMDNRSAYVNKLQGELRMAFPQYLGIFSKVTINTSLALLETYTSPSAFINADKQEILDTIRSTARFGLTYAQNKYNAIIQAANEASEFGYIIDSNIKRIRLYISFIRKYDEEINNILDALHELVDANEDTDFVKQIHLIETFKGAGFLSAVSLMGEIGDFSAFGKPKQLFAYFGLDPAVKQSGKFEGTKVQMSKRGSAIARRVIHTLTLQSISTSRTGEAKNPVLRKYYLKKCESKPKLVAMGAVSHKVCNMIFAILRDNKPFVIITPQEHNKQYNAAKCDLVA

SEQ ID NO: 94826 - protein, 438 aa, unidentified
MSGLSLTHPNAAGIDVGSASHWVAVAAHLDEQPVREFASFTADLQALAQWLRKCGVDTVAMESTGVYWIVLYELLDSLGFEVILVNARHVKNVSGRKSDVLDCQWLQQLHSFGLLAGAFRPAEAVCELRAITRHRAMLLRNQARSVQHMQKALTQMNIQLANVISDVAGVTGRAIVREIVAGERDAQVLAAYRDRRIKASEEEIAKSLQGNWRAEHLFTLKQALATFDFCGVQLTECDDEIERRLKALQKHEGSPAKGKKRSKSKNAPKFDVREHLFKVCGVDLTRIDGIDVTTAMTVISEIGPDMSRFPTVKHFTSWLGLCPGTKISGGKVLGARTKRCANRATQALKLAAAALRSSHSALGAFYRRMSARMDKPKAVTAAAHKLARLIYVMLTRGEEYTDQGQQYYEERYRERVVRQLNKRARQLGFELTPNQQPA

SEQ ID NO: 94827 - protein, 338 aa, unidentified
MRFIGIDSHKDTLAAASIDAQGRPLGSQTFANEAGGFVRLIDWARAVEPERIGIEGSGGLGRQAALALQAAAFAVVEVPPQLTAAARRNQRNHSKTDPIDALIIARIVLRDEDLPTVRPTGEIEDLRALVRYRRDLLAERTRLASQLHGNLEQLHPGYQRSIGRLTTLTELDKVKRLLATDASVGARLARQRLARLRQLCKEIVAATREVEAAVSGTAVQLQTIPGVAKLAAAEILAHVGDVRRFRTKAQFAMANGTAPLPASSGRTNRHRLNRGGNRQLNRVIHFAALTQVARYPEGRAYYLRKQAEGRSKKDALRCLKRRISDRIYHSLRLDAGTA

SEQ ID NO: 94828 - protein, 345 aa, unidentified
MTIVKTRAITGGVDTHADVHVAAALDPIGGLLGVQEFPATAAGYAGLLGWLGGFGTVALVGIEGTGSYGAGLARHVTAAGIRVVEVDRSDRQDRRRQGKSDPLDAVSAARAAQSGRARGAPKGRDGAVEAIRALMVAKRSARSERVQTINQARALVLTGPEDLRTRFARHTAASLVSGLASLRPRPGDVVGYATRIALRELGRRAEFLDGQLERLDELIAPLVAARAPGLLALHGVGPDTAALLLVAAGDHPERLRSEAAWAHLCAVAPLQASSGKVTRYRLNPGGDRQANHALWRIVLTRMSAHPPTLIYVERRTREGLSKKEIIRCLKRYVAREVYRHLRAAG

SEQ ID NO: 94829 - protein, 347 aa, unidentified
MDVHQATISAAVRDSSGNLVLEATLETKAETILEFVHGLRGSLRVSFEEGTCAAWLHDLLQPHVSEVLVCDPRKNALLRVGNKNDREDARKLAELLFLHKLHPVYHGEAGIRTLKELARSYLTITRDLTRVMNRLKAIYRGWGIACAGQQVYAPRYRAAWLAKIREAGVHRRAEIYYQQFDVLAALRQQARRELLGEARKHPALRLLRQIPAIGPIRAALLIALMQTPHRFRTKRQLWAYCGLALRTYDSGEYRFVGGQLKRSKKAVTIRGLNKNHNHDLKNIFKGAATRAAATAGPLQNFYEARLASGMKPPMARLTLARKIAAITLLVWKKGVCFDAKQLKQQAA

SEQ ID NO: 94830 - protein, 315 aa, unidentified
MTEKNERFVGIDVSKQTLQVCVLPESVQRCFDNSASGHVELLQYLASVGPQLAVLEPTGGYELEPLCALWQAGIPVAVVNPRQIRDFGRSLGKLAKTDILDAELIARYAQTVRPPVRPIPDEESQQLQALVVRRRQLVETRAAEQARKHLAKNRVRASIELLIVHLSAQIDELDDELQKLVESHPAWHKQDEILQSVEGVGDVTSATMIALLPELGTLNRKQISALVGVAPLNRDSGRKQGKRQIWGGRAAVRAGLYMATLAATRFNQQMSSYLQALRQRGKCFKVAMVACMRKLLCILNAMLRDGRPYDPQLQT

SEQ ID NO: 94831 - protein, 486 aa, unidentified
MKTTRERTQERAKAAAGSAPSKSQRMNRKQRRELARKIQADDVNLEVVHPDAAGIDIGNECHYVAVPSKRDSEQPVRRFGCVTAELKAMAEWLKQCGIRTVAMQSTGVYWIPVYDILEAARLKVYLVNARETKNLPGKKTDVQESQWLMKLHTYGLLRNSFRPTAEIRRMRNYWRQRNDLIQSAARHIQRMQKVLTQMNVQLANVISDVSGVTGQAIVKAILDGERDPYQLAELRDPRVRATKEQIARSLEGNWQEDLLFILRQEHEAHGFCEKQIAACDQELKEYLNEREDRSQGAHLEEEKRRNRRMKKKGHKPQQFDMREALFRMTGVDLTRIDGIDVMTASTVISEAGWDMSKWRTEDHFVSWLRLCPDNKVSGEKVIGKGRLPTNNRLTTALKIAATSLKQSETYLGAQFRRLRTRLGSPVAIKAMAAKLARLVYRMLRYGMRYVDRGAQIYEEQHRQRQIIFLKRKAAELGLKFVETAAA

SEQ ID NO: 94832 - protein, 316 aa, unidentified
MADITQQIILGIDVAKRELVIFNWINEQQATLENDARSIRAFLRSLNGAVSIGLEPTSHYHREVAEQAVALGHKVYLVNPRQLAHYREGINRRNKTDAEDAYLLARFVAKEANELRAFTPQCAQAQQLWALLKRRSGVVAARKQLQQSLSDLKLSAKAMFTQFAALLRRIDKRLNALAQALGWSEDVKRCRSIPGIGPLNAVALVAAFHRGAFASGDAFVAFIGLDVRVRESGTYKGKRRLSKRGDAELRRLLYCAAIPARSHDPFARYHQKQLDKGLSKIAANVILSRKLARIAFAILSNKTTFNSTKRKGGSEP

SEQ ID NO: 94833 - protein, 456 aa, unidentified
MTQPIPAQEPEFAAFVALDWADQEHTWALEVPGAPPRERGKLEQTPEAIDAWVAQLTARFQGRPIAVALEQARGALLYALSKYPHLVLYPIHGATSSRYRAALFPSGRKDDPLDTDLLLDLLVQQRSRLRPLRPDTEQTRKLQVLVEKRRQLVDERTAQTNRITDLLKVYFPQALQWFDKLGSPLAGVALERWPTLPRLQAEDAEHLRQFFRQHHCSPERIQQRLEEIPKARPLLEDPAIIDPSVLMVQALLQVVAALRQGIAALDRSIREVFADHPDAPLFDALPGAGPVLAPRLLAAFGSQRDRFQSAQQILSYSGIAPVIARSGQTQLWIHFRWACPKFLRQSFHEFAECSIPQCGWAKTFYARQRAQHKGHHAAVRALAFKWIRILFRCWQTRQPYQEDLYLAARERRAVPLSRRPLRTQLAAGSAPPACGNAQDRELKTVGALLKSLMAGA

SEQ ID NO: 94834 - protein, 340 aa, unidentified
MSKKLVFSPPLSTQPILGVDVAKLTFESCLLQGAQRSRREFANTPAGFGELFAWLAEAQAGQAIVALEATGPYGEGLAQAAFAAGYRVLVYNPRRVLDFARSTGRRNKTDRVDAELIARYVLSQADRAYPWWQPLPAPQAALRELLRRQADLEASLHAEERRLEVAAPAVQPSVRRAVRWLEAELARLEAMVQKHLQLHAPLAADVARLRAIGGCGEKTARLLVAEIPRHFRTARAVAAWLGVVPRQAESGTSVRKGSHVGHEAPWLRPKLYFPAITAMRCDPRAQALAQRLRALGHTTMSIVVAVMHQLIRTAFGLLKHGTTYDPAHQVRLSAPAPCSP

SEQ ID NO: 94835 - protein, 343 aa, unidentified
MNISRVGVDLAKSVFQLHGVDAQGKAVWKRRLSRNKWIGTLCKALPRGCEVGMEACAGSHHWARVLIGHGYSVKLIAPQFVTPYIKSNKNDANDAEAICEAMSRPNMRYVKIKSIEQQDIQAIHRVRSELKSHCHAKANQIRGLVTEYGLVAPQQLSSLRAAVPCWLEDADNGLTDRFRALLKGLWDDLTYLDQRMDDLNRDIETIAKTDPMARRLQQLRGVGPLVSTALIAAVGNGDQFSRGRQMAASIGLTPKQFSSGGKERLLGISKRGDSYLRSILIHGARSTIHHAKHKDDPLSKWVTGLAERRHPNIAAVALANKTVRMAWAMMQSGEDYNPDRAVA

SEQ ID NO: 94836 - protein, 370 aa, unidentified
MRKSIMYIGMDVHKESIEIAIAEEGESQEVRRYGRIDGKAESLAGVVRKLVASGKELRFVYEAGPCGYYLYRQLKEKGLACKVVAPSMVPKKSGDRIKTDRRDAVNLARLERAGELTAVHVPEPEDEAMRDLSRAREAAKRAETQARHQLQGLLLRHGLQYSGKTPWSKAHWLWLADVKLPQPAQQIVFQEYVDAISEARAREERLVSQIRTLLPQWRLAPVVQALQALRGVSLVTAVIMVAEVGDLRRFTKPRQLMAYLGLVPSEHSSGARRRLGAITKAGNGHARRVLVESAWAYRLPARVSRIIRQRQEQLAKPICEIAWRAQLRLCARYRRLTLKGKTKQVVVTAIARELAAFMWAIAKQVPVSAG

SEQ ID NO: 94837 - protein, 481 aa, unidentified
MAARKKNMTKDTAPGVAGASSVPGGDGAEVAEDRVEVVTYAAAIDVAKGFGMVCTRVPGSRPDRRRQKVWRVEATYDAVVALMDHLRCEGIQRLVLESTSDYWRIWYYLAEAAGLEVWLVNARDVKHLPGRGKSDREDCVWLCKLNERGMLRRSFVPPEPIRDLRALTRTRSRLAQDQVRHQNRVEKILEDALLKISVVISDLFGLSGRRFLDALVAGERSPKTLAALGDRRLKASTTELEAALTGRFREVHAFEIATHLRLIDAINGEIARLDARIEQQLASIPGVAPACTGCGLIGGGHAPGCASKDAAVLGLVERLDEITGVGARNNQVLIAELGTDMSVFPTAGHAAAWARLTPRTLQSGATARPGRTGKGDPYLRGALGQCVMAASRTDTRLGEQYRRTARRRGKQKGIVAVSRVICEIAWLLIGDRAARFTDLGAGYYSTQNPQRHTRSKIREIERLNPGMKVTLTPIEPAGTAA

SEQ ID NO: 94838 - protein, 319 aa, unidentified
MFVGIDVSKDRLDVAVHGRKENWQFNRDENGLGRLVDHLQSLGESITLVVLEATGGLERDVAASLAVAKIPAAVVNARQVRDFARATGKLAKTDGIDATVLAHFAEAIRPAVQTVADELAQALEARITRRNQLIQMFVAEKNRRAMLLIQRTASSAMAKSIDVHIQWIEKQIASLDDELDKLIKNSPVWKEKDDLLQSVPGVGPVTSRTLLGYVPELGTLDRKKIAALIGLAPFNHDSGHLSGRRAIWGGRAEVRSVLYMAVVAALRCNPVLRAFYARLIAAGKVPKVAITATMRKLLTTLNAMVRDGASWTPPSALRA

SEQ ID NO: 94839 - protein, 396 aa, unidentified
MDTAVYLGVDIGKSGHYALAVDAAGKPIYQTAVPNDEAALHKLVKWAHQHQAGLVVDQPGGAAAVLLRLCWQSEVRIGYLHGLAMARARDFYAGESKTDPKDAFVLADVARAHPNRIVWLESSSEALAHLELLCGYDADLRGDANRLTNRLRALLVTHWPALERAFGERLDSHGVLAVLQQYPSGPAVRDAGVEQLTAALKAQRVRRPEAFAKQLHQAALAQTVTITGSQTAARLISELAGQLTAILARRAELEKDIERGFFALPEAAILRSLPGIGPRLGARIAVEIGSICRFRTPGQLASYAGLGPTPWKSGTSINANMPSRFGNHRLKNALFLAAFASLRHEPSRTYYDRKRAQGKRHNQAVLCLARRRVDVLHAMLSRGEPYRAPTPLPAAA

SEQ ID NO: 94840 - protein, 351 aa, unidentified
MKKVAYLAMDVHSGHCVLGHMDFDGTFIGNRRFPTSEQHIIEALKAVKAKEKYLALEESNLAYWAAQVARAYVTEVISSDPKENALIYRSPNKRDKVDTHKLCRLLRLGELKRVYHPENDERAIFKAAVQHYIDLRDQQVVLKNKIKAMYRHWGVIDVAGQAVYGIKRRHDYLQRVKHLHIRNQLHRLYCLMDETESMQKRALKAMKQLGRKYPEIKQFKKMPGIGEILSHTFDAFIQTPHRFADKRKLWRYCRLAITDRSSDGKPLGFKRLDKSGVSELKALSYRAWLCAMGSDNEVSRFYSRSLRRTHSHVHARLNTQRKILAVMYGMWKRGEAYRPQLFLDSPQMSVV

SEQ ID NO: 94841 - protein, 358 aa, unidentified
MMYVGVDVHKKVCRAAMVNDECELVDEFSFRNCSKGIEDFMMKIEAFRDRVLVAVESTANLWIRLYDSLEEHGIQVVLSNPSKTRLIAEARVKTDKVDARILARLLRADMLPLCFVPNRMQRDRRQFIRHRVHLVKMRTEVKNRIHALLDKHGLKCPYKILFSKKGLEWLKGLKLGFTDDAVLRSDLALLEALDEQIGFVDAKIASVAVNDERVRLLMTMPGLGYFAASLLVAEICDISRFTSDKRLVAWAGLAPGVHQSGERTVQGRITRQGNRLVRWVMVQAAHIARLHDERFKEFYERYSRRKGDKKAVVAVAHEMLRVVYFMLKRNEPYRGEKRGLSWRKLKRLESVALGGFQA

SEQ ID NO: 94842 - protein, 416 aa, unidentified
MNAVGIDVSSRKSTVAVLRPLGEVVCLPFDVTHDIAGLASLAEKLKAIDGETRVVMEHTGRYYEAVEKALHEAGLFVCAVNPLLIKEYGANSLRRVKTDKADAVKIARYALDNWADLRDFTPMDAIRYDLKTLNRQFQLASKQRTASANNLIALLEQSFPGIRKCFDSPVRSDGTQKWVDFAHSFWHVDCVRKQPFAAFCERYRKWCKRHAYLFKLSNAEEVYALAKRAVVLTPKSKVVKVLVQEAANQLSSISRSVEVYRAEMDRLAAMLPEYPVVMAMYGVGKSYGPQLMAEIGDVRRFERKQALVAFAGIDPMPNQSGDKNVRSNKSSKRGSPYLRKTLFNVIRTYLQCAPQDEPVFQFLNRKRAEGKPFYVYMLAAANKFLRRYYAKLRDYFASLDTLQPVAPIPTILKATL

SEQ ID NO: 94843 - protein, 367 aa, unidentified
MKKVSTTARKQSRNISGQRLTIGLDLGDRNSWYCVLDESGQIQLEQRVRTTAKALQEVFGAMPRSRIALEIGTHSPWISRLLGELGHEVIVANARKVRLIGESRKKDDRLDAQTLARLARIDPELLYPVKHRSAQAQADLMMIRARAGLVRARTGLVNTARGLAKSYGERLRGCNVRNMDPEKAEGLSPELQRALEPLLAAIEELSERIVEYNDRIEALAQANYPQVELLKQIKGVGTLIALTFLLTLEDPHRFRKSRDVGGYLGLQPGRRNSGESEKQLHISKEGDPYLRTLLVQGAQHILGPFGIDCDLRRWGLKLAERGGRNAKKRAIVATARKLAVLLHHLWVSGEVYEPLHNSNRLTVAVAA

SEQ ID NO: 94844 - protein, 344 aa, unidentified
MEHFAGLDVSVNETSVCIVDEMGRIIRETKVASEPDALLAALKSGVYHFKRIGLEAGPLSQWLYNALGEANLPVICVETRHMRAVLKAQINKTDRNDARGIAQMMRAGLYRPVHVTTLRSQKLRMLLTHRKLLQSKAIAIENDLRGTLRNFGLKVGVAGAGKFEARIRGLVETFPDLTVLVEPLLIVRRVLREQIAVLHRRVLAVVRDDEVCRRLMTIPGVGPVVALTYRATVDVPSRFRRSRAVGAVFGLTPARHQSGESDRPGGISRCGDEMMRVMLYEAAQIMLTRTNKWSWLKAWAMQIARRRGMKKAIVALARRLAVIMHRIWVDGTEFCWTRPESAAA

SEQ ID NO: 94845 - protein, 318 aa, unidentified
MNVIGLDVSKDTIDATLITTKGSKDYIKISNSTEGFENLINWIKTKRIRKIAISMEATGIYYEQAAEYLSALYIVYVINPLKIKEYAKSQFSHTKTDKADSKLIAEFANRHLDKLTPFRPSENPILYKLVNLLQQLKEQQKETQNRLHTAKDIYIKSTHEAIIELLEEKIDQTSKRIEGMIKQKESLNIEYQNLQTIPAIGKETAVILLRHLTDKNFETANKFVAFAGLSPKIEQSGTSVNKKGRLSRYGHRQLKRALFMPALVAYRMNAFPQLVRNLEAAKKPKMIIIVALMRKLAKIAFYIHKTKKPFDKARHQTV

SEQ ID NO: 94846 - protein, 355 aa, unidentified
MTSVKYIGLDVHKESISICVRNSVGKVVMESVIETKASTILQFIDGLRGDLRVTFEEGTWAAWLYDLLKPRVSGVEVCNPRKNALLKDGSKSDRIDANKLSEQLYMNNIKSVYHGEHGLRTLKELARSYLTISKDLTRVMNRLKALYRGWAIPCAGKEVYAPRHRAEWLGKISESGVRRRAEFYYQQLDALRLLRQEVRRDLLREVKKHQAWKLLRQIPGIGPIRAAVLMAVMQTPHRFRTKRQLWTYSGLGLETHDSGEYRAVKGQLQRAKKQATVRGLNRDHNHDLKDIFKGAAMRASTAAGPLHDFYENLLAKGRKPTMARLTLARKIAAITLIVWKKEVRFDANYLKQQAA

SEQ ID NO: 94847 - protein, 320 aa, unidentified
MSGIVTIGLDVAKSIFQFHGVDNTGRTILRRRLSRHELVPYFAKISPCLIGMEACSAAHHWARELSRFGHSVRLIPPQYAKPYVKRNKTDAADAEAICEAVARPNMRYVPIKTLDQQSVLSLHRVRALFVRQRTAAINTVRGLLTEFGIIAGKGIGRIGELRHRANEADGEVLPDEARAAITEVFEHIDALTERIDATEAKIVAWHKSSEASQRLASAPGVGPITASAIVASVGDARQFRSARHFAAWLGLTPRLHASGGKEHIGRISKGGDRYLRALLIHGARAIVGTSFRKDVPPRPWLKQRHRGTAPTSNTGAGLRG

SEQ ID NO: 94848 - protein, 349 aa, unidentified
MTHVGIDLHKLGSQICVIDEAGEVLAETRVMTRRDALEQALAPWPGSQVLVEACNESEWVARHLEGCGYAVVVADPNYTPMYGHRHTGYKTDRRDARALASASAQGLYRRAHRTSEARRVVRAELVTRDALVRTRSRYISVIRSRLRAEGWRLRSGDAASFVARVGELALEPQLLAHLQPLLQVMALVNQAIATADRALERRAQADPVVQRLRSLPQVGPITALAFVAALDDVRRFRNAHQVESYLGLVPRERSSGEHQVRGRITKTGDKRVRWLLVECAWGIQRSPRASVALLQQWTARVGTRRGRTVAAVALARRLAGILYAMWRDDVPYDPKKLHPPHGLAQGARA

SEQ ID NO: 94849 - protein, 343 aa, unidentified
MEAYAGKQFVGIDLHRRRTVIVRTTASGEVLEAVRIVNDVQRLASVMARAGQGPEVVLEATYGWYWAVDALQAGGANVHLAHPLGVKAFEYRRVKNDVRDAQDLADLLRMGRLPEAWIAPPPTRELRELVRHRAKLVGLRSHCKAEVHAVLAKCGVQVLMSDLFGLAGTELLDGLDLPAPYAARIASLRRLMDDLDFEINLFAGIIRGRLAKEPGYTAVQNIPGIGPTLGAVLVAEIGDVSRFASASKLTCWAGLTPKHHESDTHVRRGRITKQGSRLVRWAAIESVKTVSKGSEVGMLRERVADRRGRNIGSVAAARRQLELVFYALRDGHVRALEHLPRVA

SEQ ID NO: 94850 - protein, 304 aa, unidentified
MVVVGVDAHKRTHTLVAVDGNGRELGHVTVRATSAGHLEGVKWVAQFGGERMWAIEDCRNMSRRLESELLTAGETVIRVPTKMMAGTRKSARESGKSDPIDAASVARAALREPDLPRAHLDGPAREVKLLIDYRESLVRERTAAQNRLRWRLHELEPEFDPPSGSLSRYRTLDQTLAVLESHTGLIADLARREVARIRDITREANRLEHQIRDLVTQVAPSLLQLPGCGALSAAKLVGETAGIERFRSRDAFAMWTGVAPIPVWSGNPHKYRRNRGGNRQANAALYRIAITQLRIHPEAQAYIQ

SEQ ID NO: 94851 - protein, 330 aa, unidentified
MELATDELFTLLDDGKTLKKKLKRHELLAFFANYPASIIGIEACGSSHHWARELTKLGHEVILLNARFVKNYVVGNKTDFNDAEAIHEAVLRPNKRVVAIKTVAQQDIQLVHNIRKDLVDQRTALVNQTRGLLSERGIVINQGIEQLREQLPLIIEDAENSLTDLSRELFAEQYEKIKTLDAEIKAQDQRINRLCNANDLSKRFLDVPGVGPLTATIVAADIGDGGKGYKSSRDYAASLGVVPKQHSSADKQHYLGISKRGNRYIRTLLIHGARAVLKNCGKKTDKLSLWLQALVARRGFNKAAVALANKNARILWAMASNDKDYEALVA

SEQ ID NO: 94852 - protein, 370 aa, unidentified
MRVLHERVAGIDVHKDMIKVAVRSPGDKPWTRKTEILEFRTFYGVLQHMASELARRGVTHVVMEASGVYTEPVYYALCERDFDEVAVINPAHAKALKGHKTDARDCARLAELFECGLLRGSYLPAPELKEVRDLTRYRMKTVQARTSEIQRLAKALESAGIKLGSVASEITGKAATAMIEALIDGERRGAVLADLAIGRMRTAGKLADLSQALAGRFTEHHALLCRLHLDRIKVFDTAVTDLGGRIAGKAARWQREVDLLTTVPGFGHIVAWAWLGEIGPAPHQHFSSHDKLASWVTLCPGNNISAHKRKHGRTGDAGTYIKPMLIQAAWAAIRTRGRLQPGTTGWYAASAGRRTRQLRRRRSPRSPTPC

SEQ ID NO: 94853 - protein, 381 aa, unidentified
MPSMQLRRDDVIVGVDTHKDNHVAVAIDGFGGRLGDIVVPTTIAGFEELLAFCLAFVGSAGRLIGFGVEGTGSYGVGLARYLRNHGHDVHEIARPARAAERRLAGKNDTIDAEHAARQLLAGHGLSTPKTADGAVETIRLVKIAYDGAVQARTTAMITLKATLATGSEALRAELETLTDHKLILACAALEGPTPLPPVRRGAPAVVVPGDPDVAMRHVLSSMAKRWLALHEEAKAHAASMKALTAAAAPQLVEAVGVGYDTAAQMLITAGDNANRIKSEAAFAKMCGACPIPAGSGKTNSRHRLYRGGNRQANAALYRVVIVRMRWHQPTIDYVARRTAEGMSKREIIRCLKRYLARELFRLLPAPDAIAKPVNGELEIAA

SEQ ID NO: 94854 - protein, 407 aa, unidentified
MEQPTRFIGMDVHKDTIVVAVTAIGDAGKATPYGTFPNSAAALEKLVKRLRQADSGPLKFCYEAGPCGYGVHRTLTKLGEDCMVVAPSMIPRKSGDRQKNDKRDAASLAVLLRGGLLTAVWVPNAAHEAMRELIRARLAAVRAVRTARQQLSAFLLRHERIYPNGRKTWTKSHRRWLADQNFSQPAQQIVLEESIEAVRLGEQRRDRVDDYLRAQIPNWSLFPLVRNLCALRGLDMIAGAGLAAAIGDPSRFSAASNFMAYIGLVPSEHSSGTQQHMGAITRTGDVHARTLLIEAAHCYRFPARIARHKLAAVDAVSDAVRVIAWKAQTRLCRRYRQLMAKGKPRQVVVTAIARELAGFVWAIACITSNPPAKTVSVAPAPGEVDLANSDTIAISSRNDSERRHKMA

SEQ ID NO: 94855 - protein, 455 aa, unidentified
MANKAKKIKTKKGLKLEIVNPNAAGIDVSSTEMQVCVPADRDGENNRRFGTFTCDLHEISAWLKGCKIDTVAMESTGVYWVPLYMRLVADGFDVLLGSAQAIKNFAEKKSDEVDAEWIMVLHSYGLLKASFQPCNYTREIRNLVRHRDNHLRSAAKEVQHIQKYMELMNIKLTNVISDILGVSGQAIITAINKGERDPKVLAALADSRCKSPREVIEKSLDANWDDNLLFTLKQSFDLYHFLQKQIVATEKKVEKIIFKYKASLPKEAVHKTPCEPSNKADASKNRISIDIEQYAHEFWGVNIMRVPGISKGSTFRLLGELGHDFVDKFETYKHFCNWANVVPNNKTTGGKLISSKIPKRKNPVGQILRVAANSLKNEKSPMGNYFRKIRSRKGHNHAIVATANKIGKIIYLMVKNQTEYDESLIQEDRAKILRRKLRRTERELERIKNQLSECV

SEQ ID NO: 94856 - protein, 376 aa, unidentified
MNYSTVYVGMDVHKETFSLCCFTNEKEEAEYPQKVKGHYSKVLNYIEAMRFHYGDNALFICGYEAGCLGFTLYHQLTAHGVKCIILAPTTMLQPKGKKKIKTDKRDAKLIARCLAHHDYNPVHIPTEQNEQTKEYIRMRDDHKLALKKVKQQILSFCLRHNYRFDGTSRHWTQTHLKWLNSLQPEGLYREILREYLLTYVQLVEKLERLDRRIEELASEETYKEKVSKLSCFIGVKTITALAVLTEVGDFKRFASAQQFSSYLGLTPGEDSTSDNQNRLSITKAGNRHVRLLLVEAAQSFARGQVGYKSRLLKIRQEGNLPEVIAYADKANERLRRRYYRMVLRNNKKPNVAKIAIARELACFIWGMLTGRITALP

SEQ ID NO: 94857 - protein, 321 aa, unidentified
MAFAGVDLHKSYCQAIVCTNEGNVLKEGRIATEPEEIEEFFSGLERLEIALEASTNYEYYYDLLESLGHRVVVAHPLKTRMIADAKIKTDKIDARILAELLRGDLLPTSYVPPKEQRELRHLVRHRIALGRIRGGLKTRIKTELRRKNIKYREGANCFTEKGKAELRRLHNPVVDSYLAIYEVVEDELKKMDRAIAEAGARYEEVKVLTSITGIGVYSALVIYSEIGDGSRFPTEDQVFSYAGLVPRVHQSGNEQYHGRITKEGSKYLRWILVEAARIHVQWCPESKITRHYEKLKRKRGAKRRSRSSQLRGSSFRRSTIC

SEQ ID NO: 94858 - protein, 398 aa, unidentified
MGVAVGIDIAKEFHWVRAIETASSEVLLDRRVDNRPGDLAALIDELTRLGAEHGELRVGIDVVGGIAGLLTAMLGEARIAVVHVSGLAVNRARQGGVGGEHKSDPKDAGVIADQVRHRRDLRALDPSAEIDAEIRLLVARRRELVADQTRRMSRLRDLLASIFPGLERVIDPSTKASLQLLSRYVTPREIRRAGRRRVADHIARAGRLSRKHVEQLADAALAAAHAQTLAVPGEAVAAKIVRELVDELTAGKRRLAALDAELELALDRHPDAALIRSLPGMGATLTAEFIAEAGRIERFPTADQLAAAAGLAPVLKQSGKVRYLKRATTGNKALKRVYFQSAFCSLQHPASKAFYARKRAERKTHHQAVIALARRRVDVLHAMLRNRQPYEVRPAKAA

SEQ ID NO: 94859 - protein, 367 aa, unidentified
MSSVASQAGLIHLGMDTSKNAIVVATLLPGEQSPVTDRIANEEAAVRRLVGAFADRSVLRAWYEAGPGGYELCRLLASMGVACQVVAPSLIPKGGSDKVKTDKRDARRLARLGRAGELTPVRVPSPAEEAVRDLVRARDAMLADRKRAQQRLTAVLMRHGRIWRGATYWTAAHRSWIAAQRYGEPALAAAVGYYRATLAVREAELAGLEAELLPWAGREPLAGPVARLGCYRGIAELGALTLAAEVVDWRRFPAARAFMGWTGLVPAEYSSGERTRRGHITKAGSEPVRTALIEAAWAYRFAPAIGAGLRRRQHGAGPDTLARSWKAQRRLHDRYVHLTRAGGKAAPEAATAVARELAGFAWAEMTA

SEQ ID NO: 94860 - protein, 340 aa, unidentified
MKEIKRIGIDLAKSVFQAHGVDAHEHVALRKRLTRGRVLAFFAQLPPCQIGMEACGSAHYWARELRKLGHEVRLIAPQFVTPYRKNDKNDGNDAEAICEALGRPRMRFVPIKNAEQQAVLCVHRARSLLVGERTALVNQIRGLLAEYGMVVAQGVVRLRHALPGILEDGENGLPLLAREVFADLYARLQALEAGVAAYDRRIAQLARTMAPAKRLMQVEGVGPLTATALVATVGDARLFKNGRQLAAWLGLVPRQHSTGGKSRLGRITKRGDVYLRTLLVHGARSVLRHLAAKGDAKSRWGTALAARRGFNKAAVALAAKHARILWALLAHDTDYQRATT

SEQ ID NO: 94861 - protein, 348 aa, unidentified
MDTIGVDLHKRETQLCIGQADGTITEQRIVTSRERFTAVLGQRPPARILVEASTESEWVACQLESLGHEVIVADPNYAPMYATRSRRVKTDKRDARTLMEACRAGTYRPAHRLSAARRHVRAQLAVRDAVVRTRTRYVALAKALVRRDGLRVPSSAAERVGAHLEALAGSPTLAAELAPLLTLLPPLNATIAAADQRLAELEHTDPSVALLMTAPGIGAVTASALVATIDDVQRFASAHQFEAYLGLVPGERSSGELRRIGPITKAGNRRARWLLVEAAWRILRSKDAAGAPLRGWARPIVARRGSRIAVVAVARRLAGILYAMWRDGAPYDAGKIRRPRSARQSPAA

SEQ ID NO: 94862 - protein, 412 aa, unidentified
MNIRVEKACGIDIHQAFLVATMLDLAGTKDTRRFSTCIEDLLNLREWLLDSKCQRVAIESTGVYWIPTYTLLEGKVETIVANPLQIKNIPGRKNDDIDSEWIAEVCLNGQIKPSYIPPKEIREIRELTRSHVKLTQAKTSFKNRVHKVLSRAGIHVSGVLSDIFGKSGIIILNGILNGKTIDQTLAEIKDKRIKIKKMEIKDSLKGELSQNDIFVIKECIDSIKFLDQKIKEFDSKINQNLNGLQKEMEIVMSIPGVGFTTAAAVMAEIGNIEEFSKPKQLVGWSGLTPAINESAGKSSNGHITKRGNKFLRTILVLAANSIAIGRPNKLRFFYERIKAKKGHKKAIVALARKLVSIIHHLLMFKEMYSEEEMKQKNFKLPKFIPVPDFSIDDMIGILCEAGYSVNKTAVKT

SEQ ID NO: 94863 - protein, 350 aa, unidentified
MAMTIVEPVSARAVTGGVDTHLDVHVAAALDDIGGLLGVESFEASPAGNDKLLAWLRTFGDVVQVGVEGTGSYGASLARSLRAAGVTVVEVDRPNRQARRRTGKSDPADAVEAARAALSGRAQGAGKTRDGNVEAIRALVVVKRSARSTRIKSLNQIRHLGFTAPDELRDRMRGVSRDHLAGVAAGLRSRAGGDPVTTATKTAMRVLGRRVLALDEELATVDALLAPLVAATAPSLLEVHGVGVDTAATLLVAAGDNPGRLRSEAAWAHLCGVAPIQASSGKVTRWRLNRGGDRQANGALWVVVITRMGSDPRTRAYVERRLKEGRSKTEIIRILKRYVAREVFHHLPRA

SEQ ID NO: 94864 - protein, 392 aa, unidentified
MQPVVGVDVAKGSSVAQAFRKRNEPFGKAVDIMHEKSGFEQFSGMLDMLQIETGLAPVVVLEATGHYHRALVSYLDRSGYTYYIVNPLQSKRAKGTQLRKVKTDALDAWHLAEMYYRGDVKPHRTWDETFTELQHLTRQHEFVTGIFVQAKLNSRALLEQVFPEYEGLFSNVFSATSLTVLACCLEEGTADWIEVIQGSTGKSRSKQWVIEKVRKLEEVLGDWGETRRSPSQRQALLGMVKLLLTLIRQLDELEKQMENIATNLPEVELVKSIPGIGMKLAAAIVAEIGDVRQFRDAKQLVAFAGLDPGIFSSGKFTATSTRITKRGSKRLRRSLYLAVQCGMRKNVNAKIGSYYEKKRKEGKPYKVVVIACANKLLHHIFAILQKSQPYQA

SEQ ID NO: 94865 - protein, 407 aa, unidentified
MEVLYPRCAGLDVHAGSITACMRVATGATVTYEQRKTPTTTRGLLQLAEWLTEHGCTHVAMESTGVYWKPVWHVLEEHFTLILANAMHIRNVPGRKSDMNDARWIADLLAHGLIRSSFVPPAPIQELRDLTRTRRQLVHEAARHVLRIQKTLEDANLKLTQVMSDITGVSGRAILNALIAGETDPDTLADLTRGRLKATRAELVDALHGRVTDHHRFMIKLHLSQLDALDAAIASLEARIGAALGPFRPAVSLLTTMPGLRETTAHVLVAEIGIDMTRFPTVGHLISWAGLCPRLDESAGNRRSTRTRQSAPWLKPTLVNAAWAASRKKDSYLRAQFLRIKSRRGAKKAILAVASSMLTAAYFMLRNGVEYQDLGPRYFADRDKTRLTKRLLQRLQDLGVTVEVKAA

SEQ ID NO: 94866 - protein, 355 aa, unidentified
MNSEKYIGLDVHQATISVAVMDSMGKLIMESILETKAATILEFVAGLRGTLSVTFEEGTWAAWLYDLLKPHVDELVVCNPRKNALLKDGNKSDRIDARKLADRLRLNDLKPVYHGETGVRMLRELARSYLNLVKDQTRVMNRLKAMYRSWAIPCAGRDVYYARHRAEWLGKIREAGVRRRAEHLYQQLDMLQHLCQQARRELLAESRQHPITAKLRQIPSLGPIRSALAVALIRTPHRFRTRRQLWAYSGLALETRTSGEYRCVEGQIRRSKKQISIRGLNKDHNHDLKGLFKGAATRASVQPGPFQDFYQRSLAKGIKPTMVRLTLARKIAAITLTLWKKGENFDVEKLKSQAA

SEQ ID NO: 94867 - protein, 413 aa, unidentified
MPRKRRVRADTPVRQRIALARTLGIDVDRDMLVVARWLSDHPEIKVDEFPNNPTGHKALVEQAAAFKPELIVLESTGPYSLAAYDALAAAGLPITMINPLTVKALLRVEGKSDRRDAATLARLAAGFDLRKSNIPDARQRGALWALRLLFRQYDDATQELIRTNARLGAVLVQCGCSLMAVVSGATRLKMLSAIAKGQLPAEIAALHPHRNRRPIVQAALPEAFPAGVPEYVAMAVASLEVLERRREDALTRLDQYRQANHAWLDDATRWLRTVPFTTDLLALRCVAEMGPDLTRRYPTAERFCSALGVAPQSEVSGGKLLKVADSHGNRRMLTALVNSVKAAVLHKGDPLRDYCRSLRGRMGHSKALLATAHVVAEAWYNCTKLQVAWDPVAALRHRSDMPVYVSPEGEVKV

SEQ ID NO: 94868 - protein, 456 aa, unidentified
MPKRTTGARPELKLINFGAAAIDIGSRMHMAAVNPASTDAPVRSFGTFTHDLHDLADWFKACGVTSVAMESTGIYWIPVYEILEQRGFDVILVNARYAKNVPGRKTDVSDAAWLRELHSYGLLRGSFRPDAEIATLRAYLRQRERLVEYAAAHIQHMQKALMEMNLQLHHVVTDITGATGMRIIRAIVAGERNPDVLATYRDVRCHSSIDTIRAALVGNDRNEHVFALTQSLELYDVYQAKMLDCDRKLEVLIAALNNNKGAKPVGKLSKPRIKTKQVNTPTFDVRSALYGLLGVDLTEIHGLGPSLALKLVGECGTDLKAWPSAKHFTSWLCLAPGNKISGGKVLSSRTRRSSSRAAALLRLAATTVGRSDTALGAFYRRLSSRAGKSKAVTATARKIAVLFYNTLRHGMSYRDPGADHYEQQYRKRVLANLQRRAKSLGFVLQAIPENANPAVS

SEQ ID NO: 94869 - protein, 410 aa, unidentified
MFKVAIRSPGDKPWTRKTEILEYRTFYGVLQHMAAELRERGVTHVVMEASGVYTEPVYYALMEQDFEQVAVINPAHAKALKGHKTDAKDALRLAELFECGLLRGSYIPPQDLKDLRDLTRYRVKTVQARTSEIQRLAKALESAGIKLDSVVSDLTGKSAGLMIEALIDGERRGQVLADLAIGRMRTAGKLADLSQALVGRFTDHHAALCRLHLDRIALFGTAVAGLEQKIAVKVTPYQRELDLLKSVTGFGDAVACVWLAEIGPAPHEYFGSHEKLASWVTLCPGNHMSAGKRRHGRTGDAGAYIKPMLVQAAWSAIKTQGRLQARYHKLVRRFGGPKNPAAVKKAILAVAHTLLKIAYQVLQSGKPYEDLGADFYAKRESPEQRRAYLLRQLEKLSPGCTITITPAEAA

SEQ ID NO: 94870 - protein, 374 aa, unidentified
MEHHSEVFVALDTAKLRNAVAIAGAGRNGEVRYLGEIDNSEAETRKLVTKLARKYARLTFCYEAGPTGYGLYRLIKSIGHDCIVVAPSLIPSKPGDRVKTNRRDAVNLVKLLRAGELTAVWVPDERHEAMRDLVRARDAAVKDYRIKRQNVSSLLLRLGPHYPGKKTWGRAHINWLTSLRLEHREQRIAYEEMLLAVRQVRERIDRLEQAMREAVADWTLSPVIEAVQAMRGIDMVGAIAFLAELGDLSRFESPRQLMAYLGLTPSERSTGESVNRGGITKAGNTRARRLLIEAAWSYRFPPRVSKDMQTRVGAAPRIAREIAWKAQMRLCGRFRTLTRKGKRPTIVVTAIARELSAFIWAINREVAGSHATAN

SEQ ID NO: 94871 - protein, 337 aa, unidentified
MSNLGVDLHTNSFTVCYLTGDGKQRHATFDIGRIDSFRKTLRKQDRIAVEATGNTAWFVGQVQERVKKVVVVDPHQFEVIRKSVKKTDKHDAGTLAYFLSKDMLPEARMKSKENAQLHSLAGTRDKLVKQRTALINKIHNVLNGHGIKFSKETLSTEKALKSIWSYNWDAIVKVELEVLIEQIRSLTASIKKLDEQMSEHGKKLSGHENLTSIKGIGDRSATVLLSVIGDVKDFADENKLAAYFGIVPKVSNSNETVHHGRITKNGSKIGRTTLVQCTLVAKRYSPYLNRYYERIKRHRGSGKAIIATARKFLGIIYQTLKNGWIFEDFPNFVIANT

SEQ ID NO: 94872 - protein, 369 aa, unidentified
MSRSSWLVAGLVPGVERRPLKKLNADEGELLALLKRWTQEAIMAGRTVARVVLAYEAGRDGFWLARWLRARGIEAHVIHASSVAVSRDRRRAKTDRLDTALLMRALLGWLRGESGHCTMAVVPGIEDEDAKRPTRERENLVGERTRLINRMKAALARLGVRDFNPALSKAAEHLEALRTPEGGDIPANALAEMRRDMARLQFIKNQITEIERERLCRLEEAHPQRSRADGMVRTLSRVVGLGVETADMLVHEILARDLRDRRAVARYAGLTGSPDESGSRRRERGLSRAGNARVRRGMVQLAWRFLVFQKDSALVRWYRERTSDGRGRTRMAMIVALARKLLIALWRLVRTGEVPDGVRLRTAAPVGAQ

SEQ ID NO: 94873 - protein, 350 aa, unidentified
MLIIGCDFHTRYQQIAMMDDATGELLERRLEHENGEAEAFYRGLPKPVRVGIEATGPIHWFERLLTELGHELWIGDAAKIRASEVRKQKTDERDAALILDLLLANRFPKIWVPTPAERDLRQLLWHRHKLVCLRTLLGNQLHALALSQGLCRKKKLFTKKGRAELQSLGLAPWASRRREELLKLLGQVDAPIAELDKAVLEEAQRRQEAVLLMTHPGIGPVTSLAFVLAIGPVTRFPRSKKIASYLGLNPSEESSGGRRRLGAISKQGNTMVRWLLIEAVYPAMRQDLALRQDYQRLKFRRGHAVAKVAIARKLAVRMYWMLRSGAEYAQLVRRQGSPGATLVDASSSLG

SEQ ID NO: 94874 - protein, 335 aa, unidentified
MKHYAGLDLSMETTHVCVVDADGRKVGAQCVDSTRRTIATALERYGPIERAVIESGRMTPSIALGLRELGVAIICIDARQAHQSLKAMKANKTDPHDAAGLAQLARTGFYKEVHVKSPAAHGVRSIITARGHLVEARVRLDNTIRGLCATFGIRLGLGQGERFLARMQVAAAIPGLGEAVASLLRAREGIVAEIGQLDRQLKAISTASPVCQALMSIPGVGVQTSAAFAAAVDDASRFKRSRTAGAYFGLVPRRHQSGEVDWTGRITKQGDSTVRKLLYEAANSILTRTKQSFALKTWALKIAKRRGLKKARVALARRLAVIMHAMLRDGTLFEA

SEQ ID NO: 94875 - protein, 402 aa, unidentified
MTKRFWAGLDVGVETSAVCVIDDAGEIIHEGSCPTAVQSVHRELVCLRRRRFARVGLEGGTGTTLARGLRNLGYEVDLYEARQLSKFLRLRRNKTDAGDAIGIAEAGRLGAATISRVHLKSLECQCLQSRLTIRRHLIHQRVAAVNILGRQLELFGGRLPRKNLGSLRHNVEGEIRKIFGRAPNDLTGALRHLLQHCEQLIAYQRTVDDELRRCAFQNEVCRRFMEIPGVGPLCALTFYAVVSDPNRFSRSADVGSYLGLTPRVDQSGLMLKRGRISKMGNTAARTLLVRSSGMFMRSADADTNLRVWAHAVEQRRGLKKARVALARKLSIMMLSMWKSGQSYVPRLSTASATQFMVSEPAGRISTAVLSHKDDTSCESGPSNLPAHNKNMRVSGSRRPQSC

SEQ ID NO: 94876 - protein, 339 aa, unidentified
MKVSTPGIDLAKNVFQLHGVGCNGQTVLKKKLTRDKFLPFLMQLEPCLIGMEACASSHHFARVLRQYGHEVKLIPPQYVKPYVKTNKTDAADAEAICEAVARPNMRFVQIKTAEQQAILVLHTERNILIRERTACANSMRAILAEFGIIMPRTLSQLYKKVPEILEEYDNELSPFVRCSVARQLEHLQGVEDQITLIEQELSSWAKTQPACQRVMKVPGVGLMTATYLVASVGNGQQFHSAKQFAAWLGLVPREFSSGGKQRLGRISKRGDRYFRYLLVHGARAVAAVIERHKDNMPWLYRLLSKKAYNVAVVAQANKTARILWSMLVHHTEYRTLSVV

SEQ ID NO: 94877 - protein, 325 aa, unidentified
MRQPQSAAKSQTQIGLDVSSQTLDAHIRVDGKAFSVPNTDAGFDQLCEMLSAYSVSMILMEATGGYEDNVACYLQLQGFDVVVINPRFARRFAQSMGRLAKTDRIDAAILAQMAFMIDSGPDRERYIKPVTDEQRKQLSRMSSRRRQVVDLITIEKQRLTHADDYARESINEIISLLNVQLKRIESDILRYVKKNFSELANRLLSIPGVGSQAVTVLIADLAELGHVNRRRISALLGVAPFNHDSGKFKGQRRIRDGRQTVRNVLYMGVISATRFNPVIKAFYDSLLLRGKPRKVAIIACMHKLIRIINAMMRTGKPFDMSLHGV

SEQ ID NO: 94878 - protein, 387 aa, unidentified
MSEAFDPRKSATAFDQASTLVAVLELSGKSWQAGAIVPGVSRRPSRQLEAGDIDGALRAIEQWKNEATKAGHDVRRVVVGYEAGLDGFWIARALRERGIEVYVMHPASLPVERRGRRAKTDRIDVDILLRALLGWLRGEPRHCTMAPIPSEAEEDMREPGRQRETLTAARLKVENQMRSLLARFGVAHFRPRLKKAAEHLDKLRAFDGRPLPANTKASLERLLAQHRLLSEQLREIEAARERVVAVADPDRFERMIQALARLVGVGVETATTLVHEVFSRRFRDRRALAAFVGMTGTPYDSGGSRREQGLSKNGNPRVRRILTQLMWRWLMFQPQSALAQWFHGRTQGAKGRTKKIMAIALARKLLVALWRYVETGVVPEGVRLAAA

SEQ ID NO: 94879 - protein, 447 aa, unidentified
MAPPNKKKKKYNQGLPVINEHAAGIDVGDTFHAAAFSNGEGSLEVSECLSFTTDLNGLVKSLKEKGITTAAMESTGVYWLNLYLLLEEAGIEPYLVNAKHVKNVTGRKKDDTDAIWLQKLHSCGLLQKSFQPDTEIRTLRTYVRQRKNLIGLSSDSVRRMQKALELMNLKIHVVISDILGKTGLAIVADILGGQRDVNELIKHKDRRIKASDEEIKKSLEGIWKDEYLFTLQQAYDGYLFYQSQIKSCDEKIKECLLQGAVKVLEGDISSLDISIKKKPKKNQFSFNAEILLSTMVGVNVCEVNGLSEVSVVELISEIGTDMTKWKSHKHFAAWLNVAPNTKITGGKVISSKMQKKKNSAGQTLRMSASSLSSSKSPLGNYYRKMKARLGKKGGVVATAHKIARIVYVMLSTKQPYNESIIENEQEKWKKQRIKYLENQLSQLKKAS

SEQ ID NO: 94880 - protein, 326 aa, unidentified
MVVLLNEQDQVVYQKRLPNDLPTILEVLAPHHAEIKGLVVESTYNWYWLVDGFMEAGYRVHLANPAAMQQYSGLKYSDDHSDARWLAHMLRLGVLPEGYIYPKAARAVRDLLRKRAHWVRQHTANVLSVQNIMVRNTGARLSVKRIRELPKKELEGLLPEADQVLAITSSLAILDCLSQQIKALEKIVHQRLHHTPSYEQLLTVNGIGTILAQTITLETGDINRFPTVGNYASYCRCVDSNKISNGKRKGQGNVKNGNPYLGWAYMEAAQFALRFNPSAQRFYQRKLAKSNNNTILARKTVAHKLARACYYIMRDLVPFDAMKAFG

SEQ ID NO: 94881 - protein, 429 aa, unidentified
MQNESTPGARGPVFCGVDTHADSHWLCVLDWRGRKVLSRQFPADAAGYEALAGAIAAAGEPACVAMEGTSSYGAGLTRHLASLGMPVREALSPARAQRRRPGQGKCDEADAERAARAAMSGSKLGTPKSQDGWVDGVRCMLAARSGAVKARTSAINTARSLLTTAPEGLRSRFRGMAGPRLMEELPSVRAEGALGAALGALADLWAAARDAALDMERAIEASLEENCPALLAMYGCGPVSAAKLAVAAGDNPGRLRSEASFAAICGACPIPASSGKTVRHRLNRGGDRQANSALHEIARQRVMRDPETAECAERARGRGKSDREVMRCLKRYVAREAYRALMRPHEIRRPEDASELVAARRAARVSQVRAASILGTSEKYISMLERGQRELKPIRRAYEAWVEAGLPLDWDRQAFEAERKMDSKKHLAK

SEQ ID NO: 94882 - protein, 343 aa, unidentified
MNEVITIGVDLAKSVFQVHGVDAAGETVICRQLRRRQVLPFFRKLTPCLVGIEACATAHHWAREIGALGHEVRLMPPHYVKPYVKRNKNDAADAQAICEAVTRPTMRFVAVKTAEQQSVLMLHRTRELMVRQRTMLVNAIRAHMAEFGIVARVGLPQVKALLAVIADEKDCRIPPLARTCLEGLAAQLLSLHREITAAEQRIHAWHRANEASRRLESIPGIGPITATALAATIADPSIFKSGRELAAWIGLVPRQNSTGGRKRLGRISKQGDHYLRWLLVAGSMTVIRHAKRRGTANPWLAKLIAGKPTKVAAVALANKLARIAWVLLRDGGTYQMPATAAAA

SEQ ID NO: 94883 - protein, 355 aa, unidentified
MTITKYIGMDVHKESISIAVMNATGKFVMECVIKTKASMLLQFIDGLRGDVRVTFEEGTWAAWLYDLLKPHVSEVVVCNPRKNALLKDGSKSDRIDARKLAELLRGNHLKPVYHGEQGLRTLKELARSYLIISKDVTRVMNRLKALYRSWGIACAGTQVYAPRHRSEWLGRISEAGVRRRAEHCYQQLDALRLLHQQVRRDLLLESKKHQAWRLLGLIPGIGPIRAALLIALIQTPHRFRTKRQLWTYSGLGLETHDSAQYRVVEGQLQRSKKPVTLRGLNQDHNHDLKDIFKGAATRVSSSSGPLYDFYEHLLAQGRKPTMAHLTLARKIAAITLIVWKKEVHFDASYLKSQAA

SEQ ID NO: 94884 - protein, 385 aa, unidentified
MGNQRFIPRDYDVFAGLDVDKKSISATFIDHQGFLKSLNMPYKVEHLLNYVRKHYPDKKVAFAYEAGPTGYGLYDGLEAQAYPCLIASPSMIPKAPGQRVKTNRLDSRGISENLRGGQLKSIHVPTPLYRELRHLTQLRDTLVSEMVRMKQRIKSLLLMEGLEFPPAPAGSQWSFLVKKKLRELPCSSTVRFKLDRLLDSLEFDEKQVLKATREIRRFCQANPELFGCIEYLKTLPGIGWIVASQLVPRVGDWRQIKNIRQLPAFLGLVPTENSTGERTERGSITHTGDGRLRSKLIQASWSAIRQDGELREFFRTVAKKHPRHLGSRIAIVAVAHKLSVRAAVVLMKQRPYEVRQKVQSAPLTQEETVPQGTTRRLKEPGEIIS

SEQ ID NO: 94885 - protein, 406 aa, unidentified
MRGPVITVDVSKGSCHYQPFLENGKPMRKARVLHDTIEGFSNLKETIEKVKEKGAVETVPVVFEATGVYHRCLQKYLDDNSIPYFIISPLLSSAYRKTNLHGNKTDPLDCAHIAKAYYCEENLLPFYKQEDRFIKLQRLNRYYETELIHLRKRKVSFRSFLDIIYPRLDKCFGSNGSLYDPIPMEVLKKYPHPDLLLKHKESTINKVIEKKVNHDQKFVEKIVHKMYECAQQCYPGADVTDVEVMKLPGMITELQSQIDLCNSILEELVDEARMIPYFECVRSIVGIGDNLAARIIAELGDMSRFANRRALAAFAGLNPKIHQSGDVDGTHLKISKKGNRHLRCLLYLGASCNYRLKKHDPLYEFNQKKRQQANSPLKSKAANTATAHKLLLVIYALSRSGEMYRF

SEQ ID NO: 94886 - protein, 521 aa, unidentified
MATRTASRRHRRSHEIQKPTGTLHPRVQAVGPERFGIVSIDCAKARSKFLLADFYGTVLLPPTVINHDRGGFEAAIHAVHAAAQRLRLGVVIVVVERTGRFHLPVQAAFQAAGFEVRIVHPFATKQFRQPADPGNKTDDTDLSAIHRAAVNGFGLLEHEPDPLYADLQLLARHRRDLVTKNVTLRNQIHDHFQLIMPGFSAVIDPFDSPLPLWIVKNLQSADAILEVGVLGLLRRLREAGFHPHLKTVEKIVAWSKAAPAQHSQSPSHLRLLMSLDGDRMTKLEAIRTVEGDLAGFLARTPYVLLLGIPGINVATAAEFAGEMGPIGRYPKARSITGRAGLFPSRYQSDTVDRSNGALVRRGNHSLREVILRIADNLITCNDYFRIQAAKWRLSGKDPRDIHVKVGGRFCRIAYQMVAGQSVYRHPSCQHRHYVLEKLIKFLNEHNVDCARTMLILDSAVCQLPRSEHRSEAVPLTEELSRPRSKRGTGPQLLGEILPAVLAKLGVNLLPSSVSGEPDPTE

SEQ ID NO: 94887 - protein, 348 aa, unidentified
MTVYIGVDFHARQQTISYLTTETGEIQHLVLLHQDLATVRAFYAQFVGQHVVVGFESSGYAAWFEELLEELGHEIWIGHALYIRQFAKRRQKNDRRDADLILDLLVKSDFPRIHRFSRRTRAILQQLRYRQRLVKMRTMAMNMLLFMASSRGVSLRTQLTSKRGQARLAELALPHPLGSQRDELLKLLQDLDEKIKTLEQWLQRETKTDAAVQRLQTHPGIGLLTSICVRYTLEQVDRFTTTRKVTAFAGFDPMQDQSDERQRMGAISKQGSRWLRFYLVEAGQIAIRKDADLARVYKRLSLRGGHAKAKVAIGRRLLVRAFIMLRDEVDYDEFLRRGVAARSSRGTA

SEQ ID NO: 94888 - protein, 461 aa, unidentified
MMIPDTTVSIILSKGAKMKNYYLGCDVSKGYADFVILDSNKKIVENNFQLDDTFKGHNKLYLILTDFYKQNPNSSILSAVESTGGYENNWFNTFSRLGEILNLSVVRLNPIGVNHSQKANMNRAITDEISAYNIAEYLINHQSKINPNTKSYYSSLRKQWIFVKLLVKQRVQLLNQLESIVYTANTEVLSYCKYSTPNWILQVLKQYPTAKRLSRANVSSLVKIPFVSREKAETLIAKAKLSISSSNDKTTETIIKATVTQILQLAKTIAHHEKLMSDSCILPEVKLLESFTGIGTYSAVGLLLEIGAVERFPSSKKLASFFGLHPTLKSSGDGRAAARMSKKGRREPRLILFNIARTSITYNPLIKEIYEKHVNRGMPKMAALGVVMHKILRIVFGMLKNNNTFDPAIDKMNQEKCKTKKEVAKISKARRYQSYDVQAPVSRRQGSKRKEEKKSQVLETA

SEQ ID NO: 94889 - protein, 341 aa, unidentified
MGIVTVGIDLAKNVFALHGVDQSGKAVFIKPKVVRGQLLEMVAQLPPCLIGMEACSGAHHWAREFSRFGHTVKLMAPKFVAPYRMSGKRGKNDAADAAAICEAVTRPNMRFVPVKDVDQQAILCLHRTRQGFIEERTALYNGLRGLISEFGIVLPQKVERLRREIGAHLEELPGWANRCVGDLLVHADRLNERIEEYDKAIAQAAKQDQRSRRLMQLPGIGPTTASALVASLGGGHDFKNGRQLAAWAGLVPGQYSSGGKARLGRITKAGDAYLRSLLVMGARAVLAGLGNKQDRFSRWARNLLERRGYWKAAVAIAAKNLRLAWAVLHYGDDFRLIEETA

SEQ ID NO: 94890 - protein, 434 aa, unidentified
MKLPKHLQHINQYAAGIDIGSRSHFAAVPEGADEQTVREFSTFTGDLERLAEWLISCGVTTVAMESTGIYWIPVFEILENHGLEVKLVNARHVKNVPGRKSDVLDCQWLQQLHTYGLLRGAFRPVEQVCTLRAYVRQRATLVRSAASYIQRMQKALAQMNLQLHNVVSDITGVTGMRIIKAILGGERNPNILAAMRDQRCKNSVATIARSLKGSYRPEHLFSLRQAVEFYEFYQSKIADCDCQILEQLKSFDVLDSPNDEPPISVGEALQRMSGVDLTSIDGIDTNTALKILAEIGTDMSRWKTAKHFASWLGLSPGSKISGGKVLSSATKPVANKAAAALRMAAFTLFNSKSALGAYLRRQRSRLGAPKAITATAHKLARLIYAMLTHGTAYVDVGQEYYEERYRSRVVQNLKRKAQELGFELVTIQGVTAVA

SEQ ID NO: 94891 - protein, 429 aa, unidentified
MRTESTPGARGPVFCGVDTHADSHWLCVLDWRGRRVLSRRFPADAAGYEALAGAIAAAGEPACVAMEGTSSYGAGLTRHLASLGMPVREALSPAGTQRRRPGQGKCDEADAERAARAAMSGSRLGTPKSQDGWVDGVRCMLAARSGAVKARTSAINTARSLLTTAPEGLRSRFRGMGGPRLMEELPSVRAEGALGAALGALADLWAAARDAALDMELAIEASPEENCPALLAMYGCGPVSAAKLAVAAGDNPGRLRPEASFAAICGACPIPASSGKTVRHRLNRGGDRQANSALHEIARQRVIRDPETAEYAERARARGKSDREVMRRLKRYVAREAYRAPMRPHEIRRPADASELVAARRAARVSQVRAASILGTSEKYISMLERGQRELKPIRRAYEAWVEAGLPLNWDRQAFEAERKMDSKKHLAK

SEQ ID NO: 94892 - protein, 474 aa, unidentified
MVVQRTPKETVRAIPKMGQNKKSKKTVRPIAKMEPLKQINLNAAGIDIGSAEIWVCVPEGRDEKSVRMFQTFTRDLHDLANWLKACQVTTVAMESTGIYWIPIYEILVAAGFAVKLVNARRVKNVPGRRSDVSDCQWLQQLHTYGLLAGSFMPNEAFTALRAFVRHRDNLINCRSMHIQHMQKALHLMNLQLDNVISDITGATGMRIIRAIVDGHRSPEVLAGHRDPHCKSDRLTIAKSLEGNYKHEYIFELQQALSLYDFYTKLIKACDQECEKEYAKFATKANPVEKPLPPRHRPRHRPEKNEPEFDLRTDLYRLCGVDLTAIHGCNALTIQAVISEIGVDMSKWPTIKHFTSWLCLCPDKEVSGGKVLRSKTRKTKNRANKALRMAAQSLHASDSALGAFYRRLRARLGAPKAITAAAHKLSRIIYHMLKDKKEYVDLGADYYEFKYREREIRKLKQKATRLGLQVVPIAA

SEQ ID NO: 94893 - protein, 423 aa, unidentified
MEVMHCRVAGLDVHKETVVACVRVMAGRRPTRECRTFTTPTQGLLELLGWLTASRVTHVAMEATGVYWTPVWKILSEGDFTLIVANAAHIKQVPGRKTDMNDAMWIADLLACGLLKASFVPPEEIQELRSLMRTRKQLVREQTRHVQRIEKTLEEANIKLGTVLSDLMGASGRRMIEAMIAGERDPHRLAALAERSVKASPKALHDALHGRLREQHRFLLQLHLRQWDALDAAIRQIDEQVAGHIARVDQEAADGQPPFGELIARLCAIPGVSFLSATAILAEIGRDMSRFATAGHLIAWAGLCPGQNESAGKRKSSRLRKGAPWLKTMLVQCAWAAKRAKHSYYSAQFHRLCGRRGPQKAICAVAASILTAIYHMVRSGASHRDLGADYFDRRTPQARAKRLVAQLAKLGFAAQLQPLAVAA

SEQ ID NO: 94894 - protein, 348 aa, unidentified
MIVVFGVDAHKRTHTVVAADPSGAQLGCLTVAATSEGHLRLLRWGEQFGQRRWAIEDCRHLSRRLEADLLRAGEQVVRVPPKMMAATRRGARTRGKSDPIDARAVARAALAEPGLPAAYLDGPARQLRLLIDYRETLITERTAIQSRLRWELHELESGWDPPARTLDTTRTLDGIETRLTGQHGTVAHLAHRHLTRIRDITREAADLEKQISRLVTDLAPTLLAIPGCGPLTAAKLLGETADISRFHSRDAYALWAGAAPIPVWSGNTARFRLNRGGNRQANTALHRIAITQIRYHPPAQAYLQRRLTAGNTKAEAIRALKRQLANTTYRALQADSAQHNTHPQALAA

SEQ ID NO: 94895 - protein, 314 aa, unidentified
MKAIRSHVAGVDVHKEILAITVLVGDAESEPVAHQFECSTFTDDLMKCGLKLKEYGVKEVVMESTGVYWKPLYNVWEPMGFTITVAQAAHVKNVPGRKTDMNDSHWLAQLHRFGLIRPSFIPEGIFQRMRLLSRHRTNLTGDLATVKNRVQKVLEDGNIKWGSIVSDVFGKSGLEILDLIADGTTNAKVLASKVTTKIKRKEEAEKALTNTLTTEHIFVIKQLMDQFHYLEQKIRDVESELAEKAKPYAHLIEKLDEIPGIDKVLAMGILAEATNQMDKFKDERSFAAWAGVASGNNESAGKKKDQNADKAIRI

SEQ ID NO: 94896 - protein, 385 aa, unidentified
MNATVNPAPIQTDLGAIFVSLELSRSTWLVTSLSPASGEKMSKFSVIAGDAADLLSRMSVLRDRALHRTGRAYPIITIQEAGLDGFWLHRLLTREGIESNVVDPASITVSRRRRQAKTDRLDGETLLRALMAHKRGEPRVCAMVHVPSPEEEDQRRVSRERKTLTGERVTHVNRIKGLLYSQGISGYEPLHRDRRKRLDELKTGDGRDIPVHLKRQVSRELDRLELLLEQIKSVEAERNALLGSQVKKANQPQVEMLLGIKGIGAEVATILWTEALYRHFDNRRQIASYAGLAPTPWQSGSIDREEGVSKAGNPRLRVTLVQTAWLWLRHQPNSALSKWFRERTQANHGRRKKSTIVALARKLLVALWKYVTSGVLMEGVITNKV

SEQ ID NO: 94897 - protein, 411 aa, unidentified
METMIARCCGLDVHKAQLTACVRLLIEGVVTEIVETFGTTTPDLLALRDWLKAHAVTDVAMESTGVYWKPVYYMLEDEFEVRLVNAAHIKHVPGRKTDTIDAAWIAQLLSCGLLRGSFVPPTPIRRLRDLTRFRKALIEERSRAVNRLHKLLEDAGVKLACVATDVMGVSGRAMMRALIDGNADPEALSELAKGKLRAKLPELRKALTHRFTDHHAFLLERMLAHIEELESDIDAISRRIDEEIRPFEAAVELLRSIPGVERRAAEAILAEIGTDMSVFPTAAHLASWAGLCPGQNESAGKRKSAKTRKGSKWLRKTLTESARAAARTKESYLSERYRRLAARRGDKKAIIAISHEILTAAWHMLSTGELYREQGADTLRQRDQDRIRRRAISQLEKLGHKVTLEELPQAA

SEQ ID NO: 94898 - protein, 318 aa, unidentified
MDAVLGIDVGKADFHCALLIEGQARSNSFPNSETGFERLAAWLRNRKIARVHACLEATGGWSEELGAFLYERGHAVSIVNPSTIKAFGQSELSRTKTDKADAALIARYCRAMNPRLWEPPSPAQRRLQRLGRRRTALLEMRVQESNRLQAPGVDEVRSSIETTVAFLDRQIAEIEADISKTIDQDPTLRGKRELLESIPSIGVRVATTLLGELPQLTEFRSGKALAAFVGLCPRQFRSGTSAASSWLSKVGNVHVRRVLYWPAITAMRCNPVLIAFAARLRANGKRPKQIIAAAMRRLLVLAYGVLKSGKPFNAAMHA

SEQ ID NO: 94899 - protein, 346 aa, unidentified
MDSTTIASIGIDLGKTTFHLVALDCHAKVIIRKKFSRTQLLAYTANLPWSLIGMEACSGSHFLAAKLRAQGHEVKLIPAQFVKPYRKSNKNDFIDAEAIAEAVTRHNMRFVPIKTDDQLDLQALHRVRERLVRRRTALINQIRGFLLERGLVFAQRPANLRRRLPFVLEDAEAHLTPLFRRLLADLWQEWQHVQADIAVLDEAMEQICSSDENCRRLREIPGVGPLVATAIVAAIGNGAAFGNGREFAAWLGLVPRQYSTGGRTQLFSISKRGNSYLRRMFIHGARAVLWRVKYDIGVLREWTTQLQSRAAKNVVAVALANKLARIAWAVLSSGEHYRLKPAVTAA

SEQ ID NO: 94900 - protein, 360 aa, unidentified
MRIIGCDLHARQQTLAMLDTETGEVVNRTLMHEGNQVREFYSELPRPVLVGIEAIGPMQWFLDLLAQLGIECRVGDAAKIRAAEPRKQKHDRRDAELILKLLVEKRFPAIWMPSKELLDLRALLLHRHQWVRLRTQVQNALQAIALANGLRRGPGLWSYDGQAKIAFLPLPPHASLRRSALQAMYGHMEEEIEKLTVQVAEQVEHRSGAQLLMTHPGVGPVTALATDVFLGDAQRFDDGKSLASYVGLIPEERSSGRRRRLGRISKQGNPLLRFLWNEAGTHAARRDPELRRFYRRKLAQKGLGKARVAVARKLGIRLWIMLRDQIDYQEFCRRGQKQSGAACAGMPEVGNGANRHRPVE

SEQ ID NO: 94901 - protein, 380 aa, unidentified
MKFIRRMNYSIDEKAVSRVSLKFTINYQDMNTQITAVPKLYIGIDIHKRSWKIHCSTDLFSGKTFTMPPDPEQLRVYTERHFPTHQISVAYEAGCCGYSAYRSFKRYGWNALVVNPADIFRTGKERHTKTDKIDAQLISRELKYERLESIEVPGKQREELRSLFRRRNDLVKDFRRVKSYIKMQLLYYGIEVPEDFDNDHWSYKFRQWLDDLEFSFITGKATLESRMRYFRFVDQDLRLVSNQLRAYCRKHYKNDYYLLRSIPGIGGIVACGILSELGDLRRFSSIKHLAGYVGLAPGMYQSADTFKVKGMTPRAHRLIRSYFIEAAWQAIRTDPVMQQYYRKHYGKDTKKIIVKVARKLLSRTLAVIKTGIPYEIGIIE

SEQ ID NO: 94902 - protein, 340 aa, unidentified
MDVSTIGLDLAKNVFHVHGVNAAGEKVLAKGLRRANMLPFFARLPRCLIGIEACATAHYWARELRVLGHEVRLIPPAYVKAYVRRGKSDAIDAAAICEAVQRPGMRFVPIKSPEQQAELTLHRVREQLIRQRTRLINVLRSLMAEFGLTVPLGPENLGGLIAVIAEESDPRLPASARLALSELLGVFKDTEQRLLVITTAIKAAHKADVASRRLATQPGIGPIAASAAMASVPDPHHFRSGRNFAASLGITPRQHSTGGKERLGRISKMGDRYLRTLLILGATSVLAQARRFRRPEHAWILRLLERRPPRVVIVAIANKMARVMWAMMVSGEEYRLPAAA

SEQ ID NO: 94903 - protein, 438 aa, unidentified
MSEKIVVGIDVSKAFSDICILSPNNDIIKRLKISNDITGMKSLIYVLEKVEDEYKDRAVIIMEATAHYHQILANFFRKHNYEVIVINPIQSGALKNINIRKIKSDKTDAYNIALLYRIKNYNETITHSDTVNSIKKLCRQHKELTDEIVEHINRLIAFLDISFPDFKKVFTDLQGKTPLSLLEKYPTIQEVLSPENKQDIIQLIKENSHKSSSYAEAKYEKLFKAAEKSIEVCIVSLSSAVLIQTTVRVIFSLQEALKAIDDEIKRLSLLDEKFHKEIVLLQSIPGVGEYTACVVLSELGDISNFSKPKELVAFFGLDPGVSQSGTYNRKNNKISKRGSPHVRSILHMLAKSNVYPNRNREYLNPIMRAYFEKKIAEKPYKVVMCAIMRKMVQIIFAILRNQKSFELRKPEEHQKLIREKSKLVAQTIKSVASKNESI

SEQ ID NO: 94904 - protein, 439 aa, unidentified
MNKRRDRVCGADVHKDLIVATITGDDVLPIRENFGTTKAELKRFRNWLVANKCEQVAFEATGVYWMPIYDALSKTIDTIVANPLQIKTIPNDKSDSKDSNRIATLCLNGQIKRSRVFTDEDRDLRMMTRARSGYVKTRTQFRNRIHKYLSSSGIKLSSTMDDIFCKSGRHILDGLAEEKPIEEILKGIPSGKIRKKQDLIRAALENTLNDTNRMLLTDALEILDNLESKMEKLSLEVLKKVQQKSKDLAIVMSIPGIGFVSASVILSEIGNYRDFQTPDQLAKWCGLNPGENESAGKKKKCGITKRGSKHIRVVLVQAAQTISNMNKTGLSRFFQRLIKKKEHNVVIVAVARKLICLIYHLLINQELYQGDDGRKKRSSQDKPCHAPSFQEEHLTDRVAAIVDAFYHLKESSRKNALMREIADISGIKVGQKRPSKGGG

SEQ ID NO: 94905 - protein, 338 aa, unidentified
MEYPFQSVGIDVSKASLDVALPTASRFLSKRFANQHQGFDDLWSWMQEQARGALHICLEPTGTYHDALVAFLLSHNVTVSLVPPSQITDFRRSEGTRHKTDKQDAILLAKFCQQKQPAAFVAVPEDLAHLRMLLARLEQVAQMQQAERNRLENGRLNEAIRSQIDEHRQMLLSWHEQLQEQIRAWIKQHAEMTAAEKLLRSIKGIGEVLAWHLLSVIGPDASRFPSAYQLAAYLGLDVVHKQSGTSVRSLGKISKQGSPRVRRVLGMCAIVARRWDADMQQWADELTRRGQKSRQVRVALMRKLLYIAYGVLKSQQAYDRSRAWPTHQHPCGEETPAA

SEQ ID NO: 94906 - protein, 344 aa, unidentified
MIYHTALDVSLRSVSICIIDGDGVIQFEGKAASEVDEIISCLKGFSSEINSVGFEAGTLTQYLSYGLQAAGIDVICMEARQVSAALSAMRNKTDKNDARGIAQILRSGWYSRVHVKSLESHLTRALLTSRKTVLKKCVDLENEIRGLIRLLGIKLPGTVKHGSFDELVRPMIQSHTTLADALIPMLDARLALYSSYLKLDSQVTAMARKDAICQRLMTMPGVGAITALTFKAGVDDPSRFKHSRTVAAHFGLTPRRFQSGEVDNPGHISRAGDADVRSALYVAAHSLVVRSQKWTYLKAWGLRLSKTKGHRKAVIAVARKLAVILHKMWIDETDFRFSSTEALS

SEQ ID NO: 94907 - protein, 468 aa, unidentified
MKPAQRRHGKAKSGAGLSLLERINPNAAGIDCGAEMHYVAVPADRDPTPVRAFKTFTADLHRLADWLLACGVTSVAMESTGVYWIPLYEILEARGLDVVLVNARHVKHVAARKSDVVDCQWLQELHSVGLLPASFRPTADIVVLRAYLRHRETLVQSAATHIQRMQKALVQMNLQLSVVLSDITGVTGQHIIRDIVAGQTDPHALAQHRDARCQASEAEIIAALTGNYRPEHVFVLRQNLELFDMYQQQLAACDAAIEAHLATLVAQAPPPGAPLPAPRTKAKPKARDNAPRFDMRTPLHQLTGVDLTQIDALGPYSALRLLGEIGPDMRRWPTEKHFTSWLTLAPCNKISGGRLLSSKTLPSANRAAGILRLAALSLGRTQTALGAFYRRLAYRVGKAKAITATARKLAILVYRSLKEGLLYQDPGAAAYDAHHQERVLRRLRQRAAHLGFSLVNRNTGEVLDHAVS

SEQ ID NO: 94908 - protein, 388 aa, unidentified
MIYVGIDIAKLNHFASAISSDGEILIEPFKFTNDNDGFQLLISKLDFFDKDSIIIGLESTAHYGDNLVRYLVTVNYKVCVLNPIKTSIMRKNNVRKTKTDKVDTYIICKTLMMQDQLRFVTFFDLDLMNLKALGRFRQKTIKQRTRLKIQLTSYIDEVFPELQYFFKSGLHQKSVYALLKEAPTPEAIASMHMTHLAHLLTVTSHGHFDKMIAQQLRVLAQKSVGANDSALSIQITHTVAQIELLDSQLERIEAEMTDIMKFNDSVIKTIPGIGYINGGMILGEIGDIHRFSSPNKLLAYAGLDPSVYQSGNFQAKKTRMSKRGSTVLRYALINAAHNVVKNNATFKAYYDAKMAEGRSHYNALGHCAGKLVRIIWKIMTDNVEFNLD

SEQ ID NO: 94909 - protein, 424 aa, unidentified
MNLTQNDRLKQVTFDTLIVGVDVGSKTHFCRAFDWRGFELSRRVFKFSNTGLGFLTFLRWTEELMNKTEMKKVIVGCEPTGCYWLTFQKFLKEHGVQLVTVNPFTVNRSMELDDNSPEKSDLKDPKTIAHLVKDGRFSTSYLPSGVYAEIREASVCRDQIMKQHVRLSNQIQGWLQKFFPEYFECYADWDSTSGLLLLKEAPLPQDILKIGAGGINQIWRDAKVRAAGIKRAQTLIEAAQNSVGLEAGEAARLEIWVLVNDYILKAEQLKRLDEYLEEKVKEVPNVEKLLAIKGVGMSTVIGFIAEVGDIGRFTDPKQIQKLAGLEIVKKSSGKKKGQPRISKRGRRKLRRTMYESARALMNWNPAFQDVFLYYRNRQKNPLGGMQAKIAVACKAIRVFYVVLQTGCDFDEEKFRKDINRPEAA

SEQ ID NO: 94910 - protein, 317 aa, unidentified
MDSKTTVDRFVGIDVAKNSLEVHVRPDKLAFSCGTDADSLAALAQRLKVLQPKLTVLEATGGYESLLAAALVHAGLTVSIVNPRQTRQFAGAVGRLAKTDKIDAAMIAHFAEAIRPRPYVLADAQTQRLAALMARRAQLMASNAAEQQRHNRASDTDTRKSCVTMLRSLKLEIARIEKLIDKLITASPLFQAKQDLLRTIPGIGDVVARTFIAELPELGTVDRHQIAALVGLAPINRDSGRSRGERHVYGGRPQIRAPLFTAAMAATRYNPALKAFYERLVAAGKNRRVALIAVMRKLVVIANAVLRDNRPWDAGKA

SEQ ID NO: 94911 - protein, 385 aa, unidentified
MAPPRMPEAVIGLDVGKLSHWACVATRDGEILLSAPVANREGDLDSLFGRFPDALAVVDQSRNIGALALARAKAAGMSAAYLPGLAAHGAARLFAGDAKTDERDAMVIAKTALGIPDALLPVGDPGPTVAAARALAAQRNFLTCENTRSKNRLRSILLESCPAFEALVDLSDGPQLRLMASLGGAWSVADAGPRRAAALTRGAARGKIEALVRSTASSTRPDAAAIAAEDRAVRLLARRISENSAEIDVITAEISALLEGDDTYRCLLTVPGIGPKTASELAISIDIEDFPSHDRLASYCGLAPRNRQSGTSISSVTASRQGNKRLKNLLIFSCNCLTRTEGRWGDYYARCRERGMPHGKALKALARKRLKVIYAIMRDRVPYAA

SEQ ID NO: 94912 - protein, 332 aa, unidentified
MKKFKEFIGIDISKLKFDIRIHSNQIASVFDNNNTGFKKMVNWVLKNVDCDKEEILFALEHTGLYSLPISVFLSENKFHFILLPGLEIKRSLGIQRGKNDKIDAKRIAEYAYQKKDKIVPSQLPFKNILQIRRLLKLRERLVKYRAGFLKDKSENKIFLNAKENKLLFEIVDKSIIELNKKIDKIEKEIDIIVESDTLISKQFYLITSIKGVGKQTALFVIAYTNCFSNFDNWRKFASYCGTAPFPYSSGTSIKGRNKVSPLANKKIKSLLNQCARSSIICNPEMKLYYKTRKEKGDNGMSITNIIRNKMISRIFAVINRGTPYVDTYKFAA

SEQ ID NO: 94913 - protein, 410 aa, unidentified
MQGAAGGVIPFRCNPTTSFGEALMTVRTVSNLPAAMHIETARCLFAIELSKQSWVIGFITPLSAKISRRILSGGDWKGLLDLIEEVRARVSRETGRAVDVISCYEAGYDGFWLHRLLEAHGIRNYVIDPASLQVDRRARRVKTDRIDTERLLRSLMAYLRGEPKVWSVVRVPSVAEEDARRLHRERDRLVSERVQHVNRIKGLCALHGICDYQPLRPQAMARLEQLRTAQGISLPPRLKSEIKRELQRLELVVEMIATLEAERDAIVEDEASTHVNAKKIQNLHQLKAIGPEFAAVLVGEIFHRDFNNRRQLASYVGYAPSPFQSGNVAHDQGISKAGNRKGRTTGIELAWLWLRYQPDSDLSVWFRARVGTTKGRIRRIAIVALARKLLVALWRYLETGLVPRGAVLKG

SEQ ID NO: 94914 - protein, 400 aa, unidentified
MDKDRIVAGLDVHKDTIYLCVMDNTEAVIFAKVYGTLTPDLELMCYEMVSHGVTEAAMESTSTYWVPVWNALCESMSLKLVNPYFIKQLPGRKSDVKDAQWIAECLLKNLIRGSFVPDKRVQDMRKYNRRIFDLNEDLTYNSNKQDAALQRCGFRLSNYVSRVNGKSYQKCVRAIITGITDPEELVKLIHGKTLRKYGRNIIKDAVTGDFHQADICLLKQYAELIEVIERQIEECRNALIAMCQEHFPKQFKRLQSIPGVKERAASAIIAETGADMKPFEKATNLVGWCGLKPRNDISNNKVKSNRTTHGNRFLRQILIEISWVASRTRNCFFSNFSYVQCTQRHKNKMKIQVAIARKLLVAVWHMLTKDEDFIDVYLKRLEKQAEWQNDIQALESLLVG

SEQ ID NO: 94915 - protein, 346 aa, unidentified
MTQYKRIGIDTSKAVFTLHGIDQRDQPTLRINLRRAQMISFFKKLPPVEVAMEACGGAHHWARELAVLGHAVLLIPPQYVKPYVKRGKNDRNDAEAICEAAGRPGMHFVPAKSLSQQAQGMVLKVRDTLIGQRTLLVNTLRGHASEFGVVAGKGVGRVGSLLAAIEQDATIPAEARDMIALLGQQIEHLDIKIKALEARLNAAHKANAVSRRLATIPGLGPVTALTLATEIDPAAFASGRHMAAWIGLTPKEHSTGGKQRLVGISRAGNERLRSLLVVCATSVIKAATMPASKQMTSWLRGLLQRKPRKVAAVALANKIARVAWAVMTYGTVYRRSPTNVEVSYAA

SEQ ID NO: 94916 - protein, 408 aa, unidentified
MNTLYVGIDVSSKSNVVYLMLPNGDKHSNFSVANSHEGSTLLVKKIYSALTSHSLDTVLIGLEATSVYGDNLVYFLREDATLAPFNRKIHVLNPKQVKKFHDTYNDLPKNDYVDSFVIADCLRFGRINKEVYMGEYRYKALQNLTRARFFAVQNLVKEKQRFMNVLFKKYSTMTQEKVFSDAFSTTALAVYDEFESAEALANMDLHELTDFIIEKGKNRFPDPDAVAKAIQKAARSSYRLPKTVNDSVNQVLSISITSMKALESQIKEFDKAIIALMELLPNVLISIPSIGPVYSAGIMAEIGDINRFDNQASLAKYAGLAWKQHQSGGFEAEVTRLIPSGNRFLKYYLCEAAFSLVRCDKKYSDFYHLKYKEVNRCQHKRALALTARKFVRLVFRLLKDNRLYCPAK

SEQ ID NO: 94917 - protein, 416 aa, unidentified
MKIVRPICCGMDVHKNIIVATIGITNKKTRITEYIQETFSTLNPDLLNLKQWLINHKCFDACMESTGKYWIPIFNILEDEINIYLTHPKYVKAIKGKKTDKKDSKWICDLFKHDLIKFSFIPPKEIRALREISRYRYKLVGMRSSERNRYQNCMTVSNIGIGSVFSDPFGKSAQAIMKEVLESDIIEDEKILKCIHGSCKNKDKILDSIKHCNIETDQRFKMNESMTHMEELQVHINNCEIEIMKRAAPMLDRFMHITQLPGISTLSAILIISEIGVDMKQFESDKQLACWAGLAPANNESANKKKSVRISKAGQYLKPLLVQCALGAIKDKEGYFGIKYSRIKKRRGHKKAIIAIARMMLVSIYHMILTGETFNPSDYESFKNPKPPIKQQVLTEESAIEFLKKSGFDVSKLTKP

SEQ ID NO: 94918 - protein, 335 aa, unidentified
MEKKIIVGIDVSKSWLDAHVLSSEGREGYALRVNNKTEGFVKLIKWIRKQTAVESDQWLFCMEHTGVYSYGLNAFLQDHSIAQSMVNALAIKRSMGVIRGKNDKADARVIAQYAFRFQDKLKEFHLPTESLQKLKIQLSQRERMIDMKRQLDLSMESMETLPLNFTKEARAQNRKLRKQLQKNIIEMDSVIRATIQSDADLKNQSQLIESVPGIGPQTCAHILVTTQGMKQFSDSRKYATYCGVAPFEYSSGSSYRGKTKVHYLANHKMKSLLHMAALNASVYDPDIKSYYERKKAEGKNPMSILNAIRFKLIDRVFAVVKRNEQYDKNYLRKAA

SEQ ID NO: 94919 - protein, 348 aa, unidentified
MNILKQVLGIDVAQKELVVCLSKLNSDLSIDHYANKVFSNKEAGFVALIKWVKKLTIENVEIHFVMEATGVYHQKFAYYLDANGFNVSIVLPNKISNYMRTLENRTITDKTCAEAIAQFGLERKLDKWRKPNIIYKNLQQLTREREQIVEERSIVKNQLHAENAEAEPNANSMKRLKARIKFLNQQEKEIKQDIEKCIKKDESIEKEINNITTIPGVGRLTATIVLAETNGFELIRNKKQLISYSGLDVREKQSGTSIKGKPRISKKGNKFLRKAMFFPALSAVKHEQNYKEIYARLVSKSGIKMKGLVAVQRKLLELIYIIFKNKTVYQSDYIKEKRAQLHELEVAL

SEQ ID NO: 94920 - protein, 398 aa, unidentified
MKVSGLDVHKDSIFCAIYDGKEYSPVNDYDSTLPKIRQMGEYLRSEGVTKVAMESTSTYWVPVWDVLLDMGFELMLVNPFLIKQMPGRKSDVKDSQWIACLLHKGLLRGSMIPSPIIQQLRVYSRKYTKLQEQKTRSLQKMDRLMVMCGFRIGSCMSNLATKSVMLIIRALIKGETDPEVLERLVYGNTANKKSGKLREALTGNLQEHYRQQLEWEIQEYDLFDLQTEQCLAQMQKICREHYKKEIELLKSIPGVSDISAMIIIAETGGDMNVFENSGKITGWAGLRPRNDESAGKYKSTATTKGNKYLRSVLVQVSWAASRIKDGWFKEKFNRFAMRKSRKKALIAIARKLLTVTWNVLYYKKPYNPQLVHIYDPVKVEAKMNYHQREAERMQKLLN

SEQ ID NO: 94921 - protein, 358 aa, unidentified
MSEITRVGVDLAKNVIQVHAVDATGKVVTNKALQRDKFILWCAMLPSGCLIAMEASSSAHHWARKLVDLGLDARIIAAHLVAPYRLQGKSGKNDANDAAAICEAASRPMMRFVAIKTQAQQGILCVHRLREGYKEERTACINRIRGLLAEFGLVFAQSNEVLRAALSSVLEDASNDLAGIARLAIERAQSQWAELDAHIAWCDARIAAHVKQDKNVNAAMQIMGVGPVTASAVVATVGDFKQFKDGAQFGAWLGLTPKQNSSGGKSNLGSITKRGDMYLRMLLIQGARSAVFTAHRRDDPISKWVHQLLQRSGWQKAVVALANKNARILWAMFAKGKPFDAHHVGVKPGLVSGAMSPA

SEQ ID NO: 94922 - protein, 334 aa, unidentified
MWHVGIDLHRETVVIAAVNDMGETMDPVRIACRETEAILRVFRILGTFRAVIEASGTYRWLYDLLRPYGTVLLAHPLRLRAMIQRRTKTDKLDAQLLANLLRINQIPLAYIPPEPYQQLRDLTRCRSRLARDQAEVKIKLRDVLARQNRQAPYRSPFGPRGLAWFRGQDFGPIENLIRDELLERCTHYRRQLAILDQHLAGIAEAFPQVEVLTEIYGIGLYSALLIVGELGEVDRFRNARQVGAYAGLTSRVHQSGGHRYQGSITRQGSPWLRWVLVEAAMKVVREDVALKNFYTRVRKRSSAKIARVAVARKLAEICWKRLRRWQDEHAGRAA

SEQ ID NO: 94923 - protein, 402 aa, unidentified
MNCVGIDVSKGKSMIAVMRPFGEVVISPFEVQHTASELSELAKLLKSLDGETRVVMESTGNYHTPVAWLLHDAGLYVSVVNAMLVHDYGNNSLRRAKTDKKDAVKLANYGLDHWLTLPRYVPEEDTRLLLKNCYRQYQQYSKVQTMLKNNLISLLDAIFPEVNRLFNSSPRADGSEKWVDFVSTFWHCQCVSTLSLKSFSARYLKWCRKHGYYFSQEKAFEIHSKAQSCIGVMPRNETIKLLVQQAIAQLKATSAALAALKQEMQSLAASLPEYPVVMEMFGVGSTLGPQLMAEIGDVRRFHSKKALVAFAGIDAPPCQSGKMDIHSRSISKRGSAALRRTLFLVMGVYLQSAPLDEPVYQFMDKKRSEGKPYKVYMMASANKFLRIYYASVTAYLNTLARI

SEQ ID NO: 94924 - protein, 312 aa, unidentified
MDALNIGIDVSRDRLDVAANTSSMAPFHVPRDHDGLEDLIARLKPLGAARIAIEATGGFETVVAAALASAGLPVVIVNPAQVRAFAQALGKRTKTDPLDAAVIARFAEATRPALRPLPDAETQALGDLVARRRQIIAMIGAENQRLKRSSQRTAKSINRLLKALQKELTDIDQDIDDSIRRSPHWLAKVELMKSVPGIGDQIARTLIAELPELGTLDRRQIAALVGLAPWTRQSGQWRGRSFIGGGRAGVRTALYMGALVAAHHNPSLRAFRDRLVAHGKPKLVAIIAVARKLITILNAILRDNHPWREQNA

SEQ ID NO: 94925 - protein, 355 aa, unidentified
MNGLRYIGLDVHQETISAAVLDRAGTLIMQSVFATRAAAILDFLDGIKGTLHVTFEEGIHSAWLYDLLQRRVARVVVCDPRKNKPLKSGNKGDLIDARKLAELLRNNSLSPVYHGEMSSLEVQHRTRSYTMLTGDTTRVMNRLKAVFRSQAIACPGRKLFRPDKRDSFVAQLATPGLRQRAESLYRELDALHPLRLRAKREMLAECRKHPAMKWLRSVPFLGKVRTAVLIGRVQTPHRFRTKRQFWSYCGLALQTHDSAEYRVVHGQLQRKSRPAQVRGLNWNHNHELKSLFKSAATMAAFRKGIFREFYSGLLAKGMRPEMARLTLARKIAAITLKIWKEGETFNAEHVKTQAA

SEQ ID NO: 94926 - protein, 387 aa, unidentified
MSISSQAPIFTVGLDVHKDSVTAAVFRDRDPEPLRVDRLPYDLKKIRRYFQRLQADGSVRACYEASGAGYVLQRTLTEWGVVCDLAAPSLIPRRAGDHRKTDRRDAIKLARDYRDDRLVLIHIPTEADEEVRDLVRCRETFQREIVKSRHYILKFMRRRGLVYREGTHWTQRHLNWIRQVLAPSEPASLSEHDRIVLGEYLALLEYKLQRRDDLDRQIEELALTPRYKPVVERLGCFRGFKTHAAMVIATELGDVRRFESPRQLMAYVGLVPREHTSGDRQRLGGITKAGNTRVRHILIQAAWHYRNQPKVGIALRRRQQGQDSAVIAHAWKCQHRLYRLYHRLAARKPNQVAATAVAREMVGFLWAVLKDLDVSQLQREQEAAHAA

SEQ ID NO: 94927 - protein, 412 aa, unidentified
MTKVLRRVGIDWGSGAHQVCRIDSEEEPKQRSFPHTSEGLNALVAFVVEGDIAPEQVLIAIEVNHGAVVEALLAKALPVCSINPKLLDRLRDRFSPAGAKDDRRDAFVLASCVESDAHAFRRIEPGNEENLRLQAATRLRGDLKSQFGADANRLWSELRDYRPGLLVLCPGADEPWLWALIDKAPSPLQGAKLTRTSIGTVLKRHRIRRLTIEDVQTVLRKDVLSLRPVYIESHVARVLVLTAKLKLAQSQIDKIEKEIKTELAERVESEEKTKRRDLTILLSLPGFGPLTTATALGESGDAFERRDYNALRSICGAAPITKQSGGSRFVVMRQFCQPRLRVALHISALQAIRIDPKFHDLYVRARARGHTVGRAIRNIVDRLLFLAVQLLRKNELYDVTLRQLASAAVAAS

SEQ ID NO: 94928 - protein, 407 aa, unidentified
MQIISKYVCGMDVHKKSITACILTPKSKEVRTFGTMTDDLLLLVDWIQSNKCTHVAMESTGVYWKPIYNLLELEPSLQTYVVNAQHIKQVPGRKTDVKDAEWIADLLKHGLLKPSFIPDREQRELRELVRYRRSLIDERAREANRIQKVLEGANIKLSSVATDILGVSGRLMLRQLIKGETNPSLLAELAKKQLRKKMDLLERSLKGLIGPHQKFLLKGQLDHIEYLEKQIEMLDLEIKERLKEYKDEIELLDSIPGIAIQTAQHIIAEIGPDLSRFPSAAHLAAWAGMAPGQNESAGKKKTARTRDGNKYLRSALIESASSATRKKDCYLAAKYQRLKRRRGTNKAKVAIAHQILVIAYHLLTRKESYKELGSNYYSEKALEVKKKKAIKHLTNLGYEIRHPLQSA

SEQ ID NO: 94929 - protein, 388 aa, unidentified
MFKTVERPDAPAAIRMDIGAIFVSLELSRSTWLLTSVSPGAAEKMSQHATPAGDLRRLFECLAELKRKALARTGKTYPIIVIQEAGLDGFWIHRALEREGIESHVVDAASIAVPRRRRRAKTDRIDGKTLLRTLMAFKRGEPRVCAMAKPPSVEEEDRRRLGRERKTLIAERVEHVNRIKGLLFTQGAIDYQPLRRDRRARLEALRTGIGDPLPARLKDLISRELDRLELLLAQIKAVEAERDALLAEQSRQAPAAAAMLLAFKGIGPEFATVLWLEGLFRSFANRRQVAAYAGLAPTPWRSGSIAREQGASKAGNPRLPATLIELAWLWRRHQPKSALTLWFEDRVKANGGRVKKALLVALARKLLVALWKYVTTGLVIEGAVMTTA

SEQ ID NO: 94930 - protein, 407 aa, unidentified
MIASDPNQINPQTLDRFASFVGVDLHKKVVALAAVDRQGNILDRIRCSTQEPHKIHRFLRGLPRPLWMAVEAVGFIEWFIDEFRPAVERIDIADATKLASMRGKRRKNDRKDSLEFAQRLARGECPLGYIADEDLLHLRKLGRHWHRLSERLSRAKTTVRSLLNAANLEGPTSNSLHMRQWLELQGHQLKPATLLTIEGLTQEIEGIEHQRRSLEEAIRQANTSDVFAADIQLLKTVKGIGDILACIIRAEVGPFMRFPNADALEFWSGLTPDNQESAGRTQSGHITKAGPASLRWALGQAAMAQCRSDRRVGGIRRKLANKRGKGKANTAMARRLLRTLYAMMRDGVPYDPKANTGGTRPAKAQATRPHKDKPTARQRADAFFASRPPTGAKGERAKNAYQRSCSC

SEQ ID NO: 94931 - protein, 341 aa, unidentified
MSEASTIGLDLAKRVFQAHGADASGKVVFRKRLRREQVLAFFAGRAACVVAMEACSSAHYWAREIGELGHTVRLIPPAYVKPFVKRQKNDATDAEAICEAAQRPTMRFVSVKSEVAQANAVVFRTRDLLVRQRTQAINALRGHLGEHGVVVAKGPSHVAKLIAHVEDPATGLPEAARTVLRVLTASLQFLSERIDLLDREIARRAREDKEVRRLTTIPGVGPVIATALAALAPPADAFRRGRDFAAWVGLTPSQHSSGGKQKLGATSKMGERTLRRLLIIGASSVVQKAIKHGTPSGSWLGRMLARKPRMLVIVALANKMARTVWALRATGEIYRAPVVAA

SEQ ID NO: 94932 - protein, 322 aa, unidentified
MEMLSFGGIDVSKDRLDITVLPDEQCSSVSNDAAGWAELIEQLRGSSITAIGVEASGGYERGVVRALLAAGMSVRQINPFKLRQFAKASGVLAKNDRLDARMIASFVAIMPTRPAQRQTPMIEQLAAMLTVRRQLSDHKVATENASRLLEGAMLQRLSRRRVAGLTADIDLLDQRLVEIVTADPALAHRFWLLTSMPGVGAVLACTLIALLPELGQMSRKQVAALVGLAPYDFDSGKLKGRRCIWGGRARVRHVLYMAALSASNWNPALKAFHDRLAATGKKPKVVIVAVMRKMITTLNAMLRDGTTWVDRYSGRRSAATAR

SEQ ID NO: 94933 - protein, 429 aa, unidentified
MNSTQNKKIEQVKETTMIVGIDVGSEKHYFRAFNWRGIELTRKPVAFLNSMEGFNSFYNSVVELMQKNELKEALVGIEPTGHYWFDLGQFMGEKNIKFVMVNPHHVHKTKELDDNSPSKNDRKDPRVIAGLVRDGRYFYSYMPTGVYAELRNASNRRFVLVEEQTRAKNRLQKWVAVYFPEYKGIYTHIDAKGGLLVLKQAPTPEEIVRLGVEGIIKIWKDAKLRGNGHKKAMLILNAAMKSIGLKAGLTEARMEIQDLIEDYELQTKRLERVNDLIKELCQQIRYVDKLLEIKGIGITTVAGFIAEVGDITRFDSTKELQKLAGLELVADSSGKHDGKTKISKRGRKRLRYLLFEAAISVVGKNEEFKEIHRYYTTREKNPLKKMQSLIAVACKLIRVFHVILTKGISYDASKMLKDIRHPGEQLKAA

SEQ ID NO: 94934 - protein, 413 aa, unidentified
MNFIGADLHKKSITLCVMDQNRKVLARKTLSCQETNEIVEFCQQFRPFKVVVEATASYPWFVRLVEPLAEEVVLGNPKKLRVIAESTKKTDNLDAQVLAEFLALDMIPKSYQPTARQREHRILVRHRQYLQRRITSVRSKIHHILSNYNADRKDLFSAHCGLSYIKGVPLSNADQFVITQLWTEWQEHLTQRLALTKKLKAFVAKAPQREAEARAILKTAPGVGFVTAEVILSELGDISRFRNAKAVCAYAGLVPAVRQSGGKKSKDLHITKEGSGILRWALVQAAWRLAVKSPKWVIVYARLKERKGSKRAIVAVARKLLCVLYAMLKTSTPYKIAAPGPSPRQTRKRRLVLVRTSPPEPTTTPGTLAPKTTCSQPVRTSAPARATRTQTTARRTARKSAAGTSIPEPATTP

SEQ ID NO: 94935 - protein, 466 aa, unidentified
MERKGGKGALAETAGRRQRKGRGKRARKAGFELAHPDCAGIDVGSGSHFVAVPADRENPSVREFGSFSDDLHRLADWLSACGVRTVVMESTGVYWIALYELLEGRGFAVYLVNARHVKNVSGRKSDVLDCQWIRDLMSFGLLRGAFRPSQEVCALRAVMRQRDMLLAGQARHVQHMQKALAQMNIQLANVISDVVGETGQRIVRAIVAGERDRSRLAALRGPRIHASQEEVGRALEGTWRAEHLFALKQALALFDTYAQMLMECDGELERMLERLARYDGDPGKPKRRGRQKNAPRFDVRVHLFRACGVDLTRIDGIDTTTALKVLSETGPDLSRFPTPKHFTSWLNLCPNTRITGGKRLKGRERNRCNRAGQALRQAAVGLSTSKSALGAYFRRMAGRLSKAVAVKAVAHKLARLVYAALTKGMVYVDRGMAAEEERYRARAFKHLAKRAAALGYSLSPTLQAAK

SEQ ID NO: 94936 - protein, 346 aa, unidentified
MLYAGLDLSRQRLDVHVLDEEGRTVEVMAVHPDADALRTLATHVLRHGQEVTAAVESMTGGRFVHDQLERWGWDVAIADAVKVKGLAPLAAKTDRIDARVLAELARRDLVPAIWLPDPTIRAERERARFRLHLVRHRTALKNRIHATLMTFGYSVSVSDLFGTQGREILGRLVIPEPWATTLTTSLRMIDDLNVEIAACEADLRRLGADHPYIPLLLTVPGVGPLLAYTIASEIGRIGRFESPKKLAGYTGLCPIVRQSGPKDRRGPLAKNGPKYLRWALIEAATHAARDARYRDRYERTKHRLGRQRGAKVARVDIARQLAEAIWHILTENEPFAPAGPAITLVA

SEQ ID NO: 94937 - protein, 355 aa, unidentified
MNVKKYIGMDVHKETISIAVMTGDGKLVMESIIETKASTILQFVQGLQGDLHVTFEEGTWAAWLYDLMKPHVRELLVCDPRKNALLKEGNKSDKIDARKLADLLRGGYLRSVYHGENGLRALKELARSYLTISQDLTRVMNRVKALYRSWGIACGGQQVYAPRHRAEWLNKIGEPGVRRRAEFFYQQLDAVRGLRQAVRRDLVAESRQHGATKLLRQIPYIGPIRSALLVALIQTPHRFRTKRQLWTYSGLAIDTRDSAQYRYVAGQLQRSKKPQQLRGLNENHNHDMKAIFKSAAAMASRREGPFQDFYQGLLVKGMKPAMARLTLARKIAAITLILWKKGAHFDAEQLKPQAA

SEQ ID NO: 94938 - protein, 369 aa, unidentified
MAFFIGVDLHKTQFTAHVRTEEKVESLDQIKQYPTTTAGYAEFLSRIETYKATGAAVKIGVESTGNTRFFKNQVEKAGAEVTVINTLKFKVINESTKKTDKHDASTISEFLSKDMLPESYLCGKETENIRRLLKSRERLVRSTVGQKNEIHALLVSLGLSDELRSLQSKKGRQRVLDTLESNNDCVLEAQSVKLMFEIIERIEESVKIIEKQISELTKDDEMVNRLMTIRGCGKITAWTIRAYTEDISRFATAKKYAAFCGLVPWVQDSNETIHHGKITKRGPQELRTCFVQLVMGIRRCKDTSEWRMMQRYEYMKKNKGSGKSIVAAARKMAEIVWAMLNDKQDFDSAKMIGKYKPMILADEALAAMN

SEQ ID NO: 94939 - protein, 356 aa, unidentified
MSKILALDLGKFKTETGGLDTDTGEIRFQRIASNRHYMSRLLKKEQPDVVVFEACTMAGWVFDLCQELGIPAKVANTSGEAWKFKNLKRKTDRDDAERLARLESMGELPTVYVPAVAVRERRSLIEYRESLIEHRVKLKNQIRSLYLAQGLELPRGHAAWTVEGLKKLQEMAQPLLECTATELWRGQLHAILQELRELYQRIDTVEKRLDALGEADPATRLLQSADGIGSRTAEVVAVYLENPRRFKNGRAVSAYSGLVPRQYQSGELDRRGRITRRGPRLLRKMLVEAAWCMLRYNEWARQVVARISGGQRARKKQAVVALARKLLVRLWAMLRDGVPWNDQPPRAIGQPAIALV

SEQ ID NO: 94940 - protein, 406 aa, unidentified
MELIALHKRVIGLDVHQAQITACAILEEADGTTRIEQRQFGAFKRDRRALADWASSLAPDEVVMESTGIYWKSPYAALEAVGIRGQVVNARHVKNVPGRKTDVGDAQWLATLARAGLLRGSFVPPMQLRELRLISRQRQKLVGQLASEKNRLHKVLTDGGVRLGVVVSDLHGQSARAMVKAIILGQSPNEVLQFASKRLKASREEIFDALQGELTDSHRFVLDELMRHIEEIEARIARFDARLLEGLKGERNTLALLQTLPGVDLIGAAMLLVEIGSDMEAFGSADRLASWVGICPGNNESAGKRKSGRVRKGNLYVRRLLCEFAHAARRTQSVFQSKFKSLIVRRGHKRSIVALAHKILRTIFFMIKRREHYRDSATDYEALSVQRNAPRWIKALTRFGFIPAAA

SEQ ID NO: 94941 - protein, 372 aa, unidentified
MNDDSVIFIGLDTSKLKLSVAIAEGERNGEVRFFGDISSEPASVESLVSKLSKRGAKLHFCYEAGPTGYGLYRQIVELGHDCVVVAPSLVPKRAGDRVKTNRRDAVSLARLHRAGELTAVWVPDEAHEAIRDLVRAREAASDALKQARQQLQSFLLRHGRIYTGHKPWTRAHIRWLTCQAFDHPAHQILVAEYCQAIEDAGVRLDRLTQLVVETAASWSMAPVVAAYQAMRGVAFMTAVTFVVEIGDVRRFDNPRQLMAYLGLVPSESSTGERVKRGGITKAGNTRVRRVLIEGAWTYRFPARVSPTIQARLDGLPRTVREIAWQGQVRLCARYRKLMAAGKPKVVAVTAIAREMAAFLWAIGQEVAPTAKI

SEQ ID NO: 94942 - protein, 338 aa, unidentified
MKTHVGVDLHQRFCYLTAMNASGRICRQGQVVNEGGALQAWLRELPRPRQVVVEASGFWPAFARAAAVESERLVMVHPQRVKAIASAKLKNDRVDSETLAHLSRCDLLPEAWMADPATQQLRLRVRLRIALGRQRARAKNQLQAVLHQEGFRKPVTDVFGRRGRAWLKGLELSEAGRLVVDTWLREVDRLDAELTTQTRELERLAEADARAGWLQSVPGIGAYAAMVILAEIGDVERFASKRALASYAGLTPVVRESAGRRKRGGITHQGSNTLRWIMLQVAQVAARWSPGARSYYAGLRARKPAQVARTALARKLLTVVWALLRHGVDFDEELFIRG

SEQ ID NO: 94943 - protein, 379 aa, unidentified
MRRVCGLDVHKDSIYMCILYENGSKIESVFGVLTPELDKLRDLLVSHHVCEVALESTSIYWIPIWNILSVDFSLKLVNPYFIKQLPGRKSDVKDAEWIATVLQKGLIRGSYVPDRMIQCLRQYERRNHELSKNIVHAEQRMDMILQRCNIRISNYVSCISCKGYQKVVNAIISGESNPKVLVTLIHKRTLNKHGRQVVEDSLNGFVSDTDRDILRQYRDERMQMEQHKSENKAKMQAICEAHYCEELELLQTLPGIKEESAANIIAEIGVDMKMFLTASAIVGWAGLKPRNDQSAGNIKSRKITHGNKYLRKILVEAAWSAARTKDSRFMKMYQRLLARGKSKQKALIAVARKLLVLIWNMLSKKEAFNPEYKRRIQAA

SEQ ID NO: 94944 - protein, 411 aa, unidentified
MDIVNARCAGLDVHKATVVAGVRVPGPRPGERRGETKTFATTTRALRELTDWLIGHGVTDVAMESTGVYWRPVYAALEGLAQVVLVNARHVKMVPGRKTDVKDCEWLAQLLECGLLRGSFVPPRAVRDLRDLTRLRKALIRERGHHVNRIEKTLELAQIKIGCVVTDLMGKTGRAILEALSAGIDDPDQLAEYAQGLLRKKRAALREALGGRLTPHYAFLLQQHLSLIDALDAHLATLQARIEMAMAPFADTAALVQTMPGVAARAAQAILAETGVDMSCFPTPAHFASWARLCPGNHESAGKRQNTTTGKGATWLRATLQEVAWAAVRSKKSYYRALYHRLKARRGAKKAIVAVQHAMLVALWHMLKHHVAHHDLGADYFERRNTARIRRHHIRRLELLGYDVVITDKAA

SEQ ID NO: 94945 - protein, 377 aa, unidentified
MNTAVGIDVSKGKSVVAAMRPFGEVMLPPQEFLHTSNDLLSLTESVRLIGGNTRVILEATGRYHEPVVAALREAGIFVSIINPKLIKDFGNNSLRKVKTDKSDAVKIARYGLEYWEEMREYTETDTVRQQLKLFSRQYNLHMKTVVALQNNLISLLDSVFPGVNELFKSPVRDDGHQKWVDFVCTFYHRDYISTVSAATFSERYNKWCKRKGYNFSSAKAAEIYAVSRELVVTMSKNALTKTLITSAAEQLIAATTTLATLKTEFIRLAASLPEYEIVSSMYGAGDITGAQLMAEIGDVRRFANRGSLIAFAGVDPSVNESGKHSSQSVRTTKRGSPHCARRCFKSSVRISNSRRRTSLFTSSSTVNVPRASLISFT

SEQ ID NO: 94946 - protein, 450 aa, unidentified
MPRDVREIEVDEQEETLERVAAIDVAKASAKVCTRVAHPSVTHRRVTKVWDVGSTTNAIMSLADELAEAEIERVVIESTSDYWRPFFYLLEARGLLVWLVNARDAKQVPGRPKTDKLDAVWLAKLNERGMLRPSFVPPKEIRELRDYTRLRVDLTQERGRYAQRLEKLLEDALIKLSSVATDILGKSGRQMIEALIQGERDPVVLAEMAKGKLRIKRSALVEALTGRFDDHHGELARILLDQIDALSEKIETLTLRVSELIEQIPEAQALVEERSGPAGALLHPDRAPLPVVERLDEVTGIGLLSAQAIIAEIGLNMGQFPSAGRLVSWAKLSPRTIQSGPKTRSGGTGQGNPYLRRALSEAAASAARTNTFLGQRYRRLVKRRGKLRALVAIARSILVIVWHLLADRTARFIDLGPDFYDRRINNDRRARDLVRQLQALGHQVTLSPAA

SEQ ID NO: 94947 - protein, 410 aa, unidentified
MELLHRRCCGLDVHKETVVACLRLVSDGKVTTEVRTFQTTTAHLLRLSEWLAANECTHVAMEASGVYWKPVWHILDDGEFELVLANAAHVKNVPGRKTDVNDAMWLAELLAHGLIRASFVPDTQTQEMRNLLRTRKQLVREQSSHVQRVQKTLEDANIKLDSVLSDLMGKSGRAMIEAMIAGETNPAKLASLAHPRAKASHEEFREALRGRVTKHHRFLLRLHLNQIDALNAAMATLDTQVEANLGPFRTAVELIMSIPGIKNLGANVIASEIGIDMSRFPSDAHLVSWAGICPRNDESAGKRRSNRLRKGAPWLKTTLVQCAWAAVKKKNSYLQAQFYRIKARRGPKKAIMAVAASILTAVYHMLKDGTMYKDLGSNHFDRRSTDQQKNRLIKRLADLGYAVQIKPLSA

SEQ ID NO: 94948 - protein, 350 aa, unidentified
MNVNHYIGFDVHKKSISYCVKLADGQIVEESKLRATYDALRQWAGRRREPWHGAMEATLFSGWIYDTLKPFAAELQMGHPALMKAIGASKKKNDRLDARKIADLVRCNLLPACYVAPAQIRELRQILRYRNLVVKQAVRMKNKMSGLLMEAGAEYSKQQLHGKKYFTKLLDTVKEVPESVKDLLRLSRGAMEMFETTQQQLLGRLRSDPRLAERVILLRSIRAVGEVTALTWILEVGDPQRFTSIAKAVSYCGLTSALVSSADHQKRGPISKQRNAHLQTVLIEAAKLAPRWNPQLAAVHAREVERGNRNRATLAVARKLVAYLLAVDKSGQPFQPRTPLAAETEVEKVA

SEQ ID NO: 94949 - protein, 343 aa, unidentified
MDEISMIGLDIAKNVFHIHGVDASGAPVLRRQLRRGQVEKFFAKLPPTLVGLEACSSAHHWARVIGRYGHQVRLMPPGYVKAYVKRNKNDGRDAEAICEAVSRPTMRIVPVKTVEQQATLSVHTTRALLVRQRTMAANSLRGMLSELGIVAAQGVKGLRALMQQLEQPSEAIPELMRHALLLLTRQWEALDTAERALEQQITRAAKADSEARRLMAVPCVGPMIASTVLAKVPDPRMFRTGRDFAAWIGLTGRDRGTGGKHRIGHISKQGDRILRTMLINGASAYLLHQKARGVTDLWLRDLLARRPYKVVMVALANKTARIIWALLAKGGEYRVRASVPAAA

SEQ ID NO: 94950 - protein, 358 aa, unidentified
MQKYNISFKGQKIFIGIDVHKKTWDVAIAPEIGIIKRHTQKPSAKELFDFLKKHYPDGDYLAVYESGFSGFSTYYALKEVGIDCIVIHAADVPTTQYEEVMKSDRLDSIKLVKSLKAGLLKGIYIREKENIDDRAVIRIRKTIQKELSRYKIRVRHILHSNGVQLPDRFEKPGSLWSRAFIKWLKEDVTLLSSTRNSLDLLIRQVETIRKTLLEATNMMRYMSQTERYKHKFDLLTTVPGIGVTVAMCILTEVYDVRRFHNEKQFAAYLGLIPTCHSSGEKVIHGEMTFRGNKQMGPMLIEAAWTTISRDAGLGSLYLRYKERMKPQEAIVRIARKLSNVIFAILKNETEYIPYQTGK

SEQ ID NO: 94951 - protein, 339 aa, unidentified
MKLYVGIDLHSNNSVVVVMNEQDHVLYEKRLPNDLRLILGALEPYRQRVEAVAVESTYNWYWLVDGLMEAGYPLRLVNTAAVKIYEGLKYTGDEHDARHLAHLLRLGILPTGYIYPKQERAVRDLLRKRAQLVRCRTAQVLSIQNLISRNSGKGIAMDAIRQLGDEAIHQLCGQDAFRTLAIQSNRAVLKCLDDQIRILERKVLSQAKLKPAFEKLLSADGIGNILGMTIMYETGDIERFSKVGQFASYARCVGSGRFSNGKKKGEGNRKNGNKYLAWAFVEAAHFAVRYNEHVRKFYERKKAKTNSIVAIKAIAHKLARACYHMLKDQTSFDATRAFA

SEQ ID NO: 94952 - protein, 347 aa, unidentified
MSITRIGLDTAKSVFQLHGVDEAGKMQIKRKSQRREMIPYFEKLEPCIIYLEACGAGHYWARILIGLGHDVKLIAPEAARPFVKKGKKNDPADAAALCEAGSRPDIKFVPVKTEEQQAVLAMHSVRALLVKQQTMLSNAMRGLAAEFGLIVPKGIDKLVELMAQVDADENVPKQGRLAVQELFDQREAVAERIETLEAEIIAHARQNEAARRLATIPGVGPITASLIAATVADFSVFKRARDFAAWLGLVPRQHSTGGKTRLGKITKAGNREIRTLLVLGATSMTFRAPQWKSAAGVWTDHLRQRRPFRLVTVALANKIARIAWALMTRNEVYQANGRVVTAAEAVA

SEQ ID NO: 94953 - protein, 348 aa, unidentified
MDKVVAGMDLHSNNVVIGIMEMSGKRLASRKLACDLKEVVKFLAPYKKRLERAAVESTYNWYWLVDGLRALKYPVVLANPAGMQQYSGIKHADDTNDAFFVAELLRLNILPTGHIYDPRLRPMRDLLRRRMMLVHHRSALMLSFKSLYTRTTGQEMTLSRLKELEIKEAQGLYEHPANQLIAGMQIQHIDQLSESIEKIEKVVLASARELPCYAKLTTLPGVGRILGMTITMEVGEIERFASPGDFASYCRAVEAKCTSNQKKKGENNSKCGNRYLAWAFVEAANFARRYYPQCRQWYDRKAAKTSNVIATKALACKLAKAAWSVMSTGSDYDPNRMFGPMAKSKMKA

SEQ ID NO: 94954 - protein, 456 aa, unidentified
MRRKQFPSSAPEEIPDADFELVCQRVAAIDVAKAFGKVCVRTPGPTRRVSKVWDVEATCGAVTELGETLATSGVEKVTIESTSDYWRIWYYLLEAAGLSVQLVNARDVKNVPGRPKTDKLDAVWLAKLTEKGLLRPSFVPPAPIRELRDYTRLRVDLTRERTRYWQRLEKLLEDAAIKVSTVASKLSTVSAREMVEALIAGERDPARLADLARGRMRMKRAELIKALDGRFDDHHGELARMLLGQIDALNAAIATLSTRIEDLITAIDPGPGPDGPGGSSEPGGHDGSPAGGDWMPAVERLAEIPGISTTSAQIILAEIGMDMTQFPTAAHLVSWAKLCPRAISSGPVTRTGRTGKGNPYLKGALGEAAAAAAKTDTFLGERYRRLVKRRGKLKSQVAVARSILVVIWNLLSDPTARFHDLGSDYHTNQISTERRIRNHVAQLSAMGFHVTIEPAA

SEQ ID NO: 94955 - protein, 355 aa, unidentified
MSSEKYIGLDVHQATISVAVMDSQGKVIMESSLETKASTILEFFAGLHGSLFMTFEEGTWAAWLYDLLKPDVTEVLVCNPRKIPLVKGGNKSDQIDARKLAERLRLHDLKPVYHGETGVRMLRELARSYLTVVKDLSRVMNRLKALYRSWAIPCAGRDVYYRRHRSQCLEKIPEAGTRRRAEQLYQQLDLLQHLRQQARRELLAESRQHAITAKLRQIPSLGPIRSALAVALIQTAHRFRSKRQLWTYSGLGLETRDSGEYHFVKGQPRRRKKQATIRGLNKDYNHDLKGLFKGAATQASVKPGPFQEFYQRSLAKGIKPTMVRLTLARKIAAITLTLWKKGEDFDIHKLNSQAA

SEQ ID NO: 94956 - protein, 357 aa, unidentified
MSYTIAGIDIHKKVLMVVVTEVAVEELRFVCRRFGTTASEREHVVAWLQEHQVQEVVMESTAQYWKPVWLDLEPHFGRLHLAQAHSNRAPKGRKNDFGDSKRLVRRLIAGELILSFVPDAEQRSWRTMARGKLQLVRDRVRLENQLEALLEEMRIKLSSVVSQLLGLSGRRILRALAEGETDPDKLAQWGDRRLKCSKEELQDALRGQWQAMHRQMLQLFLERLDLLDRQIEQLDRMMAEAMKDHESAVIRLAEVPGFGPNSAQQMIAEVGPDVKTFPSAGEFASWIGCCPGSQESAEENHSSRSPKGNPFVRRVLTQAAQAAIKKKGSHFQAVFRHWRPTLGYNGALWAWPTSYAA

SEQ ID NO: 94957 - protein, 431 aa, unidentified
MDTLQFEVIRPKCAGLDVHKKSVVAAVCTSDPVTLTASYKTKVFNTTNSDIAALRDWLLAQDCHDVCMESTGKYWIPIFNILEPHMHVILTHPKYVKAIKGKKTDKRDAKWIANLFRFDIVKASFIPPADIRALRELSRYRLKLSYMRTAEKNRYQNSMTISRIRIDCVLTDPFGLSATRIMDYLLSDEPFDEEKCRSLIDHRVKASKDEVMDAVHGYHILEEQKFKMTHAKAHMDFINKTIDEIEAELFLRSRQYDAQIKRIATVTGITELSALFILSEIGADMSVFESDRHLCSWAGLTPANNESASKKKSTRCSKAGQYLKPLLVQCAVAAVKSKKEPYFAIKYQRLAKRRGKKKAIIAIARMMLTSIYHMLSDNENFHPDDYEATVHPPKQKPVVLTLDNTLQFLREQGADPETLKLIQQQCAAQAG

SEQ ID NO: 94958 - protein, 355 aa, unidentified
MNGLRYIGLDVHQDTVSAAVLDGAGKLLMQSVFATRAVAILDFLHGIKGTLHVTFEEGVHSAWLYDLLRRRVARVVVCDPRKNKLLKSGNKGDLIDARKLAELLRNNSLSPVYHGGMSALEVQHRTRSYTMLTEDTTRVMNRLRAVFRSQAIRVHGRKLFRSDLRESHLAQLATPGLRQRAESLYRELDALHPLRLQAKREMLAECRKHPAMKWLRSVPFLGKVRTAVLIGRVQTPHRFRTKRQFWSYCGLALETHDSAEYRVLHGQVQRKSRPAQVCGLNWNHNHELKGLFKSAATMAAFRKGIFREFYSGLLAKGIRPEMARLTLARKIAAITLKIWKEGETFNAEHIKPQAA

SEQ ID NO: 94959 - protein, 345 aa, unidentified
MQVTTMGIDLAKNVFQVHGVDASGKVVVRKALRRSQLLPFFEDLAPCLIGMEACSSAHHWARELNALGHTVKLMPPSYVKPYVKRGKNDVADAEAICEAVTRPTMRFVPVKSTDQQAVLMLHRTRALLMRQRTMAVNALRGHLAEFGLVAAQGGKSLAELIESVFEGSGTDDDAVPPLARRALAPLVAQLRQLQAQVKAIEVELLAWHRATDASRRLETIPGVGFITATAIAATVTDPSHFTSGRQFAAWLGLVPRQNSSGGKERLGSISKMGDRYLRTLLVVGATSVMRYARSKNAAGAQWVNALLARRPARLVSVALANKTARIIWAVLVRGETYRAPASAAV

SEQ ID NO: 94960 - protein, 416 aa, unidentified
MAKTDRVVTGGVDTHKDVHVVAVIDERGEILDTASFQARASGYRELVSWLRSFGKLARVGVEGTGSYGAGLARHLANAGIEVVEVNRPNRQARRRRGKSDTVDAEAAARAALNGEASVVPKAQRAVVESIRVLRVAFTSARDSRTRVALKMRDLIVTAPDCLREVLEPLNTDERATRCARFHVAGDLADPLLGTNLALRTLARRYEALSTEMAELEARLDELTARANPALRGANGVGPDVAAILLTAVGDNPERLRSEAAFAALCGVSPIEASSGKTVRHRVNRSGNRQANQALWRIVMVRLSIGDPATKAYVERRRAEGKSLREIIRCLKRYVAREIYRHLVRPKPVPTGADLRVARRAAHLSLQSVADALHSWPSRISELERGRKHDAALAHRYMAWLLAHGEDPPNMGCSFAV

SEQ ID NO: 94961 - protein, 368 aa, unidentified
MKKRITFVGLDTHKNSIEVALADDGRNTEVRLYGSIGGDLASLDKMIRKLQATGTELRFVYEAGPCGYQIYRHLRAQGLQCDVVAPSMVPKRSGDRIKTDRRDACNLARLYRAGELTAIYVPQEDDEAMRDLVRGRQDAINAQRKVRQQLGGFLLRHGFRYPGKCAWTLTHRRWLAGVRMPHPAQQIMLQEYIHSVEECTQRVHRLTEQILQLMPDWRMRPLVGALQALRGVAPVVAATAVAEIGPMGRFERPRQLMAYLGLVPSESSSGGSVRRGAITKTGNGHARRALIEAAQAYSHPARISRVMRKRQEAVPEPIRQIAWKAQLRLCARFRKLTARGKSRNRVVTAIARELSGFMWAIAKQVPVP

SEQ ID NO: 94962 - protein, 379 aa, unidentified
MQSIKTKAGIDVSAKTLTGVRRRGGEEEEKEFANDGVGHRQLLKWVGHAARVCVEATGVYHLQLALTLRAAGVKVMVLNPRVAKDFARALANRSKTDMVDVWTLLEYVERMEFVAWAAPSEAVLELRELGRRLKELVEAAVVEKNRLHAKTVSGLSKTVVTDVKAHVGHIEKRIKQIETAAVEVVESDADLDEQFQILRRIRGVGRRSAIQLLTELAVLDPTMSVKQLVAYAGLDPRRYESGTSVEKPARISKIGNARLRAILYMNALSAIRHDRGARLFFARLVARGKKKKQALVAVMRKLLHGIWIVLQRRVAFESSVLFAASLAQAESSDSAVAATKPEPGQGHPKGRSAAEELRQQLDPGSAEATRSRKNKSKAA

SEQ ID NO: 94963 - protein, 367 aa, unidentified
MAGDSSMRLGSMRPFVSQGVTRSSLRARTVARGLDPASRKAGPGRGPSRVEALMTGPAVCVGIDVSKATLDLALRPTGERWTVANEAAAIEALAQDLRPHAPSLIVLEATGGFEHAVVAALAAAGLPVIVANPRQVRDFARATGQLAKTDAIDAEVLALFAERVRPEPRPLPDEAAQALDALLTRRRQLLDRLVAEKNRLGFARAVVRRGITQHIHWLERRLGDVDHELGQMIEQSPVWRATDDLLQSVPGVGPVLSRTLLGELPELGRLNRKQIAALVGVAPLARDSGTLRGKRMVWGGRAPLRAVLYMGALVATRWNPVIRVFYQRLRAAGKPKKVALVACMRKLLTILNAMARTGTSWRLGAAT

SEQ ID NO: 94964 - protein, 350 aa, unidentified
MRTKPDPQTAAFGIDIGKKVFHVVALNAAGAVIQRAKFSRDTLMAFFDAAPKALIGMEACPGSQWLARRLTAMGHDARIIPARFVKPYVKSNKTDTVDAAAIAEAVTRPTMRFVEVRTPEQVDLQALHRIRDRLVGQRTALMNQARAFCLEYGLAMRVGGGGFHADIRRHLANAENDLTPAMRVLLEELLDDLAHVERRIKTVNGKVEAYASQHDAVSRLVTIPGIGALGATAIVAAAGDGRQFRKARDLAAWLGLVPAEHSTGGKQTLLGISKRGNRYVRRLIIHGARSCFLHLNRANHALGGWLSALEARTHRNKAVVALANKLTRIVWAILTRPGTVYLQSKGAAVS

SEQ ID NO: 94965 - protein, 384 aa, unidentified
MVKKSKRRCDTLPILHPDAAGIDVGASELYVAVNADRDPQPVRCFPTFTRDLHALADWLVQCGIRSVAMESTSVYWIPIYQILEERGLEVYLVNAQHVKNVPGRKTDVSDCQWLQYLHSVGLLRASFRPPGFICAIRSLWRHRASLIQMAAEHVLHMQKALDQMNLQIHRVLNDITGVSGLRILDAILAGERDPLTLARLCHGGVKSSEDVIAKSLEGDYRPEHLFALRQSLAAFRYYQQLVLEADREIQLQLAELETAPTAQPTTPARTKPTAHYARHYEPRTFDLRDELYRVFGVDLTNVPGISALTAQTILCEIGTDVSRFRNASAFASWLGLCPEKKISGGKVLFTKSRRVRSRVATALRMGAQSLHHAKDYLGNLCTGA

SEQ ID NO: 94966 - protein, 367 aa, unidentified
MKKHTTMNKPVSATDVSVCMTVAVDLAKKVFQVAGEDAQGQLAYEQRIKSREAFQVFLQKLPEGVTVLMETGPGAQAWARLLQAQGNPVRILPAQRVAEHRSGAKNDRNDAHAILRAGRDSSIASVPVKSVAALAMQAWHRVRRGYVRRRTAMGNQIRGLLLEQGIALAQGDVGLKQGVTRVLEDASQPLPALLRELIDEMLNEWKRLGERIAALTGRLEACAAADPTAKRLMTVRGIGPITATALLAKQVEPERFANARQFAAYFGIVPDQHSSGQKVRLGKMTKRGDAYVRSLMVVGSHAVLKQLRPDSEHPDDRRLQRWLQRLGRKGAAVRLANRNLRIAWVLLCSEQTYQRKPNACREMEMSH

SEQ ID NO: 94967 - protein, 343 aa, unidentified
MKHTTIAVDLAKSVFQVAISHRPGRVTKQHRLSRARFLPFFSQQPPAVVLLEACGSAHHWAREIRSLGHTPVLLPAHDVHRYLHGNKTDSADAKALLEAFRNEQVHPVPVKSVDQQALTALHRLRSASLATRTARINTLRGILREFGVVLPMGAKRVLPALRAILDDHSSVLPLPLRIELEEAGLEIRSLEERAHSLERHLQTLAGRLPAVQRLLTVPGIGPLTASALVAFVGDVRRFPSGRHFASYLGLTPREHSTGMSRRLGRITKRGDVYLRMLLIHGARAVLWAAKSKKDPDRLRAWALNIERLRGHNKAAVALANKMARIAWAVWKKEQNFEEVPIAA

SEQ ID NO: 94968 - protein, 331 aa, unidentified
MDHCAIDLGGRKSQVCVRSPDGRLLFEGPYDTHSLPEFLRLLPRSRVIVETAAEAFRVADAAKEAGHEVRVVPATLVRSLGVGARKTKTDRRDARALSEVSCRIDLPSVHIPSARSREWKAICGMHDALTTARTKLINNLRGWLRGQGLRIGKGKAETFAERMAKFEPLPDYVRSQVEALAALTEKIRGSDKRIEALAKDELCQRLMTVPGIGPSSAVRFVAAIDEVARFESAHKVESYLGLVPGESSSSERQQRLSITKAGSSSVRWVLGQAAWSLQLRCQDPGARPLQLWAAEIARRRGARIATIALARKLAGILYALWRDGTKYEQRP

SEQ ID NO: 94969 - protein, 349 aa, unidentified
MRFYNQPHRFYCGVDLHARILSLCILDSAGQTVLARTLAAGPDDFLQAVAPFRDGLAVACECMFAWYWLADLCHEQQIPFVLGHALYMKAIHGGKAKTDKIDAHKIAVLLRGGMLPQAYVYPKGMRETRDLLRRRTFLVRRRAEALVHLTNTNSQYNQPPFAKKLAYAANRAELDVAQRFTDPSVRKNVEVDLALIDTYDRHIGELELYLVRTAKVDDPQAFHRLRSVPGIGKVLALILLYEIHDIRRFAEVGQFLSYARLVRCVHESAGKKQGSGGNKIGNAHLKWAFGEAACLFLRESEQAKKWLARREKKHGKARALGTLAARLGRTVYHLLRKQEAFDAKRFFAT

SEQ ID NO: 94970 - protein, 407 aa, unidentified
MNPLYVGIDVSSKNNVIYLMLPNGDKHSSFSLANSHDGSTQLVKRIFTAMTSNNIDSVLIGLEATSVYGDNLVYFLKEDTTLASFDRKIHVLNPKQVNKFKESYNDLPKNDYVDAFVIADCLRFGRINKEVYMDDYRYKALQNLTRARYFAVTNLTKEKQRFINVLFKKYSTMTQEKVFSDTFSTTALAVYEKFESAETLAKMDLQELTAFIMEKGKNRFPDPDAVAKALQKAARSSYRLPKTVNDSVNQVLAISITSIRALESQIKAFDKAITKQMELLPNVLISIPGIGPVLSAGIMAEIGDINRFQNQAALAKYAGLAWQQHQSGDFEAQTTRMIHSGNRFLKYYLCEAAFSLVRCDKEYSRFYHLKKEVNRFQHKRALALTARKFVRLVFALLKDNRLYRPAE

SEQ ID NO: 94971 - protein, 349 aa, unidentified
MTMIGGLDVHRQQITFDYVDSDGLVRWGQIRPATRKSLRGWLAEHCPDGDAEFALEGCTGWRYVSEELAAAGVVAHLGDPAEVAGLRGRKKRAKTDRADARLLRTLLLQGRFPESWIPPAHVVEVRTLGRLYCALMDERRAWQQRIHAQLFHQGCPPITALLSVAGREGLARAELSAVGRQYVDTALRRVDELTTEIDPLRAQLVNFARHQQGCQVLQTRHYGIGWLCAAIIWAEIGDARRFHSSDQLVRFAGMDVTVYSSDTKRSPGHLSRQGSPELRWATFEAAKSAARRGSPDYAYYHELAAKHDGRNGKNPTLAVERKILRRCYHTLRELGDAALIPPQLVREAA

SEQ ID NO: 94972 - protein, 346 aa, unidentified
MKHFAGLDVSLGETAVCVVDEEGRIAKEARVPSEPEALAAFLLGLGLTLERIGLEACSLAAWLHEGLVAAGLPAVCIETRRAKAAMGAMPNKTDRNDARGIAQIIRTGWYRAVHVKSPASRSWRALLAARRLVLNKMRDVENGLRALLREAGLKLGTPGRKRFPERVRELAAADPVVSALAEPLLAIAATMARELAQLTRRVLAIARDEPVCRRLMGVPGVGPLTALAFRATIDEPGRFRRSRDVGAHLGLTPKRYQSGETDVQGGISRCGDELARTALYEAAHSLLVRSRKWSSLRAWGMRVAKRRGMARARVAVARKLAVILHRVWADDAEFRWGKEDTALAAV

SEQ ID NO: 94973 - protein, 392 aa, unidentified
MFYIGIDVSKDKHNCFCCNDNLQPVFQFQFNNDSIGFKQLFEAIKSLDSPFDNIKIALETTGHYSYNITSFILDNSLPLAIINPLHSNLFRKSLSFRKTKTDKVDACVLARMLIAYPDLKFSTSLDDNDIILSELKSLTRFRLSLVKDLSKLKTSLSRIINIVFPEIEKVFSSTNSLYELLYNFPSAKEIANAHLTKLTNVLIKASKGHFSKEKAVQIKKLAQNTVGNSSYALTLELKHTINLINEYNYSIDKIDKEITTIMDKIASPITSIPGIGITLASIIIAEIGNFDNFDSPDKILAFAGMSPTIYQSGKYVASSAKMEKRGSKALRYALYNAARLTSIYCPVFKEHLARKRSQGKHFNVAISHVVKKLVRVIYHLQTKNELFKNIIN

SEQ ID NO: 94974 - protein, 356 aa, unidentified
MTALETARSGHVVIGIDTHKHIHVAAVMDTIGGILATLTITTDQAGFKQVLEWGASFGKILALGIEGTGSYGATLTSFLRRHGHKVVEAGRPDRRSRRVNGKSDTLDAENAARSVLAGFATATPKTADGTVEMIRQLKIAHDSAVTERSATMVTIKAMLVHGADELRRETSRKSQIMLARHLAALRPRALDTPDDALRHSLRSLARRWQNLDAEAKELTAMIEQLVTNTAPQLVEQFGIGIDTAAEILIVAGDNPERIRSESAFAKLAGISPVPTGSGMTSGRHRINHGGHRQLNAAIYRTVIVRMRFHEPTIAYVARRTAEGKSKREIIRCLKRYVIREVYHLVKANPTTGEIGS

SEQ ID NO: 94975 - protein, 335 aa, unidentified
MKKYLVTVGIDVSKLKLDVRFVFDINSKEHPHIIVANNEEGIRAIIAFLKTKKVQTCDALFCFENTGLYSMPLAIFFSKHQLDYWDIPAIEIKRSKGIARGKSDKIDAKDVAFYAITHSYQLKLCQVPEQDILKLQLLYSEREKLIKALHAMQASTEVASFLPKEIIKEVIAINKKTTAHLKASLKQIDERIAAIIKSNQSINTCFDLSVSVPGVGKQSAVYLIIKTRCFSRFDNWRKLACYAGIAPFEYSSGSSIRGKTKVSHLADKKMKSLLNMAALSAKKNDKEIGDYYKRKTDEGKNPMLVMNAIRCKVLSRVFAVINRQTPFVNTQKFAA

SEQ ID NO: 94976 - protein, 341 aa, unidentified
MMIIGCDFHPRFQQIAFVDQETGEYGERRLNHPGEAEQFYRSLAGRQVRIGAEATGNFRWFRHLMQELGHEFLLGDASAIRAACPRKQKTDKRDARHILTWLVEDRFPVVWQPPAKNDHVRQLLLHRCRLVRMRTRIKNQLDSIAKNEGLLSSRVWSPKRRSEIEALPLPGWYAHRRADLLGLLDELDKRIRPLDEAVHEAAEDNQEARLLMTHPGVGPIVSLAYVLTIGDWRRFPRGKQVGSYLGLIPEEESSGSTRRLGHVSKQGSVLVRWVLVEAAVHAQRHDASWHRQYVRLSMTKHHGVAKVAIAHKLAVRLYWMLRSGEDYSKVMERGSHAGQSV

SEQ ID NO: 94977 - protein, 320 aa, unidentified
MTYIGIDISKDSFVVAYPRKSGYTTKTFMNNTKGVRSFITSLPEDCHCVMEATGNYSMLLLYLLQQAGIPTSMENPQKIKHFSRAMMTVTKTDEIDAKLIAMYGEKMNPAPYKIPSESIILLKQKRTVLRQLKKQLTAMSNLQHSLSVLPKQDPTAKVATEQTIKFLHKQISKLEEEITNLSNKEFKRQMELLTSIKGIGESIASALITATGGFANFSSAKQISRFLGLCPTYQQSGTSVNVKGHINRNGDSHLRGQLYIVAMASIRCNTACRETYERLCDRGKPGKVALIAVANKLIRQMFAVVTYNRPYIDGYVSSLA

SEQ ID NO: 94978 - protein, 323 aa, unidentified
MSNVLGIDVGKAEIMVALLVDNKCIGKESFENNDKGFKSLSKWLKQKKISALKVCMEATGNYSNNIAEFLYKNGNEVHIVNPVCIKSFAKSRLIRTKTDAVDALIIAQYANITELIPYQPKSATFKELKSLHRCLDDLKGQCVQISNHLEHKEHVPKSVTSTWKKLLKDFKNEIKNIENSLDELFENNPELKQQRENLQTIPGIGKTTATSILAESPDLSSFKSPRQYAAYAGLVPKHRTSGSSIRGKARLSKLGSSKLRKALYLPAVVAKNHNPILKAFSNKLKSKGKHNMVIIAAVMRKLLHLCFAIIKSNSTFNPNALNP

SEQ ID NO: 94979 - protein, 340 aa, unidentified
MDITTLGIDIAKSVFQLHGTNKQDKVVLKKRLRRDQLLAFMQNLPPCLVGMEACGGAHYWARKFQGYGHTVKLMSPQYVKPYVKTNKNDYNDAEAINEAVGRPSMRFVGIKALWQQDIQTLHRARSRLMQLRNTLSSHTRGLLMEYGFVIPKQIGQLRRALPLISGDLDNELSTEMRALFAGLYEELQSVDTLISEKDKQILAIHRESELSQRLGDIEGIGPLTATAFISAVGDAKMFKRGRDCSAWLGLVPRQYSTGGKTILGSISKRGDRYLRTNLIHGARSVISRADNKTDARSRWIQQLKSRVGMNKACVALANKNARILWAIMASGERYRASGQV

SEQ ID NO: 94980 - protein, 315 aa, unidentified
MTNPVFVGVDVAKEQVDVAVRPSGDRWSAVNDEVGITALVARLRPLAPALIVCEATGGFERAAIAALAAAGLPVVVANPRQVRDFARATGQLAKTDALDAGMLALFAERVRPTPRPLPDAAAQLLDAVLTRRRQLLEMLVAEKNRLGFAPKPVHRGIQAHIRWLERQLDEVTKELAGLIEASPVWRAKDDLLQSVPGVGPIVSYTLLGELPELGTLSHKQIAALVGVAPLARDSGTRRGQRLVWGGRASVRTALFMAALCGRRWNPALKQFYERLKAAGKPTKVALIACARKLLTILNAMVRDQSHWACHVQYSC

SEQ ID NO: 94981 - protein, 355 aa, unidentified
MVMLAENYDFVIGGDPDRDTIDLAVLDTSAGRVQAHLADSADGPGYNRMLTWAGEHAPGRRIWALEGTGSFAAGLVVVLLDAGETVVEVGALKRARGAKNDRIDAIRAARQALARDEQGAPRAGGLREALRMVFACREGVLVSRTKAINELKSLIVVAPEQLRAELRGRSLAVQLTRIEALQAPPAAPVELRLSVFSLQSITARIRFLSTQLAGLDPQLLSLIKQHPAGPALLAEAGVGPVVAAQLLISWSHHGRVRDEAAFASLAGVSPIEISSGQRSRHRLNRGGDRALNRALHTVAITGLRCHPESIAYEIKRTAQGKTHRDIRRSVKRALARRLYRRIEAAIRLENTSVAA

SEQ ID NO: 94982 - protein, 427 aa, unidentified
MSEVEWVSQEPHFAAFVGIDWADQKHVWCLQAAGSEKRESGELEHTPEAVEAWVGQLCQRFGNRPIAVAVEQSRGALGFMLAKYEPLHLFPVPSTMAANMREALYPSGAKDDPRDADLLLDLLLQHRDKLRGLSPDTEATRRVQNLVEERRKLVDEKTAQINRLTSHLKIYFPQILDWFEHLDTELVCALLEHWSTLEELQKVPPAKLRTFFRKQHCRDQELIERRLLAIRQAISAIRDRAVIEAKSSVVKVIVQIIRSLGKGIADLDEKIEEAAAAHPDFFIFESLPGAGAVIAPRLLAAFGSQRERYGNAGEVQSYSGIAPVTERSGKKKWVHSRWACPKFLRQSFHEWAGHSIAYSVWARSYYQQQRSKGQDHHAAVRALAFKWIRIVFRCWKDGVAYDESKYLASLARRGSPLAALAATAKTL

SEQ ID NO: 94983 - protein, 417 aa, unidentified
MIDDVQWFVGIDWATQSHRVCLLDVEGRHVNERDFAHGGAGLTELRDWLLEKTKAAPGQIAVAIETPHGPVVEMLLDHGFLVFAINPKQLDRFRDRFTVAGAKDDSRDARVLGSAVRTDRQAFRRLVVDDPVVIELREWSRIADELQQERTRLANRVRQQLWRYYPQATELTDDVADDWFLVLWQQVPTPATAAKVSEKTITRILKDHRIRRLDAATVLQTLRQKPLFVAPGTTEAACAHIRNLAARLRLVNQQIKEAHRSLDGLCAKLEARESPSGQNREQRDVTILRSWPGIGRIVLATLLTEAAEPLRARDYHALRALAGTAPVTRRSGKQCFVIRRHACNGRLQTAIYHWSRVAIQRDVVARRRYDALRRRGHGHARALRSVGDRLLYALCTTLKRQTTYDPNCQATQITASL

SEQ ID NO: 94984 - protein, 424 aa, unidentified
MKNSTARKLAQVPAGYLLVGTDPHKKQHAVVIMSQDAVIKRKFKFTNSREGFTEVMQRIAEEVTKTGSNGAMFAIEAGSHYWRNLAYYLDQQKVLFRLVSPFTLKRRREGEDLNRRKNDYRDAEMAAELLRTGKFMNNRLLYGIYAEIRAAYTNYQRLVEDKTAQINLLKSRLDNLFPEFTTIFKDPCGKTAMAVLAQCAMPKMIARMKLADFIQIVKLGFTGRGLQIRKLLALQAMAAGSIGIDEGAMAISQEISLLVAHIQLLAAQIETVIKGLIELVNSLPESRYMLSIQGLGYLTVAGILAGLGPLSNYTNGRQLIKMAGMNPTQKESAGKSSRHTPISKQGRSSLRWCLWPALVALLRHNADFRTWAKARQERAANAHPLHRREVIGAAINRLLHLVFALVKKQSFYRIPQAEVALVAN

SEQ ID NO: 94985 - protein, 316 aa, unidentified
MSATPVFVGIDVSKASLDIAVHRPATRWTVDYTEAALTPLGARLTALAPALIVLEATGGLEVPLVGALAVAGLPVVVVNPRQVRDFAKATGQLAKTDALDAAVLAHFAAAVRPPVRPLPDAATQGLAAVVTRRRQLVDMLTAERNRLSCAPPVLRTELQAHIRWLERRIAGLDTDLDQAIRTSPVWRAQEDLLRSTPGVGPIVARTLLAQLPELGTLSHKTIAALVGVAPLNRDSGLCRGRRQVWGGRAAVRAVLYMGTLAAVRFNPVLRAFYQRLRAAGKLPKVALTACMHKLLTILNAMLKHQRRWDPTHAQAH

SEQ ID NO: 94986 - protein, 355 aa, unidentified
MSNLSVMPNMLGIDVSKNKLDCTLLEAMTRKALWQCQVPNTTQGITQLLDRLDRLPTSDSLASPVSLVLEPTGRYSRAIAQRAHADGKTVLLAPPRRAHAFLQSVQSRAKTDTLDSRSLALFALSQPLRPYPIKSDAVEKVDQLLSARKGISSALTRLQMQRKELPHAAQALDAALLALKTQKAVLDKQIAARVGQEPSLSPTATRLQQVPGIGPITAAAVTARLADKQFLHPDSFVSYIGLDVAVRQSGQKSGNLGLTHQGDAELRRLFYLAAQSNLRSKDPDNPFKLQYERERAKGLSTTAALCAVARKLAKLCWSLHKHQSEYDPARVAQQGGRRPKQSQGELKDAPQSSTP

SEQ ID NO: 94987 - protein, 347 aa, unidentified
MAMTIVETRAITGGVDTHLDVHVAAALDPVGGVLGVESFLATRAGYAELFEWMRDFGPVTRVGVEGTGAYGAGLARFLRSAGVEVIEVDRPNRQARRAHGKSDPADAVEAARAALSGRARGLAKSADGNAEAMRALLVAKRSARETRIKALNQIRHLSFTAPDELRERFRSVRSDVLAPHAAALRPRRDGDPVLYATKVSLQTLGRRVLALEVDDTRMDALLAELVIATAPSLLEIYGVGIDTAAILLVTAGDNPERIRSESAWAHLCGVAPVPASSGKVTRYRLNRSGNRQANHALWRIVLTRMSGDARTRVYVARRLHEGRSKPEITRILKRYVAREVYRHLPRG

SEQ ID NO: 94988 - protein, 415 aa, unidentified
MLKIVYPICCGLDVHRDFVYACIATTVNGVTTYKSHRFSTFTKGLRELLSWLLASNCKDVCMESTGKYWIPVYNILETDCKIVLAHPKYVKAIRGKKTDKKDAKWIADIFKHDLVSGSFIPPADIRQFRDLVRYHAKLTNFTTGEKNRAQNCLTVSNLKLDSVFSDVFGKASSKIISHILANPSEKLSDVSAFRTKGMKATDEEILEAVDGEIYPEQAEKLRIIRDHMSSLDLCKANLQSLILSTAEKYIPEIDLVCTVPGIATFSAISVIGEIGVDMSVFPTSKHLCSWAGLTPQNDQSAGKKKTTRISRAGAYIKPLLVQCALAAVKSKNKHPEVYNRYSALKKRRGHKKATIAIARMLLTAIYNILKKHEPYNAEIYRKSDAPPEHRNVSVEEAIFILQRQGYLISSPVSIE

SEQ ID NO: 94989 - protein, 342 aa, unidentified
MEKITTIGLDLAKNVFQVHGADTDGAPVLRRKLRRTEVLVFFEKLPPCLVGMEACGGSHHWAREIAALGHEVRLIPPAYVKPFIKRGKTDAADAEGICEAVGRKTMRFVPVKTAEQQGTTMLMKTRELLVRQETQAINALRAHMHELGIITGKGAGKVSDLISIIRDPEDRRVPPVARFALGTLSDQLEALGAELGKLEKAIVAMVKQDPDMQRLATIPGIGPITAASIKALVPDISGFKSARHFAAWLGLTPKPHSSGGKERLGRISKMGNPTLRNLLVLGAMSVLRRAKNAESAPRWIAGLLARRPAKVVAVAMANKAARIAYALLTKGEVYRKSPVSVA

SEQ ID NO: 94990 - protein, 394 aa, unidentified
MKLIGIDIGKNKHFFCIMDQQTGEIISQPVSFSNDKEGFDFLVQKIKSYPKDSILIGMEDTGHYHFALLKYLLDLQYTVALINPKTTVFNRKIQGGITKNDKLDTINICDVLDTPERKKQYRITKVNSFDLYEQKQLTRHHHNLKEEENVYKNRLQKCIDIVFPEFNNLFNSKYGTVYMNILKMFGSAENIANTDIRTIRKCFEIEGRGNRISLTPERLKECAGSSIGISSSAEVIQIKHLTAQIELIEEQLTEIDKKIEEFSIQNNSPILSIPGISHFSGTSILAELGDISNYSKPSQIIKFAGVAPLHYESSQFNAQHTAITKKGSKYLRKTLYQIILPVIRHNPVFNKYYQLKISQGKGHRCAQGHCVRKLLRIIYHLLKTNQQFDPQLLR

SEQ ID NO: 94991 - protein, 350 aa, unidentified
MEVHTIGIDLGKTLFHLVGVDASGAVVIRKRCSRTQLLAYTSNMRVHRIGMEACSGAHFLGRALREQGHDVRLMPAQYVKPYVKTNKSDYIDAEAIAEAVQRPTMRFVPIKTEEQLDLQAVHRVRERWVMRRTAVVNQVRGLLLERGLTLPKGRSHVGHALPEILADTQSKLSDSFRVVLAQLKLELDQLTARIDEMDRVIRNTATEDEACQRLTTIPGIGPVTATALFAAIGNGAAFRKGRDLSAWVGMVPREYSTGGKQKLLGISKQGNSYLRRLFVQGARTVMQHRTKQALGLRCWLDQLLARSHQNVVIVALANKLVRTAWAVLRKNETYRCPVPLSSSCDSGVSG

SEQ ID NO: 94992 - protein, 357 aa, unidentified
MRFYTGQHQHYCGIDLHASTMYVCILDTAGEIRVHRNVKSNPAAFLEIIAPYRDGLVVAAECTFTWYWLADLCARENIPFVLGHALAMKAIHGGKEKNDKIDSHKIAVLLRGGMLPQAYVYPAAMRATRDLLRRRLHFVRKRGQLLAHIQNTIHQYNLDPFGKRIAYPANREGLLEHFPDPAVRKSVEVDLALVERYDALIADLELTIVRNAKRHDADAFHRLRSVPGIGKILALTILYEIYDVSRFDRVQQFASYGRLVKCVHESAGKKLGTGGSKQGNVHLKWAFVLRRRAVSAPRRRRQEAARAARAQARQGQGALDPRAQDRPRRLLHPRARHGVLAGEVCKRMTSRAGEPVV

SEQ ID NO: 94993 - protein, 429 aa, unidentified
MSEEKAIELRVSVDVGSRRHSVAMGLSSGEVLEEFEIEHRPEGFTEFFSRIEKHQKTKSCAVAVAMEGYNGYARPLDSMVRQHGYRLYNLNNLKFARFKEIFPGGAKSDRIDARKGLELFQLSDHLPLAKEVLQEVKGTPQENEILKRLSRRRRRLVNERVRMVNGLQADLQAVCPGLLEITAEASNQWFLNFLLSAQTLPQLSRLRHSTLMKIPCVGVKCAAKIEGWQKRAHFSDEVEWVGEMIQEDARRCLELDEKIKRLRNKIAEIAKDSKIAKTLRSIPGFGAVCTSELAGEISTVERFTSEGSLALYLGMATLDNSSGKYQGTKAPKQVNTRAKAAMMIGVDRHRKYVPESQQYYEKKRAEGKKHNQAIRALGRHLCRIIYRMLKDEREYEVRPGKGNTKTKVGPTACVKTQIRRPKISGKKKK

SEQ ID NO: 94994 - protein, 388 aa, unidentified
MLLGAEPNDVATTIRWDIAAIFVSLELSRSKWLVTSLSPGSGEKMSKHMVDAGDSRALLALLGQLAAKARARMGRDFRVVTIQEAGLDGFWLHRLLEAQGIESHVVDPASVAVSRRRRRAKTDRIDNEALLRTLLAYKRGEPRVCSMVRPPRPEEEDRRRLIRERKTLIGERTQHINRIKGLLFAQGIADYEPLRRDRRARLSDLTTGDGRALPAHLAAQIGRELDRLELLIVQIKAVEAERDAVLERERGSCPSRPAMLLELVGVGPEFAAVLWGEGLFRDFDNRKQLAAYAGLAPTPWQSGRIDREQGISKAGNPRLRTTMIQLAWLWLRHQPASALSQWFHQRVASNAGRYKKPTIVAMARKLLVALWKYVTAGVVIDGAVMKTA

SEQ ID NO: 94995 - protein, 597 aa, unidentified
MSLHPAAIAQATGPLPARIGVGIDTSRYGHYAAFLRDDLQPAAAELPFAESAAGYGQLRQRLEDLARRHTATTFVVRVDAAGQYADNLLHFLHQLRQPAEQQAGAIPGADFSISCGDPQRNKNYRAALFGSKKSDPVEARAAAHFAISQRPAPTPMLPTTLRTLRHVAARLQAAVRQRTRLINQFHHLLALTFPELALLVKDVSQGWVLELVQRYPTAALLAAASADDLGGIPYLPDKHIAALLEKARTSVASLCDATTAELVRDQIRQLRDVAARQKRLESLLISAYRGLPKTNHLATIPGIGEVTAAVLTAYIFDIDRFETPGKLVAYFGVMPIEMSSGVDRDGQPRGSRRYVMSRRGNDLVRRYLWMAGLSAVRCNPAVKALYRRVVAQHPDHKAIAIGHAMRKLLHLVFALWKSDKPFDEGHYPWDRPAHDTGGSEAAANRPVGQEATTSQTAGHKPESKPAEKVVTAVCEATVAAEQPDSEGIFVDFAHLKRQLSLVQVLEHLGLSSRLRGSGSQRRCACPLHRDDARGRSFSVNLDENVFCCFDKRCGKHGDVIDLWAELHHVSLREAAIDLVATFGLEPAAKRGTEKRDC

SEQ ID NO: 94996 - protein, 352 aa, unidentified
MSETAHSAIAVVGIDIGKNSFHVVGLDQRGAIVLRQKWSRGQVYARFANMPPCLVGMEACVGAHHLSRRLRLLGHDARLMPAKYVRPYSKGQKNDFRDAEAIAEAVQRPTMKFVATKTADQLDLQALHRVRERLVSQRTGIINQIRAFLLERGIAVRQSPRYLRSALPSILATPTDDLSPRMVRIVEDLAGDWRRLDDRIEGLSAEIEELARKDCGCERLMSVPGIGPIISSAMVAAIGAGDVFSKGRDFAAWLGLVPRQISTGDRTILGKISKRGNRYLRVLFVQAAWVVLIKPKSWERYGLKPWIEAARKRLHRNVLAIALANKLARIAWSVLARGRSFEVRSTVPAPSV

SEQ ID NO: 94997 - protein, 331 aa, unidentified
MFPVGIDVSKNTLGLCMLYDGIKGRIKTRNIQNNRHSVENILRWLRLQHCSPEDVHVVMEATGVYHEQLATELHDAGFRVSLANPHRSREFARGMGIMTKTDKVDAYMLACYAFLKKPHRWEPPAPEIRYLGALLRRRDVLLGDALREENRLEKYLSTDTPADIISSCRRMAQLLREEISNIERQIKAHIKASPALRRDYTLLTSIKSVGPQLGMHMLIVLRSHNFVSAEQAAAFLGVVPIEKRSGTSVRRRPRMSKIGPPQLRAKLYMSALCGKIYNKRMRNIYDEMCLRGKPKMVAIGALMRKLVHWCYGVLKTGTVFNDEDLKPVLST

SEQ ID NO: 94998 - protein, 326 aa, unidentified
MKKSNENKLVGVDISKKTFDVYCLDAKGQAVQRQLPQSSKGYRTLAGLIGPSAVCVMEATSTYHLPLAQWLYDHGIRVVVENPLKIKRFSQMHLQRHKTDKADAKMIYEYGTVIVAKNIVLWRPQSTRIQELQQCDSLSQRLNKELTAITNTHEALAQLSVVNAEVTRIVSSTIKQLKEALRQLDKQMQALIKEHYCENYKLLMSIPGVGSKTSVMLICQTDNFTKFDNVKKFLSYIGMSPRTYESGTSVKGKGHITKVGNGRLRSLLYMCSWTAKRTNPQCVAVYEKMHTKGKPEKVIKVAIAHKLLRQAFGVIKHQQPFSMQLA

SEQ ID NO: 94999 - protein, 344 aa, unidentified
MSKLDTCGIEVSAKELVVALRREETLEPLRSFANTAEGHQALIRYLRRAGGVVRVCLESTGLYGLDLALALSAQEGLEVRVANPRAVRHFATALMKRSKNDQIDAGVLEQFAARLPFQPWQRPSPVALALHALARRLSELVEMQTAEKNRQHAAELSQAIPAAIRRDLARSLRAQERAIARLTREARKVIAQEPKLAERFALLDSVPGIAETSAVQILAELAVLAPDLEARQWVAYAGLDPREHSSGSSVQKKTRLSKAGNKHLRRALYLPALVAVQHDPHLRAFYQHLLERGKRKMQALVAVMRKLLHAFHALFKTRQPFDGSKLFRLEAPPVQEVASASLAS

SEQ ID NO: 95000 - protein, 334 aa, unidentified
MQNVSLIGIDLGKHSFHVHAQDKHGHALLRKKFSRSQLTTFLSSCSASTVVMESCAGAHYMARHISAFGHQVKLISPQFVRPFVKTNKNDFIDAEAICEAASRPSMRFVAPRTEEQQAMSAIHRVRESLVRERVKTTNQMHAFLLEFGISLPRGIAVIRRLEALLEEHALPPYLARLLVRLRQHYTWLSEQIDEVEQELKNHLSDDESAQRLLTIPGVGVITASLLSTKLGDGKNFASSRDFAASTGLVPRQYSTGGKNTLMGISKRGDKKLRRLLVQCARVFMQRIEHHPGRLADWVKEQLTRHCSNVVACGLANKLARIAWAITAHRTEYSH

SEQ ID NO: 95001 - protein, 348 aa, unidentified
MRFYTNTHKHYCGIDLHGRKMYVCIIDGEGKVLVHRNIDCNPDEFFRIIAPYREELVVGVECMFAWYWLSDLCRKEKIEFVLGHALYMKAVHGGKAKTDKIDAHKIAVLLRGGTFPIAYVYPPKMRATRDLLRRRNFFVRKRADLMAHIQNTVTQYNLPKLGFDLSSESNRHEVVQLFPNPEVRKMIDIDIAMIDAYDKVLKVLESDIEKTARQHDRHALTLLRSIQGVGPILGLVLLYEIHDINRFETVQQFASYCRLVKCCHESAGKKKGTGGAKIGNAHLKWAFSEAAIHFICNNPPAKKLLENLTKTHGKGKALTILAHKLARAIFYMLKNKRPFDRDKFLATA

SEQ ID NO: 95002 - protein, 342 aa, unidentified
MNHYAGIDVSLECSSVCVVDASGKILREARVASEPEALIAWFRQSGFEFERIGMEAGPLSQWLFAGMKAAGLAVELLETRHVRKAFEAMPVKSDRNDARGIAQLMRLGWFRPVHCKSISAQETRSLLTARKLVQSKLLDVENSLRGILRGFGLKVGKTTGQTFAGRIEELVHGHPHLQMIAKALLAVRAVLRTEFAAFEKQTRRMVRSDMQARLLTSVPAVGPIVALTYASAIDDPTRFKSSKQAGAHFGLTPKKHQSGETDYTGRISKIGDASVRTALYEAANVMLTKPLKGCSQLKSWAMRIKKRAGMSKAKVALARRLAVIMHRMLADGTPFNAAAAAA

SEQ ID NO: 95003 - protein, 371 aa, unidentified
MANCIMVGCDLHMKTMVLKYAVGRGAIQSRTFANNRPARRAMVDWLNQGRCHRIADRLLFAYEASSEGFGLYDELRAAGIECYVLAPTRIARSPKHARSKNDGRDALQLLELLRAHVLAGNALPTVWVPDVQTRDDRELVRMRLDAADKRTVTKNQIQSLLKRSEVRRPALTGKGWTNLYRSWLEDMASGRVEGLGHGGRMVLSSLLRQKEAIEEEIDLLNERICVLSASPCYAAAVRHMRTIKGVATLSAMVFLTELGDLSRFSNRRQLAAYIGLVPTSNETGERHDCKGHITRQGPSRIRKVLCQSTWCLIRTDERFGKAYAALVRRHSKNRKIAIVAIMRRLAILMWHRARDAGPPTDNRERPPCVAA

SEQ ID NO: 95004 - protein, 409 aa, unidentified
MRGRRCIGLDVHRDFCEVAIWEDGKVRSAGRVAARPEALAEYAAALRPTDWVALEATSGARQVAEILGPHVARVVIANTHRLAAISESKKKTDRNDARTLAQLLAAGVLEGAWLPDEPTRALRRRVSRRHNVVVARTRAKNEVMAVLHRNLSERPPMSDPFGVAGRRWLGSLELPDDEVETLSAALRQIDFLNQEIATLERELARFVSASVEARRLMTVPGVAMITAATFLAQIGEIDRFSSPKQLVGYLGLDPRVRQSGNGAAFTGRISKEGSVLVRHVMVESAHSATRTPGPLRAFYQRVRSRRGHAIAIVATARKMVTLFWHLLTRSEDYQHAIELPTTKKLRKVELLAGGPRRRAGGPAKGPNREQRLATDRAKAQHAEDQYRQLVANRTPPGHDHPQNQDQLRT

SEQ ID NO: 95005 - protein, 340 aa, unidentified
MEKPVNLQAPTFILGIDVSKDSLDVCLIRVSDHQQLCHKLNNNPSGFRRMKAWLKQHGCEAGPETLCCLEHTGLYTRQVVHYLLARDVQVWMESALQIKRSIGMIRGKDDKVDAQRIARYALLHQHEAKCVNLSGVTLERLKDLQANRSRLLKALQSIKVTIKELIAVDPVSGKTLEQVNKKAIKGIEKSMEQVEEKMQLFIAKDDELKQKYDLLTSIKGVGKVLAISLLVYTQGFTRMDDPRKLACYCGVAPFEYRSGTSVMGRTGVSKFANKELKHFLHMAAINSVRFNEELKLYYERKVGEGKSKMSVINAVRNKLLHQIVAVVKRGTPYELKLKNI

SEQ ID NO: 95006 - protein, 369 aa, unidentified
MGKYSEVFVAFDVAKKKHAVAIAEGGRTGEVRFLGDVENSPLPIERTIKRLAGRYDRLHVCFEAGPTGYGLYRQIQALGHECMVVAPALIPKRSGERIKTNRRDAVTLARLHRAGELTGVWAPDAAHEAVRDLVRAREAAADDLRRKRQQLLSFLLRHSRIYSGGGHWTMAHRRWLASQKFEHAAQQIVFQEAIDAIEDALQRLRRLEKQLALIVPEWSMAPVVEAYQAMRGASFLVSVTFAAEIGDVRRFDTPRQLMAFLGLVPAESSTGDTIRRKGLTLAGNRRARRALIEAAWTYRYPARVSETLRARLEGLPKPVRDIAWKAQVRLCARYRRLSATGKKLPVVVAAIAREMAAFLWAIGREVAPA

SEQ ID NO: 95007 - protein, 341 aa, unidentified
MYRTKVGVDLAKHIIQVCTLNGKKVISNVEMSTDEFLCWLVKSKPVTIAFEACSTSNYWYQQAIKAGHDARLVSAKLVKAVRQNQKTDKNDALAIVQTLFLPEMSFIAGKSIEQQQLQSIQRLRELAVKHQGAAQKQIVSLLLELNIRVPNAQASLLSKLEDILEDAENGLPDIFRSTLCVAKNQLENMLSTIREYDRCLEKTIHSLPDCKKLLKLEGVGPINAVNLYIALSGELAQSFKKGKDASACIGLTAIQHSSGGQTKIGTIGKHCKNTFLRSQLIAGAMAVVIKVLSYGAKTKKELWLQGLMQRRGNKCAAVALANKTVRTAYAMLSQNTEYHAA

SEQ ID NO: 95008 - protein, 465 aa, unidentified
MQMTLGIDVACRAAHQASLADESGRFAWSGRKFTTTSAELRQLWDSVPPGATVTVVMEPTRNAWVPLAAWFRRQGATVIMVPPEQSADLRDYYSKHVKSDRLDSRLLARLPLLHPDGLRPAEGLGPAGPLRRAVALRASLVKRRTAIVTRLDSYLELLGPAWHAAFGGDLTLYTPLRFLAAGYADPHAARRLGKTRLTRLIWRWSHGAWAEDHAGRILAAAAETLQLWDTELSYPDLAEDIAAEARLALALCTEVRDLDTKIASLLRQLDPAGIMTSVPGVGAVNGAQILARLGDPARFQSLAGARSFSGLVPALAASGVYGRHGAPTKQGDASLREALFLAADHARRADPTLAARYYRLMVHEGKHHNSALCHIAPTLLTRIVACWRAGTPYQVRDTDGTPLTPAQGRAVVAERYRVSDELRARRRTSHAKTGTSQRHQESPGAPTSTRPRNTLRRPAQPLDTD

SEQ ID NO: 95009 - protein, 507 aa, unidentified
MAKAVQFKSVSTGQIKPAKQMPTVHPHAAGIDLGNAAHFVCVPADSVPAGQSPVRQFGVFNPQLDEMVEWLKQCQVQTVAMESTGVMWIPVFQKLETAGLEVLLVNTKRLKHVPGRKSDVLDCQWIQQLHSYGMLNGSFRPADIICRLRTLMRQRENVIASAGSETQHMQKAMQEMGVHLHVAVSDVTGETGLRIIDAILAGERDPKELVKLRDWRVRKSTVAEMEAALQGDWRDELLFVLGQSRKAYAFFQEQLAALDQKIIALLGEIPPAPQPPTDGSQPVNAPAPEGPMQPKAQSDSGPAAASEASAAHKASKTRKAQATKKAKRKPSKGGNPLPKDIRPQLTKIFGVDLTLVPGLNLVGVLVILSEIGTDLKRWRDGDAFAAWLGLCPGSNISGGRILSSRTPHVVNRVAVLLRLAALAIGRTDTCLGVFYRRMKAKHGAAKAMTATARKLAVLIYHLLTTREQYQEPDLKAYDERVRKAKIIRLSRQAKELGFDLVPLEQAA

SEQ ID NO: 95010 - protein, 451 aa, unidentified
MDQGNNGLSRGDRNRNARLAALRAVLPRDHAILGIDLAQSRQAAVLADHDSRVIARWRPRCSPWKLGELLDRALRKALAAGFAGITVACEPTGHRWMVIAQLAAGRGMPMVCVQPLVVARGREAEDYTRGKSDDRDAVLIARLAAQLHCYLPEQAGQAWARLRHLGARRSRLIDSSTMCIQQLRDLLEVAWPAVLPAAAEPLESATWLACLQVALERGDGDLGAVHAMGQDAFTAAARGGLGAWGARRICQRIAAAAYAALADPAQVAAQRPGAPGRAFSVLGDWRTIRGELAGVNARMLQALEAMGVLEVAGSIPGVPALQVAAILAETGDPSRFPTARAMVKHAGLAPCENSSGNHAGQAGISRRGRPTLRLAAWRAVWGALRHNPVYAARHASLTGRAEDQLTDQQARAAIAAALLRQIHAIITRRIPWDAGIAAGRHRPGQEVNAAA

SEQ ID NO: 95011 - protein, 413 aa, unidentified
MDVLHPRCCGLDVHKSSISACILLREAGRVQKHQRRFGAMTQDLRELAEWLQQFGVTQVAMESSGVYWKPVWNILERQFTVILANAQHIKNVPGRKTDQKDAEWIAQLLQYGLLRPSFVPCEIIRDLRDLTRMRASLSQEASRISSRIQKVLEDANIKLASVATNALGKSGRAMLEDIITGEDDPEHLASLALGHLRVKIPQLRLALEGKIRSHHRFLLRRLLDQMQFVEHEIALLEERLEDIGRQGQELSQAVARWDTIPGVDRVAAWALLAEVGNNMAQFPTAEHLASWAALCPGNHESAGKRLRGATRQGSPWLRRMACQCAWAAARTKNTYLSSQFRRLAARRGKKRAIIAVAHTLIVIGYHLQKDQSNYDDLGGNYFDRIHSDGLKRYLVKRLQQLGHKVTLEPIEAA

SEQ ID NO: 95012 - protein, 455 aa, unidentified
MVDEAIFILFVQEKKKSFLAAMTLINFVAANQKYYAFNLLSVFIMVFWSVQYLLQHLLVQTQLSDQLLQPLILILQLPQTPQFRHARPGKFFLPVNGMDYLLPLRLTVRNVLTRRITMNIVFLGIDLAKNVFQLCGLNQAGKPVYTKRTGRKELLQTLANIPACLIGIEASTGAFYWQREFEKLGHKVKVISPQYVKPFVRGQKNDGNDAQAIAVALMQPTMQFVPPKSPEQQDIQALHRARQRIVNHRTDTVCQIRGLLLDRGIPIGSAVSRARRAIPLILEDAENGLSSRMRKTIAELYDLFSDLGRRIHFFDKEIETVFRQSEACQRIAKVKGIGPETATAVVAAIGKGTEFKNGRHFAAWQGLVPRQHSSGDRQVLMNMTKKGDKHLRTLFIHGARAVVRVTTNNNDGHMNQWVNQLKERRGFNKTTVAVANKNARIIWSMLRNETEYQVV

SEQ ID NO: 95013 - protein, 418 aa, unidentified
MDEEFELFVGFDWATERHQVCVLNAVGTVVRECNIEHNAEALHKLIDWIAERTGGRTALAAVAIETPHGVVVETLLERGIVVYSINPKQLDRFRDRFTASGAKDDRRDARVLGDSLRTDRRAFRRVVLSSGEMVELRELSRLHGELSVQFVQLTNRLRDQLQRYFPQLLAVGETDERWLWELWELAPNPHAAANLKPAQIGKILRRYRIRRHSAHSALDKLKLPAFSVAPGVIEAACRHIEVLLPQLRLLTEQLRGCDDDLHALLERCKADREHPSEGGRRREHSDAEILLSLPGVGDLVGATMLAEAGQPLSERDLNSLRQLCGSAPITKRSGKSVHVIRRYACNQRLQNACHHWGQSALRWDARSAAHYARLRAAGRTHGRALRGIIDRWLSVLVAMLRDGTLYDPARRNITRTAA

SEQ ID NO: 95014 - protein, 422 aa, unidentified
MNYLSDNSFTAYVGIDWADSKHDICVQAAGGQQREFDCISHQVDQIDQWAQSIHERFGGVIAVALELSKGPIVYALQKYDFFVIYPVNPSTLAKYREAFTPSRAKDDPTDAELALDLLIRHPERFTPLNPQSVEMRTLACLVEQRRNLVNDKTRITNRLRSALKQYYPQMLEWFEHLDTVLVCDFITRWPTLTQVKRARKNTLVKFFHEHNMRFSHVLDVRLKSIKAATPLTLDAAVVMPYSLQALVLTDLLRASLQAIRRYDDEIAALAPKHPDYGLFSALPGAGPSLAPRLLVAFGEQRERFASAAALQKYAGIAPVTERSGKKHWVHWRWQCPTFLRQTFVEWAAQTINKSYWAGAYYRQQRDKGCTYQAAVRALAFKWIRILYRCWQTKTPYNESVYLKALKRRGSPLLNPPTAVKMT

SEQ ID NO: 95015 - protein, 400 aa, unidentified
MLSIGIDVSKGKSTVCGMKPGGEIVYAPFEVQHTREGMLELVSLLRSSGEEVRAVLESTGSYHCPVVTALLENGIFVSVVNSLRMKRFCSQSIRKVKTDRIDAMQIALYGLAYWQELQPTKLPEDTYRELQLLARQYYQMTSLLIKAKVDFNAICDQVLPGMQELMNDHAGRHKLSDFVLRYCHTTHILEMGETRFRKDYCKWAEKKGYRNCERMAVLIFATAQNGIPVLPNAPSTQIVITEAIRVLHTVEASRDAILTQMQALAKTLPEYSLVREMPCIGDTLAPRLIAEIGDVRRFHSKRALIAYAGIDAPPYQSGKFCANNRHISKRGNRYLRKTGYEVMQSYVMHKPANDPIFTFIEKKRGEGKSGKLAMVAGLNKFLRVYYGKVTELYRSLLAIE

SEQ ID NO: 95016 - protein, 498 aa, unidentified
MATLGGGRCGLTQAGAPPQTPGLRRGSAPDPGLRWGSAPGPGIALGLRRQERGCKKLSCIDDSANGLMENAASVEIRKQRGLPPPLGKLAPKSGATFPHFPQALLVFLFVRGSKTGKAKHMKRRPSDDKVVAQHKTKSRKERLVNDDKYIGMDVHNATTVTRVLNLQGKEIAKAIIETKGATIVDYLKGIRGTLHVAFEEGNHAAWLYDLIRRHVAEVVVCKRKKNNSRNHKSDDDDANDIAESLRTGALKPVYHGRRSTEPLKEFAKSYAAIVRDSTRVKSRIKSLFEGRGIACGGDGIYEKDEKAQHESWLDRLDNPARRTRARRLFLELDVLDELWEEAEKDLVAETKKHPAAKILDSIPGIGLVRAAVIIAFVITPFRFRTRRQFWAYCGLAVRSKITGEYIMVEGRVRRSKKRPLVRGLNRDFNHALKEVFKGAAKSAAKGPWKPQFDALIAKGTEPRLALLTLARKLASTTLTLWKKGELYDEHKVKIAHAA

SEQ ID NO: 95017 - protein, 379 aa, unidentified
MATTKQALLNDTSVKLMLYMALELSASKWKVALADGQRAASQHTLVAGDVGGLLLLIDKAKKRCGVQGKVRVMSCYEAGRDGFWLHRWLLEQGIDNVVVDSSSIEVNRRKRRTKNDALDAAKLYEMLVRYVAGEKRVWRVVRVPSVQQEDERRLHRELERLKRERNAHVNRIRSLAVLHNVRLQRVGGKDWSERLEQLKGQLPAGMVAEIERQSARAQLVGEQIAALEKSRQEQLRAMIEQQQDGPLLALLKLRAIGVQTAWVLVRELFSWRRFSNRRELAGCVGLNPSPYDSGASQREQGISKAGNRRVRALLVEIAWYWLRYQPHSALSAWFNRRFGGAGKRMRRVGIVALARRLLIALWRYVEQGVIPEGAQLKKP

SEQ ID NO: 95018 - protein, 450 aa, unidentified
MGSRFAGIDWATEKHDVLVSNELGEKLLAATFAHDENGLSALCRTLVKMEVVLVAIERPDGVVVERLLDAGLRVLALHPNKVAAARDRFRVSGGKSDRFDAFVLCELARTDSHRFRVLEPDSDQTKALRAMTRAREGLVENRTGVMNQLRAELDRFWPGPLRLFSHMDSEILLAFLERYPSPADARGLGIGRMQAFLRREKYSGRQQPAALMVKLRSAPEGRVGEFEHAAPRQLVLSFVAMIRALNAQIKGLERQIRTAVRAHPDGPIFLSLFKQAASVITAAELLAEMGDCRARYPARDALAGDAGQSAVAKESGKRKDANFRWGCNKRLRVAFSRLADSTRHWHPWAQALYAQARQRGHEHPRAIRTVGRAWCRIVWQCWQHRTPYDPTRHRSLQRHITVTIPSPSGAVTDVAATQRMAAALAPPAGTLEPSAQHLTTSLHPLTQTGG

SEQ ID NO: 95019 - protein, 348 aa, unidentified
MRFYTKQHKYSCGIDLHARSMYICIVDEQGKTVFHRNRKASAEALLKAIEPFREDIVVAVECMFVWYWLADVCAKEKIPFVLGHALYMKAIHGGKSKNDKIDSKKIATLLRGGNIPMAYVYPRKMRSTRDLLRRRNHLMRKRSELLAHIQNTNSQYNLPEFGKKLAYKANREGVAEHFPDPSVSKSIEVDLQLLDFYDQLLNDLELYIVKKAKVDDAYSWYRLRSIPGVGKILGLILLYEIHDIKRFPRVQDFVSYCRLVKCPRESAGKKFGTKNSKIGNAHLKWAFSEAACLFLRGNEQAQHYHARLVSKYGKGKALSILAHKIGRAAYFMLKRKEPFSMKVFFNET

SEQ ID NO: 95020 - protein, 329 aa, unidentified
MNADATSGIDVSAKTLDASVLRANSDKRKRRKFSNDAPGHRQLIEWLQAFGVTRVVCEATGVYHLDVAFALTDAGIPLMVANPRQVKRFIEARARNTQTDVIDADELAEYARRMDFVPWKAPSINGFELHKLGRAIGQLTKRHTAMLNRLHAARASTHTPKSIVKSAEREVQFIERERVKLSKEALRLVKADPDLTRKFELLVSAPGIAEVSALAILAELIVLPPNLAGKAWVKYAGIDPMSKRSGTSVNTNAHIAKRGNARLRGALYMPAMTARQRDPHMRDFADRMIANHKQPIEAIVAVQRKLLLSIHAMFRTNQTWIPQPTPKTA

SEQ ID NO: 95021 - protein, 352 aa, unidentified
MATYCGVDFHARQQLVKWCNTDDGEIHERQVGHQSVEEVREFYAQFKEEVIVGFETSGYSSWFEAMLEELGHQVWIGHATEIRRRARSRQKTDRRDAELILDLLLKNEFPRIHRVSAASREVLRQLRYRHRLVQQRTRSYNSLQAIALSAGVSLKAKLRTRKGKERLLGLVVSAAHGQQRQEWLDVIAQLDGYIERVEKELELIAEADERVQLVRTHPGVGLLTGLGLVHTLSPVSRFANSRKVAAYVGLEPREYSSGERQQFGGISKAGSRLLRFLLVEAGHKAINKDAQLKQLYYRVMHRREKAKAKVAVARHLLVRTYIMLRDGIDYAEFVRRGVAVPSARVGYRPESA

SEQ ID NO: 95022 - protein, 312 aa, unidentified
MERTFVGIDIAKDQVDVHVRPTDERFQLSRNDAGLAGLVARLQPLGPQLVVLEATGGYEIPVAAVLASAGVPVAVVNPRQIRDYARATGQLAKTDALDARLLARFAEAVQPEVRPLPTPEAQALGDLVTRRRQLVDMLGAERNRHQQARDLRLQRRIATHIRWLTKALAEIEADLGTRIRSSPIWRERDTLLHSAPGVGDVTAHTLIADLPELGHLDRRKIAALVGIAPFNRESGHWRGRRMIAGGRPAVRSVLYMATLTAARFNPAIAHFYQRLVAAGRPKKVALTAAMRKLLTILNAMLRDQRPWQPESA

SEQ ID NO: 95023 - protein, 400 aa, unidentified
MVHDGYGVYLGLDVGKEGHHAVGLGPDGKRLHDAPLPNTEARLRQLFDKLARHGTVLVVVDQPASIGALPVAVARAAGHQVAYLPGLAMRRIADLHPGSAKTDARDAYVIADAARTLPHTLRRVDIGDETLAELEVLVGFDDDLAGEATRVSNRIRGLLTQIHPALERVLGPKVHHKATLELLSRCGGPVGLRKAGRRKLMSIAGPHAPRMGERLVEQVMIALDEQTVTVPGTQAAETILPRLADSLRDVLRQRDQIADQVERMLDAHPLAPVLTSMPGIGVRTAARILLEVGDGTAFATPGHLAAYAGLAPVTRRSGSSIRGEHPPRGGNKNLKRAFFLAAFASLADPVSRAYYDRKRAEGKRHNAALICLARRRCDVLYAMLRDKIPYQPRPTTPIVA

SEQ ID NO: 95024 - protein, 428 aa, unidentified
MKYNTQNAKIESITEKTLIVGIDVGSETHYARAFDWRNYEYSKKPLEFSNNEAGFVTFKVWMEELAEKYGKDVVIPGMEPTGHYWFNLGAYLQDNGMKPVHVNPHHVKKSKELDDNNPNKNDRKDPKTIAALVNEGRFSYPYIPTGVYAEIRSLSNLRLQAQEEITRIKNRIARWFSIYFPEIKDVYKNPGAVSGLMILKVAPLPKDIVKLGVDGVNQIWRDAKLRAAGLKRAKTLVTAAEHSIGSQEACDSARIELKILLNDYEIYHQREEELMELIEEKLSEVPYIDKLLEIKGIGMKTVSGFVAEVGDIRRFDNPKQLQRLAGYAIVECSSGKHKGESHISYRGRKRLRYVLYEAAISLIARNTEFKEIHRYYQTRGKNSLKKMQSVIAVACKALRIFYAILTKGVTYDGAKMLQDIKRPQLKVA

SEQ ID NO: 95025 - protein, 420 aa, unidentified
MKVTYQTCCGVDVHKSFLVATIVKTTGGIEPYYQKKRFSTFNNSILEFKHWLLDNDCHDVCMESTGKYWVPVFNLLEDEINVVIANPRWVKAVKGNKDDTKDSKWIGDLFRLGLVKGSYIPCKIVRILREYTRYRYKLVSCRSSEKNRYQNALTVCNVALDSVVSDIFGKSSMSIIDYLLEQSGTSINHEEIASKLLRSLKSKEDAVIESVEGYQMTDAQKYRVRLVRAHMDYITAEINDVDKMIENMISSNPDFENAVQFLCTIPGVKRDSAITIISEIGTDMSQFSGSKRLCCWAGLTPDSNESAGKKKSVWITRAGVYLKPALVQCAHAAVKSDKSPYYKKKYESLVKRRGKKRAIIAIARMILTAIYQMLSTGELWNPSDLYKIDMPVALVEKQKAKAIRQAKKLLQREGTLPPVV

SEQ ID NO: 95026 - protein, 366 aa, unidentified
MEKGTTFVGLDVHKDAINVAMLLPGETRPVEWQVSNDPAAVRRLVRKLQRSAVGEVRVCYEAGPCGYAVQRTVREQGVWCIVVAPSLIPRKPGERVKTDRRDARKLAELLRAGLLTEVHPPTEADEAVRDLCRAREDAHGDLVRARHRVSKLLLRHGWTWNGSKKAWGQGHRLWLRSLRFEHKEDQWVLDDYLLALEHIEERLRALDVQVEQTSLDPRYASAVAALRCFRGIDTLTAMCLVAELHDFMRFESARGLMAYLGLVPSEHSSGGKEHRGEITKAGNRHARRLLIEASWHYRHHPSALSLRKRREGQPARIVAIADRAMLRLHRRFNRMLERGKPRPKIVVAVARELTGFIWAAMRNHAA

SEQ ID NO: 95027 - protein, 336 aa, unidentified
MDTVHAVVGIDVSKKKLDVALLVNGKTKSKVVDNSASGHRALLEWLGKSKTPMAELHVCMEATGVYYEPVALALHAAGLRVSVVNPACIKGFGYSENIRNKNDAVDAGLIARYCVAMAPAPWTPPPIEQRQLRAWSMRVQALKDIRQQEENRLEAHTVTGMDEVAEHVRGHIAWLSAEIAKLEDEIDDHIDRHPGLKHDADLIASIPGVGATTVARILGHLGDIRRFESAKAFAAFLGVTPKQRTSGTSVRGRTMISRTGSTALRAALYMPSLVARRHNPILATFAERLLATGMAKKAVIGAVMHKLTHLIYGVIHTGKPFDANYLSKGLANQDGI

SEQ ID NO: 95028 - protein, 519 aa, unidentified
MHQTKYRGIITEAGSLTTPPWEPAFRLVKPLRKSVSPFGGDLCFGWLGSPRLYLYKPLGCVSAFWKWIPARKDKTMQYQKVLKMLESIPYLSVGLDVGADFTWMSIMLPNGTLAGKPFKIVHSDPQSRELAVAKIKEAQEAYSLKSRCFLESTGIYHIPLLCFLRDKGFDCSVINPIITKNSTNMNVRKLHNDKFDSKKAARVGLDASLKVSIIPDDEVIDLRNLVRDYYYFKDLQSAVVLKLTAELKVSFPAYRKVFSKVTTKTSLKLLDAYPLAEDLLAAPKETVVETIRSTARFGEKYALARYDALRTAAEDAAIFGRALKSNSVRIRLYIDSYREYQKRLDTIMEAIHATVDGLKDSPIYGRILLLQSLRGVGFMSAVVLVAEMGSFDLFPSPKKLYAYFGLDPAVKQSGKFNGDKVHMSKRGSSLARRILHMVALNNLKVDKGSGMPVNPVIHSYYADKCKAKKKNVAVGAVMHKICNIIFAMLRDNKPFEVITPQEHCKRYLAAHPDKVQSAA

SEQ ID NO: 95029 - protein, 340 aa, unidentified
MKLYCGIDLHSNNSVVVILDEADKVVYQKKLNNDLASILGQLSIYKDKITAIAIESTFNWYWLVDGLMEAGYTVKLVNTAEVQTYSGLKHTDDKDDARWLAHLLRLKILPTGYIYPKEERAVRDLLRKRSQLVRQSTTNILSLQNILARNTAQSLSSYKIKKLDDVQAEKLLDDPNTTLALKCNLNVIRCLQSTIAEIETTVLQQARIRAEFKQLLTVSGIGEILGLTIMLESGDMSRFPKVGNFSSYCRCVKSERLSNGKKKGEGNRKSGNKYLAWAFIEAANFAIRYNDKIKAFYQKKKVKTNGIIATKAVANKLARACYHVLKDQVPFDVNKSFSRW

SEQ ID NO: 95030 - protein, 462 aa, unidentified
MKKRNVNRKVTKLPTELAKVNLNAAGIDIGSASHFVAVPEGRDNVTVREFKSFTADLHELANWLKKCGIKTVAMESTGIYWIPLFEILEEHGFEVRLVNPRHLKNVPGRKSDVLDCQWLQQLHTFGLLSGSFRPEQQVCELRAYTRQRDGLVKSTSSHIHLMQKALGLMNIQLHNVLSDITGQTGFKIIRAIVAGERCPKKLAEFRDRRCRSSIEMIEKSLAGNYKKEHLFKLRQELSLYDKFQEMLAECDKEIEACLLEFKEKVDVTAKPLAPVEKKKRRKNELYFDAREYLYKMVGIDVTRISGLDSYSVLKLIGETGLDMSRWPTANHFASWLSLAPGTKISGGKRLSGKTKPSANRAAEIFRIAAFTLSHSSSALGAFLRRMKARLGAPKAITATAHKIARLFYTMIKFGKDYEDTGAEYYEEKYRGRVIKSMQNKALKMGFSLVPLSFETQTDPEVS

SEQ ID NO: 95031 - protein, 330 aa, unidentified
MRYIGIDISKDSFTVAFSSVKGSKTQSYKNTPKDIQKFIKTLDKEQDHCVMEATGNYTFKLLYLLIEQGYKASLVNPKQTKYFAKTMLSVTKTDPQDACLLACYGEKMTPPVYKMPSEKIILLKQKRTVIRQLRKQLTALKNLEKSLEVLPRKDKNAFNCLNNTISYTEKQTEKLEKELIDDITEDFDKQLDLLTSIKGIGNKLAASLIIVTGGFSFFENPKQISRFLGICPTYQQSGSSINIKGSINRNGDSHLRGMLFLASLAAIRFNTACKELFSNFKAKGKPVKVALIAVANKLIRQAFAVVKSGISYIDGYISKPPITTVKIISN

SEQ ID NO: 95032 - protein, 440 aa, unidentified
MAKTVNFDEVHERCAGIDIGAQKIFVSPDGQEVQSFDTFTSGYYSCIEYLQSKDIKNVAMEATGVYWMALYSMLEICGMKVCLVNPKETKQSKGRKTDVADCRWIQRLFSAGILRSSFIPEGIMMELRFLVRDRLDFVEMGSTYVNKMQKYLELMNIKLKEVISQIHGASGIRMIKAIIGGERNAQKLLLLSDGRIIKNKGEAVLKALEGNYNDTYIFMLDQNMKMWEAHQNQLLIIDNQIEELLKKLCIGKQPVAATGKAKRTRHHEPKVEELHQKLMQIYGVNLSSISGFNDYTLLRLIGETGTDMSRFPTAKHFVSWCGLSPKNHQSGKMKKRVKGTPCNQSGQIFKLCAQSLMNSKFIAIGCFIRKLKVKKDAGTAIKAGARKLANAYYNALTKGIEYVEQGTRIYEEQIKQRELKALQKLASKHNFQLVENQSAA

SEQ ID NO: 95033 - protein, 340 aa, unidentified
MKLYGAIDLHSTNNVTVVIDEQDRVVYQKRLPNDLALILKEVSVYQTELQGIVVESTYNWYWLVDGLMEQGYKVHLANTAAIQQYEGLKYTDDHSDARWLAHVLRLGVLPEGYIYPRADRPVRDLLRKRSQLVRQRTTNLLSIQNLVTRNTGESLSANQIKGLDVQQVDELLPNGDLALAVKANLSVMCCADEQTEILERTVRDRIKLRPEFSFLKTVPGIGQILALTIMLETGDIRRFPSVGNFASYCRCVGSQKVSNGKKKGKGNTKNGNKYLAWAFVEAANFAIRFNSKIKSFYQRKKAKTKGVVAIKAVAHKLCRACYYIMRNRVAFDLIKAFGQK

SEQ ID NO: 95034 - protein, 348 aa, unidentified
MKIIGCDFHPSYQQIAMVDTETGELWEGRLEHEQGEARRFYQALQGQEVRVGMEAVGNAQWFERMLASLGQELWIGDAAQIRQMVVRRQKTDRRDARHILQLLLDGRFPRLWVPSAAMRDVRQLLRHRQKLVEMRTQVKNQLQHLALNQGVQRKRRLWSREGRAVLEGLPLEGWTARRRADLLAMLDRLEAQVKELDEAVCQEAWQRPAVRLLMSHPGVGPVTGLAYVLTIGPVARFPRGKQVASYLGLIPREHSSGGRQKLGAISKQGNTMMRTLLVEAAQNAARLDQELRRDYQRLKARKHSALAKVMVARKLAVRMYWMLRENKPYTPRPVARMQGGPSHSVVAG

SEQ ID NO: 95035 - protein, 448 aa, unidentified
MSKLHVGLDVSQLSVATCFVLDDGTEPVKRFSFEHNPSGVDKLVAKINTTAEEIGIDQLLIGMETTGLLWWHLSEALRNSERLEHLQPQVYAINAKLVAHFKKAYVEMDKTDPGDAFVIADRLRFGRLPKLAEPDERYLAIQKLTRHRFHLTHSLAREKNRFLTHLFLKFSGFCQEEPLSDPFGAASSALLTEFFSVDEIAQMPVEDLTDFLVEKGKNRFPDPEAVARATRQAARNSYRLSKCLADPVNIVLAMTLENIRFFEKQIAAVEKPIAKELAAFPGAQVLLSVPGLGPVFVAGIIAEVQDVNRFDTDAQLARFAAIVWKKNQSGAFEADDTPMMHSGNEYLRYYLIEAANSLRMHNEEYAAYYRTKYREATTHHHKRACVLTARKLVRLVHTLLRKGQLYQTPDQRKEAPAVLPAGMTPGELARHVVRRRQAKGRFRVHLDH

SEQ ID NO: 95036 - protein, 428 aa, unidentified
MSFKARTSLISNISSKEGVTLNQTLFVGIDVAKSSNHVYALNLNRDKLLSVNISNTQDGADLIETRILKLLDKHHLSKVIVILESTGVYSMHLATFLSASKFLSIFDIRVYLINPKISKNYRKSFADMDKTDPNDSFILADIARVGRCDELTPFKGAQRLALERLTRHRLHIVEKLSNEKVYALNNVFLKFSNFESLFSNNFGSTAIDLLLEYKTLDDIMNSSLEDLADFVAKSSKNRFDSSLDIATKIQKAAKGSYRLEKMAYDPVNLSLASSINVIKCYESEIKEIDKAIIKQVAGFNHDHYQVLLSIPGIGKVYAAGILAEIGNIDQFDSNDALAKYAGITWRKNQSGKFTADDTHLTKTGNKYLRYFLIQAANMARLNMPEYDAFYHKKYEEVTTHQHKRALVLTARKLIRLIYGLLSTNRLYK

SEQ ID NO: 95037 - protein, 367 aa, unidentified
MGVLFVGLDVHKETISVAVAEDGRHGEVRSLPTISNTPQAIEKMLAKLSGKAGRLSFCYEAGPCGYGLYRQIVESGHDCMVVAPSCIPTKPGERVKTDRLDAIKLARLLRAGDLTAVWVPDAAHEAMRDLLRSRTDAMLQLKIAKQQLSAFLLRQGRSYSGRKLWGRAHFRWLSEQKFEHEAHRMVFQDYINAVQDGQQRHGALIKIVEGLIPEWSMRRLHEALCVMRGIDTISAATILCATGDLRRFDSPGKLSAYFGLVPSEHSSGGSVKRGGITKTGNNEVRRILDQSAWCYRFPARVTRAKEKIASETEKKVRDVAWRAQVRLCGRYRKLLAAGKCAPLVCMAVARELAAFIWEMGRVVPLTT

SEQ ID NO: 95038 - protein, 366 aa, unidentified
MKKNSTLAVGRKQIFKQAKLTIGLDLGDRSSHYCMLDEAGNVILERSLPTTANGIRQAFSRIPRCRMALETGTHSPWVSRQLSELGHEVIVAHARNVRLIGESSRKDDRIDARTLARLARIDPGLLGPVRHRSAQAQIHLTVIRARAALVSTRTALVNAARGLTKSYGQRLNKCGTEQMTRDRAKGLSQELREALDPLLREIESLNERIAEYNRRIEQIAKEVHPEVARLKQVKGVGTLIALTYVLTLDDPQRFRRSRDTGCFLGLRPGRRNSGQSEPQLHISKEGDRYLRTLMVQGAHYILGPFGQDSDLRRWGLKLAERGGKNAKKRAVVAVARKLAVLLHKLWVSGEVYEPLRNNHEVESAVA

SEQ ID NO: 95039 - protein, 335 aa, unidentified
MDIRHFIGIDVSKNTLDWAVYTNKGIVWQTQSENSPTAIRAVIKQLQALPDFGRSTCVVCMEHTGLYNAHALDVFFQAQLPIWLEASLHIKQAGGLQRGKSDSIDAQRIAEYAYRFQDRTRLWKPARPVMKKLAEFTRLRQRLQGMISQLKVPLAEQKRFGDKALTTQLGQHCSSSLKALLSDLKGVEKAIKQLIADDPTLKALFELVTSIPGVGQVVATELILASDEFKAIDDPKKLACHAGVAPFEHSSGSSVRGKTRVNHHARKSLKTLLHMAAMSALQMPGELQEYYQRKVKEGKNKMLVINALRNKLIHRVYAVVKRGKKYNKNYTPTLV

SEQ ID NO: 95040 - protein, 354 aa, unidentified
MTFYCGIDLHSKKSHFCIIDKNGKKVKEENLNNDLSLILQFLKPYGKDVHIAIESTINWYWIVDGLMEAGYDVRLAHTLGLYMITGAKVKTDRRDAFKLAKLLRMGEIPEAYIYPKEKRPLRDLLRRRAGLVQERAACYSSLRVQFIRYNLNTMSLTDLKQFLPADIYVMPIPQELKDYCVMILQRVDLLSTQIHELDTYLKGVTLEDPKFKILLTLPGVLYVLGLTIYYEIGDISRFSNVRQFASYCRLVPGISQSSDKVKRGKGSNQGNHYLKFAFTQAANIAVRYYPTLRKFRDKHANRRKGNAATMVANCILAHKIAIATFHMLKEGVPFDEGKLFGLQVAVIPAYTLGS

SEQ ID NO: 95041 - protein, 433 aa, unidentified
MQTPSVPSAPAPAGDFAALGHFAGFDWAKDKHHVAVVDPSGRRVLELGIEDTAEGWAALRQKLAAFPRLAVAIETSCGPAVERLLEMGLAVYPLNPMAAQRYRDRKSPAGAKDDALDAWSFADALRTDGHGWRRLSPLDQATHELRILCRDEITLIGQRTALVNQLRAALHEYYPVALEAFDEWTTPPAWKFLLAFPTPAELAAAGKRKWEKFLHANKLYHPRTQQTRLELFAKALQFVNPNAAVTAAKSLLAGALAEQLLTLQRQMDKYRQRIQKLFADHPDHDLFGSLPGAGEKLAPRLLAEIGPDRDTFATAQGLQCYAGTAPVTRQSGHRRGVFVRRACNKVLRATVHLWADLSRPKCAWAQAYYQKKREQGMGHAAALRCLGQRWLNILWRMWQDRVGYDEARHTLDQVKHGSWVVRLLPQPVPATDA

SEQ ID NO: 95042 - protein, 316 aa, unidentified
MPYVGIDVAKNKHDVTALNVQGKTVLKPLTFSNNKAGFELLDLSLRQLNQDCLIALEDTGHYAFNLLNFLHEQGYKVYTYNPLLIKKFAKSLSLRKTKTDKKDAHGIALKLLSDPNREQFQHDNRQVELKILARHIHRLKKKQSDWKVQYTRCLDIIFPELDKIVGKHSEYTYQLLTRYPNPQKRIEAGFDKLIEIKRLTASKIQDILSVAPRSIGTTSPAREFEIIENIKHYKRLIDKAEKCVNDLMAELNSVITTVTGIGNRLGAVILAEIQNIHAFDNPAQLQAFAGLDSSIYQSGQIDLAGRMIKRGSPHLR

SEQ ID NO: 95043 - protein, 368 aa, unidentified
MSARLTNSSRDMRLKGGAVQKIYIGVDFHARQQTICYLTTDSGEMLFQQLQHQDKAAVRAFYAQFSGDVIVGLEASGYSPWFERLLEELGCQVWLGHATEIRRRARGRHKNDRRDAELILDLMLHDEFPRLYLPPLPSREVLRMLRYRQKLIKIRTIGKNSLQALALQAGLAKGPHLFTKAGLQELRTVAMSPAMQWQREQWLQLLEPLNQRLLETMLWLKQQSQADQRIHRLRTHPGVGLLSALCLVHSLEPVSRFANTRKVTAYAGLDPLERSSAERKRFLGISKGGSRVLRFLLVEAAHTALRKDAELRRFYQRLAERHGRPKAKVAVSRKLLIRAYIMLRDEIDYAEFQRRAVAARPAPPAHGH

SEQ ID NO: 95044 - protein, 453 aa, unidentified
MKRSRREQQILEKIHLHAAGIDIGSGSHWVAVPEDRDEKPVREFRSFTQDLHALADWLEACGIETVAMESTGVYWIPLYEILEERGFEVLLVNARHVKGVPGRKSDILDCQWIQQLHTFGLLRGSFRPAAPIAALRSLVRHRDQLVEAAASYVQRMQKAMVLMNLQLHTVISDVTGVTGIAILRDIVAGETDPTVLARHRHPRCKASEEEIAASLTGHYREEHVFVLRQALELYDVYQEKIRRCDEEIEGKLRTLEASCDAPEGQLAPPRRPRRRSANEPDFDLRSPLYPLCGGVDLSALPGLGPYGALKLVSEIGLDMRRWATESHFAAWLTLAPRNDISGGKLLRSRTLPSANRATQILRMAALSVGRSDNALGAFYRRMAARIGKAKAITATARKLAILVYRMLRDRISYREMSAAEYDQQQRSRILRGLRKRAASLGFELVDTQTGLVM

SEQ ID NO: 95045 - protein, 409 aa, unidentified
MDLLHPLCAGLDVHKDTVVACLRRVVDGRVKREVRTFGTTTRDLLELSDWLASQGCRHVAMEATGVYWKPVWHILSDGDFELVLANARHVKNVPGRKSDVSDAAWVSDLLAHGLIRASFVPDGATQDLRSLLRTRKQLVRERTSHVQRLQKTLEDANIKLDSTISDVLGRSGRAMIEALIAGETDPDRLAALAHGRIKASQARLREALRGRVTDCHRFLLRLHLGQIDGLSKAIADIDREVEARIEPFRKAVELLSSIPGVSTLSAQVIIAEIGLDMSRFPTVGHLLSWAGLCPKSDESAGKRRSTRMRKGAPWLKPNLIQCAWAAKNAKRTYLQAQFYRVRARRGEKKAAGAVAASILTAAYHMLQRGVFYQDLGPEHFERSKAHQAKRYVKGLQNLGYAVAITPIAA

SEQ ID NO: 95046 - protein, 413 aa, unidentified
MDAIVERCAGLDVHLDTVVACVLYGKLDIKPKKEVKTFSTTTKGLLELLDFINQKECTHVAMESTGIYWKPVWNILESGAFELIVANAKKIKNVPGRKTDVKDAEWIASLLRCGLIEKSFVPPERIRDLRDLTRLRKELLGEVNRNKNRIHKVLQDANIKISSVLSDVFGETGKSILNQIIDNQCITEEFIYSLYEGRGKSKLKSTPMEMYEALNGKIRGHHVILLGMHNSNIVFLEKQINELEKEIDILLQKERDSLELLETIPGISKISASSIIAEIGTSMDVFKTEKHISSWAGLCPKNNESAGKKKRSGIKSWNNWLRSMLCECAWSATKKKDSRFKNKYWSMVPRMGRKKALIAIANMMLRLIYHLLKTKSTYKELEIQYFIDKDKRREDRIIKELKSKGYLVEKDSL

SEQ ID NO: 95047 - protein, 377 aa, unidentified
MKSTRFVGLDVHAATIAVAVAEPEGEVRSLGTIPNEPDAVRRLMKRLGPADQLRACYEAGPCGYTLYWQLAQLGVACQVIAPTLVPVKAGDRVKTDRRDAERLARSFRSGDLTAVWVPDAAHEALRDLVRAREAAKRDQLRARHRLQKFLLRHGRRAPAGTTAWSEKYRRWIEGVRFEHPAQEATRLDYLSEVDHARERIARLEQALAKAVETAPAPMRAVIDALQALRGIAHLAAVTIVAEVGQLSRFARARQLMGYSGAVAREHSSGLRVRRGGITKTGNAHLRRIVVEAAWTYRHRPKIGVTLHQRQRTQSDTVKAIAWKAQHRLHSRYYRLLGRGKSKQQVVTAVARELLGFIWAIGVTIEREQPWLLKGQVA

SEQ ID NO: 95048 - protein, 454 aa, unidentified
MACFPSGKSAPGGYLIFSDRNRSELLAIKSCRQNAFLLADAQWNGPKHRAYPERGVVELERTEFAASLTRRNRWYGELARNWYETVTLEKRETKRMKKHTQDLIAEAPRGCSQVGITIGIDLGDVWSHYCTLNEAGEVVDRGRFRTNPSSVDKWFTDLPRVRIAMEAGTHSIWISEQLQELGHEVIVANMRELRAISHSNRKSDQVDAEKLARFARLDPKILRPIAHRTVAQQEALTLIRARNLRLRTAAVNAVRGLAKPCGYRLPASSTLCFAQRCVAVLPPGLSRALGPVLHQIADMTVKIKEYDRAIKQLTETEYRETQALLKVYGVGQLTALTYVLTLGSKERFQRSHDVGCYLGLRPKRSQSGERDPQLGITKAGNVFLRSLLVECANHVLGRHGKDSTLRQWGLSLASRGGKQSRNRAIVAVARKLAVLLHRIWVTQQPYIPFYAKAA

SEQ ID NO: 95049 - protein, 360 aa, unidentified
MTKARSLVGLDVHAAKIVAVVLDAETGQLQTFAMSGESTGAAGFCAGLPRPVRATYEAGPTGYGLARELAKRGVECVVAAPSKIPRASGDRVKTDRRDAELLARLLLAGKLHPVRVPGDEEEALRDLVRAREAVRVDLMRARNRLSKLLLRHDIRFEDGGAWTQRHRDWLVKVTLPWPAAQATLLDARGAIDALSYRRDALEREILALLPVSPWQVQVGRLRCLRGIDTLTAVGLCAEVGDFERFGRAEQLMSYIGLVPSENTTGQQRRLGSITKTGSGHARRLLVEAAWHYRARPNIGRALSERQASQPPQAIATAWSAQRRLHRTWARLEARAKRRTIIAVATARELTGFCWAITQIE

SEQ ID NO: 95050 - protein, 345 aa, unidentified
MQSMYCIGLDVHKKTISYCVKDGSGIVHAEGAIPATRWDLDRWMKMLPQPWTAAMEATIFTGWIYDHLKPHAAALKVAHPLMLRAIAAAKKKNDRIDANKIADCLRCDFLPECYMASTEIRERRRTLRYRNLLVHQAVQLKNKISGLLMEAGVSYNKQKLHKVGYFKELLATNPDINEGLRPLLRLCRETLVRLQKTESALVRSLQRDSLLAERVQRLMTIPAVGPITALTWALEVGDVKRFSSIKRAISYCGLCGAEKSSADTVKRTPISKQRNKHLQSVLVEAAKMAPRLSPELALIYDREKQKGNANRASLAVARKLVAYLVAIDRSQRDFLVVEKENCAAA

SEQ ID NO: 95051 - protein, 369 aa, unidentified
MAKSITYVGLDVHKDTIAVALAAAGLRGEVREHGKIPNAPGALRALAVKLAAAGRELRFCYEAGPCGYGVQRQLTEAGHECAVVAPSLIPRKPGERIKTDRRDAINLAKLHRAGELTPVWVPDQAHEAIRDLVRARQAAVRTLRQARQQLSGFLLRHGRHYHRPAWTQLHRRWLASLKFDQAVHHIVLEDCIAAVEAAMARRDRLERHIEAVLPEWSLAPVVEALQALRGVRLVAAATLVAELGDITRFTNPRQLMAYLGWVPSEHSSGRTRHQGGITKAGNGAARRMLIEAAWSYRFPARISRELLLRQERQVKPIRDIAWKAQERLCRRYRKLARAGQQPTVITAAIARELAGFIWAIAKQVQPMAT

SEQ ID NO: 95052 - protein, 310 aa, unidentified
MNKSAGIDVSKQSLECGLLPEGPAFSVNNDENGIIDLVERLKRFGPERVVLEASGGFETAAASAIAAAGLPVAVVNARQVRDFARAKGLLAKTDRLDAQLLAQFAAAVCPPLRALRDEQQQALAELLTRRRQLVAMRAQEATRLQQASAPLRPQIKQHIGWLDERIEELDVDLRAQLRNSEAWKIKENLLRSVPGVGRVTCTTLLIALPELGHLSHKQIAALVGVAPFARDSGKHRGKRAIWGGRAQIRCVLYMATLTAIRCNSVLKRFRQRLQAAGKPFKVVIVACMRKLLIILNAMLRDNQPWTPSPA

SEQ ID NO: 95053 - protein, 419 aa, unidentified
MSFKILKNNCCGLDVHKTWIFACIGITDSHRRTEYKQARFSSFTKGLQELCDWLAKYNCTDVCMESTGKYWIPVFNVLEKNNIWVTLSHPKYTKPQKGNKTDRKDAKWICDLYMCGMVKPSFIPPADIRQLRDLVRYRFKLTCMITSEKNRAHNCLTISNFKLDEVFSDIFGKSSRSITEQILQHPGETFDVAQFVDGRCKTPIEEIQAAVDGAISTEQAVKLRQCLNHIDELEKHQAEIEREIFRLSDKYEEVLNLIRTVPGFDKNPMTAIQVLSEIGGDMSVFPTAKNLVSWAGCCPRNDQSNQKIKSTRISRAGSYFKPVLVQVANALIKSKKYPEFITRYKRIKARRGHKKAIIAICRMILTAIWHILTDLKPYTTEGFLESRPVNDSKILTTSQALNLLKQRGYVIKDDIVSVP

SEQ ID NO: 95054 - protein, 409 aa, unidentified
MSLRSAPLFAGLDWGSAGHAVCVVDDRGTVLLRHDVRHDAAGLADLVAALKRLGPSEALPVAIERPSGLVVETLVAAGHPVVPIHPNAVKACRPRYRAAGGKSDPGDAYLLADMLRTDGHRFTPLTPVSDEIKALRALVRSRDDLVATRVGLANRLRSLLEGFWPGAAAIFTEIDCGVALAFLGRFPTPQSAQRLGPRRLAAFLAQHRYPGRRTPEELLARLRAAPRGLAGEAETDAGGEIVRVTARALEALVAAIRDLSRRIEHAVADLPDGRLVMSFPRAGRICAAQILAELGDVRARFQSEDQLAAEAGVSPVTHASGKSRGVVFRWACNHRLRAALTCWADNSRHASPWAADLYRRARARGCDHPHAIRVLARAWVRVLWRAWTDRTPYDQTRHTAARRFLQPTA

SEQ ID NO: 95055 - protein, 440 aa, unidentified
MAMRKRDDEVFPNAAGIDVGASGHWVAVPPHLAEESVREFGAMTDDLNALADWLLACGVDTVALESTGVYWIPVFEVLEQRGLKVWLVDARQMKYVPGRKSDVQDCQWLQKLMSLGFLRAAWRPDGEVCVVRAVARQREVLLAEQASWVQRMQKALVQMNIQLTEVLTDVMGMTGQAIIRAIVAGERDPKALARHRNGRVKASAEEITKALTGNWRDEHLFVLSQSLAMYDDIARHLAECDAKLQALLTDLGQSKVDLGKVPRAGSKLRLQFDARQILANWAGVDLTRIDGLGLAAVMKILSEIGPDLSRFETVKHFCSWLGLCPGTKISGGKVLSAKTKRSANRVRQALKMAAMSLSHSDSALGAFYRRLCSRMDKPRANTAVAHKLARMVYFMLTRGEAFVDKGQQHYEEQQRQRSIAALKRRAAALGFEINPASAPA

SEQ ID NO: 95056 - protein, 315 aa, unidentified
MTSVGIDVAKATLRVAVVPDGRQWEVANTPGGITTLVEALGPIAPTVVVLEATGGYETAAVAGLTAAGLPVVVANPKQVRDFARAAGRLAKTDALDAQVLADFGWKMQPTPRPLPDAQTRELQALVVRRQQLMEMRVAEMLRLAQADSPRVQQAVREHLDWLEARLREFDRDLRAFLRQTPAWREQDDLLRSVPGVGPRTSACLIASLPELPRLTRGQLAALVGVAPFNVDSGTWRGQRRIHGGRGRVRQALYMATLTAIRYNDRVAPFYQRLVAAGKPKKVALVAAMHKLLTILHAILRSRTPYQPASTSASPC

SEQ ID NO: 95057 - protein, 418 aa, unidentified
MQTELSQFKAIIGLDWADKKHDVCVQATASGQRKTYQIQHKAEKIDEWARALYRRYGGPIAVALELSKGPIVSALQKYDFLVIFPIDPTTLANYRKTFTPSGAKDDPTDAELALDLLLCHPDHFQPLQPQSVEMRTLMTLVEQRRRLMNDRVRLTNRLRNALKQYYPQALEWFDRIDTPLFCDFIKRWPSLAQARRARKATLQKFFHEHHMNRKALLEQRVTAIKSAVALTTDDAVIVPFRLQALTLVAQLEVALESIRIYDDEIAALAPQHPDYDLFRALPGAGPLLAPRLLVAFGEQRERFTSAAELQKYAGIAPVTERSGQSTWIHWRWQCPTFLRQTFVEWAAQTINKSYWAGLYYYQQRAKGCSHQAAVRALAFKWIRILYRCWVTRTPYDEAKYLKALQERGSPLLKMAEAA

SEQ ID NO: 95058 - protein, 408 aa, unidentified
MTKNKGRVVGLDVHPDSFAGAVVEGTDPAQARVLSSSTRVELEQLEQWALRHTSTEDRLVLEASGNAFAVAARLRAIGRKVEILDSHRAGKVGKVYCANDRVDAVKIARIYLSALSPIVWQPDAKTLERREIFSAYQAVVKESTRAKQQLRSMLNEHCVRLEKGFRLCHPNAIRRLVALREWTPARTMLLQQLHGTLMAARGRRTLLRRHMAQEIVAEEALLRLTRLCGINLITLYGVVAAVGDVRRFPHSKKLVAYLGLNPSVSQSGNFEGSGALKRHGRGALRALLIQSGKKLLEVNNPLQKWGLAIAARRGRNKAAVAVARKLCVALWHVLMGHVIGALERLDTLETKLSKFATEIGPAALRAFGYKNKAEFVGKNFMCYEAILDLTTCLHRLVRPQVGLAPGAS

SEQ ID NO: 95059 - protein, 428 aa, unidentified
MNTQESIRLKKYCQLRKEIRGSDRHLIIGIDIGKDKHHAFMGTATGKSLLRKVIFENNIEGYEKLLMHANAIKTQNGLAEIVFGIEPTGNYHKPLGKHLIECGFNLVLVSGVAVKRNRELLDGRWDKHDTKDAANISDLISQGKCLFYESPSLEIEKVRNLLSLRRRLKREEHSLKMRIRNNILAMYFPELDKFFSQSESENLAIIRWCLDTGKLAGLEFNQFYQMVTTRDRGAAQRVRLKKIQELAIESVGCSVNSATEFEAMVLVDKLRQIREVVKETEGLIEAECHSLSAYHSLLTIPGFGPFVSASVLATIGNPFRFSNRKQVVKLAGLDLGANRSGKTSQYAIPVISKKGSGELRYALYQAAHIASIRNKGFIQYYTALMDGRDREKGIKTKLRVKLAAKLLVIAWTLMKTGECFDPDCLTKN

SEQ ID NO: 95060 - protein, 393 aa, unidentified
MQSVLAIDIAKGKSMVTLINSCGEVLIEPYEISHSIKDFSNLLNRIKQLKLDNISVIMESTGIYHRPVERFFLENNFKVYTINALYSKMYKRNLRKTKTDKLDCLSLSELYFTNNFKQYIRPDNIYLNMNALARQYFALDQLCTNLKNRYKNLVYLCFPEYELLFKQEAIYSDIALSFIANYPHAEIISNTRIDHLQHYFKNNNYKRWKQKPMLIKEAAKNSYPSVSKDDEIVSDLSQLAKLIRNYQNEINSIKLKLINYGKQTKYFTAINSIFGIGEFTASIMIAELNDINRFNNIKELTAYCGLDPSIKQSGKSINIHGPISKSGNKYMRKLLFVSCLNIIRLSSKCHVKNDIEIYYRKKRNEGKHHYVAMIACTTKLLRQILALCKQLDK

SEQ ID NO: 95061 - protein, 390 aa, unidentified
MRFVGIDIGAERHSVAIVDEAGRIVSKSVSFEEGAAGYRRLSELLGSPADCLIPMEATGHYWKNLFAALAAEGFPIVLLNPLRTRRFAEEELQRTKTDKVDAVSIARFAAQKRPAATALRGPEIEELKQLVRLREQSVQHLGDRVRHLHQAIDLTFPEFTRHVRGLDTELATAILVRYPTAQALRTISVRKLAGLCYDGRRRIGDVLARALIEAAKISVGHFSSEPYQFQVRYACEDIVSLRARVRELETDIELRLNTDEVGKLLTTIPGVSTLTAARIVAETGDPAQFRSAAAFASYIGAVPRLHQSGKKRYSGKPAIPLGNARLRRAFWMPVLVGIRLNPWLRTYYLRLRSAGKRPKVAIIAAMHKLLLAIYSVAKHRTPFVPQLPAT

SEQ ID NO: 95062 - protein, 458 aa, unidentified
MSQRSQKQRKQKFRVQNLPKQLQHINVNAAGIDIGAAQHLVAVPEGRAAVSVRQFGTFTGELQAIADWLEQCGVTTVAMESTGVYWIPLFELLEQQGFEVKLVDARQVKNVSGRKSDVLDCQWLQQLHTYGLLAGAFRPAAEICVLRSYLRQKEMLTQASAQHIQHMQKALQQMNLLLHNVVSDITGVTGMRIIKAILGGQRSPQMLASLRDGRCHSSSETIAQSLVGNYRDEHLFALRQAVELYETYQAKIADCEAAIITQLDSYPDNTDDPPPPGSKPGKARTHIRNGVDVRHLLFQKSGIDLFAIPGLGTDTLLTVTSEVGFDMNPWKTVKHFTSWMNLCPGTTISGGKVLSKKIKRNANRAAQAFRLAAATLGRSQTALGAFYRRIKARHGGQQAVTATAHKLARIYYTMLTKGTAYVELGQQAYEQKYRERRFAHLQRQAKTFGFQLVPCTQS

SEQ ID NO: 95063 - protein, 315 aa, unidentified
MKDKQAFIGIDVSKDNLDIGIHPDSKTWRISNDEKEIQKLCQNLLKVKPQLVVLEASGGLEMPVVIELDKAGLPVAVVNPRQVRDFAKATGTLAKTDQLDALALARFAEAIRPTPRPLPDESQRELEALMARRRQLVAMIAAEKNRLHKASKAVAYLIKDHIEWLKKQLTSLDSNISDLIKNNEVWKKDEKLLRGVPGVGPVMSRCLLSDLPELGKLNGKQIAALVGVAPFNRDSGKLQGSRRIWGGRSKVRNILYMSTVACVRCNPVIRSFFLRLLEAGKPKKVALTACMRKLLIILNSIMSTKQPWDYKYVTL

SEQ ID NO: 95064 - protein, 409 aa, unidentified
MPDKEEVRVIVGVDTHADTHHVAVVTEHGRPLADREFVATGSGYRKIVEFARSYGEVVAFGVECTGTYGAALTKVLRSEGLSVVEVNRPNRQQRRLRGKSDPLDAYDATESVLAERCTAVPKDKDGPVECMGVLRASRSSAMKARTAAINQIKDLLVSSPEVIREKYRGMVTAAMIAAMSRARPAGHHADPVHVTAWTLKKLACRYQSLTEEITEADSALKEILDAYAPLLCDLPGVGVEVASQLLVTVGDNLERVGSEAQFAALVGVAPVPASSGKTSRHRLSRGGDRNANKALHHVVLVRMGSDPRTKAYVAKRTLEGKGKREIMRRLKRYVARELFRQIMNPVPAPSIADLRPLRQELGLTLQNAAEHLHQWPSYLSRLERGQTRNDSLISAYRRWLEEQAAPARG

SEQ ID NO: 95065 - protein, 323 aa, unidentified
MSNPVVLGIDIAKQKFDAALLIGGKLKHKSCKNSTEGFETLSQWLRKQRVDCLHACLEATGSYGDELALYLYDAGHTVSIVNPARIKGFAQSELLRTKNDKMDAGLIARFCLAMHPEPWEPPAPEIRALQALVRRADALISMRTQEMNRLGTAARAVEPSIREHIAYLDEQIEKIKQQIAEHIEGNPELKNKKALLSSIPGIGPATIAAILAEINIFKRCDEVRKVVAFIGLAPKEKVSGTSIKGKPRLCKIGHARLRKALYMPALVSIRYNPVIIDFYRRLKSKGKNGKEIVCAIMRKLVHIIFGILKSGKPFDPNYKPHFA

SEQ ID NO: 95066 - protein, 366 aa, unidentified
MTVIGIDAHKDWHTLVAVDEVGRRIKELTVEARAVGHRKILTWLEGFETVTVAVEDCRHLTRRLEADLLEAGHRVVRVHTRLMAGMRRSSRERGKSDPIDAEAVARVALREEGLPTAELPGTSRDIKLLSDHRRSLVARRTAMQSKARWFLHEIDPELEIPSRALRRYHLLDELVEYLATADGAVAEIARDLLVDIRELTVRINTLESRLSRLVRADHPSLVAVPGMGTLGAAMIIGETAGIARFRSRDAYARFNGTAPIPVWSGNKVRVRLSRGGNRTINTALHMAALTQIRIGAEGATYYDKLIAAGKTRKEALRLLRRRLSDRIYAAQRADLAPVTQTPEGGAPLEEQSPIEHPASSMPLMAA

SEQ ID NO: 95067 - protein, 462 aa, unidentified
MSRLSNRQVSSEIIVRPFDGLARIHPNAAGMDIGAHEIMVCVPGPDSTQAIRAFGTYTVDLYAIADWLQQYGIRTVAMESTGVYWIPVFETLEARGLKCCLISATAIKRYPGRKTDVLDCQWIQTLHSYGLLADSFRTEADLVALRTLLRHREQLIAHRSPHNLHMQKSLLQMNIQLTQVVSDVTGVTGQQIIRAIVAGERDPHKLAEMHNYRCKKDEQEIAKALTGTWRAEHLFVLEQSLAFFDFYTQQIEACDAEIERTYTAIRPDWGDPDDQAPLPPQKAKSHSRNAPKGVQVRLHLKRIAGVDLIAVHGISVSLAQTIIAEIGTDMSKFPTEKNFCSWLGLAPHNEITGGRVIRSYTLKTHNRAGQAFRQAAASVMRADCAFGAFYRRLKSRLGPAQATVATAHKIARTVYHMLKFQLEYQAISATEYEQHFREREIKYLQRKAAQFGFSLLPSTVST

SEQ ID NO: 95068 - protein, 340 aa, unidentified
MPLYGGIDLHANNSVVVLLNEQDQVVYQKRLPNDLPTILEVLAPHHAEIKGLVVESTYNWYWLVDGLMEAGYRVHLANPAAMQQYSGLKYSDDHSDARWLAHMLRLGILPEGYIYPKAARAVRDLLRKRAHWVRQHTANVLSVQNIMVRHTGARLSVKRMRELPKKEREGLLPEADQVLAITSSLAILDCLSQQIKALEKIVHQRLHHTPSYEQLLTVNGIGTILAQTITLETGDINRFPTVGNYASYCRCVDSNKISNGKRKGQGNVKNGNPYLGWAYMEAAQFALRFNPSAQRFYQRKLAKSNNNTTLARKAVAHKLSRACYYVMRDLVPFEATKAFG

SEQ ID NO: 95069 - protein, 400 aa, unidentified
MISVGIDVSKGKSTVCLLKPYGEIICKPFEVQHTEKDLEELANLLQKLDGEIKIVMEATGIYHLPILTFLLEKGFFISVINPFMMKRFARDNSLRGAKNDRLDSVMIASYGIEKWYKLKKYEVNARIYTELRLLGRQYHRFMQTHVKHVQELTHLLDYTAPGLKTMFNSWNEHSNRDKLSDFVERFWHFDLITSLSREEFVEQYLLWAKEKKYHQSRSKAEKIYDLASNGIPTLSSRTPSTQMIIQEAINVLRIVNNSLYRILSRMKELAKSLPEYATVRSMGGVGDSLAPRLIAEIGDVRRLHNGHALIALAGIDPPPYESGQFVGTHRKISKRGSPILRKIGFEVMRVLKSHKEPEDNAVYNYILKKEAEGKNKKLSKIAGLNKFLRIYYARVMEVYQ

SEQ ID NO: 95070 - protein, 435 aa, unidentified
MAKHAGQIVSKGRYAWVVVGEKTMLEVMFTHCAGLDVHKKSVTVCVLVPGKQGKARGAFKTFGATTKALQEMKAWLLELGVTHVAMESTGVYWKPVYNILQAEIEVWVVNAQHIKQVPGRKTDVKDAEWIATLMRMGLLNNSFIPDEAQRDLRDLTRYRAQLTNERSAAVNRVQKVLEDANIKLASVVTDIQGVSARQMLAALIEGEQDSEALAGLAKGRMRNKMAELNEALSGFVRPHHRFMLAELLSHVDELNQKLASLNERIEQETAAHEALVARLDEIPGIGQQTAQILLAEIGCTVEQFPTAKHLASWACLCPGNNISANKRRSGKTRKGQKWLRTALSEAAWAASRTKDTYLGAQFHRLRARRGAKRAAIAVAHSILQIVYHLMKDPTATFQELGGDYFVKRNKGDQRRRAVKTLTTLGFAVELTPIAG

SEQ ID NO: 95071 - protein, 356 aa, unidentified
MIPITHPNVPGIIIGVDTHKEEHVAVAVDKLGVRIGQHKLPTTDTGYAGLEHWARRLGEIDAFGVEGTGSYGAGLARFLRSQGRRVIEVNRPDRSTRRRLGKSDPTDAEMAARSVLAGVAHDRPKSGVDKVEMIRMLKSTKDSAMKSRTQAINQIKAIIITAPVELREVLRGLATNRLVLRCAKLRPGQLGTPTAAAKYVLRSLARRHTQLTQEIETLDAELARLTLAFAPALMQSFGIGADTAAALLVTAGSNPERLKSEAAFAALCGVSPIPASSGKTNRHRLNRGGDRKANAALYRIVIVRLRYHDRTRTYFTRRIEEGKTKTEVIRCLKRYVAREVFGILQDIGKRHASQNA

SEQ ID NO: 95072 - protein, 382 aa, unidentified
MQTIDTIKPTILLAIELSASTWLVAARVPGREKPHLHRIDGGDTAALLALISSLQARAARGLDATIGVVCCFEAGRDGFWLHRLLTAHGVVCHVLEPTSILVNRRARRAKTDRLDAEGMLRVLAAYLRGDHQACSMVRVPTPEEEDAKRTHREREKLVQERQRIENRIEALLFTQGIRKRPSLRSWERDLAVLRTGDGREIPRHLRAELDRLRRRLVMTLELIREVEAERDQAAKTTPQDRACHKIAALSRIRGIGENFAAVLTREVFYRSFDNRRQIASYVGITPMPYQSGGMDRDRRISRAGNPRARTTMIQLAWLWLRYQPGSELAEWFRERVGRLAGRTRRIAIVAMARKLLIALWRYAETGVIPAGAEIRAEITVAA

SEQ ID NO: 95073 - protein, 354 aa, unidentified
MEKAYDGRQVVGMDLHRRRSVLVRMTEDGRRLGTSRITNSPQELRAEIARAGKSPKVALEATYGWYWAADTLAAAGAEVHLAHPLGVKAFSYRRVKNDERDSADLADLLRMGRLPEAWIAPREVRELRELTRYRQKLVHLRTSCKDQVHGVLAKLGIRVTCTDIFGKAGSAWLDGLRMPQPYAGKVTSLRHLAGELTTEITMLGEVIADLLAGDRGYQVIQQLPGIGPVLAAVITAEIGDVTRFKNAGQLCSWAGLTPRHRESDTKVARGHVTKQGSRPLRWALTEAIQRIPRDCVIGGVKDAIIARRGKEARNIAKVAAARRLLTLVFYGMRDGQIRCLSKAPGNPPATPAAT

SEQ ID NO: 95074 - protein, 343 aa, unidentified
MDHFAGLDVSVKETSVCIVDETGKIVREVKVASEPEALLPVLTKPGYQFKRIGLEAGPLSQWLYSALAEAGFPVICVETRHMRAVLKAQINKTDRNDARGMAQMMRVGLYRPVHVKTLRSQKLRMLLTHRKLLQSKAIALDNDLRGTLRNFGLKVGMVGTVKFEARIKELVENLPDLAILVEPLLIVRRVLREQIGILHRRLLAVVRDDEVCRRLMTVPGVGPVVALTYRATVDVPARFHKSKAVGAAFGLTPSKYQSGEINRTGAISKCGDEMMRAMLYEAAQVMLVRSTKWSWLKAWAMKIARHRGMKKAIVALARRLAVIMHRIWVDGTEFRWTRDVAVA

SEQ ID NO: 95075 - protein, 356 aa, unidentified
MSRDTKYIGMDVHKEAIVMAVLNGSGKQVMESIIETEASSILQFIHGLQGELHVTWEEGTWAAWLYDLLQPHVHEVLVCNPRRNALLKEGSKSDKIDAQKLANLLRTGMLRPVYHGENGLRTLRELARTYQTLSQDLNRVMNRLKALYRGWGIACSGTQVYAARYRQEWLGKIEHVGVRRRAELLYEQLDGLQALRRTLRPELLAESRKHKAAKLLRQIPCIGPIRAARLIALMQTPHRFRSKRQLWTYSGLGIETRDSAQYRFVRGQLQRAKKPQQIRGLNRNHNHEMKEIFKGAATRASCGMGPLRDFYVALLDKGMKPEMARLTLARKIAAIALTLWKKEEHFDAEELKTQAA

SEQ ID NO: 95076 - protein, 438 aa, unidentified
MPTYAFVGLDVSQIEVRVCFLLADGSEPQARWTISNTQPGADTLNAELARLCQLHQIEQVRIGVEATGLLWWHLAAALKDAPVLAPFAPQIYALNPHLVHTFRANFGALPKSDHADAFLIAERIRYGRQLPAPYQLDARYAPLQRLTRFRCHLVQNLAREKSYFLSFLFLTFSTYGQVDPFGDPFGATSCAVLEEFTTDELAQQSLDDLATYLQEHGRGRFADPDALAATLQQSARDSYRLDKVLQEPLRLVLGTTLASIRTLQQQLKAVDKTIAQELTTIPQTLSTVPGLGPVWTAGLIAELGAITRFDDDGAIAQYAGLTWETYQSGGFQADDTAMTKRGNSYLRYYLVEAANSVRIHCPEYGQYYATKYAETTRHAHKRALVLTARKLVRLIDVLLRDGRIYQSPAQRQQRTDGTSPHAARPQPQRRSKRAEAVR

SEQ ID NO: 95077 - protein, 387 aa, unidentified
MHIQQIAPVAKSEFAPVCVAMELSRSKWLVGVGGPHRRNVSRHQVTGGDLAALLALLARLAATESKVIGQTVCFHICFEAGRDGHWLYRALKAEGYDVYEIDPASVSVNRRARRAKSDKIDVDMLVRTLAQLLRGEIDACSVVQVPSEEEEDAKRPHREYERLVKERTSHLNRIKGLLFAQGIRDFDAMAADYAGRLAALPIMPNLKAELGRQCHRLFAIQQDIDAVESAMKAAIVSSKRKSVRAAAMPSAMQTKVAQLFKLRSIGVHFSTVLGSEVFYRTFRNRRAVGQYLGLASSPFQSGDVAHDQGIAKVGNRRARKAIVELAWLWQQHQPDSALTKWFQQRVGDQKGRVRRIAIVAMARKLAVALWRYLETGLVPEGAVLKRA

SEQ ID NO: 95078 - protein, 349 aa, unidentified
MVADELDYVIGVDTHLDEHVLAIIAAPSGAVVARRSIQASARGYAAALRFAAAEANGARVWAIEGTGSYGAGLARFLAGRKETVLEISRTPRAERRLRGKDDSLDATRTARAALASEALALPRSGERREALRLLLVARRSAVDVRREALGQLRGVIVTAPDKLREELRGVPVGRLLERCSRLRRSRSAGADELATRLVLRSLARRIEAATLEAAVLERELLGHVRALAPQLLDEPGVGPIVAAQLIVAWSHRGRLRSEAAFARLAGVAPVPASSGKTTRHRLSRGGDRQLNRALHTVVLHRRQHDPATRDYIARRIAEGKSRRDATRLLKRYLARHLYRLLQNQEPLLA

SEQ ID NO: 95079 - protein, 464 aa, unidentified
MTAGKQLWRNRKEKKEWARRLQSEDPGLEVVHPHAAGIDVGNSTHYVAVRPDRDPEPVRRFECFTADLHRLADWLQSCGVKTVAMQSTGVYWIPLYEILEEHGLEVYLVNARHTKNLPGRKSDVQESQWLLKLHTYGLLNNSFQPVSEIRVLRTYWRQRGEHVRGAATCIQRMQKALTQMNVQLANVISDISGLTGQAILRAIVAGERNPLKLAMLSDPRVHASHEEIAKSLEGNWRPELLFVLHQEVDMYDTYQKRIAECDQRLQKQLASFTRPLPIQPPTQKLKTKKPAAKNAPRFDLSSELQRVTGVDLTRIDGIDVMVAQTLLSEVGLDMSRWTTESHFASWLGLCPDNRISGDKVLSRGTRRVVNRAATALRQAANTLMRSRSYLGAQYRRLRTKLGAPKAITAMAHRLARLVYRMLKYGQTYVDKGTEYYEERFRQQQIQLLRKRAAKLGLQVAEIHA

SEQ ID NO: 95080 - protein, 350 aa, unidentified
MLFAGLDYHTKHSYVSILDENGMEVMEGRVETTTQLPGLLRELPGPAKVLFEAGYGWPRLIEILRGIPVELVMCSPVENRKIACDRRKSDRRDAKHLAMYLLTGTYKKVYMADEEIRAQRQLVRGRAFLTRYGTMVKNRVHGLLGYAGKPKERGDIFTKKRRGFLDEMELPERVREVLDCDLRILDLQSELMNSLDKSIAEMNRRDPTARLLKTIPGVGDFTARMIIAQVGDIDRFPSDKSLACYCGLTPGQRQSSEKLVMMGISKEGSSMLRWCLVQSSWIAIRLDPSLKEFYERLNARKDSCSAICAVARKLAVAVWHIMKKKVPFRFRKTFSEGKPAVAHGKSAKFA

SEQ ID NO: 95081 - protein, 415 aa, unidentified
MDVIVDRCAGLDVHKDTVMAAVRKPDGGGGRAEVVREFSTFTVDLVRLRDWLAEAGVSQVVMEATGVYWRPVWHVLEEQARFELMLVNARHVKNLPGRKTDAGDASWLAQLLECGLLRGSFVPTKEMARLRDLTRYRTKLTQERTREIQRVQKLLEDANIKLDSVITDVMGKSAREMLDALIAGRHDVEAMAQMARTRMRPKIPELRLALDGRFDDHHRLMLRLHLRHIDDLSAMIVELDTTVDELMGPFDEPATRLLSIPGVGKRTVETIVAEIGVDMTRFPTSSHLASWTGLCPGNDESAGKRRSGKARKGNEALRTAMCEAAWAASHTHDSYLAAQYRRFKRRMGTKSEGKAIFAVAHTMIVIVWHLLHDNTNYAELGADYFEQRNDADARQRYLIRELEKLGNTVTLEPAA

SEQ ID NO: 95082 - protein, 345 aa, unidentified
MDQYAGIDVSLELSSVCIVDAQGKIVKEAKVASEPEALVTFFETLGFAVKRIGLEAGPLSQWLHAGLKRAGFEAVLLETRHVKAALSAMTVKTDRKDARGIAQLIRMGWFRPVHAKSMGSQEVRALLVARKQLLGRLIDVELSIRGILRGFGLKVGPVTRKSFEARIRELVTGQATLERITTAMLSARAALKVEYTKLHKAVLTIVRDDAVCRRLMTVPSVGPLVAITYKSAIDDPHRIAKSKAAGALFGLTPKKYQSGEKDVTGGITRAGDEMVRTALYEAANVLLSRITRFSKLKRWGMDVAKRRGSKRAKVALARRLAVILHRMWVDGTTYRWAEAAEPIAA

SEQ ID NO: 95083 - protein, 358 aa, unidentified
MPMLANVVDAVVGVDTHRDTHHVEIALPTGSPIAACSISNDTRGYAQLLAWIADHTPGPRLVVSIEGTRSYGLGVARALTAAGLAVIECEQPTRNNRRGRGKSDPIDAHLAVLTALRLDVERLPTPRADGDREALRILLSARHDLTVATTAQTNRLRALLRDGDDGDRQLARGALTDTVLAGLARRRPPRDATRAQAVRQAEIRRLALAVRDTGRALKTNRAQLQAIVDELAPGLTDRRGIGAVSAAQVIISFSHPGRCRSEAAFAALAGASPLPASSGRTMRHRLNRGGDRALNRALHTIAMTRMNTCPTTQAYVARRTAQGKTPREIRRCLKRYITRELYRALTASMQTKPAPTMA

SEQ ID NO: 95084 - protein, 415 aa, unidentified
MKTYSELSHFGGLDWAKHHHDVCILDPGGQIVERLRFDHSGPGWEKFRQQIQKYPALGIAIETSQGAVVEQLLGSGVTVYPVHPKAAKEYRKRQAPSGTKDDELDSWSLADALRMDGGHWRALSPQDPMIAELRLLCRDEEELIEQRTALVNQLQAALQEYYPAALEAFEDWTVPYTWEFIARFPTPQELAGATVHRQRVFLHTHKLWRPGTAEARLEIFARADQFCGGEAVTRAKSRLALSLVKLLQALQTQLDSYRSAIEQLFAEHPDHDVFGSLPGVGQKLGPRLLGSIGADRRQYPDVQGLQCVAGSAPVSFKSGQMRRVKIRWHCDRFLRHTVHLWADGSRKTCAWAAAYYQAKRAQGKSHACALRCLAQRWLKILWKMWQTHTPYDPEYHARNQQRHDSWVLQLNPKKA

SEQ ID NO: 95085 - protein, 335 aa, unidentified
MTKEDFIYVGIDLHKETHTAVMIDCYNNKLGEITFPNRPADFPKLVTKVKKCNTDAKEVVYGLENAYGYGRALAVWLIDKGYFVKDVNTAISHRQAKHRGAMYRKSDSDDAEAIALATLNMLDKLPDACPNDAYWSLGQLVHRRDNIMKQRTRLVNQLHEQLCIAYPSYKSFFNDISRPTALYFWEHYPSKKYLKGKSVEDLRAELVPVSHNKCSTKTCEKILDAVASDKVKNNAYQDARDMVTLSIVSDLQHYDSQLTEVDKMLEQMYKMLGCTLTTIPGVNVITAVKILAEIGDIKRFANANKLAQFAGIAPLHLSSSGKGKDVATKQGNRRL

SEQ ID NO: 95086 - protein, 349 aa, unidentified
MEQYAGIDVSLDSVSVCIVDAQGKILKEAKVACEPEALIAWLAAHGTPMARIGLEAGPLSQWLFAGLKAAGLPVELLETRHVRAAFKAMPVKTDRKDARGIAQLMRLGWFRPVHCKSLPAQEVRALLTTRKLLQAKRQDVEMSLRGVLRGFGLKVGPTTPKTFEDRVRELVVHHDTLRTIADALLKARAVLEQEFKAIEKRLYALARASAPTRRLMTTPGVGAIVALTFASAIDDPARFRSSRRVGAHFGLTPRKHQSGETDVTGRISRIGDHGVRVALYEAANVILTRAVRGSDLKSWALGVAHRAGLKKAKVALARKLAVVLHRMLADGTTFMASQGAGARAVAGAA

SEQ ID NO: 95087 - protein, 317 aa, unidentified
MNSTNNQNEINIGVDTGKTQLDIYIRPLDIYFTVTNDEKGINKAIKEIKKYKPKRIVIEATGRLEQAFIIACAKEKLPFVIANPAHIKKFAGAIGQLAKTDKLDAKLIAYYSEALKPKLSTLKPATLRFMSDLMSRRCQLMEIRTMEKNRLQIMPKEITSSINPLLTVINNQLVKIDKKLHKLIESCDEYKIKNDIIQSVPGVGNVVAFSLLSNMPELGYITNKEAAALVGVAPFNRESGSFQGKRMIRGGRHQIRTAMFMSMMSAMQCNPVFKAIYQRLVATGKPKKVAIIACVRKMIVILNSMVRDGVYWDPKMS

SEQ ID NO: 95088 - protein, 388 aa, unidentified
MPAAETPVAYLGIDVGKSSHSACALDAGGGVAFRAELANRPDDIDRVLERAGSGALVVVDQKRNIGALVLARAHAHGNPCAYLPGYAEKQARGMFPGIAKTDAIDAEVIARTALGVPRALRPAPEEPEGTASLRILSSQREFASSARTRAKNRLRATLLEADPALEGAVDPSSRWQVSMLAEFGGAAGCSAAGWRRFSSAARRAGAPAAGARRLWEALLASSRSGRRLPAGEDVAVRILAREIASLDADIEELDSLVADSLAGDEVYECLLTVPGIGPKTAAALVTSIDISAFRGHDELASYCGVAPSDRRSGSSIRSTSPQHGGNRQLKNLLIFSCNSLIGTDNRFGRCYGECRARGMRHSKALKAVARKRLKVIYAIMRDAVPYAA

SEQ ID NO: 95089 - protein, 369 aa, unidentified
MEEYSEAFVAFDVAKKKHALAIAEGGRTGEVRFAGEVENSPATIERTIKKLGKKYDRLHVCFEAGPTGYGLCRQVRDLGHDCMVVAPALIPKRPGERIKTNRRDAVTLARLHRAGELTAVWVPDVVHEAVRDLVRARGTAADDLRRKRQQLLSFLLYHGRIYEGGGHWTLAHRRWLARQSFEHTAQQIVFQEKIDAIEDAAQRLRRLDEQLGAVVPTWSMAPLVEAYQAMRGASFLVAVIFAAEIGDVRRFDTPPQLMAFLGLVPGERSTGDKVRRSSLTLAGNRRARRALVEAAWTYRYPARVSETMRVRLEGLPKAVRDIAWKAQVRLCARYRRLSAAGKKPPVVVAAIAREMAAFLWAIGREVAPS

SEQ ID NO: 95090 - protein, 317 aa, unidentified
MTQISTMTAGIDTSKAKLDIAVHERTERWQVANTLRGWRRLAAEFSKAGVARVGIEATGGYERGVVRHLRERGFVVLVLQPIQVRAYARVHLRRAKNDLLDARLIAACAAAIDPPDIEPDERLAELAGHLTFVEQIEEDIARLKVRLEHIDEPRLRRIVLADIARLKVRRTAELLRIVKALRAHGDLTRRLDLVLSVPGIGERTAIALVVRMPELGRVSREQAAALAGLAPFDDDSGTHKGRRHIAGGRERLRRSLYAAALPAAFRWNKALVALYTRLMARGKAHNAALVACARKLLIYANTVVHRGTPWIDTHAAA

SEQ ID NO: 95091 - protein, 410 aa, unidentified
MEVLYDRVAGLDIGKASLTVSVRTPGARRGRHQETRTFKTTTGSLRVMRDWLVEQGVTIAAMESTSTYWKPPLYCLEEVMEVWLLNAAHMKAVPGRKTDVRDAEWIAQLLEHGLLTPSFVPPPPIRRLRMMTRYRIQLHGDRTREIVRLELMLEDASIKLSTVASSLKTVSARAILAAMIDGETDPQVLAEMAKGRMRKKIPDLAQALEGHFDVHHAQLARSILDRIDRVEQAMAELDLAIEAECAPWAHQLELLQTIPGVGPKVAQVVIAETGGDMSKFPTAAHLASWAGLAPAIYESAGKRAPAGRRRGNKWLSAMLVEAAGSVARMHDKNYLAVQHARLTRRRGMSRAQIAVAHSILTTAYYMLKRDEPYRDLGPEWLAKRNEEAHTRRLVAQLEKLGHTVVIDPAA

SEQ ID NO: 95092 - protein, 347 aa, unidentified
MRKFIRIGVDLSKRYFQVHALLGEDGRAVTRKLRRDGFLAFFAEAAPCLIGMEACGSAHYWGRELRAMGHDVRLIPPIYVKPYVKRGKNDAVDAAAVCEAVSRPDMRFAPIKSAENQASLMLHKTRELLVKQGAMCVNALRGHLAEFGVVAAKGVGHAGELLAKAKNDATLPAIAKATVEIFAQQLEAINASIVALDKEIAAVHAQSETSRLLAGVPGVGKIAATAIVASVPDPSVFKSARDFAAWLGLTPRQNSSGGKEKLGSITKQGNRYLRKLLTLGATSLLRVAGKRKGALRDWLVALLARKPARLATVALANKLARIIWAMMTTGEAFRTQIIARAGEPSMA

SEQ ID NO: 95093 - protein, 427 aa, unidentified
MTGWRMPVLFWLPVPDWDGCRGTLGEGVAYMPAVIGPERSVKVGDIAGREEDKVAGVKRQRGRRAMEFFCGLDVSIDETAVCVVDDKGHVHLETTVATDPEMIRAALKPFLPRLRRVGHEAGSLSPWLHPEMLALGLPVVCLETKHVRAAMSAQRNKTDKADALGIAHIMRTGWFRAAYVKSEEGYRLRLILTQRRALKRKFLDLENTIRHSLKVFGIRLGRVSRGQFDAAVREAVAQDALTRDLMEAMMRAKAALWEEYVRLHKLVVKIVAGHEICRRFLAIPGVGPVTALSVMTAIDDPSRFRRSRDVAAYFGLTSRRWQSGTSIDVQGRISKAGDPDVRRALYEAASAVLTRFRGRDRLRSWGLELAKRSCHRKATVAVARKMVVIMHAMWVDGTFYCGDATASDEERAMHAARRLKDHLGALA

SEQ ID NO: 95094 - protein, 343 aa, unidentified
MKLSRVGVDLAKNVYQLHGVDRHGKTLWKRRLRRGQWLQALMDKAEPGCVIGMEACTGAHHWARELQSRGYEVRLIAPQFVKPYVKSNKNDANDAEAICEAMSRPHMRFVTVKSVEQQDIQATHRVRTELKDQRNAKANQIRGLVAEYGLVAPLTLLALRKAIPCWLEDAENGLTVHFRTLLHGLWNDLVALEDRMTELDKAIRKIADSNEVTQRLQQLRGVGPLVATALVATVGTGEQYSKGRQMAAALGLTPRQYSSGDKQRLLGISKRGDTYLRTLLIHGARAVVSQAKHRDDPLSRWAISIAKRRHPNVAAVALANKTARMAWAMLRNDTNYDPDFAVS

SEQ ID NO: 95095 - protein, 447 aa, unidentified
MGAEPPFAALTETRGGTAPAGSILYVGIDVGRRGHLVAAIPRERMENGTWERAPVRRVATTGSGFRDLTTWLAGWGDPDHVRVGCEPTGGWYAQTVAAWLERHGYAVLWLQNTALHERRELLIGKQTKTDALDARLIARLVYEREAFGLRGGFLHQPPRSTDALRMLVRNRHKLVEQRTRYRLQLTAVEDVLFPELKDFFKTSITGTAARRLLEAYATPAHLAVAPLSDLREVLIVQARARRLGPRLLELQQAAAQSAGLIENIEPILQAQDWLLYQLRLVDGQIAGAEDAITSALETWPPRDRTVLDSLPCMSIMRQAVLLSAIGDLSTFRDDRQLRKFLGWYPELRESGSSTAKHRLGRSGNRLARRELWLWSVQLLAPACPPSPFRDYYRRLRERGLRGQVAVGHVAGKLISVLFFCVRRGELYDAERHGRDLGLSDACSTSEA

SEQ ID NO: 95096 - protein, 429 aa, unidentified
MDHSASLTNPILAWIGLDWADQKHDVCLQATGSTEVEHLVVEQKPEALQAWVAELRRRFPHGPIAIALEQSRGSLFYALMNYEFLRLYPIPPKALADYRKALYPSGSKDDPVDAQLLLEFLRKHPQRFRPWVADDVETRQLALLNEHRRRLVDDRTALTNRLTTLLKGYFPEALGWAEDLRTPLAWDFLAQFPSLERAQQASRLDVLKVYRAHTRRPPEQLEALCDEIRTARPLTTDRAIIASSVLMVEILVEQLRVLGAGIERVEHQLADVFATHPDRAIFQSFPGAGKALAPRLLAAWGSDRQRFPTAANMQCFAGPAPVTVRSGKTKWVHRRYAGPTFLGQTFHEFAAQSRLKSPWAKAYYQQMRDKGADHHPAVRALAFKWVCIMFRCWQDRTPYDEARYQQALKRRGSPLVATLNRLATPPARA

SEQ ID NO: 95097 - protein, 352 aa, unidentified
MLYTGIDYHKKYSVVSTMDATGARVREARIEDNEPAAFAAYFKNLPERSRVVVEACWNWGWLYDELGEIADIEDVVLAHPFKTRLIADAQIKTDRLDARALATLLRGNLVATVHAPTPANRARKHVIRQRLFLVRMRTMVRNRVHTVIARQRNLERPVFSDQFGKKGLHWLRTVTLPAPDNTLLEQDLETLEQLGTTIKELETQIAEANGVDEATRRLQTLPGVGPILAAVMAAEIDGVARFSRADKLCAYASLVPTTHSSGGKTAHGRMLPCSNRWLKWAFVEAAWVAVGCSPYFGGIYRRHRARGKKANTAITIIARRMCAIAWHLLHDKRDFAPNPPPLTLSPVAPRKD

SEQ ID NO: 95098 - protein, 339 aa, unidentified
MQVTTIGVDLAKTIFQVHGITEHDEVAFNRPLRRAQVLPFFTRLDPCLIGMEACSTSHYWARELSRLGHEVRLIPPMYVKPYVKRGKSDAIDAEAICEAVTRPTMRFVEIKSVEQQALLSLHRARNLMVRQRTQLVNALRSMLAEFGVYIAKGIARIISFSQGVLAGTKLALPEIAQDVVHNLCGQLDVLHGQMRWYETRLRLEAKRDPRIKLLQTIPGVGPVTASAIAASIGSGHQFKNGREFAAWLGLTPTNRSSGGKERLGRITKMGDQYLRQLLVVGMTSLVRQTKSHPERANKWLTALLERKPARLATVAMANKTARIVWAVLTKNEPYMPRTT

SEQ ID NO: 95099 - protein, 521 aa, unidentified
MSRKTRSKRRRSGRGCVQKANGVLHPRVQKVGPQHFGVVCVDVGKAKSEWMLCDFYGKVLIEPTEVLHTRCGFDLAILVLREALRKYRIRDQVVAVERTGNYHLPVKRAFAAASFETRIVHPFATKQFRQPADPGNKTDPNDLDAMFRATVTGFGLLEQELDDVSRRLRLLTRHRRDLVEKRSSLCCQIREHLDALLPGYAALFDEVWESAIAIHVARHFVSPELIREANLEGLTHSLRQAHIRVHQGVLQRILTWASNATSPADATDIHQRIWTTLDDDRAAKTLEIQALERDVASLLVQTPYVLLLSHPGINVVSAGELAGEMGPITHYLNAKAITGRAGLFPSRYQSVDVDRADGKIIRCRNRRLRTILMMIADNLIQCNHHFRGLNAIWKTQGKDPRWSRVKVACRFTRILYQIVAGRQVFRHPSQRDRAYILDKLLTFHRQHATPLDKTLVDLNRAIHQIPKAEYNNEAAPLQTHCERTQNRRRRDPQPIGDILLVVLAKLGVGAVQSTSEDRDPS

SEQ ID NO: 95100 - protein, 415 aa, unidentified
MTEERWYAGVDWASENHHVFLTDGNGRKIGEKIFKHSGEGLAEMAAWLLAASGAGSPSQIHIAIEVPHGPVVETLIERGFTVHAINPRQMDRFRDRFTLAGAKDDSRDAEVMASALRTDPHCFRLLAALDPTVIELREWSRIASDLGTERNRLTNRFREQLWRYFPAMLEFEEDLGSGWLLELWELAPTPGKAARIRKGTVAKILKRNHIRRFDAAHVLAVLRKPPVQVAAGTVEAASAHIKTLVARTRLLNGQIKEAHRQLDSLTAKLIPAEDAGAGQQKQHDVEILASLPGVGRIVLATLLAEAWDALLRRDYTALRSLTGVAPVTKRSGKSCIVIRRQACHDRLANAVYHWARVAIQHDPKSKAKYAALRGRGHSHGRALRSVADRLLNVACAMLKNGALFNPSFEAQNTPC

SEQ ID NO: 95101 - protein, 333 aa, unidentified
MGFEPEPSKEGSWMMAQNDLHVVGIDVAKDKVDACVRSPAQRQTFPTGAEGRRKLMAWLRRHKVGKAVMEASGGYERDWAKALRTAGIEVRIVDPKRVRNFARSAGRLAKNDAIDAEMIAWFAETFGDAPNQVYDAERERLAQIVNARQGLLDVQTELQNRNEHSVPELVQNVHARLLKKIAAEVAKLEAAIAAMIKATRHFAELAAIIESVPGLGEGTSAGLIATMPELGHVSNKVAAALLGVAPYDDDSGKRRGERQIKGGRRKVRNLFYMACLGAATRHNPALNAFYRRLIAKGKEKKVALVACMRKLIVILNTMIARGQKWDANLHLAS

SEQ ID NO: 95102 - protein, 422 aa, unidentified
MLAESHDEEQIIARVAALDIGKAELVCCVRVPAPAGGRRRLQEVSTHSTMTKSLADLANRLVGMGVERVVMEATSSYWKPVFYLLEAHGLDPWLVNARDVKHLPGRPKTDVLDAVWLCKVAERQMLRPSFVPPWPIRRLRDLTRYRTDLVAARTAEKNRVEKLLEDACIKLSVVASDIFGVSGRAMLAALVAGERDPKVLAQLARARMRGKIDRLEQAFDGHFADHHRFLLSRMLSRIEALDADIAAVDAQIEAQLAPFAKAAAHLDELPGIGPVAAAAIIAEIGVDMSRFPTAGHLCSWAKFAPGINSSAGKTKRSASSGHGSPYLARVLGEAAVGTSKTNTFLAARYRRIARRRGQPRAVVAIGRSILVIIWHLLHDPDTRYHDLGADHYTRHVDPTAKKRSHIRQLEALGYTVTLTPAA

SEQ ID NO: 95103 - protein, 348 aa, unidentified
MTVYIGVDFHARRQTISYLTTEDGEIKRLQLDHAQPEEVRRFYAQFAGQRVVVGFESSGRAAWFEELLEELGCEIWIGHATAIRLFARRRQKNDRRDADLILDLLVRGDFPRIHRYAAESRAVLQQLRYRQRLVKMRTMLLNSLVFMAASRGVVLRSQLKTKRGLERLRQIDLPPALCEQRDELCQLLLELKPKIDKVESSLAAKAEADLRVRRLRTQYGIGPLTGLCLAHTLEHPERFANPRKVTAYVGFDPVEDSSGERRRIGSISKQGSRLLRFLLVEAGQIAVRKDEELARVYKRVLVRRGHAKAKVAIGRRLLVRAFIMLRDEIDYAEFQRRGVAARSSRGIA

SEQ ID NO: 95104 - protein, 328 aa, unidentified
MFYLGIDVSKATLDCCLLYQGVGGKKKNKRFINSAKGYSELLQWLTQQGGTPTQTHIGMEATGCYHEEAAFRLHEAGCLVSIVNPAQVRYFAKGRAIRTKTDKVDSEVIAYFVGINKPELWQPPTPEVLLFKGLLARLQALNDDLQREKNRLEKALSTTTPARVIASINASIRFIESEIKRLEDDKNDHIQQHPDLKRDKVLLESIPAIGDKTSDALLAILQTHHFDSADKFASYLGVIPVEKQSGTILGKVMLSKNGPSQVRAKLYMAAIVATQYNPHVKKLYERLLAKGKCKMLALGAAMRKLAHLCFGVWKNQTPYQANFLPKTP

SEQ ID NO: 95105 - protein, 356 aa, unidentified
MNEGSWVGLDVHARSVVAGVIDVGSGEVRSQRVPPGPEATVAWLKTLPAPVRAVYEAGPTGYGLARACAEAGIGCVVAAPSRIRPAADRVKTDRRDAERLARLLRLGEITPVRVPGPEEEAARDLVRAREDARGDLMRARHRLSKLLLRHGAVYDATAWTRAHDAWLRKQRFQGGPLATVFDECYSRMIDAKSRRATLDKAIAELAATPPYVDVVERLVCLRGVSTLTAFALTVELGDWHRFRPESLAPFLGLTPSENSSGERRRQGAITKAGNTHARRLLIEAAWHQRSAPRLSITLERRRTGKSLAVRAQADSSARRLHGRWNALEARGKPRLIVVVAVARELAGHCWALATME

SEQ ID NO: 95106 - protein, 379 aa, unidentified
MITSYPCESTGIMFQSHVGTDLHKTVLTFATRDSSGQLINTASIDCKCVNKITDYITSLPRPIHCAIESVGMYEWLWEFLEPMVEKLTLADAVELKYRAGRRQAKTDKIDAKFISLLTYKNDLPVSFVPDKTTRQFRRVCRHWHATSEMLSDIKIRMRWILLQHNLKGPEHLNGNSARRWLKAHGHLMDSIAFFSFSQFLDTVEHIELQQLTIRRQMRQFSQLPQFKDDIELCCTVPGIAEILASIIVAEVAGFDRFDSAQAIACYTGLTERTQESSGKRSQGHVSCAGPSSLRWALCEAATTLVRSDPSYRGIYNHLIKNTGNKSKAKVAMARKLITWLWKMSQTREPFIRGGSTNHNRNANIARQKAMSIKNMASAC

SEQ ID NO: 95107 - protein, 491 aa, unidentified
MITIRHRAKLSKGGEMAAWQKANEKLNRQQRKELVRRLWSSNPGLDVVHRNAAGIDVGNEEHYVAIAPTQDEVPVQRFNCFTAELIRMAVWLKGRGVQTVAMQSTGVYWIPLYDILEEHGIEVYLVNARDTKNLPGRKTDVQESQWLLKLHTYGLLRNSFRPASEIRVLRAYWRQRDQHVKTAGQCVQRIQKALTQMNLQLANVISDLSGKTGLQILRAVVNGERDPAKLADFRDPRIKASREDIIASLRGNWRAELLFQVKQELARYDFCQTQIEECDRELEQQLQSLPELRAGEEKSGTKETQRTPKKRKRRKDGNIPRFDLHHELQRISGVDLTRIDGIDVMTGQTVISEVGLDMSRWPSENHFASWLGLCPSNELSGGRILKKRTRKVVNRAATAFRMAASTLRTSQSYLGAKFRRLRSRLGPPKAITAMARTLAILFYRMLKFGQDYLDRGTEFYEQRQRDQQLQYLQKKAAQLGFQVVALPQTPK

SEQ ID NO: 95108 - protein, 404 aa, unidentified
MIFVGVDWAEDHHDVCVMDTEGTVLGTRRVADSVRGVGELHELVGAHAEEPDEVAVGIELDRGLLVSALVGAGYAVYAINPLASSRYRDRHAVSGAKSDAGDAKMLADLVRTDRHNHRPVAGDSELVEGIKILARVHQTAIWGRQRQVNALRSALREYYPAALEAFGTDLSHHDAVAVLSIAPTPALGRQLSKSKIAAALRRGGRTRYIETKTNEIQAVLRAEHLEAPAVLASAYGDAARSALRLIEVFTAEIGALEKAVAENFDQHPDAKIVLSLPGIGTVLGARVLGEFGDDRTRFASAKCRKNYGGTSPVTQASGRSHIVLARFTRNRRLSDALDRWAFCSLTPSPGARQYYDELRARGKTHKQAIRQLANRWVGIFHGCLEAQTTYSEEIAWPRSTESAA

SEQ ID NO: 95109 - protein, 329 aa, unidentified
MDRIAIGIDVSKLTLDVALTTDGKEVVSSGQFANDAKGHKALHKWVGKQMRKHGAGEVHYTMEATGVYSEGIHEFLSESGEMVSVENPLKIKSFAQMQMMRTKNDAVDAAIIARYAWIMKPALTPPIEPAIKRLRALARHLEHLTQRKASEANRLESAKDTIVIKSIKDIVKRYEHQIGKVTKEIKNHIDNNPDLQEQMDLLTSIPGIADKTAGVILSELKGETMSVKAQVAHAGLAPRQRVSGTSVRGKTQICKTGNARLRKSLYMAALSAIQHNPHVREFYQRLVSQGKHKMVALCACMRKLLVIALGVLRNGVPYQEDWVSKRPVG

SEQ ID NO: 95110 - protein, 411 aa, unidentified
MVKENFIYVGIDLHKETHTAVMIDCYNQKLGEITFPNRPADFPKLVTKVKKCNTDGKEVVYGLENAYGYGRALAVWLIDKGYLVKDVNTAISHRQAKHRGAMYRKSDSDDAKAIALATLNMLDKLPDACPNDAYWSLGHLVHRRDNIMKQRTRLVNQLHEQLCIAYPSYKSFFNDISRPTALYFWEHYPFRKYLRGKSVEDLRKELVPVSHNKCSTKTCEKILDAVASDKVKNIDYQDARDMVTLSIVSDLQHYDSQLAEVDKMLEQMYKMLGCTLTTIPGVNVIIAVKILAEIGDIKRFSNANKLAQFAGIAPLHLSSSGKGKDVATKQGNRRLQAAIYFLAIQMVQLSSKGTPRNPVVRAYYEKRKAEGKTSQQTLICISRRLISIIYGMLKNGTEYRMPVVENAGEKL

SEQ ID NO: 95111 - protein, 407 aa, unidentified
MDVIHAKCAGLDVHQKTIVACARVMTGKTVQHHLQTFGTTTDDLLALGDWLARHEVTHVAMESTGVYWKPVWYALEGQFQLLLANPMHVRNVPGRKSDVNDATWIADLLAHGLVRSSFVPPEPIQELRDLTRTRKQLTREIARHTLRIQKTLDQANLKLTGLLTDILGVSGRAILDALVAGERDPDRLADLATGRLKASRAELVAALHGRVTPHHVFMLQLHLTQVDALRAAVRDLEARLGDALAPFRAAVERLTTIRGIGPLAASVLVAELGVDMSRFPTAGHLRSWAGLSPRQDESAGKRRSTRTLAGNPWLKTTLVQAAWSAVRKDGTYFRAQFLRLKARRGPKKAIVAVAASILTAVYHVLQREVSYEDLGGDYFSQRDKAKLARRLIARLHDLGLTVEVRAA

SEQ ID NO: 95112 - protein, 355 aa, unidentified
MSILAESLDYVIGVDTHLHSHTAAVLTATGAVVASLRIDAEQAGYCRLVRLVSRAAPGRRVWAVEGTRSYGAGLTGHLLNLGETVGEVDRPKRPARKRGKSDEIDAVRAAREALSMGQLASPRGSGRREALRIAASTRQEVMGERTRAMNQLRGLVVSAPEHIAARFRDHSGRSHSLERLTKRCLALRVYGTVDVEDRVRLDTMKRIAHRIGELEREAAHYETEMTALIRELAPGLLELPGVGPATAAMVLTTYSHRGRFRSEAAFASMAGVAPIPASSGKQQRHRLNRGGDRRLNQALDLIVKNRIRYDPETIAYMERNKGGRRTDRDLRRILKRYLARSLFRFLEHAPPLDKG

SEQ ID NO: 95113 - protein, 401 aa, unidentified
MESPIVSIDVSNGNSHYMCFIKNNKRFGKVKKIDHDIEGFKRLLEDIQKLEAETNEKVCAVFEATGVYTKPLERFLSKNSIKTYIINPLESARKRKEEIHNKKTDKLDPISISKVYYDKEEMMELTKKDETHNWLRKKNRLYEDQLNHLRKYKVTFQNQLSICFPGYLDLFKDGYSDIPMTILKKYPHPDLLKNKKAETVARYLEKNTCHTHKVSLEYALKIIEFAKKTYPGCEKDDVEVEIFKILLDKVIETQRECEKTLNEMITVASTLEEYRYISSIDGIGPNLAARIIAEIGDIEEFKSREALVAYAGLDPHIYQSGDQDGKHLKISKKGNKYLRCLLFLAVGCSIRGAKDNPVNRFYQKKKQQSNPLNSKAAKTACTAKLLKIIYGICKNKTTYER

SEQ ID NO: 95114 - protein, 344 aa, unidentified
MKKNLFFIGLDIAEADFAASIYKTPDKPIVTKEAIPNNPEGFSMFLLWLKDHHIDKANSHICMEATGVYSQAIAYYLLFAGFPVSVEPPLKVKRAFDPIGHKTDPVDSKQIAEYAYRFQDELTSWKPKDEILEKIRQLLSVREQFTKQKVALKNAMQAYSKQRVQVALIKKAHQETLAQIEKQIARIDKELAKLIKQDPQILQKADYLKSIPGYGMLLAAHLLVITENFTKIQQSKRLASFVGIVPYQHQSGVSVFKRAKIRHFGPGPSRKLLRLAAQSVATHDVTFRRYYLRKLAQGKAKTLVLNNIANKLLKVACAMLRNNTRYIKEHRSIHPMYLKSLKSA

SEQ ID NO: 95115 - protein, 343 aa, unidentified
MQTITAIGLDIAKSVFQVHGVDADGRVVVRRQLKRRYVLAFFQKLPPCLVGIEACASAHHWSRELQALGHTAKLMPPAYVKPYVKRHKNDAADAEAICEAVARANMRFVATKTPEQQSCLTLHRTRHLLMRQQTSVINAIRSHLAEFGIVAPVGRNGVEQLLGVVADSNDKRLPEVARACVAALGAQLRVLKVQILEFDRMIRAWHRSSEASKRLDQVPGVGPVLATALIASVADPKAFRSGRDFSAWIGLVPNQNSSGGKERLGNISKRGDRYLRSLFTTGALAVIRYAKIHGTKHRPWLTSLLARRPTKVAAIALANKLARMAWAMMAKGERYKEPAALAA

SEQ ID NO: 95116 - protein, 324 aa, unidentified
MAKRKLDVALLDEAGKVKSKVLANDPAGFAALMTWLKERGAEAASSHLCLESTGIYSEGCATFFADAGWKVSVVNPSLPKDFGKSELKRNKTDAIDAGLLARYCLKMEPPAWQPPPLEYRKLRSLVDRRQALQDMHQQEANRLESTVETSARTSIAEHLSWLESRIAELNRDIDDHIDGHKQTLGKDAQLLASIPGLGRTTAAKVLGLLGDLRRFDSGKALAAFIGVTPQRRESGDSVRGRSSISKAGHASVRHALFMPTLVATRHNPKIKAFRDRLVAAGKPKKSAVLASMHKLVHIMYAVVRKGVEFNPRFGQLALDVQDGI

SEQ ID NO: 95117 - protein, 355 aa, unidentified
MIYTGIDYHKRYSVACTLDAQGHLLHEARIDGNAAAAFAAYFKHLGTPSEVVIEACWNWGSLYDLLEDTAGVAKGVLSHPAKNRIIADAQIKNDRVDAKALATLLRGDFVAKVHVPSRDVRRRKNVIRQRLWLARLRTMIRNRIHCVIDRHPQLARPAVKDLFSNQGKAWMKRAPLPATDRTLLDDDLALHTLLQAQIDALEKIIVADNAANPLAMRLQTLPGVGKILAPIMALEIDPVERFITADKLCAYAGLVPTTHASGGKIAHGRMLPFCNRWLKWAFIEAAWVAVGCSDYFGAFYGKQRLRGKGANDAITIVARRIAKIAWQMLHDGRDYSPQAPTRSKKPISPAALITD

SEQ ID NO: 95118 - protein, 368 aa, unidentified
MKDVTTYVGIDAHKKDLFIAMLVGTQATPLTWTVANEPNAIRRLVRKLEREAPGPVRSCYEAGPCGYALQRRMTTTRVVCQVIAPALIPRKPGERIKTNPRDARKLAELLRAGLLTEVQPPTPEEEAVRDLCRARDDAREDLQRSHHRLGKLLLRRGLHYSGRNWTRAHRQWIDSLAWAHAAERVVVDDYLLAIDHLEARLIELDARLTAIAATEPYREPVAWLRCFRGIDTLTAILILAELHDFRRFQSPRALMAYLGLVPGEDSTGEKHRRGRITRTGNALVRRLLVETAWHYQHRPGVGVALTRRRKGQPTRVIAIAEKAQQRLCRRFRRLAEQHKPAPKIAVAIARELAGFLWAALQPAPVSAH

SEQ ID NO: 95119 - protein, 416 aa, unidentified
MNAVGIDVSSRKSTVAVLRPLGEVVCLPFDVTHDIAGLASLVEKLKALDGETRVVMEHTGRYYEAVEKALHEAGLFVCAVNPLLIKEYGANSLRRVKTDKADAVKIARYALDNWADLRDFTPMDAIRYDLKTLNRQFQLASKQRTASANNLIALLEQSFPGIRKCFDSPVRSDGTQKWVDFAHSFWHVDCVRKQPFPAFCERYRKWCKRHAYLFKLSNAEEVYALAKRAVVLTPKSKVVKVLVQEAANQLSSISRSVEVYRAEMDRLAAMLPEYPVVMAMYGVGKSYGPQLMAEIGDVRRFERKQALVAFAGIDPMPNQSGDKNVRSNKSSKRGSPYLRKTLFNVIRTYLQCAPQDEPVFQFLNRKRAEGKPFYVYMLAAANKFLRRYYAKLRDFFASLDTLQPVAPIPTILKATL

SEQ ID NO: 95120 - protein, 425 aa, unidentified
MNYKQNEKINQVKESTLVVGIDIGSTKQYARAFDWRGIELGKVFTFSNSKEGFEAFKAWMRHLQDKYRKSDVIVGIEPTGHYWFDLGAYLEDEGILLVMVNPYAVKQTKELDDNSQSKNDRKDPKVIAKLVTEGRYSAPYTPDGVYADLRIMVTNRKRLIREMTQIKNRFARWFAIYFPEYTDVFGDYEAQSSMLLLKKVCTPEAIVELGAEKINKIWRDAKLRAVGMKRATTLCETAKRSIGLKKGSSAARYEMKLLLEDYEYKKAQLDAVMEEIEKLCRKIPESEQMLAIKGIGVITVAGFLAEVGDVRRFESPRQIQKLAGLSLRENSSGKHKGQTTISKRGRSNLRAVLFNAAIPLIATNPEFKSLHEYYTTRANNPLKKKQSVIAISCKLIRVFYAILANGVTYDPQKMLSDIHRQPQAA

SEQ ID NO: 95121 - protein, 310 aa, unidentified
MGQVFVGIDVAKAAVEVCVRPTGEALAVPRDEVGLAQLVERLTALGPALVVLEATGGYEASVAAALAEGGLAVVVVNPRQARDFARSTGKLAKTDRVDARLLAHFAEAVRPPVRPLPTAAAEELGALVARRRQLVDMIRAEKTRAQQARSREVQGRITAHLQWLERELADIDDDTRRLIRSTPVWRETDDLVRSAPGIGDVTASTLIADLPELGHLDRRRIAALVGVAPMNRDSGAWRGHRMITGGRAQIRQHLYMATLTAITHNAAIRVFYHRLVAAGRPKKVALVAAMRKFLTILNAMVRDRRQWQNA

SEQ ID NO: 95122 - protein, 342 aa, unidentified
MEKVYYIGLDIHKKNISYCVKLQDGSIVQQGEMAAERKAINQWTSELPGPWKGAMEATLFTGWVYDFLKPHALELKVAHPEMLKAITSAKKKNDRADSEKIADLLRVNLLPECYMASEEIRELRRILRYRNMIVRTSVKMKNKISGLLMEVGATYSKKRLHGKKYFNGLLETVEDVPPSVNELLKLSRSGLDMFQGVQRKLLDTLHDNSLIGERVKRLMTIKGIGEVTALTWVLEIGDPNRFSSIRQAVSYCGLCGAQKESGGKEQRGPISKKRNKHLQTVLIEAAKLAPRWNQQLAEIYTKELERGNRNRATLAVARKLVAYMMAVEKRQKDFEPMTAEAA

SEQ ID NO: 95123 - protein, 345 aa, unidentified
MSEQYAGKQIVGMDLHRRRSVLVRMTETGEHLETVRISNDPEYLRQVMERAGEAPEVVLEATYGWYWAADTLAELGAHVHLAHPLGVKMFAYRRVKNDQRDAADLADLLRMGRLPEAWIAPPACRELRGWVRHRAKLVGLRSSLKCQIHAVLAAAGVQVPMSDLFGAGGRQLLTNARLAPESRARVDSLLRLIEALDFEIELFATLVARRLREHPGYRAIQQIPGVGPVLAAIFVAEIGDIGRFARPQQLASWAGLTPKHHESDTTVHRGRITKQGSRLVRWAAVEAVQRMPAHTRLGQIRDQVGERRGRNIGVVAAARELTELVFFGLRDGDVRRLSTPPQPAA

SEQ ID NO: 95124 - protein, 459 aa, unidentified
MRRDKSSVGSWEGLKVIHPNAAGLDIGSAEIWAAVVPGCTAEPVRKFGTFTPDLNALADWLTACGVDTVAMESTGVYWIPVYEILEARGLQVHVVNARHVKNVPGRKSDIQDCQWLQGLHSVGLLRGSFRPEGEIVALRAYLRHRAALIEHRAAHIQHMQKALQQMNVQLSQVVSDITGMTGLAIVRAIVAGQRDPQQLAALRQPGCKKSEQQIAKALTGNYRREHLFALQQALALYDFYTVQIATCDTEIEAQFANLKPISEDLPPLPPSGKRDSHSKNGPSYDARSYLYRMTGVDLVAISGLNESTVQTIISETGTDMSHFPTEKHFCSWLGLAPHNDISGGKRLRSRTLPSNNRAGQAFRLAAQSVSRSPNDAFGAYYRRMRARLGAQQAIVATAHKIARAFYHVLKHRTPFHDMGGEEYERRARLRELKNLQKRAAKLGLLVVEKPQPAALAGSF

SEQ ID NO: 95125 - protein, 320 aa, unidentified
MTETPLPLFIGIDVSKEGLEVAAGVAGETWTVENDPTGLASLKDKLQALKPELIVLESTGGFEALALAELYAAGLKVARVNPGRVREFAKSIGQLAKTDHLDAHLLARFAEAVHPEASILPDENAQYLAALINRRRQLLEMQVAEQNRLQTAPKTMRERIHKHLDWLKTEIRELDKELDDFIQSSPLWKEKGDLLRSVPGVGPITTFTLLAELPELGTLDRKAIAALVGVAPFNQDSGHHTGKRHIHGGRPAVRSILYMATLCATRFNPVISSFYQHLLKAGKLPKVALVACMRKLLTILNAILRTRSLWRAPSTSMPAP

SEQ ID NO: 95126 - protein, 309 aa, unidentified
METEVGCDISMDWIDVCVLEPPRHFRVANKPKPVERLARELPPGSRIGMEATGTMHQLLADTMCAAGHTVYELNPRWVHRYAGGVGVRGKSDRGDAMVIARYVHAEGAHLHPYRSPTPQQREIRTLLHRRAQVMKLKTASRQSLGDQANEVVQTFKQLVKDIDRRIATLLGADPQWKGLAAKLRRIPGVGPLVAAHLVEALARRPFEAVKAFIAYTGMDPRPNDSGRKKGIRRLTHHGDAHLRAALFMGAMAACKVARWRAVYEHNRRKGLPSTAAIIVVARKLARVAFCLFKTGQDYDPERIGGVAPT

SEQ ID NO: 95127 - protein, 342 aa, unidentified
MKVTTVGLDLAKNVFQIHAVDGRGKVVVRKQLKRDQVAPFFAKLEPCLVGIEACASAHHWARKLQGFGHDVRLIAPQFVKPYVKANKNDAADAEAICEAVSRPSMRFVAVKNVAQQALLAMHRVRQGFIKARTAQGNQIRGLLGEYGLIIPQGIGHIAKRVPSLIEDASNELPGTFRVLIDRLLEHLKALNQQVAELEAQITAWHRESEASRRLEQIPGIGPITATALVATMGEARNFSNGRQVAAWLGLVPRQHSTGGKATLLGMSKRGDAYLRTLLIHGARSMILALRRKAKPQGWLHDLLKRRNANVAAVALANKNARIAWALLAHDRHYRADYVSAAA

SEQ ID NO: 95128 - protein, 361 aa, unidentified
MSESMALVGLDVHKSRTVAAVLDRVTGELRMERLRGAPELVVPAFLEELDRPVEAVYEAGPTGFVLAREAEQRGLDIRVVAPGSIPRAPGDRVKTDRRDAKRLARLFAAGELRFAFVPSEADERFRDLVRCVDDVRRDLMRARHRLSKFLLRRGVRWQGKTWTQPHERWLCTLHFEDPLSQAVFVDYLAAVQGLAQRRKTLGSVLEGAVPNSSHAETIKRLRCFRSIDTLTAAGLCAEVGDFTRFAKPALLSGFLGIVPSEYTSDEKRTQGQITKAGPTNARRLLVEAAHNYRHRPAIGENLKARQLGQDPRVAQIAWRCQQRLHQRWMHLGGKRGKPTGKVAIAVARELAAFCWEAATLN

SEQ ID NO: 95129 - protein, 312 aa, unidentified
MAYVAMDTHKKTIAVSVAEGVRRGEVRFIGEISSDPAAVSKMITKLASRHEHLSFCYEAGPCGYGLHRQITQLGYECIVVAPSLVPTRPGDKVKTDRRDATTMAALFRSGELTAVWVPDEAHEAMCDLCRARQMAMQGLRRARQQVLGFLLRQGRTYSAGNHWTGKHRKWLAAQRFEHPARQIAFEEMVQVVDEAEARRDRLARQMEELVPSWSLAPIVTAIQALRGIASIAAITIVAEIGDFHRFANPRQLMAYLGLVPCEHSSGAKTARGNITKAGNTRARRMLVESAWTYRLPARLGEAILKRNQAVTQ

SEQ ID NO: 95130 - protein, 346 aa, unidentified
MRIIGCDYHPSWQQICWMDTETGETEEKKLEHASGEAERFYRQLPGRALIGMESTGNCQWFVEMATRAGHDVWIGDAARIRAAEVRQQKHDRGDAALILKLLLEGRFPRIWTPSGEEKDLRQLLIHRYKLVRIRATVKNELQHLAMNQGVTKKRKLWSKAGEQVLRELPLKPWASRRREDLLKVKEMLNGQIAVLDGAVVEAAEKNEKARLLMTQPGVGPITSMAFVLTMGDVNRFQRGKQVASYLGLIPREYSSGGHQRLGSISKQGNRFMRMLMVEAAQCAVRYDPGFRNEYLHRCHKKAKGVAKVAAARKLAIRLFWMLRTNTGYPEVVRAESSSRVALVGAS

SEQ ID NO: 95131 - protein, 402 aa, unidentified
MLYIIYKAMKKVCGLDVHKDTIFLCILAENGQTFLKEYSTLTPDIESMRDLIKEHQVCEVAMESTGIYWIPIWRILQGHVAMKLVNPYFIKQLPGRKTDVKDSQWIATVLQKGLIRGSYIPEKHIQELRQYERRYVRICEQVTRIEQEIDRQLHRCNIRITNFATKIGSVSVMGVVRGIIQGENTSDELIRHVHARITNKYKEKIAASLQGVVSDSDRFIFRHNYEVLELLTRQQQECIKEMEKICDILYEQEMNLLCTIPGIQKLSAMTIIAELGVDMKTFLTAAALTGWVGLRPRNDESAKKIKSRKITNGNKYLRRILVQCAWAITRSKKCWLSGKFNELAKRRSQKKALIAIARKLLVIIWHILSKNQAYKEYKPRLSKEQKQKRITWLQKQITELQA

SEQ ID NO: 95132 - protein, 391 aa, unidentified
MPDVRSSVSAKTTRTWVALDVHKDSLAAGILSAEGGPPEVVQFENSERAVRRFLRRLGDPEALAVCYEAGPCGYDLYRLLTSVGVACDIIAPSLTPVRPGDRVKTDRRDAMKLVRLYRAGELSFVCPPTPVQEGLRDLVRCRDDLRCARTAARQRIGKQLLRYGRIYREGRGRWTQRHGIWLRAQRLDDPLAQAALQQMLCHLQALDAQLLAIDAQLDEIAREEAWHEAVIALTCFRGVSTLTALSLLAEVGDFHRFGCARELMSFLGLTVSEYSSGARRTRGSITKTGNRHARRLLVETAWHYQHAPLLSARIRAHEGVVAPELLALAWQAQIRLHHLHRHLTGRGKPATVATIAVARELCGFLWATMTDQPLRGDHLDERRPSKEVLVA

SEQ ID NO: 95133 - protein, 325 aa, unidentified
MKELYCGVDIHKENFVGNIMKEDGSIVREGSFLPTKEGAQSFFCGMPIKAIAIEACGIWRGAYNIFSRLGYKVKLANPVKTNMIACKKKTDKVDARTLADLLRTNYLPEVFIPNENTLKLRDTVRHKCNLTRLKVRVQNKIKGYLLREGIAYPKQIWNEKALSELKKLEKEELNDLIDSYWFFRNKERKHLGKIGNISRNTKLSALLKTHPGIGEFGALMMVAEIADINRFEDAKHLLGYAGLVPGIYQSADKSHSVQNHAVNKWLKWIVTECASRAAMFDKDFMAKFAKVKQRKGFKVARREIARKMLRNVYYMLKNEEPYNAS

SEQ ID NO: 95134 - protein, 408 aa, unidentified
MQVVYERCCGLDVHKETVVACVITPRGKEIQTFSTMTNNLLELADWLSELEVTHVAMESTGVFWKPIYNLLESDFEAMVVNAQHIKAVPGRKTDVKDAEWIAELLQHGLIRASFIPDRPQRELRELVRYRRSLIHQRGQVVNRIQKVLEGANIKLSSVATDVVGASGRAMLQAMVNGTEDPKALAEMAKGRLKNKRPELEEALKGLVNDHQRMMLDSLLRHLTFLDEEIERLDAEVARRMLPFEETIQHVMEMPGMGRRNAEEVLAEIGTDMSRFPSANHLASWAKMCPGNNESAGKRKSGSTGHADSWLRSALVEAAWSASRTKETYFSAQYRRLAPRRGKKKAIFALGHTILVTIYHIIRDKTDYHDLGCDYFSKRSSSYIIQRAIRQIEKCGMTVTLKPLQPVFS

SEQ ID NO: 95135 - protein, 319 aa, unidentified
MGVEDMMSEFIGIDVSKATLDVYVHAAGAAFAVANDEAALYGLREKLAGFKPELIVLEATGGYERLCAAALAQAGLPVAIINPRQVRAFAIATGVLAKSDRVDARVLAHFAAAVRPEVRALPDEQREALDELLGRRRQLVGMLVQEKNRLQQARAALVRKDIKSHITILEKRVSGCDGELQQLIHDSPAWKAQEDLLRSFKGIGPVSARTLVAELPELGKLNRKQIASLVGLAPIARDSGTWRGKRAIYGGRAQVREVLYMATLTAIRANDTIRSFYQRLCNAGKPHKVALIACMRKLLTILNAMMRTQTHWHDPLKTA

SEQ ID NO: 95136 - protein, 342 aa, unidentified
MNIVYVGLDLGSSNFQQVALNRAGVSRVNRDFQTSEANLIKAFSDLKGEIHVHLEAGELAPWAASVITPLVRRVVCSHPQSNAWIAKDADKCDRIDAYKLAELLRLNRFKEVHYAPDQPRRNFKQLVQHYDELTAQQARLKTKLKARLRLQGVIVTGARLFSAIGRKEVLARVESRDMRTAIKQLYEVLDQSVAAQGQARLLMLRAAQAFQEIKLFRTAPGMGPIGACRFSAYVHTPSRFSTTRKLWKYCRLSVSHRSSNGKPLRRPRLDRSGCGRLKDVSRKAFEVAVRARQDNGFKRAYQRALETTHDATHARLTVQRKIVSTLRAMWLNQTPYREELMR

SEQ ID NO: 95137 - protein, 315 aa, unidentified
MPKIVHKICCGIDVHKSFVVACIAKTDKNLVTTYSKAMRFSTFTNDLRRLAKWLSDNDCKEVCMESTGKYWIPVWNVLEHTCDCVLMHPKYAKAIKGKKTDKRDANEKIQAAVDGEICAEQAEKLRIIRSHMASLTECKANLESAILNVAEKFLPQINLVSTVPGIKDFSAVAIIGEIGADMSVFETSRHLCSWAGLTPQNDQSAGKKKTTRISRAGQYIKPLLVQCALAAVKSKKNPEISNRYNAIKKRRGHKKAIIAIARMLLTAIYNILKKNEPYNAELYRKSNLPPVQREVTVEQAIFIIQRQGYLVTNST

SEQ ID NO: 95138 - protein, 445 aa, unidentified
MHPQAPASPRLVNMNCSPSSAIQTEMKTNDYAAYLALDWGDSHHAFALQMADTQKTEKGQFAARPEAIHDWLKELGSRCSHGRVACAIEAGGDALVSALLEHKWIEIYPVNAAMSARFRKALVPSGAKDDVPDANVLLTLLLRHGDQLKPLQLDSAKTRELAALVLARRGAVDRRSQLGNQLRAVLKGYFPQALALVGDDIHGVMALDFLERWPDLATLQKARAATVQSFYVLHRVRRPELIKSRLELVAQAQPLTQDSAVIGPAVLQVQMLTAMIKTLQRHIARFDESIQERFAAHAESALFRQLPGAGPQLAPRLLVAFGDNRQRYPDATSLQKYAGLAPVKEKSGRQLWVHWRWNAPIFVRQTFVEWAGQTVVYCDWAGVYYARQKRAGKGHHAIIRALAFKWIRVLWRCWHRQEAYDEARYLTALRQRRSPLIQDLDLALS

SEQ ID NO: 95139 - protein, 344 aa, unidentified
MTYYTGIDVSLRTVSICVVNDKGEVCLEAKVAAQIDAIVECLHRFDRDVRSVGFEAGTLTQYLTYGLQAAGFEVVCLEARQVSVTLAAMRNKTDRNDARGIAQILRTGWYSRVHIKSLHSHQVRALLASRKAILKKCVDLENELRGLLKVFGIRLPSRVGHGAFDAELRQTVSGDEMLACALVPLLDARTVLYKTYLKLDNAVKAVVRVDPICRRLMSIPGVGPVTALTFKAAVDDPGRFKSSRTVAAHFGLTPRRFQSGELDNPGHISRAGDADVRSALYVAAHSLLTRNAQWSSLKSWGVRLAKTRGHRRAVIAVARKLAVILHRMWIDGSQFRWGPAPAQA

SEQ ID NO: 95140 - protein, 368 aa, unidentified
MTLREKSLFVAMELSNKNWKMRLGDGSRERERTIPAREEALLFREVAKAKEKLGLSSTARVIFCYEAGRDGFWISRMLQKHRCECHVMDPASIEVPRRARQRKTDRLDARKLLQLLLRKVLWGQEEAYAVVRVPTEMQEADMRCHRERERLVKERTGHAARIKSLCILHGAVVKNPVKMRVEQLRDWEGNPLPDPLVEELRREQKRLIIVEEQIKVLEEQQVAALKKASSPTQDKAVKLGKLKAVGQQSAWLLSHECFGWRVFANRKQVGSFAGLTGTPYDSGETLREQGISKAGSGRVRTTMIELAWNWVRWQPKSALTNWFLDRFVRNGTSRSKRKGIVALARKLLIALWKYVEQDIVPEGAILRA

SEQ ID NO: 95141 - protein, 447 aa, unidentified
MAQRKRPTTQSAITLTHPNAAGIDIGSAAHFVAVPPDRDDEPVREFQSFTADLHRLADWLDACGVDSVAMESTGVYWIPLYELLESRGFTVLLVNARHVKNVSGRKSDVLDCQWLQQLMSFGLLHGAFRPAEQVCVLRSLTRQRTMLLRNQGRLVQHMQKALTQMNIQLANVISDVAGETGQRILRAIVAGERDGQALAQLRNARIRASEDEIAKSLQGSWRAEHLFALKQALDAFDFCGTQLAECDAQIQAQLQALHVREDAPAAGKKRGRARNAPKFDLRTQLFQMCGVDLTRIDGIDVTTALVVVSEVGADMGKFPSDKHFASWLGLCPGTKITGGKLMSGKTKRCANRAAQALRLAAAALRSSQSALGAYYRRLCARMDKPKAVTAAAHKLARLIYAMLTHGQEYTDQGQDYFEERYRQRVLHNLAQKAKAMGMQLVSADNPA

SEQ ID NO: 95142 - protein, 403 aa, unidentified
MFVFLTDDNQLSILSEISVANDIEGASFIRETILEFNNSYHFDQIVIGMESTSMYSFHPSMFFHEDEKLKKLNTLVTIENPFRVKQFSRMFDENKTDRNDALRIADFLRIQRFTTSSPIKEEKYMALQRLTRTRYQLIKQLIRTKQHFLENLTYKCNTLAREMRDESTSLFSATLISLMTEDFTLDELAELPLEAFCDLLQEKGKGRFKQPEKIAKAIQRAITMSYRLGALAQESINVVLSVLVREIRALEKNIKELDKAIEQVIVVIPEYQCLTSIPGVGKVYAAGLIAEIGQIERFEDQTKLAKYAGLSWKVNQSGNYQSQNTPLTKQGNRYFRYYLVEAANSVKNYLPEYKAFYQSKYKEVPKHQHKRALVLTARKFTRLVDTLLRKHQLYTPPRSVIEK

SEQ ID NO: 95143 - protein, 327 aa, unidentified
MIQPVLGIDISKTTFDAALQISDKTTHRKFENNEEGFKQLSIWLQKNKVKTVHACMEATGQYGECLAEDLYQKGHGVSVVNPARIKAYASSKLRRNKTDKADAELIADYCQREKPALWSPPEASFRDLQALERHLEDLQSMLQQERNRLKSGMRTQLVIEHLQSHEKYLEAQIADTKQAMQDLINTNARLKQQRDLLVSIPGIGELTAAKILGEIRDVRQFESARQLAAYAGVTPSHFVSGTSVHKKSRISKTGNTNIRRVLYMSAISAKHCNQIVAPFCSRLLKNGLTPMQTVCAAMHKLLHLIFGILKSGKPFDPNFLLNQCLTP

SEQ ID NO: 95144 - protein, 408 aa, unidentified
MRVIGLDVHRSMAVVAVLEKERLTSGGRIDLTRDAVIAFGRKLRSDDEVVIEATVNTAAIVHLLRPFVRRVVIANPLQVRAIAHAKIKTDKIDAAVLAKLHASGFLPEVWMPDETTETLRRLVAQRAQVIQQMTRAKNRIHSILHANLIPLYQGELFSVAGRSWLKTQPLALDETLAIQRHLADLDCRASDLRVLDQVLAQRALQDKRVERLMTISGIHVTVALGLLAAIGDISRFASSEKLVSYLGLNPSVRQSGDGPAHHGHISKHGRAHARAMLVEAAWAAARAPGPLRAFFIRIQSRRGKQVAAVATARKIAVLAWHLLTKNENYVWARPALLENKLRKIELLAGQPAAKGRRPGRAHAYNDRAVRQRERSWLEQAEGAYTRFVVNWQIKPGQRTGAANRKRPS

SEQ ID NO: 95145 - protein, 313 aa, unidentified
MINVSQVFIGVDVSKSSLDIFIHPLGISLKMDNSEKAVIKFIEQLAFYQVKQIACEATGGYEKLLMNLLKKHSYDCWVVDPRRIKGFIIATGCRTKTDKIDAKKIAEFASKNTPDYEAINKTPHEEILQALVNRKADLTQYLASEKVRLKHPSHKISIASIKKFIATLQKEIKKIDNQISEHIRKDSMLDKKVKLLESIPGIGKATAALLVSFVPELGHLSNNKITALIGVCPYNRESGTYKGKSFIRGGRAIPRNALYMCALTTIKYHLPLKEFYDRLIVNKKPFKVAIVAVMRKLIIIANVILKKGELCRA

SEQ ID NO: 95146 - protein, 333 aa, unidentified
MNYAGIDVSHKELVIVVSVKGKAHKAKTFENTASGHKAIIQLLSKLKGESKVCIEATGVYHFDLAVALSRAEGIEVMVINPKASHNFAKVLMKRSKTDAVDAEILAIYCERMPFEAWQRPADEHIALRAMARRIAALTKLKTQTKNQLHALKTTEETPVLVIEYTEELIEVVDKQIQVHRESARQLIQQHDELAEAFALITGIKGIAVASAVQMLGELMILPKDMSAKQWVAYAGLDPRQFESGSSVTKKPRISKAGNKFVRRALYMPALVATCHEPHIKGYYTHMIQDNGLKKIQAVCAVMRKLLHAIHGMLKAKKEFDGTRFYTFPVEANS

SEQ ID NO: 95147 - protein, 349 aa, unidentified
MEVLIGVDPHKATNAVAAIDEHGELVGQAAFPASRGGIRALERWAKRFAERRWAIEGAAGIGRPLAQKLAASGEEVVDVPPKLSAKVRVLSTGNARKNDHLDATFTALAALRSERLARVHPEVGLEGRVEVLRLLTERREDLVAERTRALNRLHVLLRDLLSDGVAKGLSAQAAAKLLRRARPDHAAGRTRKRLASELVRDVRALDRKVASLDERIREEVEASGTTLTEVFGVGSILAAKIIGIVGDVGRFPSKGHFASYAGVAPIEASSGQVVRHRLSLVGNRRLNKVIHMIAVCQARSDPRGGAYYRKKLGEGKSRREAMRCLKRRVSDAVFKALVADSARASLAVA

SEQ ID NO: 95148 - protein, 409 aa, unidentified
MSNDASTAVFVGLDWAVHTHAVCLIDGAGSVLDRFEVAHDRDGLATLMRRLARHGPRLRIAIERPSGLIVDALVEAGHEVFPIHPNAVKASRPRYRSHGAKSDASDAYLLADLLRTDGHRWRALAQQSDDIRALRALVRSRDDLVAARVAAANQLTSTLQAFWPGAAVIFADVASPIALAFLRRYPSPGSARRLSEVQLQRFCKTQHYSGRRTPAELLARLRSAACGAVGKRTEQALSEVVLAQLKVLVPIVAQIAELTRRIEQFMHSLPDGLLMMSFPRAGQVCAAQILAELGDVRERFPSADRLAAEAGAVPVTYQSGKTRSVAFRWACNHRLRKAVTCLADNSRHANTWARSTYQAALARGCDHTHAIRILARAWLRVIWRAWTDRKPYDPSLHGNAVALASSQGG

SEQ ID NO: 95149 - protein, 320 aa, unidentified
MDAVLGIDIAKAKFDVALVWPDGRVRRKSCPNTAAGFAQLATWLTRQGVTTVHAALEATGTYGLALAESLHDAGHVVSVLNPAIIHAFAASQLQRAKTDRTDAALIARYCATQAPAPWTPAPREIRELQGLVRRLEALHEMRTQETNRLAAGEVVPAVRASIEVVVSTLTQQIAAVQRQIRDHFTQHPGLRTQRDLLTSIPGIGNATAAVLIAELFDKRYSSARQAAAFAGLVPRVWESGTLRGRGRLVKIGSSRLRKAMYFPALTALRANPTLRALKARLTAAGKPKMVIVGAAMRKLIHLAFGVLKSGLQYTPEYRHS

SEQ ID NO: 95150 - protein, 457 aa, unidentified
MRQRGRRTKGMEEAHPFGGMSQVNKDAAGVDIGAEEIIACVSGDEATQIVKAFGNYTVDLQNIGKWLQEHHVKTVAMESTGVYWIPLFEELERQGYECLLISSRSLRRVPGRKSDITDAQWIQTLHSYGLLESSFRPQAELVALRTLLRHRGQLLEHRAPHIQHIQKALLQMNVQLSQALSDVTGETGLAIIRAIVAGEREPEKLAAMRDRKCKKSEEEIGKALTGTWREEHLFIVKQSLEMYDFYTEQVEECDAEIGRMYALIRRDWEGGELQPLPQKKRNAHSKNAPENKEEIRKHLKRISGVDISVVDGFGVSLAQTVIMEVGTEMSKFPSEKHFCSWLGLAPKHEISGAKVLRNKTMKTKNRAGQAFRMAAQSVKRADCVFGSLYRRLKSRLDKAQATVATAHAIARVVYRMLKYQVEYEKINVEEYEEKYKQAQIKYMKKKAEKFGFQLVPT

SEQ ID NO: 95151 - protein, 384 aa, unidentified
MRADRTDAPAGGEYATVYVVFELSKAKWQLGVMTPGSEKMSRYRIAGGDLAALSGVLARARAKAEQMGKPVRVLSCYEAGLDGHWLHRWLSDNGVVNYTLDASSIEVNRRARQAKTDRIDLARLLRAFLAHLRGEPRACSVVRVPTPEDEDRKRRTRERETLVKERTRHVNRIKGLLHGQGIRDAMPLKPSFLGDLEALRTGDGRALPPHLRNEIRRQHERLLLVCKQIKALEAENLAAHRAPAFGALEAKAVALAQLRGIGPLIAQVLANEVFYRDFNNRRQVGSCFGLTDTPYDSGASRRQQGISKAGNHRARATAIELAWLWLTHQPGSELSRWFRQRVGDLKGRIRKIAIVALARKLMVALWRYLQTGLIPTGAVMRPSL

SEQ ID NO: 95152 - protein, 342 aa, unidentified
MHNIITGVDLAKEEIQVCVCKRNKVQSNQAMTPIEFGSWLASSKPMTIVFEACSTSNYWKQKALEYGHDARLISAKLVASVRQNQKTDKNDALAVAQAAQLTDVSFINGKSKEQQTLVRLRELAVKHKVAMQQQIKSLLLEFNIRISPSQGGLSGVVEGVLEDAENGFSMVFRQALSTSWQQLQRGIESIKQYDLYLEKAANGHEICKSLQALEGVGPLNAVNLYMALGCGEMGQFEKGRDASACIGLTPIQHSSGGKVKLGSVGKYVKNNMLRSCLVSGAMSAVNQAMRRPAKTKKEMWIQQMVERRGKRCTAVALANKTVRTAFAMLTNGTEYKAELLAA

SEQ ID NO: 95153 - protein, 390 aa, unidentified
MSEMFSPMPSPAALAYVVGIDIGAESCFMCCLTVEKRQVIKPSQFGNDALGFEWLFTRLEQLKSAPHQILVGLEATSRYGENLYHALLKRGYHVCLLHPGQVHAFAQQRGLRAKTDRVDAMTIARVLLSGEARFGYVPSEQIATYRELTRLHQQPQVLADPSRPTALAVLKAYPSAAAMREADPAALGRFLHELCPSHYGRQTAEKLVQLAKSSVSSGVALAARSSSLRILCNQLEYTQSNLKQLQEEIEGLVNQDPKAKGVLSISEFGPMTVAVILAELGDLDRFSHMDQVVAYVGMDLRVKESGKWKGQTKLSKRGSGRVRRSLYLAALRSIRLPTSPFRIYYRRLVDRGMKKGMAVVAVMRKLLIVASHLIQTRGRTMMLAKSRDQQ

SEQ ID NO: 95154 - protein, 343 aa, unidentified
MNQLNVIGVDLAKNVIQISVLSPSNRELRNSALTRRKFAEFLARQRPSLVAFEACATAHYWARVAQRHGHQVKIIPAKVVFPFRQGHKTDENDALAVAEAARRPNVKLAPLKTVEQQGMQAIQRSRELLVHERVALSNHLRGLLMEFGIVIPQGFASLYRRLPEILEDGENELPDLYRPTLNLLYRRLCDLREALEQLNAEIKTLVQHHPICQRLTALEGVGPIGSVLLYATLGTGEAFTNGRQFSAYLGLTPKQFSSGGKVNLVGISKRVANRRLRAVLIQGARAYVYHMKEPKTAKDRWLWAIVERSGKCKAAVALANKNVRTAWAMLTQNTEYQRYPLVA

SEQ ID NO: 95155 - protein, 385 aa, unidentified
MRRQRPIVKGGLNSLPMKKQTKTNPSVVLTSTAAVVSGFTIGLDLGDRSHYVCVLDATGQIIHEGPMLNDRAALALLLTQYPAATVALEAGTHSPWISRYLTGLGATVIVANPRKLHAISRNERKCDRRDAVMLARLARADAALLHPLQHGSAQAQHDLLGLKLRDSLVRTRVNLINTVRFTLKSLGHGVSNPSSEAFHKSILTEVPADCLPVVAPVLAVLTLLTEQIKTLERDLVARSKKEYPVTQRLQQIAGVGPLTALCFVLKIGEPTRFGRSRDVGPYLGLCPRRDQSGGTDKQLRISKCGDGLLRRLLVSAAHYILGPFGPACALRAYGQHLVGTSAREKKRAVVAVARKLAVLLLSLWKHGTDYEPRVPAAPALVLTPA

SEQ ID NO: 95156 - protein, 355 aa, unidentified
MNSVRYVGLDVHRDTISAAVLSESGRMIQQSILATRAAAILDFIGGMRGTLYVTFEEGTHSAWLYDLLVRRVARLVVCNPRMNALMKSGNKSDAIDARKLAELLRADMLSPVYHGEKSAMEVQHLARSYALLTEDTTRVMARIKAVFRGQAISCAGQKLYGHKHRDEYLAQLGACALRRRAELLYQELEAVQQLRRQAKREMIVECRKYPETKLLCSVPFLGPVRAAVLIGRVQTPHRFRTKRQFWAYCGLALEMRDSGEYRMVDGQVERRKRPAQIRGLNWNHNHELKNLFKAAATTASFSNGVFREFYLGLLKKNMQPEMARLTLARKIAAIALKIWKKGEAFDAEQVKLQAA

SEQ ID NO: 95157 - protein, 361 aa, unidentified
MNATTAAIDLAKNVFQVVLVDANYRVLEQHRLTRAQFERFFDNRKVSRIVMEACGSAHHWARVFGARGIEAILLPAMYVRAYVRRSKTDAADALALLEALRCADIVAVKVKSVEQQSLQALHRTRSLWMGTRTSRINALRGFCRELGLHVPIGARTGLEAMGRAVADEQSPITPLLRPIMLQLLDEIRLLETRVAQLERQLAQLARESHACKLLMSIPGIGLLTATAILAATAGSVAHFKSARHFASWFGLTPKENSSGTMRRMGRISKMGDRYLRMLLTHGARSVPRAAKVAQLKGIELIGLRHWALALQARSNHNKSACALANKMARICYAVLRDQTPFGQPAARLAKKMQRQSFELAY

SEQ ID NO: 95158 - protein, 387 aa, unidentified
MPQPNDLSRSLAALDQDSTLVAVIEISQSSWLVGGIVPGVNRQPLKKLAADETALLQLLSRWRDEATKAGRTISRIAVAYEAGRDGFWLARWLRGRGIEAHVIHPTSVAVSREHRRAKTDRLDTELLKRAFLGWLRGEQRHCSMAMIPTLEEEDAKRPNRERENLVSERTRLVNRMKSALARLGFRGFKPHLRKAPERLDTLRTAEGMALPPNTLAELRRDMARLRFVMDQIREIEAARLARLEQHPEQANHAMVRLLARVVGVGIETADMLVHEILSRHLRDRKAVARYAGLTGSPDESGARRREKGLSRAGNARVRRGMIQLAWRFLMFQKDSALAQWYRRQTTDGRGATRKTMIVALARKLLVALWQLVTTGEVPEGVVLRRAA

SEQ ID NO: 95159 - protein, 335 aa, unidentified
MSRYVGIDLHRRRSVVVILDETGELVSSRRIENSPLVLVEAVGEAGSGAEVVLEATWGWYWAADVLREAGFGVHLAHPLAIGGYRNRRVKNDERDAMLLADLLRMGSLPEGWIAPPELRQLRELVRYRHKLSQLRAGLKSQIHAVLGKEGVIPELSELWGPAGAAWLDEQQLGEAYQTRITSLRGLIGRYDSEITRIDRIVHTRLRDDVGYQAIQQLDGVGPVLAGVFVAEIGDVSRFDTAKRLSSWAGLTPRHRESDTKVIRGPITKQGSPLVRWAAIEAVARYRGGAPIKATYQRIAARKGNKVARVAAARKLLTLVFYGLRDGEIRCLNEAA

SEQ ID NO: 95160 - protein, 343 aa, unidentified
MQISTIGVDLAKNVFQVHGVDSAGKVVITRQLRRKQVIEFFSKIPPCLVGMEACGAAHHWAREVSKLGHTVRLMPPSYVKGYVKRSKNDAADAAAICEAVTRPSMRFVAVKSTDQQASLMLHRTRDLLIRQRTQLINALRAHLAEFGLVAETGREGVGQLAALITDESNREALPFAMKQALQAFVDQLAALELQIGTLDRAIHAHHRANDMSSRLETVPGIGVIGATAIASAVTDPSNFKSGRDFAAWIGLVPRQHSTGGKERLGGISKQGDRYLRRLLVIGATAVVRHARQHPQKHPWIMRLLARKPAKLVAVAVANKMARIAWAIMAKGGYYRAPELAAAA

SEQ ID NO: 95161 - protein, 344 aa, unidentified
MDHFAGLDVSVKETSVCIVDDTGRIVREVKVASEPEALLQVLENPSYRFKRIGLEAGPLSQWLFSALAEAGLPVICVETRHMRAVLKAQINKTDRNDARGMAQMMRAGIYRPVHVKTLRSQKLRMLLTHRKLLQSKAIAIDNDLRGTLRNFGLKVGIVGTAKFEARIKELVENLPDLAVLVEPLLVVRRVLREQLGILHRRLLAIVRDDEVCRRLMTVPGVGPVVALTYRATVDVPARFRRSKAVGAVFGLTPAKYQSGEINRTGAISRCGDEMMRVMLYEAAQVMLTRTNKWSWLKAWAMKIARHRGMKKAIVALARRLAVIMHRIWVDGTEFRWTREETVAV

SEQ ID NO: 95162 - protein, 402 aa, unidentified
MNMNCVGVDVSKGKSMIAVMRPLGELVIPPFEVAHNDAELRKLSRLLGDLDGETRVVMEATGNYHLPVASFLCDSGFYVSVVNAMLVHGYGNNSLRRAKTDKKDAIKLSNYGLDHWLALPKYIPEDEVRLMLKTTYRQYQQCAKVQTMLKNNLISLLDTAFPDANRLFTSPARADGSEKWVDFVAAFPHCECVCGLSEKAFTAKYQWCKKHGYNFSQDKALDIYASACGHFSVMPRTDTAKLLVDQAVSQLRAASAALAALRDEMQSLAASLPEYPVVMGMFGVGPALGPQLMAEIGDVRRFHSKKALVAFAGIDAPPYQSGQMEVRSRSISKRGSFALRRTLLLVMSTILRRSPADEPVYQFMDKKRAEGKPYRVYMIASANKLLRIYYATVKRHLDSLEA

SEQ ID NO: 95163 - protein, 341 aa, unidentified
MMIIGCDFHPRFQQIAFLDTETGECGERRLNHPEEAERFYRSLLGKQVRIGLEATGNFLWFRRLIQGLGFEFLLGDPSAIHAANPRRQKTDKRDAKHILRLLVEDRFPAIWQPPADNEQLRQLLLHRCRLVRVRARLKNLLDSIAKNEGLVGAKGWSGKRRGQIEALPLTGWYKRQREDLLYLLDELDKRIDPLDQFVAQAAEENPQACLLMTHPGVGPVVSLAYVLTIGDWKRFPASSNLSSYLGLIPAEESSADKRRLGHISKQGNSLLRWLLVQAAIKAQACDVSWHRQYLRLSLHKHHGVAKVAIAHKLAVRLYWMLRSGQNYTQVKERGSHAGQSV

SEQ ID NO: 95164 - protein, 358 aa, unidentified
MDGSKQQPKVTAGLDIGDKYSYLCLIDTASGAIMEEGRLRTSPETFKRRFASERPMRIAIEAGTHSPWVSRVLEECGHEVLVANPRKLRLIYANKRKTDEIDAENLARLARVDPRLLYPLKHRGEDSQAHLAITRSRQALVDCRTQLVNHVRAAVKSFGARLPKCSARSFHKRASEHIPEALRPALGPILEVIASLTERIRDYERELETISKEHYPETELLRQVEGVGTLTALTFVLTVEDPYRFERSRSVGAYLGLVPASDRSGDRDPQKRISKEGDQMLRKLLVGSAHYILGPFGHDSDLKRHGEKIASRGGKNAKKRAVVAVARKLAVLLHSLWASAEVYEPLRNAHRSAGGQAA

SEQ ID NO: 95165 - protein, 356 aa, unidentified
MNYVGVDYHKKYSQVTAIDEEGRVIRSRRLENKPESFQEFFKRLDGPSEAVLETSRTWGVMYDLLEDLEEVESVELAHSLKVRAIAEAKIKTHKIDSHILAQLLRADLIPAAYIPGKQTRSYKEMIRQRIFLVRMRTRLKNRIHVLLDRLHNPLPSLTDIFGKRGTNYLRRLNLPGVDGEILRENLQLLETLNTLIKEAEREIESLLGEDPRVKLLRTVPGFGPILAALAALEIDRIERFISPSKLASYTGLVPSTYAFGGKLFHGKLIPMSNKWLRWVLVEAAWASIRTSPYCRVYFESHKRHKGPHTAAIALARRLSMIIWHVLKENRVYEERPFPRQRRTSITATSPAALTIS

SEQ ID NO: 95166 - protein, 410 aa, unidentified
MIFVGVDWAEAHHDVHVVDEEGERLAKARLPEGVDGISRFHDLVGAHVDDPAQVVIGIETDRGLFVTALVAAGYQLYAVNPLSTSRYRDRRSTSGAKSDAGDAQVLADMVRTDRHNHRLVAGDSEGVEALKVLARAHQTMVWSRGRQTNLLRSTLREFYPAALVAFDDLTSSDALEVLRVAPTPTLGAGLSRSKIAAALRRGGRQRRIDERAAEVQAALRSDQLQASAVVATAMGASVAASVAVIAEMGTQIARLAEDLGSGFERHPDAEVVRSLPGLGTILGARVLGEFGDAPNRYASAKSRKNYAGTSPITRASGTKKAILARHARNRRLADAIHQWAFASLTASEGARAFYDARRSAGDGHHQALRALGNRLVGILHGCLEHHSRYDEITAWAHRPENDLRAAEQAA

SEQ ID NO: 95167 - protein, 368 aa, unidentified
MDSSGGLIGIEVPKSRMNVASMEESTMNPTTIAVDIAKSVFEVATSDHPGRVSDRRRLSRAQFARFLAERKPSLVLLEACGTAHFWGRLAQDLGHTVRLLPPHAVRPHVLRNKTDRADAKGLLEASRNEDIHPVPVKSVSQQTLMALHRLRSAWIATRTARLNTARGILREFGVVIPVGARHVVPRLREIDGDVDSGLPEPVVVMLREIATEIRELEVRIHSVEAQLKALAEQTPAVERLVSVPGIGLLTATALVAFVGDVQRFRTGRHFASYLGLTPKESSSGLRRRLGAISKKGNVYLRMLLTHGARAALCHAKRASAPTRLQTWALKIESSRGHNKATSALANKMTRIAWAVWKGETSYENRIAT

SEQ ID NO: 95168 - protein, 347 aa, unidentified
MLYAGLDLSRQRLDVHVMDETGGTVEVTAVRPDADALRTLVSVIGRHGQEVTAVIESMNGARFVHDQLEVAGWEVEIADALKVKGLAPLAAKTDRIDARVLAELARRDLVPAIWLPDPTVRAERERARFRLHLVRHRTALKNRVHATLITFGHPVPVSDLFGVKGRELLASLAIPEPWATTLATSLRMIDELDAEIAACERELRRLGAGHPDIPLLMTVPGIAWVLGYTIASEIGDIGRFASPKKLAGYTGLCPYVRQSGGRDDRGPLAKNGPKYLRWALIEAATHAARHSAYKERYERTAKRLGRQRGSKVARVELARELAGAIWHMLTKRGSFAPGRPRVPVLVA

SEQ ID NO: 95169 - protein, 351 aa, unidentified
MTVYAGLDVSSKHTSICVVDNDGTVLMESQVVSDPKAVKEILQPYRRQLRRIGIEASSTGTWLQRELGRLGLEAVVIEACHAHTSLSAMRNKTDRNDARGLAQLMRLGWFKVVHVKSDHAQRLRMLLGCRKLVVRKLVDTENEIRGTLRGFGLKPGHVSRTAFAGKVGELVAGGHPMVQEVMVRMLSIRGVLLEQRGKLDRLVVKAVREEEVCRRFMAIPGVGPIAALAFRAGVDDPRRFKRSRTVGAHFGITPRRYQSGEVNIEGHISKCGDRMVRQALWDAAGSMLRRCRRHSAILAWGLRLVKRGGLQKATVAVSRKLATIMHRMWLDGTEFRWKKGPLPAALSAVVV

SEQ ID NO: 95170 - protein, 411 aa, unidentified
MNAVGIDVSKGKSKIAVIRPYGEVIAKPFDITHYPDQLAELAEYIHSLEGESRVVMEYTGKYSEPIANFLCDAGIFVCMVNAKLIHDYGGDTIRRDKTDKVDALKIAGYCLDKWPKLSRYEPVEDKRKMLKTYNRQLSEYTKIKTMLKNNLISLLDQTFPGANELFSSPAREKDGHEKWIDFVAAFPHCHCVSAISKRMFVARYEKWCRKNGYNFCPHKAGGVYSAALNCLPTLPNDDFARTLVIQTVNQLNNLCQTVAAVKTEMSKLAHALPEYDTVRSMHGVGKTLAPQLIAEIGDIGCFPKRSSLARFAGIEPPENQSGAYNQHSRRISKQGSPHLQKALFQVMCCVLQNSNSDEPTFQFLDKKRAEGKPYKVYMIAGANKFLRIYYARVKECIEKLEESKSVFAQAA

SEQ ID NO: 95171 - protein, 359 aa, unidentified
MNAIHYIGFDVHKKTISYCVKSAAGEIIEESTLSARREVLRRWAGARTQPWQGAMEATLFSAWIYDTLKPYGQRLEMAHPARMKAISSGKKKSDHLDARTIADLLRCNLLPTCYVMSPEMRNLRRLLRYRNLVVQESVRMQNKIAGLLMETGAPFEKQKLPGKKYFTQLLTSLEEVPESVKDLLRISRGAMAMFESTQKLLIKRLLAESALQQRVERLASIPGVGPITALTWALETADPHRFASISDAVSYCGLTAAFRSSAGKEQRGPISKQRNAWLQTALIEAAKLAPRWNPQLAALHAQALERGHRNRATLEVARKLVAYLLAVDKSGQPFRLRTQPGETTTLSQKAKAAISAPAA

SEQ ID NO: 95172 - protein, 351 aa, unidentified
MNNDITGVVGMDVSDRYSHLCVLGLDGEVEEESKVPTTSQGIRRRFSEMGRVRVALEVGTHSPWMGRLLEGLGHEVILANPRKVRSISHSNDKSDRVDAEMLARLARLDPKLLCPVQIRSEERHAGLVVIRSRRILVDTRTKLINHVRGVCKSLGVRLPKCTTACFHRRAVSFIPEEILPSLEPVLRQLDGIEGSIGDCDRRIKEMASEIEGVEILASVAGVGDLTAVTYVLTLGDPSRFKRSREVGSYVGLRPKRDQSGDVDKQLRVTRAGDKYLRSLLVGSAQYILGPFGPDSALRCWGLSLAERGGKAAKKRAIVAVARKLSVIMHSMWIRGEMYQAFPGTKAEEKAA

SEQ ID NO: 95173 - protein, 350 aa, unidentified
MENIALIGIDLGKNSFHIHCQDRRGKAVYRKKFTRPKLIEFLATCPATTIAMEACGGSHFMARKLEELGHSPKLISPQFVRPFVKSNKNDFVDAEAICEAASRPSMRFVQPRTESQQAMRALHRVRESLVQDKVKTTNQMHAFLLEFGISVPRGAAVISRLSTILEDNSLPLYLSQLLLKLQQHYHYLVEQIKDLESQLKRKLDEDEVGQRLLSIPCVGTLTASTISTEIGDGKQYASSRDFAAATGLVPRQYSTGGRTTLLGISKRGNKRSELCWFNVRYSYKTGTPVWQIGRLGQGFTVPEKQLCRHLCSGKQAGQNSTGPNGTTANLCSITAEIHRFKELLIWFCEY

SEQ ID NO: 95174 - protein, 408 aa, unidentified
MQVLYPRCAGLDVHKDTIVACVRCVSAPMHQEVRSFDSTTAGLLALADWLALHGCTHVAMEATGVYWKPVWHILEGNFELVLANAQHIRNVPGRKTDVNDAMWIADLLAHGLIRSSFVPPAAIQELRDFTRTRKQLVREISQHSLRIQKVLEDANLKLGSVLSDVLGHSGRAMLKAIVNGEDDPERLAALAQGNARKKSAELREALRGRITEHHRTMLKLHLDIIGALEHTLAELDAVVGKALAPIQQRARLLTTIPGVSDLTARVLLAEIGVDMTRFPDAGHLVSWAGLCPRNDESAGKRRSTRVRKSGTWLKTALVTAAWAAVRVKTSYLRAQFLRIKARRGAKKAILAVAASMLTAAYHMLRDGVEYADLGPDYFDRHHADKTIRRLLKRLADLGCHVDPIAHPV

SEQ ID NO: 95175 - protein, 382 aa, unidentified
MPQPNDQSRSLAALDQDSTLIAVIEISQSSWLVAGMVPGINRQPLKKLAADEVALLQLLYRWREEASIDRVAVAYEAGRDGFWLARWLRGRGIEAHVIHPTSVAVSREHRRAKTDRLDTELLKRAFLGWLRGEQRHCSMAMIPTPEEEDAKRPNRERENLVSDRTRIVNRMKSSLARLGIRGFKPTLRKAPERLARLLTPEGALLPPNTLAELQRDVARLRFIMDQIREIEAARLVRLEHNPEQGSHAMVRLLAQVIGIGIETADMLVHEVFVRNLRDRKAVARYGGLTGSPDESGAKRREKGLARAGNARVRRGMIQLAWRFLMFQKESALAQWYRARTADARGATRKTMIVALARKLLVALWQLVTTGEVPEGVVLRRAA

SEQ ID NO: 95176 - protein, 338 aa, unidentified
MAIVNVGIDLAKNVYALHGVNEVGQMDLRRPSVPRAKLHELVAALPPCTIGMEACSGAHHWARLFSQSGHTVKLIAPKFVTPYRMSGKRGKTDAADAAAICEAVQRPNMRFVPVKTVEQQSRLMVHRTRQGFVEARTAVINRIRGLLAEFGIVLPQKAQVVRREAARHMDSLPGLGKIVVEDLLEEIRHLDERIKAYDEHVRSMARDCTAAQRLMQIIGIGEVTATAIVAMVGNAREFSSSRQFAAWLGLVPGQYSSGGKTRLGRITKAGDAYLRGLLVMGARAVLNAAGAKDDYVSRWAKNIALRRGYWKAVMAVAAKNARLAWVALTKGESFTMPA

SEQ ID NO: 95177 - protein, 344 aa, unidentified
MTYYVGLDVALRSVSACVIDDQGEIIKEAKLDSEVEPIVAWLASIRSEIEIVGLEAGTLTQYLTYGFQAAGYPIVCMEARGVHAALQAMRNKTDKNDARGIAQILRTGWYRRVHVKSIESHHIRALLSSRKAVLNKCIDLENEVRGLFKIFGIKLPPKLKHGAFDAAVRETIEADPALSHALMPLLDARLVLYRTFLEMDRRARKMAQQDEICQRLMTVPGVGAISALTFKSAVDDPKRFKRSRTVGAHFGLTPRRFQSGEMDNMGHISKAGDRDVRIVLYAAANALLTRTTGWSPIKAWGMGLMKTKGRKRALVAVSRKLAVILHRMWIDGNDFQWGTEGGQS

SEQ ID NO: 95178 - protein, 366 aa, unidentified
MRVGADLAKRVIQVHAVDAAGRRVVSRALKREQFMAWCAQLPAGCLVAMEACSSAHHWARKLRLLGLDARLIAAHFVSPYRMEGKSGKNDMTDAAAICEAASRPSMRFVPVKTCEQQGVMSLHRVREGLKEERTGCINQIRGVLAEFGLVFAQSPKVLRTVLADVIEDASNELSAMARRVLQRAFDHWRELDEHMRWCDSQVGQHVRSSPAARRAAKITGIGELGASACTAGVGDFHQFKGGHQLAAWLGLVPRQNSTGGKTSLGRITKRGDDYLRTLLIQGAKSAVMSAGKRDDPTSRWLVQLTARVGWQKACVAMANKNARILWAVMTRDEGFDARHLSEKPQAKRPANERIAASTPTMTPCPA

SEQ ID NO: 95179 - protein, 477 aa, unidentified
MRPTCRGRLTVVCFNPSTKLTRVRPAELIVARSKELSTRRKFVSYFAPLVGRGSDEERLLREVGTGMQVVHERCCGLDVHKKTVVTCILITLANGEVQRHIRTFSTMTAGLLALSDWLESLAVTVIAMESTGMYWRPVFTLLEEGRSVILVNAQHMKAIPGRKTDIKDSEWLADLLRHGLLKASFIPPAPIRELRDLTRSRKSLVQERAREVNRVHKVLETANVKLSSVATDVLGKSGRDMLSALIEGTTDVEILAELARGKLRKQLPQLQQALDGRVQAHHRLLLKHLLAHIIFLEETLEQLQQEIEQHLCPFEETMTLLMSIPGIAALAAAAILAEIGDDMTRFPSAKHLASWAGVCPGNKQSGGKRLSGKTTQGNAPLRAMLAEVVWVLSHMRDNYLSAQYHRLARRLGKQKAVIAVSHSLLVIIYHVLSTKQPYSDLGADYFEQRDSARLTQRSVRQLEALGYKVTLLPKEVA

SEQ ID NO: 95180 - protein, 409 aa, unidentified
MMKQNIIFGIDVSSKSSTVYVVIDRIKQGETFKITNDSFGYQDLLDRLNQYLITPLVVFEATGVYSLSLQAFLEDYHIKYLKLNPLKAKKLMDNNLRHNKTDKVDAYRLALIQFNAPQKLRAPQPKEYHELQNASRYYEELTQALIINKNQLHRNLQSTFPQIESILSTSSGRVYWTIVSLFPHAQYVLNHNENQVFQSLLAISGIGRQRAHYLTTRLYALARQAYPYDNESSITIRAIQRNIANLLSLSAERDNVINYMEKLAMQANARSLTIYESIPGIAKTTAVRLVAELGDLRRFDTSAQIDAFVGIDPGRYQSGEKDSHLGITKHGNHLARKILYRTITQMETVKATQPCHITDYYDKKKRSSNSRGYKKIAIASVHKLIRTMFALIKHDQLYDYNVATHNQRL

SEQ ID NO: 95181 - protein, 353 aa, unidentified
MTNDKYVAMDVHKASVVIGMRDGGGKMIGHAVVETKAQTLRDYVRGLSGTVHLTFEEGTQAAWLYDLLKPLVAECIVCDPRRNKLLESGNKSDDVDVEKLSELLYLGRLRAVYHGGQGTRALKELAQNYEALVKDNTRVKNRLKAIFRGRGISYEGGELYDYEQREQWLAQLSERGVKERAGQLYEQLAQLEEWVAKARLAMLRESRKQKAKKILEQIPTLGEISVAQLIATVDTPFRFRGKRQFWTYCGLAVVRHTSADYQFAQGELRRRAKPGATRGLNRNYNRRLKRLFKSAALAGSSKGLFKPFYERLLARGLNPELAQVTLARKIAAITLTLWKKGANFDREKLVKPE

SEQ ID NO: 95182 - protein, 414 aa, unidentified
MAEEYKIAAGLDIHKQFIVATILSVQELKIQQRFERTMQGLLALKNWIIEHKCQVVACESTNNFWYHIYDSLCDHTTVIVGNAHDMKVLTHKKTDKIDSEIIAKLALKGMITPSRVVPRHQRDFRNIVRMRHFLVRKRTDLKNRIHNIFDTELFHLSNVLTDVFGKSGRMIMDGILQGKSADEVIMSLKGQVRIKKGGEIRELLEQSLSVYALMQLRHSLEVLRVLDAEINYLTKVSSQYAQKHYPREYEILITVPGVGEIAAFTLLAEIGNFKDFSSAEKLAAWLGIVPKVYQSADHNSRRSITKRGSRLARWILIQVAHAAAKRKVSIFYDFYESKKDIIGKGKAAVALARKIITIIWHLITNDEPYEDKYARPKKIPKVPTVKIPVTFTIEEAIKLFTEASQVLKAPDPGL

SEQ ID NO: 95183 - protein, 422 aa, unidentified
MKKHSNLPVKNEQRSKQTKSRVPVQRDTKELLAELLGKLTEKLDPKAISASAGKKQKQGSRLRPNLDRLTVGVDLGDQWSAYCILGLEGETLIEGQLQTAQPGVAEFFQGLPAARVVLEVGTHSAWVRELISGCGHEVLVANPRLMEGSKRRKRKNDRIDANKLARLGRMDPQSLYPIQHRSPEVRQDLVILRARDALVAVRTELINTTRGLVKSVGARLPKCASPSFSKKVEESLPVEIREALLPLVQLVATISDSIQGYDEKIERLGSEKYGHTKLVRQVTGVGPITALAYVLTLENPNRFAKSRDVGPYLGLVPNQEDSGDIQPQLGISKAGDTMLRRLLVGSAQYILGPFGPDTDLRRYGLRLCERGGKNAKKRAAVAVSFCGMPYAHYFRVCQRHNSENLIALRGDGHATLGEELRA

SEQ ID NO: 95184 - protein, 349 aa, unidentified
MIVGVDVHRREHCAALIDERGVVLGTLSFPNTAAGVRKLRTWLNARDAGAAVVGIENGAGYGQLLCSSLAAAGLEVLNVPAWRTKRDRGKHGPGKSDPGDAIAIARVVLCDRERLGPALEPELVRALAIVETLRRQTVTRRTDAIQRLRALWTQFDPEAEVAVDNVLTAHNLRRLRRLRLGSGVLGDVATSCLHRIAAEIARLDAVVHDLDKQLAELVAQNGNPLEDVCGAGLQVAATLIAQSGDVRRFRDRAAYARYGGVAPIPCGSGASAGRHRLHRGGNRQVNAALHRIAIVQAQWDPDAQAYLERKLAEGKTPREARRALKRHLANLVYRRLHLWAEDALPTQSS

SEQ ID NO: 95185 - protein, 408 aa, unidentified
MRQLLERCCGLDVHKKSISACARVPDERGEVAELYATFGTTTPDLLELSDWMMGLGVTHVAMEATGDFWKPVYYILEADFELLLVNPAHIKHVPGRKTDAIDAAWIAELLSYGLLRKSFVPPPPIRRLRDLTRYRKALIRDRSREVNRVHKVLEDAGVKLSAVATDVMGVSGRAIMEALIGGTSNPDALASLAKGRLRAKIPELHKALTARFKDHHGFMLQRMLAHIDDLDADIAAISGRIEAEIGPFAEKAKLLPSITGVGPRAAEAIIGAIGVDMSVFPTSGHLASWAGLCPGQRESAGKRKSSRTRKGSELLRTTLVECAHSASHTKDTYLAEFFWQVTRRQGKDKAIVAVAHEILIACWRVLSTGTAYCDPGPGALRARSEEQIRRRAIRQLESLGLRVTLDAA

SEQ ID NO: 95186 - protein, 348 aa, unidentified
MALTIVETRAITGGVDTHADMHVAAALDPVGGLLGVREFPVTPAGYAGLLGWLGGFGTVCLVGIEGTGSYGAGLARYVTAAGVRVVEVDRSDRQDRRRQGKSGPLDAVSAARAAQSGRAAGAPKGRDGAVEAIRALMVAKRSAAGERTQTINQARALVLTGPDDLRARFAGHTVAALVAELASLRPRPGSTVGYATRIALRELGRRAQFLDGQLERPGELIGPLVTGHAPGLLALCGIGPNTAALLLIAAGDHPGRLRSEAAWAHLCGAAPIPASSGKTVRHRLNPGGDRQANHALWRIVFTRLGSHPATRAYAERRTAEGKSKAEIIRCLKRYVAREACPHLRPPAG

SEQ ID NO: 95187 - protein, 430 aa, unidentified
MKSNTQNAKIEAITEKTLVLGIDVGSEMHYARAFDYRGIEYSKKPFKFSNTEAGFVTFKEWILDLKERHEKDKVIPGMEPTGHYWFNLGKFLQDNEMKPVLVNPHHVKKSKELDDNNPTKNDRKDPKVIAGLVREGRYMIPYLPDGVYADLRTASNIRFQLQAELTRIQNRISRWFNIYFPEYKTVYGKSDAKSGMLILKAAPLPEDILTLGIDGVNQIWRDAKLRAVGKARAKTLIEAAEHSVGSKEGAVSARMEIRMLLEDYESRNIRLQEVMTLIEGLVKQIPMAEKLLEIKGVGIKTVSGFLAEVGDISRFNTPKELQKLAGLALVESSSGKHKGETTISRRGRKRLRYLLFEVAMSLVAKNPEFRELHNYYTTRRLNPLKKMQSLMAIAAKLIRVFYAMLTKGVDYDPKKMVSDIKRPAVYLQAA

SEQ ID NO: 95188 - protein, 434 aa, unidentified
MEPQFAALIAIDWADQKHVWAMEIPGQTKPQMGSLSHTPEAVDAWAAELARRFGGQSIAVALEQSRGPLVFMLTKYPHLIIYPVHCSTLANYRKSFRPSGAKDDPIDAQLILDILARHRDKLRPLRTDTVETRTIQFLVEERRKLVDQKTACTNRLTAHLKMYFPQALEWFGELGSPIAVAFLERWPTLSDVQKSRPATIRKFYTSHNSRTGGDYLDKRIDEIQTAISATHDEAVIAGYSVAVLAWTGLLKQFLLAIKDYDQRIDLLASKHPDYALMKSFPGVGPVSAPRLIAALGSQRDRYESAYQIQCYSGIAPVVSSSGKKHHVHCRWACPAFLRQTFHEWAQHSMAGSQWAREYYEHQRKAGKGHNTAVRALAFKWIRILFRCWKNNVAYSEPVYSPPVVNQKAQNQVGRAVEIKGEKKIGISKFMGPAT

SEQ ID NO: 95189 - protein, 406 aa, unidentified
MGLYCGIDWATDHHDVAVVDDNGRVMARCRVGNDAAGFTQLLTLLAEAGDNPAHPIPVAIETDHGLWVAALRETGRVIYPINPLAASRYAVSGAKSDATDAVLLANIVRTDRHAHRPLPADTELAQTIRVLARAQQDAVWARQQIGNQIRDLLNGFYPAAIVAFAELPSGGLARPDARTILAAAPTPVQAAALTPARLRRLLRKAGRERNIDRDIDRLRAIFADTYLHQPPMVENAMGMQLTALLRQFDAACTAADELAEAAIAHFEQHPDAAIITSFPGLGNLAGARVLAEIGDDRSRFADARGLKAFAGSAPITRASGKKTIVLHRHIKNRRLAAVAPIWALSALRHSPGARRHYDARRAAGDWNHQAQRHLFNRLLGQLHHCLQTGQLYDEHRAFPPPLPRAA

SEQ ID NO: 95190 - protein, 365 aa, unidentified
MKKISTMRTSGKNILEGRLTIGLDLGDRSSAYCVLNEAGEIVLEHKLATTPEAMEQVFGSMPRCRIAMETGTHSPWVSRVLTALGYEVIVGHAQKVRLITKSRRKDDRLDARTLARLARIDPELLSPVKHRSAQAQLHLTEIRARAGLVSARTALVNAARGLVKSYGERLRKCGTQQFGRETTSALNAGLRQALEPLVQEIESLNERIQEYDRRIAKMAKEEYPETALLKQVNGVGDLIATAYVLTVEDPQRFRKSRDAGCFVGLQPGRRNSGESEPQMRISKEGDEYLRTLLVQGAHYILGPFGKDSDLRRWGQKLSARGGKNAKKRAVVAVARKLAVLLHRLWVSGEVYEPLRNSQKAMSAAA

SEQ ID NO: 95191 - protein, 458 aa, unidentified
MAKNKKIKKRNVNSLHLIQPNAAGIDVGATEIYIAVPDDRDKEPVRRFETFTENLHEAATWLKSCKIESIAMESTGVYWIPIFQIFEAYGFEVFLVNARHVKNVPGRKTDVLDCQWIQYLHSVGLLRGSFRPDQEFCAVRSLLRHRDSMVKIASSHVQHMQKALTQMNLQIHNVISNICGVTGLAIMDAILAGERDPEKLADLRNHRIRADKNTIIKSLVGDYRQEHLFTLKQALQSYRHYCRLIEECDIEIEKLLREFESRIHPDEDPPEPLKKSHRKPQGNEPKFDLQKHMHRILGTDLTKIDGISVLTTHVIFSEIGPDLSKFPTVQHFSSWLGLCPNNKISGGKVLSSHTRPGKNRVAQALRIASQSLWNSQSYLGDYFRRMRARHGAPKAITATAHKLARIVYHLIKNQKPFDETLFAEQEAHHKLRLEQKLKKQAKYLGFQLVPVDPSFVVT

SEQ ID NO: 95192 - protein, 413 aa, unidentified
MKRIVERCAGLDVHKASVTACVRTPGEGGEPHQEVRKFSATTRGLLQLRDWLASFEITLVGMEATGVYWKPVYYMLEDDFECWLLNARHLKNVPGRKTDVKDAEWICQLVEHGLVRPSFVPPKQIRELRNLTRYRKAQIEERTREVQRLEKVLQDAGIKLSWVATRALGVSGRAMLDALTSGTTDPEILAQLARGRLRSKIPALREALEGRFSAHHGLMVGRMLAHIDYLEESIAELSMEIERVMAPFSEEVKLLDTIPGVDRRTAEVLIAEIGADMSQFPTHRHLASWAGMCPGNDESAGKRRSGKTRKGSKWLRSALIEAAYAAARSRGTYLGAHYARLKGRRGPKKAAVAVGHSILVICYHILQRGEPYQELGEDYFNRRLSEEAYKKRLVRQLERLGHRVVLEALPQPA

SEQ ID NO: 95193 - protein, 352 aa, unidentified
MEQFIGCDAHKKFSVFVAVNERGQAGEALRVMHERQLYREFLARLPPSSAIAVEASGNYSWLVDEMERSGHRPKLANPLEAKRRMGLTKKTDKLDAKGLAILLRNGTLPEVWIPPSELRDQRELLRLRIFLVRLRTRVKNRIHGTLARYNVQVPGADLFGVAARMQLGGRLPELPLHSREAVEQELATLDFLETQIESAEKRLEAIMKVSVEADLLKTLPCVGKILSMVLMLEIGRVDRFPTAAHLASYAGLVPRVHSSGGHTRMGQVCGNVNRNLKWAFVEIGNLVVVNQRRLTGSHVVRLYQRIKRGKNHQKAVVAVGRHLAEAAWWVLTKQEVYREPQGPRQALSSTHG

SEQ ID NO: 95194 - protein, 313 aa, unidentified
MNEICVGIDVSKSRLDVAVGDGEQFSVSNDLTGHVQLIERVLAVKPRLIVMEATGGLERAVAAQLTAQELSIRVVNPRQVRDFARAAGILAKTDLLDAVVLVRFAQAMQLEPRPLPSEQVQALQALIARRNELTEMLTMERNRLRLAHTSIKRDLKKSIEWLESQIRSTDNDTGSLLRECGIWRDKVELLESVPGIARLTSLRLVTTLPELGTLNRRQISALAGVAPFNQDSGRWHGKRRIYGGRAAARTALYMAALVGSRHNPVLRAFYQRLRAAGKPAKVALTACMRKLLTIINSMLRDRRPWTPQLVTEA

SEQ ID NO: 95195 - protein, 322 aa, unidentified
MSEVAGSEVFVGIDVAKAKLDVGVHPSGESWTVEHDEAGITTVVERLVAAGPRLVILEATGGLELALAAALVAAAVPVQVVNPRQARDFAKATGQLAKTDRLDALVLARFGAALRPEPRPLPDAALQEVRALVARRRQLQAMVIAEKNRRASAPKRLHAQIDEHLAWLRRAVADLDRDLGTTIKATMAWQTAVTRWRSVPGIGPVVSATLLADLPELGTLTRQQIAALVGVAPLNHDSGAHRGSRSCWGGRAHVRAALYMGALVATRCNPTIKAFYQRLLTAGKPKTLALTACMHKLLTILNAITRAGTDWRDQATSAELAA

SEQ ID NO: 95196 - protein, 385 aa, unidentified
MEGPIITVDVSKGSCHYQPFIENGHPMRKPKQLSTTIDGFQKLGQTIKDLEAKTEREDIPVIFEATGVYHRPLQKYLEDHKIRYYIISPLLSATYRKTDLHSNKTDALDCAHIAKAYYCEKELRQYQAQPQEYKRLYQLSRIYESELVHLRKRKVSLRSMLDIIYPRIDKTFKGNQNLYDPIPMEILKRYPHPSLLLSHREDTIVKTVGHRTGHLKGYTERIVHKIYEKAKECYSGCDIDDIEVVKLPNLIENVQEQKKKCDSLLKEMIEIARTCPYFASVVSIVGIGENLAARIIAELRDVNRFDNRAAIVAYAGLNPKIQQSGDIDGLHLKISKKGNKHLRCLYILVHNVIIDCAKEDPLYEFTKKKRQQTQCPLSSKSCLYC

SEQ ID NO: 95197 - protein, 413 aa, unidentified
MDVLYPRCCGLDVHKSSISACILVQGAGRVQKHQRRFGAMTQDLQELANWLRQFEVAQVAMESSGVYWKPVWNILEGQFTVVLVNAQHIKNVPGRKSDQKDAEWIAQLLQHGLLRPSYVPCEVIRDLRDLTRMRASLSQEASRISSRVQKVLEDANVKLASVATNTLGKSGRAMLEEIIAGQNDPEYLASLALGHLRAKTPQLKLALEGKIRPHHRFLLRRLLDQLRFVEHEIELLDERLEDIGRERPELSQAVARWDTIPGIDRVAGWTLLAEVGHNMAQFPTAEQLASWASLCPGNHESAGKRLGGTTRKGSPWLRRMACQCAWAAARTKNTYLSAQFRRLAPRRGSKRAIIAVAHSLVIIGYYLQKSQRNYEDLGGDYFDRIDSDGLKRYFVRRLEKLGHKVTLVPIQAA

SEQ ID NO: 95198 - protein, 335 aa, unidentified
MKLYTAFDLHANNSYGAIIGEQGQRVKRQRLANDPELIFQFLLPYKAEIVGVVVESTYNWYWLVDALMSEGYKVHLANTAGIQKYKGLKHSDDQDDAFWLAEMLRLNILPEGHIYPKEERPIRDLLRKRGHLVKLRTSLIISLQNIIDRNCGTRIKVNDVKRLKEDMVAPFVAGNEDLALAGLVSKEAIDFLTVKIRTIESSVESRIKLKEPYKNLLTIPGIGKILSLTIMLETGAMDRFEKVGNYASYCRKVSTKWTSNDKKKGKGNKYLAWAFSEAAEFARRYDPQARAFYNRKLQKTNFMVAHSALAHKLARATYHVLKEQTPFMPEKLFAS

SEQ ID NO: 95199 - protein, 349 aa, unidentified
MRFYTQQHRFYCGIDLHARTLALHLLDANGRTLLAKSIPAEPATLLDALAPYRDGLVVACECMFAWYWLADLCGEQEIPFVLGHALYLKAIHGAKAKNDAIDAAKLARLLRGGAFPQAYVYPKGMRETRDLLRRRTFFVRQRGQLLAHLVNTNSQYNLPPLSQKLCYAANRDRINLTARFRDPSVQKSVAANLALVDAYDEQIRDLELYLTRTAKVDDPQAYQRLLSIPGVGKVLALIFLYEIHDVGRFPDVGQFLSYARLVRCAHESAGKVKGSGGHKIGNAHLKWACGEAACLLLRESEAAKKWLARKERKSGKARALGALAARLGRAVYHVLRKQEAFDLKRFIGS

SEQ ID NO: 95200 - protein, 391 aa, unidentified
MILVGIDVAKDKHDCYIMTSEGEVLFKSFTIANSMEGFNQLYEKILSVTDNLDKVKIGLEATGHYSYNILGYLLDKGLTPFVINPLHTNLYRKSLSLRKTKTDKVDSRTIASMLMSDVSLKPYSDTLYHNEELKSLTRYRFDKVQQRAKLKTSISRLVTILFPELEKLVPTLHMKSIYSLLYEFPSAKAISKAHLTRLINLLYASSKGHYGKEKAVSIREAAINSIGSYMSVKSLELKHTIKLLEELTLEIDEIEKEIKSIIDKLNSPILTIPGIGYSLGAQIIAEIGDFKNFDSPDKILAFAGMSPSTYQSGKLYSSNAKMEKRGSKYLRSAFFTAAVCVCRIEPTFALYLAKKRAEGKHYYVAISHVVKKLVRLIFHLEKTGEHYVALT

SEQ ID NO: 95201 - protein, 340 aa, unidentified
MDHYAGIDVSLECSSVCVVDASGKILRETKVASEPEAVIAWFRSLGFGVERIGLEAGPLSQWLFAAMKAAGLAVELLETRHVRKAFEAMPVKSDRNDARGIAQLMRLGWFRPVHCKSMSAQETRAILTARKLVQSKLRDVENSLRGILRGFGLKVGKTTERTFAGRIEELVTDHPHLERIADALLSVREALRKEFTAFEKQTHKMVRSDMQARLLTSVPAVGPIIALTYASAIDDPARFRSSKRVGAHFGLTPKRHQSGETDYTGRISKIGDGSVRTALYEAAHLMLTKPIKGCSQLKSWAMRIARRAGMSKAKVALARRLAVIMHRMLADGTPFNAATA

SEQ ID NO: 95202 - protein, 347 aa, unidentified
MRFYTQQHPHYCGIDLHARTMYLCILNQAGAIVLHRNMKADPDSFLSAIAPFRDQIAVTVECIFTWYWLADLCAREGITFVLGHALYMKAIHGGKAKNDKIDAHKIAVLLRGGMIPQAYVYPADMRSTRDLLRRRMHLMHQRSQLLAHIQNTNSQYNLPEIGKKIAYKSNREGVAERFADVSVRSSITFDLRRIDFYDGLLNEVELEILRHAKLHNPNTFHLLDSVPGVGKILALVLLYEIHDICRFPRVQDFVSYCRLVKPKKESAGKTYGFIGAKIGNAHLKWAFSEAAVLFLRNNPQGQAYVARLEKTHSKGKALTILAHKLARAVYYMLRRNEAFDMKRFLNH

SEQ ID NO: 95203 - protein, 430 aa, unidentified
MKSNTQNAKIEAITEKTLVLGIDVGSEMHYARAFDYRGIEYSKKPFKFSNTEAGFVTFKEWILDLKERHEKDKVIPGMEPTGHYWFNLGKFLQDNEMKPVLVNPHHVKKSKELDDNNPTKNDRKDPKVIAGLVREGRYMIPYLPDGVYADLRTASNIRFQLQAELTRIQNRISRWFNIYFPEYKTVYGKPDAKSGMLILKAAPLPEDILTLGIDGVNQIWRDAKLRAVGKARAKTLIEAAEHSVGSKEGAVSARMEIRMLLEDYESKNMRLQEVMVLIEELVRKIPMAEKLLEIKGVGIRTVSGFLAEVGDISRFNNPKELQKLAGLALVENSSGKHKGETTISRRGRKRLRYLLFEVAMSLVAKNPEFRELHNYYTTRRLNPLKKMQSLMAIAAKLIRVFYAMLTKGVDYDPKKMVSDIKRPAVYLQAA

SEQ ID NO: 95204 - protein, 367 aa, unidentified
MKKVSTAARKQIRNISQQKLTVGLDLGDRSSWYCVLEETGQVMLEQRVSTTAKVLREVFGRMPRSRIALETGMHSPWVSRLLSELGHEVIVAHARNVRLIGESRKKDDRLDAQTLARLARIDAQLLCPVRHRSAKAQADLTVIRARAGLVRARTALVNTARGLAKSYGERLRGCNVRNMNPEKAEALSPELQTALEPLLVASEALSEQIAEYNQRIEQMAKDSYPQVALLKQVKGVGTLIALTFLLTLEDPHRFRKSRDVGCYLGLQPGRRNSGQSQPQMHISKEGDPYLRTLLVQGAQHILGPFGVDCDLRRWGLKLAERGGRNGKKRAIVATARKLAVLLHHLWASGEVYEPLHNSSRVSVAAAA

SEQ ID NO: 95205 - protein, 342 aa, unidentified
MELYCGLDLSIKSTSYCIVNSEKKIVSEGKVATEVEALQGLLKRWEGLKCVVEAAPLAEWMCQVVEDCGHKIDIVCPRKAKPYLSGKKKTDARDARGLAELCRVDFYEPVHRKSEEARAIRSFMVARKQLVDAGVGIVSSIRGLLRANGVKLVASSDEEHFEVKVKAAMVELPRLVQSGIRPLLATYLLLRRQQRRMYRQLQKWANENPVSERLMSIPGVGAATAVAFVATIDEPKRFKSGAHVASYLGLVPSVNQSGEKESRGKITKQGDVLVRWLLVEAAHVLLTRSKADCELKEWGLRLREAKGPGKARVAVARKLAGLMWVMWLREERFRGKKAQAAA

SEQ ID NO: 95206 - protein, 415 aa, unidentified
MPNPLLVGVDVHRQTNTVCLMDQAGHVLGPRFSIDNNRPGAEAFVHQVAHQVVTGDFDAIQIAAEATGYYWWHFFQTLSRDPLLQQWPLQLYPLNPRLTANFAKTYLDRDHTDLGDAFVIADRLRMGRDLPPPYQLDARYLAVRLLTRYRFHIVHALVREKAYALAILYLKASEYARRKPFGNLFGAASRALLQEFSSLEAIAALPFDELVEWLDVRGKRRFADPQDNARTLQQVACDSYVLPTALQLPIHQTLGWSLQHVTFLEGQIKRLDSAIADQLTSIPHTLETIPGVGPVFAGGIVAELGDIARFEYQQAKVAKFAGFKWRKHQSGDFTAEETHLTRTGNRYLRYYFCEAANAVRMHDAEYAAYYDRKYREVRQHQHKRAIVLTARKLVRLVVRLLTTNQPYQPRRPATS

SEQ ID NO: 95207 - protein, 356 aa, unidentified
MQTQVTKKIDFKGKDLYIGLDVHKKSWSVTILVEGMEHRTFTQPPDPLALYNYLQKMFPGGTYYSAYEAGFCGYGIHRALNDLGIKNIVINAADIPSSQKDQLQKRDPVDSRKIARALEKGLLRAIHIFDRDREELRSLNRTRFYLMRDLRRSKNRIKSFLQYYGISIPLEYDNSLWTLKYIDWLKQIKMKTLSGQDAFSNLISSYEYHRQQILTLSRQIRVRIREYDNELYSLLKTISGIGPLTSSALITELGDINRFPHINHLSSFVGLVPRVKQSGESSYNAGMTFRCNEYLRTLLIESSWQAIRLDPALMQYYQQHITNNKGQKVIIKVARKLLNRIRYVMKNRQPYVTGVA

SEQ ID NO: 95208 - protein, 431 aa, unidentified
MVRHDLAILAIDLADTKQALVLCDHDSRVLARRTVRGHAWQLEEALRWGREVAVQHGFAGIVVGCEPTGHRWRIVADLCQQRGIELVCVQPLLVARAREGEDLTGDKSDPKDAMVIARLVGELRCYLPERPDQVWARLRQLGARRAQLTTQVTAARQQLRDLLECAWPAVLDTAAKPLDSLTWRAAVQVMLAATQGDPAGIRRLGYPRFARRVASELARWGGQRCCLRIVRAVWAATSSQALALGVGVQRPGGLERAALVLGDWHYALGQLAEVEQRMTGILDQLQLTSLVKSIQGLSAVGAAAILAESGDPARFDTARALVTHAGLCPRDNQSGAYADTTRISGRGRPALRLAAWRAVWGALHANPVLRARHAHLTSRDHHQLTPTQARTALAAALLRWLWVVVTKRIGWQAAIAAGQLDPRKEVTTPAA

SEQ ID NO: 95209 - protein, 351 aa, unidentified
MPRRSTVRAVTTIGIDMGKNTLHIVGLDSLGAIVLRERVSRGRITSRLANLPPCLIGVEAGMATHYVARELAALGHDVKQVPPAYAKPFRQGHKNDFRDALAVAEAVQRPTTRFVPPKSNEQLDLQALHRVRSRLVSQRTAVINQIRGFLLERGIIVRQGLRFLRQLLPDILAKRTDVLSPRMARIVSDLAGDWRQLDDRIETVTDEIETLAKNDDSCRRVMTVPGIGPIISSAMVAAIGNGSAFSRGRDYSAWLGLVPKQMSTGDRTILGRLSKRGNSYLRMLFIQAARVILVRPANWPKHGFGAWLIRAIQRLHPNVLAAALANKLARIAWTVLAQERSYEARVTTAEA

SEQ ID NO: 95210 - protein, 384 aa, unidentified
MSVIIGMDPHKRSATIEVIDGRAVVLAAGRYGTDKAGYAQMLAAARKFADRIWAVEGCNGIGRHLAHRLVHDGEIVVDVPPKLSAQVRVFATGNGRKTDPVDAHSVALVALRTPNLVQVRVEEDLVVMGMLADRRDELGQARTQVAGRLHRLLLELLPGGAKKFLSARQARSLIAPVRPRDLAGKTRRRLAVELIAELEAIDKKTRALDKELTELVTARGSTLMDLHGIGPSGAARLLADVADVHRFARRDRFASWNGTAPLDASSGSQTRHRLSRAGNRRINRVLHIMAVVQLRNQTKGRAYYDARRAGGMPSMMAMRALKRRLSNVVFARMLADQKRREAGPGGQPGTPADSSVAGPDPRTPALRTSHVPGPPLHSLNGVLT

SEQ ID NO: 95211 - protein, 416 aa, unidentified
MNAAGIDVSSRKSTVAVLRPFGEVVRFPFDVRHSAEDLAALAAQLKSIDGETRVVMEHTGRYYESIAKALHEAGLYVSAVNPLLIKEYGNNSLRKVKTDKADAMKIAKYALDNWSELRDYTPMDTIRYDLKTLNRQFQLASKQKTATANNLIALQEQSFPGIRKLFDSPVRSDGTQKWVDFTHDFWHVDCVRGGSQNAFTERYRKWCKRNHYLFSMEKAAEVYALAKSAVVMVQKTSVTKTLVQEAANQLTAISRSVETYRSEMNKLASQLPEYPVVMEMYGVGESLGPQLMAEIGDVRRFERKQSLVAFAGIDPAPSESGNYCSHSNRTTKRGSPYLRKTLFNIMTVHLQRAPADEPVFQFLDKKRAEGKPYYVYMTAAGNKFLRRYYGKVMAYFSTLEDLPPVDMDSTGLHRTE

SEQ ID NO: 95212 - protein, 345 aa, unidentified
MEHFAGLDVSVKETSVCIVDDTGRIVREVKVASEPDALLAVLTNPAYHFKRIGLEAGPLSQWLFSALAEAGLPVICVETRHMRAALKAQINKTDRNDARGIAQMMRAGLYRPVHVKTLRSQKLRMLLTHRKLLQSKAIAIENDLRATLRNFGLKVGVVGTVKFEARIKELVENLPDLTELVDPLLIVRRTLREQIGILHRRLLAIVRDDEVCRRLMTIPGVGPVVALTYRATVDVPARFRNSRAVGAVFGLTPSKYQSGEVDRTGGISRCGDEMMRAMLYEAAHILLVRTTKWSWLRAWAMQIARRRGLKKAIVALARRLAVIMHRIWIDGTEFRWTREQAAAAA

SEQ ID NO: 95213 - protein, 321 aa, unidentified
MGAIWVGIDVSKRCLDVAVRPTGETFSIDNDDTGIKNLTKTLAKRSPQLIVLEATGGHEYAAAYALMKAGLPVAVVNPRQVRDFARAVGKLAKTDPIDAKILAHFGEAVQPPARPVPDQQLEEIGHLVTRHRQLVQMIVAEQNRRMSSMGTARRDIDATIRFLRDRLDKIDEQMKTLITKHPEWRAKAELLDSVPGVGPVLISSIVAELPELGTLNRKQIAALVGVAPFNNDSGQWRGRRRIWGGRGHLRSLLYMSVVAGIRFNATIRQFYKHLTGGGKAPKVALVACMRKLLVILNAMLKSQQPWRPAATCDELASLVPA

SEQ ID NO: 95214 - protein, 345 aa, unidentified
MKITTVGVDLAKNVFQVHGVDERGRTALRKQLRRAQVAVFFGNLPPCIIGMEACASAHHWARTLQGFGHTVRLIAPQFVKPYVKTNKNDVADAEAICEAVCRPNMRFVPIKNIEQQAILSVHRVRQGFVKARTAQANQIRGLLGEFGLVIPQGIYNVAKRVPEILEDASNALPAQFRHLIDRLTAHLKELDRQVKEFEQEIIAWHRASELSRKLEKIPGIGPLAASALVASIADAHSFDNGRQVSAWLGLVPRQSSSGGKPTLLGMSKRGDTYLRTLLIHGARSAILAAKNKVDNTQGWLTELLKRRHPNIAAVALANKNVRTVWAILAHGREFKADYVPTRIAA

SEQ ID NO: 95215 - protein, 339 aa, unidentified
MAEYYAGIDLGARSSWLCVVDAKGEKQLNRKVPNDPARILDWLDPFRPSLQVVIESTFNWYWIVDLLEDHQIEVKLAHPLYLKAIAYAKVKTDQVDAHTLAQLLRLDYIPEAFIYPRDLRPTRDLLRRRHRLVSWRSDLVRVLHFQLISHNVTTFGRNAIRQLDDRQLRGLLTHPHDRQVGRSILHLIAGLDLEIAELEKQVSASVFRKKPVVLLKTIPGIGKILAATIYFEVGQIHRFASDKAFASYCRLAPTVAQSGGVTRQGRNRKQGNRLLKWAFSEAAQLAIQGYPTIREQFEQLLRRKKKRILVKSILAHKLAVAAFHVLHDETPCQPGFLTN

SEQ ID NO: 95216 - protein, 415 aa, unidentified
MKTFAELTHFAGLDWAKDHHDVVIVDRQGQVVAQLTFPQSAEGWQQWQQCVQAYPALGVALETSSGPAVEGLLASGVTVFAMNPKSAKAYRTRKAPSGTKTDGLDAWSFADGLRTDGHAWRALAPLDPLVQELRLLCRDEVELITQRTALVNQLQQALGEYYAAALQAFDDWTAPYAWAFVEAFPTPEALAKAGQRRWVNFLHAHKLYRPQTAQKRLEQFAKALEFCPSPAITRAKSRLAISLVKTLLTLEKQLQQYRAAIEQLFAEHPDHDLFGSLPGAGDKLAPRLLSEVGQDRHFFDDLQGLQCVAGTAPVSFQSGQIRRANIRWHCHKHWRYAVHLWADCSRKYCSWAQVYYKAHRDKGNTHASALRRLGNRWLKILWTMWQEGKTYDSERHARNQQEHGSWLLKLETAKP

SEQ ID NO: 95217 - protein, 351 aa, unidentified
MSQKLNSAIAVIGIDIGKNSFHVVGHDRRGAIVLRQKLSRGQVETRLANLPPCLIGMEACVGAHHLSRKLQLLGHDARLMPAKYVRPYSKGQKNDFRDAEAITEAVQRPTMKFVATKTAEQLDLQALHRVRERLVSQRTGIINQTRAFLLERGIAVRQGLRFLRAELPGILAKRSDVLSPRMLRVIEDLAGDWRRLDERIGGLSGEIEALAQQDQACVRLMTVPGIGPIISSAMVAAIGTGDVFCKGRDFGAWLGLVPKQISTGDRTILGSISKQGNRYLRALFVQAAWVVLVKVGPKHWERYGLRSWIEAAKKRLHHNVLAIALANKLARIAWSILAHGRTFEASKLQAA

SEQ ID NO: 95218 - protein, 491 aa, unidentified
MKSIFTKTNPAVEHVFQEAAHPSKVMCVPLDYAKRTHTALVCNGAGMQLRKPFNVHNDPAGLEFLLKITDGLCRKHFIGKEHVIFAGEDCGSFCFNFIHALASQGRLIVGVHPKDAADERENKNASTDELDLLGIASLVINKKRGRTIGADHSSAAVLRRLTHHRNSVIKAHSACAHRIHALVDQLLPGFLNEKQSGLTPFSRASLWLMQERFSPRQLKSRRRDALIRKLREFAVTDAEQTADQIRHLADTCLPPPTGLCESLQTSLSREISIYQSLDACIGPMNTQIAQCLAPTPGAMLMTVPGIAVALGAGLYAEIGDPARQRSLEQLTSYAGIVDRLKQTGGPESEAKSKGRSRRGHRVLKRLAVDIALKTGQYGHPELKADYSRREALGQDVRFTMARRMLRICNHLIQYTDFFLPPSLVEDPSHEQLRAYYQQAWPRMLVKWRNAGAIQQAFTPGAPLEHWRTMLNERYHLSLSKKSPQAAELRRG

SEQ ID NO: 95219 - protein, 345 aa, unidentified
MEHYVGLDVSLKLTAICIVDRTGKIQREGVVHSDPEAIAAFIKSNAPHVVRIGLETGATSTWLWTELKKLGLPVICIDARHAKAALKMQINKSDRNDAVGIARIMQCGWYKEVRVKDLDSHAVKALLVSRALLVKIKRDLENQVRGLLKNLGLVIGPAKMNTFALRAAGLTEDRPELAAAVTPLLKARMAIEQQIAELDRKVMKSARNNAQVRQFMTAPGIGPITALCFLATVDDPGRFRRSRSVGAYVGLTTRRFASGEIDWTGRISKCGDKMLRSYLYEAANVLLTRVAKWSALKAWGIRLAKRSGLRKAKVAVARKLAVILHRMWIDGTDFRWSKETAAQTA

SEQ ID NO: 95220 - protein, 384 aa, unidentified
MAKVVIGVDPHKRMNAVVVVNAKGTVLARQQFSNTARGFRELRAFSRQWRPRTWAVEGCNGVGKHLAQRLVAEHETVVDVSTRRAALVRVYAGGNGRKTDDTDAHLIAMVGLQTPGLPVVRPDDRTVTLRLLANRRHELVGLRTQAVCRLHRDLATLIPGGAPRALTAKKAKELLATIRPRDEVGRLRRQLAVDQLAGLVALDRRLAELERQINMVVAATPTGLVRIFGVGPVSTARILGEVGDVARFRSRHHFASYNGTAPAEEGSGGAPIQRVNLKGNRKINHAIHMVAITQVRNDTPGRAYYLRKQAQGKTQKEALRALKRKISDAIYRQLVEDALAERGPGGQTGTTLRSSVAGPTPTAGSSDKPQPGPKPQATPLPASA

SEQ ID NO: 95221 - protein, 312 aa, unidentified
MTHACAAGVDVGRDWLDVGLAPSNKTFRIANAPAGIATLVAQLKREGASKVVLESIGSYGARLVRGLADAGFEVGVVDPKRIAALRTAEGRRAKTDRLDAGLIARFALLMQDAARPVPSAKAFEIRALSTRRRQLVEMAAMEKTRLKQTLDEAVADSCRQMIALLSQERDRIEAQLQAMLLEAQDGPARAALLQTIPGVGPAVSMTLLADLPELGILDRKAVASLAGLAPHANQSGTRAGPAHIGGGRPCVRAALYMAALSAARNDKGFKREYLALRQAGKPAKVALVAIARKIVVAANGMLKSGQPWQKPA

SEQ ID NO: 95222 - protein, 392 aa, unidentified
MIYAGVDIAKADHVIAAVDETGAEVARPMAFKNTEAGFERCVAWLESIAQTEDDVFVGMEATGHYWMACFAYLTAAGYRACVVNPMQVSAMRKLKGLSGVKNDRIDSFLIAETLRQGNYDETRLATDEVQALKQLTRYHQGLKQELATVKTQAICVLDAYFPEYAGLFSDMFGAASLKVLSECPTPSEVARKRASSIAKMLSEGSHGRLGADRAARVKAAARSSVGIRLGEDAASFQIKTMVSQIEFLNATIAKVEREVEGLLERIEPNITTIPGVSITTGAQIVAEIGDVKRFKNAASIVKYAGLNSGVDESGKFSAEGVPITKQGSPYLRRSLWLAANRARQFDPRLKAFYDKKRREGKPHRVAVTACARKLCHVVYAVMRDGEPYDPDK

SEQ ID NO: 95223 - protein, 323 aa, unidentified
MVAVAEGGRRGEVREYRRIANTPTAVARLARQLSRDGVRLRFCYEAGPCGYGIQRQLSGLGYECVVVAPSLIPKGAGDRVKTDRRDAASLARLNRAGELTAVWVPDAGHEAMRDLVRARLAAVQALCRARQQLAGFRLRQGRHYGRPAWTKLHRRWLAGLKFEQPVPHIVLEDYIAAVEAAEVRRDRLTAQIETMLGDLSRFANPRQLMAYLGLVPSEHSSGTSIKTRRSHQGRQRHRPSTADRGGLVLPDSRPASAVSCCSARRRSRGRSVRPPGRRSCGSARGTASSPAPASPANVVTAAIARELAGFLWAVARQVTIPAG

SEQ ID NO: 95224 - protein, 403 aa, unidentified
MNGCACFTRIGGFLPAHPELVLRNYVKKGLEISGSLLIIKEKTKEGTVMDNQSIDYTNQDFFLGIDVHKKSWKVTVRTQNMELKTFSMDPSPEELYRYMNKRYPGGNYHSVYEAGFCGYWIDRELRRYGFKNIVINPADVPTTQKEKSTKTDKVDSRKLGRELENGTLRGIYVPDELHQQLRSLCRLRFKVVQSQTRLKNRIKGHLAFYGYVIPGHDEVSHWSLGFIRWLKTLEFSYGMGRDYLWLCLEELESHRRRLGEVLRLLRRYCREYGIQEEVKNLRRVPGVGFVTAMTLYGELMDMRRFKSIDYLASYVGLIPSVSASGERESSLGLSFRRNRYLRYLLIEGAWVAVREDPALGYVFSRLIRRMSRQKAIVRIAKKLLNRIRHVWNHKEGYACGLIS

SEQ ID NO: 95225 - protein, 348 aa, unidentified
MITIGVDFHKRTSSYKVLDINGRHLKSTKFENSREAIREFLETIPNPKRLAMEATRSWGLYHDCVHDLVDEFHLGHPKKMKVITESQTKNDKKDAEMIARLTYSGFLPKAHISCLDTRELRSLLRFRHFLVNERRSIRNQVQTLIDRNIWPSDRPKSFKNLFCRRGIQWLKKIELSSRERFILNQCLGAFDQLSQKVLDMEEFIKNQTLDLPGLPYLRTVPGFKSSSVNALIILTEADGINRFPKARSFSHYAGLIPSEFSSGDKHRTGRLVKDANMHLRTAFIESTFAAIRADKGLKAYYKEVKKRSGSGSAVIATARKLCYAVYHVLKEQRAYRPEPLPPAAVCHP

SEQ ID NO: 95226 - protein, 358 aa, unidentified
MYKFMKKFFIGVDVSKDTVDVSFFDDDRMKSPEYLAQYSNSPKGFREMVKDLRMCCHGISSGQWLFCCETTGRYDHPLCHWLVDHGMVVWRESALQIKWSSGIQRGKNDRVDSLRIAEYAWRHQDKMQKFVKPSESLSNLKAAFTHRRRLVEKRTATRCQLKSMSSEKGLSASVARMIVRDLSREIERLSASIATMDESIQKIIRSDSELDRNYRHIISVKGVGPITAVALIVCSGNFKAITSAKKMACYCGVASFRSQSGTSINRKASVSNLSNRQIKSLLSMAARSASRSNPVFAEYFNRTLSRGKPVALVYNNLRNKIITVVYKLIERNCDFDVDYKRMHSTGQRANEPAIREAV

SEQ ID NO: 95227 - protein, 380 aa, unidentified
MKTNSDTTTKLYIGFDVHKEKTTIAIAEPGATGEIRSYGEVATSQVAFERTLRKLAKARGVAMGEIHVCYEAGGCGMWIARMLVRLKVRCTVVAPSLIPSKAGDQVKTDKRDAIKLVRLLRAGELTAVHIPDETDEAIRDLCRARVDAMDDLRRAKNRLLAMLRRLGFRYTGKTHWTEAHKRYLRDLRLPFACHRVIMEELIGQIDQLVARIERLEGHMELMCAEWVKKPVVEAIMTLRGFRIIAAMTVVSEIGDFVRFTHPTQLMSYLGLTPGEYSSGGKRKQGSITKCGNSHLRWMLVECATHYKAEPRVSSALSMRQEGQPRWLKEISWKAQNRLHLRFTKLRQRLMHHNKIKVTVARELAGVLWEIGVKMQTQTTR

SEQ ID NO: 95228 - protein, 420 aa, unidentified
MEHEKIEYAAWVGIDWGSENHAICLQVEGSERLESYTLEQKADVLHAWFMHLLVRFSGRKIAVAIEQSKGAVVNFLLGLDFVHIFRIHPKSLKNYRDALYPSGAKDDPIDAELIVQFTRLHQKKILPWIPDSEDCRLLMRLVEYRRKTVNKRVRLTNELTQLLKEYFPQALDLAGALDHGMACNFLLKWPTLQKLQRCKPEVVRQFYREQGCRHSEVIEKRIEQIHKTYPLTTDKAILESSILMVQTILPQLRLLIEAIARFDERIAEVYRKQPDAEIFSSFPGAGKALAPRLQAAMGSKRDRFRSSQEVAEYSGIAPVTERSGKSQWIHRRFACSRFVKQSFHEFAGESIVHCVWAKAFYESKKASGMEHHAALRSLAYKWIRIIFKCWQDQVPYDEDKYLKSLRSKHPSWLELMPKEV

SEQ ID NO: 95229 - protein, 392 aa, unidentified
MIYVGIDVAKSKHDCCILSQDGEVFTSFSFTNDKLGFEKLMNEIKRFSGKKDFSNVKIGLESTGHYSLNITNYLLQKRLSVKIFNPLLVSLKRKAESLRKTKTDKSDSKFLAQLLFTGESEPYLPPVLPISELKILTRNRHRLVMMRSKLKLSISRLITILFPELPNVVYSVNQKSTYALLLEFPTARTIADAHLTKLTNLLSDNSHGRYGRDKALQIRSLAVDSIGFDSNATSFELRQTIRLIQNLNTEIAVIDREIKSIMDEIESPIISIPGIGYVLGAIILAEIGNIENFSNPNKLLKFAGLEPSVYESGKFKAGNTPMVKRGSPYLRWALLQAARLVAYRNDTFHRYQQRKLAEGKHFLVVQTHLAKKLVRVLFHLLKTNSDFDINVA

SEQ ID NO: 95230 - protein, 407 aa, unidentified
MVDTTATDLFLGLDLGKEFHHAHGRTEDGRTVHDKRLPNTEPKLLELFTKLVAKFGTVLVIVDQVANIGALPLTVARAAGCRVAYLPGLSMRRAADLHPGEAKTDARDAFVIAETARTMPHTLRAVDRDDEVLAELTMLTGYDNDLAGEVNRTTNRLRGLLSQIHPSLERVLGPRLAYPYVQVLLARHGSPARLKRLGRARCEALLRAHGSRKARHLTAEIYDALAEQTLVVPGTEASALIVPGLAAQLAAAHTQRKATEQEIAALLEALPLFHLLTSLPGLGVRTTAAVIVAIGDGTGFPTAGHLASYAGLAPATKSSGTSIRGEHAPHRGNRLLKRALFQAAFAAIGCKADPSSRIYYDRQRARGRTHTQAILRLARQRVNVIHAMIRTGALYEPRTPDAVGLAA

SEQ ID NO: 95231 - protein, 343 aa, unidentified
MEYYVGLDVSLKQTSICVVDQSGSVVREGVVDSDPEAISVYVRSKAPGAVRIGLETGPTSTWLWTELKRLGLPVICIDARHAKAVLKMQINKSDRNDAIGIARIMQTGWFKEVHVKDIDSHSVRALLASRALLVKIKRDLENHVRGLLKNLGLVIGRAKFNVFAVRAEELIEGRPELITTIRPLLEARTAVEQQVNELDRKVMKLARHDAQVRRFMTVPGVGPITALAFKATIDDPARFARSRSVGAYVGLTSRRHASGEVDWTGRISKCGDAMLRSYLFEAAGVLLTRVPKWSAVKAWGVKLAKRNGLRKAKVAVARKLAVILHRMWIDGTEFNWSKKEIAA

SEQ ID NO: 95232 - protein, 433 aa, unidentified
METLFKVSAGIDVHQDTVVVSIRRRDEREREKVETRTFETFHDTLVQMVAWLDEHEVEVVGLESTGVYWKPVVRALKVGSPCRLVWLVNPAEVKKVPGRKTDVNDSQWLSKLVMHGLVSPSFLPPLEQEELRKLTRFRTRLVAERTSIKNRILKEMEAAGIKLASVCSEPLGKSGRTMLDALLAGTQTPAQIAQLALGALRTKIPTLERAVCGSFSEATRFVLKQMVAHLDQIQRDMKALDEQIQTRLAGYEKEADLLQPVPGLDRVAIAAIVAEIGGDMSVFGGADQLSAWSGLCPGSNESAGKSKSAPTRKGDKYLRTILVQVAWCAVRTRGCFWKQKFGQIVKRLGPKKAIVAIARKMLVAMYYMLRDRVPYQEPTAPVPSNAKAKRMVQQYTARLAALGFEVHLTPVVAPAPVASPVTEAPAPVAAPAT

SEQ ID NO: 95233 - protein, 400 aa, unidentified
MHLTANISVPQKNFIAIDLHSDNAVICVRRNALNKAGELIGKNIWCGRVSIRDGLDNFIKALLPYCQDFDHVAVVESTYNWYCLADVFEERGWLLRIADPSTVSQANLKASDDRTDAQYLAERLRVGSLKHYLPLSYSSRALRDLCRYRMAMVQDCASLKIKLINLYRNQLSKNMRVADLLDRCRNHMQSNYRFDPDILEEFKDPNIRLRVAFEVSRIAMLEEMIEECNAEIQKQCKDQELVKLCKTLPGCGPVLSAVICTEIGTMQRFKSAGDFVSYCRLCSTSKLSNGKSKGLGNAKNGNAYLSWAFTEVAQYASRNPVIREILQRLLRKYGGLRVKAIRTLAAKIARVTFYVLKNRQPFNAAQCFGDELTKGIKKKLALKPLSKDDSVVLPIVAGLA

SEQ ID NO: 95234 - protein, 461 aa, unidentified
MKKQEQKSAALSEPKIKRFSQGLPVNNPYACGIDVGDTMHDVAIGKDEGHEVRKYAAFTEDLQNLVAWLKNEGITSVAMESTGIYWLNLYLMLEEAGIETFLVNAKHVKNVTGRKRDDTDAIWLQKLHSCGLLQKCFQPEASIRTLRTYVRQRKKLVTLSSDSVRRMQKALELMNIKLHTVISDILGRTGMAMVAAIINGERNADELLKLKDARIKASEEDIRKSLQGIWSEEYLFTLNQAYNGYGFYQAQIKECEEKIKEQLLAQAAKVQAGDISNLEIERKKKLKKNEFAFNAQVLMKAVVGVDLCQIESMSEISVVELISEIGLDMKQWQGHKRFGAWLNLAPNTKQTGGKIISSKMQKKKNQAGLTLRMAASNMSKSKSPMGDYARKMRARIGKKGAVVAAAHKLSRIIYTMIKDQVEYAPVTLLENQQKLNEQRIKYLEKQLLQLRSASWLSGTYI

SEQ ID NO: 95235 - protein, 344 aa, unidentified
MEHFAELDVSVKETSVCIVDDTGKIVREVKVASEPEALLAVLKNPAYHFKRIGLEAGPLSQWLFSALAEAELPAVCVETRHMQAVLKAQINKTDRNDARGIAQMMRVGLYRPVHVKTLRSQKLRMLLTHRQLLQSKAIAIENDLRASLRNFGLKVGMVGKVKFEERIKELVENLPDLAVLVEPLLVVRRVLREQLVILHRRLLAIVRDDEVCRRLMTTPGVGPVVALTYRATVDVPARFRKSKAVGAVFGLTCSQYQSGEIDRSGRISRCGDEMMRVMLYEAAQSMLRSKKWSWLKAWAMQIARRRGMKKAIVALARRLAVIMHRIWVDGTEFRWTREQAAAAA

SEQ ID NO: 95236 - protein, 346 aa, unidentified
MMVIGCDYHPSWQQICWVDTATGETQEKKLEHASGEAERFYRGLPGPALIGMESTGNCQWFVEMATTAGHDVWIGDAAKIRACDVRQQKHDRRDAALILRLLLEGRFPRIWTPSGQEKDLRQLLIHRYKLVRIRAQVKNELQHLAMNQGITKRRKLWSKAGEKVLRELPLKPWASRRREDLFKVRGMLDEQVGLLDQAVVEAAEKNEKARLLMTQPGVGPITSMAFVLTMGDVNRFQRGKQVASYLGLIPREYSSGGHRRYGSISKQGNRFMRMLLVEAAQCAVRCDPQMRSEYLHRCHRKPKGVAKVAAARKLAIRLYWMLRSNTRYPEVVHVESSSRVPLVGAS

SEQ ID NO: 95237 - protein, 422 aa, unidentified
MLQEAHDSEELIQRVAALDIGKAELTCCVRVPGGGKRARRLQEVTTHPTMTRSLLELADRLHQLGVTRVVMEATSDYWKPVFYLLEAAGFEVWLVNARDVKHLPGRPKTDRLDAVWLCKLAERQMLRPSFVPPPPIRRLRDLTRYRIDLVAVRTAEKQRVEKLLEDAQIKLSVVASDIFGVSGRAMLSALVGGERDPKVLARLARTRLRAKTARLEEAFAGRFSDHHAFLLQTMLSRIDQASADIAELDRKIEEAIAPFAAAADRLDEITGVGRTAAQVIIAEIGVDMDRFPTAGHLVSWAKFAPGVKESAGKRKGKHTTGHGNPYLARVLGEAAVAAGRTNTFLGERYRRIARRRGAKRAIVAVGRSILIIIWHLLTDPDVRYCDLGAGFYDTRINAERRKHNHVRQLQALGYRVTLEPAA

SEQ ID NO: 95238 - protein, 390 aa, unidentified
MQALCPRPHEHTAIRTDLKAIFVSLELSRSTWVITSLSPGGGEKMSKHAVPSGDIPALLARLSQLKEKARARTGQVFPIIVIQEAGLDGFWIHRVLQQEGIESYVVDPASIATSRRRRRAKTDRIDGEALVRALLAYKRGEPRVCAMVQAPTPHEEDRRRISRERDVLTAERVQHVNRIKGLLFAQGIGDYEPLHRNRRERLAELITGDGRPLPECLKAQISRELDRLELLIEQIKAVEAERDAMLAQARASSGVPAPAAQLLALRGIGPEAAATLWTEGLFRTFDNRKQVAAYAGLAPTPWQSGSVHREQGVSKAGNPRLRTIMIQIAWLWLRHQPQSALTLWFRARIKRTGGRLGKTMIVALARKLLVALWKYATAGVLIEGAVLKPA

SEQ ID NO: 95239 - protein, 358 aa, unidentified
MVQRKELNFEGQNIYIGIDVHLKTWHVSILTESGCLKKHSQQSSAQALFEHLKKHYPNGNYLSAYEAGFSGFSTYYSLLDFGIECLPVHAADIPTGQYESVMKTDAIDSTKIARALKSGLLRGIYIPKKEVLDDRNVMRLRITLKRQLSGYKSRVKHLLYNNGVIYPECFQNSKSHWSKRYLKWVHEDVQLLSESRNSLDLLLRQVELFRKSLLEITRLVRTLSRNGRYGEAYENIVSIPGIGMITGMCLLTEIGDIHRFRNERQFASYLGLVPTSHSSGEKTSHGEMTFRGNKRLGPLLVESALVAIRQDRALAAAYGEYCKRMLPQEAIIRITRKLSNRILIILKSGKKYEHDRCY

SEQ ID NO: 95240 - protein, 373 aa, unidentified
MPKYSTAFGMDVHLRSTTVCALDADTGEAVTRRFPGNPWGEIAGWMDGFPGPSLAAYESGYLGFAPQRELAGLGVECVVAAVSKIPRSAADSASKNDRNDAARMAKAILAHDISPVWIPSPEVEGIRDLAGAYDGATARLATAKQRLLAFLAKRGFVYGGTTPAGNPRKYWTYDFLRWLDKVRPEDDGGVRTLAALRNEVEAAAEARADLLSEYRAAVDASPIAAEVAALQSIKGCAFALAAAFSAEVGDFTRFRSGRQVTAYFGLAPSQRSSGGSVRLGGISGAGNALVRKLAVEGSWCYAAARHQPKLMPRDTGVPLEIRMHGRKGSERLLRRREEMLARGMPAAKANAATAAELVRWLWALGMMCREGAE

SEQ ID NO: 95241 - protein, 409 aa, unidentified
MAMLDVALDPATVVVAVDPGKVMNRVWVSNGDGLLEQPVSLPVARAGIAALERMLAAHSGERVIAIEATGSLHRAWAAELERLYPGALRLFAPSETKAARTQLGSARFKTDDRDCAALTYLARQGAGRRQVEESVIDTLRAAVRHRRGLVDDRKKAQQRLHDQLNGLCPGLSAPAGHGRELPIETPTGQAVLACAAAFAGRPPTMRSLIARAPGRLTKTNAEYWVQRWRGCLPPPPDAEQRAQRLGRDLARFRALQIDIAAIEEEMKAWLAATDGQILTSLPGVAVLRAAAFAAHTLPIARFPDAEHLYSATGLAPALYESASLRKRSRISRQGLAEHRDALMGIAWGLSLFSPSFAERDAELRARGMAPIQARVALARNACRLAYRLLVTQQPFDEEAYRRGRLRRGR

SEQ ID NO: 95242 - protein, 359 aa, unidentified
MEQISRIGMDTSKHIFQLHGVNIAEEPVLRKKLRRTEMVVFFEKLPPTVIAIEACGGSHHWARLLQSFGHQVKLIAPQFVKPYVKRGKNDAADAEALCEAMSRPAMRFVPVKTPDNQAALMLVGLRDRLIRNRVQLANAIRGYAAEFGLTAAKGVCKIEPLLDRAAADKTLPALARELFAFHAAEYAQLQEQLEKVEAKLVAWHRADECSRRLAQIPGVGPIGASMLVMKTPTPEVFRSARHFAAWLGLTPKDHSTAGKVRHGVITRAGDEALRSVLVVGATAVIRQIRYGRGALSPWLLDLLKRKPPKLAAVALANKIARIAWKLMVSGQQVARIGAGCVARVQPATGSTCQDATVPS

SEQ ID NO: 95243 - protein, 389 aa, unidentified
MKKQYLNVASVGMDVHHKFSTVVMRDGKGDVLCRERLDHVGRSLLRRRLTGWPKRVPYVMEASFGWMWLSDEMVAKGLKVNLANCFKLEQMRKARGESKTNGKDAALLSELPFEARQWWRVWLAPAEVRNEREWLRLRMDLVKLQTQTKNRINAIFHRYGIFHEFSDLFGSKGRGLLVHLCQYGRTDEVELPDGALAALRSHVRLLGQVRTRLAEVTRKIRVRLERTDLARRLDGIPGFGEVLSHTVIAEVGRIERFRNHRALASYSLLAPISMDTGEPSGKAPLGRHLGHRGNRTLKWAFIEAAHGAVRSGGRWRAMYDRHTDGGRRNKNQGYIKVARSLVKVVYAVWSKGVDYTPSAPSPARRKRRAKSRRSRSGKGQPFQPMAAVR

SEQ ID NO: 95244 - protein, 371 aa, unidentified
MTEAVKYVGLDVHKETIAVAVADGERGGEVRFVGTVANEDDAVRKLVKRLKGPGVTLSVCYEAGPCGYGLHRLLTQLGQTCIVIAPSMMPRRPGDHIKTDRRDALTLARLLRAGELTAIWVPDEAHEAVRDLIRARRSAQEDAIGAKQTVRSFLLRHDRRFGGRAAWTKMYWRWLSEQRFDFPHQQLAFEEMQKRVLEAQARVGRLEAALAEAVDAWCFAPLVRNLQVLRGIRLVSAATLVAEVGDLTRFDNPKQLMAYVGLVPSEHSSGARTKRGRITRAGNAQARTMLIEAGWSYRLPAREERRYRERVIDLPEEIQAIGWKAQVRLCQRYRRLTATGKPQPKVTTAIARELVGYAWDIARRVSPALAS

SEQ ID NO: 95245 - protein, 423 aa, unidentified
MQAAWFVGVDWGCQKHQVCVTDAAGAVLGERAFEHGGAGLSEMADWLLSFAAGAAGAVGVAIETPRGPVVESLMEHGIAVHSINPKQLDRFRDRLSPAGAKDDRRDAQVLASALRTDLHCFRRLEPTDPTIVELREWSRLSDELTRERVRLANRMQQQLWRYYPQFLDAVDGDVAAPWALDLWRSLPTPRAGQRVREVTLTRVLKQHRIRRTDAATLRDKLRAPAVKVAPGAVEAAVTHVELVAERLVLVNRQLDRARRALDGLVGQLAEAAPADDPDASAEAEPASSRQPPDAAILLSVPGIGVKVLSTLLAEGSDAVQRRDYDALRCLCGVAPVTRRSGKSLLVTRRLAADGRLRDATYHWARTAAQRDPASHNKYQALRARGHGHARALRSVADRLLSVACAMLRDGTCFDPQRVGTTAR

SEQ ID NO: 95246 - protein, 391 aa, unidentified
MVCVGIDVAKDKHDCFIISSEGEILADVFTIPNNAEGFDTLLQAIRRSTRPEDKIKVGLEATGHYSYNILGFLLNEGLDTYVINPLHTNLYRKSLSLRKTKTDRVDARTIAAMLMSDVDLKSYTDTAYHNEELKSLTRYRFDKVKERAKLKGSISRLVCILFPELEKLVPSLHIASVYALLEEFPGAKQIAAAHLTRLKALLEAASKGRYKRDMALEIRDAARNSIGSWMPAKSLELQHTIRLICELDNEIAEIEEQIQLIMDEIHSPITTIPGIGFRMAAMICAEVGDFTRFDSPDKLLAYAGMSPSTYQSGQLKNCYPHMEKRGSRYLRYALYNATKYVCHWDPTFADYLAKKRTEGKHYNVALSHAAKKLVRLIFAMEKSRQPYCSTA

SEQ ID NO: 95247 - protein, 323 aa, unidentified
MLIHYIDIAKRNFVIAVSSLSKTKTETNNPKGIAHTIEYLKKHKVALVVTESTGGLEIPAAKAIRRAGIAVIIANPRQTHQFAQSQPLTKTDAKDAKMPAFFAQMTAQKEDSQTMPYQPPTEAEEVLEALVNRRNQSADMRTAEKNRLHQVHETQVGSVKQLIAHFDRLIDELDKQIDNHTHTHFDGKAQVAEQIKGIGSITTATLMAMLPELGRLSHKRIASLAGIAPHPRESGETKFKSRCFGGKSAVRKALYMATVAATRFEPLIRDFYQRLLSEGKPYKVAVTACMRKLLTISNARMRDYFAENDTAENDTAENGIRTA

SEQ ID NO: 95248 - protein, 352 aa, unidentified
MGIVVALDVHRNQITYKALDRQTGELSRGRIAPAARAEVRAWLGRFAGSEAEFALEGTTGWRFVAEEIERAGHRAHLADPAETAARRGRKRRAKTDNADCDLQLRLLLGGELPESWIPPAHILELRTLVRLRKTLIDQRTAWQQRIHAQLFHQGVPAGLRLRTQPGREALARAELSPAGRELVALGLRMLDIFDLELAPLDRQLRVFARRQPGCRALIERLYGVGPVSATAILAELGDARRFSSSDDAVRHAGLDITVYQSDEKRAPGRLSHEGPELLRWALFEAAQSAARASSPDRDYYLQVAERIDHNRACLSVARKLCRRAYHILRELGEEALAPIQPAEEEEAIAAAA

SEQ ID NO: 95249 - protein, 409 aa, unidentified
MHYYIGVDWADQEHAVWVEDEQGHRVTTRMVPHSAAGFSDWGHELHTWRAQGITLWAAIERPEGRVVDFLLDHGVRVYPVNPKALDRARDRFRQSGAKDDLFDARVLAGFLRTDHGHLTALEPSSEAAQELKLLTEDYHRQLRAQTRVMNQLTATLKEYYPRALEVAELTTALLRAFLQAYPTPESLTDLSERQWQRWARAHRLSAARTTELWVTLKQPQLPVPAHVVRAKSRLMQVLTRELAVVVEAVTSYRTAVDDFFARMPAAPWARTLPVGEHGITVPTLWARLGDAPGRWESAAHLQAQAGMVPVTVRSGKQLAVLFRFACDKQLRYTVDQLAWLSLSRSEWARAYYDQQRERGHRHRRALRALGAKWLKIVFIMWKRHVAYSEEHHLATMARQALRRPEKKIA

SEQ ID NO: 95250 - protein, 414 aa, unidentified
MQVVYSRCCGLDVHKKSVTACVLVLDQQGHRSVRKKQFETHRPGLHRLVLWLYASKVTQVAMESTGVYWKPVWNALEKHFPLILANPYQVKSIPYEKTDPRDAEWIADLLAHGLIRPSFVPPVEIRQLRDLTRHRVKLMQDRNRVHNRIHKVLEDASIKLDTVASDILGSSGRAIIEGIIAGEERPDWLADKAQGTLRGKRNQLRVVLRGQVNEHHRWMLRRLLEELKFLENEILCLEQQLALAMRPYEPAIDRLCTIPGVNVLTAWTLIAELGPTMSVFADAQHAASWAGLCPGNRESGGKQLSQRTRKGNRWIRRALCQSAWAVSHKKDCYLTAYFYRKAGNGMRQAIVATAHKILIIAYHVLRDGISYQERGGGYFDQLHPERARNRLLKRLERLGWDVSITPRMPSAPDR

SEQ ID NO: 95251 - protein, 347 aa, unidentified
MRFYTTQHSFYCGIDLHARTMYLCILDQRGEVLVHRNMQTDPDAFLKTIAPYREGLVVAVECMFTWYWLADLCADEGLPFVLGHALYMKAIHGGKAKNDRIDSQKIAALLRGGMLPQAYVYPAQMHATRDLLRRRMHLTHKRAELLAHVQNTHSQYNLPAIGKKIAYKANREGVAERFADPAVQKSIEVDLALITSYDELLRDVALTIVKTARHHDANTLYLLQTVPGIGKILSLVLLYEIHDINRFPRVQDFISYCRLVKCAKASAGKRLGTSGAKIGNAHLKWAFSEAAVLFLRDHAAAQKYLARLEKKHGKGKALTILAQKLARAVYYMLKRQVAFDREKFFHP

SEQ ID NO: 95252 - protein, 397 aa, unidentified
MQQDSKGQVVAEWDARRSDRKYVGLDVHKATIAVAVADEGRGEVRSYGTIKNAPEAVAKLVTKLGPAERLECCYEAGPCGYGLQRQLTGLGAACSVVAPSLIPTRPGDRIKTDRRDAVKLARLLRSGELTSVWVPDAEHEALRDLSRAREQARDARHRSRQQLSKLLLRLGVAEPSGTKRWTQRYWSWLRGVELEQPLQQLVLADAIEAVETGTTRLKKLEGQLKAAATQGRHAPLITALQSLRGVGVITAVTVVAELGDLGRFPTPRPLMAYLGLVPSEHSSGGSQRRGRITKAGNRHVRHVLVQAAWHYRHAPKVTRALRQRQAGQPQAVIDVAWSAQQRLHGRYRKLASRKGRQKAVIAVARELAGFVWALARAHAEHQAADASQAPNAAEAAA

SEQ ID NO: 95253 - protein, 410 aa, unidentified
MDWIACVGVDWSDQKHDYALRGRDGELEQGKFPSGPAEVHAWVARLRAQYPTGTIVVALEQSRGPLLYALSMYDFVALVPINPRAATAYRESLHLSGAKDDPVDAALIRDFAAAHLDKLRVWKADDALTRRLRLLAEFRRKLVDHRTGLTQAFTDAVKQYFPQILEWFSNGVLARAFLSEWPTLEQAQNVSDQSIRTLVRSCSRKSQAKIDELIVKIRAAVPLMSDQAIIAAMVIRIRSLIALIEELDEQVRAHDQAIAQAWIEHVDQKLFDSFPGAGPVLAPRLAAAFGSDRTRFEDASEMHNYSGTSPVTERSGKRCWVHARWQRPKFLHQTFHEFAEASIPHCAWARAFYQRQRQRGAGHRAAIRALAYRWIRVLFRCWKTNTPYDEATHIESLRRRGSPLVDCLAA

SEQ ID NO: 95254 - protein, 376 aa, unidentified
MTQIIRIGVDTSKSVFVLHGVDAAERVVLRKRLRRRQVLELFAQLEPTKVGLEACGAAHYWARELQGLGHEVVLLPPQYVKPYVKRNKNDAADAEAICEAMSRPTMRFVPVKTAEQQAALMLVGTRDALVRRRTQLTNAIRGYAAEFGLIAAKGLDKIEPLLARIAAHAPLPGLAQELFAAHAKEHVRLQAQIREIEAKLRAWHKHNELSRRLAEVPGIGPIGATLAVMKVPNPKAFRCGRDFSAWIGLTPKDHSTAGKTRLGVITRAGDEALRSALVAGATAVIQHVKQGKGHPSPWLIELVRRKPAKLAAVALANKNARIAWKLMVSTERYNPAHSRAVAASGGRGPALRGGSAPRPPLAPHDKSREITATTRA

SEQ ID NO: 95255 - protein, 344 aa, unidentified
MQIRSVGIDLGKTTFHLVALGDNGKVLLKKKFTQKQLIAFTANMQTCLIGMESCSGAHFLGRALREQGHDVKLIPAQFVKPFVKSHKNDFVDAEAIAEAVERENMRFVPIKTDDQLDLQALHRVRERLMTRRTALINQIRGFLLERGIVFAKSPSRLREAIPEVLENANENLTPRMRNLIAMLWSEWKDLELQIDEMNSEMERIASSDDACRRLRQIPGIGPLVATAIVASIGNGAAFSKGREFAAWLGLLPNQRSTGGKTKLGAISKRGNCYLRKILIHGARAVVLRSKRDRLAMGAWMTSLDTRAPRNVLIVATAHKLARIAWAVLSTGQDYRAAVPEALAA

SEQ ID NO: 95256 - protein, 418 aa, unidentified
MNKHNNSGKKSELTSKRAKPRGPMRRDTKEVLTELVGKLKEKLDPKKPAATSAGEKHKRGELRPNLDRLTVGVDLGDRWSNYCILGLEGETLAEGQLRTTQEDLAEFFQALNAARVVFEVGTHSPWVQEVIGGCGHEVLVANPRMMDGSKRRKRKNDRIDANKLARLGRVDPQSLHPIQHRSREVRQDLVILRARDALVAARTELINATRGLVKSMGTRLPKCSSPSFAEKVEGTVPAELRDALLPLMRMATALSDCIQEYDEKIEKLGREKYGHTELLRQVKGVGPITALAYVLTLENPERFVKSRDVGPYLGLVPKQEDSGESQPQLGISKTGDTMLRKLLVGSAHYILGPFGPDTDLRRYGLRLCERGGKNAKKRAAVAVARKLAVLLHCLWVSGEVYEPLRQGTSATIAPAVAA

SEQ ID NO: 95257 - protein, 435 aa, unidentified
MSVSQTSSPAEPDWAAFAAIDWATQKHSWALRPATGGPSQNGVLENSPEAVELWAMQLHQRFPTGPIAVAVEQKRGAVIYMLSKYDHLVLYPIPPTMSAAYREAFFPSGAKSDPADAELLLSILLQHRDRLRPRQLDTPDTRLLQFLTEWRRQLVQLKVASLLRLIDCVQQYFPQLRKWFPALDAPIVAALLQQWPGLPELQRAHPGTLHRFFLEHHCRHEDTVQQRIEQIYAAIPAVTDPVVIEACTRKTQALLAILAVLRPQITDLETRIQEIVAKHPDAPIFASFPGAGAATVPRLIAAFGTRRDAYPRVGDLQRLSGIAPVKSASGNTSFISFRRACPKFLRQTFHEFAGQSIPHSQWAKLFYEFHLKGDKSRHHLAVRALAFKWMRILYRCWKDQQPYDERVFVERQRRSPHLQGRDLVALWNTKSMSKK

SEQ ID NO: 95258 - protein, 345 aa, unidentified
MHYIGMDCHISTLEFAVIDEAGRLVKADRVRTGVRSFMEFVKKVPKPRRVFMEEGTLAAWALETCVRHGEELVITDPKENHWIGSSGQKDDTIDALKLAQLSRGGYIKEIHHPVGQRRRFRELMLAYHDTVRSSTRIKNKIKARFRQNGIPCTGETVYEKTHREEWKAQLPREAIVVLIVEGLWNQLDQLAQTEKELLAAAKAQAKHYGEIKLFDDIPGIGFIHAATVSAIVETPHRFATKSKVWMYAGLGIMKKSSGGKVYTERLSTDYNRQLKYTLKQAAEDAIHAQDNPFRRKYLEMTLLHGVAPHRARLTIARDILATMLAMWRKGERYNPEIREKARMHK

SEQ ID NO: 95259 - protein, 398 aa, unidentified
MLSIGIDVSKGKSTVCGMKPGGEIVYTPFEVQHTREGMSELVSLLRGSGEEVRAVLESTGSYHCPVVAALLESGIFVSVVNSLRMKRFCSQSIRKVKTDRIDAMQIALYGLAYWQELQPTKLPEDTYRELQLLARQYYQMTSMLIKAKVDFNALCDQVLPGMQELMNDHAGRHKLSDFVLRYHHTTHILEMGETRFRKDYCKWAEKKGYRNCERMAVLIFATAQNGIPVLPNAPSTQIVITEAIRVLHTVEASRDAILTQMQALAKTLPEYSLVREMPCIGDTLAPRLIAEIGDVRRFHSKRALIAYAGIDAPPYQSGKFCANNRHISKRGNRYLRKTGYEVMQSYVMHKPANDPIFTFIEKKRGEGKSGKLAMVAGLNKFLRVYYGKVTELYRSLPQ

SEQ ID NO: 95260 - protein, 342 aa, unidentified
MQAITVGLDIAKSVFQVHGVDADGQVVIRRQLKRRYVLAFFEKLAPCVIGIEACASSHHWSRQLQALGHTVRLMPPAYVKPYVKRQKNDATDAEAICEAVGRANMRFVPTKTPEQQSGLVLHRTRHLFIRQQTSVINAIRAHCAEFGIVAPVGRQGVEELLNVIANAKDEQIPAIARACLSALGDQLHRIKAQILEFDRMIGAWHRSCEASRRLDEIPGVGPALATALVASIADPRTFRSGRDFSAWIGLVPKQSSSGGKPKLGSISKQGDRYLRGLFTAGALAVIRYAKIHGIGHRPWLTALLARRPTKVAAIALANKIARMAWAMMARGEHYREPVALAA

SEQ ID NO: 95261 - protein, 316 aa, unidentified
MTPQERYVGIDVSKKNLDIAVRPGDEHWTVANDEDGIDELANRLKSIGPRLVVLEATGGIELAVTGGLADAGLLVAVVNPRQVRDFAKAMGRLAKTDSLDAQVLAQFGQMVQPTPRPLRDAEAQALSALLSRRRQLVGMMTQEKNRLHAAQPSVQHDIRQHIVYMEKRLAKLDDDLGGTLRKSPLWRERDDLLRSVPGVGQVLSVTLLAGLPELGTLNRKQIAALMGVAPLNRDSGLLRGRRTVWGGRARVRATLYMATLTATRYNPVIRAFYERLCASGKAKKVAITACMRKMLTILNSMLRHHAAWQPDYALNA

SEQ ID NO: 95262 - protein, 312 aa, unidentified
MDATVVGIDVAKDKLDVCVRPGGESFITARNGAGIADLAERLKKLAPAVVAIEATGGFETVVAAGLAAAGLPVLVVNPAQVRAFAVALGRRAKTDPIDAAVIAHFVEATKAAPRPLPDETTRLLADLIARRRQIVDMMAAEGQRERRLTNKRLHKSIARLRKALEKELAELDREIDDHVRGSPVWAAKEDLLASVPGVGPVVARTLIAELPELGSLDRRKVAALVGLAPWTRQSGQWRGKSFIGGGRKSVRNVLFMAAMVAARHNPILKRFRDKLVAAGKPKLVAIIAVARKLLTILNPILRDKMPWQPKNA

SEQ ID NO: 95263 - protein, 346 aa, unidentified
MKQIIRIGMDTSKNIFQLHGVDAAEHVVLRKRLGRKQMAAFFAKLPPTVIGMEACGAAHYWARVLGGFGHEVRLIAPQHVKPYVKRNKNDGRDAEGLCEAMSRPTMRFVPVKTAEQQAALMLAGLREQMVARRTQLSNAIRGYAAEFGVTAAKGLDKIEPLLADIAQDESVPALARESFAVQGREYAQLQVELKAIEIRLRAWHRANADSRRLAQIPGVGPIGATTLVMKTPDPRAFTSGRHFAAWIGLTPKDHSTAGKTRLGKITRAGDERLRSVLVAGATAVIQQAKQGRSHPSPWLLALLKRKPAKLAAVALANKIARIAWKLMVSGESYDGARMLSASASTA

SEQ ID NO: 95264 - protein, 373 aa, unidentified
MGHHTEAFVGIDTSKSRNAIAIADGSRGGEVRYLGEFPATEAAIRKLVARLAEKYRCLTFCYEAGPTGYGLYRLLKRLGHECQVVAPSLIPRKPGDRVKTNRRDAVNLAKLSRAGELTAVWVPDERHEAMRDLSRARQAAMKDLQGKRQQISSLMLRLGRIYPGKKTWGPAHMRWLTEQKLEHREQRIAFEELLEGTRQESERVERLEKAIREAVPDWSLAEVVTALQAMRGIDLIAAVGVLAEIGDLSRFQNPRELMGYLGLVPSESSTGDKVKRGGITKAGNGRARRMLIEAAWSYRYPPRVSRDKQPRVAAAPRRVREIAWKAQTRLCGRFRSLERKGKRRTVVATAIARELSAFIWAINRELMSGDGRA

SEQ ID NO: 95265 - protein, 341 aa, unidentified
MNIKRVGIDLAKSVFQIHGVDGQEKVVLRKQLRRAQLLDYFKKLPPCLIGMEACGGAHYWARELQKLGHTVKLMAPQFVKPYVKSNKNDANDAEAICEAVARPNMRFVAIKTIAQQDIQAIHRIRSELVQQRTAKVNQIRGLLAEYGIVVGRRVEVLRNALPQLLEDAENGLTADFRVLLDGLRQDLIMLDERVDDLDKKIKTLANSNSAAKRLQQIPGIGPIIATALICAIGDGKQFKRGRDMAAWLGLTPRQHSSGGKDRLLGISKRGDAYLRTLLIHGARAVLKVAGNKDDPRSRWLQNLCSRRNKNIAAVALANKNARIAWALLSKETDYLPEGEPA

SEQ ID NO: 95266 - protein, 304 aa, unidentified
MNMEKVYCGVDVSKKHLDAFNGKTARRFDNTCEGATALMNWAGNAHYVFESTGGYERMAAWMVMAADGTASIVNPSRVRHFALGMGQIAKTDPIDARMICDFASHTEPKPSKKPSSAQRRLTALVDRRVHLSDMHTAEKNRLGTADEPEMIRLIKQHLKWLEKQLEKIEAKITDTLAEDATMTKKAKCIQSIKGLGIVNAVTLLAHLPEIGTLSRREIASLAGLAPFNRDSGGKSGRRHVCGGRRRLRSCLYMAAMNARTYNPVLREFYQRLVNENHRPKMVALTAVMRKLLIAANSAVKNAEI

SEQ ID NO: 95267 - protein, 412 aa, unidentified
MEPKLVVAGIDVHKKMLAVVVVDEENPQQALDRRKFGSGAKELQHLSTWLGAHGVSLVVMESTAQYWRPVWLALERDFVPHLAQAQSNAAPKGRKSDFVDALRLARRFLAAELRLSFVPDAEQRSWRSLSRSKHQKRRRRVQLQNQIEALLEENRIKLSSVVTDLFGLSGYRILQALSQGECDPEKLVGLAANNLKASPEELADALQAAPMAARHRKILTMHLEELDLIDRHIGELSRELGEALRNQQQAVVRLCEIPGVREDAAWQMIAEVGPEAAVFETPEQMASWIGVCPGREESAGESKSNRSPKGNRTMRRVLNQVAWGAVRTKDSFFKELFQRLIPRLGVHKAVWAVAHRIARLIWKVLHEKVRYIERGPLAMDPMAMKRRVARLTKQMRKLGYTIEVKPVAQATE

SEQ ID NO: 95268 - protein, 399 aa, unidentified
MLAVGIDISKSKSVAAILNQDGSMHTSPFEFHHTQPELDAFIKYILNSKQSATILMENTGHYHYPVLKAFQEAGLPVCIVNAYQIKKFGDMDLRKAKTDKKDAVRIARYALEKSYSLVPYTSMEQKYEDLRFLARQYNQRMLTLKTNKVFLLNLLDETMPGITNILPLTTRTPETSLSVLFINRFKSYDRIKKMGKNRFLDAFEKIARKSRNRQTKTYGLAIYEAALRNITTRGENEYILAAQDQCLELVCESQKAADSIILKMQTLAETLPEYAVLRSMAGVGDRLGPLILAEIGDIRRFHSGKALNAYAGNDAPPYQSGTFESHNRHISKRGNAALRKYCFEVMQALKLTQPQDDPVYLFLLKKEQEGKPYNVAKMAGVNKFLRIYYARAMETLKQQ

SEQ ID NO: 95269 - protein, 391 aa, unidentified
MSMYFIGIDISKYKHDCCIISAADQKVVSKVTIKNNKAGFNELLTIIHSLANPADIRIGFESTAHYALNLELFLENSLLTFMEVNPVLISEYKKSKTLRRTKTDSVDCESIARWLMTVEYKPHSKGFYHAYSLKSLTRLRDKLIRQRSFYLIKITNVLDHTFPEFKPFFNERLSKTALYLLENYGSAGKMARMNSASYEKLRSLSRGKFSPQQFLRLKELAANTVGVNNSIFDVELNSLLSLYKSLVKEINTIEKEINKLIEEVHPHYMSVPGIGPLSAAVIYSEYGDISNFTNPGQMLAFAGIEPGINESGTESHGGKMVKRGSSQLRYTLINCCLPLIRFDMTFATYYAKKRGEGKPHRVAITHVAKKLIRVIYALERQDIDFNAQKLR

SEQ ID NO: 95270 - protein, 362 aa, unidentified
MAKVAKRKQTSKGLRLEVVNPNAAGIDISPKEMQVCVPSDRDGECNRTFGVYTEDLHYIAEWLKACCIDTVAMESTGIYWLPVFRILKESGFEVILVNASDVKNFSGRKTDASDAEWLMMLHSYGLLKPCFQPENIARTMRNLVRHRDNLIRSASREVLHLQKAMEQMNLKLDNVFSDILGKSGQSVIKAILNGERNPKVLADLADPRCRTSKEEIEKSLHATWDEEHLFEMRQSDSLYQFYQQLIAECNAKINEIAMQYSATVDAPKTQLLRSEKYNAKKNRIGFDVEKVAFELWGVNVMRIPGMSRGSLLRLVGELGADFTTKFVDVNHFVSWANLVPNNKISGGALLSSKVPKKKNPVA

SEQ ID NO: 95271 - protein, 372 aa, unidentified
MDKDTMTVIGCDLGDRSSHLCLLAPEGSVLRRAKIATTQKAFDKFLSGLERSLVVLEVGTHSRWSSALIRELGHACVVANPRHVRLIYGGTHKNNRLDAEALARLRRLDPTLLRPVEHRSQEAQTQLSTLKAHDALVRSRTRLIASVRGIAKSAGVRLLSCDADYFTRKVTLPPALQPALGAMLQNIEEPTEHIKHYDNQIAQLCAQHPETQVFQQVHGVGPITALRYALTLERPERFSRSRDAAAFVGLVPKQRQSWRHDPQLGITKAGDRFSRRLLVQCAHCILGARGQDSDLRRFGLRLAAHGGKRAKKLAVLLHRLWVSGDLYEPLRLTPQVLPATFAGRAVRSVLVSRRPAPRYYSLMICVQRPMRD

SEQ ID NO: 95272 - protein, 341 aa, unidentified
MSIVGAFDVHRRQLTFEYLDTSSGELKRGRVVPADRQHLREWLARFAGQDDVHFALEGCTGWRYVVEELLAAGITPHLAEPADTAALRGKKRHAKTDKTDTRHLRVHLMAGDLPECWIPPGHVLEARAVVRLYKDLLDERGAWHQRIAATLFHQGVPVIGSMATAEGRAAVEQVDLSPAGRQAVQAGLRQIDRLTGELDVLRRQLGMLSRHQPGCAALRATWFGVGPVTAVAIWAELGDVRRFGNSDDVVRHTGLDITVYSSDTKRAAGHLSRQGPPLLRWALYESAKCAARAAAPDHGYYAAVRDQRTAGLATLSVARKLARRSYHTLRELGEEALAPAA

SEQ ID NO: 95273 - protein, 341 aa, unidentified
MTEVTTIGLDLAKNVFQAHGADAAGAVVFRRKLRREQVLAFFAAQPPCLVAMEACPGAHYWGREISKLGHMVKLIAPAYVKPFVKRQKNDAAYAEAICEAAQRPTMRFVAVKSEEKQASAVIFRTRDVLVGQRTQIINAIRGHLSEFGLIAPQGPSHVERLIAQIEDPASGVPEAARCCLVILVEALRRLQEQAKALDAEIAARAKADDTAHRLMSVPGIGPLIATALEAMAPPAETFRSGRDFAAWIGLTPIQRSTGGKERLGRTSRMGERTLRRLLIIASSAVVRWAKRKGVPSGSWLHRMLARKPPMLVIVALANKTARIAWALMTKGGSYRAPSVAA

SEQ ID NO: 95274 - protein, 388 aa, unidentified
MFKTVELPEAPAAIRMDIGAIFVSLELSRATWLLTSISPGAGEKMSQHATPAGDLRQLFECLAELKRKALARTGKTYPIIVIQEAGLDGFWIHRALDKEGIESHVVDAASIAVPRRRRRAKTDRIDGKILLRTLMAFKRGEPRVCAMAKPPSVEEEDRRRLGRERKTLIAERVEHVNRIKGLLFTQGAVDYQPLRRDRRTRLEALRTGIGDPLPHRLKALIGRELDRLELLLAQIKAVEAERDALLAEQSRQAPAPASMLLKLKGIGPEFAAGLWLEGLFRSFANRRQVAAYAGLAPTPWRSGSIEHEQGASKAGNPRLRATLIELAWLWRRHQPQSALTLGFEERVKANGGRVKKALIVALARKLLVALWKYVTTGLVIEGAIMKTA

SEQ ID NO: 95275 - protein, 347 aa, unidentified
MDQIIIGVDTHKSKHIAVAISHQGACLGSMTISTNSQGYRDLEAWASGFGTIKAFGIEGTGSYGAGLSRDLLAMGHMVLDVMRPNRQLRYLHGKSDSLDAESAARSVLNGQATALAKTQIGACEMIRHFKIARDSAVKSRSQAMITLKTLIINAPAELRDTLDLIKGPITLIRHIAALRPGKITSPTASAKTAMRAIARRWLVLHEEIQAHGQELERMVREKAPDLMNSHGISTMTAAEMLILVGDNPERIKSEAALAKICGVCPIPASSGKTKRMRLNRGGNRHANAAIYIIAITRMRDHEATKSYVAKRTAQGKSKREIIRCLKRYIVREIYRELCVPNDTKRTH

SEQ ID NO: 95276 - protein, 360 aa, unidentified
MKKDTREESGLTVGVDLGDRWSKYCVLDKQGQILEEDTVATTARAFRKLFSDRTAARVVIEVGTHSPWIQRLLQELGHETITANPRYVRLIYSSRNKNDKLDAERLARLARVDTKLLHPIQHRGGTTQADRALLRSRNALVECRTKLVNHARGIVKSIGGRLPSCSTTCFHKRVRQDLPDELKPALTPVLDTLAALTKKIQCLEARIERLAAKRYPETGLLRQVSGVGPLTSFSFVLTLEDPERFKNSRAVGPYLGLRPRQSQSGEQNPELRITKAGDTDLRRLLVGSAHYILGPFGPDTDLRRWGLALAARGKKNAKKRAVVAVARKLAVLLHRLWVTAEVYEPLRNSRSVIVPEAVSA

SEQ ID NO: 95277 - protein, 431 aa, unidentified
MSKYLNSLVVGIDVASEFSFASVLAPDGSQYRKPFKFSHTADGFTYFLEQIKKAEEEFSTKPVFFMESTGVYHLTLFHFLKNKKFETFIINPLVTNCNKNKDIRKVKNDKNDSLSIARLGKFEDIKVSSDSDINIFTLKLLVRDYYKLIDTRSTFKKKLSSSLCISFSGYQDVFSDTCGYVSINILKKYPSPQAVLSAPKQDIIDILLHSRKGLKWAEAKYSKLIQSTKNAKFVSLPSPRLSISITTSISLYEAINAQASKLLNEIECFINSGDMPPALCKNILLLMSIPGIGYITAITILAEIGGIDKFVTPKQLVAFFGVDPAVNESGKFKGDRVKMSKRGTRLGRRALYAAALASIRTKRNGEATNQILLKYYQENLKGKKAKVALVAIMHKLINYLFAVLRNQQEYQVRDPKLHQKMFLENNNRQAA

SEQ ID NO: 95278 - protein, 387 aa, unidentified
MQTVANRPEAPNAIRNDLGAIFISLELSRSTWLITSLSPDGGEKMSKHSLPAGDIYALLARFSEFKQKAFARTGKSFPIIVIQEAGLDGFWIHRVLQNEGIESHVVDPASIATSRRRRRAKTDRIDGEALLRTLLAYKRGEPRVCAMVKAPTPEEEDRRRLCRERKILIAERVKHVNRIKGLLFCQGVSGYKPLGRDRRQRLDELRTGDGGLLPKHLKAQIGRELARLEQLLEQIMAVEAERDALFAAAPAPGPPAMLLNIKGIGPEFAAILWSEGLFRHFDNRRQVASYAGLAPTPWQSGSVDREQGVSKAGNPRLRTTLIQLAWLWLRNQPQSALALWFEERVRRNGGRLKKTTIVALARKLLVALWKYVTAGVVIEGAVMKAAR

SEQ ID NO: 95279 - protein, 409 aa, unidentified
MDTIYGCCAGLDVHKESIQCCVRRMDEQGKVQDQVRAFGTTTRQLLALYDHLSQCGVTHVAMESTGVYWKPVWNVLESGFELILVNARHIKSVPGRKTDVKDCQWIAQLLQHGLLKASFVPHSQQREWRDLTRHRVQLIAQATQTANRIQKVLEDANIKLASVASDVLGKSGRAMLKALIDGQTDPTVLAAEARGRLRRKTEPLREAMEGRVTEHHRFMLQLLMDQLEQLEAMVKRIEERIDQAMTLFAREIELLDTIPGVDRKVAQTLLAEVGAQMGQFPSADHLASWAGICPGSYESAGKRKKGTTNRANRWLRRALVQAAWAASHAKNAYLSAQFRRLAPRRGKKRALVAVAHSILVSVYHMLSRGTEYRDLGADHYDRLNPERLTRHLVKRLEALGHRVILAPAA

SEQ ID NO: 95280 - protein, 358 aa, unidentified
MYKFMKNFFIGVDVSKDTVDVSFFDDDRMKSPEYLAQYSNSPKGFREMVKDLRMCCHGVSSGQWLFCCETTGRYDHPLCHWLVDHGMVVWRESALQIKWSSGIQRGKNDRVDSLRIAEYAWRHQDKMQKFVKPSESLSNLKAAFTHRRRLVEKRTATRCQLKSMSSEKGLSASLARMIVRDLSREIERLSASIATMDESIQKIIRSDSELDRNYRHIISVKGVGPITAVALIVCSGNFKAITSAKKMACYCGVASFRSQSGTSINRKASVSNLSNRQIKSLLSMAARSASRSNPVFAEYFNRTLSRGKPVALVYNNLRNKIITVVYKLIERDCDFDVDYMRMHSTGQRANEPAIREAV

SEQ ID NO: 95281 - protein, 320 aa, unidentified
MAKRTTICAGIDTGKRKLDVALDCSSEQLQVENTAEGYKTLLEWLGRHKVKRVGIEASGGYEQAVVAELRRKRLVVVVFQPAQVRAYAKYRGQRAKNDRIDAALIAACTAAVNEIHPAPDARFSALAVHLTLIEQIGEDIARCKNRLESCRDVRIQKLWKEDITRLVKRKRAEFKALVEAIREHRDLAERLDLIYSVGGAGLPTAVAILVRMPEIGQLSREQAAALAGLAPYDDDSGEHTGARHIEGGRKRLRRALYAAALAGSFRWNPQLMALYKRLIAAGKGHKCALVACARKLLIFINAVVTRGTPWQADAPAAQAA

SEQ ID NO: 95282 - protein, 351 aa, unidentified
MEQVKQITKVMAMLFMGIDMHKNKWQITIRDEAKVIWRGCIPGTWEDMKKLLERYRGYGIQTVYEAGCFGFWLHDELKEYGVECIVTPPSLVPMEYGNKVKTDRRDSDKLALLLSKGLLKSVHVPSKEEVLHRQIFRQRTQMVRDRVRVQNRIKSALLFYGLEVPGRASFSRNYINNLRDLKFGNQLFQESFNLLLDEYEFLTQKINQQTRLINEMAKLPQYRERVKILTSTKGIALLSAMEIILELQNVSRFPRREQIAAYVGLTPSQHSTGDNIHMGRITNIGKPHLRGTLIEISWTLIRYYSVEREFYFQLKARVGKKRAIVAVARRLIIKIRHMLLTNTPYRMQAAG

SEQ ID NO: 95283 - protein, 341 aa, unidentified
MEEYIGLDVSMKETSVSIRRAGERIWRGKCASDPSIVAELIRKRAPSVKRVVFETGPLSVWFYHSLRIEGLPAICIDARHAKAALDMATNKTDANDADGLAQLAEVGFFREVRVKGFDSMLTRTLVAARTRLVRITTELSNQIRGVMKTFGLLVPAGKGSTFEKNVRSLLADQDRLASIVLPMLEAWRGIRVRAAELGRQLVRDARQSRACRILMSIPGIGAITATSFTTAIEEPGNFRKSRSVGAWIGLTTRRYQSGEVDYDGHISRRGDHHLRGLLYEAAAVILTRSSTHSTLRTWGLQLRERIGFKRAAVAVARKLAVIMHTMLKTGELFNPNAGAAA

SEQ ID NO: 95284 - protein, 377 aa, unidentified
MKRILRIGMDVHSTNYTLCAMEPIIGEDDRIFANIQVTPDYKNILMFIENLKMKLGLDNEYDIQCGCEAGCLGYSLYNQLTAAGVKCVILAPTTMLTPQGQRVKTDARDALMIAQCLSYGGYHAVYIPTEEDDSVKEYLRMRDDHKTALKKIKQQINALCLRHGYHYEGTKWTIKHVAWLRKLELLPLYRETLDEYMASYDEQTAKIERFDKRIGELASQSSYEEKAKRLGCFLGIKTHTALSLLVETGDFSRFAKGSTYAAFLGLAPGENSSGEKINRTGITKAGNRHLRQLLIEAARGICKGAIGHKSRELRARQSGNTAEVIAYADRANTRLRSRYYKLIRHGKKKNVAVAAVARELACFVWGMMTDNTGMKMA

SEQ ID NO: 95285 - protein, 326 aa, unidentified
MQGKDASEQEAKCKSSVGIDVCEAWLDIHILPANQALRVPNTCEGHRTLKRRLKRYDVGLIAIEATGKWHRQLHRSLHASGYQVRVVNPLRARLFAEGMGVLAKTDRLDAHMLAVFAGNLEGNARPPAPEVIEDLKELVQARVSAVEEQTSLTNQLKSAQTVFLRRQLKRRLRHTAKVIAEIEAELLRRVKADEALAHRYEILRSVPSFGPVVAITLLARLPELGRCNDKQIATLTGLAPWPDDSGLREGPRHIRGGRDSVRHVLYLAALTATRCNRDMKAFFRRLIGAGKLTKVALIAVARKLVVLANTLIIEDRLWLPEPPKCA

SEQ ID NO: 95286 - protein, 385 aa, unidentified
MEKKRIVASIGLDAHRKFSKVAARNPAGELIWRQRMDHRDRRMVRQQMRSWPAGTPVILEATFGWGWITDELQACGQQPHLAHSGKVSAWREARGLAKNDDLDASLLSELWFQRPPWWEVWRAPTEGRTQREWLRYRCSLVKMQTALKNRIHAIMHRHGIVHEFSDLFGVEGRQYLQFLAEPNNITLPDSARAMLKGYLQLLDHVRRQIAGVTMQFRRQLKRDANAQRLKTLPGVGEVLAYTIMAEIGCIERFAKPRSLAAYSLVAPRDHESAVEWNDGESPRGRHVGHAGRRTLKWAWIEAAHGAVKGSSRFHTIFDRRTNGGKRDRQRGYIAVAHELCRTAYAMLKRSDDYREDRPVRPGTRVPTDSRSGMGQPDHPMVVAAS

SEQ ID NO: 95287 - protein, 385 aa, unidentified
MTTTEEVGTFIPRDYDVFAGLDVDKRSIAITFTDHGTMRKSLKLPYSASQLLNYTGKHFPGQRVAFVYEAGPTGFGLHDELTAASHRCLVVSPSMVPSAPRNKVKTNRLDSKKLSEGLRGGQLRGIHVPPPSYRELRHLVQLRDTQVAQLTATKLRIKSLLLYEGIPFPAANGKWSGRVLRQLETLPCNATVRFKLDQLIDTLQFHFQSAAKVQKQIRYFCQNDPELSQCISFLISLPGIGTITATHALARLGDWRQIKDVRQIAGFLGLVSSEHSTGDKENRGQITRIGDKRLRSKLIQCAWTAIRKDPELRAFYRRIYERHPKKVAARKAIVAVARKLTTRMYAVLKEQRPFVIRTDSSIAPLTAEETTGLGERLDGAQNDQP

SEQ ID NO: 95288 - protein, 375 aa, unidentified
MRVVYQICCRVDVHKKFLVATIITTTKGVQPHYQKKRFSTFNTDLNRFADWLNENNCVDVCMESTGKYWVPVYNILEMRGIRTIIAYPKWVKAFKGNKDDTKDSKWIGDLFRLGLVPGSFIPRKKFRVLREYTRYRYKLTSMKSSDKNRFQNAFTVCNVALDAVVFDMFGVPASAIADYLISTEQFDEDYCKSLLKRSLKKKSDTVIESIQGYCIEPEQKLRMQFVRNHLDYLKNEISQVDAVIDTMIKKCEGLIALLTTIPGVKRDSAITIISEIGDDMSQFGSSKRLCCWTGLTPGNNESADKKKSVRITRASIYLKPALVEVAHAAIKATESPYYHIKYEKIVKRRGKKRAVIAIARIILTAVFQMLSTGEV

SEQ ID NO: 95289 - protein, 456 aa, unidentified
MPNKQSAAKTKPVPMLHCLQPNAAGVDVGATQIYISVPPDRDPESVRSFQTFTGDLHQAADWLQSCRIDTVAMESTGVYWIPFFQVLEARGLRVFLVNARHVKNVPGRKTDVEDCQWLQYLHTVGLLRASFRPEQAVCNVRSILRHRDSLVQMASVHVQHMQKALDQMNLQLHHVISDITGVTGTVIIEAILQGERDPHKLAELRDGRIKAAAETIAKALVGDYRREHLFTLRQSRAAYRNYQQLIAACDVEIQGYLAAFDAKVDTEAFPLGKPKDLHKPRRNEIRFDLRSELYRIFGVDLTQIPGVNALTAHTLLAEVGPDLSLFANAAAFASWLGLCPDNRISGGKILSVKTRIVKNRVAAALRMASQSLHRSRSYLGDYYRRMRAKMGTPKAITAAAHKLARIIFHMLSTRQSFDETVFSKHEEQHLQRKEISLRNHARKLGFDIVPSVVSTR

SEQ ID NO: 95290 - protein, 356 aa, unidentified
MSKVISEGAVRVGVDLAKRVIQVHAVDAAGRLLTNRALARDKFIEWCVRLPAGCIVAMEASSSAHHWGRKLAALGLDPRIISAQLVEPYRSQGASGKNDANDAAAICEAASRPTMRFIPVKSIEQQSMLCVHRLREGIKEDRTACINRIRGLLAEFGLVFPQGPRELQAVLSAVLEDATNELGALARLTLQRAQAQWHELDEHLAWCDERIEAHAKDNAEVKTAATLWGIGPVTASAAVATVGDFKQFKNGAQFGAWIGLTPRQRSSGGKNNLGGITKRGDTYLRTLLIQGAKSAVMTAHRRQDKISTWVVALRERSGWQKAVVALANKNARILWAVLARGQAFDANHLSVKPTAA

SEQ ID NO: 95291 - protein, 426 aa, unidentified
MKKPFRQAVGIDMSKDKFDVTLSTMNENFEIKVHYTGQFKNDLTGIEHFYQTITKRKNKDCELWFNMEATGVYYEELAWFLHCNQEKVSVLLPNKARLFAKSLDTRSKTDKIDAKILSRMALERQLTCWNAPSVLLWTLKKISRERQALVQEVVRLSNRRHALDHGHIYHKPTYENIVRRSDSLIHLCSDQIREIENQMIELVKEDPHLYQAIERISKINGLGIKTVITVIAEADGFNNIQNIRQLVSYCGLDVKLNESGYFKGKTTISKHGNSFIRSALYMPALTAARYNKVLKPYYLRLSGRKKVKRMAVVAVMRKLLTLIYVLYRSGAEYDPEYKSSPHTEDETPAMQRPELSVLHNQEQNTSAGVKAEPSNDVCGVDVISSKKTQIKVKQKSSKKEKREPFWHPSSVDESPSDAPTETLCFA

SEQ ID NO: 95292 - protein, 349 aa, unidentified
MIVGIDVHKHTHAAALIDDRGGEIATLTLANSPKGYRQLIDWLVGHEAGHAVIGVESPGSYGRCLVAALAGAGFEVLQVPAWRTHRERHRRGPGKTDPGDALSIAKVVLTNRTDLGPAEEPELVRALSMLELQRRRFVRDRTQAIQRLRSDWTQLDPVAEAGVVRCDRQRELRKLKRIQLGDSLAQRTAARCIRELARDIDDLNRRIATLDTEIAELLTEHGNPLEDLQGAGTNLAATIIAHAGDVRRFRDASAFARFCGAAPIPCGSGQTTGRHRLHRGGNRQLNAALYRIAIVQQRHHPQAKTYLARKIAEGKTPREARRALKRHLANVLYRHLTTWANNTPAMNLS

SEQ ID NO: 95293 - protein, 400 aa, unidentified
MATLQDNGERVKRFRELKATLRTNRQRLLVGIDVAQAEHLVHLRHAHTRVVVPRLTVPNTTRGFAQLWARIQQAQRSTGCREVVVGLEPTGTYHQAVADFLAAQGVDVVLLSSTVAYWNRRTQDGTWDKSDQKDAANCADLLEQGKVLFYSQPTGPLADLRRLVKGLRRARAELASCKARWRTTLRPALAPMGEPLPNRLRVELPAGLQAWERPARGHPAHPQGRLPLGLATACQDLGAQVTAVQARIAAIEQALAPVAERLPAYHLLRTIPGIGPTVGAILVAEIGDIGWYTRFSQLRKLAGLDIVRVQSGQFAGQQRISKCGRRLLRWALYQAAVGLVRTAAGRQRLTALKAKRRGDRFGGFKAMVELAAKQLRLVWGVWRSGRPYDPTRAGGGRLRR

SEQ ID NO: 95294 - protein, 353 aa, unidentified
MRTYYVGMDVHRATIAIVVLNGAGKVVEQLVVETSATRVRCYLKQLQGRVYVTFEEGTQAQWLYDVVQPLVTEVIVCNPRHNKLLKAGNKSDRIDAQKLAELLRNGALKAVDHRDHGVRALKELVRNYDCLVSDTTRVMNRLKAMFRQQAIACGGHEVYRQDRREVWLAKLTERGAKERARSLYRQLAALRALRHEAKLAMVREARRGAADLWLMSVPRLGAVSVAQLLAVVGTPHRFRTKRQFWSYVGLAVVTSSSADMEVVAGVLRRRRRPVATRGLNRNHNHLLKRVFKHAATSACQSEPFKPHYERRLQQGMDPALARLTVARQLSAITLSLWKRGEKFQAERLKRQTT

SEQ ID NO: 95295 - protein, 326 aa, unidentified
MSLVMLGVDPHKQSHTATALVTGSHQQLATLRVPASPSGYRQLLGWARQFPQRRWAVENARGLGCHLTQWLLARGETVQDVRTTATARVRELSRGRGRKTDALDAAAAAGIAALQGDAEQLQPENATVVLAVLEERRSNLVGQRTRSVNQLHAVLRELIPGGAPCKLRADRAAALLRGVRPLTAADRARKQVAWDLVAEVRGLDRRLAMIGKRIRDTVTALGSRLPQIVGVGPIIAGRLLGRTGRASRFPTAAHFASYTGAAPLEVASGERARHRLSRAGDRQLNHALHIIALVQVRSPGCAGYDYFRRKLAEGKTTREAMRCLIG

SEQ ID NO: 95296 - protein, 313 aa, unidentified
MSELYVGIDVSKDRLDVATSDGRELHVANDAAGHRQLCELLVRERPQLIVMEATGGLERAVAAELAAVSLPLRVVNARQVRDFAKASGCMAKTDRLDARVLVAFAQAMKLEPRELPSEELQTLQALIVRRQQLIEMLMMEKNRLRTAHKEVKRSLKKVIELLEEQLRHADQDLGSALRECGVWREKVELLESVPGIAQLTALKLLASLPELGTLNRREISALAGVAPFNRDSGRWSGKRSIYGGRALARGALYMAALVGVRHNAVLRVFYQRLRAAGKPAKVALTACMRKLLTIINSLLRHRQRWSPKLMDTA

SEQ ID NO: 95297 - protein, 321 aa, unidentified
MAMPKTPIEAGVDTAKDELVIQSAPDTKPFAIPNTSKSIKAWLKTLPAGSALAIEATSTYHIEMAEQAHAAGFAVYVVDGFRLSKYRESIAVRAKTDAQDAALLARYLRNERSSLKVWTPPPAGHRQIQVLLRRRAKLVEVRGMLRESFKGDKMFAAELKKIERTLKRTELATAKALREEVKDAGLNDQLRRVQQLPGIGFLTAVGLVMSFMRGEFANSDAFVAYLGMDVTVVQSGKWSGRGRLSKRGDSEVRRLLYNASMSGSRTATWKAFHAYHLGRGKKTTQAFVILARRLARLAFGLMRHQQDWKPEIYTGGAKLTS

SEQ ID NO: 95298 - protein, 340 aa, unidentified
MNATTYGLDVAKRVFQLYWVDAQTGEIANRRFSRDDLIAFLAQRPAGRVALEACGSAHWWARKIQALGHEVVLLHAQFIRPFVQTNKTDAADAKAIWTAVQQPGMRTVAAKTEDQQAMLSLHRMRSLLIKFRTMQVNQLRGFLYEFGVTFRAGRLAGLAEVRERMAELEDTLPGAIIHNLQDQLRRINALEEDIEQLEKRIGAWQKQEVACRAISEVPGIGRLTATALVATIGDARTFKSGREFAAFLGLVPRQSGTGGKVRLGSISKRGDPYLRTLLIHGARSVLCHTKAPTAWQKGMQERRPVNVVAVALANKMARTAWAILAHESSYQTNHVSVRPA

SEQ ID NO: 95299 - protein, 331 aa, unidentified
MNYSHFVSLDVWKKTFDASLMSADEKELSHKSFDNTPTGIQSLLDWIAGYHLSLSKLLFCAENMGSYVTELSVSSVSMGFSLALVCPLTIKKSIGLQRGKNDRIDAKRIANYAVLHYRKLELYKLPDKDLVRLRGWIIIRDNLVKQKVSSIKLLETFSWMAKLADVTESISFLEEQLKSIKERILEVEEDMEQLIAASTSLYTNYLLLRSIKGIGIINAIVLLCVTDNFQRFDNPRKFACYCGVAPFEHTSGISIRGKTQTSSLANKEVKVYLTRAAITAISWDPQMKAYYKRKIAEGKHKASVINAVRAKIIARSFAVIRRQTPFVTLAV

SEQ ID NO: 95300 - protein, 410 aa, unidentified
MELLHRRCCGLDVHKETVVACLRLVADGKVTTEVRTFQTITSDLLRLSEWLAANECTHIAMEATGVYWKPVWHILDDGEFALVLVNAAHVKNVPGRKTDVNDAMWLAELLAHGLIRASFGPDTQTQEMRNLLRTRKQLVREQSSHVLRVQKTLEDANIKMDSVLSDLMGKSGRAMLEALIAGETNPTKLASLADRRVKASPQEFREALRGRVTKHHRFLLRLHLNQIDALDAAMATVDAQVEANLGPFRTAVELLMSIPGIKSLGAHVIVSEIGIDMSRFPSAAHLISWAGICPRNDESAGKRRSNRLRKGAPWLKTTLVQCSWAAIKKKDSYLQAQFYRIKARRSSKKAIMAVAASILTAIYHMLKDGTMYKDLGRNHFDRRSTDQQKKRLVKRLADLGYAVEIKPLAA

SEQ ID NO: 95301 - protein, 386 aa, unidentified
MKRNDLSRSLIAFDQATTLVAVVELSRGSWLAAGLVPHLTRQPLKKLRSDPDALLGLLLRWRDQAIKAGGRIKRIVLAFEAGRDGFWLARWARARGIEAYVIHPASIPVSREHRRAKTDRLDAGLLMRAVLGWLRGEPKHCNMAAIPTVAEEDARRPTRERETLVREQTRAVNRIKSTFFRFGIRSVKVKLRQASKHLEELRGPEGEPLPPNTIAELRRDLARLQLIRGQIREIERARLERLKRAPRQGTHPMMRMLARIMGIGIETADMLVHEVLSRKLRDQRGVARYGGLTGSPDESGNKRRERGLARAGNARVRHGMIQLAWRWLQFQNRSALAQWYRTRTAGAKPGLRKAMIVALARKLLIALWRYVTIGEVPAGVVLRPAT

SEQ ID NO: 95302 - protein, 262 aa, unidentified
MCFGHLTKELDVVYKATASFPNNEKGFKALVEWMKKLADETLKVHVVIEATGVYHEHLANFLVDEHYLVSVVLPNKVNKYANTLPWRTQNDKTAAKVLCSMGLEKKLDLWHKPDPVFVHLKQLTRERERLQKECTASKNQLHAQEYSAYKNDATIKRAKARITFLKAQIKEIEKEIQQVVNNHPELKNKISKICKIPGVGLITAVIVIAETNGFHYVRSRKQLASYAGYDVQEKASGTSVHKKPRISKKGIHIFAKRCTFLH

SEQ ID NO: 95303 - protein, 319 aa, unidentified
MDSSLKPFAEFIGIDVSKSALDVALRGRSVRRKFSYDAKGLGQLSELVQPIGSCFVVVEATGGLEQRVAAELVEAGCTVAVVNPRQVRDFARSLNRLAKTDRIDAVVLAEFAERIRPRPTVLASETERELHDLVTRRRQLVTLRTMENNRAGAVAAKRARSSIRRLIGTIDDEIQIIEAAIAELIRSDDDWQQKSEILESVPGVGDVTATSLIAELPELGHLNRQEISALVGLAPYNRDSGRFAGRRSIWGGRATVRAVLYMAALTARRCNSIIRQFAERLEQAGKPFKVVLTACMRKLLTILNRLMKTQTRWNPNFAR

SEQ ID NO: 95304 - protein, 355 aa, unidentified
MNSEKYIGLDVHQATISVAVMDSMGKLIMESILETKAATILEFVAGLRGTLSVTFEEGTWAAWLYDLLKPHVDELVVCNPRKNALLKDGNKSDRIDARKLADRLRLNDLKPVYHGETGVRMLRELARSYLNLVKDQTRVMNRLKAMYRSWAIPCAGRDVYYARHRAEWLGKIREAGVRRRAEHLYQQLDMLQHLRQQARRELLAESRQHPITAKLRQIPSLGPIRSALAVALIRTPHRFRTRRQLWAYSGLALKTRTSGEYRCVEGQIQRSKKQISIRGLNKDHNHDLKALFKGAATRASVQPGPFQDFYQRSLAKGIKPTMVRLTLARKIAAITLTLWKKGENFDAEKLKSQAA

SEQ ID NO: 95305 - protein, 377 aa, unidentified
MHSENIAAYIGLDVHKETLAVAIAAPERLGEVRYYGTINNEAQAVRRLFQKLQGLYGNILSCYEAGPCGFGLYHQLTAMNIKCQVIAPSRIPKSPTDRIKNDHREAISLARLLRAGELTPVWIPDLTHEAMRDLIRARAAAKRDSRVARQRILSMLLRTGKRYAGKHWTGKHRTWLANQSFSQPSQQIAFQHYCQSLEQIEDRILQLDQEISRLLPEWSLCNLVCQLQALKGVGQLIAITLVAELGDFSRFSNPKQLMAFLGLVPGEYSSGNSIRPRGITKVGNSELRRLLYEAAWSYRTPAKVGAWLIYYRPDSVTQYSKDIAWKAQQRLCSRYRTLTAKGKKSQVAITAVARELTGFMWDIALAAQSSFSQQKQN

SEQ ID NO: 95306 - protein, 484 aa, unidentified
MDDRRLVGIDLGITSAHTVRVLAGDGSLVCRRKAIPTVDSLEQVEQAALAETPAGTLLEVVVEPTGPAWLPIAVFFAARGHSVYRVSSAKAHDLRRVLSRHAKSNGIDADTLARLPLVDPAGLHPLQLPDAAQAALDRRVRACDRLTQQAATHKRRIKDLVHQLLPASPLIGELGQADLAVLERWADPHALVAVGRARLQRVLASASAGQQGAQRATHWLAAARAALELYGDHPAIAFHELAAEVASEVRLLRATQAELADHASHREGCYRRVDPAALARSLPGLATIGGPALVATMGKASRFPTAAKFRAFTGLTPKASETGQSDRKGQPITKAGNRLLRTTLVRAADHARRQDPQLARIYWIQMVQRGKDHLGATCVVAAHLAERAWAIMDRGTPYVVCDTDGTPVTPAQAKAIIAQRWTVPEEVRRRRRAKKGKAPQQVHAGHVHGAQGATRRPSPLLGHSWPPAQPRQADPTATLTAKPP

SEQ ID NO: 95307 - protein, 372 aa, unidentified
MIQRFHGLDRHKKHSTISVLNREGQEVEFLSKCPDLRGYIEELGPEDTVVMEAATGSFFWADLIESTGATCHILHPYKFKIIRDSWNKTDKHDARNMAKALWVYLVTGEFGIPTVYKPSVAVRELRRLFCQYNLLNRQVTALKNTIQAILADNGVSLTCRQKTMLSSETDAKEVLNAYDLSPASLLSIQINLEILWKVEEQKNNLKKEILLAGEPFAAEVKLLITVRGITPLAALAFLADVADIRRFKTLRKMNAYLGLVPRVKESGGRSRTGHINRESRRLTRTLFTQSVMHFAAASPYLRLCYSNLVSRRGVGRARIALIRKICGMMRRMLLEQEEFRWMQPSNFERKLKRYENQLKKIKKIKEEERKSA

SEQ ID NO: 95308 - protein, 354 aa, unidentified
MLAELVDHVIGVDPDRDWITAAVVDARTTGVVAKQKFSADTVGYDDAISWAEEFTVEGERAWAVEGTASYGRGLTAALARASEWVIEFDRPREKASKDGAKSDELDAVRAAREALGRDRLHQPRAHDGHREALRVHTVTRAGVVRARTAAINELKALVLTAPDDLRQELRHLTTKALVKRCAAFRDTPQRPVAQRCARNTMRSIARRISFLTDEIAVHDTAMKQLIDEAAPQLVAEPGIGHVTAAMFYIAWSHPGRCRNEAAFARLGGAAPLPATSGQSQDRHRLNRSGDRQLNNALFVVALSRTRNHQPTRDYRDRRRSEGKTDREIRRCIKRYIARRVWRLLEHPPVLEIAT

SEQ ID NO: 95309 - protein, 388 aa, unidentified
MAARTVNNLPPAGAHDDAVRCVLAIELSKKSWIVAVNTPLSDKISRHTLKPCDGKGLLDLCEQIRTRVARATMKRVEIVSCYEAGYDGFWLHRLLQAHGIRNCVIDPASLQVDRRARRSKTDRVDVERMLRSLMAYLRGEPKVWSVVRVPSVAEEDGRRLHRERGRLISERVQHVNRIKGLLALHGIYDYQPLRPDRRQQLERLCTADGTLPPRLKAEILRELQRLELVVAMIKTIETERDAIASAKVETEHGNAKKIQDLAKIKCIGPEFATTLVGEVFYRSFDNRRQLASYVGLTPAHFQSGSMCHDQGISKGGNAKARTVMVELAWLWLRHQPASSLSVWFHERVGKLKGRIRRITVVAVARRLLIALWRYLETGLVPEGATLKV

SEQ ID NO: 95310 - protein, 387 aa, unidentified
MSSITAAPIFWVGLDVHKDSVTAAVFRNRDAEPLRVDRLPNDHKRIRRYVERLSAAGQPRVCYEASGAGYVLQRAFIEWGVPCELAAPSLIPRRPGEHQKTDRRDAIKIARDFRDGRLVLIHIPSEADERVRDLVRCRETFQRELIKSRHYILKFLRRRGFIYREGTHWTIRHMNWIRQVLRPGTLAADDRTVLAEYVALLEYKLQRRDELDRRIEELALTPRYKPVVDRIACFRGFKTHAAMVLATEIGDFRRFESPRQLMAYLGLVPREHSSGDRRRQGAITKAGNSRCRHVLVQAAWCYRRRPTVGASLKRRQQGQDPSTVAHAWKCQHRLYKVFHRLAAKKPKQVAATAVARELIGFIWAVLQDLDRSHFSHDPVIEEDAHAA

SEQ ID NO: 95311 - protein, 352 aa, unidentified
MRNVTIAVDTAKNVFEIAISAAAGQIRERRRMSRHQFERFWSTREPCRVVMEGCSGSHHWARLLIGLGFEVKLIPPHYVTPYRRRNKTDRADCEAILEADRCAGIHGIAVKSEAQQAIMTLHCARSQWMATRTARINAMRGMLRELGVTCALGAERFLADLRQVLERNRERLPERIRRMVLLLWDEVRELERRIEEVEEELERIAKEEPVIRTLLQVPGIGVLTATALYASVGDIHAFTSGRHLASWLGLTPRESSSGDRRRLGRITKQGDPYLRTLLIHGARSALLGAERARRANRKLTHLQAWALERAGEGHTNRAAVALANKLARIAWAVWRHERAFDGDHALQLAAAA

SEQ ID NO: 95312 - protein, 392 aa, unidentified
MICVGIDVAKDKHDCFILSSEGEVLADVFTIPNNAEGFDTLFQIICRCTRPADKIKVGLEATGHYSYNILGFLLNKGLHTFVINPLHTNLYRKSLSLRKTKTDRVDARTIATMLMSDVDLKSYTDTSYHNEELKSLTRYRFDKVRERAKLKTSISRLVCILFPELEKLVPNLHMASVYALLSEFPGAKQIASAHLTRLTNLLYEASKGHYGREKAVEIRDAARNSIGSAMPAKSLELKHTIHLIGELDAEIEEIEKEINSIMDAVHSPITTIPGIGSRMGAMILAEVGDFSNFDSPDKILAYAGLSPSTYQSGQLTNCYSHMEKRGSRYLRYAIFNATKYVCIHDPTFAAYIAKKRAEGKHYNVAISHAAKKLVRLIYAMEKTQQPYRPAST

SEQ ID NO: 95313 - protein, 338 aa, unidentified
MACYAGIDLHATNSVLVVIDETDRVLYQKRLRNDLPLILAALEPYRTTVQGVVVESTYNWYWLVDGLMDAGYRVHLAHAPALPQYSGLKHADDQHDAQWLAHLLRLGLLPTGYIYPKAERAVRDLLRKRSQLVRHKTMVVLSLQSLLTRVTGTRLSLPRLRQLTPESVRTLVPFPAHVQAVASSLTVLQCLEQEVHTIEEQVREAGRTQPGYALLQTVPGIGPILAGTILLEAGDIRRFATVGHFASYCRCVGSEHVSNGKRKGAGNTKNGNKYLSWAFIEAAHFAIRYEAVIRNYYQRKQARTHPLVALKAVAHKLARACYHLLREQVPFDVSRAFG

SEQ ID NO: 95314 - protein, 402 aa, unidentified
MGIDWGSQRHRVCLLDRNGRRIDERWVDHSGSSLAELVVWLRDKSESSGVLAVAIEIPRGAIVETLMEHGFSVFSINPKQLDRFRDRYSPSGAKDDRRDAFVLADALRTDMHCFHAVRLDDPAIIRLRELCRLEEDIVRDQNRVNNQLREQLHRFFPQLLQLCAAADEPWLWDLLQAAPSPAKAAKLTKARIVRILTRHRIRRLDVDRVRAALAGTPLTLAPGAVEAASEHALLLLPRLRLLRQQRTEVARRIEALLGELAAACGSDGEIPEHRDAEVLLSLPGVGRQVAATMLSEASQAIAERDYHALRCYAGSAPITRQSGKTAVISMRQGCNERLRNALYHWARVSVVCDSKSKEIYAQMRAKGHSHGRALRGLADRWLRVLMSMLRRNAIYDPKRSPA

SEQ ID NO: 95315 - protein, 419 aa, unidentified
MSFKILKNNCCGLDVHKTWIFACIGITDSNKRTVYKQARFSSFTKGLQELCHWLAKYDCTDVCMESTGKYWIPVFNILEKNNIWVTLSHPKYTKPQKGNKTDRKDAKWICDLYMCGMVKPSFIPPADIRELRDLVRYRFKLTCMITGEKNRAHNCLTVSNLKLDDVFSDIFGRSSRSITEQILQHPGETFDVAPFVHGRCKTPIEEIQAAVDGAVSKEQAVKLRQCLNHIDELEMHKSEIEREIFRLSDKYEDILTLIRTVPGFDKNPMTAIQVLSEIGGDMSVFPTAKNLVSWAGCCPHNDQSNHKIKSTRISRAGSYFKPVLVQVANALIKSKKHPEFSTRYRRIKARRGHKKAIIAICRMILTAIWHILTDLKPYTSDGFLESRPVKKEKVLTTSQALNLLRQRGYLIKDEPSPVS

SEQ ID NO: 95316 - protein, 422 aa, unidentified
MVLKGVPMALKIVYKICCGIDVHKTFVVACIASTNDKGVTSYESHRFSTYTSGLKTLLQWLLDRNCKDVCMESTGKYWIPIYNVLEKDCNIVLAHPKYVKAIRGKKTDKKDAKWIADLFKHDLVAGSFMPPADIRQLRDLMRYRFKLTCFKSSEKNRLQNCLTISNIQLGNVVSDTFGKSAQAILDKILEDPADTSFDLEPLVFKSLKKKLPELRDAIDGYITPEQAGKLKVIKAHYENLEARKAELEELILALATPYQQELAILQTAPGISSDFTAIGIISEIGTNMEAFPSAKHLCSWAGLTPTNNESAGKKKSVRVSKAGCYIKPLLVQCANAVVKSNKHPEIRNRYLRIKKRRGHKKAIIAIARMLLTALYHILKNGENYNAELYRKSDLPPVDREITVEQALMIARNQGYKIKSATA

SEQ ID NO: 95317 - protein, 330 aa, unidentified
MKEYTIIFGVDVSKKTSDISYLCGAVTEHKKFSNTVTGMKDLRQWITAYNCTLQNTLFCMETTGIYCFTLTKFLYDNKYDTWVEHATQIKKSMALARGKNDKIDSKRIAQYAAKNLDRLRLFVPASTTLEKIKHLAKTRDRIIDTQSRLTVPVAEFEDVGNKEMAKLLGKSIKKTLSALEADLKNIEKQLLDLIMKDENLCRKYASATSVIGIGFVTAVNLIVHTQGFTQMTDVRKLACYCGVAPFEYSSGTSIKGKTKVHFMANKKLKSNLHMASLSAVKLDVDLKKYYERKVEEGKNKMSVLNAVRNKLLARVLACVNNDKLYVKRVA

SEQ ID NO: 95318 - protein, 433 aa, unidentified
MRSTRDQTAVQASIVKTMKTWNELRHYAGLDWAKDHHDVVVVDPEGTIVTEFGFEHSAKGWEKFRQSIKPFPHLGVVLETNHGIVVDQLLEAGCLVFAIHPKSAKHYRDRKIPSGNKTDRTDAWTMAEALRTDGRPWSPVSLEDEATQQIRLLCRDEIALIDQRTLLVNQLQQALRDYFPAALEAFDDWTLESTWDFLIQFPTPQALALAGKRRWEKFLHTHRMWREDGVARRLEIFARADRFCGSAPVVTTKSVLAVGLAKVLKTLQVQIKVYRQQIAQRFEQHPDSKIFDSLPGAGAKLAPRLLAELGTDRQRFIDAAGLQCLAGTAPISFESGQIKKVRVRYQCDKVLRYTVHLWADCSRKVCVWAQTYYQQKRKQGKSHACALRCLGQRWLKILWKMWNTRTAYDENLHTLNQQKHGSWVLTLKTEKIA

SEQ ID NO: 95319 - protein, 386 aa, unidentified
MAYRIAGIDVHKKMLAVVVADVECTGEYVFERRKFGSSPEQLQGLAEWLLQQEAEEVVMESTAQYWQPLWGALERYWRPSCQSREGASPMSGKLHLAQALSNRGRRGRKRDFPDAERLVKRLVAQELVLSFVPDPEQRLWRTLTRRKLQMTRLHVRMQNQLESLLEEAHIKLSGFVTDLLGVSSRRMLQALAEGETDPAALAALADKRLRATPAQLRDALGACTDLNPVYRRLIKMALQELQFVEQQMDQLDQEMANLLRPHEDAVKRLAEVPGLGVDSAQQIIAEIGPAVATFPSAKQLCSWVGICPGDNDSGGVNPSHRSPKGNRQMRRVLNQAANAAARTKGSIFDIVYRRKVTRMGHNQAIGVIAHRLCQLIWILLHRKVTL

SEQ ID NO: 95320 - protein, 329 aa, unidentified
MDVSPPLPVVGIDVSKATLAVCYLRDQQVQHLDVGNTPAGFQQLVKARGPRRRLVMEATGTYYLALAYHLHEQGMQVSVLNPLVIKRFIQMHLSKGKSDRKDAQWLLRYGQQQAVKAWQSDETVLVECRQLEQVTEQLVKQKMMVCNSLEALTRQPVVSPVARQRLGQTKRLLDEQLQAVEAELLALLAQRFAPEMVLLCSIPGIGRKTAGLLLLFAGGFARLDNHRQLVAKAGLFPREHTPGSSIRGKVRITRMGSGLIRGKLFMFSFSAKKSNAARKALYDRLVAKGKNGKVALIAVCNKRLKQAFAIIKSGAPYQSDFCSALALSL

SEQ ID NO: 95321 - protein, 342 aa, unidentified
MTNATHGNQTSQVTVYAAIELSKKSWVISIARPDRDQPSIHRITGGNFSELVGRLRTAAKNFGRILVCYEAGYDGFWLARSLTKVGIECRVLDPASLQVNRRARRVKTDRIDALALLRALIAIDRGDRHVCAVVRVPTLEEEDARRSHRERQRLVRERTAHINRIKGLLFGQGIRGVEPKLRLSRIDFAALTTSEGHPIPDRLRRELEREYVRLNLVEQQLRTVEKERDTADSQDPAVDRKRQMLCALRGIGEASAAILAREVFVRSFANRRQLGSYLGLTPSAYDSGSTSRCQGISKAGNSWGRRVLIEIAWLWQKYQSGSSLSRWRANSPLPCGDMSRQG

SEQ ID NO: 95322 - protein, 359 aa, unidentified
MQTQSNKIDFNGQNIYVGIDVHLKSWKVTIMTERLPFKTFSQDPKPEVLHHYLTRNFPNGIYHSAYEAGFCGYWIHNKFTALGINSIVVNPADIPTTDKEKVQKADKRDSQKIAKALRSGDLKGIHVLASKTLEDRCLVRTRATIVQDLTRNKNRIKSFLNFHGIEMPEKFKLMQHHWSKRFVEWLRSIEMSEQSGKKSLNLYIDEAEHLRLTILQATRGIRELSETEQYADQVRLLRGIPGIGLLTAMIILTELETVNRFENFDKLCSFIGLIPSTHSSGEKENIGEITHRGNSFLRGALVESSWIAARLDLALNKSYHDYCKRMEPNKAIIRIARKLLNRIRFVLKNNQPYECAVVK

SEQ ID NO: 95323 - protein, 375 aa, unidentified
MREKVRFLGLDVHAETIAVAIAEPEGEVRSLGTIPNREDSLRKMIKKLGPTDKLRVCYEAGPTGYVIYWQLAELGVKCEVIAPTLVPVKAGDRVKTDRRDAEKLARCYRAGDLTAVWVPDEGSEALRDLVRAREAAKQDQLRARHRLSKFLLRSGQRPPSGVRSWTRPYLIWVAQLRFTQMAQEATRLDYLHEVEHMRERVERLELAISEAVKLASPALQQVINDLQALRGIADISAVTIAAELGQVSRFESARQLMGYCGAVPSESSSGKRTRRGSITKTGNAHLRRIVVEAAWSYHRPPGIWYGLRKRQESISEEAKEIAWKAQHRLYKRYLRLAAAGKDKRKITTAVARELLGFIWAIGTRAETEVRQRIAA

SEQ ID NO: 95324 - protein, 345 aa, unidentified
MKYYAGLDVSVKETSVCIVDEKGNIYREQKVVSHPDDLVDLLHGLQVPLERVGLEAGPMSQWLLDGLAKAGLPVICIETRHTKAFLKAQPNKSDRNDARGIAQMMRVNLFRPVHVKTLASQKRRALLTARTLLQGKVIAIENDIRGLLRNFGLKVGAVGAGKYEERIRELIEGMPELGEILEPLLTARQSLRDEFGKLDRKVRQVAKADPVCRRLMSVPGVGAIVALAYASTIDIPARFRNSRAVGAVLGLTPVLNQSGESRRIGRISLCGDAMMRTLLFEAAQVLLSRVTKWSWLKAWGMNVAKRSSGRKAVVAVARRLAVILHRIWVDGTEFRWTRDDAPVNA

SEQ ID NO: 95325 - protein, 377 aa, unidentified
MDKDSGEIVSQPASFSNDKEGFDFLLQKIKSYPKNSVLIGMEDTGHYHFALLKYLLDLQYTVALINPKTTDFNRKMQGGITKNDKLDTINICDVLDTPERKKQYRITKVNNFDLYEQKQLTRQHHNLKEELNVYKNRLQKSIDIVFPEFNSLFKSKYGTVYMNILKTFGSAENIANTDIRTIRKCFEIEGRGNRISLTPERLKECASSSIGISSSAGVIQIKHLTAQIELIEEQLTEIDKKIEEFSIQNNSPILSIPGISHFSGTSILAELGDISNYSKPSQIIKFAGVAPLHYESSQFNAQHTAITKKGSKYLRKTLYQIILPVIRHNPVFNKYYQLKISQGKGHRCAQGHCVRKLLRIIYHLLKTNQQFDPQLLR

SEQ ID NO: 95326 - protein, 357 aa, unidentified
MNKKIVKQVAGIDVAQKELVVCLGRMYDDWTPELYSHKTFPNTEKGFTAMVLWVKSQTSEAFTVRFVMEATGVYHESFAYFLNDKGHDLSIVLPNKISNYSRTLHTKTETDKTASEAIARFGLERKLDNWTRPKKIFKGIRQLTREREQVVQMRTMAKNQLHAEQAEAEPNSSTLTRVKKQIVFLNKQELEIKAEITAICGQDEKIKETVKLLSSIPGIGQLTAATVLGETNGFELIRNKRQLTSYAGLDVKEKQSGTSVKGKSKISKKGNKYLRKAMHMPALAAIRHDERFKAIFARLVSRHGIKMKAAVAVQRKLLEMMYIIYKTNTPYDKDYLKKDEAESLQVEQQDEKKLERS

SEQ ID NO: 95327 - protein, 347 aa, unidentified
MTIVEDTRAITGGVDTHFGMHVAAALDPIGGLLGVREFPATAAGYAELLDWLRSFGTVTLAGVEGTGSYGAGLARYLAAAGVRVVEVDRPDRQDRARQGKSDPLDAVSAARAAQSGRASGAPRGRDGAVEAIRALMVAKRSARQERTQAVNQARALIVTGPEELRARFAGHSTAALAAAIAALRPRPGDVPGYATRVALRELGRRIQFLDAQIKRLDELIGPLVTARAPGLLSLHGVGPDTAALLLVAAGDHPERLRSESSWAHLCGVAPIPASSGKTAGRYRLNRGGDRQANSALWRIVIVRLGSCPATRAYADRRSKEGLSKKEIIRCLKRYVAREVYRQLRDGA

SEQ ID NO: 95328 - protein, 451 aa, unidentified
MRKKVVDKIPKLDSLKQLNLNAAGVDIGAAEIWVCVPEGRDPAPVQKFETFTCELKRIAVWLHECGVDTVAMESTGIYWIPLYDLLEQEGFRVFLVNARQVKNVPGRKSDILDCQWIQQLHSYGLLRTSFRPDRDIRELRDLNRHRDNLFSDRMRHIHHMQKALHLMNIQLDNVISDITGMTGMKIIRAIVGGQHDPEKLSAFRDPNCKNSREVIARSLEGSYSKEHLFSLKQSLQLYDYYSELIRECDREMEKVYEQWPQGYDGQKALPPSRKKNSHCKNEPYYDLRSCLYRLCGVDLTQVDGFNSVSVQDIVTETGTDMTRWKTDKNFTSWLCVSPNNDISGGKVLKSKTRRTKNRANLAFRQCAQSLLRSKSALGAYARRMHARLGAPKAITAVANKLARIYYRMMKTKKEYVDPGEDYYIKKNKNREIRKIAKRAASLGYYLVPAVL

SEQ ID NO: 95329 - protein, 341 aa, unidentified
METIYYTGIDQHKRSSYLTTVDAAGDIVRSQKLKNNPDAIRAYFRTLGGEHDVTVESTTGWYWMNDLLSSEDIDLSLAHATFVKAISYAKVKTDKVDAETLAQLLRVGLIPEAHKVSNELRDIRDTLRTRLNLVEKRTSAKNSIHRVLEKFNVTSPEDLPELFRLQAEMHKERADLIHDQIRRLDTTLNSQLLDEDDVQRLLWIPGIGRINAYTIYLEIDGIERFPSVKNFYSYCRLVPGAQNSAGKNRHRASKSGNKYLKLAFSHAATRAIQYFPVVKRYYERMARKKGKHIAKTLVAKEIAKSVYYVLQTGEEYNRRFKGEKLEREKLDSWPRRSSPDA

SEQ ID NO: 95330 - protein, 410 aa, unidentified
MSVLGIALDPATVIVAVDPGKAFHRVWISDGSGSLVDPMSLPVSRDGISRLEVELGRRGAGEPVIAVEASGSLHRPWAAELERHHPGAVRVFAPSETKAARIQLGSGRFKSDDRDCAALTYLARQGLGRRYREQSTVEALRAAVRHRRGLVADRKVAQQRLHDQLNVLCPGLSAPAGHGRALALETPTGLAVLACAAAFAGRAPKPRSLICRASGRLTAATAEFWASRWQQCLPPPADAAARARRLDRDLDRYRRLRADIAEIDAEIGELLAVTDGQILTSLPGVASIRAAAFAAHSLPIDRFPDAEHLYSATGLAPALYQSATLNRRGRISRQGLAEHRDALMGIAWGLSQRSPSFARRDAELRARGMAPIQARVALARHACRLAYRLLRTQQPFDERRYRRGRLSRER

SEQ ID NO: 95331 - protein, 345 aa, unidentified
MKSTTIGIDLAKSVFQVSTADASQRIVKRQRLTRSQFEKFIVTSPSAKLVMEGCSSAHHWGRMAQDHGHQVSLLHPLYVRPYVRRNKTDAADADALVRASADPELKPIAVKSVHQQALQSLHRIRAQWQRSRVSRVNEARALLAEFGVVLPRGTRDIGARLHAVMDELPELMQFTFAELVAEIGETQQRLKRLDRLLRQLVENDPDGQRLIAISGIGVTIASAAMGRVNNIHAFKRGRAFASWLELTPREYSSGNHRTLGRISRRGDSYLRMLLIHGARAALLAAKRRKSRDQALTELQQWALNTEARTGHNKATVALANKMARIMWAVWTRQTSFNGDHAKRYY

SEQ ID NO: 95332 - protein, 421 aa, unidentified
MEETSDLSELAWRVAALDLGKATLTACVRVPHADKPGRRCQEVREYRTTTRALLTLAADLRGHGVTLVAMEATSDYWKPVFYLLEAEGFTCWLLNARHVKNVPGRPKTDKLDAIWLAKVVERGMCSPSLVQPRDIRRLRDLTRYRRTLIRQRTAEKQRVEKLLEDAQIKLSAVVSDIFGMSGRAMLEAMIGGERNPRALAQLAIGRMRAKLVVLEEALTGHFDDHHAFICRMMLDRIDDITRQAAELTARIEEQIAPFADAAARLDEIPGVGRTGAQELIAEIGVDMTRFPDAAHLVSWAKFAPIDKNSAGKKKTASTGKGNPWLGATIGEIVSAAARTDTFLAERYQRIARRRGKRRAIVAVGNSVLTIIWHLLADPEASYRDLGPGYYESRISAQRRQRNLIRQPERLTGQKAALQPAA

SEQ ID NO: 95333 - protein, 433 aa, unidentified
MEEAEDEPLFCERAAGIDIGKQSVMVTVRVPSETRRGGRAQETREFGTTRRQLLELADWLRSWGVTRAGMESTSDYWKPAFFLLEQQGFDCVLFQAARVKAQPGRPKTDKLDSVWLAKVTERGSVAGSFVPPEDIRRLRTHTRYRRRLTQARTAEKQRVEKLLEDAHLKLSSVISDIHGASGRDMLRALAAGERSPLTLAEMARGVMRRKLAALREALDCSFFTQEHAFVLSMMLDNIDHYSAQIAVLDEKIAVMCEPYERQLAQLDAIPGFGVKNAQDLIGEIGVDMSAFPTAAHLCSWARVAPRPKESGGRRKGGSATGKGNPYIGAALGEAAVSVGRTQTFLGAKLRRLVRHMPKKKAQVAVMRTQLMAAHALLSDPSVEYADLGPGYYDERAGTARQARGHVRSLERLGWKVTLEPLNPDTGELTAQAG

SEQ ID NO: 95334 - protein, 344 aa, unidentified
MEYYCGIDVSLEQSSVCVVDATGSIVCEATVASDRDALIAWFSDLDVALSRIGLEAGPLSQWLYAGLVKAGFAVELLETRHVRDAFKAMPVKTDRKDARGIAQLMRLGWFRPVHCKSLPAQEVRAVLTARKLVQAKLHDVEMSLRGILRGFGLKVGRTTPHTFEDRIRELVEGHPTLTTIADALLAARSVLHREFQGFERKVRSLARRDDRARLLMSTPGVGVLVSLTYASAIDDPGRFKRSRQVGAHFGLTPKRYQSGEKDVSGRISKIGDRGVRTALYEAAHIILTKPVKAGALKSWAMRLAARAGKNKAKVALARKLAVILHRMLVDNTPFVADKAAMVRG

SEQ ID NO: 95335 - protein, 340 aa, unidentified
MGIDLHRKYFVATIVDEDGEVVRRDRVSTDRLAIAGYLGGLDGERPRKAVMEACYNWSYLYDQLESEFEEVLLAHPLKTKAIAEARIKNDVLDSETLAQLLRAGLIAQAYAPPKETRDVKNLLRYRSSIVGARTAFKNRVHAVLARNHVEHPALRDLSDIFGKKGMATMRSLELYGHDTAILNGLLDIVDEFAGRELELRKQIRAMNREDDITRLLMTVPGVGDITALLIRYEIDDIDRFLSPGKLCSYAGIVPCTLSSGGKTYHGRITKQGNRWLRWGIIEASHKATVTSPSLAAYHARIKGRRCSSDATVALARKLLKIVYCVWKERRPYYEGPVRIG

SEQ ID NO: 95336 - protein, 317 aa, unidentified
MQDSRYIIGVDVSKSKLDYYASDSLRGTIANTPEGISRLLDTIIAAHPGVPHVCLEHTGIYGRLLCEGCHGRGMNYSLLDPKKIYHYKKFKHGTRAKTDRHDARLIHGYAADNPPQPSAPPTQRQEELRELDNLRALLVKQCAELKTARRHARGKSVVAHYDRRIARLEKEIAELDELVTALMHSDETAATLHRRFMEVPGIGNATATAVLLHLGDAIGNVSAKRIANLAGLAPIPDDSGNLSLPWRIEGGRKRVRSALYMASLSASRYNPVLKAFYKRLKEERKSSRCALVAVARKLLCLMNRIASDPNFKPIATG

SEQ ID NO: 95337 - protein, 349 aa, unidentified
MDATTVAIDLAKDVFQVAVANRAGRILDRQRFTRRQFERFVDTLVEDTSVIMESCGTSHYWGRRMQARGLRVQLLPVQYVRPYVRRNKTDRADTDALLEAARCGEIRPVPVKTVEQQTLQAIHRVRTQWQTARVARINAMRGLLAEQGHAIPVGARTVLRRVTAILSDPAAAVPEVLRQTIALVVDEVRGLEEKIAGLDRQLAQIAGAHPVATRLQTIPGVGVLTATALVGSVGHIHAFRRGREFASWLGLTPRESSTGARRYLGRISKRGDVHLRCLLTHGARAVLRVALQLAARAPDRLTRLQQWAVSIATHRGRHKATVAVANKLARIVWAVWHYDVAFEPQPRVA

SEQ ID NO: 95338 - protein, 303 aa, unidentified
MAHATTPSASLDIGKDSLDLALTGQPASWRFANTPDGHAALITHLAEHAVRRIGLEASGGYERAVCAVLHRAGFDLVLFQPRQVRAYATDRLRRAKTDRLDAHLIAACTAAHEGPVRTPPDPRLAALAEPLRLLQQIELDLARLKTRRAASRDAAIQARLAEEIARLRVWRAQAFTELLARLRAEPDLAARLELVLSIPGLGARTAVTLLVSLPELGRLSRAQAASLAGLAPFDHSSGKHQGARRIAGGRAGVRTALYAAALPAAWRWNPALVACARKLLIYANTVLARGTPWRHTPEPEAAA

SEQ ID NO: 95339 - protein, 364 aa, unidentified
MNTTTVGVDLAKVLFSICMLDGSGRVLLRREFRREAFAAWLAQLPPGTIVAMEACSGAHHWARRCRELGLQPRLIAAQFVTPFRKSRCSKNDRNDAEAIATAARQGNMRFVSIKTIEQQARLSWHRVREGYKTENLEVTNRMRGLLAEFGIIIARSQIALRRALPQILEREDLPVEFVELLQDLRAHWQQIQARLHGCDQRVEAHARGDERCRRVRAATGIGAITADAFVASVGDGRDFKHGRQLAAWMGLVPRQNSSGGHQRLGHISCSGDAYLRTLLIQGARSSVSAAQRVPIDKATPEQVWIRQLATRLPFGKLLVAIANKHARQLWAMLARGEAYDPDAWLHHPMTQRNASRKNAVCVAA

SEQ ID NO: 95340 - protein, 355 aa, unidentified
MRQPNDLSRSLVALDQDSTIIAVVEMSQSSWLVAGMLPGIERQPRKKLEPSAERLLGLLHRWRDEAVKAGRKITRIALAFEAGRDGFWLARWLRAHGVEAHVIHPSSVAVSREHRRAKTDRLDTELLKRGFLGWLRGERGHCTMARIPTIAEEDAKRPNRERECLVRERTRIVNRMKGTLARLGIRNFKPTLRKAAERVTTLHTPEGSALPPNVSAELQRNMARLGFVVSQIKEIEAARQKRLEQEPETEPHAMVRHLARVVGLGVETADILVNEVLSRPMRDRKAVARYAGLTGSPDESGAKRREQGLAKAGNARVRRGMIQLAWRFLRFQRIAHWRGGTRPALPITVLPHAKR

SEQ ID NO: 95341 - protein, 337 aa, unidentified
MGSYVGIDLHRRRSVVVVLNEDGQRVSWSRIDNTPANLAGEIVAAGGPDAEVAMEATWGWYWAADVIAECGATLHLAHPLGIAGYENRRVKNDIVDATLLADLLRMGRLPEAWIAPPEIRELREVVRYRAKLSRLRAGLKAQVHQTLGKEGVIPQLDSIWGPGGRQWLNELRLGDEYVNRIESLRDLIEVYDRQIHDCDVRIYRRLKGHPGYEAVQALRGVGPVFAAVFVAEIGDVTRFANPRRLCSWAGLTPRHRESDSHVARGRISKQGSRLLRWAAVEAVSGAVRDPQIASIKARVGARRGRNIGRVAAARQLLTLVYYGLRDGEIRCLASDAA

SEQ ID NO: 95342 - protein, 406 aa, unidentified
MRGPVITVDVSKGSCHYQPFLEKGKPFRKPKVLHDTIEGFADLQAVIQKVMEESGCDAVPVIFEATGVYHRCLQKYLDDHELPYYIISPLLSAAYRKTNLHSNKTDDLDCAHIAKAYYDEEKLLPHQKQKDLFVRLQKLNRYYEVELNHLRMYKVNFRSYLDIIYPRMDKCFKGHSSLYDPVAMEVLKKYPHPSLLLKHKEETIVKAIVKKTNHKLTFVYEIVHKMYECATRCYSGCDITEIEVIKLPELIEQLQSQMALCDSILSELVEEARAVPYFASIRSIVGIGDNLAARLIAELGDMSRFKNRRAIAAYAGLNPKIRQSGDVDGTHLRISKKGNRHLRCLLYLGASCNYRLRKKDPIYQFNQKKRQQSLSPLRSKAANIAAAHKLLVVIYALSKSGELYRS

SEQ ID NO: 95343 - protein, 342 aa, unidentified
MDHYAGIDVSLECSSVCVVDASGRIVREGKVASEPDALIGWLGSLGYELSRIGLEAGPLSQWLFAAMRQAGLTVELLETRHVRKAFEAMPVKSDRNDARGIAQLMRLGWFRPVHCKSMAAQEVRAMLTARKLVQTKLLDVQNSLRGILRGFGLKVGKTTERGFAGRIQELVAGHPALEAIAEAVLAVHAVLKCEFDRFEKRVRTMARAHRQAELLMTTPGIGPVIALTYASAIDDPGRFKSSKAAGPHFGLTPKKYQSGETDYTGRISKIGDASVREALYQGAHAILTKPLKGCKELKSWAMRIARRAGMRKAKVALARKLAVILHRMLANGTRFNAAAAAA

SEQ ID NO: 95344 - protein, 335 aa, unidentified
MHYLYYVGLDVSKETFDASLVAFEDANEMAHRKFANSRKGICSCLYWVEKRHGILLDDVIFCAEGMGSYISEMAVCASDRTLTFNFSLISPLVIKYSMGIARGKTDRVDARRIAEYAITHYRKIALYLPAEKELCQLRTWLILRAHLAKQRVAKLVLLEKLDYKEKFADVSIQRSMLQKEIAYAETHMKTIEREMQELIAADSNICRNYKLLTSIKGVGPITAIVMLCSTLNFTKITDHRKFACYCGLAPFEHSSGTSVRGGCHTSSMANRDIKVQLNRSALIAIRCDPQLKAYYERKVAEGKHKFSVLNAVRAKIAARCFAVVRRGIPYVALQI

SEQ ID NO: 95345 - protein, 429 aa, unidentified
MDNKDHSRLEDFRQLKNEIRGSKEYLIVGIDIAKDRHHAFFGTATGKTLLKRLVFENTKEGFEKLLVHAEAVKAEHALEQTVFGLEPTADYHKPLGEFLIGEGHRVVLVSGVGVKRNRELLDGRWDKHDTKDSANVADLISQGKCLFYDAPPLPLRELKALVSLKRRLKKQEHGIKARIRNHLLAQYFPELDRYYGQSESNALAVVRWCLNPSVIAAMDYRHFAQLIAPQTRSIAQQERLRSIWQRARDSIGCKAGEALAFEATVMVEELEHIREVIRATDQKIEEICIQFPEYQFLLTIPGFGPDVSSKVLAAIGDPFRFTTGSQVLKMAGLDLSADRSGKTSDAATPVLSKKGKADLRYALYQAALIASSRNRYFMTYYTHTLRGREKEKGIKTKMRVKLAAKLLIIAWTLMKRKEAFNPEYLKTDE

SEQ ID NO: 95346 - protein, 348 aa, unidentified
MAMTIVETRAITGGVDTHADVHVAAALDPIGGLLGVKEFPATMAGYGRLLSWLSGFGTVCLVGIEGTGSYGAGLARHITRAGIRVVEVDRSDRQDRRRQGKSDPLDAVSAARAAQSGRARGASKGRDGAVEAIRALMVAKRSAAGERTQTINQARALVLTGPDDLRARLTGHTAAALVAELASLRPRPGSTVGYATRIALRELGRRAEFPGGQLERLDELIAPLVTARAPGLLALYGIGPHTAALLLIAAGDHPERLRSEAAWAHLCGAAPIPASSGKTVRRRLNPGGDRQANHALWRIVFTRLGSDPATRAYAERRTAEGKSKKEIIRCLKRYVAREVYPHLRGTAG

SEQ ID NO: 95347 - protein, 357 aa, unidentified
MDGSSEQPRMTAGVDLGDKYSYLCLIDQHSAEVMEEGRLRTTPEALRRRFASERPMRVAIETGTHSPWVSRLLEECGHEVLVANARKLRLIYANKQKTDEVDAENLARLARLDPKLLYPLKHRGEDSQAHLALIRSRQALVGCRTQLVNHVRGAVKSFGARLPKCPARSFHKRASEHIPEALWPALGPILEQIGSLTERIRDYERQLETISKEHYPETELLRQVEGVGPLTALTFVLTLEDPYRFEKSRSVGAYLGLVPASDRSGDRDPQKRISKEGDEMLRKHLVGSAHYILGPFGSDSDLRRHGEKIASRGGKNAKKRAAVAVARKLSMLLHRLWVSGEVYEPLYNAHRCEGVAA

SEQ ID NO: 95348 - protein, 340 aa, unidentified
MNATTYGLDVAKRIFQMYWVDSQTGEIANRRFRRDELIAFLARRPAGRVAIEACGSAHWWARKIKALGHEVVLLHAKFIRPFVQTNKTDAADARAIWTAVQQPGMRTVAAKTEDQQAMLGLHRMRSLLIKFRTMQVNQLRGLLYEFGVSFRAGRAAGLAEIRARMAELEEVLPGSIIRALQDQLRRIDGIEQDINQLEKQIGGCHKQEAACRAIAEVPGIGRLTATALVAAIGDARTFRSGREFASFLGLVPRQSGTGGKIRLGAISRRGDPYLRTLLIHGARSVMCHTKVPTPWQKAIQDRRPANVATVALANKMARTAWAILAHGSTYERNHVSVRPA

SEQ ID NO: 95349 - protein, 420 aa, unidentified
MKAQDTLCPYTATIGIDWADSKHDVFERCLDGSICQHQIASAPEAVREWLWALRSRAKGGRVAIGLETSRGPLFHSLSQHADWLDIFPINPQSLARYRQAFYPSRAKDDPVDSQLLEELIRSHPDRLRIYRPGPEMERKLDLLCQQRRKVIGMAVELENQLRATLKEYFPLAIDLCASNGLRNKLALDFLQRWPTYALLKKARPQTLRSFYYAHNARNQALIEARLARFSSSVPLTEDPAVIEPLSIVAQMLVRAIRAIERTVEQLQDKIATLFGQHPDHLLFENLPGAGKNLAPRLLCVFGSDRSRWPDATAIQKYSGIAPVIERSGKSSWVHRRLFRPKFLCQTFHEFAGQSIHQSKWAAAFYERQRGKGKSHTCAIRALAFKWIRIIFRCWKSRKSYDETLYLRSIENQYKRSLKII

SEQ ID NO: 95350 - protein, 346 aa, unidentified
MTYIGMDVHKRDTQICELDATGQVVREQRIRTTRDRLQAVCGGRAPARLLLEASTESEWVAQTLEALGHEVVVADPNFAPMYAQRRRRVKTDRRDAWTLAEACRLGAYRPAHRTSAPQRAVRATLTVREALIRTRARYVIVIRSLLRQAGIAVASGSPDAFLRRLATVAVPPALEATLAPLCQLLEPLNGQIAAADRAIAAQLRSDPIATRLATTPGVGPITAVAFVATLDRVERFPRAANVTAYLGLVPQERSSGETRQRGALTKAGNTRMRCLLVQVAWGIWRSRSPDAEHLRAWVRPVAARRGKRVAIVALARRVARILYALWRDGTTYAVPPALTPPVALAG

SEQ ID NO: 95351 - protein, 412 aa, unidentified
MTAKDQFAAHVGLDWADKKHDVCVQFKNGDRIFHVIEHTPEALDIWLNELHQRAKGRIAIAVELKKGPVVYALQKYPFVTVFPVHALSLARYRQAFWPSGAKDDPQDAELALDLMLRYPHKIKAIEADNPDIRLLQQLVEQRRLLVEDKRRFVNRLINTLKQYYPQPLEWFSHRDSSLFCELIIRWPSLQQLKRARSDTVRHFMNAKGGPAVAYTEQRVASIASAIPLTTDKTVIEANALMATALASQIKLTGDLIRTYDERIESLFDTLPDAELFKSLPGMGPCMGPRMLAALGDNRDRFNSAEEIQNYAGIAPVTERSGQKSWVHWRWQCAKFVRQTFVEWTAKTVNSSYWARLYYQGQREKGKSHQSAIRALAFKWIRIIYHCWKTRTRYDEAKYLLALEARKSPLLKP

SEQ ID NO: 95352 - protein, 411 aa, unidentified
MAPGRRLNIGEAQRGTPLGESRGINPPGRPVFTNTGREGCDGMANEERTGRPEGLKPIDEGFPVLRADVAGIDIGSQQHWVCAPTPTGKGREVAVFAATTPGVEQLAAWLKDRGVTSVALESTGVYWIAPHEILEAHGFDVVLVDTRELGRVPGRNKSDRRDCEWIQRLHSCGLLRGAFRPVEQVCMLRTLVRDKGTLIAERADWIRRMQKTLDQMNVRVHRAVSDVDGATGMAILRAIVAGERDPHQLAALRDPRCRKSEVQIAEQLTGHWRDDHLFSLQQALKMYDALSETIAAYEREILRQLERMTNVDRRDDQAPPPTSPTKAKAIKKRGEDPLRHALYRISGVDLTTIDAVGVETVNVVLSEYGPNLSQFPTEKQFVSHVGLAPIRPQAGGRSSKRRRSRGARAPA

SEQ ID NO: 95353 - protein, 458 aa, unidentified
MEIINPHCAGLDLHKDTIWVCTGPFLDGVTPEVVTFPTHTEGLHQLVKHLKERQVTTVAMESTGVYWLAPYLALLDAGLAPCLFNPSALKSINGRPKSDRADSMWICRLHSYGLLRASFIAPPNILNLRNLCNTREKLIVEAGSAIQRMNNELVKMNIRLDRVLTDIGGASGMRVMEAIIEGKRSPEALHDKLVPQVKKRGRKNIIPLLTGRYDEICVFNLKTWHSVHKSIQQNIEQVNEKIYQLLQSLPKKASASNLPPEKKNYREDYLNFPHPLRPVFFEIFGRDLTQLPGVGADLLLSLVSTVGTDLSAWPDSQHFSSWLGLSPVNRVSAKFRKSGKSKCTGNPLANAFKMAAMAAARTQTYLGENARRLRKRITPKKAKVAIARKLAEIVFNIIRHDMPVYVKTMEEYEMRRQKREIQHFVKGLSKFSVNGEFIPEVLEEIKRQNARFTTTVAI

SEQ ID NO: 95354 - protein, 462 aa, unidentified
MSRSTRYPRKPRVSPGAQSPSIGRQVHPEAAGVDVGAREFVTAVAPERAPEGCVRTFQSFTHDIERLVQWLLACKVRTVAMESTGNYWVPLFRALEAAGIEVCLVNARHVRGVPGRKTDVCDAQWLQQLHTAGLLQKSFHPSEKVASLRYVARHRAALVQESSRHLLHQQKVLNEMNLKLHHVFSDIDGRSAMAIVEAILAGERDPAKLAALRDRRCRASQATVEKSLQGQYRPELLFVLRQAHAMWTRVREQVAEADAEYARLAAQIGEPMPKPLPPAATPAQRRLNKNSVEMDVFGEAFRFYQVDLSQVPGVGAGLLTVLMSEIGTREDLKKNFRSAEAFSSWNGLSPDNRITGGRVLKAKTRKVKGRLATAFRLAAHGLALAKGTLGDHARRMKGRLGKAEGITATAHKLARIVFGMIATAEPWDEAKAFRPTASAKANRLKRLQEQAKAIGMQLVPVQ

SEQ ID NO: 95355 - protein, 344 aa, unidentified
MEGNTKLMSIVAHSYSYVVGVDTHARSHTLAIIDAATAAEIDAAQFPSTPAGAARCISWITRRTSTKTAQVLVSMEGTNSYGSVLRESMESSGFQVAEAPRLLIRGKRRTAKSDPIDAASIAVRTLPIPVERLTVPRSGDERQSLRILLGARSGMTRTATAMINVLTALVRTNDLGVDARRPLSKKQIRQISAWRTRDTDSLSQRTARAEAKRVANTITNLWEETKTNLEALDALTSSISPTLRALVGVGPVSAAQFLISWSHPGRIHNEAAFASLAGASPIPASSGNTKRHRLNRGGDRQLNQALHNVILVKMRIDETPKPTSRNAPRKAKTDEKSCVASNAT

SEQ ID NO: 95356 - protein, 405 aa, unidentified
MSTEIFVGLDWAVHTHAVCVIDAAGAVLERFEIAHDRDGLAELMRRLARFGERVRIAIERPSGLIVDALVEAGHHVFPIHPNAVKASRPRYRSHGAKSDASDAYLLADLLRTDGHRWRELSPQSDSIRALRALVRTRDDLVATRVALGNQLQSTLEAFWPGAACIFADITSPIGLAFLKRYPSPASAARLSEAALGRFCRSQHYSGRRSPAELMARLHSAAVGLAGPLTNEAAAQLVRSMVAVLHPLVEQIAQLTRRIERFVESLPDGQIIMSFPRAGHVCAAQILAELGDVRERFPSLDQLASEAGAVPVTYQSGKTRSVAFRWACNHRLRKAVTCLADNSRHANAWARGIYTAARGRGCDHPHAIRILARAWLRVIWRAWTDRKPYDPDVHAGAQKLASDQGG

SEQ ID NO: 95357 - protein, 418 aa, unidentified
MDKIRTKKGRVVNEKTLLVTVDIGKVMNMGYWRCPDKTEVKPFTFQNNFEGFNKFLSVVVKTKTAKKLKYIVVGFESTGAYAEPLMHFLRVNGVKLVQVNPLHTKKLKDLQGNSPNKTDRKDPKVIADIIELGHALTVIIPEGVPADLRRLTHARERTLQRKTALLNQLQDAVFVSFPEFLDIMKDVKTKTAHFLLKHYPMPSEILECGLEPLTIHLKKISRGKLGHKRAQSLYEAAKRSVGIREGRISLGLEIQSFLSALEQCNGFIEQVEQEISRLLKEVSYSRFLLSMKGIGSVTVAGLIGEVGDFNAFSTISELLKCAGLNLYEISSGKRQGARHISKRGRALMRKLLFYAALCTVRKGGIMHEHYQRHLQNGMKKMKALVAISRKLLGVMFALVRDHTPYLKNHEEAKYLNAA

SEQ ID NO: 95358 - protein, 321 aa, unidentified
MQKYQKYFGIDVSKNHLDIAQYLPETNTTNYLIRIKNTPEAIETWLKTMDMAESLVCMEHTGLYINFLVMVLHQQKIDTWVENGLQIKRSLGVQKGKNDKIDAQRIAKYAFRCQDECRLYLPCSEVLEKLQVLQHLQNKLKDTLEQYEVPLNESKIFSANTHKLLEKHTEKIITELKKVIKEIETEILECIANDEGLKKKYDLINSVTNVGKQTAITLLVVTRGFTKFDNVKQLASYAGVAPFDNSSGKRTNPDHTSSLCHKPLKAILYMCALGTIKTKEDLSAYYHQKRKEGKKHRVVMNAVSNKILQRIWSVVINQKNC

SEQ ID NO: 95359 - protein, 411 aa, unidentified
MENILARCAGLDVHKESVEACVRRIEANGRVHSETRHWGTMTRDLVEMADWLAAEEVTNVAMESTGVYWKPIFNILESRFTVLLVNARHLKQVPGRKSDVRDCQWIAQLLQCGLLKGSFIPPRAQRELRDLTRHRTQLVEEKTRTINRIQKVLEDANIKLASVATDVMGVSGRAMIQRLIDGETNPCKLADLAQRQLRGKIPELEKALEGKLTDHHRFLLKMLWKELAQQEELLAELDAKIEEHTRPFAAEIVRLDAIPGVDHRVAEVLLAEVGAEMKPFPSDEHLSSWAGMCPGNEESAGKRRRRRITPGNRWLKKTLAQAGWAASHTKNTYLASQYRRLAGHRGNKRALIAVGHSILVIFYHMIRTGSGYADLGVDFFDRREPERLTRYYVKRLERLGHKVTLATSVAA

SEQ ID NO: 95360 - protein, 389 aa, unidentified
MSSLALRTAAPTSATPMPIRTIIYLGMDVHKDSITIAILPEGAKAPTRLERLPNELPKLKKWLDRVARDGTIQACYEASGAGYVLHRALRDWGYACAVIAPSLIPKRAGVHRKHDKRDAADLARLYRAGELVPVRIPSEADERVRDVVRCRETFQREILKSRHYILKFLATRGFVFREGTNWCTPHLKWLQHLTTDGSPLAREDRLVYREYHALLMYKLQRREELDRQIEQLAELPTLKPMVQQLQCFRGISLHSAMVLATELVDWRRFERPGQLACYLGLVSREDSSGNRHRLGSITKAGNSHCRHVLVQAAWSYRHRPQTSVELKRRQQGQPPAVITHAWKAQQRLHARFNHLSYRKRPQIAVVAVARELVGFLWAVAREVEPVTSI

SEQ ID NO: 95361 - protein, 321 aa, unidentified
MSENAVYAGIDVSKAELEVAVGEQAWSVPNDTAGIERLLDQLRERAPELVVLEATGGHETAAVAALAEAGLPVVVANPRQVRDFGRATGQLAKTDRIDARVLAQFAERVRPDVRPLRDEDAQELQALLARRRQLIGMMVAEKNRLKTASGAVAKGIRQHIEWLKRQLKSVDSDLDTRIKKSPVWRAKEDLLRSVPGIGPVASRTLIGELPELGQLNRRQIAALAGVAPLNRDSGTLRGKRMVWGGRRSVRVALYMAALTASRCNPVIREFYERLRARGKPPKVALTACMRKLLVILNAMARDGVAWNPDRHRSGAELAHSC

SEQ ID NO: 95362 - protein, 398 aa, unidentified
MAVVVGIDVAKEFHWASASDAQTSDVLLDRRVDNEPPSIDELIEQLRRLQVEHGAVTVGIDVVGGIASLLAVMLAEAGFRLVHVPGLAVNRARQGTSGGEHKSDPRDARVIAELVRSRDDLRPLELGSELDAELRLLVARRRELVTDQTRRIGRLRDLLASVHPGLERVVDPTRKASLWLLGRYVTASEIRRAGGRRLTDHLLHAGHVRRAHAERLAEDALAAARAQQTIVPGERVAADLVRELAREALTVRERLATLDAQLEEALSRHPDAALIRSLPGMGATLTAEFIAEAGGINRFPTADRLAAAAGLAPILKQSGKVRYLRRANGGNKTLKRVFYQSAFCSLNQPASRAFYARKRAEGKRHHQALIALARRRVDVLHAMLRTREPYRLDHAKAA

SEQ ID NO: 95363 - protein, 341 aa, unidentified
MYYIGLDIHKKSIAYCVKQADGAIVREGSVAARRHDLSAWAAALPQPWTGAMEATLFSDWVHDHLTPFAAALKMGHPARMRAIATSKKKTDRLDARTICDLLRCDLLPPAYVMPPQLRQLRRVLRYRNLLVRAGVRMQNKIAGLLLEMGVEYETPRLHRKRYFGQLIEEKRAEIPASARRLLAFSREQYETLHRMELQLLRGLEQHPVIAQRVARLMTIPGVGPVLGLTWALEVGPVERLGNVARAISFCGLSSALRESAGKQTRGPISKQRNQHLQTALIEAAHLAPRWNPLLAEVRERALQRGHPNRATLAVARKLVVFLMAADRGHQPHPRAAPAAAA

SEQ ID NO: 95364 - protein, 336 aa, unidentified
MNSEKYIGLDVHQATISAAVLDSAGKLVMESILETKASTILEFFIGLRGTLLVTFEEGTWAAWLYDLLKPHVNKLVVCNPRKNALLKHGNKNDRIDARKLAELLRLDNLKPVYHGETSVRMLRELARSYLTIVKDLTRVMIRLKAVYRSWAIPCAGRDVYYTRHRSEWLTKIPHAGPRRRAERLYQQLDMLQHLRQEARRELLAESRKHAITAKLRQIPSLGPIRSALAVALIQTPHRFRTKRQLWAYSGLALETRTSGEHRYVQGQLRRSKKQISIRGLNKDHNHDLKGLFKAAATRASVQPGPRSRISTRDRWPKASSQLWCASRWRAKLQPLR

SEQ ID NO: 95365 - protein, 347 aa, unidentified
MVQIAVLGIDLGKNSCSLVGLDAAGRVVLKRRLRRDGVIKLAVGLPSCVMAMEACCGAHHVGRILRNHGHQVRLMSPEYVRPYVKAQKNDDRDAEAIAEAATRPTMRFVELKSEEQLDMQSLHRARDRLVGERTALINQLRAILLERGIVVQQGRRKLQHYLELMLAGEHVTISSRTRMLVHDMCTEWHELDRRILAFDEEFSTRARLDPAARLLTTIPGIGPMNATAMVAAIGNAETFGRGRDLAAWLGLVPKQMTTGGKPKLLGISKRGNVYLRKMLIHGARAALPALSKSETPMGGWLRGLLARAHVNTVVVALAAADSDVKPAGIPINCRPPFRSEAGRDSDQ

SEQ ID NO: 95366 - protein, 376 aa, unidentified
MTNHSTYVGLDVHKETIAVAVIVGERGKVTEEWSMRHDHKAAERLASKVRKLAGGSEVICCYEAGPCGYGFQRELGALGTRCMVIAPSLIPVKPGVRIKTDRRDARKLAELLRAGELVEVAPPTPDEEALRDLCRAREDAKADLTRARHRLSKMLLRGSIRFDAGKKQWTELHHRWLRSLRFENTLTQAVFDNYLHAVEQIGERVSSLSARIENAAVREPHAATVANLRCFRGIDTVAAMTLVSELHGFGRFVSPRQLMAYLGVVPSEHSSGQRRSRGPITRTGNGHVRRMLVEIAWHYRHRPAVGGRLHARREGQPAWVISIADRAQQRLYRKYWRMLQRGKAPNVATMAVARELVGFVWATMRESLTLAHREAA

SEQ ID NO: 95367 - protein, 402 aa, unidentified
MKNAVGIDVSKGKSVVSVIRPYGEVVCSPFELKHTASDISSLITLIKSIEGESRIVMEHTGRYYEVLANQLSNASLFVSAVNPKLIKDFDNESLRKVKSDKADSVKIARYALDKWNLLKQYNGMDELRNQLKIMNRQFDFYMKHKTAMKNNLIGILDQTYPGINTCFDSPARSDGSQKWVDFASTYWHVDCVRKMSLNAFVDHYQKWCRRRKYNFSQSKAEEIYGKAKELVPVLPKDNITKLIIRQAVDQLNSASATVENLRNLMNETAAKLPEYPVVMQMKGVGPSLGPQLMAEIGDVTRFTHRNAITAFAGVDPGVNESGSHAQKSVPTSKRGSAQLRKTLFQVMDALVKTMPQDDPVYKFIDKKRSQGKPYYVYMTAGANKFLRIYYGRVKEYLATLQP

SEQ ID NO: 95368 - protein, 402 aa, unidentified
MFFVGIDWADEKHTIVILDEVPRHVASFEIPHSHDGIKEFTERLKDLGIPEDKTNCFIETSRGLLVSSLLQLGFTVYPLNPKVVDRQRRPSGAKTDFIDARLLADIGRKEFTNLRPLTVSNDLIEELRMMTRDQEGLVHAQTRLTNQLIACLKEFFPSALHFFTRIPQLCTLKFLQLYPTVESLVNTSKEELSKVLSGLRHKSPDSKAEEILQIAHQPHISVPMATVKAKSKLALVLIKQLLVLVEELANYDKEILRLFRSHKDASIFEGLPGAGKRLAPKLLAEWGDNRSLYDSSASVQALAGTSPVAFQSGKYCKARRRTSCVKPFRNALHEFAWCSVRWEPWAKEYYYRKRKEGKSHHVAIRSLANNWVRIIFALWKKEDKYDSSTFIKSQKRHFQKTA

SEQ ID NO: 95369 - protein, 371 aa, unidentified
MAKRLKYIGLDVHKETIAVAVAEGERGGEVRFHGTIPNEDDAVRGMVKRLAGPGITLDFCYEAGPCGYGLQRLLTRQGQPCIVISPSMMPRRPGDQIKTDRRDAMTLARLLRAGELAPIWVPDEAHEAIRDLIRARRSAQEDTSAAKQSVRSFLLRHDRRFSGKSAWTKTYWRWLSEQRFDFAHQQLAFEEAKRRVLEAQARTARLEAALVEAVDGWRFAPLVRSLQALRGVRLIVAAILVAEVGDLTRFQNPKQLMAYLGLVPSEYSSGARVQRGRITRAGNAHARTMLVEAGWTYRLPAREERRYRDRVADLPEDIQAIGWKAQVRLCQRFRRLSATGKPQPKVNTAIARELVGFAWDIARRVQPVVAV

SEQ ID NO: 95370 - protein, 408 aa, unidentified
MELFVGVDWAEEHHDVCVMDSDGRVRAKGRVSNDLAGIAKIHDLIGGALPDGIDDEVVVAVGIETDRGLLVRALGAAEYRVLAVNPLAVDRYRDRHRVSGAKSDPGDARVLADMVRTDAHQHRPVAVDSDLAEAIKLVARSHQSAIWSRRRLANQVRSALREYYPAAVAAFDDLTSGDAVEVLAIAATPEQGRSLSRSKIASALRRGGRQLNIDTRAVKIQTALRSDQLAQPATVTDAYGAIVASLTQVIAAHNRQIAELESVLDEHFGRHPDAAILLSLPGLGVVTGARVLGEFGDDPNRYADAKARRNYAGTSPLTVASGTRRIVRARHIRNRRLADALHWWAFNAITRSPGARALYDRRRAAGDTHSGALRVVANRLVAILHGCLRTRTLYDENTAWAHRHDIAA

SEQ ID NO: 95371 - protein, 376 aa, unidentified
MKNVRFIGLDVHAQTISVAVAEPGGEVRSLGMIANRAESVRKLVRKLGSPGHLRACYEAGPTGYALYWQLAQLGVKCEVIAPTLMPMKPGDRVKTDRRDAERLARSYRAGDLTAVWVPDPAHEALRDLVRAREAGKKDQLRARHRLSKFLLRQGRRAPEGTTAWTGKYLKWVQEQRFEHAAHEATMNDYFHEVEHAAGRIERLERAIDTAVESVPKAMRAVIDALQALRGIAKVSAVSLVAELGELSRFERPRQLMGYSGAVSSEHSSGERVRRYGITKTGNAHLRRIVVEAAWAYRHRPSCGGALKERQKHLSEPVKEIAWKAQHRLHGRYTKLVARGKNKQQAVTAVARELLGFIWSIGVHVEQSLRQSARRAA

SEQ ID NO: 95372 - protein, 350 aa, unidentified
MSQTPNTAIAVIGIDIGKNSFHLVGHDARGAIVLRQKWSRGQVEARLANIPPCLIGMEACVGAHHLSRKLASLGHDARLMPAKYVRPYSKGQKNDFNDAEAIAEAVQRPTMKFVATKTAEQLDLQALHRVRERLVSQRTGIINQIRAFMLERGIAVRQGIGFLRTELPTILATRTDALSPRMLRVIEELAGDWRRLDQRIDGLSGEIEALARQDQACSRLMTVPGIGPIISSAMVAAIGTGDVFSKGRDFGAWLGLVPKQISTGDRTILGKISRRGNRYLRVLFVQAAWVVLVRIKDWERYGLKSWIEAAKRRLHHNVLAIALANKLARIAWAVLARGHDYQPRIAPHAV

SEQ ID NO: 95373 - protein, 370 aa, unidentified
MKKDNRKTNEEGRQSAAKVAKGLPEITIGIDVGDEHSHFCWLDADGEIVKRGRVASTQAGLEKEFGKIGPARMALETGTHCHWMCEVLSGLGHAVVVADARELKSISGSHRKNDARDAEQLARLARADVRLLHPVSLRKRKTQQDRSVLKARDALVAARTQMICAIRGMVKADGSRLAGCSTEAFPEQVGASIPAGMRRALAPLMETLDVLNEKIRYYDQLVAHIAREEYPETSLLTQVAGVGPVTALYYRLTIEDAERFAHSRDVGAYFGLVPKQQDSGESTPQLRISKAGDEGARRLLVGCAHYILGPFGPDSDLRRWGLKLAARGGKNAKKRAIVAVARKLAVLLHRLLVSGEVYEPLRNSQASQAA

SEQ ID NO: 95374 - protein, 343 aa, unidentified
MDYFAGLDVSVKETSVCIVDDAGKIVREVRVASEPEALLQVLTNKTYRFKRIGLEAGPLSQWLYSVLAEAGLPVICVETRHMRAVLKAQINKTDRNDARGIAQMMRVGLYRPVHVKTLRSQKLRMLLTHRKLLQSKAIAIENDLRGTLRNFGLKVGMVGTVKFEARFKELVANLPDLAVLVEPLLIVRRVVREQLGILHRRVLAIVRDDDVCRRLMTIPGVGAVVALTYRATVDVPARFRNSKAVGAVFGLTPAKYQSGENDRTGAISRCGDEMMRMMLYEAAQIMLVRSAKWSWLKAWAMKIARHRGMKKAIVALARRLAVIMHRIWVDGTEFRWTREVAAA

SEQ ID NO: 95375 - protein, 401 aa, unidentified
MAALRDQAFIGLDIGKTHHWLCALDGEGKPLLSRKIANDETEIVTLLTTANALAQQLVWAVDIIGAPSALILSLLTRAGQSVRYASGRIVSAMSRAYPGEGKTDAKDAYVIAETARIRPDLPVIDHDTDLVRNLAVLTGYRADLIADRVRMINRLRDLMTSVFPSLEREFDYSSHKGALVLLTGYASPDRIRRVGQTRLAGWLRHRKVRDYASMAARAVDAAKAQSTVLPGQDLATTIVAELATSILALDERLKSLDEQIEQTFKQHPQATIIQSMPGFGPFLGAALLVGAGDLRAFPSAGHLAAAAGLVPVPNDSGRRTGNLHRPHRYSRPLRHVFYLSAQTSMMRAGPNRDYYLKKRAHGRTHSQAVISLARRRVDVLWSLLRDNRHWVADPPEHAQAA

SEQ ID NO: 95376 - protein, 351 aa, unidentified
MKKIVKQVAGIDVAQKELVVTLGRMHDDWTPELYSYKVFSNTEKGFIGLVLWVKKQSGEGPLTRFVMEATGVYHESLAYFLDDKGHEVSIILPNKISNYSRTLEVKTVTDKTASEAIARFGLERKLDQWERPKKVFKTLRQLTREREQLVQIRTMVKNQLHAEQAEAEPNDGSVTRAKKQIVFLNKQEQQIKAEIAAIVKEDEKVKASIALITSIPGIGVLTAVTVMAETNGFELIRNKSQLTSYAGLDVKEKQSGTSVKGKARISKRGNKYLRKAMHLPALAAIRHEERFKAVFARLVAKHGIKMKAAVAVQRKLLEMIYVIYKSKKPYDKNYLHQKQAETEEIKSTLKN

SEQ ID NO: 95377 - protein, 371 aa, unidentified
MKQFIKYVGLDVHKETIAVGVAEPNAEEVRYFGQISNTPQSVEKLVNQLRKGGAHLSFCYEAGPCGYGIHRQLSDLGWDCQVVAPSLIPKKAGDRVKTDRRDALCLARLHRAKELTAVWVPDGAQEALRDLTRAREDMKHLQRQAKQRLLAFLLRHGKRYDGKSKWTQAHTRWLEGVKFEQATQQIVFQEYVDTVVALSKRLDGLDGHFQRAAGESVFWPVIEALMALRGVNLLTAATIVAEIGELKRFASAPQLMAYLGGVPSEHSSGPKQTRGGITKTGNGHVRRVLVEAAWTYRHPARKTAVLQRRAERTSEVVQEIAWKAQKRLCARYRTLEARGKLKVQACTAIARELAGFIWAIGQVMPQPAAKA

SEQ ID NO: 95378 - protein, 400 aa, unidentified
MLMVVVMDASTPESKPERRRFTTMPSDLRRLLLWLREQGVEEAVMESTAQYWRSVWLELEPYMRLQLAQAFSNRAPRGRKHDFKDAERLVRRLIADELILSFVPHGEQRTWRNLTRMKLQLTRDQVRLQSQMECLLEEMRIKLSVVVSDLLGASGLRILRALAQGETDPKKLALLGDDRLKCTEEQLIDALTGRPQPMHREMLALQLERLQLMDGQIAKLNGLIAQAMKPHQDAVIRLAEVPGLGVDSAQQVIAEVGVKASTFPSAAEFTSWVGTCPGKDESAEENHSSRSAKGNKYLRRVLNQAAHAAVKKNGSHFQTVFRRLLPRLGYQSAIWAIAHRLCRVVWKILHEGVRFIEQGTEPDPKAKKQRARMLARALRKLGYDVAITPNPATAENGMQI

SEQ ID NO: 95379 - protein, 351 aa, unidentified
MSEKTGSHIAVVGVDIGKNSFHVIGLSSRGAIVLRQKWSRAQIEVRFANMPPCLVGMEACVGAHHLSRRLKALGHDARLMPAKYVRPYSKGQKNDFRDAEAIAEAVQRPTMKFVATKTVEQLDLQALHRVRERLVSQRTGIINQIRAFLLERGIAVRQGQRFLRTELPGILASPADVLSPQMARIIEGLAADWRHLDERIDQLSNEIHAMAREDTGCERLMCVPGVGPIISSAMVAAIGSGDAFSKGRDFAAWLGLVPRQMSTGDRTVLGPISRRGNRYLRVLFVQAAWAVLIRPGSWERYGLKSWVESAQKRLHRNVLAIALANKLARIAWSVLAHGRGFEANAIASSIA

SEQ ID NO: 95380 - protein, 374 aa, unidentified
MNMIVMGLDQHRAQITAEWVDTATGEVSRARVAPVDRAGVRRFLERFRGRRLEVALEATTGWRFLVEELRGVGAVVHLAEPAETAARRGNKKRAKNDRADARHLRELLLAGRLPESWIPPDHILDLRAGVRLRHSLIEQHSEWQQRIQAVLYHHGCPQRRRLMEGDGRDWLAAQQLPETAREQVTVALAMIDFLDLQLAPLTQELCAWARRQTGCKALISAHYGIGELCAVTILAELGDCARFSSSREAVRYGGMDITVYQSDRHRAPGHLSRQGPPALRWALYEAAQRARFPASPDRAWYLEAAERLGGNRACLALARKLLKRCYHTLRELGDDALTPPDERAGSGAARHASSGSARRTERLTDPEPADALAA

SEQ ID NO: 95381 - protein, 388 aa, unidentified
MQIITDRPHAPTAIRTDLGAIFVSLELSRSTWLITSLSPGGGEKISKHTVRSGDVAGLWARFSQLKDKVQVRTGQVAPIIVIQEAGLDGFWIHRLLQDEGVESHVVDPASIATSRRRRRAKTDKIDGEALVRALLAYKRGEPRVCAMVRAPTPQEEDRRRICRERKTLTAERIEHVNRIKGLLFAQGISDYEPLRRKRRERLEALRTGDGRLLPEHLKAQIGRELDRLELTLQQIKSVETERDAMLSPSDEGTPAPGAMLKSLKGIGPEFAGVLWAEGLFRSFSNRRQVAAYAGLAPTPWRSGSVAHEQGVSKAGNPRLRTTMIQLAWLWVRHQPRSILTLWFHQRVQLNGGRVRKMLIVALARKLLIAFWKYVTAGVVLEGAETTVA

SEQ ID NO: 95382 - protein, 304 aa, unidentified
MKIRAIGVDLGKTSFHLVALGERGKTVIKKKLSRKQLLTFTANLQPSLIGLEACSGSHFLGRALSQQGHDVRLIPAQFVKPFVKSNKNDYLDAEALAEAVERENMRFVPIKTDDQLDLQALHRVRDRLVSRRTAVINQVRALLASLWQEWKHLEEQVEVLSGEIGSICDSDPACQRLRQIPGVGPLVATAVVAAIGNGAAFHKGREFSAWLGLVPRQYSTGGKPKLLGISKRGNPYLRKMFIHGARAAVLRLKRERSLIGRWMDGLEARAPRNVLIVAMANKLARIAWAVLVSGEPYRAATATT

SEQ ID NO: 95383 - protein, 436 aa, unidentified
MEYGAIDLHKKESQIRIVMASGEIVDQRIATTRERLTHVFWGRPPMRILIEASTESEWVALHLEQLGHEVIMADPNYGPMYGHRSRRIKTDRRDVAALTEACYHGTYRLAHRKSARQHEVQCRLNVRQELTQARTRAISLARAITRAAGLRIRSGRTETFLDRLAALELPAAMKTTLSPLRSIIEVLDDELVNADEWFETMAGADPVVTRLTTLPGIGPITATAFVAALDSVSRFERAGQVTSYLGLVPQEHSSGENNTAVGSCAAPNRICSRSSCKRHGVYRVHRTRQQQLFGRGRRPLHAGAARKSRWSHSLDVSRARCSRCGATRPTINRDAFEPGARNPWRTRPPRPAPAPRCKSVRSSSWRSKRALMSGRNVRAVLKRALLLLRILPCAGTAVPDKSAYKRVSHLAVRQRGSGLDGASDFRTRSRVHPLAG

SEQ ID NO: 95384 - protein, 315 aa, unidentified
MEIYPNTRAIQRYIALDIHREYVLAGGMNASQGWVLSPHQIEMGRFREWAKKNLCESDAVVIETTTNVWDIYDIVQPLVGHAVVAHAGAVRQIAEARVKTDREDVKRLIRLLIAGIVPEVWVPPQPVRELRGLISYRQGLVKTGAMIRNRLHSLLHRHNLLLPKEGLADREWWAQQERIPALEKLQIQQELCMLQQIEIHKAAVDHELGRQSLGETWGKAAVRLMQLPGMGIVVAMTVLSAIGDIHRFESADKLVGYSGLGAGVHDSGKEHIEKRTLAPARKCRCHQKWTQGVTLGDGGSSLASGAHVTVLERAI

SEQ ID NO: 95385 - protein, 355 aa, unidentified
MDQRKYIGMDVHQASISVAVRDAAGKLVTESVIETKATTILEFVRGTRGSLWITFEEGTSAAWLYDLLTPHVTKVIVCNPRKNALLNAGSKNDRVDARKLSELLRAGMLAPVYHGENGVRTLRELGRSYITVTKDLTRVMNRVKALYRSWAIPCAGAKVYSPRRRHSWLEKLSEPGVRRRAEQLYQQLDALRKIRREVRAELLVESQKHPAHQLLRQIPRLGPIRVALLIGLIQTPHRFRTKRQLWAYCGLALQTRASGEYRFSGGELQFAKKSPALRGLNVNHNHDLKNLFKGAALHVTTSTDPLGDFYRNLLAKGMKPSMARLTLARKMAAIVLTVWKKGARFDPAQLKQQAA

SEQ ID NO: 95386 - protein, 351 aa, unidentified
MMIIGVDYHPSFQQIAFMDQATGEYGERRLNHSDGEAEKFYRELKQPGVSVRVGIEATGYSRWFERLLVGLGIEVWIGNAAEIKAKRVRKQKTDREDARLLLKLLLENRFPRIWVPSPENRDLRQLLWHRHRLVQMRTRIMNQLQAIAMNEGQRWKKKLFSESGRAQLEKFPLAVWASRRRQDLLELLDRLDPTIEELTAAVEQEARKRPEVLRLMTHPGVGPLTALAYVLIIGTPERFPGGKQIGSYLGVIPSEDSSGGRQRLGHISKQGNALLRFLLVEAAQAAARCNPHWRRRYVHLAMRREKSIAKVAMGRRLGVRLYWMWRNGLEYSQSIEFGSYAGKLVIGHGVN

SEQ ID NO: 95387 - protein, 338 aa, unidentified
MNISLVGLDIAKSIFHLVGLNQAGKPVKRKILKRPHLLRFFSQLGPCTIVMEACGSAHYWAREFQKQGHQVKLIAPQYVKPFVKGNKNDYNDALGIAEAGQRPNMRFVPIKALEQQDIQMVHRLRERLVKNRTALVNQIRGLLAEYGIVIRKGIYAVHAELPLILEDAENGLTVMARESFNALYAELLELNVKHRACEKKVIEINKANEICLRLDEVIGIGPVTATAVYAAVGDGRDFENGRHFSAWVGLVPKQHSSGGKANLLGISKRGNAYLRTLFIHGARSVLQYVDGKDDRFSRWASALVERRGKNKACVAVANKLARMAWVIMAKGERYRVAE

SEQ ID NO: 95388 - protein, 313 aa, unidentified
MTVIICGVDVASKKLDARIGREGPFETFDNDAAGVSALAAFCRQHGALLVVMEAAGGYERQAFAPLWGLGLKAAIVNPRNVRDFAKAMGWLEKTDKIDAGAIAWYGEVRQVKPTPLASPTQQRLSALVIRLGQLTTLRTAQNQQRRGVTDASVLSTISAILAVTARQIRALEIEIAQEIAADPLWKKLDATFRSLKGVADRTVARLMARLPEIGLISGKAIAKLVGLAPIARDSGTSHGKRAIRGGREDVRAILFVVADIVRKFDPDFPRFRDRLLAAGKPKMVVRIALAHKLLVRLNAKAREARVSSATAAC

SEQ ID NO: 95389 - protein, 413 aa, unidentified
MSIDPSTAAPRVTAGVDWAKDDHVVCVAGDQGEVLERFTVRHDAAGLRQLAARLLRAGAAQVGIERGDGPVVDTLLDAGLTVFVIPPAQVKNLRSRYGSAGNKDDRFDAYVLADVVRTDARRLRPMERDSERTTALRSAVRARRDLVGHRVAAANQLRAHLQIVFPAAAALFADVDSAITLAFLSRFTTQEQADWLSPKRLAAWLKSSSYSGNADPAALHARLLAAPRGNAGQHAAELAGVTLALVAVLRTLNAQIQALAASIGAQLDAHPDAAIFQSLPRSGTVRAARLLAEIGDARGRFPTRDSLTCLAGVAPSTRQSGKVKAVTFRWGADKQLRDALCDFAADSRRASPWAASLYDKAIARGCDHPHAVRILARAWAHVIWRCWQDHAPYDPDAHNSLQAVLKQHQSAAT

SEQ ID NO: 95390 - protein, 326 aa, unidentified
MIYLGIDVSKKKLDAKLMLDPAEVKFRSKSAANTAQGVAELLAWTLRQGNCTIAEVHAVLEATGVYHELAATAMYDAGARVSVVNPAQLKEFARGLAVRSKTDGIDSAVLARYGALTNPAPWQPEPPQVRELKALLGRLDAIEADLRRELNRQEKSEHSPVPQEVRDSLANSVAFLRQEQARLQRRINDHIDGHPTLRQDRALLQSIPAVGDKTAFRMVALLRSRTFTSAAQVAAYIGLVPVEHQSGSSVHKRPRLSKAGNGRLRAALYMAAVVATRHNPHIRAQYQRLIACGKSKMSALGAAMRKIVHICFGVIKHQTPYLPQRT

SEQ ID NO: 95391 - protein, 316 aa, unidentified
MDGAKLTWVGIDVAKATLDLHLLPSGQAHSLANNNAGHQQLRKLLPDPVGCLIVLEATGGYERKVVADLLDAGYRVAVINPKRVRDFARALGLVAKTDRLDARVLALFAEKVQPPSAQKTPENQAEIQQLVARRRQLIDLRTMESNRLEITPSKAARKSIQAVLKILERQIDGIEAAIEKLVESDDDWRQKTQLVQSVPGLGGVTATTLVADVPELGQLNRQEISALVGLAPFNRDSGKHQGKRSIGGGRKSVRSVLYMAALAARRCNPIIKAFADRLTQHGKPFKVVLTACMRKLLVIVNALVKSGQAWNPKLAS

SEQ ID NO: 95392 - protein, 418 aa, unidentified
MRFIALDVHRDFSEVAIAEGGQVRLAGRVETTPAGLELFAQSLGADDQVVLEVTGNALAIARVIEPHVARVVLANPKAVKGATQTAKTDKLDARTLAQLLAAGFLPEVWTPDERTRALRRRISRRAQLVRQRTREKNQIHAILIRNLKARPPVTDLFGVQGRKWLSGQGLPDDEREMVEACLRGIDFLDREVAAIERALAELVLASPEMCRLMTLPGVNFVTAAGLLAAIGDAKRFPTARHLVSYLGLDPRVRQSGSEPARHGRISKQGPGEARHVLVEAAWHAARTTGPLRAFHERVAARRGANVATVAVARKLAVIAWHMLTRGEDYAFVRPSLVREKIRRLELMVGAERRQGRRNPVRVFATSEQHRLEKELAAQAELAYRRLMLDWTAQKKGTGAAPGRASSAARQGTAPHPAL

SEQ ID NO: 95393 - protein, 339 aa, unidentified
MKVINQNVGIDVSKETLAVCIVIMYEDFSVKVKGSKAFMNNKIGFKQMLTWVLSKRIPEIRLSFTMEPTGVYYENLAYFLYAKKEIIHVVLPIRAKRYAESLPGDSKTDKLDAKSLGRMGVERKLDVWQIDTPIYKDIKQLTRERDALIKERTNVKNRLHALNHSANPYKKSLTRLKNLIKYLDKQIKVIEKDIYTLVSSDEWLRKKVEYIISIPGVGFLTAIIVIAETNGFALIKNIKQLVSYAGLDVKIRESGAWKGKSRISKKGNVHIRKALYFPAYTNMKHSNNYMGLYSRIFAKKQKSLIAATATQKKLLGLIYTLWKNETVYVENHQQQNKAA

SEQ ID NO: 95394 - protein, 356 aa, unidentified
MSKVKQLNFEGQTIFCGIDVHKKNWRVNIRVDEFELEDYSQDPCTELLLNHLRKKYPGASYQVAYEAGFCGFDIQRSLKEAGVYCIVVNPADVPCSDKEKKRKTDTIDARKISHQLSKAALQAIYVPAIAIEHVRTLVRQRTRLVKGQTRCKNRIWHLLMFSGLKLEAGKPQQYWSRRFMESLRQLPCETQPLRQALDIALEEYLSVRKLLSDVTKQIRIISMQTSFVETQRSLQSIPGIGVVNAMIIMTELKDIRRFKTLDKLCSYAGIVPDTDNSGENERVRGITHRSNQYLRPAIVESSWVIIRRDPAMLMLYKRYCSTMIANKAIIKIARHLLSRIRYVWMNQKKYELGIVG

SEQ ID NO: 95395 - protein, 353 aa, unidentified
METAYDGRQVVGMDLHRRRSVLVRMTEDGQRLGTVRISNSPAELRREIARAGKSPRVVLEATYGWYWAADTLAAAGAEVHLAHPLGVKAFTYRRVKNDEKDAADLADLLRMGRLPEAWIAPRNVRELRELTRYRAKLVHLRTSCKDQVHAVLAKLGIPVTSSDIFGVAGSAWLDQLRLPQPYAGKVTSLRQLAGELSAEIAMLSEVIADLLAGDRGYQVIRQLPGIGPVLAAVIIAEIGDVTRFKNAGQLCSWAGLTPRHRESDVKVTRGHVTKQGSRILRWALIEAIQHQPAGSRPRAAKDAIIARRGKQARNIAKVAAARQLLTLVFYGLRDGQIRALARQLAITPAEPAA

SEQ ID NO: 95396 - protein, 340 aa, unidentified
MKKVYAGIDLHGNNNYLGIMDKQGKKVFKRKLPNIAEVILEALRPFQKGIQGIVVESTFNWYWLVDRLMNEGYKVHLANPAAIQQYAGKKHSDDKDDAFWLAEMLRLGILPEGYIYPKEERPIRDLLRKRGHLVRLRTSLMLSLQNIISRNCGIKLSASQMKKVRKDEVLPVLVGQEDLALSGRVSKETIDFLTRQIRQVENFVEDKVELKAPYQYLQTICGVGKILSLTIMLETGPIERFAQVGNYTSYCRKVPSKWTSNEKTKGKGIKKNGNKYLAWAFSEAAELARRYEGQARAYYNKKSAKTNFLVAHTALAHKLARAAYFVMRDQVPFDPARVFA

SEQ ID NO: 95397 - protein, 342 aa, unidentified
MSTCLYVGLDVHKKTISWCAKRGDGAVHAQGKVAANRRSLAEWAESFNEPWIGAMEATLFTGWIYDFLKPRAAELKVAHPLMLRAIAASKKKNDKIDASKIADCLRADLLPECYMAPAEIREMRRELRFRNLLVGESVKMKNKISGVLMEVGAEYDKYRLHGRRYFSELLETIDPEIAPPSVHRMLKTSRAHMELFRAGSKALIKQLHEDPRIKLRVERLQTIKGVGETLALTWVLEVGDPKRFGRIGQAYSYCGLTSAQKESAGQNKRGPISKQRNKHLQKMLIEAAKVGPHWNPQLKAVHERELQKGNKNRATLAVARKLVAYMMAVDRSCKNFQERTPV

SEQ ID NO: 95398 - protein, 332 aa, unidentified
MSKFSNFLGIDVSKEYFDAVVILNGDKNNSIHNQFTNDSKGLKELIAWLKSNQSNAKNTLVCLEHTGLYGKIIIPHLLDKEFSVWVEMSLKIIRSLGVQRGKNDKIDAGRIAYYAMKNQEEAQFYQPPRKVIDKIRKLLTLRDHLVKTKALLVKNTNELKSFEPELAKLNEKYSKTTIQGIEKDLKNIEKDLETLILEDEKLNSLYNTITSVPGVGKVTALSLICFTKEFTTFQSPRQLACYCGVVTFEYTSGKSIRTKPKVHFMANKKLKKQLHMCALSCVMHNPEMKNYYQRKVAEGKSKMLVLNNVRNKLIHRICACVRDNKLYERKIA

SEQ ID NO: 95399 - protein, 343 aa, unidentified
MTYFAGLDVSVKETSVCVVDDAGKIVREARVASEPEALLQVLTNTIDRFKRIGLEAGPLSQWLYSVLAEAGLPVICVETRHMRAVLKAQINKTDRNDARGLAQMMRVGLYRPVHVKTLRSQKLRVLLTHRKLLQSKAIAIENDLRATLRNFGLKVGMIGPVKYEMRIRELVENLPDLAVLVEPLLIVRRVIREQLGILHRRLLVIVRDDDVCRRLMTIPGVGPVVALTFRVTVDVPARFRNSKAVGAVFGLTPSKYQSGQNDRTGAISRCGDEMMRMMLYEAAQSMLVRSTKWSWLKAWAMKVARHRGMKKAIVALARRLAVIMHRVWVDGTEFRWTREVAAA

SEQ ID NO: 95400 - protein, 354 aa, unidentified
MPRKTISLEAVATIGIDIGKNTFHLIGLDKMGAIVLRQKLSRNQVNIRLANMPRCLIGVEACVGAHHLSRQLKALGHDARLMPARYVRPYSKGQKNDFRDAEAIAEAVLRPTMKFVAIKTVEQLDLQGLHRVRERLVCQRTSVINQIRAFLLERGIAVRQGLRALRTAMPNVLAMTDKLSPRMIHMIEDLCTDWRHLDARIATVSNEIETLSEQDDGAKRLMTVPGIGPIISTATVAAIGSGDVFSKGRDFGAWLGLVPRQMSTGGRTILGPISKRGNRYLRMLFVQAARSVLLRPKSWQKYGLKSWIEAAARRLNRFKLAIALANKIARVAWGVLNGGRNFEVRSMRTAPQAG

SEQ ID NO: 95401 - protein, 338 aa, unidentified
MSIVMGLDQHRGQITGEWIDTDTGEVQRTRVTPADRAHVRKWLTRFRGSELEVALEATTGWRFVVEELRRVGASVHLAEPAETAGLKGPKKRAKNDRADARHLRELLMVKRLPESWIPPDHILDLRARVRLRHTLSEQRGEWQQRIQATLYHHGCPQRRQLMTGDGREWLAAQSLPAAACETVAVALAMIDSLDRQLAPLDRELRAYARRQAGCKALMAHYGIGPLVAVTILAELGDCTRFSSSRLAVRYAGMDITVYQSDQHRAPGHLSRQGPPALRWALFEAAQSACRRGSPDLEYYRQAAARVGHNRACLSVARKLLKRSYHTLRELGEEALQPA

SEQ ID NO: 95402 - protein, 339 aa, unidentified
MIVIGVDAHKATHTAAAVNGLTAELLGDVTVKARQHGHAQLLAWASGLDEQRVWAIEDCRILSSGLERALLEAGEHVLRVPPKLMANQRKSERTFSKSDPIDALAIARAAIREPNLPSAVLPGIEHEIGLLVDHRDDLVKESTGYQRRLRWHLHQLDPEYEIPAQGFTNPSNVDKVGRRLQRMEQVTQVRICRDLVRRIRELNKYANELRKEIGRLVRQTHPELLAIPGIGILCAGSIIAEVDGIGRFRTEAQLASYAGVAPLDASSGRQQRHRLNRTGNRKLNRALHIVAVTQIRVYPPATEYYERRKTEGKSNREALRTLKRHLARRVFNTLQIQTA

SEQ ID NO: 95403 - protein, 392 aa, unidentified
MVVSVGIDVSKDKHDCFIVSSEGEVLADAFIILNTMDGFHYLLQRIRHCTAPQDKIKVGLEATGHYSYNLLGFLLDNGLTTYVLNPLRTNLYRKSLSLRKTKTDRVDARTIASMLLSDAGLKPYTDTAYHNEELKSLTRYRFDKVKERAKLKSSIARLVCILFPELEKLVPSLHIASVYALLEEFPGAKQVANTHLTRLKALLETASNGHYKRDMALEIRNAAKNSIGSQMPAKSLELQHTIRLIRELDREIDEIEEQIQSIMDELHSPITTIPGLGFRMAAMILAEVGDFTRFDSPDKLLAYAGMSPSTYQSGQLKNCYPHMEKRGSRYLRYALYNATKYVCHWDPAFADYLAKKRAEGKHYNVALSHAAKKLVRLIFAMEKSRQPYCSAA

SEQ ID NO: 95404 - protein, 346 aa, unidentified
MDATTIAVDLAKHVFEVAIEDARGQVSRRRLTRQQFARFLRDHTPAQLVMEACGSAHYWGRTAQAYGHRVQLLPPQYVRPFVRRQKTDRTDVTGLLDARQRSEMPTVAVKTVAQQEVLALHRVRAQWMATRTARINTLHGLLAEHGVTFAAGVRQLGRRAGQLLADPDTPIPLSLRRALLTLLEEIRDLERRAEAVERELRAVAHSDPAMERLQSIPGVGLLTATALVGSVGQIHGFKRARRFASWLGLTPREYSSGSHRSLGHITKAGDGYLRRLLVHGARAVLAAARRRAASQRPLGALQHWAVQLAERRGPNRATVALANKLARIVWAVWTRDQVFTGRPIAA

SEQ ID NO: 95405 - protein, 340 aa, unidentified
MIQFKFMMGVDMSKDWFNYAILDQQFNVIKEGKVTNRPDEILAFLSDLLKGGTVGCMQDLYLCLEHTGIYVQHLVRAWMSKNGRLSLVPASCVSEQMRGKQGWSEKDDSLDALRLAEYGIRFSDKLKPWQFSDQSLEKLRVLQRQRNRLIKAINLLKVPSKESEEFDSMNIYELITQHQTNSLVALKKDLASIESTIQKIIREDEHLNQLFKWIKSVSGVGPVTATEVLITTQGFTKFTPDQAKSYARYIGIVPLKHQSGSSVRKKNKTKKMKNDIKSILTMGATSLLARNNELSQYYRRKISEGKHHSVVLNALRNKIILRIFAVVRNQGMYVNNYACV

SEQ ID NO: 95406 - protein, 354 aa, unidentified
MSNKSTANVATMGIDIGKNSFHVVGLDQRGAIVLRQKWSRGQVEARLAAMTPCLIGMEACVGAHHLSRKLQALGHDARLMPAKYVRAYNKGQKNDFRDAEAIAEAVQRPTMKFVATKTAKQLDLQALHRVRERLVRQRTGIINQIRAFLLERGIAVRQGFRFLRTELPGILAQRSDVLSPRMVHLIEDLAGDWRRLDERIEGLSTEIADLVAQDPACERLMTVPGIGPIISSAMVAAIGAGDVFSKGRDFAAWLGLVPRQISTGDRTILGKISKRGNRYLRVLFVQAAWVVLIRPQSWERYGLKPWIEAAKKRLHHNVLAIALANKLARIAWAVLNKERSFEVTRTTAPSSQPA

SEQ ID NO: 95407 - protein, 329 aa, unidentified
MEIKEVIGIDVSKLTVDCCIHQSQELKTFKNDSEGISKMIGWSLRKSKVDKENILFVLEHTGLYSDYLVRSLDRGDYQMKIVSGLEIKRSLGIIRGKNDRADSKRIALYGYRTREETLPSRIPGSTLTRLKRLMSMRRKLVGQRAGHMATLREQKSVLEEDSLLFWVQEDIINLLSWRINDLEREMDKLIQGDIELKRMLALLTGIKGIGKVTARFMIVYTVGFTSFSTWRKFASYCGIAPFSHTSGTSVRGRTKVSQLANREGKALLHQCSLSAVKCNPEMKAYYERRLEIGKSKMSTLNIIRNKLVSRAFAVVARGTPYVNTMGYAS

SEQ ID NO: 95408 - protein, 348 aa, unidentified
MVVVGADVHKRKHTFVAVDEVGRKLGEKTVKATTAGHTLAVLWAREQFGTALIWGIEDCRNMSARLERDLLSAGQQVVRVPTKLMHAVRKSARTRGKSDPIDAQAVARAVLREPDLPVASHDEISRELKLLTDRRDVLVAHRTSTISRLRWHVHELDPEREPAPRALRAIKHQQALAAWLDTQPGVVAEMARAELADIIRLTTEIDTLEKRLGERVRDVAPTLLDIPGCAELTAAKIVGEAAAVDRFKSEAAFACHAGIAPIPVWSGNTEGQVRLSRSGNRQINTAIHRIALTQIRITSSETHAYYQRLIANGKTKAAARRCIKRRISRNVYRRLLKDYQARTQPSAA

SEQ ID NO: 95409 - protein, 340 aa, unidentified
MKHIGMDVHSTTTDACVRNGNGVVVLQRRIRTTQNELIDFVSSIQGQKRVVVEEDQMADWVTRLLQPHVDEVIRSQPQYNKLISGSEDKCDKMDAKALSELLYLNRVKAVHHPEMKYRILREAVRAYWVASRDLTRAKNRLKGWYLFNGLYENGRSIYSVRNRSAHLKAMQQEGRNTELAKLLYEQMDACRQLKAKHIQMLRKTARPVKDLVKLVMTMPAIGPISGYTLVSLLEDGWRIPNKRKLWRYAGLSLRRHESRDFGIKGASKTGNRLLKRVAMSAAITIVARGESNGLLALWEKDIRQNVSPKRARRNLARKIVVIAQHLLRSKQEYIDERIKV

SEQ ID NO: 95410 - protein, 344 aa, unidentified
MKITTIGMDLAKNVFQIHCVNSEGRFVEGKQLRRDQVMKYFTKLPACLVGMEACGSAHHWARKLQSLGHTVKLMAPQFVKPYVKSNKHDKADAEAICEAVTRKNMRFVPVKTVDQQAVLALHRARQSMVKARTAQGNQIRGLLAEFGLILPQGLRNLYKLVPTLLDEAREQLPGSFCALIERLVTHLKELQRQVDELEVQIQRWHRANPLSCRIEQVPGIGPLTASALVASIGDARNFANGRQLAAWLGLVPKQHSTGGKAKLLGISKRGDSYLRTLLIHGGRALVRQAEKKLGAGTWLNRILGRRNKNVAAVAVANRNARIVWAMLVHDRDFRSDYADAHRIG

SEQ ID NO: 95411 - protein, 448 aa, unidentified
MRFIGLDVHRDFCEVAIAEAGAVRVAGRVQTEPAALLLFAQSLAVDDQVALEATGNALEIARIIEPHVGRVVLANPKAVKGITRAGAKTDKIDARTLAKLLAGGFLPAVWLPDEQTRILRRRISARAQLVRQRTRAKNQVHATLVRNLKGKPPVTDLFGARGRRWLAEQTLPADEQETVAACLRQIAFLDGEIALIERALAEQVLASTEMRRLLTLPGVNFVTAAALMAAIGEIGRFPTARQLVSYLGLDPRVQQSGSEPARHGRISKQGPGETRHVLVEAAWHASRAPGPLRAFHQRIAARRGGNIATVAVARKLAVIAWHMLSRSEDYAFARPSLSREKIRKLELATGAERQKGKRIGVWVTKEQHQLDKELAAQAELAYRRLVQDWQPAIKSAGAAPGRASRRPSSGQAARQEQPHPLRFSSRSPAPTRTLAKEPPAVQRLDFHP

SEQ ID NO: 95412 - protein, 368 aa, unidentified
MARIAEQAGPVTGGVDTHADVHVAAVVDQVGRVLGTQAFPATAAGYRAAVAWMSSHGELAKAGVEGTGSYGAGLARYLAACGIEVAEVIRPNRQARRQRGKSDAADAVAAALAALSGEASGMPKTRDGAAESIRALRVARAGAVKARTQAGNQLRDLILTAPEQVRRQLAGFPSKRQAETAARFRPGGLTSPAEGAKAATASVARRHQELTAEIARLDAALEELVTHAAPAGFLAKQGVATQVAATLLATTGDNPGRVRTDASFAALCGASPVDASSGKQRRHRLNRGGDRQANSALWTIAMTRLAHDPRTKAYAARRTAEGKTAKEIIRCLKRYIAREIYKAICRPPQPGTVSTPQAKQDLLTPVLT

SEQ ID NO: 95413 - protein, 385 aa, unidentified
MDRTSCSAVSRHTLHCALELSKKTWLLAIQFPDREQPSVYPIGGGDTEKLMAKLTAARDCWARVSGALPTITLCYEVGYDAFWLARFLKAHGIECLVIDPGSVQVNRRGRRVKTDRVDVKMLLRTLIAWCRGERHVWSLVRVPTIDEEDLRRSHRERSRLVRERTAHINRIKGLLFAQGIRGINVKSQYKTLAVDKLITGDGHRLPPRLACEIAREIQRLAMVQEQIAEIECERDTAPTPCEATERKRLLLLQLKSIGPAISALLSREVYYRQFVNRRQVGSFLGLTPSPYSSGEEEHCQGISRAGSGPVRAIMIETAWLWTRHQPKSALTRWFVGRTAGQSTRMRKIMIVAVARKLAIALWRYVEHGLVPQGAILKPPTTGKAR

SEQ ID NO: 95414 - protein, 345 aa, unidentified
MDIRTIGIDLGKTVFHLVGVDARGQVVARKKCSRLQLLRFTSNIRECLIGMEACAGSHFLGRALREQGHDVRLMPAQYVKPYVKTNKNDYIDAEAIAEAVTRPNMRFVPIKTDEQLDLQSLHRVRERWVGRRTAVINQIRGFLLERGITVSRGRRRIEESLPGILEDPDSKLSGALRVLLNELRQEMQYLHRQIENSDKLIVRIAGELESCGRLVEIPGVGPIIATATIAAIGNGAAFKKGRGFAAWLGVVPGQYSTGGKQNLTETSRRGNKYLRKLFVQGAHTVLQNRTKQAPGLSTWLDRLTSRKRIQVTAVALANKMARMVWAVLYKGEAYRPPLLPQAIAA

SEQ ID NO: 95415 - protein, 431 aa, unidentified
MNYNQNDKITQITSKTLILGVDIAKFKHVARAQDYRGIEFGSPCYFENTKQGFQVFLEWIFQLKEDQAMEKVIVGMEPTGHYWLNLAHILKEKNIKFVAVNPLHVKKSKELDDNSPTKNDVKDAKVIAQLVKDGRYAEPTIPQGVYAELRVAKKIRDLLTDDLQTVQGQIHNWLDRYFPEFLTVFKSWEGKAALQFLRLGALPHELIHFTDQYLLDHLRKAVSRSVGLNKILELKQAARESIGLCQGSNMAKLELATLLDKYDLIQEKFVELDNKIDNLIEHIPGVQQMLAIKGVGRDTVAGFFAEVGNLQDYNHPRQIIKLAGLSLKENTSGKHKGQTKITKRGRKKLRALLFRVCMIMVAKNSAFKALHAYYTQRSDNPLKKMQSLIALCNKLIRIFFAIGKKQIEFSEERMLKDIPHMRANIKVEKAA

SEQ ID NO: 95416 - protein, 403 aa, unidentified
MSHDRGWARRRACTSGASLVPLATPCIWTGALRDVRAVLRGVRRPPDPTRGGWRPCSLRPQPWVSLGTSRRCVTHDRTVARLPVAWTRQVTVTDIICGVDVGSETLDARIGQDGAWQQFANTVEGIAALAAFCQSHRADLVVMEATGGYERQPFAQLWAANVPAAIVNPCAVRRFAEAMGVLEKTDRIDCGVIAWFAGVKRIKPTPPASATQCRLAALVVRLRQLTELRVEQSNQRRLVTEPDVLLDFQSILTTIASQIRVLEVKIAATIAADPLWAALDAAFRSVKGVADRTVARLMAQLPEIGTISNKAAAKLTGLAPIARDSGKRQGKRPIRGGREGVRSLLFVVAEVVRRHDPDFKAFHQRLCAAGKPKKLVRVALARKLLVRLNAKARDVRNELAYAA

SEQ ID NO: 95417 - protein, 403 aa, unidentified
MNSVGIDISKGRSTVAVMRPFGEVVISPFEVRHTDSELSELARQLKSLDGETRVVMEATGNYHAPVAKLLHDAGLYVSVVNAKLVHGYGNNDLRRVKTDRKDAVKLANYGLDRWPTLPRYVPEEDTRLLLKNCYRQYRQYSKVQTVLKNNLISLLDTVFPNANRLFSSPIRGDGSEKWVDFVAEFWHCHCVSEKSEKAFTNKYQRWCKKHGYNFSEAKAHTIHCEASGHIGVLPKSETTKLLVEQAVAQLRATSAALTALKREMLTLAAQLPEYPVVMGMFGVGPTLGPQLIAEIGDVRRFYSKKALVAYAGLDAPPNDSGDVTGRHKSMSKIGASSLRRTLFLVMSIYLQNAPLDEPVYQFMDRKRAEGKPYRVYMMASANKFLRIYYATVKIYLESLEHTV

SEQ ID NO: 95418 - protein, 369 aa, unidentified
MDLVRGRRRDASKSATADSRRWLVDYCGIDLAGVSSYVYVTDARGKKLTSGEVATDKAAFEQRLKRFVRGGLSIAIEAGNQTAWVYDALVEMGAKVTVVNPAKVKLIAESRRKTDKIDAKILCELLRIDALPHPVHVPDRKTRALRGLLVARRQLVSARTKVCNVVRGMLRQEGIRLPARALSSFVGWRRLLGQGFEQPHLCTVVATYADSFVALTDSIRDIERELAEYERRDNRAARLQTMPRVGRIAALTFLAAVDDVHRFPSSRKLVGYSGLAPTVRSSGERTEYGSISREGRRELRAVWVQIAHLVAIDTSRATRPLRTWFNKVARRRGRKTAIVALARRLLVIAYRVLREETVYDAARLKRKAA

SEQ ID NO: 95419 - protein, 383 aa, unidentified
MKARCSETIMSPRGRRCDATKFIDINLIKEHLAMETILAIDLGKRNSVFCKFDTSSLKTEYSTVKTAPERFHDIFVDLDSKNSIVLFEVGNQAGWLSDMLRAIQLEFKIANVNHSAWKWTNNQNKSDKTDAHRLAMMYHHGFFPEVYIPEKAVRQKRSLIYYRQKTVNRMTQIKNGIRALLCTVAIDLPIGKNCWTKKHIKEIQQMALSFDKINDPCDLWRGQLQMELTQLDALQESLNKTTKKLDELNKQKQSVKLLETVPGIGPRTAEAIVAVIDDPHRFKSCRQVSNYVGFTPRRYQSGTMDRTGRISKRGNPLLRALLVQASWAALRYDWAKEIYKRVCRGSAKRRKIAIIAVARHLLMRCWAMLRDNKPWQYKTQNAA

SEQ ID NO: 95420 - protein, 365 aa, unidentified
MVSLPSGPGVVYAGMDTSMREIVCGVLRPGMDVPAVERIPNDEESVRRLIGKLGDRALLSACYEAGPSGYELHRLVTSMGAACQVIAPSLVPRGASERVKTDRRDAVRLVMALRAGLLTPVRVPSPAEEAVRDLVRARGDLLEDRKRMQQRVSAFLLRHGRAWHGAKWTCAHRAWVDGQRFTEPALAEALETYLGGLEAREAELRAAEARLSAWAGREPLAGSVARLGAYRGIAELTALTLAAEVVDWRRFPSARAFMGFTGLVPAEYSSGARTRRGSVTKAGPQGVRTALVESAWSYRYRPRVGAGLRRRQAGADPGTLARSWKAQQRLHATYAKMTARGKPHGVVVTAVARELAGFVWAEMTS

SEQ ID NO: 95421 - protein, 355 aa, unidentified
MTDNQQKIIIGVDTHKDFHHVAVISALGESLTDRKFDATPDGYADLIDWVTDQGDVLRAGVEGTGSYGAGLTKRLRSAGISVIDVLAPDKQERRLRGKTDQIDAYSAARAVLSKRATTVPKIRDGEVEAMRILRTSRRLVVKQRTEVMNQLHSLLVSAPESLRAKLTGLKAKDLAKACARLRDLAGDDVVTAATKGAARSLGRRHVELTREADQFEESIRALVTAYAPELLAVYGVGPDVAATLLTVAGENVDRIGTEAALAHLAGTAPIPASSGKTNRHRLNRGGNRQGNAAFHRIVLVRMKRHPETRAYVEKTLARGKTKRDTMRLLKRYLAREIFPILTAIQQRHATTQIAA

SEQ ID NO: 95422 - protein, 418 aa, unidentified
MRILNLEVSVMLNAVGIDVSKGRSTVAVLQPGGVVIHKPFDVSHKSSDLRDLARYLGSLNGETRVVMESTGRYHEPIRNALSKAGLFVSTVNPHLIRNYGNNTLRKVKTDPADAKKIARYTLDNWASLHEYSVMDTARTELKTLNSQFAFFMKQKTAAKTNLIALLDMTYPGVNKLFTSPVRPDGSEKWVDYADSFWHVDCVLDSGPKVFTERYQSFCKHHGYDYQPARPEKLYAQAKELVPTVPKDPVYKEMIRDSIAQLNLMSKHVEELRRKMDELASSLPEYQTVRSMYGVGPSLGPQIMAEIGDISRFNRREALTAYAGVDPGKNDSGEVVHKSGHASKCGSARLRKSLFQVMEAMLQLGPRDDDPVSRFLFKKKAEGKPYLVYMTAGANKFLRVYYGKVKECIRNLPASDSED

SEQ ID NO: 95423 - protein, 470 aa, unidentified
MKYKQRRKDTWSKRRGPLSLLERIQPDAAGIDCGEKSHFVAVPPDRDAMPVREFRTFTPDLHQLADWLVRCGVKTVAMESTGVYWIPVYEILEQHGLEVVLVNARHVRNVRGRKSDVLDCEWLQQLHSVGLLQASFRPAAAIVPLRSYLRERGILVEEVAARIQRMQKALTQMNVLLHTVISDLTGATGLKIVRSILAGERDPEVLAAHRDSRCHASREEIVAALTGNYRAEHLFSLRQNYTAYQFHLQQIAECDSAIEALLNTLAAQQPQPSAALPPARRKSNPKGHEPRFDIRTPLHRLTGGADISQIDSIGAQAGLQLIAEIGTDMSRWPSENHFTSWMTLAPNNKVSGGRLLSSRTTPSANRAAVILRRCAMSLARTPTALGAFYRRLAARTSKPTAITATARKLAVLVYRVLSGKLIYNDPGAAAYHELNRTRELKSLRKRASLLGLELVDPCTGAIVLKPDTVS

SEQ ID NO: 95424 - protein, 349 aa, unidentified
MGQVTYVGLDVHKNSITAVFGPAKTKPESMKVKNEPTGWERLAKRLEGCDVRSVYEASSCGFEVHDVMSGRGWDVIVVAPTLMPKSVRNKKRKTDLEDALELRNHLVAHWEAGTWLPGVWIPPQVVRQDRELVRRRLAIGGKLTRVKSSIKSLLQIHPVRPAPEFKTQWSLEHRAWLKSLCGEKSALARPVKTALASMLRELEFLVGEGKGLDKELKRLAEESRHKEQVEAVTEVVGVGLLTAMTFLTELGDVTRFQNRKQVGSYLGLTPTSYESGEAEDRKGHITRMGPARIRKVLNQAAWCGVQRDPQRAARYAEASEKSGSKKAIVGVMRKLGIELWHRAVAAKTA

SEQ ID NO: 95425 - protein, 396 aa, unidentified
MTNTSIAQTEPVLVAIDISKARHEVLIAVPGKKRRRGLTVLNQLEDFNRLIATLSGYGCPVRVAFEATGNYHRALVYHLAAAGFEIKLVSSVALARTREALHNSWDKNDPKDAQVILHMMEIGREQFYYDPLMRGTNDIQELSKTHNIVSKSKTELWHRILTHYLPLYFPEADRFHRCSRSDWFFALLEQYPSPHFISAMGKDAFIAAAWGVIGRKVSKERLLADIYETSTASVGLPVDPESDAIKMFRMVLAEGRSLIAQRNQIEERAIELLKDHPDYQLLTSIPGIGPINALTVLAEAGDLRRFNHHRQFLKFCGMDLSTIKSGTFRGQTKLSKYGNARLRRTLWMAGQVAILRRKAYTAIAAKMARTVHAVVKSGEPYRPFFEAAIQSRRTFL

SEQ ID NO: 95426 - protein, 401 aa, unidentified
MQFFIGIDWASQAHAVCVIDATARIHWHGAIPHTAEGLTDFRRRLHGLRRRGPVRIALERPSGVLVDTLLDAGLEVVPIHPNALKASRPRYSAAGGKSDPGDAFILADLLRTDGHRFRPLQEAADETRALRALVRGREDLVAQRVALANQLRALLERFWPGAAAIFADVDSPIALAFLTRYPTPHSAARLAERRLAQFLGQHAYCGRRSAAELLARLRRAPASQVGEAEAEASGEVVRALVAVLTPLVAHIQQLSAAITAALAQHPDGPLLQSLPRSGAVNAAQILAELGDDRARFPSDAHLAAEAGLAPVTKESGKHRAVVFRWACNKRLRQALTTFADNSRHASPWAALVYQRARARGCRHPHAIRILARAWARVLWRCWQNRTPYDVTHHRAAATLAA

SEQ ID NO: 95427 - protein, 283 aa, unidentified
MTYYAALDVSLRSVNVCIVNDAGEVKFEAKVDSEVEDIITCLRVFKGEIDKVGIEAGVLTQYLTYGLQAAGYAVVCMEARQVKAALSAMRNKTDKKDARGIAQILRTGWYSRVHVKSLESHHIRALLSSRKAILTKCVDLENEIRGLFKVFGIKLPSTLGHGPFDQRVRGTIEQDPALSHALLPLLEARLVLYRTFLEMARRARKMAQDDAVCRRLMTVPRVGIITALTFKAAVDDPARFKRSRTVAAHFGLTPRRFQSGEMDNMGHISIGSARYPQLYGPYY

SEQ ID NO: 95428 - protein, 343 aa, unidentified
MKLIRVGVDLAKNVFQVHGVDRNEKVVWRRKLARESWIKVLLETAAPGCAIGMEACGGAHHWARRLQAHGFKVRLVAPQFVKPYVKSNKNDANDAEAICEAMSRPHMRFVSVKTVEQQDIQAVHRIRAELTKQRTAKANQIRGLVAEYGLVAPKELMHLRRALPCWLEDAENGLSARFRRLLNGLWGDLRTLDERIAELDREIAMIAQNDPTAKRLQQLRGVGPIIATALVAAVGNGEQFANGRQMSAAFGLTPRQHSSGGKERLLGISKRGDAYLRVLLIHGARSVIHHSKGKDDRLSQWVTRLAARSHTNVAAVAMANKTARMAWAMLRNGTDYQPAMVTG

SEQ ID NO: 95429 - protein, 414 aa, unidentified
MKQQEVAAWIGLDWADKKHSIHLEVREGKREHRMLEQKPGIIHEWVAELRQRFQGQRIAIAIEQRKGAVVHALMMYDFIVLYPINPKALARYREAFRTSGAKDDPSDSELLLDLVSKHGDKLRAWIPDTVVARKLQLLCEQRRKIVNHRVALTNRITSLLKQYFPQAIEWVGDVASIQACDFLSNWSTLASIQRARKETLRKFYRQHNCRKASVIDERISQISNAVPLTNDAAIIEPLSLSVQIYAVQLRSLIRAVQQFDKQIVETFAQHPDHDVFDSFPGAGQVCAPRLAAAFGTDRSRWQSAVEMQSHSGIAPVTERSGDSKWIHHRLACPKFMKQTFHEFADQSIRFSKWARVYYDQMRARGNDHHAALRALAYKWIRILFRCWKDGKPYDEEKYVKALRQRGSALIEKFA

SEQ ID NO: 95430 - protein, 363 aa, unidentified
MEKNNTRQSPRRASKASHRPTTIGLDLGDKSSRYCVLNEEGEVAGEGSVATTRKAMTEKFGRLGRVRIAMEVGTHSPWVSRLLTALGHEAIVANARQVRLITHSTRKDDKLDARLLARLARIDPQLLRPIRHRSEKAQEHLLAIRVRASLVDARTSLVNAARGFAKASGERLPACDADSLDVEIMEALPAGLQQRLKPLLEQIESLTVKIKEADQQLEQIARTEYPETKLLRQISGVGVLIALTFVLTVEDSARFAKSRDVGCYVGLRPKRSESGQSQPELRITKEGDLYLRKMLVQGAHLILNRRGPDTDLKRWGLKLAARGGKNQKKRAVVAVARKLAILLHRLWVTAEVYHPLRRQPLAA

SEQ ID NO: 95431 - protein, 375 aa, unidentified
MNKYSIKYVGMDVHKETIAVAIAKEGRGDPAYYGEIPNTSEAIKKLIKKLASNGEKVSFCYEAGPCGYDLYRQLINLGQRCDVVAPSLIPKKSGDRVKTDRRDANTLTRLYRAGELTAVWVPDKEQEAIRDLTRAREDMKAMEGHARQRLGAFLLRHGKRFPGKCKRTQAYFRWLEEIKFEMPAQQIVLQEYVDTLKHMMGRVAALEEEMRQAMQGWSLAPVVTGLMALRGVELITAMTIVAELGDMSRFDSARQIMAHLGLVPSEYSSGNRQKRGGITKTGNGHARRVLIEASWCYRSPARKTAQIQRRAEKTSEEVQEIAWKAQKRLCKRYWYLVNKGKRPVEACTAVARELSGFMWAIVCEVMGKNCVCATA

SEQ ID NO: 95432 - protein, 356 aa, unidentified
MVNIAHIDAVRVVVGVDTHKDEHVAVAIDKLGAYLGEYRLPTTPAGYASVERWAIGLGDVAAFGVEGTGSFGAGLTRFLSGRGRTVVEVIRPDRSTRRRLGKSDSIDAEAAARSVLAGTSHGSPKSGTHSVEMIRMLKVVKDSAMKARTQATNQVKSLVLTAPAELRLALDGLSASGLIRRCAGFRPGDVATPTAAARLALRSLARRHRQLTAELKVVNAELARITAEVAPALLQAFCVGPDSAAALLITAGDNPERLKSESAFAALCGVSPIPASSGKTNRHRLNRGGDRRANSALHRVVIVRLRHDERTRMYMARRTAEGMTKTQVIRCLKRYLAREVYTILRSLAHRHPAKAA

SEQ ID NO: 95433 - protein, 350 aa, unidentified
MIHVGIDLHHKNSYVRAIDDQGRLYPGQRIYHTDIEKLWQYFGQFGQTAKRVVFEATANARWMERLLKADPSIKPVAVTPHKVRIIAETVAKTDKIDATVLATLSKMDALPRAWLPDAQVEHLRELIRYRSSLVYMRTRAKNKINGVLVRDGLVRPYGDMFGVFGRKWLGEIDLPEAMRLQVDGWLATIDHLNKKILQVERQLYRQLARSDRWREDVDILVTMPGWGQLTTLTVLAELGDYRRFKNRASVSCFAGLVPSSKRSDKSSRYGHITKRGSTELRRILVEVAINATRKVPRYGKLYARLKKERGGNVAKTAVARQMLEDGWTMLMKREPFRHKPVQVETLMRVG

SEQ ID NO: 95434 - protein, 358 aa, unidentified
MPTPLPVAPAVSVGVGFDTSRYGHHVTFLREDLQPACPPCEFAESRQGYERLLRLFDNVQQGLAAVHFHIRIDAAGQYATNLETFLHALPFPKTISVGEPARNQSYRKALFPKRKADPVESLCAARFALLEKPKPSPATAAPFHQLREVVQRLEGQCRQSTRLTNQLHNLLARVFPELGLVVADFQAHWLLQLLHRYPTPAQLARARLSSLTALPHLSEDKARQLQAVAADTVASFRGEVAEALVQQLVGQLRDSLAAEAKLHELMTTAYQALPAPNHISSIPGIGAATAAVLTAKMVHCDRFATPDHVVAYFGIFPEENASGIDREGHAKPGRHTHMSRKGNDLPLGGRQGREPTGQ

SEQ ID NO: 95435 - protein, 364 aa, unidentified
MNIIGCDLHTRFQQIAMLDTATGEIVERRLEHESGEAQRFYAALPAPARVGIEATGYARWLERMLREQGHELWIGDASAIRAARVRQQKTDARDAQLLLSLLVENRFPRIWVSSVEERDLWQLLRHRDKLVRFRTSVRNQLHALAMGEGVCRKKKLWTQRGRQELQALALGEWAGRRRQELLELLDRLHGSIAELDQAVAQQAESSPAAVRLMQQPGVGPITGLALALAVGPIERFRNSRKLVSYLGLNPREASSGGKQRLGAISKQGNSLVRWLLVEAAQTAARSDPQLRPFDRLRAVSEVEPRDYQRLVHRRGRAVAKVALARKLAVRLYWQLRLAGAQPSPPARTQGSPASPVVPLAGSTL

SEQ ID NO: 95436 - protein, 354 aa, unidentified
MNQSSTITAGLDLGDRYSHFCLLDTESGEVVEEGRISTNPKAFQRRFSGCEPMRVAIEAGTHSPWVSRLLKRCGHEVLVANARKLRLIYGEGRKNDRLDAENLARLARLDPRLLSPIEHRGEASQAHLAIIRSREALIEARAKLINHVRGTVKSFGSRLPRCSSPTFHKKVGAHVPESLRPALEPLLKTVASMTARIQEYDRELEVLAEESYPQTKLLRRVHGIGTLTALTFVLTLEDPSRFGTSRAVGAYVGLVPSKDQSGERDPQKRISKQGNGLLRKLLVGSAQRILGPFGEDSDLRRHGLKICERGGKNAKKRAAVAVARKLSVLLHRLWVTGEVYEPLYKSNRFEVKAA

SEQ ID NO: 95437 - protein, 404 aa, unidentified
MYNAVGIDVSKGKSTIAVLQPGGTVIRKPFDVSHTSQNLNELADYLSSLDGTTKIVMECTGRYHEPMVKALSEAGLFVSIVNPHLIKNFGNNSLRKVKSDPADARKIARYTLDNWTELRQYSGMDNTRTQLKTLNSQFSFFMKQKVAAKANLIALLDNTYPGVNKLFDSPTREDGSEKWVDYAYSFWHADCVRKIGLKAFTERYKSFCKKHHYIFQQDKPEKLFNASKELVAVFPKEKTYKLLIQQSIQQLNLASEHVERLRREMNELASTLPEYSTVMGIYGVGKTYGPQLIAEIGDVSRFTHREALTAFAGVDPGVDESGQHKSKSNRASKVGSARLRKTLFQIMTTLLQNAPEADPVYRFLDKKRSQGKPYYVYMTAGANKFLRIYYGKVKECLRNLEQTE

SEQ ID NO: 95438 - protein, 347 aa, unidentified
MSKLSQPLQNQLSNPQPPTVFCGVDVSAATLAVAIQQDEHAVAQREFPNTDSGHKALIACLHKRKAWARVSLEATGIYSLNLALALDAADEVEVAVLNPKVVNRFAQTLRRSKTDSADAQVLAEYSRRMDFVAWRAPSRKGLQLRTLSRYIDGLTVEHTREQNRLHAALGSAATPGCVVQDLLRSLASLQRRMVRLRREAMALIASDAILAQRFELMISIPGIAEISALQVLGELSTLSPEMSVRQWVAHSGLDPVHEDSGTSVHRPSRISRAGSRHLRRALYMPALVAAQRDPHLRAFYELLQSRHKAKLQALLAVARKLLHAIYGIFRSQKPYDGHKLFPALIPQ

SEQ ID NO: 95439 - protein, 391 aa, unidentified
MTKPKTKTVNDFSRCLDPLDMDATLIAVIEMSQSSWLVAGIVPGVERQPLKKLAIDEHALLNLLNRWRAEAEKQGHRITRIAVAFEAGHDGFWLARWLAAQGVEAHVIHASSVAVTREHRRAKTDRLDTELLKRAFLGWLRGERGHCKMVAVPTLAQEDAKRPSRERETLVGEASRIITRVKAAFVRLGIRGFNPKLKAAATRLETLRTPEDEPIPPNTLAALKRDLERHQIVKKQIREIEQTRLDVLKQAPEKGPHAMVLLLARVIGVGVETADMLVQEVLSRTMRDRRAVGRYAGLTGSPDESGAKRRDKGLARSGNARVRHGMIQLAWRFLLFQKDSALAQWYRQRTADAPSTRKTLIVALARKLLIALWRLARDGVVPEGVRMRPAA

SEQ ID NO: 95440 - protein, 336 aa, unidentified
MTHYCGIDLHSNNHVVVVIDEEDKRVFDKRINNDLSLTLKALSPYQESLQGIAVESTFNWYWLVDGLQEHGYDLRLVNTAAVKQYDGLKFSGDHYEAFHLAHLMRLGILPTGYIYPKEQRAIRDLLRRRLALVRTASTQLISVQSQIWRSTGTRFSSAELRKPDFVPPQVDNYTLQAIHAGLAVYQTLQREIDALEISAHQAVKLTDAFKILQTVTGIGKILGLTIMLETGTIERFAGPGNFASYCRCVDSTRTSNGKKKGEGNAKAGNKYLSWAFSEAAHFAVRFEPLAQRFYERKKARTNGIIAIRAVARKLARATWMMLKHQIPYDAKRMFPG

SEQ ID NO: 95441 - protein, 311 aa, unidentified
MTLPQDVIGVDIAKDWIDVFFLSARRAERVPMATAELRAFAARARGALVVFEASGGYEHPLAEALGAADVTYARVNPRQAREFARATGRLAKTDRVDARVLAEMGRALALRPTPPADPGRARLAGLMGRRDDLGAMLRAEMARLRQARDASVRRDIGSMIALLRRRIGKLEAEIAAVIGADEALSDRSRLLRTMPGVGPLLAASLLARLPELGRLDRRAIASLAGLAPHACDSGRFRGKRRIWGGRAEVRRTLYLAGFIASRYDPALRAFRRKLQEAGKPVKLAIVACARKLLTVLNAMLRDQREHRPAPG

SEQ ID NO: 95442 - protein, 351 aa, unidentified
MIIIGVDYHPSDQYIAFADTETGECGERRLNHGDGEAERFYRDLQQRAVSVRVGMEATGYSRWFERLLAELGIEVWIGDAAKIKTKRVRKQKTDRNDAQLLLGLLIENRFPRVWAASPENRDLRQLLWHRHRLVQMRTRIMNQLQALAMNEGQRRKKKLWSAQGRAQLEKLPLARWASLRRQDLLELLDRMTPAIAELTAAVEQEAKKRPEVLRLMTHPGVGPITALAFVLIIGTPERFPCGKQIGSYIGLIPAKDSSAGRQRLGHISKQGNALLRYLLGEAAQAAVRCDADWRRRYVHLAMRREKSIAKVAMARRIAVRLYWMWRNGWEYAQSVAFGSHAGQLGTGDGVQ

SEQ ID NO: 95443 - protein, 312 aa, unidentified
MDAIVVGIDVSKERLDVAVRPSGETFVVSRDAEGLDALIAKLTPLAPAAVAVEATGGYETVVAASLAAAGLAIVVVNPAQVRSFAQALGKRAKSDPLDAGVIAHFVEATRPQIRPLPDAETRLLADLVARRRQIVAMIVAERQRQKRLTNRRLQKSIARLLAALQKELSSLETDIDETVRGSPAWRAKEDLLASVPGVGKIIARTLIAELPELGTLDRRRVAALVGLAPWTRQSGKWKGKSFIGGGRADVRSALFLGAMVAARRNPDLKLFRDRLVAAGKPKLVALLATARKLLTILNAILRDQKPWRQQTT

SEQ ID NO: 95444 - protein, 387 aa, unidentified
MSQTIAAPIPAAVDYERTLVLAIEVSNQSWVLAAQVPGLPHTKAKRTIDPEAEALLAAIAGYRTRAAATGRSIERVIAVYEAGWSGFWLARWLMRRGVEVYVVQPSSVPVDRRMRRAKSDGIDSELLLRTLLAWLRGEPRVCSMVPVPDEADEDARRCVRERTELISERVGLTNRIGAVLATLGVSDYNPLLRNRGRRLAELRTGLGEPLPANAQAKIKRLLARLELVLMQIAELERERDAVVETEAPDKASRMIQQLTALRGIGVQSATVLVREAFVRRFANGKALGSYAGLASSPYSSGGIDREQGIGKAGNRRVRTVMVELAWLWTRYQPGAAQVCWFRERVGSTGRRVRKIMVVALARKLLIALWRFVVDGVVPEGAVLKPVA

SEQ ID NO: 95445 - protein, 407 aa, unidentified
MNEKKNYVLAIDVAKGKSMFFILSIHGEVILDAIEYEHTLSHFKMIDQIIGKEEIKDDLVVFMESTSTYHYPVMRYFIEQDYDVIVVNPNLVKKSSTTFRRTKTDRLDAIKIAETYFKEEIKSNAIKTGRLYDDLQAADRQLISLEKALTAIKNRYTRLLDICVPEHELFYSDKSDKYSLKYITLFEHFPHSEFIQKKRVDHIARILNLTFNRSFKTRLTNEATQLKNISKDAYPGVSITSNEVDNLKQTIIILKEFMGHYELAKARLIHLGKQTKEYTYVSSIPGIGDQTASQLIAEIGDFSRFRSYKQINAYCGIEPSIYQSGKTFYNGKITKSGNPFARKVLYSVIMNIIQSSRSNYPEHPINTYYTLKKEKENKSTKESVIASSTKLIRILFSLCKYKRTFTK

SEQ ID NO: 95446 - protein, 408 aa, unidentified
MQVLYTRCAGLDVHKDTIVACVRCVSPPMHQEVRSFGTTTAQLLELADWLAEHDCTHVAMEATGVYWKPVWHVLEAEFELVLANAAHIRNVPGRKTDVNDAMWIADLLAHGLIRSSFVPPQAIQQLRDLTRTRKQLVREVSQHSLRIQKVLEDANLKLGSVLSDVRGKSGRAMLDAIVAGETDPARLAGLAQGTARNKAAELREALRGRITEHHRTMLRLHLQVIDALQRTLGELDAAVGKALAPIQQRARLLTTMPGVSDLTASVVVAQIGVDMSRFPTAGHLVSWAGLCPRSDESAGKRRSTRTRKSGTWIKTTRVTAAWAAVRVKTSYLRAQFLRIKSRRGAKKAILAVAASMLTATFHMLRDGTEYNDLGSEHFNLQDKSKTIRRLLKRLQDLGCNVPEMVHTA

SEQ ID NO: 95447 - protein, 344 aa, unidentified
MGEVITIGLDIAKSVFQAHGVDEAGAVVIRKRVSRAKLLEFFASLQSCLVGIEACPAAHHWSRELQALGHTVKLMPPSYVKAYLKRSKNDANDAAAICEAVTRPSMRFVAIKTKEQQAALMLHRARQLLVRQRTMLSNAIRGHLSELGIVSAKGRKGTGALLEIIGDAKDGRVPPAARGILDVLARQYSAIGAEIGSIDRSIVAWHRSCEASRRLEEIPGIGPIVATALVAEIGDWKAFGSGRNLAAWIGLVPKQQSTGGKDKLGRITKQGNRYLRWLLVAGAMAVIRYAQKHGTLKRPWLGRLMERRPTKLAAVALANKIARIAWAIIVHGDRYRETKPLLAA

SEQ ID NO: 95448 - protein, 333 aa, unidentified
MKDTRLAGIDVGARNLKIEIESARDQRCRVEFANTPAGHRRLIRRLTQGGRRARVALEASGIYSLDLALALHRAPRIEVMVVNPRASRDFAKAFLLRSKTDDIDAWVLLEFVRRMPFVSWQPPRDAALALRAFARRIAALVKIRSQEKNRLHATEHCRELPAAIRNDIEVNLRHLDRRIQQLEEQAVDVVWADPMLRHDLVLLTSIRGVARASALQILAEIRVLPDDLSPRQWVAHAGLDPRTFESGDSVAKPARISRVGNRYLRAALYMPALVASRYEPHVKAFYDELIARGKKPKQALVAVMRKLLHSMHGMLSSGSDFDGERFRALPQGA

SEQ ID NO: 95449 - protein, 358 aa, unidentified
MSKSNQLDFTGVTITSGVDVHLKQWRVNIHDANFELEDFSQDADPVTLYKHLSRKYPNATYKIGYEAGFCGFNAQRILSSLGAICYVVNAADVPTTDKEKKQKKDKIDARKLCDYMQSSKAKSIYIPTVSWEHARSLARTREQIVNNQTRSKNRIRHLLHFSGLHLPEQYEEGRYWSKKMIEHLEQMDCGGSEHLHIALQLLIKDYKQTRSLLLESTRAIRKLCKEPAYQPGILWLRSIPGIGLINAAIILFEIQDIKRFKSPDHLYSYAGLVPDTADTGDKKKTKGITVRRNEYLRTALVESSWTVVRKDPALLMKYNQLRKRMHYNKAIIRIAKHLLARIRFVLLNQKEYVTGVVA

SEQ ID NO: 95450 - protein, 433 aa, unidentified
MDIVHPRVAGIDVHKKVVWVAVRLPGEAPGERKVVTKRFKTFWRPLTKMAAWLAELGVTDAAMESTGVYWWPVYHALAGAGIQVCVCNAAHMRNVPGRKRDIADCQWIAELHEHGLLRPSFIPAAEVAAIRARTRYRKRLIEQRTAEGQRLAKVLEDAGIKIDSVASRLLGKSGREMIQALIAGERNPEQLADLAKGVLRRKTDDLQMACDGRFTDSHAQMCRLHLDAYDHLTANIAELDALVAEAAAPFAAVIARLITIPGVGQRTAEVIVAETGGDMTRFATSARLAAWAGLAPGDNESAGKRRHAAARQGNRHLRAAMTEAAWATARTRTRPGARFRRLARRFGKDHEKKAATAVAHTLICIAWAVMAHGQDYADAGEDYYDQRDQRNREHLIRHHQQALARLGCPVSLAPPGDGSPPPGTTSPHPGRAA

SEQ ID NO: 95451 - protein, 315 aa, unidentified
MEQSSELFVGIDVSKHHLDVYWHPTGRSARYTSASQGLAELVEQLLVEPPVLIVLEATGGYERAAAGALAAANLCFAVVNPRQTRDYARATGRLAKTDAIDAEVLARFACAVRPEPRGERSADQQTLDELVRRRRQLVELRVAERNRLEQARSASVRRGIERLIGVLDEQIGELDAQLEQQMTSDPRWRRTKQLLTSVPGVGPGTSWTLISCLPELGRLNRREIASLVGLAPINRDSGQWRGRRRIWGGRALVRAALYMPTLTAMRFNPTIRTFYQRLRQAGKTFKVALTACMRKLLTILNAMVKTNTTWNPKTA

SEQ ID NO: 95452 - protein, 354 aa, unidentified
MKTTIGVDLHKHQLNTVVLDERGAVKERRELSTKCRRQIAEYFGSYGREAEVAVESVGFYQWFWDLVRPQVGALHLADPAGVRAHAGRKAKTDRNDALLLATLLRDERLPMAYVPREPVRALREMVRHRHSIARSLAGERRSLRWLALKNNLPGPETFTSDRAQKWLLSVEPKLSAVHRVAARQRLNHIIALERDVWDVEKVINEMAEADADLMRQVALIESIPGIGRIGAVTIVAETGDITRFKNIDQLSAYAGLAPTVSQSGESIHHGHISKQGPPTLRWVLQQSAWVAIRCSPQARTIYARISKRAGAKKAATALARKLLSYAWSVCRKNAPFHWPGESPAVTTEGTDFEI

SEQ ID NO: 95453 - protein, 333 aa, unidentified
MDTETGELQERRLQHPQEAEKFYRELAAEGMKARVGMEASGHARWFERLLAELQFELWIGDAAEIRTKRVRKQKTDRQDAQLILKLMLKDDFRRIWVPDWENRDLRQLLWHRHRMVQARTRVMNQLQAVALNEGLRCKKRLWREAGREQLEAFPLAPWASRRRRDLLELLDRLSPTIAELTQTIEQEAEKCPAARRLRTHPGVGSLTALAFVLIIGRTERFQCGKQIASYLGLVPSEDSSGDRRRLGHISKQGNTLLRFLLVEAAQVTVRSLPEWRSKYFHLAMRRGRKIAKVAMARKLAIQLFWMMRKEWDYEQVNRFGPHAGQPEHRRGVQ

SEQ ID NO: 95454 - protein, 483 aa, unidentified
MVLRVPIGSWMPYKRINIPKANRHGAIFQTLKFKIMSKSKTKKEKVKRISQLTVINPTAAGIDVSDTEMMVAYPISPEQLEIRVFGCFTRDLHSIANCLKENGTTTIAMESTGVYWIPLFLLLQEYGFEVYLVNAKHVKNVTGRKDDESDAEWIQKLHSCGLLSASFQPDNMVRTLRSMVRHRKNLVRTSSTYLNRMQKAMELMNIKLHTIISDIDGKTGLLILEAILAGERDPEVLADLRDKRIKASREDIIKSLEGHWTTEHLFELGQCYQLYCTHRQMIDECDKEIEKQLVIQIASKNEGVIPDIPKVKRKASGKHKVQFNLTADLKEILKVDVTEVFGINELSALTILSEVGCDMTKWKTEHHFTSWLGLAPNTKISGGKVISSRIMKKKHHAGQSFRMAANGLYNSKSPLGDYFRRLRAKAGAPKAVVATARKLAIIYYKMVANKEAFNPKALDDYRKKYNEKKINQLKRKIAQLEAA

SEQ ID NO: 95455 - protein, 386 aa, unidentified
MKRNDLSRSLVAFDQASTMVAVVELSFRSWLVAGLVPGLTRQPLKKLGPDAQALLTLLRRWQGEATKAGSTINRIVVAFEAGRDGFWLARWLRARGIEAYVIHPTSIPVSREHRRAKTDRLDTGLLMRAVLGWLRGEPKHCSMAAIPTIAEEDARRPNREHQTLVQERTRIVNRMKATLIRFGIRTFNVKLRKASDRLAALRSPEDEPLPPNTGAELRRDMARLQLIRDQIKVIEEARLQQLKHAPRKGTHPMLLMLAEIIGVGVETADMLVHEVLSRKLRDQRAVARYGGLTGAPDESGTKRREKGLARAGNARVRRGMIQLAWRWLTHQKNSELAQWYQTRTTGAKPAARKTMIVALARKLLIALWRYVTTGEMPAGVTLHPAT

SEQ ID NO: 95456 - protein, 399 aa, unidentified
MAAPSLWAGIDAGKLDHHCVAIDASGRRLLSRRVRNDEAALVALIEDVIALADGSSVQWAIDLKAGGAALAIALLLVRDQDLLYIPGRIVHHAAAAYRGDGKTDAKDAAIIADQARMRTDLPEFRHRDETTVELRTLCARRADVSADRNRALNRLRAQLLEYFPALERAFDYSHRKAALILLTGYQTPEALRRIGRTRLENWLRDRHAYNPGAIVSRAMEAANAQHIVVTGQHLAAVMVARIAQQILDIDAELADLDDMIEERFSRHHQASVIRSMPGFGPLLGAELVAATNGALDSFPSADRLAAVAGLAPVPKDSGRITGNLKRPRRYDRRLLRVFYLAATNSIKTCPESRAYYDRKRAEGKHHRQAVLSLARRRVNVLWAMHRDNTTYKSTAKTAA

SEQ ID NO: 95457 - protein, 354 aa, unidentified
MLIIGCDFHTRYQQIAMAREETGELLVERRLDHASGEAHAFYRSLQNSQEPVRVGIEATGPIHWFERLLADFGYELWIGDSAKIRASEVRKQKTDERDAALILDLLLAKRFPRIWVPTPAQRDLRQLLWHRHKLVSMRTMLGNQLHALAMSQGLCRKKKLFTKKGRVELVSLGLAPWASRRREELLKLLDQLEPPIAELDRAVLEEAKRHADAVRLMTHPGIGPVTALAFVLAIGPITRFRCSKKIASYLGLNPSEESSGGRRRLGAISKQGNTMVRWLLIETVHHAVRQDPELRQDYQRLKFRRGHAVAKVAIARKLAVRMYWMLRSGADYARLVRRQGSPRGTLVGASPSLA

SEQ ID NO: 95458 - protein, 384 aa, unidentified
MIKHNILFIGLDTHKTFTEVAYIEDQRGARPIHLGKILSNKAAFKKLARQLESKYPDATLHFVYETGPCGYWIYRLLTSLHHCCYVIAPSLIPKKPGERIKTDKRDALKLAKLLKSEDLTPIYVPEPEDEAVRDLSRARETTMKDLKDAKYQLKALLLRNNINSKVKDNWSLQHLRWLAELVLPHPCQQIVLQEAVSTITERLKRLKRLDNELTHQVKNWRYYPVVKAIQALRGVRLLVATGVIAELGDLTRFDHPRKLMSYLGLVPSEHSSGGKRRQGAITKYGNNRARRLLVEGAHSYKHNANISKEMQLRQEGLSKEVIDMAWQAQLRLCRRYSRLMHKGKHRNVVVTAIAREMIAYIWAISREVVLPVIDVKLRLARMPA

SEQ ID NO: 95459 - protein, 421 aa, unidentified
MRKADTRKVRGVRDDTLIVAIDVGMEMNRGYCTTSDGRSTKPFKFDNTREGLDTLWRMIMTSKDRFKCNEVIVGYESTGPYAEPMVHYLMKKPVRVVQVNPMHTKRVKEINDNSPLKTDDKDPRVIADIIKLGRALSIVIPEGDAAYLRRLNNSRERHVRERTALVNQLQQLVFLLFPEFKKVIKNIKCKTPLYLLKKYPTPEAISVLETHVLGEEMRKKSRGKFRERHADMLINLARNTIGIKEGVSGLSMDIRHILVQLEMLKNLIAEIEGEMEITIERIPYSSKLLSIKGLGVVSVAGIIGEIGDFKKFGTQPEIMKLAGLDLYEISSGKMKGQRRISKRGRSLLRKILYYAAIQTIRKNGILHDYYTRLTDRGMKRMMALVAVSRKLLGIIYAIVRDDSEYSVNFESMKRQVIKKAA

SEQ ID NO: 95460 - protein, 329 aa, unidentified
MNRIIKIGMDVHTTNYTLCIFEPSFEHDGTVHYITQVKPEVKNIIRVIETFKKEHEEDELNIVCGYEAGCLGYSLYHELKEKGIECVILAPTTMKTEKGGRKLKNDYRDAKMIAECLAYGGYSAVHVPTELDNSVKEFIRMRDDIHENLKRIKQQIIAFMTRNGKQFDGKSYWTKKTSFNEVVLQDTLKEYMIEYNHLCDRVEKLDKQIEEISVKEEYVEKVQQLQCLIGIKTHTALSLIVEISDFNRFKKGNMYSAYLGLIPGDASSGDKENRIGIAKTGNSHLRRLLVEAAQGYTRGRVGFKSKDLKVRQSSAVVKLLPMQIEPMKD

SEQ ID NO: 95461 - protein, 375 aa, unidentified
MSAAGPILVWKEPTAVTIVAHAHPFVIGVDTHARTHTLAVLVAATGEPVTTEQFPTTEAGLNRAIAWAARRTGGDLTALWVIEGIATYGARLAAVVNQAGYQVVEAARMDARAHRGTGKSDPLDAHRIAAAVLPLEPDQLRRPRSGDGIRAALRTLVTAREHMTTERTATINALTALLRAAALDIDARKSLTASQIVEVARWRTRNEDLATLTARAEAVRLAKRVVALNEELAANRAQMIHLIRESKAAVLLDKTGIGPVTVAVVYTAWSHAGRVRSEAAFAALAGVNPIPASSGNTTRHRLSRGGDRRLNRALHMAVVTRMTHDPETRAYVERRRAEGRTTKEIRRCLKRYLARQLYRTLEGLHAEPGSCSQAA

SEQ ID NO: 95462 - protein, 305 aa, unidentified
MSKETLDANCARGQRKQAKIFANSPDGWRLVLSWLKALGSKQAHVCMEATGRHSLGVALALYDAGHIVSVVNPAQIRSFAAVLGQKAKTDPLDAVVIARFAQAIKPEIRPLPDAGTQTLGDLMARRRQILAMLAAEKQRLGRAPAKLLRKSIERLIKALQKELESLDGGIDAAVKASPVWRANEKLLISVPGVGPVISRTLLAEMPELGTLSPKKIASLAGVAPFTRQSGQWRGKSFISGGRAPVRAALFMGAMVAAKYNPILKTFYRRLVEAGKPKKIAIIAVARKLLTILNAIVRDQKPWQPA

SEQ ID NO: 95463 - protein, 367 aa, unidentified
MKKISTAAVKQNRNISEQKLTIGFDLGDRSSWYCVLDEQGEVVLEQKLSTTPKAMKEVFGGMPRCRVALETGMHSPWVSRLLSELGHEVIVAHARNVRLIGESRKKDDRMDAQALARLARIDPQLLCPVKHRSAKAQADLTVIRARAGLVRARTALVNTARGLAKSYGERLRGCNVRNMNPEKAEGLSLELQRALEPLLAGVESLSERIRECNEGIEKLAQESYPQVARLKQVKGVGTLIALTYLLTLEDAQRFRKSRDVGCYLGLQPGRRNSGQSEPQMHISKEGDPYLRTLLVQGAHHILGPFGADSDLRRWGLKLAERGGRNGKKRAVIATARKLAVLLHRLWVSGEAYEPLRNSPQRTMPAAA

SEQ ID NO: 95464 - protein, 425 aa, unidentified
MKNNILSTLFVGIDVSSKTNVLCALDFQGNKLLNLKALNNQPGAESISESIIDCLDSNSLKYVVIALESTSFYSTHIANFLASNEYLLAYKPLVYCLNPKTIANYRKTFVDMDKTDPLDAYIIADFARCGRIKSKPWRGAQFLALQRLTRHRLHLVEGITREKSYMVSNIYLKFSELAVLDKEDRPFSNTYGATSSAILTEYFSLDDITYSSVEDLVEFIKEKGKNHFSDPKKTVQILQKAARDSYRLDKVLYEPLNVAIASSFNVVKALENEVKAIDKAIEKNIKGVNPTEYQSLISIPGIGPILASGILAEIGTITSFDSHNALAKYAGLTWRVNQSGNYSSDDTRMTKTGNKYLRYYLIEAANSVKNHAPEYKEYYYKKYGEVTTHQHKRALALTSRKLVRLVFGLLTKNQIYSSDKVGEIN

SEQ ID NO: 95465 - protein, 342 aa, unidentified
MYYIGLDVASKSSFLYVMDGRGKKIESKEIPTDKDSYRQYFKPWAKKPVEVAVEAGGHSRWIYDLLTRLGLGVYVVNPNKVKLIAESKKKTDKVDAKVLAGLLRMDGLPRRVFIVEGESRELRDLLRSRQQIIKGVTGLMNHLRGMLRQEGIKLPVRVFRNGDIFTRLKENKDVPDHFSSILDSYEKLIAALHDQRRALDDVIADYQNKDIDLLKSVPGVGEVASKTIFAAVSTIKRFKRAKQLTSYCGLVPTVRSSGDRADYGHITKEGRSEVRRVAVQCAQAVLRSSNAESKPLRKWHERVAKRRGFKTALVGLARKLMEIIFYVLRDRRAYDAHLVGAH

SEQ ID NO: 95466 - protein, 319 aa, unidentified
MLVGIDVAKAALVIAVRPSGERWSVTNDERGVATLVARLRALAPQLIVLEATGGYELLGVAALAAAALPVVVVNPRQVRDFARATGQLAKTDRIDADLLALFADRVRPAVRPIADAEAQELDALLTRRRQLLEMLGAERNRLGQVFGKGKRPVQKSLKAHISYLERELHMADTDLGELVRQSPAWRERDDLLQSVPGVGRVVSLTLLAELPELGRLSRRAIAKLVGIAPLSRDSGTLRGRRFVQGGRASVRAMLYMAALVATKRNTLIRAFYQRLVAAGKPKKLALVACMRKLLTILNTMVRTRQPWCPDLTTGALVSA

SEQ ID NO: 95467 - protein, 350 aa, unidentified
MIIGVDFHPSFQQIAFLIEETGEYDEQRLNHEGGEAERFYRDLKQKGIRVRVGMEATGYARWFERLLAELDFELWIGDPAEIEAQRVKKRKTDREDARLLLRLMREDRFPKTWVPSPENRDLRQLLWHRHRMVQMRTRIMNQLQALAMNEGKRWKSKLWSKPGRAEFEALVLGPWASRRRRELLELLDRLNPSIEELTKAVQQEVHKRPEALRLMTHPGVGPITALAYVLIIGTPERFARGKQIGTYVGMIPTEDSSADKQRLGHISKQGSSLLRYLLVEAAQAATRFNPHWRRRYIHLAMRRHRSIAKVAMGRRMGIRLYWMWRNGCDYSPSFEFGSYAGQLAVRHGVQ

SEQ ID NO: 95468 - protein, 340 aa, unidentified
MHIASVGIDLGKTTFHLVALDERGQVVIKKKFSRKQLLAYTANLQPSLIGMEACSGAHFLGAALRHQGHDARLIPAQFVKPFVKSNKNDFLDAEAIAEAVTRQNMRFVPIKTEDQLDLQALHRVRDRLVQRRTAVINQIRGFLLERGITFGKGPAQLRNHMAAVLEDADSNLTPRMRTLLERLWVEWRQLESDIAVAAADIERICSENAACQRLREIPGVGPLVASATIAAIGNGAAFHKGREFAAWLGLVPRQHSTGGKTRLLGISKRGNLYLRRMFIHGARAVVFRIRYDTGGLGQWVQRLQERAAPCKVIVAVANKLARIAWAVLFQGKAYRNPAIA

SEQ ID NO: 95469 - protein, 347 aa, unidentified
MLHAGLDLSRRKLDICLLSNEGEHLDQLVVPPDAGSLRTLVQRIEEVHRQPVCAVIESMTGARIVHDTLEQEGWDVEIADAQKVKGLAPLACKTDKIDSKVLATLSQRDLVPAIWLPDPRVREERELARFRLHLVKHRSALKNRIHSTLINFGRPCPVTDLFGAEGRKLLARLDVPEPWRSNVSASVELIDDLEGQISDANKRLKAGHADHPYIPLLMSAPGIGWVLAFTIAGEIGEISRFESPQKLTGYTGLCPRVMQSGDSDRRGPLTKHGPRYLRWAMLEATMHALKHPAYRDRYQRNKRRLGKQRGAKIAQIDIARRLTHAVWHMLSRNEKFAPRGAACRQAA

SEQ ID NO: 95470 - protein, 366 aa, unidentified
MKKGITYVGMDEHKVAIKLAVLLPGETKPVEWQLSNEKAAVRRMVRKVQRLAPGEVRFCYEAGPCGYALQRWIREAGAACTVIAPSLIPRKPGDRIKTDRRDARKLAELFRAGLLTEVHPPTPEDEAVRDLCRAREDAHEDLVRCRHRLSKMLLRRGWIWNGGKKAWGQGHRLWLRSLRFEQAADQVVLEDYLQAIEQVEQRLRGLEQHIEAASQLPASAEAVGALRCFRGIDTLTAMGLVAELHDFMRFDSARGLMAFLGLVPSEFSSADSERRGAITKAGNRHARRLLIEASWHYRHHPNAASLKHRRQGQPAEVVALADKAMYRLNRRFNRLLAKGKPRSKAVVAVARELAGFVWAALHSKAA

SEQ ID NO: 95471 - protein, 403 aa, unidentified
MKYFVGLDWGSTQHAACVIDAHGILVARFLVEHSAEGLQRFLTQLARLAPPQALAIAIERPDGLVVDTLLHAGHPVVPVHPNALKACRPRYRAAGAKSDPDDAYILADVLRTDGHRLRPLHPASDEIRALRALVRSRDDLVAERIALANQLRSLLDSFWPGAAAIFTDIDSSIALAFLDRYPTPQSARRLGHKRLASFLASHHYSGRRPPTELLKRLRAAPTGLAGEIEQEAKGELVQAFVAVLRSLVERLHLLTRRIEHDISDTDTGRIMMSFPRAGQLNAAQIVAELGEDPERFQTEEQLAAEAGTAPVTHASGKRRNVLFRYACNKRLRLAITTWAANSRFDSPWAKYVYDNARARGCNHPHAVRILARAWVRVLWRCWRNRTPYQAALHGAAKSFLQAA

SEQ ID NO: 95472 - protein, 400 aa, unidentified
MNAVGIDVSKGKSMVTVRKPMEKVMVKPYEVLHTVSELEKLAGFLKSLNGETRVIMESTGVYSQPIAKYLHEAGIFVSTVNAKEMYNYDKDALRKVKTDKADAKKIAKYGIAKWEDLREYAPEDDIRRQLKIYSRQYGFYTNTKTMMKNNLTALLEQTFPEVKTLFSNRVRDDGHEKWVDFVGTFWHMECVSRLSQSKFHEKYRKWCSKNGYLFGESAANRIYELSKKYIAVLPKDEITEALIKQAVSQLNSVSKTQADILRKMKDIAKSMPEYPVVIEMFGVGETLAPQLIAEIGDIMRYERKQSLSGYAGIDSPAYQSGNVNRQGKPVTKSGSPHLRRILFLVMLSLIVHKPDDKVYHFIDKKRSEGKLYLVYMVAGMNKFLKVYYGKVKEHLHRLNP

SEQ ID NO: 95473 - protein, 443 aa, unidentified
MVCGDWNGYPATDKNGCMEREGLTIIRDPKSPPPLISLDVSKGEAHALSVVNAEDIVSGKKKLRTRRFLFTKSGLDTISQMRDEIIKARNDGEDPVVVMEFTGCYSKPVEHYCQEHGFRYAMVPPTMSNKTRENESVKAAKNDNVDCRYIAVSYFEHSIEDKAKDSDEMSKIQALNALRATQICLAKRLKQTFRNYLDLVFPRLDRISGLFLYSKAFPLTISQYPHPDLIPSQKRLSKAIMKNDRIHGPEYASDMAEKILSYLEDCYSGVSSGATEVSSLSYICSSLARSIDELNEIESKLFSASSNTSKYKRIQTIPGVGPIVASTITAACGDLKRFKKSGALESYLGIVPLTKASGTETGLHHQISHKGNTKARTVLHLAAQAAVSCSKDNVFRRFYARLTEGNNKRPALARTQALIAVAHKILTVMRAICINETDFDPSR

SEQ ID NO: 95474 - protein, 348 aa, unidentified
MRPYTNTHAYYCGVDLHARSLYVNVLDNAGTTRLEQDLPASPDAFLDAVKPYRAGLVVGCECMFAWYWLADLCERERIPFVLGHALAMKAIHGGKAKNDRLDARKIAGLLKGGFFPMAHLYPKAKRDTRDLLRRRSFFVRQRAQLIAHVQNTNAQYNLPPFDKKLTYKGNRSAAIADRFEHPSTKLSITADLALVENYDTQIAALENHLVKSARIDDPATFAFLRTVPGIGPILGLVMLYEIDAIDRFAEVGNFLSYARLVTCTHESAGKVKGVGGRKIGNAHLKWAFAEAASLMLRSFPAAKSWMLRQSKKRGAKKAHAILEAKIGRAVYHLWRKQVAFDAAKFLAS

SEQ ID NO: 95475 - protein, 339 aa, unidentified
MKYTPVGVDIAKHLIQVHFIDEHTGEVIDKQLRRQDFLMFFCNREPCLIGMEACRGSQHWGRELTKLGHKVRLLQAHFVKAFVMGNKNDVMDARAIWMAVQQPGKDIAVKTEEQQSVLVLHRSRRQLVKFRTMQINSLHGTLLEFGKTIHKGRAAMERELPEALERMKERLPPYLITVLENQYNRLNELDSLIEDIEKKLTSVARQNETCKRLLDIPGVGPLIATAAVATMREASAFKSGREFAAYVGLVPKQTGSGGKIRLLEISKRGNTYLRALFIHSARAAALLPKEPGPWITELKKRRPTSVAIVAMANKLARTVWAIAAHGSKYDKNHVSIRSY

SEQ ID NO: 95476 - protein, 399 aa, unidentified
MVKIIYVRPGSLPDIGQNQRKKVFKKGEIMSIKRILVNQIDTNLEYEVIGIDLAKNCVSAILLTTDGEIFGIDRLDYQELEKSAQELSPTIFAMEPCTEMNYMVQKLEDWGHQCIVISGKNVKDYVESHFSNQKTDLNDAQALAFLTKDTQLRTVKAKDPEQLKYASLTTLREQYVKQYRQTMVSLKGICQVWGLNISKGISGKARLKDMIENHADFPAELRTALVGMVAHAQAVQKDLKSVTKILEELAKKDKACQLIQTVPGLGTICSCRLRATVGDIKRFKHPKDFPAYYGLVPRSMATGHNEKKGKITHRGDKTMRSLMVQGAGIVINQATKGNLNSKQLTKWILKKQKEKMPWGKLVCAVAAKLLRIVRAILISGKPYNPKIAGVAKCSLPKAS

SEQ ID NO: 95477 - protein, 345 aa, unidentified
MKLYGGIDLHSNNCVIAIINEQGETLSCKRLNNDISVILSFLAPYKDKLAGLVVESTFNWYWLVDALMDAGFKLHLANPAAIQQYSGFKHADDHSDARWLAEMLRLDILPEGYIYPRELRAVRDLMRKRMDIVQQSTKNLLSVQSCYMRHLGYKLGSNKIKQMAAIRKGVDTEQVHADFSSMNTALSVISNLSLIRCAQQQINAIEGAILKQTSLSPEFINLSSIDGIGNTLALTIMLETGTIKRLDSPGNFSSYCRCVKGARYSNGKKKGATNQKNGNRYLAWAFTEAANFAIRYNPTVKKYYQRKLAKTNKVVAIKAVAHKLARACYHVLKDNVPFDEHKAFA

SEQ ID NO: 95478 - protein, 357 aa, unidentified
MVVVLTSNFLHKRNLAMKFVGADLHKKSISLCVVVVVERKVQVVRRERILCREVAKLRRFLQSLGPFQLTVEATIGYDWFAALAEEFADRVVIAHPGKLRIIAESTRKTDKIDARVLAEFLAHDMIPEAWRPTPRVRQHRSLVRRRYKMQSRITSIRNTMRGILTRYNADRRDLFTRLGKAATAKLPLLEEEHWLLGHLWQDLADAQGRLREIDDRLQAFAAKAAVKEQEARAVLASLPGVGFVTIETILAELGDWHRFRNADAVVSFAGLDPGVRESDGRRTDLKLSKAGSPLLRWILIQLAHRVKRTLERWRAIFVRLSARVGKKKATCAIARRLLLVIYAMLRDGRAYQLPAVA

SEQ ID NO: 95479 - protein, 343 aa, unidentified
MQVVTTVGLDIAKSVFQVHGVDAAGQVVIRRQLKRRYVLSFFETLSPCLVGIEACASSHHWSRELRALGHTVRLMPPAYVKPYIKRQKNDAADAEAICEAVTRANMRFVATKTPEQQSCLTLHRTRHLFIRQQTAVINVIRAHLAEFGIVAPVGRKGVEELLNVVTDSSDQRVPVVARMCLAALGAQLRRLKEQILEFDRQIMAWHRSNEVSRRLDAIPGVGPVLATALVASIADPKAFRSGRNFSAWIGLVPRQHSSGGRDRLGNISKQGDRYLRSLFMAGALAVIRYAKIHGTKHRPWLTALLARRPTKIAAIALANKMARMVWAMMARGERYKEPVALAA

SEQ ID NO: 95480 - protein, 309 aa, unidentified
MSEKNFIGIDVSKDSLDVAIAHSEEFKNFANTEEGQRDLKDFISSRRPALIVLEATGGFERGVLRELASARLPVVPVNPRQVRDFAKAMGILAKTDKIDARVIARFAEAVKPEARPLRTEEEDRLDSLNARRFQIVEMLTAERNRLSHATKWTKKGIQGHIRMLERLLEEINGEMDDLIKHSPLWRQKDNILQSIPGIGKVMARTVLADVPEIGTMNRKQISALVGVAPLNRDSGKYKGRRSIWGGRAKVRTVLYMCAVTAIRCNPKIKVFYERLREAGKCFKVAITACMRKLLVIINSMIKTETCWNS

SEQ ID NO: 95481 - protein, 277 aa, unidentified
MDVHSTNFTLCSFEPGYGFEADKIFGQTQIKEDIFNSTVKYINKLKSMRPDVDVVCGYEAGCLGYNLHRKLKAKEIESVILAPTTMAVSRNCSKKKNDYRDAITIAKCLASSAYKAVYIPDDKDEDVRDFIRMRDDHKTALKQIKQQLNAFCLRHGHHYDKTKWTGLHLNWLRKLELSKLQRETVEEYLVTYETLTSKITALDIRIEDIASEERYAEKVNKLKCIKGIKTHTALSFVCEIGDFNRFKSADKFAGFIGLVPGECSSGNTERMLGITKA

SEQ ID NO: 95482 - protein, 350 aa, unidentified
MRHVIGCDVHKRYSIFVAINVHGKLSKPTRVEHDRSSFRAFLESLPPHCEIAVEATGHWYWIVDEMERAGHQPHLADPHESKKRMGKPNKHDALDAGGLAILLHNGTLPESWIPPGELRDVRELLRTRMALRDLRTALKHRIHAAIDRYGLHNDNISDLFGKAGRDFLLHQLSALPPETHAMLRLELDAMDDLTPRIETIEARVAEVIVPSKEVQLLLTLPGAGQILAPLLWLEIGDVERFPRAENLASYAGLVPRVFSSGGHTYLGHTNRYVNRYLRWGFVEAATCAVRIHGYRDIHIGTLFQRLLPTRGYGRAIVAVARHLAEASYWMLRKRQPYRPPQPKLSSSRIG

SEQ ID NO: 95483 - protein, 341 aa, unidentified
MRCLGVDLHKRQFHVCYLSEGSCEHREFMMEELPVFLSTLEMEDQVAVEATGNTHYFVNEIESYVSKVIVVNPRQFRVIEDSIKKTDYNDAELLARFLSFDGLLPEVKLPQKEASQIKSLAHTRNKLVQLRTALKNKIHGIMTFHGILLKREALSSDKGLDRALSAAGLSASARFEVEILVEQIRSLNASIKKIDAELEDRGRKLKGHRNITSIKGVGDKSASILLSVIGDINNFPSRKQLDSYFGIVPKVRNSGDTVRHGHISKQGSKLGRTTLVQCTLIAIRYSPYLRSYYERLKSKKGSGKAIIATARKLLGTIYMLLSEDLIFEDFESGVLVKATHS

SEQ ID NO: 95484 - protein, 429 aa, unidentified
MKIIYPRVCGIDVHKQFIVAVICISESVDPIYLKKRFSTFHNDLIRFRNWLIQNDCQNVCMESTGKYYIPVYNVLESHISNIVVANPKWVRAVKGEKDDDKDAKWIADLFKFDIVRSSFIPQKDFRILRELTRYKYKLVNMRSSEKNRFQNALTSGNCKLDMVFTDVFGKSASNIIDLILSDNPYTDEDILSKVHKKCKASPDMILDSVNGTDLTPVQKSRIELVNDHIKQKSSKIQRLDKLIDLMIEPYEDYISFLCQIPGVSRNSAIIVLSEIGVDMNQFISTRRLTSWAGLTPSSNQSAGKKKSVRISRAGVYLKPCLVEVAHAAVKDTNHPYYANKFNKISKRRGKKRAYIAIARKILVAAYHMLLTGEIWNPADLAEVETPVEQRIKYVKNNLKSDIKQLLDIGLTVEELTLMIQQNANIIATQ

SEQ ID NO: 95485 - protein, 363 aa, unidentified
MNEITTVGVDLAKEVIAVCGADRSGKTVLTRVFRREAFAAWAVQLPPCVFGLEACGAAHHWARWLTSHGHTPRLMAAEFVKPFRKSRAAKNDRNDAEAVLTAVRQPNMRFVAVKSVEQQARLSWHRMRQGFSEERTALINRLRGLLGEFGVWRGRSAEVLTRALPELEHDEVLPLMVRRLLSEARPHLARLDEAIAGCEVEIKNHIKGNEVAKRLTAISGVGPLTAAAVLATVTDARDFKNGRQFAAWEGVVPRQDSSGGHTRLGHITKRGDTYLRGLLTQGARSALQAALTKEPLRRTRLQSWIVQLHARVGYHKTLVAIANKHARMIWAILAKGEDYDPDAWRRWSRTAPSTPPATSGVAP

SEQ ID NO: 95486 - protein, 408 aa, unidentified
MLNDYEYFAGIDWGSEKHRVCLINRDGQILAERWIEHSGPSLAELTVWLRQQTSDSTSLLATAIEIPRGAVVETLLEHGLTVFSINPKQLDRFRDRYSSAGAKDDRRDAFVLADALRTDMHCFRAVKLDDPYVIRLRELSRMDDELAQEQNRATNRLREQFHRFFPQLLQLSECADEPWLWALFEMAPSPLGAARLTEARIARLLRQHRIRRIAAAEVRAVLKTKPLTLAPGASEAAAEHALLLLPRVRLLQRQRTDLARRISALLDELATPAEGQQEHRDAAILLSLPGLGRKIAATMLSEASQAIADRDYHALRCYSGAAPITRQSGKKKIVIMRRGINERLRNALYHWARVSVVFDPQSKKRYAAMRACGHSHGRALRGMADRWLKILTSMLTTGTLYDQQRRAA

SEQ ID NO: 95487 - protein, 494 aa, unidentified
MKAKAGKAKAKHSNSSKRGAKKTARGAVEGMKIVNPHAGGIDCGAEEHYMAVSPQSVEPGEPFVRCFSAFTEGLDASVEWLKACGITTVAIESTGVYWIALCQKLEAAGIQVFLVNARHVRHVPGRKTDVKDCQWLQRLHSFGLLSASFRPEDAICRLRSLERHRLNLTWTAGAEIQHMQKALQQMNLHLHHVVSDITGLSGLRIIDAILAGQRDAVQLTKLRDYRVCKSTVAQMQAALVGDYRPEHLFVLGQNLQAYRFYQARIQECDVQIESHLQQLAQRFESSSALPAKLPEPEVHNDAQAQNPQPAKRKVKRKPQANEPKIDLADYLRRICGVDLTQVIGLNVLSVLLIVSEIGVDMSKWRSAKAFSAWLGLCPRNKISGRKVLDTRTCKVINRVATTLRLAAQSVGRTDTALGIFYRRKRAHLGPAKATTATARKLACLVYHLLKYKDQYREPDPTTYQLKVEKAILARIQKQAAALGYKLLPTALVPA

SEQ ID NO: 95488 - protein, 311 aa, unidentified
MIIHPDFAGIDICKWHLDVFDGRVGRPERFDNTAAQARKLAKRFKKQATHVLFEATGRYDRVLRDALIAQGLAFARVNPARARDFARATGRLAKTDALDAEALAAMAQSLDPARFVPASPERQKLAALQLRHDQLVAMRAQEKTRLEALDDAFIVKSINLHIALLTRQIALIDGRMVELEAACPELGKAASQLRSIPGIGPVASSVLVALMPELGSCSPGEAAALAGLAPFNADSGATRGKRRIKGGRTRVRKALYMAALATCARTNPFGAFYRRLIASGKPVKLALIATARKILLTANAIMRDNCTYKPA

SEQ ID NO: 95489 - protein, 343 aa, unidentified
MDQYIGLDVSLKDTAVSIRENRKRIWRGKCPSDPKALSQIIRKHAPHAKLVVFETGPLSTWFYHALTAEGIPAICIEARHAQKVLNETLNKTDANDADGLAQLAEAGFYKVVRVKTFDNMLTRTLVAARSQLVSISKQLSNQIRGLLKTFGLIVPKGEGRVFDANVRELLNGNSGLAAVILPLLDAWRDIRKRAANLDHQLLAASRQSRATKLLMTIPGVGAVTAVSYIAAIEDPENFPTSRSVGAWLGLTTRRYQSGEIDYDGHISRRGDGRLRGLLYEAATVLLTRTAARTECSLKTWGLKLRERLGFKRATVAVARKLAVIMHSMLKTGQAFNPLAGASA

SEQ ID NO: 95490 - protein, 336 aa, unidentified
MEKYSFFVGIDISKGHLDFCIRNSSVRLGFNRVPNDPGGIKEAIKWMRSFEGFRVKECLACLEHTGIYGLTVLETLHRLDFAVWMEVAACIKNGSGSLMRGKNDKVDASRIADYAHRFRADAKLWEPPRKEITLLADLMASRTRLMAVISKLAVPVNEIKSFKAKGHYEKIKDASKKTIEAARKEAKAIEKQILDIMMGDAVLARLYEVVTSVQGVGFVTATNLIIATNEFKYINDPRKLACNAGCAPFEHSSGTSIRGRNKVSHKANKRLKSLLHMCATSALQAEGEFKVYFDRKIAEGKNKFIVINAIRNKIIHRVCACVREDRLYTKFPKTVA

SEQ ID NO: 95491 - protein, 407 aa, unidentified
MIFVGDDWAQAHHDIYLCDEAGARLAARRLPEGIEGIGALHDLIATQASDPAEVVVGIETDRGLWVQSLVEAGYAVYAINPRAASRYRDRHTLSGAKSDPGDAKMLAELVRTDRHNHRQVAGDSDLAEGVKVLARAHQNLIWERTRHTNRLRSALREYFPAALDTFTELADRDTLAVLGRAPTPAEARKLTPGRVRTLLRTAGRTRNIDTRAQTIVDGLRADTLTAPDPVVAAFGATTRAQVAIIGTLNEQIGSLETELAAHFEQHPDTDIYLSLPGIGVILGARVLAEFGDDPNRYADAKSRKNYAGTSPITRASGTRSVALARFVRPTRLADAADQWAFCSLRNSPGARAYYDHHRTQGDSHHKALRALANRLVGILHGCLTHHTTYNEHTAWGHRNDQPDRIAA

SEQ ID NO: 95492 - protein, 467 aa, unidentified
MARKSKNMNSKNGRRVPQSLNVMQPHAAGIDLGSVEHWVAAPPLEDGTPNVEHFGTTTPELCRLAEWLKEQRVVTVAMESTGVYWIPIYEILESRGFEVLLVNARQIANVPGRKTDIIDCQWIQILHACGLLRGSFRPSDEICRLRALIRERNTMVEQRSDWIRRMQKCLDQMNVCVHHAVTDITGVTGMAMIRSIVAGERDPRVLARLRDGRCHKSEAQIAKELTGNWRPEHLFNLRQALKMYDQLCSVIEEYDSEILSYITAIQPEDSGDKSAPPPVSKVKAKNLAKRGHEPMRQALYRLSGFDLTTIDGIGADTASVIISELGLDFTAFPNESHFVSYLRLAPNLSISAGKKVPRKSKATTCTRIATALRMAALTLRNSRSALGALYRRVSRRKGASVAVFATARKLAQLVYRLICYGQAYVDVGQDAYEARFNHRRLKIYTKILKNMGFDVQPLTTQEVAPVA

SEQ ID NO: 95493 - protein, 352 aa, unidentified
MDATTVAVDLAKDVFEVALANRAHRIIDRKRLTRRQFESFLDGLSAGTMVVMEACGTAHYWGRRCQARGLAVRLLPVQYVRPYVRRNKTDRTDTEAMLEANRCAGVAPVPVKTVDQQALQALHRVRTQWQATRTGRINVIRGLLREHGCPVPVGARTVLARVTAILDDPARALPTVLRQTVAHLVEEVRSLEARVIAVDRELARVARAHPVATRLQQVPGVGIVTATAMVGAVGHIHAFRRGRDFASWLGLTPRESTTGTRRYLGRISKRGDGYLRCLLTHGARAVLLAAQRTARTSPHRLTRLQQWAVTVAARRGHNKAAIALANKLARIIWALWCHEADFHSPTVQTTAA

SEQ ID NO: 95494 - protein, 359 aa, unidentified
MAANLSKIDYSNKTIYVGLDVHTSKWYSTIICEDKISPKVFDANPEKLANYLKKHYPDAKYKAAYEAGCFGFWGQHELQALGIETIVINPADIPTSDKDKVQKNDKNDSRKIALALRNSMLESINIPTRTQLEHRALSRRRDDLVGKCTCVKNQIKSDLKFYGISYSEEFEKSGTHWSKKFVDWLGKIKFITVVGDNVMKSRINELNWLAEEIKLISKQLDELMQTEEYKEGYRIVRSVPGIGPIHGATFILEVMDIEKRFKRADQFHSYVGLVPSEHSSGDSRHIGHLSRRCNRFLRKIFVEASWIAIKKDLALNKYFEDLKKRGMKSTLAIVKVARKLANRLRCILKKKEEYKLNIA

SEQ ID NO: 95495 - protein, 425 aa, unidentified
MPYRIAGIDVHKKMLAVVVVDVEVDGDFHFTRQKVGTTPTDLRALADWLVEQEVEEVVMESTAQYWRPVWEALEQHWRPRRRAREGASRLSGTLHLAQAQSNRGPGGRKKDFPDAERLVKRLVAQELTLSFVPDAEQRLWRTVMRRKYQVTRNRVQLQNRLEALLEEAHIKVSSLVSDLLGISARRMLQALADGETDPAALAALAAPRLRATAEQLCDAFTAAPTLHPVYRRLLKLTLEDLRLIEDHLGQLDQQMAHLLAAHHEAVQRLAEVPGRGVDSAQQIIAEVGATAVTFPSPKHLASWMGACPGNEESAGVNYSHRCPKGNRQMRRVLNQAANAAVKARGSIFAVAYRRLVPRLGHAQTIGAITHRLCRLIWKILHERVRYEERGPAVSAEAKKVRARKMIRELRSLGYRVDLISPAPSV

SEQ ID NO: 95496 - protein, 461 aa, unidentified
MNKKHSNPKNRKSKKVALQEQWEKIHPHAAGIDIGAREIFVCVPSDRDHEPVRRFGTKTPDLEALAKWLKDCRVETVAMEATGIYWIGCFQLLEREGLKPVLVNPRQIKNVSGKKSDVMDCQWIQKLHTFGLLADSFRPADPYCVTRTYMRLRDDLIAGATAQIQLMQKALHQMNLQLSHVLSDITGSSGMAIIEAILAGQRNPLVLAELASLRVKSTKDEIAKALVGEWRPEHLYCLAQAHGMYLRYKTDIAQCETKLAEELEKLPNKVDPKLKPMPPKMDRKKSINEQLRLGLYCKFGVDVTAIEGIGPTAALTFLTEVGADLNAFASEKNFCSWLGLCPDNRISGGKVLSSHTRPVVNRLADVLRMSATALKHSQTALGAFYRRMIAKLGPAQGITAAAHKLARLLYSLIKCGHEYVRTGLEQYEKMNADRKMKALRKMAASMGVQISAPQHLANGVS

SEQ ID NO: 95497 - protein, 364 aa, unidentified
MFIIGCDYHPGFQQIACVDTDTGELSERRLAHREQAEQFYRELKQQNLSARVGMESSGHSRWFERLLQELGFELWIGDPAEIRTKRVRKQKTDRQDAQLLLRLMLENRFPRIWVPDAGNRDLRQLLWHRHRLVQMRTRVMNQLHVVPLNEGLRRKKALWRPAGRKELESIALAPWASRRRQDLLDLLDQLTPKIQGLTHALEEEVEKRPVTRRLMTHPGVGPLTALAYELVIGTPERFHCGKQLASYLGLVPTEESSGDRRRLGHISKQGNVLLRFLLVEAAQVTVRSHQEWRNKFFHLAMRRGRKIAKVAMARKLAVHLYWMWRQGCDYAQTQKFGSHAGEPGHLDGEQSITDVMIGHPAPCK

SEQ ID NO: 95498 - protein, 346 aa, unidentified
MKIVGCDFHPSFQQIAVLETSTGEIEQGRLCHNDGEAEQYYRQLEGPALIGMEAVGNSLWFEQLMQQLGHELWIGDAAQIRASYVRRQKTDKRDAGHILRLLMEQRFPRIWVPSAAERDRRQLLLHRHKLVGMRTRVKTELQHLALNQGMQKKRKLWSVQGRADLEKLSLEGWTRKRREDLLAVLDLVENQVEKLDDAVKEIAADDRQAQLLMTQPGVGPMTALAFVATIGDVRRFKRGKQIASYLGLIPAERSSGDKRRLGAISKQGNVFLRTLLVEAAQSAVRHDAEFRREYRHRCHQKPTGVAKVAAARKLAVRLYWMLRTQTPYAAAVHNEGSPSHPVVSVS

SEQ ID NO: 95499 - protein, 309 aa, unidentified
MKEELVYLGVDIAKSYLDAAIGNERGRFCNDTIGHRQLIKWVKQIKAAVQVICESSGGYERRLVRTLARARIKVSLVQANRVRQFARAAGILAKTDRIDAGVLCEFGKVMQPQTVSAATLEQEHLRELESQRRHLTRVLVMEHNRGARVSDASVMRLNRSLINQIKKQIEKLDLLIKERIEASPELSAKAQKLTLINGVGARTAALLLAQMPELGQLNRREVAALVGVAPFNRDSGKVRGKRAIYGGRRPVRHGLYMAAIVAAHHNPVLRQFYLRLRAAGKPAKLALTATMRKLLIVLNSALKPDLNYA

SEQ ID NO: 95500 - protein, 331 aa, unidentified
MYKFFVGVDVSKGWIDVSSTEGLSVNYAGRFKNSIAGFKEVISQLKKISSIERSEWFVCFESTGTYSKLLLQWLSSQEIACREENPLIIAKLPGLRRGKSDKLDAGFICQYAYEKREKVKPTQLTPPTITELKKLLSRRNLHVRHCAALKTSLKEHRAEFPTELLHQLEQQNKMLIEKHNECIAFIENQIEALVNSDEELSRNSKLSQSIIGIGPVITWYMIATTGNFKLFATSRKYATYGGIAPFPKSSGTKKGRDRVSHLANKQIKALLSNGALSAIRHDPEIRTYYQRKIKEGKVEGVVINSVKNKLVARVFAVVQRGTPFVKLGNYA

SEQ ID NO: 95501 - protein, 428 aa, unidentified
MTQSEIKSIEFAAYIGIDWADQKHDICLQEVGSKQIESLRLDHKPDSISNWVSELRQRFQGKPIAIALEQKRGALLYSLMHYEFIVLYPVNPQALASYREAFTTSGAKDDPVDAGLLQEMVRLHHNRLRPWIPDDPLTRELCLLVEHRRRLVDDRTRLTNRLQALLKQYFPQALDWAGELDTVRALDFLAQWPQLEALQQATPEQLRDFYQQHYRLREKLSPRLDEISRAQPLTLDKAVITASITMVQTLLEPLRGLIAGIETFDQQIKDCYQQHPDKEIFNSFPGAGAVLAPRLLAAFGVDRARYQSAEQIQCFSGIAPVTERSGKTKFVRRRLACPKFVRQSFHEFANSSIKWSRWARAYYDQQRRRGNKHHEAIRSLAYKWTRIIDRCWQDHEPYDESVYIAKLELRGSPLAKLIPTAAEQAVSS

SEQ ID NO: 95502 - protein, 360 aa, unidentified
MISKDFKVFVGVDVSKDSFSACALTNPQNILFEAKFPMSHSGFEDFTKRLSSFPKNSILIAKESSGCYYINLFAYLTQKDFSCIVLNPLLVNKFWTATLRKTKTDRIDAKAIAIMLYHIHEQLPDRSFLPKDFRDIARERERIAQRIATVKNDIEKLLSVLFPELERIVNIYNSSILKLLSEFPSAHAIKNASIEQINKALYTKTAGRPVNVSAQKIKSVARESIASYWPVKEMILVQKIRELFFLEEQLEFFTNLLRQFCKEASLCQDIEILKSIKGVGEITAMHFMAEVGDIERFSSPKKLIAYCGIDPTVYESGRFKGKSKISKRGNRHLRRIVWLMAVSVVMHNEYFREYYNKEKG

SEQ ID NO: 95503 - protein, 348 aa, unidentified
MRFYTSQHAFYCGVDLHARTMYVCVLDQAGEVRLHRNLPCRPDAFLQAIEPFREDLVVGVECLFCWYWLADLCAAEGLPFVLGHAYYMKAIHGGKSKNDRIDSYKIAALLRGGTFPLAYVYPREMRATRDLLRRRLHFVHKRAELLAHIQNTSTQYNLPPLEKSLAAAGNREGLLEHFGDQEPVQMSIAADLALIDTYDETIHELELFLRPAVREHDGSSYHLLRTVSGIGNILALTIVYEIHTIDRFPDAGNFLSYARLVKGDRGSAGKKGKPGGGKMGNVHLKWAFSEAAALFQIANPKGQKLVARLRKKHGRGKAMGVLAAKLGRAVYYMLKRKEPFDLNRFVTA

SEQ ID NO: 95504 - protein, 320 aa, unidentified
MEAVLGIDIAKAKFDVALQFSDGRVRRKSVPNTPAGFTALGAWLTQQRVTRVHACLEATGSYGEALATWLHDAGHRVSVVNPMTIHAFAASRLSRTKTDRTDAALIAQYCATQHPAPWQPAPREIRELQALIRRLEALQDMRIQETNRLSSGAVTPAVVRSLETVIATLSDEITAVQQQIRDHFTQHPGLRAQRDLLTSIPGIGDSTAAVLLAELFDKQYRSARQAAAFAGVVPRIAESGTLRRRGRLSKIGPSRLRKALYFPALAGLRFNPSLQALRTRLRAKGKVPMVIVGAAMRKLIHLAYGVLKSQRPYDLTIVRA

SEQ ID NO: 95505 - protein, 371 aa, unidentified
MEESSKTLYVGLDVHKESIAVAYAPEERGTEVVSLGAIGTRQCDIDKLIRKLQSKGAPLVFVYEAGPCGYWLYRYLTRQGLSCHVVAPSLIPRKPGDRVKTDRRDAVMLARLMRSGDLTAIYVPTVEDEAIRDLSRGREDAMRDLKATKYRLKAFLLRQDIRYEGRANWNAAHLRWLSEVVCPTPAQQIVFQEYVRAVTEQQERVQRLETELHEHVKTWRLFPVVEAIQALRGVELTGAVILIAELGDLTRFDAPRQLMSYLGLTPSEYSSGERRRQGGITKAGNTHARRALVEGAWAYRYPAKVSRHLQLRLEKLPAEIQAISWKAQVRLCKRYRQLIARGKHANQVVVAIAREMAAFAWAIARTVPLTP

SEQ ID NO: 95506 - protein, 402 aa, unidentified
MAAGQVWAGVDVGKEHHWVCVVDDNGTVMLSRRLVNDEQPIRELVAEIEQLADEVSWTVDLTTVYAALLLTVLADAGKPVRYLAGRAVWQASAVYRGGEGKTDAKDARVIADQSRMRGTDLPVLHPDDDLITELRMLTAHRADLVADRTRTINRLRQQLIAVCPALERAAQLTQDRGWVVLLTRYQRPKAIRQSGVRRLTKMLGGAGVRNATTIAAAAVAAAKSQTVRLPGEDVAAGLVAELAGEVVALDDRIKSTDADIEDRFRRHPAAEVITSMPGMGFRLGAEFLAAVGDPALIGSADQLAAWAGLAPVSKDSGKRTGRLHTPKRYSRRLRRVMYMSALTAARCDPASKAYYQRKRDEGKRPIPATICLARRRTNVLYALIRDNRTWQPDSPPITKSAA

SEQ ID NO: 95507 - protein, 364 aa, unidentified
MSRKKTRLQSVTEPPQVRPDVAGIDISPEVIYVAVDPRHHMPIRRFGTFTGELRRIADWLRECGVRSVAMESTGVYWIPLYQVLEECGIEIYLVNARHYKNVPGRKSDVCHSAWLQYLHAVGLLQGSFRPEQQVCAFRAVLRHRQALVQFASQHIQHMQKSLDQMNVQVHRVLSDITGVSGLAIMDAIVSGERDGQRLAALRHGRVQASEETIVAALEGDYRAEHVFTLQLSLESYRHYQSQIATCDRRLRTMLDQFEGRSDCQQAPPPARKKMRTPKEEQLRAKFFRIFGTDLTAIPSVNVGTVEVLLGEVGPDLRRFRSAGAFANWLGLCPNETITGGKVLASAKSGSRGTRAHQGVCPHKR

SEQ ID NO: 95508 - protein, 345 aa, unidentified
MEQITRIGMDTSKHIFQLHGVTAAEEPALRKKLRRNQMVRFFEQLAPTVIAIEACGASHHWARLLQSFGHTVKLIAPQLVKPYVKRGKNDAADAEALCEAASRPTIRFVPVKTAEQQAALMLVGVRDRLIRNRTQLANAIRGYAAEFGLTAAKGKAHLDPLLERIRADESVPALARELFAAQAKEYAQLRAQIDEVDAKLMAWHRADECSRRLAKIPGVGPIGAVLLKMKTPAPELFRSGRQFAAWIGLTPKDHSTAGKLRLGTITRAGDEGLRSVLVVGATAVIQHVRRGGRSSPWLTELLKRKPPKLAAVALANKMARIAWKLMVTGDNYAAKSAPAALAGMA

SEQ ID NO: 95509 - protein, 299 aa, unidentified
MDRITRVGVDLAKNVMQIHAVDSAERVVVRKAIPRERFVSWFANLEPCLIAMEACGAAHYWARKLHALGHEVRLIPPQFVAPYRKGGAHVKNDALDAEAVCEAASRPHMRFVPVKSPAQQSVLVLHRMRTGFVEERTALVNRLRGLLAEFGVCLPQGIRRLHEHLIERIEDGSNELTGPARLALLRGCEQWQVLDEQIAWFDRQIAEHANRDPQAQRCMDVCGVGRLTASAAVATVVDARQFRNGRQMAAWLGIVPKQKSSGGKQRLGSITRQGNDYLRTLLFQGARSAVLTAHRRDDC

SEQ ID NO: 95510 - protein, 430 aa, unidentified
MPKQHNKVVSLPVIESNAAGIDIGATEIFVAVPPDRDPEPIRCFPTFTVDLERLADWLQQCQIRTVAMESTGVYWIPLFQILEKRKIGVRLVNAQHVKNVPGRKTDVSDCQWIQHLHSVGLLRGSFRPDDEICALRSLWRHRDNLIQLATLHLQHMQKALDQMNLQLHHVISDLAGTTGLAIMDAILAGERNPQKLAQLRNRHIHASEETIMKSLVGDYREEHLFTLRQSLKSYRHYQELIQEVDLQVKQMLQRLPSNTAAGDEAPKGDKIRRTPWRNEPPQLRNDLYRAFGVDLTEVPGINSLTAQMLLTEIGPNLSRFPTAAAFCSWLRLCPNPKISGGQVLSSRTQPTKNRVALALRMATQGLHRSDSYLGDYFRRMKARMGAPKAMTATAHKLARIVYHMVTTQQECKRGKFPSGERAFRRMSMSA

SEQ ID NO: 95511 - protein, 362 aa, unidentified
MVRHIFVGIDLGDKNSVARVAVDREKSERFGFINTRSGRQRLFGEVEKRAEKAGGAEIVMAYEASACGFVLRDEAAARKIRCEVLAPTKMEKSVDQKKHKNDDRDADDVVERLRGHFLAGNRLPVIWVPSLQLRDDRELTRLRIDLTEKSTQIKAQIQMLLKRFGVEKPSDVGKGWTQKFRHWLLALCTSGPLGGGTRQTLESLLRQLKFHEEEIERMEKPIYELAREARHKPIVDALTREKGVGVLSAMTFSTEIGYAGRFSRGRKVGKFTGLTPTSHESGEQNDHKGHISRQGPWRLRKMACQSSWVHILHDEDARKFFQKLVERNPKKKKIAIVAVMRRLVVRLWHRMRQAELEMAKAA

SEQ ID NO: 95512 - protein, 332 aa, unidentified
MSVYVGIDVHRKRSQVAVIDQDGQVLANRNVHNGVTPILSVIGGLPEGTKAAFEAAYGWGWLVELLEDYGFEPHLVHPLQCKAIASARLKNDKVDAAILAQLLRADLLPEAWIAPLEVRQLRALLRHRIQLVRLRTLLRNRIHAVLADHGHGRPEGCWSGPGRAWIASLDLPAVSREVVEDALALIDALESVTGRLDAEIRGHARSDPRVNVLTQLPGVGPFTALVLLAEIGDITRFASARKLASWAGLTPTVRGSDRTVRHGHISKQGSVWVRWILCEAAQKAKRHPDFAASYQAIAGRRGTKIATTAIARQLLTRACHLLTDAASAGAPS

SEQ ID NO: 95513 - protein, 377 aa, unidentified
MSSLLFVGLDVDDKAFHLCGVTGGGEQKFQFSCKPSVGALATKLGQHTGKDHEVKVCYEATYLGFSLQRGLAKRGFDCDVIAPSLVPVVPGERVKTNRLDCQKLAVYLSKGELVKVHVPSPEEESIRDLVRTRRFLSDQLRRHKQHVLSFCRRQGWDYRAESGKKASYWTEVHFKWLERWIKSGEFPANRFTLASQVDQVKHLQIQIENFDSEINRIAKRPEYRRQVEALMCFRGIGITSAMTFITEIGDANRFPHPSKLTSYAGMDICEYSSGHEKRWSITKMGNRHLRTAAIECVQSAAKPPRISKRLKLQREGVDKTFIEVADRCAQRLYQKSSRLLFSGKQKNKVTVACARELLSFIWESLRKAASSLEQVAA

SEQ ID NO: 95514 - protein, 342 aa, unidentified
MKIIGCDFHPSFQQIAMVDTETGEYTEKKLIPAEARLFYTELKGEVVIGMESCGNTLWWERLLAGLGHELRLGDAAKIRAMEVRKQKTDRRDAELLLRLLLEGRFPQLWVPSPEQRDTRQLLLHGHKLVKMRRQVKNELQHLALNQGVQRKSKLWSAAGRKLLEELPLEGWTARRRQDSLQLLDDLDRRIAELDIAAQQEAEKNPVAQLLQTHPGVGPISSLALAVTLGEIERFACSRKVVSYLGLNPTEHSSGGRQQLGGISKQGNAMVRSLLVEAGQNAARYVPELKRAYQRLKHRKHSGVAKVMVARKLAVRLYWMWKTQQPYSAARTQGSPSRSVVAA

SEQ ID NO: 95515 - protein, 458 aa, unidentified
MQIIFFSPLKKKGIFMTKKFKALQIKRQFISDKIIIGIDPGKNKHQAAIINHYGLPISNSFTFANTKPGYLKLLKKVSQQTAKSNDKNIIFSLETSCNLWCTLSYFLRSSGYDVLLVSPLTTKHSRPLINHDFSRTDPKDALLIAGSARDGYFDFYQDYSSDIKAMHNLSIAYDKLRKNYVQQRNRIHSLMDRVFPEFYKVLNLDTLTGQYLLSKYFLPSDFIDMDINEETKAIEKISHKNHGQQTLEHLKELATESIGIPMEESEVLAERLTLDTWLALLGTIEEKMKQIMNEIINLAKQTPYFKILTSIKGISDTLAALFIAEMRDISLYKHYKQIEKYAGYNLRQSQSGNYIGPRHINHIGNRRLSWILYRMTEETVKYVPEVRIKFVKRQLHRCSYRKNIIASSGNLLRLIMSMVKAKRCYEYFDNGCFERLYVLEKKYRQMVEIKKRRFNQVA

SEQ ID NO: 95516 - protein, 380 aa, unidentified
MENRNEIAPATVSDNATCYVAIELSSMSWIVAVRRPGSGKVSIRKLAAGDAAGVVALADRARASGSSRVLCCYEAGRDGFWLYRYLVARGIECRVLDPASLPVNRRARRAKSDRIDVHMLLRGLIGLDGGDRDACRPVRVPTVADEDARQTHREREALLKERVRHVNRIKALLATQGVTGYEPSRRARAELATLRGPDGAALPAGLMSRLARELARLAVVVEQIAAVEAVRDGAIAAAGDAAPGDASVKAARLVALKGIGPQIATVLAREVFYRSFDNRRELAGFTGLCPSPWRSGGMVREQGISKAGNARARTCAIEMAWLWLRWQPRSALSVWFTERVGGARGRVRRIAIVALARKLMVALWRSVETGLVPDGAILKA

SEQ ID NO: 95517 - protein, 357 aa, unidentified
MAEGSWVGLDVHARSTVAGVLDGRSGELRTLRVPPRSGQTVEWLRGLPQPVRVAYEAGPTGYGLARACAEAGIACTVAAPSKIPRAPGDRVKTDRRDAERLARLLRLGELVAVRVPEPRVEAARDLVRAREDARGDLMRARHRISKLLLRHGIVYDASAWTLAHDAWLRRQRFPSRPLALAFDECYGAVLQAKTRRDALDAAIGEIASEPPFAEVVGRLVCLRGVSTLTALALTVELGDWQRFRPQSLGPFLGLTPSEHSTGERRRLGAITKTGNSHARRLLVEAAWHQRRPLRASAALERLRQGQPAAVRSQADQSARRLHQRWHELERRGKRRTIVAVAVARELAAHCWALATMK

SEQ ID NO: 95518 - protein, 292 aa, unidentified
MTKVRTWVGLDVHASKVVACVVDAESGEMTVRHLPGETAEVVAFCAVLPVPACAAYVAGPTGFGLARSLNTAGVACVVAAPGKIERPAQDRVKTERRDAERLVRLLMIGGLVAVRVPSDEEEALRDLVRAREDVRGDLMSARHRLGKMLLRHDICFEDTTSRWGQRHRAWLARLDLGQPGAQSTLGDYVGAIDALVLRRDTLEAAIAELVPSSPVAHTVARLRCLRGIDTLSAVGLAVEIGDFARFQRAGQLMSYVGLVPAEYSTGTTRRQGHITKTGSSHARRLLIEAAWQ

SEQ ID NO: 95519 - protein, 404 aa, unidentified
MFKFGIDWSEQHHNLCIRNSKGAIVSQVEFKHTLAGFQRFDDERRKLGVPPSECLVAIETAYNLLVDFLLDRGYLVYLIPPQATKGYRNRQRSTDAHTDDTDAALLSSRLHTDLDSHRRLQPNSALTQQILAQVRLIDLLRRSIQRQCNQLRAVLFRVYPQALGLFGKLTAQINLHFLMAYPTAQEAQCLTRAAFEAFCREHRYGRANLISRRYAHLIEPAPEANPIAVVAYRDQIRILAELLLPQVLRRTEALSCLAQLFSQHPDAFIFESLPGAGELLAPGLLAKFGDHRDRFPTPNSVQALAGTSPVTKKSGKRKVVIFRRGCDREFRRVVQQFAKASVRQSGWALAYWRDVRPRCRSDSDAYRRLANRWLAIIWRMWQDGRAYDESYDIQQRAQRRRPRS

SEQ ID NO: 95520 - protein, 341 aa, unidentified
MKNLFIGVDFSKEKVDVAIIFADGLTETAARVFNEFKTTVSGYKQLIKWVEQNSYGIDSSLWLFCGENTGDYSKGLCNFLYGKGYDMWLENAKSIKDASGLRRLKSDRADASMIAEYAMRNYDKAVMYEPLSESLAQLRELFLYRQMVVRHRCSFQVRRGEKRLTMEKSPIKTMISQSGRHIVSELNKEVEKIDKRIAELIKSDEELTEVFTIVTSVPGIGTQNAVCLMVYTDNFRRFNYDSRKIACYYGIAPFGKDSGTSVHSDPHVHYMANRQIKAMLTQAALAAVNFNPVMARYYMRLVERGKKKQVALNNVKNKLVHLITAMVRNRQLFTTEYKITA

SEQ ID NO: 95521 - protein, 439 aa, unidentified
MTSRCTGTDEPLYRDRVCGIDIGKAELYATIRVPSDNHPARRAAETRSFPTTKRGVLALADWLRCWQVPALVMEATGDYWKGPFYRLEAEGFDCVLADARQVKNLPGRPKRDPSDSAWLAACFERGAVTPCFVAAPEFRVIRLHTRYRRDLTDERSREKNRAEKLLESAAIKLSSVVTDLHGVTGRDIMNHLIAGERNPKALAQLARARARRKISELEAALDGAEFFTPEHAALLTAMLDRIDRVNEEIARLTEVIDRLLAPYEEQLQQAESMPGWGRRSAQDAVAETGVDMARFPDGAHLASWAGRTPLDNSSGKRQGKAKVKKGNRYLGGLLGETAVAAGKTQTREGARYRRLSRRRGKAKALVAVGNTQLKVYHALLSHPGTRYQDLGPDYYERRASTSRQIAHHVGKLGALGFEVTLCRTPGPDPEPGQAATPAA

SEQ ID NO: 95522 - protein, 354 aa, unidentified
MNTTQNSTKSKIVKVIGVDLAKDHCDIIGYDENGKICLRLDGCSYAKLREILANLPQAVVLMEACKGSMFHARSIADLGHEVRLVKGADVKALRNVNHKNDLRDAAYIANLYFVPGIKYVYIKSQQQQSLQFLQNEYKSLQELRIQVGNQIHAGLEEFGCPVRKSSKFIKTRMVAHLEKHAELIPEDVMASFERRREIWLNLLQQEEEAKRRLEQVAATDANAERIMTVPCVGPQTAVGLLVHVGVDFGRFKNSRQFAASLGLVPKQNSTGGNNTLNHITKCGPKSLRSNLVQCAQLVLMYAEKWKGNFGDWVRKMRDSGKKHGVIVCAIAAKLARIIYRLMKDKVDYTPILSC

SEQ ID NO: 95523 - protein, 423 aa, unidentified
MNTHWNKITHFAALDWSSDHHDICVVEQSGAIVSEFRFAHTAQGWNEFREKMKAYPANTPITLETSSGPAVDQLLNGHWPIYPLAPTASALYRQRKAPSGTKTDRHDAWAMADALRTDGHAWRVLLPQDEATAALRLLCRDEIALIEQRTALVNQLQATLRDYYPAALEAFEDWTQRSTWAFIQRFPTPGLLQSAGKRKWESFLHAHHLWRADTRQRRMDIFGKGNAMPARPATVEAKQLLAVSLTNVLTTLQKQIDEYRRRIQDAFKAHPDHGIFGSLPGAKQVLGPRLLAEIGSVREQFPDAESLMCMAGTSPVSYQSGQINKCRLRRACNKVLRATVHLWANASRFTSEWAQAYYARKRTEGQSHASALRCLGKRWLKILWKLWQEGQAYEEAKHLANLRQRNSLTIAAMSAKKILPAQP

SEQ ID NO: 95524 - protein, 339 aa, unidentified
MKVSTLGIDLAKNVFQLHGVGCNGQTVLKKKLTRDKFLPFLMQLEPCLIGMEACASSHHFARVLRQYGHEVKLIPPQYVKPYVKTNKTDAADAEAICEAVARPNMRFVQIKTAEQQAILVLHTERNILIRERTACANSMRAILAEFGIIMPRTLSQLYKKIPEILEEYDNELSPFVRCSVARQLEPLQGVEDQITFIEQELSRWAKTQPACQRVMKVPGVGLMTATYLVASVGNGQQFHSAKQFAAWLGLVPREFSSGGKQRLGRISKRGDRYFRYLLGHGARAVAAVIERHKDNMPWLYRLLNKKAYNVAVVAQANKTARILWSMLVHHTEYRTLSAV

SEQ ID NO: 95525 - protein, 440 aa, unidentified
MTIRKREDEVFPNAAGIDVGASSHWVAVPAHRTEESVREFGAMTDDLSALADWLLACGVDTVALESTGVYWIPVYEMLEQRGLKVWLMDARQMKYVPGRKSDVQDCQWLQKLMCLGFLRAAFRPDAEVCVVRAVARQREVLLTEQARWVQRMQKALVQMNLQLTEVLTDVMGLTGQAIIRDIVAGERDPKVLARHRHSRVKASAEDIVRALTGNWREEHLFVLAQALAMHDDIARHLAQCNLKLESLLVGLGQRTIDLGRAPRAGSKLREAFDARQTMANWAGVDLTRIDGLGLTAVMKILSEIGPDLGRFANVKHFCSWLGLCPGTKISGGKVLSAKTKRSVNRVRQVLKMAAMSLSHSDSALGAFYRRMCARMDKPRANTATAHKLARMVYFMLTRGEDFVDQGQQRYEEQQRQRSIAALKRRASALGFQINPTSATT

SEQ ID NO: 95526 - protein, 291 aa, unidentified
MEFFCGLDVAIEETAVCVVDDRGEVHLTVKVATEPEALFAVLKPFVARLRRVGHEAGSLSPWLHPELLKLGLPVICLETQHVRAAMSAQRNKTDEKDALGIAHIMRTGWFRAAHVKSEECYRMRLLLTHRRNLKRKFLDLENAVRHSLKSFGIKLGGTSRGRFDQAVREAAADNPLTAELTSRRWQSGTSIDVKGRISKAGDADVRRALYEAASGLMTRFKGKDKVKTWGQQIAKRSCHRKAVVAVARKLAVIMHAMWSDGTFYVGDAAEAETDAAKRAQIKARKHLGAHA

SEQ ID NO: 95527 - protein, 355 aa, unidentified
MARVAELAVAVIGGDTHADSHTLQIAAPSSAPIATGTFDNTEQGHAQVLAWLIEHLPPAPQQPAGLVVVGLEGTRSYGVGLARALSAAGLLVVEVDRPARAGRRGRGKSDAIDARHAVLQVLAMDADRLPTPRADGDREALRILLTARHDLVTSRTRANNRLVALLRTGQDQDRTLLAASSTTASLVQAVLRRRHVRGLTREQVVRREEARRLARAVQSATAELKTNLQQLAGLVGDLAPALLDKPGVGPVSAAQVLVSFSHTGRVRNEAAFAALAGTAPLPASSGRTTRHRLNRGGDRALNGALHDIARNRMTHAPRTRHYTARRRQQGLSDREIRRCLKRYISRELYRALDKT

SEQ ID NO: 95528 - protein, 414 aa, unidentified
MPYKIAGIDVHKKVLMVVVLDASTPEEKPERRRFPTMPSELRRLSLWLREQGVEEAVMESTAQYWRSVWLELEPYMRLQLAQAFSNRAPRGRKHDFKDAERLVRRLIANELILSFVPTGEQRIWRNLTRMKLQLTRDRVRLQNQMECLLEEMRIKLSIVVSNLLGASGLRILRALAEGETDPKQLAQLGDERLKCTEEQLVDALTGRAQPLHRAMLGLQLERLQLIDRQIAQLNGMIAQAMKPHQEAVMRLAEVPGLGADSAQQIIAEVGVQASTFASAAELTSWVGTCPGKEESAEENHSSRSAKGNKYLRRVLNQAAHAAVKKNGSYFQAVFRRLLPRLGYQSAIWAVAHRLCRVVWKILHEGVRFIEQGREPDPQAKKKRAQMLARALRKLGYEVAITPINLATAEHGMHM

SEQ ID NO: 95529 - protein, 355 aa, unidentified
MKTSGLDVHKDKIFCAIYNGKSFSEVKEFSTTIHSIRSLGEYLRSEKVKRVAMESTSSYWVPVWDVLYEMEFEQKLVNPLHIKQMPGRKSDVKDAQWIAKLLYQGMLSSSLVPSPLIQELRTYTREYRKLVDQRTKVITQMDRVLVMCGIRLSSCISNMCSKSAIEIVSALIDGVTDPDLLVSKVYGNRKNKESGKLKECLTGNMKEHHRIKLMTCKQQYDLFEAQIVFYLKKMQDFCAKHFSEDVSNLTTIPGISTISAIIIIAETGGDMSAFENSGKFTGWTGLRPRNDESAGKFKSTATTKGNKHLRAIIVQVGWGASRCKGSYFMDKFQKLAMRKSRKKALVANDRYFGRA

SEQ ID NO: 95530 - protein, 354 aa, unidentified
MSQTLNAAIAVVGIDIGKNSFHIVGHDERGAIVLRQKWSRGQVEARFANMPPCLIGMEACVGAHHLSRKLRAQGHDARLMPAKYVRPYSKGQKNDFRDAEAIAEAVQRPTMKFVATKTADQLDLQALHRVRERLISQRTGIINQIRAFLLERGIAVRQGLRFLRAELPRILATPPDVLSPRMVRIVEDLAGDWRRLDERVERLSDEIEAIARLDAGCERLMSVPGIGPIISSAMVAAIGAGDVFTRGRDFAAWLGLVPKQISTGDRTILGKISRRGNRYLRVLFVQAAWVVLIKPKIWERHGLKPWIEAAKKRLHHNVLAIALANKLARIAWSVLARGRAFEARKMDQAANQSA

SEQ ID NO: 95531 - protein, 426 aa, unidentified
MRVLYDRVAAIDVHKDMVKVAIRVPGVKRGTRKTDVLEFRTFYGVLQAMARELRGRGVTHVVMEASGVYTDPVYYALRELDFAEVMVINPAHAKALKGHKTDAKDAIRLLDLYECGLLSGSYIPDPDLREVRDLARYRMKTVQARTSEIQRLQKTLETAGIKLSSVVSDVTGGSATAMIEALISGERRGSVMADLAQTRMRTAGKMADLSMALTGRFTDHHALMCRLHRDRIKIFDDAVKDLDAKIAPRVARYAREAGLLKSLPGFGDVIVAGWLGAIGPAPHQHFATASRLASWATICPGNYMSARKSKGGRTGDGGAYIKPLLIQAAWAAVRVPGRLQARFHRLVRKFGGPRNKGAQKRAITAIAHTLLKIAYSVLKTGKPYADLGADFYTRRESPDARQHYLMRQLQKLNPGCVITITPAEAA

SEQ ID NO: 95532 - protein, 343 aa, unidentified
MLSITTIGLDIAKSVFQVHGVDAGGQVVVRRQLKRRYVLAFFQKLTPCLVGMEACASSHHWSRELQALGHTVRLIPPAYVKPYVKRQKNDAADAEAICEAVTRANMRFVPTKTLEQQSGLVLHRARHLFIRQQTAVINAIRAHLAEFGIVATVGRHGVEELLNVVADPNDKRIPEIARACLSALGAQLRGIKEQILEFDRLIRAWHRSNEISMRLDEAPGVGPVLATAVVAAVADPKSFRSGRNFSAWIGIVPRQHSSGGKNRLGNISKQGDRYLRGLFVAGALSVIRYAKIHGTKHRPWLTALLARRPTKVAAIALANKIARMVWAMMARGERYKEPFALAR

SEQ ID NO: 95533 - protein, 322 aa, unidentified
MSQPNPLCVGIDVSKATLDIAASSDVAQFTVSNDSDGFNAIITGLRRHSVALVLMEATGGLEVAMACSLQAEGFEVAVVNPRQARDFARAMGYLAKTDRIDARVLTQMAEVINRHPERKRFIRALPDAERQALAAMVVRRRQLIAMLVAERNRLHPSHPQNKKSINTNIKALEDELVRLEKEMDSHIRNHFKEIAERLSSIKGVGTMTVSAMLAEIPELGTLSRREISALIGVAPVNRDSGTMRGRRTIFGGRAGVRSALYMAALVATRFNPVIKTFYVRLLAAGKAKKVALVACMRKLLTILNAMLRKNEEWDESYHHVAP

SEQ ID NO: 95534 - protein, 372 aa, unidentified
MKQTIVYVGLDVDDTQYHGSALDKNTGEAIDFKCRPTLKGLLGQLDKLRKHFPGCTLRLCYEASYIGYTLQRDLAEKGHHCDVVAPTSIPNPRGKQIKTDRIDAAQLAQFYANDLLTLVSIPERELEQDRDLMRSRQNLLQQQTELRKHIQALLRRNGLHYKAQTQNKTHWTKHHYCWLERTLDELSGSLKVNLELLLRQLKGLNSVLADYGQQIEALAKTQRYEKPVQALTCYKGIKNIFALTMITEIGDVKRFPHPRQLMSWIGMDIREYSSGGKHNRFGITKHGNRYLRTAFIEANQRGYRTARVSKDLKARRAHTAPEMVDIADRCLRRLNKKGNRLLIAGKHPNKVKVACAREMVGFVWESLHKAAA

SEQ ID NO: 95535 - protein, 314 aa, unidentified
MESPLVYVGIDVAKDHLDVAVRPTATTWQVPNTEDAFPALITQLQALAPTLIVLEATGGYEHAAVSALAAADLPVVAVNPRQVRDFAKAVGILAKTDRIDAHVLALFADRVRPAVRPLPAADTAELTAVLARRRQLLDMLTAERHRLAQARPPVQRDLRQHIHWLERRLKDLDKDLTRRIERSPVWRAHEDLLRSVPGIGPVVARTLLADLPELGHLPRRPLAALVGVAPFNDDSGRHRGRRRIWGGRATVRAVLYMATLVATRCNPPIRAHYQQLVAAGKPKKLALIACMRKLLTILNVMVRTGQPWQPLITE

SEQ ID NO: 95536 - protein, 450 aa, unidentified
MGKTRPQVIEDEEHQRVFRRVAAVDVAKASGMVCVRLPGRDGRPRGSKVWEVPALMGAVTELGRQLMRDKIEMVTLEATSDYWRIWYYVLEMCGLAVQLVSPAQARNLKGRPKTDKLDAMWLARLTEWGMLRPCFVPPAPIRALRDYTRARADLVRERTRCWQRLEKLLEGALIKLSSVASKLTTLSAQDMIRALISGERDPRVLAGLARTRMRAKHDALVEALTGMFDSCHGELAQLELDQITFLDQRISQVDDSIHATLTEIPAAWGIDADGSTGPQAGTGPSPAVLPAAARLAEIPGLSLDLAAAIIAETGLDMTRFPTSGHLVSWAGLCPVARQSGPRARAGKKGHGNSYLRGYLGQAAIGAARTTTFLSERYHRIARRRGKAKAQVAIARSILVIIWHLLNDPAARYTDLGPGYHASRINQDKKIRNHVRQLQALGLEVTLTPAA

SEQ ID NO: 95537 - protein, 401 aa, unidentified
MATMQANVQRVKRFRELKATLRTDRSRLLVGLDIAQAEHVAQLRHAHTRVVVPTLTIPNTRQGFATLWARIEQAQRATGCREVVCGLEPTGTYHQAIASFLEAQGADVLLLSSSVAYWHRRLQDGTWDKNDRKDAANCAELLEEGKVLFYSQPDGPLAELRRLVKCLRRARRELAACKGRWRTTLRPALGPMGEPLPHRLRAELPEVLQAWEPPAPGRPAVAKGRLPLGLATACADLAAQVNAVQTRIRALEQACTPLAERLPAYALLRTIPGVGPTVAAILLAEIGDVAWFTKFSQLRKLAGLDIIRVKSGQFTGQWRISKCGRGLLRWALYQAARGCARTAGGRARLAALTGKRAGDRYAGLKATVELAAKLLRVVWGVWRSGTPYDPQRAGGLQRQPR

SEQ ID NO: 95538 - protein, 338 aa, unidentified
MKLYGGIDLHSNNCVINLMDENGSVVFKKRVANSLDAILLIFQAYQEAIVGLVVESTYNWYWLVDGLMEAGFKVHLANTAAIQQYSGLKHGDDDSDAHWLATMLRLGILPEGYIYPKEERMVRDLLRKRLQLVQQNTLNLLAIQGLYIRHLNVALNNNKLKQLTQEKLALDFSDGNVRMAVASNLLMHNCLTGQINIIEKSLKQQLKLREEFVQLTSIDGIGLILGLTIMLETGDITRFNNVGNYASYCRCVSGARYSNGKKKGNSNTKNGNKYLAWAFVEAANFAIRYNETVKRYYQRKLAKSHPAVAKKTVAHKLARACFYVLRDQVAFDVNKAFG

SEQ ID NO: 95539 - protein, 410 aa, unidentified
MKVAGIDVHKKVLMVVVVDASRPEEKPARRRFVTMPSELHRLLTWLREQGVEEVVMESTAQYWRSVWLELESHMRLHLAQAFSNRAPRGRKHDFKDAERLVRRLIADELILSFVPSGEQRIWRSMTRMKLQLTRDRVRLQNQIECLLEEMRIKLSIVVSNLLGASGLRILHALANGETDPRKLAQLGGERLQCTEEQLVDALTGRAQPVHGAMLALQLQRLQLIDQQMEQLNRMIADAMKPQQDAVIRLAEVPGFGVDSAQQIIAEVGAQASTFASAAELTSWVGTCPGKEESAEQNHSSRSAKGNKYMRRVLNQAAHAAVAKKGSHFQIVFRRLLPCLGYQSAIWAVAHRLCRLVWKILHEGVRFIEQGAEVAPREKKKRAQMLARALRKLGYEVTITPINQLAPKPVV

SEQ ID NO: 95540 - protein, 422 aa, unidentified
MVRSIGLDVHRDFCEVAILDSCGGRARGRVATTPQDLELFAQSLGADDRVALEVTGNAWEIARILEPHVAKVIVVSPSDTGIRQARAKTDRLDALALAKLLAAGSLDAVWMPDEPVRVMRRRLARRAQLVAARTRAKNEIHAVLVRRLKGRPPASDLFGTRGRQWLAGLQLPVEERESVDAGLRHIAFLDGELEQVEQLIAQQALGSPQVRRLMSVPGVNVTVAATFLAAVGDIRRFPTPGKLVGYLGLDPKVRQSGEGPARHGRISKQGSGPARHALVEACWSTVRQPGPPRAFYQRVKARRGHQIAIVASARKLACLFWCLLTREEDYAFAQPSLTKKKLRQLELQAGAPRQQGARGIWSTNTAIRPAERELALQAQRAYERTVKDWQHSAGASATAGRASDGSSREHVARQTPRPKSAL

SEQ ID NO: 95541 - protein, 409 aa, unidentified
MKLFVGLDVSSQDAKICFLNGEGDCLQSFTITNDLPGALILKKKILDTASKSNCKIIKIGLESTSIYSYHPAMFLHNDKELRTYGSQVFMINPKQISNFKKSYPEMDKTDAIDAFVIADYVRFGRHTMSIVKEEQYMALQQLTRSRYQLVHALTKEKQHFLQHLGLKCSQFTQDVESSVFGNAMMELFLERFSLEELAQMPLQELVLFLQEKGKKRFGNPEDVAKSIQKAVKGSYRLSKVVEDSIDLLLSTSIQIMRTYQAQIKEIEKGIESLMSTLPQTLESIPGVGPVFAAGIVAEIGQIDRFADETRIAKYAGLFWKKYQSGRFTAENTSLTKSGNPYLRYYLVEAANSVRLHVPEYRDYYTKKSAEVPKHKHKRALVLTARKFVRLVDALLRNNQIYAPGRGVDR

SEQ ID NO: 95542 - protein, 322 aa, unidentified
MQGKVITEDAMAAVYAGIDVCKERLDVYLHPLGEQFSVMNDAGGWRRLLRCLGRHAIERVVMEPTSKYHRAAHRHLVAAGIAVALIPPHRARLFAGAFGQLAKTDRIDARILALAGERLDPAVTAPPTPEEEALEELAGARGAAVADRTAIGNRLRTTSSTFLRRELTSRLKGIERHIERLEARIASMIAADARLSRQAEIIRSIPGMGPVNVLAILTGLKEIGRLNGKEAAALAGLAPVADDSGPRHGPRRIKGGRAALRRALYMAALSAIRCNAELKAFYRRLRDKGKPAKAALIAVARKLIVLANTLVSQNRTWTLERP

SEQ ID NO: 95543 - protein, 363 aa, unidentified
MTSISSPTTRVVVGGVDTHGQTHHVAVIDGIGRQLGDREFPASPAGYRALAVWLGGHGTLEAVGVEGTGTYGAALARHLRVIGVKVVEVDRPDRKSRRARGKSDPLDAYAAARAVLSGSAAVVPKLRDGRVEAIRALRVARSSAVKARSQATNQIKALIVTGPPELREQLRHLRTPKIIAICARLRPGNKLGDPEQAAKTALRRLARRHQQLSEEITEADHEIAQLVGEVAPELLTLLGVGPEVAGQLLTSAGDNPDRITSEAAFAHLCGVAPVPASSGRVHRHRLNRGGDRHANKALYVVVINRLRYDPRSRAYAERRTQEGLSKPEIIRCLKRYVAREIYNVLVRLRSAAEKPNLSALASA

SEQ ID NO: 95544 - protein, 326 aa, unidentified
MANLEKKVIGVDVSLKMLTLNYKNSQGVMIVRNIPNLKKEILSNLKSFDKEEYKIIVEATGAYSSKILYFSYELGFEVSMVNPVSIKRYGELKNHISKTDAEDSRLIREYGEQVEFKPYTPKNMNLEYLDQELNLWHDLEQEKKKYSLKLKALRQKALCSKETVKHYERIIRNHECEIKKVMLRMSKLQNEELKRDVDLLSSISGIGEKAALLLLVATNGFKNFGSAKQISKYFGVAPRLYESGTKKKSLGKCRTTKKYVRSILYVCSWTAMRFNSQCKELYERILSKNKSKKVALIAVCNKLLRQCFGIMRNKIPYQKNYLQINV

SEQ ID NO: 95545 - protein, 366 aa, unidentified
MKKNNTMATGRKQIFKQAKLTIGLDLGDRTSHYCILDEAGNVILEGNLLTTSNGIRQAFIRIPRCRIALETGTHSPWVSRQLAQMGHEVIVAHARNVRLIGESSRKDDQLDARTLARLARIDPGLLGPVRHRSAQAQIHLTVIRARAALVGTRTALVNAARGLTKSYGQRLNKCGTEQMNRDSSQGLSQELRDALDPLLREIESLNERIAEYNGRIEQIAKQVHPEVARLKQVKGVGTLIALTYVLTLDDPHRFRRSRDAGCYLGLRPGRRNSGQSEPQLHISKEGDRYLRTLMVQGAHYILGPFGQDSDLRRWGLKLAERGGRNAKKRAVVAVARKLAVLLHKLWVSGEVYEPLRNNHKVESAVA

SEQ ID NO: 95546 - protein, 372 aa, unidentified
MSKLRFLGLDVHAETIAIAIAEPTGEVHSLGIIPNRLQSIRKMIHKLGPVQHLRACYEAGVTGYALYWQLTQLGVACEVIAPTLIPTQVGDRVKTDRRDAEKLARHYRSGNLTAVWVPDAAHEALRDLVRAREDAKQDQLRAKHRLSKFLLRHGVRPPETVKKAWTLKYMVWMKDHVRFDQPALQATLLDYMHEVDHLQERIQRLEKAIDEAVATAPESIRAVVGALQALRGIAQMTAVSIVSELGSFSRFKNPRQLMSYSGLVSSEYSSGNRIQRGRITKAGNAHLRRVIVEAAWAYRHRPWVGGALLKRQHGLEQAVKDIAWKAQWRLTTRYRKLSARGKNKPQVITALARELLGFIWAIAVRVEQTSTC

SEQ ID NO: 95547 - protein, 369 aa, unidentified
MGQKSSKLFVGMDVHKDSIDVATGDERGGEVRHYGAIGGELAAVTRLARKLESAGGPLVFVYEAGPCGFGIYRMLRARGHECWVVSPGLTPRSNADRVKTDRRDCLKLARLARAGELTPIHVPDQTDEATRDLVRAREDAVLMQRQARQRLGALLLRNDVRYNGKTAWSPAHRRWIAELKLPHAAQHIAFEEYVQSVDEAGKRIERLEAAVRDELGHWRWRPVVAALEAFRGIRTIHAVRLVAELGDLTRFASPRHLMGFLGLVPSENSTGNRRRQGAITKTGNSSARRALVEAAWAYRYGARVSVGIARRQSGLPKPVTDLAWKAQLRLCTRFRRLSARGLNRNKIIVAVARELSGFLWALGGQVKPL

SEQ ID NO: 95548 - protein, 346 aa, unidentified
MSCSTTVGVDLAKNVIQVSVVSKRGKELLNRSLTRRKFAEFLCKQKPALVAFEACATSHYWARAAQRHGHTARIIPAKAVAPFRQGHKTDSNDALAVAEAARRPNIKEAPMKTLDQQGLQAIQRSRELLVQESTALSNHLRGLLMEFGEVIPKGFAALQRRLPEILEDGDNEVPDMYRPALHRLYYRFLELRSDIRAMDAEVKALVKQHPGCRRLTALEGVGPISAVLLYASLGTGEAFSGSREFAAYLGLTPRQLSSGGKTNIVGLSKKIGNRQLRSVLIQGARSYVNKLKEPKTPKDRWLMELIERAGPGKATVALANKNARTAWALLTQGTEYQRQAQPTVVA

SEQ ID NO: 95549 - protein, 430 aa, unidentified
MEIVYPRSCGVDVHKSFIVAVICISESVKPKYIKKRFSTFNNQLIQFRDWLVENNCQNVCMESTGKYYIPVYNALEGHISNVVVANPKWVKAIKGEKDDNKDAKWIADLFKFGIVRSSYIPEKDIRVLREFTRYQYKLVNMRSSEKNRFQNALTTGNCKLDIVFSDIFGKSASAIVDTILSNDPYTSEDILSKVHAGCKASHEDILSAVEGIQLNQFQKARIKIVQKHMEYLDSLLDEIQHHINLMVANYEEYIQILCTIPGINRKSAITIISEIGTDMSQWSSHRKLAAWAGLAPGCNESAGKKKSVKVSKAGVYLKPCLVQVAHAAVKDKECEYYADKFNKISKRRGKKRAIIAIARKILIAVYHLLKTGEVFNPTDMTDVETTKKQRIEYVKNNLRNAFNQLSRTGLSEAEILQLIRKESKNSPQIE

SEQ ID NO: 95550 - protein, 403 aa, unidentified
MAATRTGGVDWAQEAHEVCISDEGRVAERFSVTHDEEGIAALAGRLVKLGVARVAIERPDGILVERLLAAGIEVLAIHPNQVKAARPRFAVAHGKSDRFDAYVLAELARTDAHRFRVLVPDTDETKALKALTRAREDLVGVRVELANQLRAQLAAFWPGALIFADVDSPISLAFLKRCPSPADARGLGPKRLAGFLARHRYSGRRTPGELLERMRSAPAGRAGELEVEARRAVVVGLVGALEPIVAEISDLTSQIRGALAAHPDRAVFAPLFRDAQTAISPATLIAELGDCRERYPTEAAMAADAGMSPVALESGKLRVATFRRACDKRLRTAVARLADSTRHWHPWAREVYARARARGQDHPHAIRTLGRAWIRVLWRCWQDRVPYDPARHGNFGRLQTVGG

SEQ ID NO: 95551 - protein, 350 aa, unidentified
MLHAGLDLSRNRLDVCLLSEHCEVLEQFAAPSDLDGLHGLARRVGGHGLPVRGVIESMTGARFVHDTLEQLGWEVLIADAQKVKGLAPLACKTDRIDARVLAVLSHRDLVPAIWLPNPGVRAEREQARFRLHLVKHRSMLKHRIHSTLITFGHPCPVSDLFGVAGRELLDRLEIPPPWRGTVDASLALIEDLERQIDDINHELRSSGAEHRYVPLLLTVPGIAWVLAFTIAAEIGDIDRFATAKKLVGYTGLCPKVNQSGDKDRRGPLSKHGPKYLRWALLEATMHALRHPIYCERYQRNKQRLGRQRGAKVAQIDIARRLTEAIWHMLTTNQPFNPTAAAGGAAHRLAA

SEQ ID NO: 95552 - protein, 440 aa, unidentified
MGTETERVVIGMDPHKRSTTIEVMSADEAIHAGGRYATDRDGYRAMLRFARQWPDRVWAIEGCAGIGKHIANRLLADGEEVVDVPPKLSARTRVFATGQGRKTDATDAHSVALVGTRMTGLRPVVNDEQLAVLRILVDRRRSLGEDHTRMVSQLHQLLLELIPGGAKKDLSARQAKALLAKVRPRDTAGKTRRRVAAELIADLERIYARKKAANKELTELVAATGTKLLDLPGIGPSGAARLLVEVGDITRFPNKAHFASWNGTAPIDASSGDQVRHRLSRAGNRQINRVLHIMARVQIRNPSEGRDYYDRKKADGKAPMEAMRCVKRRLSDIVYQQMLNDTIRHTVAATKTGPGGQRGNDSDSSVTDSHPGAGSSDKPLPGPAPQTLPATRPAANPHAGSAPSPSRRRAGAVKVQRPTGRTTLTATSAGADSTAPQPRP

SEQ ID NO: 95553 - protein, 326 aa, unidentified
MNIIGIDISKEKFDCVWIRDLEANKVKSKVFKNCPDGHKSLLDWAVKNMGSEPQDITVLMEATGVYHEALAYYLHNATVRVAVLNPARVRDYAKSLGSKTKNDKRDAMVIARYGATQSLALWQPEPESIRSLKALLARLDAVEKDIQREGNRMEKATVSGASSVIIDSIQSVLDFMDEEKKRLNKIINDHIDSDPILKKDMALLKSIPGVGDVVSRHMMAIYHSRNFQRASQMAAYLGVVPIEYQSGSSIKGRPRLSKAGSSVVRAKLYLPAVVATRHNPQAMALYQRLLSRGKAKMAAIGAVMRKLVHMCFGVLKHQQAYSPQAA

SEQ ID NO: 95554 - protein, 400 aa, unidentified
MRVVFGIDVSKASSEVAILVNGEKVHGYTISNDAIGFARLLGDLRTVHKPEIIFEATGVYSRRLQTFLDDNGYAYTRLNPLEAKKQLDSLRVRKTDQIDAEKLAQSQFVLNRKPTYVQEEVYQNLRDLSRFYQNLTEDIVRAKNRLHKVLQVTFPELENILSTPTGEQYWNLVITFPCKDFVLDLSKNELSKSIRQSTSKRISDKRVAYLAEKLTALANQSYCAVKKTSPILEEVHYYAKELLRLSEQRQAVLDQMVELAQPLPEYDILLSIPGIAETTATSIIGELGDIRRFQSANQINAFIGIDLRHYESGNFLAKEHITKRGNPYARKILFKCIHNIASVSHTNPCHIADFYEKRKRQSQTTSTKPHTIASIHRLIRTMYYLIMHNKLYDYASTQNR

SEQ ID NO: 95555 - protein, 339 aa, unidentified
MSLYAGFDLHAKSNHLAILDQKGKRVFSKKLPNETKTIFEALKPFKKRIEGLVVESTYNWYWLVDSLMEKGYRVHLANPSAIQQYSGLKHSDDIHDAFWLADQLRLGILPEGYIYPKEERPIRDLLRKRGHLVRLRTSLVISLQNIISRNLGFKVDVKDIKRLRENRISPLLAYNDDIALVGQTSKRTIDFLTRQIQNIEKVVESKTQIKPPYEYLLTLPGVGKILGLTIMLETGPISRFSKVGHYVSYCRKVTTRWSSNGKSKGKGNKKNGNKYLAWAFSEAAELSKRYDPYAKRYYTKKALKTNRMVAHNALAHKLARAAYWVMKAQVPFSYEKLFA

SEQ ID NO: 95556 - protein, 349 aa, unidentified
MNFYTNTHPYYCGIDLHTRLLYVCIIDNENNILVHEKIDDSPDKLLALLKPYLGNIVVGVECMHCWYWVSDFCEEHNIDFILGHALYMKAIHAGKTKNDKIDALKIAKLMRGGNFPLAHAYSKEHRSIRDALRRRTHIMRMSAQLKAHVASTVSQYNLPALETRLDLRNSPDREKMRHFFPDEAVQKSMDLNLNIIETMVSELYKIEHYVKTQAQTHRATDLHILKSFPGIGKILALTILYEVGDIKRFPSVQKFASYSRLVKCKAESAGKTHGTQGNKIGNAHLKWAFSEAAVLYLKGNDNAKRYLAKLQKRMSKAKALSALAHKIGRCTYFMLKNQQVFDEERFLNG

SEQ ID NO: 95557 - protein, 333 aa, unidentified
MKSIASVVMAGASSVVVGIDMAEEKFDVSMTGATKEIKTFVNNATGHSEFIESLKGLNIKLVLMEATGKCETLLALALEKAQVPYKIESLVKLRNFSKALGIIEKTDGIDARAIALAGERLNIQPSERGLNIAAVRLRENIQLRNSFIDEKVRFENQMRRLIDSEVPKILKSHIASLKKLIAELTKRIKSLITENEALKAKYDLMTTATGVGFATASTLIAELPELGEISRTEISKLAGLAPMAKESGKITCRRHIRGGRRNVRCALYMATLTAMKKNELIKPFYDRLREKGKAVKVAMTACAHKLLILLNSMLKLNRPWNEFCQMAKDKNIS

SEQ ID NO: 95558 - protein, 337 aa, unidentified
MGMDQHRAQISAEWIDTITGEISRARVAPADRAGVRKFLTRFQGESLEVALEATTGWRFVVEELERFGADVHLAEPAETSGMKSKKQRAKTDWADARHLRELLLIGRLPESWIPPAHLLDLRARVRCRHTLVHQRTEWQQRMQAVLYHHGAPHARGLLTLANRERVAAMALPAAAREQLTIALAMIDAIEVQLGPFDAALRAYARKQPGCRALIDEVYGIGELTSVTILAEFGDPRRFQNARDAVRYAGMDITIHQSDARRSVGHLTRQGPPALRWALYEAAQAARRPSSPDRPYYDQLAARIGSNRACIAVARKLLKRSYHLLRALGDQAIEPVTV

SEQ ID NO: 95559 - protein, 375 aa, unidentified
MKAKVRFLGLDVHAETIAVAVAEPDGEMRSLGTIANRAESIRKLVKKLGPVDDLRACYEAGPTGYVLYWQLTELGVECEVIAPTLVPVKAGDRVKTDRRDAERLARSYRSGDLTPVWVPDQGSEALRDLVRARESAKQDQLRARHRLGKFLLRTGQRPAQGMKAWTQAYMVWVGQVRFAQMAQEATKLDYLHEVEHMGERVVRLEQAIVEAIKLASPQIQAVVKGLQALRGIAQISAVTIAAELGNISRFAGARHLMGYSGAVPRENSSGKRKQQGSITKTGNSHLRRIAVEAAWSYRHRPGIGLALGKRQQGVAEEIKEIAWKAQHRLHKRYSRLSAAGKDRRKVITAVGRELLGFIWAIGIKAEAAAQQRMAA

SEQ ID NO: 95560 - protein, 409 aa, unidentified
MLWGERRGNGTIVAANKPTGCPMPQPNDLSRSLAALNEDSTLIAVIEMSQSSWLVAGIVPGVERHPAKKLEPDEAELLRLLHRWRGEAEKADLNINRIAVAFEAGRDGFWLARWLRAHGIEAYVIHPNSIAVSREHRRAKTDRLDTALLKRAFLGWLRGEREHCSMAAIPTLEEEDAKRPSREREKLIDERTRIGNRIKGTLARLGIRGFKPTLRTAPERLERLRTPEGAPLPLNTMAELRREMARLRLLAEQIREIETGRLQRLDQEPNSGAHPMIRLLAQVRGLGIETADMLVQEVLSRNLRDRRAVARYGGLTGTPDESGARRREKGLARAGNARVRRGMLQLAWRFLMFQKDSALVQWYRARTADARGATRKTMIVALARKLLIALWRLVTTGEVPEGVVLRPAR

SEQ ID NO: 95561 - protein, 402 aa, unidentified
MNCVGIDVSKGKSMIAVMRPFGEVVVSPFEVRHTANELSELAGLLKSLDGETRVVMESTGNYHAPVAWLLHDAGLYVSVVNAMLVHDYGNNSLRRAKTDKKDAVKLANYGLDHWLTLPRYIPEEDTRLMLKICYRQYQQYSKVQTMLKNNLISLLDTAFPDANRLFTSPPRADGSEKWVDFVATFWHCECVCGRSEKAFTTQYQKWCRKHGYNFSKDKALDIYVSACGRFGVMPKTKTAKLLVEQAISQLQATSAALAALKQEMQSLAASLPEYPVVMGMFGVGPTLGPQLIAEIGDVRRFHSKKALVAFAGIDAPPYQSGQIDVRSRSISKRGSASLRRTLFLVMGVLLQCAPMDEPVYQFMNKKRSEGKPYRVYMMASANKFLRIYYASVKAYLDSLEHD

SEQ ID NO: 95562 - protein, 388 aa, unidentified
MQDVADQSVAPTTIGADLCAIFVSLELSRSTWLATSLSPGRGEKMSKHSVSAGDIAALLARFSELRRKACARTGKSFPITVIQEAGLDGFWIHRVLLSEGIESHVVDAASIATSRRRRRAKTDRIDGEALLRALLAHKRGEPRVCSMVRAPTPEDEDRRRICRERKVLIMERVQHVNRIKGLLFSQGASGYEPLRRDRRARLDALQTGDGRRLPQHLKAQVCRELDRLELLLEQIKAVEAERDALLNAEQTKVSAPPPMLLGVRGVGPEFASVLWSEGLSRHFDNRRQIAAYAGLAPTPWQSGSVNREQGISQSGNKRLRTTMIQLAWLWIRHQPGSALTLWFKDRIERNGGRRRKTTIVALARKLLVALWKYVSAGVVIEGAMIRPA

SEQ ID NO: 95563 - protein, 345 aa, unidentified
MKITTIGLDLAKRVFQVHAISGGGEVVVRKTMRRAQVLRFFERLTPCLVGIEACGTSHYWAREISKFGHEVRLMPPAYVKPYVKRGKTDASDAEAICEAVSRPTMRYVAIKSCEQQAALTVHRTRDLFVKQRTQLVNMIRGLLAEFGIEIRRGITHALSLAERIVAGEMPGIPALAAKMIASLAEQILDLQARLREIERELLAWHRSSDIALRLATIPGVGTICATAFAASVSDPHQFRSGRQFAAWLGLTPLQHSSGGKERLGRISKMGDKYLRRLLIIGMTSLVRRAKYKPDAVDPWLAALLSRKPARVVTVALANKAARVIWAIMSRGEIYRAPQTAGAVAA

SEQ ID NO: 95564 - protein, 332 aa, unidentified
MLNCIGIDVSKATINIHIPKNNQDLMMDNNQKNFKSLYSKLKKIYKKEIENIIFIFEPTGSYSEALRKYCSEQKIQCFIINPKQFSNYAKALGVEVKNDVEDARVLSKALHLAKENQVKVPVYNEDVEHIKELMSFYKFTKKQTTQQKNHLEALTSKDGDNFSIKELKKSIKESQEKELRIIEQVQTLIDSTDEYRTAYQNIISIKGIGQIGAIVLLHLFLKYPEANQRQITSLTGLNPIYKQSGTSIQSGYRIAKSGAGLYRGVIFMSALSAAIHDKNFKAFYDRLKSKGKHTTSAQIAVMRKMILTAHSLYKNNRKYDENFNTYQASNME

SEQ ID NO: 95565 - protein, 321 aa, unidentified
MMTQNDLVVVGIDVAKDKVDACIRRFKLRQTFPNNPQGRRQLIVWLRKYQVGKAVMEASGGYEREWRNVLHNAGIEVRIVDPRRVRNFALSAGRLAKNDPIDAEMIAWFAETFSQAPGQIPDAAREELAALTKARKALVDIKIRLQAQDEHAAAPELARKAYARVLKSLAAEIDKLEAAISAKVKATPEFAERAEIIESVPGLAQATSAILIAGMPELGQVSDEVAAALIGVAPYDDDSGKRRGERSIKGGRRWVRNGIYMPCLGAATQCNPVLKAFYQRLLAKGKEPKVALVACMRKLIIILNTMLARRQKWNPGRHAIT

SEQ ID NO: 95566 - protein, 374 aa, unidentified
MRETHTHAWVGIDAGKGHHWAAVVDEAGLIVWSHKIINDETAILHALSEILALADELHWAVDISGTSSALLLALLAAHDQSAVYVPGRTVNRMSGAYRGEAKTDARDAYVIAETARHRHDLSVLIPPAQLAAELALLTSHRTDLVADRVRLINRLRDTLTGVFPALERAFDFGRHKGALVLLTGFQTPRAIRRRGRTRLSLWLGKRGVRGADGVAEIAWEAASAQNVVLPGEAVAAQLVADIADRVLAVDVQLARIDAQIGETFRRHPQAAVIESMPGIGPILGAEFVVAAGDMSAYSDAGHLASAAGLVPVPRDSGRRTGNMHRPKRYSRRLRRVFYLSAQTSIIKDGPNPALSSARYVALHCTHSPSSVILY

SEQ ID NO: 95567 - protein, 486 aa, unidentified
MVKARTPLERLQVFLQTGPDLAINSSRENYMSKRRGKAKRVQKASNPELENLPILNRDAAAIDIGSEQHWVAVPPGGDTESVRSFGAFTIDLHAMAGWLKQCGIKSVVMESTGVYWMVPFQILEQYGLEVLLIDARLARNLLGRKSDVLDCQWHQQLHTFGLLRGCFLPAAEIVPLRSYLRLRDELVGGSSQSIQHMQKALFEMNVQLANVISDISGETGLAIIEAILAGERDGKKLALLKHRRIVASKETIAKSLEGNWRPELLFALQTALERYKFYQQQIAQCDCQIAQALAQLPTRELNVQSEPEKKTEPSAKGKKLTPLEAELKRIAGVELTSIDGIGEQIAQVILSELGPDLQKSFQSEKHFSSYLGLCPGTTISGGKVLKRRSRKVKHRVATALRLAAGSLHSCDSALGANFRRLRARLGAPKAITAMANKLAKLVYRLLVHGKDYFDRGAQMYEQKFRLQQIRRLQKQAKMLNLKLIPA

SEQ ID NO: 95568 - protein, 403 aa, unidentified
MQRTDHRPVFPRAAVREHDTWLCLALELSRSTWLIAASAPGTDRISRYQIQAGDTTAFLALLERLKTQAARTCHQTVKVVSIHEAGLDGFWVHRFLEANGVESHVVDAASIAMNRRSRRAKTDRIDVEKLLDTLIEWARGGRRVCSMVRPPSPEEEDERRMVRERQTLVSERTQHTNRIKGLLATQGVSDFEPVYKDRWKRIENLRAWDGQPLPPRLKAELARELERLELVMSQIATVERERDRALAEKQQRVAAAITTEALVGKAACRHNAGALLFRLRGIGPEFASVLSLEAFYRNFGNRREVAAYAGLAPSPWISGSIQAEQGISKAGNSRLRKTLIQLAWLWVRHQPGSALSRWFHERVGDRRGKIRRITIVATARKLLIALWRYVTLGLLPEGAELKA

SEQ ID NO: 95569 - protein, 371 aa, unidentified
MEESSKTLYVGLDVHKESIAVAYAPEERGTEVVSLGAIGTRQCDIDKLIRKLQSKGAPLVFVYEAGPCGYWLYRYLTRKGLSCHVVAPSLIPRKPGDRVKTDRRDAALLARLMRSGDLTSIYVPTLEDEAIRDLSRGREDAMRDLKATKHRLKAFLLRQDIRYEGRANWTAAHLRWLSEVVCPAPAQQIVFQEYVRAVTEQQERVHRLETELHEHVKTWRLFPVVEAIQALRGVELTGAVILIAELGDLTRFDTPRQLMSYLGLTPSEYSSGERRRQGGITKAGNTHARRALVEGAWAYRYPAKVSRHLQLRLEKLPAEIQAISWKAQVRLCKRYRQLIARGKHANQVVVAIAREMAAFAWAIARTVPLTP

SEQ ID NO: 95570 - protein, 385 aa, unidentified
MAPPARPRVVIGLDVGKSAHWACVVTREGELLASRPIPNRENAIDGLYAQYPGALVVVDQVRNIGSLALSRAKLAGMPRAYLPGLAAHGASRLFAGDAKTDERDAMVIAKTALGIPDALLAVADRPPEVEAARSLAAQRDFLTCENTRSKNRLRSILLESCPEFEAQADLSDPATLKLMAAVGGPWSISEASPQSVGALTRGCRRAKVAALAGSVESSSRPHPAAVACEDRAVRLLARRISENDAEIGSLTSEISALLSADETYRCLLTVPGIGPRTASELVISIDVADFPSHDRLASYCGLAPRNRRSGTSISSVSASRQGNKRLKNLLIFSCNCLARSRNRWGEYYARCRDRGMPHGKALKAVARKRLKVIYAVMRDKVPYAA

SEQ ID NO: 95571 - protein, 433 aa, unidentified
MLEAEDEPLFAERAAGIDIAKAGIEVTIRVPSDTRRGGRQQETRSFRTTRKDLLALADWLRCWQVTKVGMESTGDYWKPVYFLLESEGFDCVLYHAAQVKALPGRPKTDKLDSVWLAKITERGSLPGSFVPPEEIRRLRTHTRYRRHLTQARTAEKQRVEKLLEDAHLKLSSVISDIHGISGRAMLEAIAAGERNPKTLAQLARGTMRGKIRRLEEALDCSFLTGEHAAVLAMMLAAIDYYTARIEALTAKIEVLCEPYLHQIAQLDEVPGTGVITAQDVIAEIGTDMTVFPTAAHLVSWAKWCPQVAQSGGKRKGASASGRGNRYIGAALGEAAISAGRTQSFPGAKYRRLVKRMPKRKALVATGNSLLTIYHALLSDPEAAYTDLGTDYYERRANIRRQARNHVRGLERLGYKVTIEPIDPATGELQEAGS

SEQ ID NO: 95572 - protein, 332 aa, unidentified
MSEKSNCAIAVIGIDIGKNSFHIVGHDQRGAIVLRQKWSRGQVEARLANLPPCLIGMEACVGAHHLSRKLQLFGHNARLMPAKYVRPYNKGQKNDFRDAEAIAEAVHRPTMKFVVTKSSDQLDLQALHRVRERLVSQRTGIINQIRAFLLERGVAVRQGPRFLRAELPGILATRTDVLSPRMLRVIEELAGDWRHLDARIEGLTSEIETLARQDQHCERLMTVPGIGPIISSAMVAAIGTGDVFSKGRDFGAWLGLVPKQISTGDRTILGGISRRGNRYLRVLFVQAAWVVLAKLPKQWERYGLKSWIEAAKKRLHHNVLAIALANKLARIA

SEQ ID NO: 95573 - protein, 409 aa, unidentified
MLFAGIDWASEEHAVAVHDDAGKSVAAFMVEHSAEGLDKLVARLRGMAEPAELTVAIERPDGRLVDRLLEAGHPVVAVSPNAIKVWREGEVASGAKSDPGDAAVIAEYLRLRFRKLQALRPFSDETRALRAAVRARGELVDQRTVVHNQLAAILDAFWPGAREVFADIASPIALAFLRRYPTPASAGTLGEKQMAAFCKKQGYSGRRSPAELIERLRKPPAGIVAGAEMGARKAAVLAYVKVIASLNAAIKDLDKEVFTRLGEHPDGEIFTSLPRSGLINAAQMLAEWGDCRQAYDGPDAVGALAGMSPVTKKSGKHKSVHFRWACNKRFRNALHTFAGQSRHGSDWAAGIYDRARKRGADHPHAIRILARAWIRVIFACWRDGVAYDPAKHNAAAAPAASSDSAPQAA

SEQ ID NO: 95574 - protein, 344 aa, unidentified
MQLASIGIDLGKTTFHLVALGEHTKVLLRKKFSRTQLLAYTANLPASLIGVEACAGAHFLGAALREQGHQVRLIPAQFVKPYRKSNKNDYIDAEAIAEAVTKQNMSFAQIKTQDQLDWQAMHRVRDRLVQRRTALINEIRGFLLERGIVFAAQPIHLRKNLPAVIEDAEQNLSPRLRWLLHRLWQEWKQIDSDVQVITDEIERISNEDARCQQLRQIPGFGPLVSTATVAAIGNGAAFRRGRDFAAWVGVVPRQYSTGGKARLYGISKRGNIYLRRMLIHGARAVLFRIKHDTGGLGQWVHRLAQRAPHNKVVVAIANKLARIAWAVLSSGKDYRHQPLQPVAA

SEQ ID NO: 95575 - protein, 374 aa, unidentified
MDDHSVAYVALDTSKLRNAVATAEAGRDGEIRYLGEIDNAPAATAKLARRLAKKHAVLTFAYEAGPTGYGLYRQIKSLGHDCIVVAPSLIPQKPGDRVKTNRRDALSLARQLRAGDLTAVWVPDPHHEAVRDLTRARGAAVRDQRAKRQQVSALLLRLGLHYPGKTTWGKAHMAWLAGQKLAHLEQRIALEEMLHAVRQAGDRIARLEHAIHTAVPDWSLAASATALMALRGIEFIAATTLLAEIGDLTRFRTPRELMAWLGMVPSEHSTGERIRRGGITKTGNRRARSVLVECAWSYRHPPRVSRDKLARLEAAPPAVRDIAWKAQSRLTARYRALRRAGKLDVVAITAVARELAAFIWAVGLAVGSGRTPEV

SEQ ID NO: 95576 - protein, 345 aa, unidentified
MASMYYIGLDVHKKTISYCVKDVSGRVHAEGTIPATRSDLDRWMAALPQPWTAAMEATVFTGWIYDHLKPHAAALKVAHPLMLRAIAAAKKKNDRLDASKIADCLRCDFLPESYMASTEIRERRRTLRYRNLLVQQMVQMKNKIAVLLMEAGVSYNKQKLHKVGYFRELLETHPEIDEGLRPLLRLCRETLVHLGKTESALIRSLQRDALLRKRIERLTSIPAVGPITALTWALEVGEVQRFSSIKKAISYCGLCSAEKSSADVLKRSPLSKQRNRHLQTVLIEAAKMAPRNSPALALLYDREKRNHNANRATLAVARKLVAYLIAVDRRQKDFLVIENQNRSAA

SEQ ID NO: 95577 - protein, 441 aa, unidentified
MRLTSSMGQDVVGRLTTKLSSRAARAGRMTALGRVGRPGLLQRLDTHHGLCSSGMLKVTTPAHTASYWETMMRFYQGQHPFYCGIDLHARTMHVCILDQAGQTVFDKGIPCRPEALLRAIQPYRDHLVIGAECMFAWYWVADLCVEQDIAFVLGHALYRKAIHGGKAKNDRSDAGKIARLLRGGTFPLAYAYPKGMRETRDLMRRRTYLVRKRAELLTHLQILNAQYNLAPFPKKLACAANRTEMNVAERFADPSVQKSAAINLALIDRLDELIGDLELYLVRTAKVDDIQTFYRLRSIPGVGKVLALILLYETHDIGRFDTAGQFLSYARLVRCAHESGGKKLGTGGKKIGNAHLRWANACAACLFLRSSERAKKWKQKQAAQRGEGKALAILAARLGRAVYHMLRKGEAFDEDRFWSGARRTRTGSSSLSRKEARDAGH

SEQ ID NO: 95578 - protein, 411 aa, unidentified
MHNRQNYLYVGVDLHKEHHTAVMINCWQEKLGEIQFDNKPSAFSKFLLEVETYVSDGLSVVFGLEDVGGYGRALAKYLVDHERVVKEVNPALSFLERKSQVTTQKNDSWDAECVARILVNKFNQLPDAKPNDLFWSIQQLVSRRNALVKAQSALKNQLHIQLNHHYPSYKKFFSEVDGKTALAFWQQYPSPSCLEGANIKQLTAFLLDVSNNTCSVKKANGILKLVKEDGHTMKEYQETRDFLVRSIVRDIEFKKKEMKYIERELKQLVKMLDFQLETMPGIELVTASALIAEIGDIRRFSNANKLARFAGIAPVYFGSGGKGKTHKSKQGSRALHALFYNLAVQQVQVAKGSKLPRNPVFHAYYQKKLKEGKTKGQALVCIMRRLVNIIYGMMKYKTAYELPIVEEKEVV

SEQ ID NO: 95579 - protein, 326 aa, unidentified
MTHPVAASKAELPPASITIGIDVSKDHLDAARHPGGDTVRVANTRKGQTALLRWIGDIKAVAQVVFEPTGPYHRTLEERLAAVGIPQVKVNPRQARRFAEATGKLAKTDRVDALMLARYGALLDPVARPVRTDLQNRLAELVAARRSLMRDRTATLNRLKTLTIGLLQRHARHRLRQIEAQVTSLDAATDALVAEDAHLSRRRDVLASIPGLGRVTAHALLADMPELGMMEEGQAAALAGLAPITRQSGTWRGRSFIQGGRATIRQALYMPAIVAMRFNPDLKRVYDRLIAKGKHAKIAITAIMRKLVVLANALLHKDRLWTPKAA

SEQ ID NO: 95580 - protein, 358 aa, unidentified
MEMIGVDLHARQQTIAMLDTETGELVEKTLEHEGEKVREFYAALPGPVLVGIEATGSMPWFLKLMEELKIDCQVGHPAEVRKAETRQQKHDRRDARLLLKLLAENRFPSIWMPSTEQRDLRTLLRHRDQWVRMRTRVQNTLQALALSNGLQRGHGLWSQAGQQALEVLQLAPYTGQRRAALLRLYLQLQKSIDDLDQQVSEQARQRPQARRLMTHPGVGPVTALATEVFLGDPMRFADGKAVASYIGMIPSEHSSGSRQRLGALSKQGNALLRFLWGEAAMQAVGRDPELKRFYRRKLVQKGLGKARIAAARKLGIRLGIMLRDQIDYKEFCRRGQLRQKSGAARVGMPAYNNGSALQ

SEQ ID NO: 95581 - protein, 391 aa, unidentified
MIYVGIDVAKDKHDCFITNSDGEVLFKSFTIPNNRDGFETLFQKIQSVSDDLTKVKVGLEATGHYSYNLLGFLLDKGLPTYVINPLHTNLYRKSLSLRKTKTDKVDAHTIASMIISDVNLKSYSDTSYHNEELKSLTRYRFDKVQERAKLKTSVSRLICILFPELEKLVPTIHMASVYAMLSEFPSAHAVASAHLTRLTNLLSESSHGRYGKDTAVMFREAARNSIGSNMPAKSLELKHTIKLIQELTSEIDEIETEIKSIMDEVNSPILSIPGINYRMGAMILAEIGDFSRFDSPDKILAYAGMSPSTYQSGQLDNCYSHMEKRGSRYLRYALYNATKYVCHWDESFGTYLAKKRAEGKHYNVALSHATKKLVRTIYAMEKTGQSYSSAS

SEQ ID NO: 95582 - protein, 342 aa, unidentified
MKTVTTIGIDLAKNSFSVYGVDAKGKPVIQRTLSRAGVVRFFANLPACLVGMEACASSEYWARTIESLGHTARRIHPRYVKAYLLGSKNDVNDAAAICEAVQRPNMRFVPHKSPEQTDIQCVHRIRQGFVRSRTALVNQIRGLLGEYGTIIRQGVSAVRKQLPELIADETNDLSPIMRQNLTSLYESLCFLDGRILAQEKLLKSIARENEACQRLLKIPGIGLLTATILLSVAGVASSFKNGREFAAYLGLVPRQNSTGGKIKLLGISKRGDSYTRTLLVHGARAVLYSLIAGRTPPARQNAWLAELAARRGKNRASVALANKTARIAWSMLAQGTEYKIAA

SEQ ID NO: 95583 - protein, 297 aa, unidentified
MQQDSAVFVGLDASKMKISVALAEEGRQGEVRFLGDIDHTPEAVRRLVTKLVGRYGRLLFCYEAGPTGYGLQRQISALGHDCAVIAPSLIPKRPGERVKTNRRDAITLARLHRAGELTRIWVPDPGHEAVRELVRAREAAMADLRTKRQHLQSFLLRHGRIYRGSRPWTQVHARWLSNLSFEHPAQSLVLREYRQAIDDAETRLERLTQQVAEVVCSWSMAPVVEAYQALRGVAFLTAVTFVAEIGDVRRFETPRQLMAYLGLVPSERSTGEQVWRGSITKAGNPRARRVLVEGAWT

SEQ ID NO: 95584 - protein, 319 aa, unidentified
MSEIVIRAGLDVSKDQLEAYVHPGGARLSVTNDRAGHRQLLAWLAKHGVAIVGAEASGGYEHDILETVAESGLVALRLNPLRVRRFAEACGRLAKNDRADAQTIVLFMASCPDERAVIPPDPARERLGEHLLVRVQTLDAIAALENQLEHLRDRGLRATLRARAEGLRRAVTKLDRRIAELIAAAPNLEAMAACLRSVPGVGPVLSATLLALLPELGRLSRRQVAALAGVAPFDDDSGKRNGQRRIHGGRAALRKVLYMAALVAKRRNPAIRTFALRLAGKKPKVIIAACMRKLLTILNAVARDHVMWHDTQIVPCRHS

SEQ ID NO: 95585 - protein, 408 aa, unidentified
MQKKENQTYQFLLRLESGAGIDVHKEFFQVAVCREKSPPVEKQFGTFTKDLLALRDFFIEHQIKDVIMESTGVYWMPLYQVLSEAGINVRVANPLKVKQIPMEKTDKKDAVWLAKLLMNDMVKPSFIPDEQQQAMRSFSRLRTKYTQQTTRVKNQVVKMLETCNFKIRSIVSDISTKTAAKLVEAISKGETNTEKLIELCHKSVRKRQGDERLALALEGRLTNQSQQLLIMLLKDLAYFEGQKKEADAQVKKLMNEQQQKMINLLDEVEGTSVEQGEIVMSEIGAGIQSFAYADKAAKYAGLTSGQATSADNKKPVRAVPGNKHLRTVMVQIAWSAVKVKDGYWVAEYQTLKKRIGAKKAILATARKIFKAMYKILSTGYKYEKWDAKKYFDNPIKTMAYKTALKKAV

SEQ ID NO: 95586 - protein, 441 aa, unidentified
MAMRKRDDEVVFPNAAGIDVGASSHWVAVPRHSTDDPVREFGAMTGDLNAMADWLLGCGVDTVALESTGVYWIPVYEVLEQRGLTVRLVDARQMKYVPGRKSDVQDCQWLQKLMSLGFLRAAWRPDSEVCVVRAVARQRDVLIAEQASWVQRMQKALVQMNIQLTEVLTDVMGMTGQAIIRDIVAGERDPKALARHRNGRVKASVAEITKALTGNWREEHLFVLRQALAMYDDIARHLSECDTKLQALLTELGQAKVDLGKAPREGSKLRQEFDARQILANWAGVDLTRINGLGLGAVMKILSEIGPDLGRFDTVKHFCSWLGLCPGAKISGGKVLSAKTKRSTNRVRQALKMAAMSLSHSDSALGAFYRRLCSRMDKPSANTAVAHKLARMVYFMLTRGEAFVDEGQQHYEEQQRQRSVAALKRRAAALGFNINPTSVPA
